United States Patent Application Publication US 2005/0255487 A1 - sequence listing, part 38

SEQ ID NO: 1036068 - RNA, 19 nt, Homo sapiens
  misc_RNA (1)...(19): siRNA sense strand
agaagagacuggaaccaaa

SEQ ID NO: 1036069 - RNA, 19 nt, Homo sapiens
  misc_RNA (1)...(19): siRNA sense strand
gcacagucaucgccugcaa

SEQ ID NO: 1036070 - RNA, 19 nt, Homo sapiens
  misc_RNA (1)...(19): siRNA sense strand
agacacaguucuuucaugu

SEQ ID NO: 1036071 - RNA, 19 nt, Homo sapiens
  misc_RNA (1)...(19): siRNA sense strand
gaaacagaaagaaguguau

SEQ ID NO: 1036072 - RNA, 19 nt, Homo sapiens
  misc_RNA (1)...(19): siRNA sense strand
acaaacaaacuucaggaua

SEQ ID NO: 1036073 - RNA, 19 nt, Homo sapiens
  misc_RNA (1)...(19): siRNA sense strand
ccugcaaacuuuagaauca

SEQ ID NO: 1036074 - RNA, 19 nt, Homo sapiens
  misc_RNA (1)...(19): siRNA sense strand
aaagaaguguauccugcua

SEQ ID NO: 1036075 - RNA, 19 nt, Homo sapiens
  misc_RNA (1)...(19): siRNA sense strand
ccaaaggacaucaucagaa

SEQ ID NO: 1036076 - RNA, 19 nt, Homo sapiens
  misc_RNA (1)...(19): siRNA sense strand
ggagauaagcuucgacucu

SEQ ID NO: 1036077 - RNA, 19 nt, Homo sapiens
  misc_RNA (1)...(19): siRNA sense strand
ucucaagacuccucagaug

SEQ ID NO: 1036078 - RNA, 19 nt, Homo sapiens
  misc_RNA (1)...(19): siRNA sense strand
caucagaagagcaaagaaa

SEQ ID NO: 1036079 - RNA, 19 nt, Homo sapiens
  misc_RNA (1)...(19): siRNA sense strand
guaaauaggaagacgacaa

SEQ ID NO: 1036080 - RNA, 19 nt, Homo sapiens
  misc_RNA (1)...(19): siRNA sense strand
caaagaaaauuccgaagau

SEQ ID NO: 1036081 - RNA, 19 nt, Homo sapiens
  misc_RNA (1)...(19): siRNA sense strand
gaagacgacaaucuaugaa

SEQ ID NO: 1036082 - RNA, 19 nt, Homo sapiens
  misc_RNA (1)...(19): siRNA sense strand
caaccgccauccagcaguu

SEQ ID NO: 1036083 - RNA, 19 nt, Homo sapiens
  misc_RNA (1)...(19): siRNA sense strand
agacgacaaucuaugaaau

SEQ ID NO: 1036084 - RNA, 19 nt, Homo sapiens
  misc_RNA (1)...(19): siRNA sense strand
ucaaagaaauaccaacacu

SEQ ID NO: 1036085 - RNA, 19 nt, Homo sapiens
  misc_RNA (1)...(19): siRNA sense strand
agaaucaccucaccaacug

SEQ ID NO: 1036086 - RNA, 19 nt, Homo sapiens
  misc_RNA (1)...(19): siRNA sense strand
aaguauggcuguaguagga

SEQ ID NO: 1036087 - RNA, 19 nt, Homo sapiens
  misc_RNA (1)...(19): siRNA sense strand
gucaucgccugcaaacuuu

SEQ ID NO: 1036088 - RNA, 19 nt, Homo sapiens
  misc_RNA (1)...(19): siRNA sense strand
cgaaacagaaagaagugua

SEQ ID NO: 1036089 - RNA, 19 nt, Homo sapiens
  misc_RNA (1)...(19): siRNA sense strand
aaggaauaaucccaucuaa

SEQ ID NO: 1036090 - RNA, 19 nt, Homo sapiens
  misc_RNA (1)...(19): siRNA sense strand
gacgacaaucuaugaaauu

SEQ ID NO: 1036091 - RNA, 19 nt, Homo sapiens
  misc_RNA (1)...(19): siRNA sense strand
gaaaaugagcaaagaagaa

SEQ ID NO: 1036092 - RNA, 19 nt, Homo sapiens
  misc_RNA (1)...(19): siRNA sense strand
uaaucgcgaugguacuaaa

SEQ ID NO: 1036093 - RNA, 19 nt, Homo sapiens
  misc_RNA (1)...(19): siRNA sense strand
uaaauaggaagacgacaau

SEQ ID NO: 1036094 - RNA, 19 nt, Homo sapiens
  misc_RNA (1)...(19): siRNA sense strand
ugaaagaagaguaugacaa

SEQ ID NO: 1036095 - RNA, 19 nt, Homo sapiens
  misc_RNA (1)...(19): siRNA sense strand
caaacguaauagucuccua

SEQ ID NO: 1036096 - RNA, 19 nt, Homo sapiens
  misc_RNA (1)...(19): siRNA sense strand
ugaaagccaucucaagacu

SEQ ID NO: 1036097 - RNA, 19 nt, Homo sapiens
  misc_RNA (1)...(19): siRNA sense strand
ccugaaagccaucucaaga

SEQ ID NO: 1036098 - RNA, 19 nt, Homo sapiens
  misc_RNA (1)...(19): siRNA sense strand
ugggcaaacuaauagaauu

SEQ ID NO: 1036099 - RNA, 19 nt, Homo sapiens
  misc_RNA (1)...(19): siRNA sense strand
cagacacaguucuuucaug

SEQ ID NO: 1036100 - RNA, 19 nt, Homo sapiens
  misc_RNA (1)...(19): siRNA sense strand
gguacuaaaugcaacaaaa

SEQ ID NO: 1036101 - RNA, 19 nt, Homo sapiens
  misc_RNA (1)...(19): siRNA sense strand
gcaaagaaaauuccgaaga

SEQ ID NO: 1036102 - RNA, 19 nt, Homo sapiens
  misc_RNA (1)...(19): siRNA sense strand
cgacugagaaagagggaaa

SEQ ID NO: 1036103 - RNA, 19 nt, Homo sapiens
  misc_RNA (1)...(19): siRNA sense strand
aaaggaauaaucccaucua

SEQ ID NO: 1036104 - RNA, 19 nt, Homo sapiens
  misc_RNA (1)...(19): siRNA sense strand
cagcacaacccuaccugaa

SEQ ID NO: 1036105 - RNA, 19 nt, Homo sapiens
  misc_RNA (1)...(19): siRNA sense strand
gggaaaauaugucaaaacu

SEQ ID NO: 1036106 - RNA, 19 nt, Homo sapiens
  misc_RNA (1)...(19): siRNA sense strand
ggaaguauggcuguaguag

SEQ ID NO: 1036107 - RNA, 19 nt, Homo sapiens
  misc_RNA (1)...(19): siRNA sense strand
caaacuucaggauauauug

SEQ ID NO: 1036108 - RNA, 19 nt, Homo sapiens
  misc_RNA (1)...(19): siRNA sense strand
ccgagaagacccaauaauc

SEQ ID NO: 1036109 - RNA, 19 nt, Homo sapiens
  misc_RNA (1)...(19): siRNA sense strand
ggcaaauaacuacaagaaa

SEQ ID NO: 1036110 - RNA, 19 nt, Homo sapiens
  misc_RNA (1)...(19): siRNA sense strand
gggcaaacuaauagaauuc

SEQ ID NO: 1036111 - RNA, 19 nt, Homo sapiens
  misc_RNA (1)...(19): siRNA sense strand
guauggcuguaguaggaaa

SEQ ID NO: 1036112 - RNA, 19 nt, Homo sapiens
  misc_RNA (1)...(19): siRNA sense strand
cgagaagacccaauaaucg

SEQ ID NO: 1036113 - RNA, 19 nt, Homo sapiens
  misc_RNA (1)...(19): siRNA sense strand
gaaaggauuagaggucauc

SEQ ID NO: 1036114 - RNA, 19 nt, Homo sapiens
  misc_RNA (1)...(19): siRNA sense strand
ccucagaugccaccaacaa

SEQ ID NO: 1036115 - RNA, 19 nt, Homo sapiens
  misc_RNA (1)...(19): siRNA sense strand
gcauaguuucauccagaua

SEQ ID NO: 1036116 - RNA, 19 nt, Homo sapiens
  misc_RNA (1)...(19): siRNA sense strand
gaagagacuggaaccaaaa

SEQ ID NO: 1036117 - RNA, 19 nt, Homo sapiens
  misc_RNA (1)...(19): siRNA sense strand
agucaucgccugcaaacuu

SEQ ID NO: 1036118 - RNA, 19 nt, Homo sapiens
  misc_RNA (1)...(19): siRNA sense strand
auaggaagacgacaaucua

SEQ ID NO: 1036119 - RNA, 19 nt, Homo sapiens
  misc_RNA (1)...(19): siRNA sense strand
agacgaaacagaaagaagu

SEQ ID NO: 1036120 - RNA, 19 nt, Homo sapiens
  misc_RNA (1)...(19): siRNA sense strand
ugggagaccuugcugaaac

SEQ ID NO: 1036121 - RNA, 19 nt, Homo sapiens
  misc_RNA (1)...(19): siRNA sense strand
gaccuugcugaaacucuua

SEQ ID NO: 1036122 - RNA, 19 nt, Homo sapiens
  misc_RNA (1)...(19): siRNA sense strand
gcgaugguacuaaaugcaa

SEQ ID NO: 1036123 - RNA, 19 nt, Homo sapiens
  misc_RNA (1)...(19): siRNA sense strand
cuucgacucuucugcuuuc

SEQ ID NO: 1036124 - RNA, 19 nt, Homo sapiens
  misc_RNA (1)...(19): siRNA sense strand
ggagaaugccacaauaucc

SEQ ID NO: 1036125 - RNA, 19 nt, Homo sapiens
  misc_RNA (1)...(19): siRNA sense strand
gacaucaucagaagagcaa

SEQ ID NO: 1036126 - RNA, 19 nt, Homo sapiens
  misc_RNA (1)...(19): siRNA sense strand
agaccuugcugaaacucuu

SEQ ID NO: 1036127 - RNA, 19 nt, Homo sapiens
  misc_RNA (1)...(19): siRNA sense strand
ggauuagaggucaucaaug

SEQ ID NO: 1036128 - RNA, 19 nt, Homo sapiens
  misc_RNA (1)...(19): siRNA sense strand
ugagaaagagggaaaauau

SEQ ID NO: 1036129 - RNA, 19 nt, Homo sapiens
  misc_RNA (1)...(19): siRNA sense strand
caggaaguauggcuguagu

SEQ ID NO: 1036130 - RNA, 19 nt, Homo sapiens
  misc_RNA (1)...(19): siRNA sense strand
gcagacacaguucuuucau

SEQ ID NO: 1036131 - RNA, 19 nt, Homo sapiens
  misc_RNA (1)...(19): siRNA sense strand
gcaaagaagaauguuucau

SEQ ID NO: 1036132 - RNA, 19 nt, Homo sapiens
  misc_RNA (1)...(19): siRNA sense strand
gggagaccuugcugaaacu

SEQ ID NO: 1036133 - RNA, 19 nt, Homo sapiens
  misc_RNA (1)...(19): siRNA sense strand
gaauguuucaugcuacagu

SEQ ID NO: 1036134 - RNA, 19 nt, Homo sapiens
  misc_RNA (1)...(19): siRNA sense strand
acgacaaucuaugaaauuc

SEQ ID NO: 1036135 - RNA, 19 nt, Homo sapiens
  misc_RNA (1)...(19): siRNA sense strand
ccauccagcaguuccuuaa

SEQ ID NO: 1036136 - RNA, 19 nt, Homo sapiens
  misc_RNA (1)...(19): siRNA sense strand
gacgaaacagaaagaagug

SEQ ID NO: 1036137 - RNA, 19 nt, Homo sapiens
  misc_RNA (1)...(19): siRNA sense strand
agauaagcuucgacucuuc

SEQ ID NO: 1036138 - RNA, 19 nt, Homo sapiens
  misc_RNA (1)...(19): siRNA sense strand
ccaacacuuccucaacuga

SEQ ID NO: 1036139 - RNA, 19 nt, Homo sapiens
  misc_RNA (1)...(19): siRNA sense strand
aagaauguuucaugcuaca

SEQ ID NO: 1036140 - RNA, 19 nt, Homo sapiens
  misc_RNA (1)...(19): siRNA sense strand
aauaaucgcgaugguacua

SEQ ID NO: 1036141 - RNA, 19 nt, Homo sapiens
  misc_RNA (1)...(19): siRNA sense strand
uaaaggagcagaggagacu

SEQ ID NO: 1036142 - RNA, 19 nt, Homo sapiens
  misc_RNA (1)...(19): siRNA sense strand
ugagcaaagaagaauguuu

SEQ ID NO: 1036143 - RNA, 19 nt, Homo sapiens
  misc_RNA (1)...(19): siRNA sense strand
gagggaaaauaugucaaaa

SEQ ID NO: 1036144 - RNA, 19 nt, Homo sapiens
  misc_RNA (1)...(19): siRNA sense strand
gauaagcuucgacucuucu

SEQ ID NO: 1036145 - RNA, 19 nt, Homo sapiens
  misc_RNA (1)...(19): siRNA sense strand
gauaaaacaggaaguaugg

SEQ ID NO: 1036146 - RNA, 19 nt, Homo sapiens
  misc_RNA (1)...(19): siRNA sense strand
uuccgaagaucaauauucu

SEQ ID NO: 1036147 - RNA, 19 nt, Homo sapiens
  misc_RNA (1)...(19): siRNA sense strand
caacuugaagaggaaauuc

SEQ ID NO: 1036148 - RNA, 19 nt, Homo sapiens
  misc_RNA (1)...(19): siRNA sense strand
aagaagagacuggaaccaa

SEQ ID NO: 1036149 - RNA, 19 nt, Homo sapiens
  misc_RNA (1)...(19): siRNA sense strand
aggaauaaucccaucuaaa

SEQ ID NO: 1036150 - RNA, 19 nt, Homo sapiens
  misc_RNA (1)...(19): siRNA sense strand
uagaaucaccucaccaacu

SEQ ID NO: 1036151 - RNA, 19 nt, Homo sapiens
  misc_RNA (1)...(19): siRNA sense strand
gaaaaguucccaggugaug

SEQ ID NO: 1036152 - RNA, 19 nt, Homo sapiens
  misc_RNA (1)...(19): siRNA sense strand
cagcuccgcccuuccgaaa

SEQ ID NO: 1036153 - RNA, 19 nt, Homo sapiens
  misc_RNA (1)...(19): siRNA sense strand
gagaauuacugcuaacuuu

SEQ ID NO: 1036154 - RNA, 19 nt, Homo sapiens
  misc_RNA (1)...(19): siRNA sense strand
caaaugagcucugccaguu

SEQ ID NO: 1036155 - RNA, 19 nt, Homo sapiens
  misc_RNA (1)...(19): siRNA sense strand
ugaggaagcugcagaaaug

SEQ ID NO: 1036156 - RNA, 19 nt, Homo sapiens
  misc_RNA (1)...(19): siRNA sense strand
ugaaguauaucacucauga

SEQ ID NO: 1036157 - RNA, 19 nt, Homo sapiens
  misc_RNA (1)...(19): siRNA sense strand
gcgaucagcaggagaauua

SEQ ID NO: 1036158 - RNA, 19 nt, Homo sapiens
  misc_RNA (1)...(19): siRNA sense strand
gcuaaagggugaacuugaa

SEQ ID NO: 1036159 - RNA, 19 nt, Homo sapiens
  misc_RNA (1)...(19): siRNA sense strand
gcauugaacugacagacuu

SEQ ID NO: 1036160 - RNA, 19 nt, Homo sapiens
  misc_RNA (1)...(19): siRNA sense strand
ccacagcucugccgcuaaa

SEQ ID NO: 1036161 - RNA, 19 nt, Homo sapiens
  misc_RNA (1)...(19): siRNA sense strand
gagaaggugccagaaauua

SEQ ID NO: 1036162 - RNA, 19 nt, Homo sapiens
  misc_RNA (1)...(19): siRNA sense strand
gugcauaccuuaaauguac

SEQ ID NO: 1036163 - RNA, 19 nt, Homo sapiens
  misc_RNA (1)...(19): siRNA sense strand
cagccaagcuuuaccuuau

SEQ ID NO: 1036164 - RNA, 19 nt, Homo sapiens
  misc_RNA (1)...(19): siRNA sense strand
aaugagcucugccaguuua

SEQ ID NO: 1036165 - RNA, 19 nt, Homo sapiens
  misc_RNA (1)...(19): siRNA sense strand
gaaaagagcauugacaaaa

SEQ ID NO: 1036166 - RNA, 19 nt, Homo sapiens
  misc_RNA (1)...(19): siRNA sense strand
uuaccaagauguccauuug

SEQ ID NO: 1036167 - RNA, 19 nt, Homo sapiens
  misc_RNA (1)...(19): siRNA sense strand
guauaucacucaugacaag

SEQ ID NO: 1036168 - RNA, 19 nt, Homo sapiens
  misc_RNA (1)...(19): siRNA sense strand
ugacagugauucagaaagu

SEQ ID NO: 1036169 - RNA, 19 nt, Homo sapiens
  misc_RNA (1)...(19): siRNA sense strand
gugcucagcuuccuucugu

SEQ ID NO: 1036170 - RNA, 19 nt, Homo sapiens
  misc_RNA (1)...(19): siRNA sense strand
gccaacaaaucauaaauac

SEQ ID NO: 1036171 - RNA, 19 nt, Homo sapiens
  misc_RNA (1)...(19): siRNA sense strand
gaaggugccagaaauuaug

SEQ ID NO: 1036172 - RNA, 19 nt, Homo sapiens
  misc_RNA (1)...(19): siRNA sense strand
gcuaaaugcuucuacaacu

SEQ ID NO: 1036173 - RNA, 19 nt, Homo sapiens
  misc_RNA (1)...(19): siRNA sense strand
gagcugagcaacuuagaga

SEQ ID NO: 1036174 - RNA, 19 nt, Homo sapiens
  misc_RNA (1)...(19): siRNA sense strand
cugcagaaaugccauaaug

SEQ ID NO: 1036175 - RNA, 19 nt, Homo sapiens
  misc_RNA (1)...(19): siRNA sense strand
cuacaacugucccuucaga

SEQ ID NO: 1036176 - RNA, 19 nt, Homo sapiens
  misc_RNA (1)...(19): siRNA sense strand
cugagcaacuuagagauua

SEQ ID NO: 1036177 - RNA, 19 nt, Homo sapiens
  misc_RNA (1)...(19): siRNA sense strand
ccagacaccugacccaaca

SEQ ID NO: 1036178 - RNA, 19 nt, Homo sapiens
  misc_RNA (1)...(19): siRNA sense strand
gagcucugccaguuuauaa

SEQ ID NO: 1036179 - RNA, 19 nt, Homo sapiens
  misc_RNA (1)...(19): siRNA sense strand
caacugucccuucagaauu

SEQ ID NO: 1036180 - RNA, 19 nt, Homo sapiens
  misc_RNA (1)...(19): siRNA sense strand
ucauaaauaccgugaguuu

SEQ ID NO: 1036181 - RNA, 19 nt, Homo sapiens
  misc_RNA (1)...(19): siRNA sense strand
cagaaaguguggauuugga

SEQ ID NO: 1036182 - RNA, 19 nt, Homo sapiens
  misc_RNA (1)...(19): siRNA sense strand
gaaauuaugggaguuaucu

SEQ ID NO: 1036183 - RNA, 19 nt, Homo sapiens
  misc_RNA (1)...(19): siRNA sense strand
gaauugcccaggucuuuga

SEQ ID NO: 1036184 - RNA, 19 nt, Homo sapiens
  misc_RNA (1)...(19): siRNA sense strand
uagcagacauugugcauac

SEQ ID NO: 1036185 - RNA, 19 nt, Homo sapiens
  misc_RNA (1)...(19): siRNA sense strand
aggagaagauggcauaugu

SEQ ID NO: 1036186 - RNA, 19 nt, Homo sapiens
  misc_RNA (1)...(19): siRNA sense strand
gccaagcuuuaccuuauga

SEQ ID NO: 1036187 - RNA, 19 nt, Homo sapiens
  misc_RNA (1)...(19): siRNA sense strand
gggccaggaugaguucuaa

SEQ ID NO: 1036188 - RNA, 19 nt, Homo sapiens
  misc_RNA (1)...(19): siRNA sense strand
cugagaugcuccagaguuu

SEQ ID NO: 1036189 - RNA, 19 nt, Homo sapiens
  misc_RNA (1)...(19): siRNA sense strand
gcagaaaugccauaaugag

SEQ ID NO: 1036190 - RNA, 19 nt, Homo sapiens
  misc_RNA (1)...(19): siRNA sense strand
ccacugcgauuccaaagac

SEQ ID NO: 1036191 - RNA, 19 nt, Homo sapiens
  misc_RNA (1)...(19): siRNA sense strand
caaguacacagauauagug

SEQ ID NO: 1036192 - RNA, 19 nt, Homo sapiens
  misc_RNA (1)...(19): siRNA sense strand
ccagaaauuaugggaguua

SEQ ID NO: 1036193 - RNA, 19 nt, Homo sapiens
  misc_RNA (1)...(19): siRNA sense strand
ggagaauuacugcuaacuu

SEQ ID NO: 1036194 - RNA, 19 nt, Homo sapiens
  misc_RNA (1)...(19): siRNA sense strand
gaucuguagucaggaagaa

SEQ ID NO: 1036195 - RNA, 19 nt, Homo sapiens
  misc_RNA (1)...(19): siRNA sense strand
gcccaggucuuugaagguu

SEQ ID NO: 1036196 - RNA, 19 nt, Homo sapiens
  misc_RNA (1)...(19): siRNA sense strand
gaaaaucuugacaccauua

SEQ ID NO: 1036197 - RNA, 19 nt, Homo sapiens
  misc_RNA (1)...(19): siRNA sense strand
auacagagucccaauuuga

SEQ ID NO: 1036198 - RNA, 19 nt, Homo sapiens
  misc_RNA (1)...(19): siRNA sense strand
gcugagcaacuuagagauu

SEQ ID NO: 1036199 - RNA, 19 nt, Homo sapiens
  misc_RNA (1)...(19): siRNA sense strand
agacccaaguacacagaua

SEQ ID NO: 1036200 - RNA, 19 nt, Homo sapiens
  misc_RNA (1)...(19): siRNA sense strand
cuaaaugcuucuacaacug

SEQ ID NO: 1036201 - RNA, 19 nt, Homo sapiens
  misc_RNA (1)...(19): siRNA sense strand
gugaggccauuguugagaa

SEQ ID NO: 1036202 - RNA, 19 nt, Homo sapiens
  misc_RNA (1)...(19): siRNA sense strand
ucagugaggccauuguuga

SEQ ID NO: 1036203 - RNA, 19 nt, Homo sapiens
  misc_RNA (1)...(19): siRNA sense strand
gucauccagugccguauaa

SEQ ID NO: 1036204 - RNA, 19 nt, Homo sapiens
  misc_RNA (1)...(19): siRNA sense strand
aguuaucugugcccaguua

SEQ ID NO: 1036205 - RNA, 19 nt, Homo sapiens
  misc_RNA (1)...(19): siRNA sense strand
cagaauugcccaggucuuu

SEQ ID NO: 1036206 - RNA, 19 nt, Homo sapiens
  misc_RNA (1)...(19): siRNA sense strand
ccagauacaggaaaucaug

SEQ ID NO: 1036207 - RNA, 19 nt, Homo sapiens
  misc_RNA (1)...(19): siRNA sense strand
uaucacucaugacaagaaa

SEQ ID NO: 1036208 - RNA, 19 nt, Homo sapiens
  misc_RNA (1)...(19): siRNA sense strand
cagcaaaacuugaaaagag

SEQ ID NO: 1036209 - RNA, 19 nt, Homo sapiens
  misc_RNA (1)...(19): siRNA sense strand
ggcagacguuucaggcauu

SEQ ID NO: 1036210 - RNA, 19 nt, Homo sapiens
  misc_RNA (1)...(19): siRNA sense strand
aaucauaaauaccgugagu

SEQ ID NO: 1036211 - RNA, 19 nt, Homo sapiens
  misc_RNA (1)...(19): siRNA sense strand
cgccaacaaaucauaaaua

SEQ ID NO: 1036212 - RNA, 19 nt, Homo sapiens
  misc_RNA (1)...(19): siRNA sense strand
gguaaaagacccacauuug

SEQ ID NO: 1036213 - RNA, 19 nt, Homo sapiens
  misc_RNA (1)...(19): siRNA sense strand
caggaaaucaugcccaaug

SEQ ID NO: 1036214 - RNA, 19 nt, Homo sapiens
  misc_RNA (1)...(19): siRNA sense strand
gacaagaaagaucagcaaa

SEQ ID NO: 1036215 - RNA, 19 nt, Homo sapiens
  misc_RNA (1)...(19): siRNA sense strand
cccugaggcugaaguauau

SEQ ID NO: 1036216 - RNA, 19 nt, Homo sapiens
  misc_RNA (1)...(19): siRNA sense strand
gcaaaaucauucauucaca

SEQ ID NO: 1036217 - RNA, 19 nt, Homo sapiens
  misc_RNA (1)...(19): siRNA sense strand
cacaggagaagauggcaua

SEQ ID NO: 1036218 - RNA, 19 nt, Homo sapiens
  misc_RNA (1)...(19): siRNA sense strand
uugagaaggugccagaaau

SEQ ID NO: 1036219 - RNA, 19 nt, Homo sapiens
  misc_RNA (1)...(19): siRNA sense strand
gaauuacugcuaacuuugg

SEQ ID NO: 1036220 - RNA, 19 nt, Homo sapiens
  misc_RNA (1)...(19): siRNA sense strand
cgacagcccucuccccaaa

SEQ ID NO: 1036221 - RNA, 19 nt, Homo sapiens
  misc_RNA (1)...(19): siRNA sense strand
gcugagguguggagaaugc

SEQ ID NO: 1036222 - RNA, 19 nt, Homo sapiens
  misc_RNA (1)...(19): siRNA sense strand
ugagaaggugccagaaauu

SEQ ID NO: 1036223 - RNA, 19 nt, Homo sapiens
  misc_RNA (1)...(19): siRNA sense strand
gcuccagaguuugguggua

SEQ ID NO: 1036224 - RNA, 19 nt, Homo sapiens
  misc_RNA (1)...(19): siRNA sense strand
uaaucacucugcccucugu

SEQ ID NO: 1036225 - RNA, 19 nt, Homo sapiens
  misc_RNA (1)...(19): siRNA sense strand
gaagaucgagcugaguugu

SEQ ID NO: 1036226 - RNA, 19 nt, Homo sapiens
  misc_RNA (1)...(19): siRNA sense strand
caggaucuguagucaggaa

SEQ ID NO: 1036227 - RNA, 19 nt, Homo sapiens
  misc_RNA (1)...(19): siRNA sense strand
gagcuaaagggugaacuug

SEQ ID NO: 1036228 - RNA, 19 nt, Homo sapiens
  misc_RNA (1)...(19): siRNA sense strand
agacauugugcauaccuua

SEQ ID NO: 1036229 - RNA, 19 nt, Homo sapiens
  misc_RNA (1)...(19): siRNA sense strand
cgcauucucuguccaguuc

SEQ ID NO: 1036230 - RNA, 19 nt, Homo sapiens
  misc_RNA (1)...(19): siRNA sense strand
gacauugugcauaccuuaa

SEQ ID NO: 1036231 - RNA, 19 nt, Homo sapiens
  misc_RNA (1)...(19): siRNA sense strand
aauacagagucccaauuug

SEQ ID NO: 1036232 - RNA, 19 nt, Homo sapiens
  misc_RNA (1)...(19): siRNA sense strand
gcucugccaguuuauaaug

SEQ ID NO: 1036233 - RNA, 19 nt, Homo sapiens
  misc_RNA (1)...(19): siRNA sense strand
uaaaugcuucuacaacugu

SEQ ID NO: 1036234 - RNA, 19 nt, Homo sapiens
  misc_RNA (1)...(19): siRNA sense strand
gcagacguuucaggcauuc

SEQ ID NO: 1036235 - RNA, 19 nt, Homo sapiens
  misc_RNA (1)...(19): siRNA sense strand
caucaagaguauaaucacu

SEQ ID NO: 1036236 - RNA, 19 nt, Homo sapiens
  misc_RNA (1)...(19): siRNA sense strand
ccuagaguccgccaacaaa

SEQ ID NO: 1036237 - RNA, 19 nt, Homo sapiens
  misc_RNA (1)...(19): siRNA sense strand
caagaaagaucagcaaaac

SEQ ID NO: 1036238 - RNA, 19 nt, Homo sapiens
  misc_RNA (1)...(19): siRNA sense strand
ucacucaugacaagaaaga

SEQ ID NO: 1036239 - RNA, 19 nt, Homo sapiens
  misc_RNA (1)...(19): siRNA sense strand
cuaugacagugauucagaa

SEQ ID NO: 1036240 - RNA, 19 nt, Homo sapiens
  misc_RNA (1)...(19): siRNA sense strand
ggaaaaucuugacaccauu

SEQ ID NO: 1036241 - RNA, 19 nt, Homo sapiens
  misc_RNA (1)...(19): siRNA sense strand
ucagccaagcuuuaccuua

SEQ ID NO: 1036242 - RNA, 19 nt, Homo sapiens
  misc_RNA (1)...(19): siRNA sense strand
ugagcaacuuagagauuau

SEQ ID NO: 1036243 - RNA, 19 nt, Homo sapiens
  misc_RNA (1)...(19): siRNA sense strand
cagaaauuaugggaguuau

SEQ ID NO: 1036244 - RNA, 19 nt, Homo sapiens
  misc_RNA (1)...(19): siRNA sense strand
aacugucccuucagaauug

SEQ ID NO: 1036245 - RNA, 19 nt, Homo sapiens
  misc_RNA (1)...(19): siRNA sense strand
ccaaguacacagauauagu

SEQ ID NO: 1036246 - RNA, 19 nt, Homo sapiens
  misc_RNA (1)...(19): siRNA sense strand
gagcaacuuagagauuauu

SEQ ID NO: 1036247 - RNA, 19 nt, Homo sapiens
  misc_RNA (1)...(19): siRNA sense strand
ugaggccauuguugagaaa

SEQ ID NO: 1036248 - RNA, 19 nt, Homo sapiens
  misc_RNA (1)...(19): siRNA sense strand
uacauuugauacccugaaa

SEQ ID NO: 1036249 - RNA, 19 nt, Homo sapiens
  misc_RNA (1)...(19): siRNA sense strand
gaaauuccuaggagaucug

SEQ ID NO: 1036250 - RNA, 19 nt, Homo sapiens
  misc_RNA (1)...(19): siRNA sense strand
gacagugauucagaaagug

SEQ ID NO: 1036251 - RNA, 19 nt, Homo sapiens
  misc_RNA (1)...(19): siRNA sense strand
agaucgagcugaguuguuc

SEQ ID NO: 1036252 - RNA, 19 nt, Homo sapiens
  misc_RNA (1)...(19): siRNA sense strand
cagauauagugcucagcuu

SEQ ID NO: 1036253 - RNA, 19 nt, Homo sapiens
  misc_RNA (1)...(19): siRNA sense strand
gggaagaacucacucauaa

SEQ ID NO: 1036254 - RNA, 19 nt, Homo sapiens
  misc_RNA (1)...(19): siRNA sense strand
gaaagaagagcaagaacua

SEQ ID NO: 1036255 - RNA, 19 nt, Homo sapiens
  misc_RNA (1)...(19): siRNA sense strand
gcaagaggauucuaagaga

SEQ ID NO: 1036256 - RNA, 19 nt, Homo sapiens
  misc_RNA (1)...(19): siRNA sense strand
ccaauaagaguguugauua

SEQ ID NO: 1036257 - RNA, 19 nt, Homo sapiens
  misc_RNA (1)...(19): siRNA sense strand
gauacaacuuucagagaua

SEQ ID NO: 1036258 - RNA, 19 nt, Homo sapiens
  misc_RNA (1)...(19): siRNA sense strand
caggaaacaucgaucauaa

SEQ ID NO: 1036259 - RNA, 19 nt, Homo sapiens
  misc_RNA (1)...(19): siRNA sense strand
gaagaacucacucauaaau

SEQ ID NO: 1036260 - RNA, 19 nt, Homo sapiens
  misc_RNA (1)...(19): siRNA sense strand
gaacaguaaugcuuccaau

SEQ ID NO: 1036261 - RNA, 19 nt, Homo sapiens
  misc_RNA (1)...(19): siRNA sense strand
gcagagaaaugguguggau

SEQ ID NO: 1036262 - RNA, 19 nt, Homo sapiens
  misc_RNA (1)...(19): siRNA sense strand
ugaauuagcugauaugcau

SEQ ID NO: 1036263 - RNA, 19 nt, Homo sapiens
  misc_RNA (1)...(19): siRNA sense strand
gaaagaacucuaucuagga

SEQ ID NO: 1036264 - RNA, 19 nt, Homo sapiens
  misc_RNA (1)...(19): siRNA sense strand
ggauacaacuuucagagau

SEQ ID NO: 1036265 - RNA, 19 nt, Homo sapiens
  misc_RNA (1)...(19): siRNA sense strand
ggagaauacuggaagacaa

SEQ ID NO: 1036266 - RNA, 19 nt, Homo sapiens
  misc_RNA (1)...(19): siRNA sense strand
gguaagucuuccagaauaa

SEQ ID NO: 1036267 - RNA, 19 nt, Homo sapiens
  misc_RNA (1)...(19): siRNA sense strand
gagaggaaauggagcuaga

SEQ ID NO: 1036268 - RNA, 19 nt, Homo sapiens
  misc_RNA (1)...(19): siRNA sense strand
gaucgugagcuugaaauua

SEQ ID NO: 1036269 - RNA, 19 nt, Homo sapiens
  misc_RNA (1)...(19): siRNA sense strand
aaagaagcaugcagagaaa

SEQ ID NO: 1036270 - RNA, 19 nt, Homo sapiens
  misc_RNA (1)...(19): siRNA sense strand
aaucagauguuccaccuuu

SEQ ID NO: 1036271 - RNA, 19 nt, Homo sapiens
  misc_RNA (1)...(19): siRNA sense strand
gaagccauccuuacagaaa

SEQ ID NO: 1036272 - RNA, 19 nt, Homo sapiens
  misc_RNA (1)...(19): siRNA sense strand
uggaaugcaucacucuuua

SEQ ID NO: 1036273 - RNA, 19 nt, Homo sapiens
  misc_RNA (1)...(19): siRNA sense strand
aaagaacucuaucuaggaa

SEQ ID NO: 1036274 - RNA, 19 nt, Homo sapiens
  misc_RNA (1)...(19): siRNA sense strand
uaaagcagccugugguaaa

SEQ ID NO: 1036275 - RNA, 19 nt, Homo sapiens
  misc_RNA (1)...(19): siRNA sense strand
gaaaagcagucucauggaa

SEQ ID NO: 1036276 - RNA, 19 nt, Homo sapiens
  misc_RNA (1)...(19): siRNA sense strand
ugaauaaacuaccaaagca

SEQ ID NO: 1036277 - RNA, 19 nt, Homo sapiens
  misc_RNA (1)...(19): siRNA sense strand
caucuauagucaucgaaua

SEQ ID NO: 1036278 - RNA, 19 nt, Homo sapiens
  misc_RNA (1)...(19): siRNA sense strand
aagaagacauuacucauuc

SEQ ID NO: 1036279 - RNA, 19 nt, Homo sapiens
  misc_RNA (1)...(19): siRNA sense strand
gcacugcucccuacacgaa

SEQ ID NO: 1036280 - RNA, 19 nt, Homo sapiens
  misc_RNA (1)...(19): siRNA sense strand
caaagcaagaggauucuaa

SEQ ID NO: 1036281 - RNA, 19 nt, Homo sapiens
  misc_RNA (1)...(19): siRNA sense strand
agaaagcaaucaagaagau

SEQ ID NO: 1036282 - RNA, 19 nt, Homo sapiens
  misc_RNA (1)...(19): siRNA sense strand
gagaauacuggaagacaaa

SEQ ID NO: 1036283 - RNA, 19 nt, Homo sapiens
  misc_RNA (1)...(19): siRNA sense strand
ggaagaacucacucauaaa

SEQ ID NO: 1036284 - RNA, 19 nt, Homo sapiens
  misc_RNA (1)...(19): siRNA sense strand
ugguaagucuuccagaaua

SEQ ID NO: 1036285 - RNA, 19 nt, Homo sapiens
  misc_RNA (1)...(19): siRNA sense strand
acaguaaugcuuccaauaa

SEQ ID NO: 1036286 - RNA, 19 nt, Homo sapiens
  misc_RNA (1)...(19): siRNA sense strand
ggaaacaucgaucauaaag

SEQ ID NO: 1036287 - RNA, 19 nt, Homo sapiens
  misc_RNA (1)...(19): siRNA sense strand
caaauacugcuggagaaua

SEQ ID NO: 1036288 - RNA, 19 nt, Homo sapiens
  misc_RNA (1)...(19): siRNA sense strand
agaaggaaauaucaguuga

SEQ ID NO: 1036289 - RNA, 19 nt, Homo sapiens
  misc_RNA (1)...(19): siRNA sense strand
gccggcagcuggcuauuga

SEQ ID NO: 1036290 - RNA, 19 nt, Homo sapiens
  misc_RNA (1)...(19): siRNA sense strand
gaaggaaauaucaguugaa

SEQ ID NO: 1036291 - RNA, 19 nt, Homo sapiens
  misc_RNA (1)...(19): siRNA sense strand
gaaguuuaaguucucagua

SEQ ID NO: 1036292 - RNA, 19 nt, Homo sapiens
  misc_RNA (1)...(19): siRNA sense strand
cagcaaggcuucauaaaau

SEQ ID NO: 1036293 - RNA, 19 nt, Homo sapiens
  misc_RNA (1)...(19): siRNA sense strand
ggaaugcaucacucuuuaa

SEQ ID NO: 1036294 - RNA, 19 nt, Homo sapiens
  misc_RNA (1)...(19): siRNA sense strand
ugcuauggcucaucgaaua

SEQ ID NO: 1036295 - RNA, 19 nt, Homo sapiens
  misc_RNA (1)...(19): siRNA sense strand
gcaagcaucucaguaacag

SEQ ID NO: 1036296 - RNA, 19 nt, Homo sapiens
  misc_RNA (1)...(19): siRNA sense strand
ggaaaaggaucgugagcuu

SEQ ID NO: 1036297 - RNA, 19 nt, Homo sapiens
  misc_RNA (1)...(19): siRNA sense strand
ggaagagaaacauuuggaa

SEQ ID NO: 1036298 - RNA, 19 nt, Homo sapiens
  misc_RNA (1)...(19): siRNA sense strand
gauuauagcagaucucagu

SEQ ID NO: 1036299 - RNA, 19 nt, Homo sapiens
  misc_RNA (1)...(19): siRNA sense strand
ccaaucaaguccugguguu

SEQ ID NO: 1036300 - RNA, 19 nt, Homo sapiens
  misc_RNA (1)...(19): siRNA sense strand
caaauuauggcuaaacauc

SEQ ID NO: 1036301 - RNA, 19 nt, Homo sapiens
  misc_RNA (1)...(19): siRNA sense strand
gugcuccuguggaaguuua

SEQ ID NO: 1036302 - RNA, 19 nt, Homo sapiens
  misc_RNA (1)...(19): siRNA sense strand
gaaugcaucacucuuuaau

SEQ ID NO: 1036303 - RNA, 19 nt, Homo sapiens
  misc_RNA (1)...(19): siRNA sense strand
aaagcagucucauggaaga

SEQ ID NO: 1036304 - RNA, 19 nt, Homo sapiens
  misc_RNA (1)...(19): siRNA sense strand
gaauaaaagugaaggauac

SEQ ID NO: 1036305 - RNA, 19 nt, Homo sapiens
  misc_RNA (1)...(19): siRNA sense strand
gagaaagcaaucaagaaga

SEQ ID NO: 1036306 - RNA, 19 nt, Homo sapiens
  misc_RNA (1)...(19): siRNA sense strand
aucgugagcuugaaauuaa

SEQ ID NO: 1036307 - RNA, 19 nt, Homo sapiens
  misc_RNA (1)...(19): siRNA sense strand
caacuucagcuuaggcauu

SEQ ID NO: 1036308 - RNA, 19 nt, Homo sapiens
  misc_RNA (1)...(19): siRNA sense strand
augcaucacucuuuaauuc

SEQ ID NO: 1036309 - RNA, 19 nt, Homo sapiens
  misc_RNA (1)...(19): siRNA sense strand
ccauaugauugcccaaaga

SEQ ID NO: 1036310 - RNA, 19 nt, Homo sapiens
  misc_RNA (1)...(19): siRNA sense strand
gaaagagaaagcaaucaag

SEQ ID NO: 1036311 - RNA, 19 nt, Homo sapiens
  misc_RNA (1)...(19): siRNA sense strand
uaccucaaauuauggcuaa

SEQ ID NO: 1036312 - RNA, 19 nt, Homo sapiens
  misc_RNA (1)...(19): siRNA sense strand
caacaggaaacaucgauca

SEQ ID NO: 1036313 - RNA, 19 nt, Homo sapiens
  misc_RNA (1)...(19): siRNA sense strand
acacagaggacuauccaaa

SEQ ID NO: 1036314 - RNA, 19 nt, Homo sapiens
  misc_RNA (1)...(19): siRNA sense strand
guaaaacaccuucaacaaa

SEQ ID NO: 1036315 - RNA, 19 nt, Homo sapiens
  misc_RNA (1)...(19): siRNA sense strand
ucucagugcuccuguggaa

SEQ ID NO: 1036316 - RNA, 19 nt, Homo sapiens
  misc_RNA (1)...(19): siRNA sense strand
gaauaaacuaccaaagcaa

SEQ ID NO: 1036317 - RNA, 19 nt, Homo sapiens
  misc_RNA (1)...(19): siRNA sense strand
gaaacaucgaucauaaaga

SEQ ID NO: 1036318 - RNA, 19 nt, Homo sapiens
  misc_RNA (1)...(19): siRNA sense strand
aaacaucuauagucaucga

SEQ ID NO: 1036319 - RNA, 19 nt, Homo sapiens
  misc_RNA (1)...(19): siRNA sense strand
uggcuaaacaucagaauga

SEQ ID NO: 1036320 - RNA, 19 nt, Homo sapiens
  misc_RNA (1)...(19): siRNA sense strand
ggaaauggagcuagagcau

SEQ ID NO: 1036321 - RNA, 19 nt, Homo sapiens
  misc_RNA (1)...(19): siRNA sense strand
caggcaagcaucucaguaa

SEQ ID NO: 1036322 - RNA, 19 nt, Homo sapiens
  misc_RNA (1)...(19): siRNA sense strand
aaagagaaagcaaucaaga

SEQ ID NO: 1036323 - RNA, 19 nt, Homo sapiens
  misc_RNA (1)...(19): siRNA sense strand
gagcaagaacuaccaccaa

SEQ ID NO: 1036324 - RNA, 19 nt, Homo sapiens
  misc_RNA (1)...(19): siRNA sense strand
gcuagagcauucugacagu

SEQ ID NO: 1036325 - RNA, 19 nt, Homo sapiens
  misc_RNA (1)...(19): siRNA sense strand
uuucggagacucuaaagua

SEQ ID NO: 1036326 - RNA, 19 nt, Homo sapiens
  misc_RNA (1)...(19): siRNA sense strand
ucuaaaaucucccaaucua

SEQ ID NO: 1036327 - RNA, 19 nt, Homo sapiens
  misc_RNA (1)...(19): siRNA sense strand
gcucagacagcuaccaaga

SEQ ID NO: 1036328 - RNA, 19 nt, Homo sapiens
  misc_RNA (1)...(19): siRNA sense strand
gaaacaacuucagcuuagg

SEQ ID NO: 1036329 - RNA, 19 nt, Homo sapiens
  misc_RNA (1)...(19): siRNA sense strand
gcaaggcuucauaaaauua

SEQ ID NO: 1036330 - RNA, 19 nt, Homo sapiens
  misc_RNA (1)...(19): siRNA sense strand
ccaaagaagagaugcuaug

SEQ ID NO: 1036331 - RNA, 19 nt, Homo sapiens
  misc_RNA (1)...(19): siRNA sense strand
cuuaggaaaucccaggaaa

SEQ ID NO: 1036332 - RNA, 19 nt, Homo sapiens
  misc_RNA (1)...(19): siRNA sense strand
gaagacuuucucugugauu

SEQ ID NO: 1036333 - RNA, 19 nt, Homo sapiens
  misc_RNA (1)...(19): siRNA sense strand
acaaagaagacauuacuca

SEQ ID NO: 1036334 - RNA, 19 nt, Homo sapiens
  misc_RNA (1)...(19): siRNA sense strand
aaauacugcuggagaauac

SEQ ID NO: 1036335 - RNA, 19 nt, Homo sapiens
  misc_RNA (1)...(19): siRNA sense strand
gcagcuggcuauugagacu

SEQ ID NO: 1036336 - RNA, 19 nt, Homo sapiens
  misc_RNA (1)...(19): siRNA sense strand
gaaaaggaaagaacucuau

SEQ ID NO: 1036337 - RNA, 19 nt, Homo sapiens
  misc_RNA (1)...(19): siRNA sense strand
uggaagccauccuuacaga

SEQ ID NO: 1036338 - RNA, 19 nt, Homo sapiens
  misc_RNA (1)...(19): siRNA sense strand
ggaucaggcuaugucuuga

SEQ ID NO: 1036339 - RNA, 19 nt, Homo sapiens
  misc_RNA (1)...(19): siRNA sense strand
aguaaugcuuccaauaaga

SEQ ID NO: 1036340 - RNA, 19 nt, Homo sapiens
  misc_RNA (1)...(19): siRNA sense strand
ugaaagagaaagcaaucaa

SEQ ID NO: 1036341 - RNA, 19 nt, Homo sapiens
  misc_RNA (1)...(19): siRNA sense strand
ucagacagcuaccaagacu

SEQ ID NO: 1036342 - RNA, 19 nt, Homo sapiens
  misc_RNA (1)...(19): siRNA sense strand
cagaaggaaauaucaguug

SEQ ID NO: 1036343 - RNA, 19 nt, Homo sapiens
  misc_RNA (1)...(19): siRNA sense strand
gaaggauacaacuuucaga

SEQ ID NO: 1036344 - RNA, 19 nt, Homo sapiens
  misc_RNA (1)...(19): siRNA sense strand
caaagaagacauuacucau

SEQ ID NO: 1036345 - RNA, 19 nt, Homo sapiens
  misc_RNA (1)...(19): siRNA sense strand
gggaagagaaacauuugga

SEQ ID NO: 1036346 - RNA, 19 nt, Homo sapiens
  misc_RNA (1)...(19): siRNA sense strand
caguaaugcuuccaauaag

SEQ ID NO: 1036347 - RNA, 19 nt, Homo sapiens
  misc_RNA (1)...(19): siRNA sense strand
gcaucacucuuuaauucuc

SEQ ID NO: 1036348 - RNA, 19 nt, Homo sapiens
  misc_RNA (1)...(19): siRNA sense strand
gcagaaagggaagaacuca

SEQ ID NO: 1036349 - RNA, 19 nt, Homo sapiens
  misc_RNA (1)...(19): siRNA sense strand
aaguaacugugguaaauuc

SEQ ID NO: 1036350 - RNA, 19 nt, Homo sapiens
  misc_RNA (1)...(19): siRNA sense strand
agcaagaacuaccaccaaa

SEQ ID NO: 1036351 - RNA, 19 nt, Homo sapiens
  misc_RNA (1)...(19): siRNA sense strand
agagaaacauuuggaaguc

SEQ ID NO: 1036352 - RNA, 19 nt, Homo sapiens
  misc_RNA (1)...(19): siRNA sense strand
ucacggaacaguaaugcuu

SEQ ID NO: 1036353 - RNA, 19 nt, Homo sapiens
  misc_RNA (1)...(19): siRNA sense strand
gcaguguuauguugaaugu

SEQ ID NO: 1036354 - RNA, 19 nt, Homo sapiens
  misc_RNA (1)...(19): siRNA sense strand
uagacaggguuaauuauuc

SEQ ID NO: 1036355 - RNA, 19 nt, Homo sapiens
  misc_RNA (1)...(19): siRNA sense strand
caccugaccuggagaguuc

SEQ ID NO: 1036356 - RNA, 19 nt, Homo sapiens
  misc_RNA (1)...(19): siRNA sense strand
gcgugaggauagagaagua

SEQ ID NO: 1036357 - RNA, 19 nt, Homo sapiens
  misc_RNA (1)...(19): siRNA sense strand
agacaggguuaauuauuca

SEQ ID NO: 1036358 - RNA, 19 nt, Homo sapiens
  misc_RNA (1)...(19): siRNA sense strand
ggauccaccggcaauauuu

SEQ ID NO: 1036359 - RNA, 19 nt, Homo sapiens
  misc_RNA (1)...(19): siRNA sense strand
cuagacaggguuaauuauu

SEQ ID NO: 1036360 - RNA, 19 nt, Homo sapiens
  misc_RNA (1)...(19): siRNA sense strand
ggacgcugcuacccacaag

SEQ ID NO: 1036361 - RNA, 19 nt, Homo sapiens
  misc_RNA (1)...(19): siRNA sense strand
uauuugcaguguuauguug

SEQ ID NO: 1036362 - RNA, 19 nt, Homo sapiens
  misc_RNA (1)...(19): siRNA sense strand
cuccaaggcucccuagaca

SEQ ID NO: 1036363 - RNA, 19 nt, Homo sapiens
  misc_RNA (1)...(19): siRNA sense strand
gauccaccggcaauauuug

SEQ ID NO: 1036364 - RNA, 19 nt, Homo sapiens
  misc_RNA (1)...(19): siRNA sense strand
guucaaagugccuaacaca

SEQ ID NO: 1036365 - RNA, 19 nt, Homo sapiens
  misc_RNA (1)...(19): siRNA sense strand
uaacacagggacgcugcua

SEQ ID NO: 1036366 - RNA, 19 nt, Homo sapiens
  misc_RNA (1)...(19): siRNA sense strand
gagaguucaaagugccuaa

SEQ ID NO: 1036367 - RNA, 19 nt, Homo sapiens
  misc_RNA (1)...(19): siRNA sense strand
caauauuugcaguguuaug

SEQ ID NO: 1036368 - RNA, 19 nt, Homo sapiens
  misc_RNA (1)...(19): siRNA sense strand
cccagcagcucuccucacu

SEQ ID NO: 1036369 - RNA, 19 nt, Homo sapiens
  misc_RNA (1)...(19): siRNA sense strand
ggaaggagcucucgaccua

SEQ ID NO: 1036370 - RNA, 19 nt, Homo sapiens
  misc_RNA (1)...(19): siRNA sense strand
gacacgaucugcauucuca

SEQ ID NO: 1036371 - RNA, 19 nt, Homo sapiens
  misc_RNA (1)...(19): siRNA sense strand
gcagagaaguccguucaca

SEQ ID NO: 1036372 - RNA, 19 nt, Homo sapiens
  misc_RNA (1)...(19): siRNA sense strand
ccauuucucuccucuacaa

SEQ ID NO: 1036373 - RNA, 19 nt, Homo sapiens
  misc_RNA (1)...(19): siRNA sense strand
caacagcagacauccauca

SEQ ID NO: 1036374 - RNA, 19 nt, Homo sapiens
  misc_RNA (1)...(19): siRNA sense strand
ggagagacacgaucugcau

SEQ ID NO: 1036375 - RNA, 19 nt, Homo sapiens
  misc_RNA (1)...(19): siRNA sense strand
gggcugccuugccaucaga

SEQ ID NO: 1036376 - RNA, 19 nt, Homo sapiens
  misc_RNA (1)...(19): siRNA sense strand
gagagacacgaucugcauu

SEQ ID NO: 1036377 - RNA, 19 nt, Homo sapiens
  misc_RNA (1)...(19): siRNA sense strand
auucucagcuucccacuuc

SEQ ID NO: 1036378 - RNA, 19 nt, Homo sapiens
  misc_RNA (1)...(19): siRNA sense strand
gagacacgaucugcauucu

SEQ ID NO: 1036379 - RNA, 19 nt, Homo sapiens
  misc_RNA (1)...(19): siRNA sense strand
gaagaggcaacagcagaca

SEQ ID NO: 1036380 - RNA, 19 nt, Homo sapiens
  misc_RNA (1)...(19): siRNA sense strand
ggcaacagcagacauccau

SEQ ID NO: 1036381 - RNA, 19 nt, Homo sapiens
  misc_RNA (1)...(19): siRNA sense strand
cgaucugcauucucagcuu

SEQ ID NO: 1036382 - RNA, 19 nt, Homo sapiens
  misc_RNA (1)...(19): siRNA sense strand
uuucucuccucuacaauca

SEQ ID NO: 1036383 - RNA, 19 nt, Homo sapiens
  misc_RNA (1)...(19): siRNA sense strand
caccuuagcugggcuuucc

SEQ ID NO: 1036384 - RNA, 19 nt, Homo sapiens
  misc_RNA (1)...(19): siRNA sense strand
ucauggagcuuccuguaug

SEQ ID NO: 1036385 - RNA, 19 nt, Homo sapiens
  misc_RNA (1)...(19): siRNA sense strand
ggagugugugugaugauga

SEQ ID NO: 1036386 - RNA, 19 nt, Homo sapiens
  misc_RNA (1)...(19): siRNA sense strand
gagugugugugaugaugag

SEQ ID NO: 1036387 - RNA, 19 nt, Homo sapiens
  misc_RNA (1)...(19): siRNA sense strand
gaagaugacuugcuauuua

SEQ ID NO: 1036388 - RNA, 19 nt, Homo sapiens
  misc_RNA (1)...(19): siRNA sense strand
gaacaacaauucccaaaug

SEQ ID NO: 1036389 - RNA, 19 nt, Homo sapiens
  misc_RNA (1)...(19): siRNA sense strand
ccagauaucucucaccuua

SEQ ID NO: 1036390 - RNA, 19 nt, Homo sapiens
  misc_RNA (1)...(19): siRNA sense strand
gaaauucucucuucagaug

SEQ ID NO: 1036391 - RNA, 19 nt, Homo sapiens
  misc_RNA (1)...(19): siRNA sense strand
gcaauuaucuuaacaaguc

SEQ ID NO: 1036392 - RNA, 19 nt, Homo sapiens
  misc_RNA (1)...(19): siRNA sense strand
ggaguaguguuccugauaa

SEQ ID NO: 1036393 - RNA, 19 nt, Homo sapiens
  misc_RNA (1)...(19): siRNA sense strand
guagaacgauuucagaaug

SEQ ID NO: 1036394 - RNA, 19 nt, Homo sapiens
  misc_RNA (1)...(19): siRNA sense strand
gccaugacaucaacucuuu

SEQ ID NO: 1036395 - RNA, 19 nt, Homo sapiens
  misc_RNA (1)...(19): siRNA sense strand
agauaucucucaccuuaua

SEQ ID NO: 1036396 - RNA, 19 nt, Homo sapiens
  misc_RNA (1)...(19): siRNA sense strand
gguaaagucuccaaaugug

SEQ ID NO: 1036397 - RNA, 19 nt, Homo sapiens
  misc_RNA (1)...(19): siRNA sense strand
ggaacccaaucuaucuaua

SEQ ID NO: 1036398 - RNA, 19 nt, Homo sapiens
  misc_RNA (1)...(19): siRNA sense strand
ucaagagaguguuuggaua

SEQ ID NO: 1036399 - RNA, 19 nt, Homo sapiens
  misc_RNA (1)...(19): siRNA sense strand
ucccaaagcugccuaagaa

SEQ ID NO: 1036400 - RNA, 19 nt, Homo sapiens
  misc_RNA (1)...(19): siRNA sense strand
caguggagcucaauacuau

SEQ ID NO: 1036401 - RNA, 19 nt, Homo sapiens
  misc_RNA (1)...(19): siRNA sense strand
gggaaauucucucuucaga

SEQ ID NO: 1036402 - RNA, 19 nt, Homo sapiens
  misc_RNA (1)...(19): siRNA sense strand
cagcugccuuugcuauuua

SEQ ID NO: 1036403 - RNA, 19 nt, Homo sapiens
  misc_RNA (1)...(19): siRNA sense strand
gcaaccuucugauuucuau

SEQ ID NO: 1036404 - RNA, 19 nt, Homo sapiens
  misc_RNA (1)...(19): siRNA sense strand
guuaacauuuccuaucuga

SEQ ID NO: 1036405 - RNA, 19 nt, Homo sapiens
  misc_RNA (1)...(19): siRNA sense strand
ccagggaaauucucucuuc

SEQ ID NO: 1036406 - RNA, 19 nt, Homo sapiens
  misc_RNA (1)...(19): siRNA sense strand
uaaaucaucgagaccaaua

SEQ ID NO: 1036407 - RNA, 19 nt, Homo sapiens
  misc_RNA (1)...(19): siRNA sense strand
aaauacagcucaagagagu

SEQ ID NO: 1036408 - RNA, 19 nt, Homo sapiens
  misc_RNA (1)...(19): siRNA sense strand
uaucauuggugcaggaauu

SEQ ID NO: 1036409 - RNA, 19 nt, Homo sapiens
  misc_RNA (1)...(19): siRNA sense strand
gagaagaugacuugcuauu

SEQ ID NO: 1036410 - RNA, 19 nt, Homo sapiens
  misc_RNA (1)...(19): siRNA sense strand
caagagaguguuuggauau

SEQ ID NO: 1036411 - RNA, 19 nt, Homo sapiens
  misc_RNA (1)...(19): siRNA sense strand
gcaguggagcucaauacua

SEQ ID NO: 1036412 - RNA, 19 nt, Homo sapiens
  misc_RNA (1)...(19): siRNA sense strand
ccagcugccuuugcuauuu

SEQ ID NO: 1036413 - RNA, 19 nt, Homo sapiens
  misc_RNA (1)...(19): siRNA sense strand
gaagaagcccagaacaaca

SEQ ID NO: 1036414 - RNA, 19 nt, Homo sapiens
  misc_RNA (1)...(19): siRNA sense strand
ucugaugacuguaguuuau

SEQ ID NO: 1036415 - RNA, 19 nt, Homo sapiens
  misc_RNA (1)...(19): siRNA sense strand
caaagcugccuaagaaaug

SEQ ID NO: 1036416 - RNA, 19 nt, Homo sapiens
  misc_RNA (1)...(19): siRNA sense strand
gggcaugcuuuacacuuau

SEQ ID NO: 1036417 - RNA, 19 nt, Homo sapiens
  misc_RNA (1)...(19): siRNA sense strand
gacgugggcuugguuguga

SEQ ID NO: 1036418 - RNA, 19 nt, Homo sapiens
  misc_RNA (1)...(19): siRNA sense strand
ggagaauguagaacgauuu

SEQ ID NO: 1036419 - RNA, 19 nt, Homo sapiens
  misc_RNA (1)...(19): siRNA sense strand
uugagaagaugacuugcua

SEQ ID NO: 1036420 - RNA, 19 nt, Homo sapiens
  misc_RNA (1)...(19): siRNA sense strand
gaaaauacagcucaagaga

SEQ ID NO: 1036421 - RNA, 19 nt, Homo sapiens
  misc_RNA (1)...(19): siRNA sense strand
ugggaucccuugcaauuau

SEQ ID NO: 1036422 - RNA, 19 nt, Homo sapiens
  misc_RNA (1)...(19): siRNA sense strand
gcuacuacuugucacuuug

SEQ ID NO: 1036423 - RNA, 19 nt, Homo sapiens
  misc_RNA (1)...(19): siRNA sense strand
caagccaucuuccaaggau

SEQ ID NO: 1036424 - RNA, 19 nt, Homo sapiens
  misc_RNA (1)...(19): siRNA sense strand
ggcaugcuuuacacuuaua

SEQ ID NO: 1036425 - RNA, 19 nt, Homo sapiens
  misc_RNA (1)...(19): siRNA sense strand
uuagcaaccuucugauuuc

SEQ ID NO: 1036426 - RNA, 19 nt, Homo sapiens
  misc_RNA (1)...(19): siRNA sense strand
ugacuuggcuucagauagc

SEQ ID NO: 1036427 - RNA, 19 nt, Homo sapiens
  misc_RNA (1)...(19): siRNA sense strand
gagaguguuuggauauugg

SEQ ID NO: 1036428 - RNA, 19 nt, Homo sapiens
  misc_RNA (1)...(19): siRNA sense strand
ucucagcggauuacuauuu

SEQ ID NO: 1036429 - RNA, 19 nt, Homo sapiens
  misc_RNA (1)...(19): siRNA sense strand
gacuguaguuuauuuacug

SEQ ID NO: 1036430 - RNA, 19 nt, Homo sapiens
  misc_RNA (1)...(19): siRNA sense strand
ccaaagcugccuaagaaau

SEQ ID NO: 1036431 - RNA, 19 nt, Homo sapiens
  misc_RNA (1)...(19): siRNA sense strand
augcugaacuuccagauau

SEQ ID NO: 1036432 - RNA, 19 nt, Homo sapiens
  misc_RNA (1)...(19): siRNA sense strand
gaugcugaacuuccagaua

SEQ ID NO: 1036433 - RNA, 19 nt, Homo sapiens
  misc_RNA (1)...(19): siRNA sense strand
aguauaagcuucccaugca

SEQ ID NO: 1036434 - RNA, 19 nt, Homo sapiens
  misc_RNA (1)...(19): siRNA sense strand
gaacccaaucuaucuauac

SEQ ID NO: 1036435 - RNA, 19 nt, Homo sapiens
  misc_RNA (1)...(19): siRNA sense strand
aaaggagaauguagaacga

SEQ ID NO: 1036436 - RNA, 19 nt, Homo sapiens
  misc_RNA (1)...(19): siRNA sense strand
guccauacuuagcuucauu

SEQ ID NO: 1036437 - RNA, 19 nt, Homo sapiens
  misc_RNA (1)...(19): siRNA sense strand
cagcugcucugucccaaag

SEQ ID NO: 1036438 - RNA, 19 nt, Homo sapiens
  misc_RNA (1)...(19): siRNA sense strand
aaauaagauuggcuugguu

SEQ ID NO: 1036439 - RNA, 19 nt, Homo sapiens
  misc_RNA (1)...(19): siRNA sense strand
guucucagcggauuacuau

SEQ ID NO: 1036440 - RNA, 19 nt, Homo sapiens
  misc_RNA (1)...(19): siRNA sense strand
uagucacucuucuccauuu

SEQ ID NO: 1036441 - RNA, 19 nt, Homo sapiens
  misc_RNA (1)...(19): siRNA sense strand
caacaauucccaaaugcau

SEQ ID NO: 1036442 - RNA, 19 nt, Homo sapiens
  misc_RNA (1)...(19): siRNA sense strand
gcagagauaaguauaagcu

SEQ ID NO: 1036443 - RNA, 19 nt, Homo sapiens
  misc_RNA (1)...(19): siRNA sense strand
gauuaugccuuuugcuauu

SEQ ID NO: 1036444 - RNA, 19 nt, Homo sapiens
  misc_RNA (1)...(19): siRNA sense strand
augcauauuuacugcguua

SEQ ID NO: 1036445 - RNA, 19 nt, Homo sapiens
  misc_RNA (1)...(19): siRNA sense strand
aaucaucgagaccaauaua

SEQ ID NO: 1036446 - RNA, 19 nt, Homo sapiens
  misc_RNA (1)...(19): siRNA sense strand
guuguggauuguaggaauu

SEQ ID NO: 1036447 - RNA, 19 nt, Homo sapiens
  misc_RNA (1)...(19): siRNA sense strand
ggggcaugcuuuacacuua

SEQ ID NO: 1036448 - RNA, 19 nt, Homo sapiens
  misc_RNA (1)...(19): siRNA sense strand
ggcauacucuugcaugaac

SEQ ID NO: 1036449 - RNA, 19 nt, Homo sapiens
  misc_RNA (1)...(19): siRNA sense strand
gagaauguagaacgauuuc

SEQ ID NO: 1036450 - RNA, 19 nt, Homo sapiens
  misc_RNA (1)...(19): siRNA sense strand
gguaguugcuggccaagcu

SEQ ID NO: 1036451 - RNA, 19 nt, Homo sapiens
  misc_RNA (1)...(19): siRNA sense strand
gguuugagaagaugacuug

SEQ ID NO: 1036452 - RNA, 19 nt, Homo sapiens
  misc_RNA (1)...(19): siRNA sense strand
agaccaauauaucuugcaa

SEQ ID NO: 1036453 - RNA, 19 nt, Homo sapiens
  misc_RNA (1)...(19): siRNA sense strand
agagaguguuuggauauug

SEQ ID NO: 1036454 - RNA, 19 nt, Homo sapiens
  misc_RNA (1)...(19): siRNA sense strand
uaacauuuccuaucugacu

SEQ ID NO: 1036455 - RNA, 19 nt, Homo sapiens
  misc_RNA (1)...(19): siRNA sense strand
ggauagaggggagaaaaua

SEQ ID NO: 1036456 - RNA, 19 nt, Homo sapiens
  misc_RNA (1)...(19): siRNA sense strand
agaagaugacuugcuauuu

SEQ ID NO: 1036457 - RNA, 19 nt, Homo sapiens
  misc_RNA (1)...(19): siRNA sense strand
cccaaucuaucuauaccuu

SEQ ID NO: 1036458 - RNA, 19 nt, Homo sapiens
  misc_RNA (1)...(19): siRNA sense strand
ucacucuucuccauuuaca

SEQ ID NO: 1036459 - RNA, 19 nt, Homo sapiens
  misc_RNA (1)...(19): siRNA sense strand
ggaaauucucucuucagau

SEQ ID NO: 1036460 - RNA, 19 nt, Homo sapiens
  misc_RNA (1)...(19): siRNA sense strand
uggaguaguguuccugaua

SEQ ID NO: 1036461 - RNA, 19 nt, Homo sapiens
  misc_RNA (1)...(19): siRNA sense strand
ugaugugucugaggaauag

SEQ ID NO: 1036462 - RNA, 19 nt, Homo sapiens
  misc_RNA (1)...(19): siRNA sense strand
uaagauuggcuugguuuga

SEQ ID NO: 1036463 - RNA, 19 nt, Homo sapiens
  misc_RNA (1)...(19): siRNA sense strand
ccaggaacccaaucuaucu

SEQ ID NO: 1036464 - RNA, 19 nt, Homo sapiens
  misc_RNA (1)...(19): siRNA sense strand
cagcugugcuacuacuugu

SEQ ID NO: 1036465 - RNA, 19 nt, Homo sapiens
  misc_RNA (1)...(19): siRNA sense strand
uuuagcaaccuucugauuu

SEQ ID NO: 1036466 - RNA, 19 nt, Homo sapiens
  misc_RNA (1)...(19): siRNA sense strand
cagggaaauucucucuuca

SEQ ID NO: 1036467 - RNA, 19 nt, Homo sapiens
  misc_RNA (1)...(19): siRNA sense strand
cagaacaacaauucccaaa

SEQ ID NO: 1036468 - RNA, 19 nt, Homo sapiens
  misc_RNA (1)...(19): siRNA sense strand
gaauguagaacgauuucag

SEQ ID NO: 1036469 - RNA, 19 nt, Homo sapiens
  misc_RNA (1)...(19): siRNA sense strand
ugcuauuucuaccucauua

SEQ ID NO: 1036470 - RNA, 19 nt, Homo sapiens
  misc_RNA (1)...(19): siRNA sense strand
aagagaguguuuggauauu

SEQ ID NO: 1036471 - RNA, 19 nt, Homo sapiens
  misc_RNA (1)...(19): siRNA sense strand
ccaaucuaucuauaccuua

SEQ ID NO: 1036472 - RNA, 19 nt, Homo sapiens
  misc_RNA (1)...(19): siRNA sense strand
ggaauacuaaggcggagau

SEQ ID NO: 1036473 - RNA, 19 nt, Homo sapiens
  misc_RNA (1)...(19): siRNA sense strand
aauagucacucuucuccau

SEQ ID NO: 1036474 - RNA, 19 nt, Homo sapiens
  misc_RNA (1)...(19): siRNA sense strand
aagaugacuugcuauuuac

SEQ ID NO: 1036475 - RNA, 19 nt, Homo sapiens
  misc_RNA (1)...(19): siRNA sense strand
gaguaguguuccugauaag

SEQ ID NO: 1036476 - RNA, 19 nt, Homo sapiens
  misc_RNA (1)...(19): siRNA sense strand
aauaagauuggcuugguuu

SEQ ID NO: 1036477 - RNA, 19 nt, Homo sapiens
  misc_RNA (1)...(19): siRNA sense strand
cuacgugcuucuguuaguu

SEQ ID NO: 1036478 - RNA, 19 nt, Homo sapiens
  misc_RNA (1)...(19): siRNA sense strand
ugucuacgugcuucuguua

SEQ ID NO: 1036479 - RNA, 19 nt, Homo sapiens
  misc_RNA (1)...(19): siRNA sense strand
gguucauuauggucuauau

SEQ ID NO: 1036480 - RNA, 19 nt, Homo sapiens
  misc_RNA (1)...(19): siRNA sense strand
agucacucuucuccauuua

SEQ ID NO: 1036481 - RNA, 19 nt, Homo sapiens
  misc_RNA (1)...(19): siRNA sense strand
guucugacacccagggaaa

SEQ ID NO: 1036482 - RNA, 19 nt, Homo sapiens
  misc_RNA (1)...(19): siRNA sense strand
gagcugaagaagcccagaa

SEQ ID NO: 1036483 - RNA, 19 nt, Homo sapiens
  misc_RNA (1)...(19): siRNA sense strand
aggagaauguagaacgauu

SEQ ID NO: 1036484 - RNA, 19 nt, Homo sapiens
  misc_RNA (1)...(19): siRNA sense strand
uagcaacaauagucaucga

SEQ ID NO: 1036485 - RNA, 19 nt, Homo sapiens
  misc_RNA (1)...(19): siRNA sense strand
uggcuugguuugagaagau

SEQ ID NO: 1036486 - RNA, 19 nt, Homo sapiens
  misc_RNA (1)...(19): siRNA sense strand
gugcuucuguuaguucuca

SEQ ID NO: 1036487 - RNA, 19 nt, Homo sapiens
  misc_RNA (1)...(19): siRNA sense strand
ggagauaccuuuccagaug

SEQ ID NO: 1036488 - RNA, 19 nt, Homo sapiens
  misc_RNA (1)...(19): siRNA sense strand
ggccauugcuccagaugua

SEQ ID NO: 1036489 - RNA, 19 nt, Homo sapiens
  misc_RNA (1)...(19): siRNA sense strand
ccucggaccuuuacgcuuu

SEQ ID NO: 1036490 - RNA, 19 nt, Homo sapiens
  misc_RNA (1)...(19): siRNA sense strand
gaacggugcugcucugacu

SEQ ID NO: 1036491 - RNA, 19 nt, Homo sapiens
  misc_RNA (1)...(19): siRNA sense strand
gaugucagcuccaaacucu

SEQ ID NO: 1036492 - RNA, 19 nt, Homo sapiens
  misc_RNA (1)...(19): siRNA sense strand
uggcugagcuggagcagaa

SEQ ID NO: 1036493 - RNA, 19 nt, Homo sapiens
  misc_RNA (1)...(19): siRNA sense strand
gcacgucuauucaggaaac

SEQ ID NO: 1036494 - RNA, 19 nt, Homo sapiens
  misc_RNA (1)...(19): siRNA sense strand
ggcgcagggucauaaauuu

SEQ ID NO: 1036495 - RNA, 19 nt, Homo sapiens
  misc_RNA (1)...(19): siRNA sense strand
gagauaccuuuccagaugu

SEQ ID NO: 1036496 - RNA, 19 nt, Homo sapiens
  misc_RNA (1)...(19): siRNA sense strand
ccucaaugcuacagaguug

SEQ ID NO: 1036497 - RNA, 19 nt, Homo sapiens
  misc_RNA (1)...(19): siRNA sense strand
ugucaccacugcagauauu

SEQ ID NO: 1036498 - RNA, 19 nt, Homo sapiens
  misc_RNA (1)...(19): siRNA sense strand
gagaagggaaggaauaugg

SEQ ID NO: 1036499 - RNA, 19 nt, Homo sapiens
  misc_RNA (1)...(19): siRNA sense strand
ccaaugcuaccaaggaauu

SEQ ID NO: 1036500 - RNA, 19 nt, Homo sapiens
  misc_RNA (1)...(19): siRNA sense strand
gggcgcagggucauaaauu

SEQ ID NO: 1036501 - RNA, 19 nt, Homo sapiens
  misc_RNA (1)...(19): siRNA sense strand
ggauggcucuccagauguc

SEQ ID NO: 1036502 - RNA, 19 nt, Homo sapiens
  misc_RNA (1)...(19): siRNA sense strand
cccaaggcaucucuguuaa

SEQ ID NO: 1036503 - RNA, 19 nt, Homo sapiens
  misc_RNA (1)...(19): siRNA sense strand
uuggaucccugcccacuaa

SEQ ID NO: 1036504 - RNA, 19 nt, Homo sapiens
  misc_RNA (1)...(19): siRNA sense strand
gggaacccuuguccuucua

SEQ ID NO: 1036505 - RNA, 19 nt, Homo sapiens
  misc_RNA (1)...(19): siRNA sense strand
caagggcgcagggucauaa

SEQ ID NO: 1036506 - RNA, 19 nt, Homo sapiens
  misc_RNA (1)...(19): siRNA sense strand
acaaaaggcuguccagaug

SEQ ID NO: 1036507 - RNA, 19 nt, Homo sapiens
  misc_RNA (1)...(19): siRNA sense strand
cuacucggauugcuacugu

SEQ ID NO: 1036508 - RNA, 19 nt, Homo sapiens
  misc_RNA (1)...(19): siRNA sense strand
gcucauggacucugucauc

SEQ ID NO: 1036509 - RNA, 19 nt, Homo sapiens
  misc_RNA (1)...(19): siRNA sense strand
ucauaaauuugcccuugga

SEQ ID NO: 1036510 - RNA, 19 nt, Homo sapiens
  misc_RNA (1)...(19): siRNA sense strand
agggauggcucuccagaug

SEQ ID NO: 1036511 - RNA, 19 nt, Homo sapiens
  misc_RNA (1)...(19): siRNA sense strand
ggucauccuuggagacuac

SEQ ID NO: 1036512 - RNA, 19 nt, Homo sapiens
  misc_RNA (1)...(19): siRNA sense strand
gaugucaccacugcagaua

SEQ ID NO: 1036513 - RNA, 19 nt, Homo sapiens
  misc_RNA (1)...(19): siRNA sense strand
gcgcagggucauaaauuug

SEQ ID NO: 1036514 - RNA, 19 nt, Homo sapiens
  misc_RNA (1)...(19): siRNA sense strand
acaaucgccucuaccacuu

SEQ ID NO: 1036515 - RNA, 19 nt, Homo sapiens
  misc_RNA (1)...(19): siRNA sense strand
ggagacuggagauaccuuu

SEQ ID NO: 1036516 - RNA, 19 nt, Homo sapiens
  misc_RNA (1)...(19): siRNA sense strand
gcaagggcgcagggucaua

SEQ ID NO: 1036517 - RNA, 19 nt, Homo sapiens
  misc_RNA (1)...(19): siRNA sense strand
caguacaccuccagcuuca

SEQ ID NO: 1036518 - RNA, 19 nt, Homo sapiens
  misc_RNA (1)...(19): siRNA sense strand
cggcacgucuauucaggaa

SEQ ID NO: 1036519 - RNA, 19 nt, Homo sapiens
  misc_RNA (1)...(19): siRNA sense strand
gcagucacccuggcuggaa

SEQ ID NO: 1036520 - RNA, 19 nt, Homo sapiens
  misc_RNA (1)...(19): siRNA sense strand
uacgagaagggaaggaaua

SEQ ID NO: 1036521 - RNA, 19 nt, Homo sapiens
  misc_RNA (1)...(19): siRNA sense strand
gaacccuuguccuucuaca

SEQ ID NO: 1036522 - RNA, 19 nt, Homo sapiens
  misc_RNA (1)...(19): siRNA sense strand
gccacuugcugagccagua

SEQ ID NO: 1036523 - RNA, 19 nt, Homo sapiens
  misc_RNA (1)...(19): siRNA sense strand
ggccaucccucagccacuu

SEQ ID NO: 1036524 - RNA, 19 nt, Homo sapiens
  misc_RNA (1)...(19): siRNA sense strand
agacaucggcuacgguuuc

SEQ ID NO: 1036525 - RNA, 19 nt, Homo sapiens
  misc_RNA (1)...(19): siRNA sense strand
gcucggacggcuacgugua

SEQ ID NO: 1036526 - RNA, 19 nt, Homo sapiens
  misc_RNA (1)...(19): siRNA sense strand
uguuaggccugaccaagga

SEQ ID NO: 1036527 - RNA, 19 nt, Homo sapiens
  misc_RNA (1)...(19): siRNA sense strand
ugccaaugcuaccaaggaa

SEQ ID NO: 1036528 - RNA, 19 nt, Homo sapiens
  misc_RNA (1)...(19): siRNA sense strand
caaggcaucucuguuaacc

SEQ ID NO: 1036529 - RNA, 19 nt, Homo sapiens
  misc_RNA (1)...(19): siRNA sense strand
cuaccaaggaauucacuga

SEQ ID NO: 1036530 - RNA, 19 nt, Homo sapiens
  misc_RNA (1)...(19): siRNA sense strand
guacaccuccagcuucagu

SEQ ID NO: 1036531 - RNA, 19 nt, Homo sapiens
  misc_RNA (1)...(19): siRNA sense strand
acuaagcccagagcuguua

SEQ ID NO: 1036532 - RNA, 19 nt, Homo sapiens
  misc_RNA (1)...(19): siRNA sense strand
cagucacccuggcuggaaa

SEQ ID NO: 1036533 - RNA, 19 nt, Homo sapiens
  misc_RNA (1)...(19): siRNA sense strand
guacgagaagggaaggaau

SEQ ID NO: 1036534 - RNA, 19 nt, Homo sapiens
  misc_RNA (1)...(19): siRNA sense strand
ccagccagccuguccuuuc

SEQ ID NO: 1036535 - RNA, 19 nt, Homo sapiens
  misc_RNA (1)...(19): siRNA sense strand
gccaguacaccuccagcuu

SEQ ID NO: 1036536 - RNA, 19 nt, Homo sapiens
  misc_RNA (1)...(19): siRNA sense strand
ucccugauccugugacuuc

SEQ ID NO: 1036537 - RNA, 19 nt, Homo sapiens
  misc_RNA (1)...(19): siRNA sense strand
gcaaugagcgcuuccagua

SEQ ID NO: 1036538 - RNA, 19 nt, Homo sapiens
  misc_RNA (1)...(19): siRNA sense strand
ggcaaggacuucaacauga

SEQ ID NO: 1036539 - RNA, 19 nt, Homo sapiens
  misc_RNA (1)...(19): siRNA sense strand
uggcaaagcuuucaagaag

SEQ ID NO: 1036540 - RNA, 19 nt, Homo sapiens
  misc_RNA (1)...(19): siRNA sense strand
gcugguaccuggagaaaca

SEQ ID NO: 1036541 - RNA, 19 nt, Homo sapiens
  misc_RNA (1)...(19): siRNA sense strand
gagaagccguucagaugug

SEQ ID NO: 1036542 - RNA, 19 nt, Homo sapiens
  misc_RNA (1)...(19): siRNA sense strand
gggagaagccguucagaug

SEQ ID NO: 1036543 - RNA, 19 nt, Homo sapiens
  misc_RNA (1)...(19): siRNA sense strand
cagcugcggucacacauga

SEQ ID NO: 1036544 - RNA, 19 nt, Homo sapiens
  misc_RNA (1)...(19): siRNA sense strand
guacuucgaugagcacaug

SEQ ID NO: 1036545 - RNA, 19 nt, Homo sapiens
  misc_RNA (1)...(19): siRNA sense strand
gagagaagccguacaucug

SEQ ID NO: 1036546 - RNA, 19 nt, Homo sapiens
  misc_RNA (1)...(19): siRNA sense strand
ggaugaacgccaacaacua

SEQ ID NO: 1036547 - RNA, 19 nt, Homo sapiens
  misc_RNA (1)...(19): siRNA sense strand
cagaagugcccacgaguuu

SEQ ID NO: 1036548 - RNA, 19 nt, Homo sapiens
  misc_RNA (1)...(19): siRNA sense strand
ggagaagccguucagaugu

SEQ ID NO: 1036549 - RNA, 19 nt, Homo sapiens
  misc_RNA (1)...(19): siRNA sense strand
gaugaacgccaacaacuag

SEQ ID NO: 1036550 - RNA, 19 nt, Homo sapiens
  misc_RNA (1)...(19): siRNA sense strand
gaugugagaacugcaauga

SEQ ID NO: 1036551 - RNA, 19 nt, Homo sapiens
  misc_RNA (1)...(19): siRNA sense strand
ggagagaagccguacaucu

SEQ ID NO: 1036552 - RNA, 19 nt, Homo sapiens
  misc_RNA (1)...(19): siRNA sense strand
cacaugagcauccacauug

SEQ ID NO: 1036553 - RNA, 19 nt, Homo sapiens
  misc_RNA (1)...(19): siRNA sense strand
ugacauguggcaaagcuuu

SEQ ID NO: 1036554 - RNA, 19 nt, Homo sapiens
  misc_RNA (1)...(19): siRNA sense strand
ccaugagcauaacaagauu

SEQ ID NO: 1036555 - RNA, 19 nt, Homo sapiens
  misc_RNA (1)...(19): siRNA sense strand
aaugagcgcuuccaguaca

SEQ ID NO: 1036556 - RNA, 19 nt, Homo sapiens
  misc_RNA (1)...(19): siRNA sense strand
caacauccagugugugaca

SEQ ID NO: 1036557 - RNA, 19 nt, Homo sapiens
  misc_RNA (1)...(19): siRNA sense strand
aggugaagcuggaggagaa

SEQ ID NO: 1036558 - RNA, 19 nt, Homo sapiens
  misc_RNA (1)...(19): siRNA sense strand
caugcgagaucugugagaa

SEQ ID NO: 1036559 - RNA, 19 nt, Homo sapiens
  misc_RNA (1)...(19): siRNA sense strand
gcacggcuacgcagagaag

SEQ ID NO: 1036560 - RNA, 19 nt, Homo sapiens
  misc_RNA (1)...(19): siRNA sense strand
cggcaaggacuucaacaug

SEQ ID NO: 1036561 - RNA, 19 nt, Homo sapiens
  misc_RNA (1)...(19): siRNA sense strand
cgagaucugugagaagaag

SEQ ID NO: 1036562 - RNA, 19 nt, Homo sapiens
  misc_RNA (1)...(19): siRNA sense strand
ccagaagugcccacgaguu

SEQ ID NO: 1036563 - RNA, 19 nt, Homo sapiens
  misc_RNA (1)...(19): siRNA sense strand
gcacaugaagacccacaca

SEQ ID NO: 1036564 - RNA, 19 nt, Homo sapiens
  misc_RNA (1)...(19): siRNA sense strand
acacaugagcauccacauu

SEQ ID NO: 1036565 - RNA, 19 nt, Homo sapiens
  misc_RNA (1)...(19): siRNA sense strand
caccauccaugccagaagu

SEQ ID NO: 1036566 - RNA, 19 nt, Homo sapiens
  misc_RNA (1)...(19): siRNA sense strand
ucaaggcccacaaggagaa

SEQ ID NO: 1036567 - RNA, 19 nt, Homo sapiens
  misc_RNA (1)...(19): siRNA sense strand
ugcgagaucugugagaaga

SEQ ID NO: 1036568 - RNA, 19 nt, Homo sapiens
  misc_RNA (1)...(19): siRNA sense strand
ggaggaugaacgccaacaa

SEQ ID NO: 1036569 - RNA, 19 nt, Homo sapiens
  misc_RNA (1)...(19): siRNA sense strand
gugcacggcuacgcagaga

SEQ ID NO: 1036570 - RNA, 19 nt, Homo sapiens
  misc_RNA (1)...(19): siRNA sense strand
agaagccguucagauguga

SEQ ID NO: 1036571 - RNA, 19 nt, Homo sapiens
  misc_RNA (1)...(19): siRNA sense strand
ugcgagaucuguggcaaga

SEQ ID NO: 1036572 - RNA, 19 nt, Homo sapiens
  misc_RNA (1)...(19): siRNA sense strand
guggcaaagcuuucaagaa

SEQ ID NO: 1036573 - RNA, 19 nt, Homo sapiens
  misc_RNA (1)...(19): siRNA sense strand
uccaugagcauaacaagau

SEQ ID NO: 1036574 - RNA, 19 nt, Homo sapiens
  misc_RNA (1)...(19): siRNA sense strand
cgcaacauccaguguguga

SEQ ID NO: 1036575 - RNA, 19 nt, Homo sapiens
  misc_RNA (1)...(19): siRNA sense strand
caggagagaagccguacau

SEQ ID NO: 1036576 - RNA, 19 nt, Homo sapiens
  misc_RNA (1)...(19): siRNA sense strand
ggucacacaugagcaucca

SEQ ID NO: 1036577 - RNA, 19 nt, Homo sapiens
  misc_RNA (1)...(19): siRNA sense strand
gaggaugaacgccaacaac

SEQ ID NO: 1036578 - RNA, 19 nt, Homo sapiens
  misc_RNA (1)...(19): siRNA sense strand
guaccuggagaaacacaug

SEQ ID NO: 1036579 - RNA, 19 nt, Homo sapiens
  misc_RNA (1)...(19): siRNA sense strand
gcuacgcagagaagaaguu

SEQ ID NO: 1036580 - RNA, 19 nt, Homo sapiens
  misc_RNA (1)...(19): siRNA sense strand
gcaguucaugugccaaugg

SEQ ID NO: 1036581 - RNA, 19 nt, Homo sapiens
  misc_RNA (1)...(19): siRNA sense strand
gaagugcccacgaguuuuc

SEQ ID NO: 1036582 - RNA, 19 nt, Homo sapiens
  misc_RNA (1)...(19): siRNA sense strand
gcauccacauuggccacaa

SEQ ID NO: 1036583 - RNA, 19 nt, Homo sapiens
  misc_RNA (1)...(19): siRNA sense strand
gagaagcagcaccauccau

SEQ ID NO: 1036584 - RNA, 19 nt, Homo sapiens
  misc_RNA (1)...(19): siRNA sense strand
ccauggcccacgugcguaa

SEQ ID NO: 1036585 - RNA, 19 nt, Homo sapiens
  misc_RNA (1)...(19): siRNA sense strand
gaagauguguggguuauaa

SEQ ID NO: 1036586 - RNA, 19 nt, Homo sapiens
  misc_RNA (1)...(19): siRNA sense strand
gaugguaucuucaauuaga

SEQ ID NO: 1036587 - RNA, 19 nt, Homo sapiens
  misc_RNA (1)...(19): siRNA sense strand
aaaggaagcugaagaugaa

SEQ ID NO: 1036588 - RNA, 19 nt, Homo sapiens
  misc_RNA (1)...(19): siRNA sense strand
gaaaagacaugguagauau

SEQ ID NO: 1036589 - RNA, 19 nt, Homo sapiens
  misc_RNA (1)...(19): siRNA sense strand
gauagaagccaaauucauu

SEQ ID NO: 1036590 - RNA, 19 nt, Homo sapiens
  misc_RNA (1)...(19): siRNA sense strand
gaaaucaguaugugaauga

SEQ ID NO: 1036591 - RNA, 19 nt, Homo sapiens
  misc_RNA (1)...(19): siRNA sense strand
gaaagaagcaauggugaaa

SEQ ID NO: 1036592 - RNA, 19 nt, Homo sapiens
  misc_RNA (1)...(19): siRNA sense strand
uggaagaacuugaauggaa

SEQ ID NO: 1036593 - RNA, 19 nt, Homo sapiens
  misc_RNA (1)...(19): siRNA sense strand
uauagaauguggagggaua

SEQ ID NO: 1036594 - RNA, 19 nt, Homo sapiens
  misc_RNA (1)...(19): siRNA sense strand
gaagaagauguguggguua

SEQ ID NO: 1036595 - RNA, 19 nt, Homo sapiens
  misc_RNA (1)...(19): siRNA sense strand
uaaaggaagcugaagauga

SEQ ID NO: 1036596 - RNA, 19 nt, Homo sapiens
  misc_RNA (1)...(19): siRNA sense strand
gaucaagcaucccaaugug

SEQ ID NO: 1036597 - RNA, 19 nt, Homo sapiens
  misc_RNA (1)...(19): siRNA sense strand
ggaaaucaguaugugaaug

SEQ ID NO: 1036598 - RNA, 19 nt, Homo sapiens
  misc_RNA (1)...(19): siRNA sense strand
auggaaagcucuuaagaaa

SEQ ID NO: 1036599 - RNA, 19 nt, Homo sapiens
  misc_RNA (1)...(19): siRNA sense strand
gagcaauacagacugauuu

SEQ ID NO: 1036600 - RNA, 19 nt, Homo sapiens
  misc_RNA (1)...(19): siRNA sense strand
gaagauacagaauggaaug

SEQ ID NO: 1036601 - RNA, 19 nt, Homo sapiens
  misc_RNA (1)...(19): siRNA sense strand
gaaacacuucuauucauga

SEQ ID NO: 1036602 - RNA, 19 nt, Homo sapiens
  misc_RNA (1)...(19): siRNA sense strand
caaugaagauacagaaugg

SEQ ID NO: 1036603 - RNA, 19 nt, Homo sapiens
  misc_RNA (1)...(19): siRNA sense strand
gaauggaaagcucuuaaga

SEQ ID NO: 1036604 - RNA, 19 nt, Homo sapiens
  misc_RNA (1)...(19): siRNA sense strand
gaaguuggagcaauacaga

SEQ ID NO: 1036605 - RNA, 19 nt, Homo sapiens
  misc_RNA (1)...(19): siRNA sense strand
gaagcuagcagaaguugga

SEQ ID NO: 1036606 - RNA, 19 nt, Homo sapiens
  misc_RNA (1)...(19): siRNA sense strand
uuuaagagauuucggcauu

SEQ ID NO: 1036607 - RNA, 19 nt, Homo sapiens
  misc_RNA (1)...(19): siRNA sense strand
ggaagcugaagaugaauuu

SEQ ID NO: 1036608 - RNA, 19 nt, Homo sapiens
  misc_RNA (1)...(19): siRNA sense strand
uuaaagccaucgugaauag

SEQ ID NO: 1036609 - RNA, 19 nt, Homo sapiens
  misc_RNA (1)...(19): siRNA sense strand
ugaaugaagucacaaaugc

SEQ ID NO: 1036610 - RNA, 19 nt, Homo sapiens
  misc_RNA (1)...(19): siRNA sense strand
gaagauaugcaggcuguug

SEQ ID NO: 1036611 - RNA, 19 nt, Homo sapiens
  misc_RNA (1)...(19): siRNA sense strand
caauguguuuguugguuaa

SEQ ID NO: 1036612 - RNA, 19 nt, Homo sapiens
  misc_RNA (1)...(19): siRNA sense strand
ucagauagaagccaaauuc

SEQ ID NO: 1036613 - RNA, 19 nt, Homo sapiens
  misc_RNA (1)...(19): siRNA sense strand
gaagaaaaccccagaaaag

SEQ ID NO: 1036614 - RNA, 19 nt, Homo sapiens
  misc_RNA (1)...(19): siRNA sense strand
caacagugauaaugaacca

SEQ ID NO: 1036615 - RNA, 19 nt, Homo sapiens
  misc_RNA (1)...(19): siRNA sense strand
caugguagauaugauggua

SEQ ID NO: 1036616 - RNA, 19 nt, Homo sapiens
  misc_RNA (1)...(19): siRNA sense strand
gauacagaauggaaugaca

SEQ ID NO: 1036617 - RNA, 19 nt, Homo sapiens
  misc_RNA (1)...(19): siRNA sense strand
gauaaugaaccaaauagag

SEQ ID NO: 1036618 - RNA, 19 nt, Homo sapiens
  misc_RNA (1)...(19): siRNA sense strand
agucacaaaugcagaagaa

SEQ ID NO: 1036619 - RNA, 19 nt, Homo sapiens
  misc_RNA (1)...(19): siRNA sense strand
ucacaaaugcagaagaaga

SEQ ID NO: 1036620 - RNA, 19 nt, Homo sapiens
  misc_RNA (1)...(19): siRNA sense strand
ugaaccaaauagagagaaa

SEQ ID NO: 1036621 - RNA, 19 nt, Homo sapiens
  misc_RNA (1)...(19): siRNA sense strand
agcagaaguuggagcaaua

SEQ ID NO: 1036622 - RNA, 19 nt, Homo sapiens
  misc_RNA (1)...(19): siRNA sense strand
gaauguggagggauaaauc

SEQ ID NO: 1036623 - RNA, 19 nt, Homo sapiens
  misc_RNA (1)...(19): siRNA sense strand
acacuaccaugacaauugu

SEQ ID NO: 1036624 - RNA, 19 nt, Homo sapiens
  misc_RNA (1)...(19): siRNA sense strand
ccaaugaagauacagaaug

SEQ ID NO: 1036625 - RNA, 19 nt, Homo sapiens
  misc_RNA (1)...(19): siRNA sense strand
aauacagacugauuuggaa

SEQ ID NO: 1036626 - RNA, 19 nt, Homo sapiens
  misc_RNA (1)...(19): siRNA sense strand
caauacagacugauuugga

SEQ ID NO: 1036627 - RNA, 19 nt, Homo sapiens
  misc_RNA (1)...(19): siRNA sense strand
aagaagcgguuacaggaau

SEQ ID NO: 1036628 - RNA, 19 nt, Homo sapiens
  misc_RNA (1)...(19): siRNA sense strand
gcuccaacagugauaauga

SEQ ID NO: 1036629 - RNA, 19 nt, Homo sapiens
  misc_RNA (1)...(19): siRNA sense strand
ggagcaauacagacugauu

SEQ ID NO: 1036630 - RNA, 19 nt, Homo sapiens
  misc_RNA (1)...(19): siRNA sense strand
gaagcugaagaugaauuua

SEQ ID NO: 1036631 - RNA, 19 nt, Homo sapiens
  misc_RNA (1)...(19): siRNA sense strand
ggaagaaaaccccagaaaa

SEQ ID NO: 1036632 - RNA, 19 nt, Homo sapiens
  misc_RNA (1)...(19): siRNA sense strand
guuaaagccaucgugaaua

SEQ ID NO: 1036633 - RNA, 19 nt, Homo sapiens
  misc_RNA (1)...(19): siRNA sense strand
gcuaaaggaagcugaagau

SEQ ID NO: 1036634 - RNA, 19 nt, Homo sapiens
  misc_RNA (1)...(19): siRNA sense strand
gaagaaaugguuuuacguu

SEQ ID NO: 1036635 - RNA, 19 nt, Homo sapiens
  misc_RNA (1)...(19): siRNA sense strand
caugacaauuguuuaccaa

SEQ ID NO: 1036636 - RNA, 19 nt, Homo sapiens
  misc_RNA (1)...(19): siRNA sense strand
gaaaccauuugaaaagaug

SEQ ID NO: 1036637 - RNA, 19 nt, Homo sapiens
  misc_RNA (1)...(19): siRNA sense strand
guauucaacacuaccauga

SEQ ID NO: 1036638 - RNA, 19 nt, Homo sapiens
  misc_RNA (1)...(19): siRNA sense strand
uaaccagcaucuuagucuu

SEQ ID NO: 1036639 - RNA, 19 nt, Homo sapiens
  misc_RNA (1)...(19): siRNA sense strand
aagaagauguguggguuau

SEQ ID NO: 1036640 - RNA, 19 nt, Homo sapiens
  misc_RNA (1)...(19): siRNA sense strand
aauggaagcuagcagaagu

SEQ ID NO: 1036641 - RNA, 19 nt, Homo sapiens
  misc_RNA (1)...(19): siRNA sense strand
gaaaugguuuuacguuuac

SEQ ID NO: 1036642 - RNA, 19 nt, Homo sapiens
  misc_RNA (1)...(19): siRNA sense strand
ucaagcaucccaauguguu

SEQ ID NO: 1036643 - RNA, 19 nt, Homo sapiens
  misc_RNA (1)...(19): siRNA sense strand
uaagagauuucggcauucu

SEQ ID NO: 1036644 - RNA, 19 nt, Homo sapiens
  misc_RNA (1)...(19): siRNA sense strand
caucuuagucuucuagcaa

SEQ ID NO: 1036645 - RNA, 19 nt, Homo sapiens
  misc_RNA (1)...(19): siRNA sense strand
uagcagaaguuggagcaau

SEQ ID NO: 1036646 - RNA, 19 nt, Homo sapiens
  misc_RNA (1)...(19): siRNA sense strand
ggaauggaaagcucuuaag

SEQ ID NO: 1036647 - RNA, 19 nt, Homo sapiens
  misc_RNA (1)...(19): siRNA sense strand
gauguguggguuauaauuc

SEQ ID NO: 1036648 - RNA, 19 nt, Homo sapiens
  misc_RNA (1)...(19): siRNA sense strand
gaugacucuugcacagcua

SEQ ID NO: 1036649 - RNA, 19 nt, Homo sapiens
  misc_RNA (1)...(19): siRNA sense strand
gaaugaagucacaaaugca

SEQ ID NO: 1036650 - RNA, 19 nt, Homo sapiens
  misc_RNA (1)...(19): siRNA sense strand
gaaccaaauagagagaaau

SEQ ID NO: 1036651 - RNA, 19 nt, Homo sapiens
  misc_RNA (1)...(19): siRNA sense strand
aaagacaugguagauauga

SEQ ID NO: 1036652 - RNA, 19 nt, Homo sapiens
  misc_RNA (1)...(19): siRNA sense strand
gcuggaagaacuugaaugg

SEQ ID NO: 1036653 - RNA, 19 nt, Homo sapiens
  misc_RNA (1)...(19): siRNA sense strand
aauggaaagcucuuaagaa

SEQ ID NO: 1036654 - RNA, 19 nt, Homo sapiens
  misc_RNA (1)...(19): siRNA sense strand
gauagcuccaacagugaua

SEQ ID NO: 1036655 - RNA, 19 nt, Homo sapiens
  misc_RNA (1)...(19): siRNA sense strand
agaaagaagcaauggugaa

SEQ ID NO: 1036656 - RNA, 19 nt, Homo sapiens
  misc_RNA (1)...(19): siRNA sense strand
caagcaucccaauguguuu

SEQ ID NO: 1036657 - RNA, 19 nt, Homo sapiens
  misc_RNA (1)...(19): siRNA sense strand
gguuuuacguuuacagaaa

SEQ ID NO: 1036658 - RNA, 19 nt, Homo sapiens
  misc_RNA (1)...(19): siRNA sense strand
cuccaacagugauaaugaa

SEQ ID NO: 1036659 - RNA, 19 nt, Homo sapiens
  misc_RNA (1)...(19): siRNA sense strand
guggagggauaaaucucaa

SEQ ID NO: 1036660 - RNA, 19 nt, Homo sapiens
  misc_RNA (1)...(19): siRNA sense strand
gauaugcaggcuguugaaa

SEQ ID NO: 1036661 - RNA, 19 nt, Homo sapiens
  misc_RNA (1)...(19): siRNA sense strand
aaagaagagucaaaagaug

SEQ ID NO: 1036662 - RNA, 19 nt, Homo sapiens
  misc_RNA (1)...(19): siRNA sense strand
agacugauuuggaagaaaa

SEQ ID NO: 1036663 - RNA, 19 nt, Homo sapiens
  misc_RNA (1)...(19): siRNA sense strand
caacacuaccaugacaauu

SEQ ID NO: 1036664 - RNA, 19 nt, Homo sapiens
  misc_RNA (1)...(19): siRNA sense strand
gcgguuacaggaauggaaa

SEQ ID NO: 1036665 - RNA, 19 nt, Homo sapiens
  misc_RNA (1)...(19): siRNA sense strand
agacaugguagauaugaug

SEQ ID NO: 1036666 - RNA, 19 nt, Homo sapiens
  misc_RNA (1)...(19): siRNA sense strand
acagacugauuuggaagaa

SEQ ID NO: 1036667 - RNA, 19 nt, Homo sapiens
  misc_RNA (1)...(19): siRNA sense strand
ccaugacaauuguuuacca

SEQ ID NO: 1036668 - RNA, 19 nt, Homo sapiens
  misc_RNA (1)...(19): siRNA sense strand
cuaccaugacaauuguuua

SEQ ID NO: 1036669 - RNA, 19 nt, Homo sapiens
  misc_RNA (1)...(19): siRNA sense strand
gcaggaucccaaugaagau

SEQ ID NO: 1036670 - RNA, 19 nt, Homo sapiens
  misc_RNA (1)...(19): siRNA sense strand
caaaugcagaagaagaugu

SEQ ID NO: 1036671 - RNA, 19 nt, Homo sapiens
  misc_RNA (1)...(19): siRNA sense strand
ugaagucacaaaugcagaa

SEQ ID NO: 1036672 - RNA, 19 nt, Homo sapiens
  misc_RNA (1)...(19): siRNA sense strand
aaagaagcgguuacaggaa

SEQ ID NO: 1036673 - RNA, 19 nt, Homo sapiens
  misc_RNA (1)...(19): siRNA sense strand
gaauggaagcuagcagaag

SEQ ID NO: 1036674 - RNA, 19 nt, Homo sapiens
  misc_RNA (1)...(19): siRNA sense strand
auagcuguauucaacacua

SEQ ID NO: 1036675 - RNA, 19 nt, Homo sapiens
  misc_RNA (1)...(19): siRNA sense strand
acagugauaaugaaccaaa

SEQ ID NO: 1036676 - RNA, 19 nt, Homo sapiens
  misc_RNA (1)...(19): siRNA sense strand
ggaucccaaugaagauaca

SEQ ID NO: 1036677 - RNA, 19 nt, Homo sapiens
  misc_RNA (1)...(19): siRNA sense strand
cacaaaugcagaagaagau

SEQ ID NO: 1036678 - RNA, 19 nt, Homo sapiens
  misc_RNA (1)...(19): siRNA sense strand
gugauaaugaaccaaauag

SEQ ID NO: 1036679 - RNA, 19 nt, Homo sapiens
  misc_RNA (1)...(19): siRNA sense strand
cagacugauuuggaagaaa

SEQ ID NO: 1036680 - RNA, 19 nt, Homo sapiens
  misc_RNA (1)...(19): siRNA sense strand
ugaauggaagcuagcagaa

SEQ ID NO: 1036681 - RNA, 19 nt, Homo sapiens
  misc_RNA (1)...(19): siRNA sense strand
gcaucuuagucuucuagca

SEQ ID NO: 1036682 - RNA, 19 nt, Homo sapiens
  misc_RNA (1)...(19): siRNA sense strand
aacacuaccaugacaauug

SEQ ID NO: 1036683 - RNA, 19 nt, Homo sapiens
  misc_RNA (1)...(19): siRNA sense strand
caggaucccaaugaagaua

SEQ ID NO: 1036684 - RNA, 19 nt, Homo sapiens
  misc_RNA (1)...(19): siRNA sense strand
gaaaaccccagaaaagaca

SEQ ID NO: 1036685 - RNA, 19 nt, Homo sapiens
  misc_RNA (1)...(19): siRNA sense strand
gcaggaaacucuucucuga

SEQ ID NO: 1036686 - RNA, 19 nt, Homo sapiens
  misc_RNA (1)...(19): siRNA sense strand
ccaaggagauccagguuaa

SEQ ID NO: 1036687 - RNA, 19 nt, Homo sapiens
  misc_RNA (1)...(19): siRNA sense strand
gaucaugaguccugugaaa

SEQ ID NO: 1036688 - RNA, 19 nt, Homo sapiens
  misc_RNA (1)...(19): siRNA sense strand
ccaacuacuuugcguuuaa

SEQ ID NO: 1036689 - RNA, 19 nt, Homo sapiens
  misc_RNA (1)...(19): siRNA sense strand
ggacagcugggucuucaua

SEQ ID NO: 1036690 - RNA, 19 nt, Homo sapiens
  misc_RNA (1)...(19): siRNA sense strand
guacaaguguggccucauc

SEQ ID NO: 1036691 - RNA, 19 nt, Homo sapiens
  misc_RNA (1)...(19): siRNA sense strand
gcccagacacaaacaaaua

SEQ ID NO: 1036692 - RNA, 19 nt, Homo sapiens
  misc_RNA (1)...(19): siRNA sense strand
caacuacuuugcguuuaaa

SEQ ID NO: 1036693 - RNA, 19 nt, Homo sapiens
  misc_RNA (1)...(19): siRNA sense strand
gaaggcauuugacauguac

SEQ ID NO: 1036694 - RNA, 19 nt, Homo sapiens
  misc_RNA (1)...(19): siRNA sense strand
ggacagaaggcauuugaca

SEQ ID NO: 1036695 - RNA, 19 nt, Homo sapiens
  misc_RNA (1)...(19): siRNA sense strand
gaugaaagcaggaaacucu

SEQ ID NO: 1036696 - RNA, 19 nt, Homo sapiens
  misc_RNA (1)...(19): siRNA sense strand
cuagugaaauuccuuaaag

SEQ ID NO: 1036697 - RNA, 19 nt, Homo sapiens
  misc_RNA (1)...(19): siRNA sense strand
ggaccaaaaugaacgauga

SEQ ID NO: 1036698 - RNA, 19 nt, Homo sapiens
  misc_RNA (1)...(19): siRNA sense strand
cauguacucuggagauguu

SEQ ID NO: 1036699 - RNA, 19 nt, Homo sapiens
  misc_RNA (1)...(19): siRNA sense strand
gaaacucuucucugacuug

SEQ ID NO: 1036700 - RNA, 19 nt, Homo sapiens
  misc_RNA (1)...(19): siRNA sense strand
agaaggcauuugacaugua

SEQ ID NO: 1036701 - RNA, 19 nt, Homo sapiens
  misc_RNA (1)...(19): siRNA sense strand
gaacagcccagacacaaac

SEQ ID NO: 1036702 - RNA, 19 nt, Homo sapiens
  misc_RNA (1)...(19): siRNA sense strand
gggcagaggccuaaacauc

SEQ ID NO: 1036703 - RNA, 19 nt, Homo sapiens
  misc_RNA (1)...(19): siRNA sense strand
gccaacuacuuugcguuua

SEQ ID NO: 1036704 - RNA, 19 nt, Homo sapiens
  misc_RNA (1)...(19): siRNA sense strand
ccaaagaccucagggguaa

SEQ ID NO: 1036705 - RNA, 19 nt, Homo sapiens
  misc_RNA (1)...(19): siRNA sense strand
gauguuaugcaccuaguga

SEQ ID NO: 1036706 - RNA, 19 nt, Homo sapiens
  misc_RNA (1)...(19): siRNA sense strand
ggaaacucuucucugacuu

SEQ ID NO: 1036707 - RNA, 19 nt, Homo sapiens
  misc_RNA (1)...(19): siRNA sense strand
aaacaucgcccuggugaau

SEQ ID NO: 1036708 - RNA, 19 nt, Homo sapiens
  misc_RNA (1)...(19): siRNA sense strand
gaacgaugaaagcaggaaa

SEQ ID NO: 1036709 - RNA, 19 nt, Homo sapiens
  misc_RNA (1)...(19): siRNA sense strand
uuaugcaccuagugaaauu

SEQ ID NO: 1036710 - RNA, 19 nt, Homo sapiens
  misc_RNA (1)...(19): siRNA sense strand
cagaaggcauuugacaugu

SEQ ID NO: 1036711 - RNA, 19 nt, Homo sapiens
  misc_RNA (1)...(19): siRNA sense strand
acagaaggcauuugacaug

SEQ ID NO: 1036712 - RNA, 19 nt, Homo sapiens
  misc_RNA (1)...(19): siRNA sense strand
ggauguuuauucgaagcua

SEQ ID NO: 1036713 - RNA, 19 nt, Homo sapiens
  misc_RNA (1)...(19): siRNA sense strand
gcccuacuaugugcuuuga

SEQ ID NO: 1036714 - RNA, 19 nt, Homo sapiens
  misc_RNA (1)...(19): siRNA sense strand
ccuccuggcccucaucuuu

SEQ ID NO: 1036715 - RNA, 19 nt, Homo sapiens
  misc_RNA (1)...(19): siRNA sense strand
gacauguacucuggagaug

SEQ ID NO: 1036716 - RNA, 19 nt, Homo sapiens
  misc_RNA (1)...(19): siRNA sense strand
gagauguuaugcaccuagu

SEQ ID NO: 1036717 - RNA, 19 nt, Homo sapiens
  misc_RNA (1)...(19): siRNA sense strand
gcccucaucuuugccauag

SEQ ID NO: 1036718 - RNA, 19 nt, Homo sapiens
  misc_RNA (1)...(19): siRNA sense strand
uuaaagaacagcccagaca

SEQ ID NO: 1036719 - RNA, 19 nt, Homo sapiens
  misc_RNA (1)...(19): siRNA sense strand
ccuuugagcaguucuuaaa

SEQ ID NO: 1036720 - RNA, 19 nt, Homo sapiens
  misc_RNA (1)...(19): siRNA sense strand
gagagugucaggugugcuu

SEQ ID NO: 1036721 - RNA, 19 nt, Homo sapiens
  misc_RNA (1)...(19): siRNA sense strand
gaaagcaggaaacucuucu

SEQ ID NO: 1036722 - RNA, 19 nt, Homo sapiens
  misc_RNA (1)...(19): siRNA sense strand
cagagcugcuggagaugga

SEQ ID NO: 1036723 - RNA, 19 nt, Homo sapiens
  misc_RNA (1)...(19): siRNA sense strand
ccuacuaugugcuuugaag

SEQ ID NO: 1036724 - RNA, 19 nt, Homo sapiens
  misc_RNA (1)...(19): siRNA sense strand
ugacauguacucuggagau

SEQ ID NO: 1036725 - RNA, 19 nt, Homo sapiens
  misc_RNA (1)...(19): siRNA sense strand
gcaccuagugaaauuccuu

SEQ ID NO: 1036726 - RNA, 19 nt, Homo sapiens
  misc_RNA (1)...(19): siRNA sense strand
ccucaucuuugccauaguc

SEQ ID NO: 1036727 - RNA, 19 nt, Homo sapiens
  misc_RNA (1)...(19): siRNA sense strand
aggaaacucuucucugacu

SEQ ID NO: 1036728 - RNA, 19 nt, Homo sapiens
  misc_RNA (1)...(19): siRNA sense strand
gacagaaggcauuugacau

SEQ ID NO: 1036729 - RNA, 19 nt, Homo sapiens
  misc_RNA (1)...(19): siRNA sense strand
cgggacagcugggucuuca

SEQ ID NO: 1036730 - RNA, 19 nt, Homo sapiens
  misc_RNA (1)...(19): siRNA sense strand
ccuagugaaauuccuuaaa

SEQ ID NO: 1036731 - RNA, 19 nt, Homo sapiens
  misc_RNA (1)...(19): siRNA sense strand
cagcugggucuucauagga

SEQ ID NO: 1036732 - RNA, 19 nt, Homo sapiens
  misc_RNA (1)...(19): siRNA sense strand
aaagaacagcccagacaca

SEQ ID NO: 1036733 - RNA, 19 nt, Homo sapiens
  misc_RNA (1)...(19): siRNA sense strand
caaggagauccagguuaaa

SEQ ID NO: 1036734 - RNA, 19 nt, Homo sapiens
  misc_RNA (1)...(19): siRNA sense strand
cagcccagacacaaacaaa

SEQ ID NO: 1036735 - RNA, 19 nt, Homo sapiens
  misc_RNA (1)...(19): siRNA sense strand
ugaaagcaggaaacucuuc

SEQ ID NO: 1036736 - RNA, 19 nt, Homo sapiens
  misc_RNA (1)...(19): siRNA sense strand
guuaugcaccuagugaaau

SEQ ID NO: 1036737 - RNA, 19 nt, Homo sapiens
  misc_RNA (1)...(19): siRNA sense strand
agaacagcccagacacaaa

SEQ ID NO: 1036738 - RNA, 19 nt, Homo sapiens
  misc_RNA (1)...(19): siRNA sense strand
gucgugggcccuacuaugu

SEQ ID NO: 1036739 - RNA, 19 nt, Homo sapiens
  misc_RNA (1)...(19): siRNA sense strand
aagaacagcccagacacaa

SEQ ID NO: 1036740 - RNA, 19 nt, Homo sapiens
  misc_RNA (1)...(19): siRNA sense strand
caccuagugaaauuccuua

SEQ ID NO: 1036741 - RNA, 19 nt, Homo sapiens
  misc_RNA (1)...(19): siRNA sense strand
guacucuggagauguuaug

SEQ ID NO: 1036742 - RNA, 19 nt, Homo sapiens
  misc_RNA (1)...(19): siRNA sense strand
caaguguggccucaucaag

SEQ ID NO: 1036743 - RNA, 19 nt, Homo sapiens
  misc_RNA (1)...(19): siRNA sense strand
gcacuaacguucugauuga

SEQ ID NO: 1036744 - RNA, 19 nt, Homo sapiens
  misc_RNA (1)...(19): siRNA sense strand
gaucagcccucgauagaaa

SEQ ID NO: 1036745 - RNA, 19 nt, Homo sapiens
  misc_RNA (1)...(19): siRNA sense strand
ucacucagcugaugacauu

SEQ ID NO: 1036746 - RNA, 19 nt, Homo sapiens
  misc_RNA (1)...(19): siRNA sense strand
aaacagagauguggaagaa

SEQ ID NO: 1036747 - RNA, 19 nt, Homo sapiens
  misc_RNA (1)...(19): siRNA sense strand
gaacgaggaugucacucuu

SEQ ID NO: 1036748 - RNA, 19 nt, Homo sapiens
  misc_RNA (1)...(19): siRNA sense strand
ucacguccauccagaauaa

SEQ ID NO: 1036749 - RNA, 19 nt, Homo sapiens
  misc_RNA (1)...(19): siRNA sense strand
ggaugucacucuuagauca

SEQ ID NO: 1036750 - RNA, 19 nt, Homo sapiens
  misc_RNA (1)...(19): siRNA sense strand
gcaagauccugucucacuu

SEQ ID NO: 1036751 - RNA, 19 nt, Homo sapiens
  misc_RNA (1)...(19): siRNA sense strand
ugaagaagucagugauuua

SEQ ID NO: 1036752 - RNA, 19 nt, Homo sapiens
  misc_RNA (1)...(19): siRNA sense strand
gaagaagucagugauuuau

SEQ ID NO: 1036753 - RNA, 19 nt, Homo sapiens
  misc_RNA (1)...(19): siRNA sense strand
augguaggcuuaucaaaua

SEQ ID NO: 1036754 - RNA, 19 nt, Homo sapiens
  misc_RNA (1)...(19): siRNA sense strand
caauauagcccacuuucga

SEQ ID NO: 1036755 - RNA, 19 nt, Homo sapiens
  misc_RNA (1)...(19): siRNA sense strand
agaagucagugauuuauag

SEQ ID NO: 1036756 - RNA, 19 nt, Homo sapiens
  misc_RNA (1)...(19): siRNA sense strand
gcgcuggaguuuacuacaa

SEQ ID NO: 1036757 - RNA, 19 nt, Homo sapiens
  misc_RNA (1)...(19): siRNA sense strand
ucacuacucuuuccuaaaa

SEQ ID NO: 1036758 - RNA, 19 nt, Homo sapiens
  misc_RNA (1)...(19): siRNA sense strand
cagcaacagauaaaucaua

SEQ ID NO: 1036759 - RNA, 19 nt, Homo sapiens
  misc_RNA (1)...(19): siRNA sense strand
gauggugguuggagaagau

SEQ ID NO: 1036760 - RNA, 19 nt, Homo sapiens
  misc_RNA (1)...(19): siRNA sense strand
ggaaaggguggcugaggaa

SEQ ID NO: 1036761 - RNA, 19 nt, Homo sapiens
  misc_RNA (1)...(19): siRNA sense strand
ucaaagaaccugaagaaaa

SEQ ID NO: 1036762 - RNA, 19 nt, Homo sapiens
  misc_RNA (1)...(19): siRNA sense strand
gaucuccucaacuggaaua

SEQ ID NO: 1036763 - RNA, 19 nt, Homo sapiens
  misc_RNA (1)...(19): siRNA sense strand
cgacuaggccugaagaagu

SEQ ID NO: 1036764 - RNA, 19 nt, Homo sapiens
  misc_RNA (1)...(19): siRNA sense strand
ggaguuuacuacaauucau

SEQ ID NO: 1036765 - RNA, 19 nt, Homo sapiens
  misc_RNA (1)...(19): siRNA sense strand
gaccgcugcuuuccucaug

SEQ ID NO: 1036766 - RNA, 19 nt, Homo sapiens
  misc_RNA (1)...(19): siRNA sense strand
gaggaugucacucuuagau

SEQ ID NO: 1036767 - RNA, 19 nt, Homo sapiens
  misc_RNA (1)...(19): siRNA sense strand
ucgcauggcauucaaagaa

SEQ ID NO: 1036768 - RNA, 19 nt, Homo sapiens
  misc_RNA (1)...(19): siRNA sense strand
gcaaggcuggcuggagaua

SEQ ID NO: 1036769 - RNA, 19 nt, Homo sapiens
  misc_RNA (1)...(19): siRNA sense strand
cuaacguucugauugaaga

SEQ ID NO: 1036770 - RNA, 19 nt, Homo sapiens
  misc_RNA (1)...(19): siRNA sense strand
uugaucauguguaauggua

SEQ ID NO: 1036771 - RNA, 19 nt, Homo sapiens
  misc_RNA (1)...(19): siRNA sense strand
gagucuggcuuucgucuac

SEQ ID NO: 1036772 - RNA, 19 nt, Homo sapiens
  misc_RNA (1)...(19): siRNA sense strand
uagaucagcccucgauaga

SEQ ID NO: 1036773 - RNA, 19 nt, Homo sapiens
  misc_RNA (1)...(19): siRNA sense strand
ccucaacuggaauaacuua

SEQ ID NO: 1036774 - RNA, 19 nt, Homo sapiens
  misc_RNA (1)...(19): siRNA sense strand
agucagugauuuauaguuc

SEQ ID NO: 1036775 - RNA, 19 nt, Homo sapiens
  misc_RNA (1)...(19): siRNA sense strand
gagauguggaagaaacuuu

SEQ ID NO: 1036776 - RNA, 19 nt, Homo sapiens
  misc_RNA (1)...(19): siRNA sense strand
acagagauguggaagaaac

SEQ ID NO: 1036777 - RNA, 19 nt, Homo sapiens
  misc_RNA (1)...(19): siRNA sense strand
ugggugaccuuccgcaaga

SEQ ID NO: 1036778 - RNA, 19 nt, Homo sapiens
  misc_RNA (1)...(19): siRNA sense strand
agaaugcuaugcuggacuu

SEQ ID NO: 1036779 - RNA, 19 nt, Homo sapiens
  misc_RNA (1)...(19): siRNA sense strand
gcuggaguuuacuacaauu

SEQ ID NO: 1036780 - RNA, 19 nt, Homo sapiens
  misc_RNA (1)...(19): siRNA sense strand
cgauagaaaucugaagagu

SEQ ID NO: 1036781 - RNA, 19 nt, Homo sapiens
  misc_RNA (1)...(19): siRNA sense strand
agucacuacucuuuccuaa

SEQ ID NO: 1036782 - RNA, 19 nt, Homo sapiens
  misc_RNA (1)...(19): siRNA sense strand
gaaaggguggcugaggaaa

SEQ ID NO: 1036783 - RNA, 19 nt, Homo sapiens
  misc_RNA (1)...(19): siRNA sense strand
cagaaggacaguucacuca

SEQ ID NO: 1036784 - RNA, 19 nt, Homo sapiens
  misc_RNA (1)...(19): siRNA sense strand
gauugccggucucuccuau

SEQ ID NO: 1036785 - RNA, 19 nt, Homo sapiens
  misc_RNA (1)...(19): siRNA sense strand
ggagauguggugcgacuag

SEQ ID NO: 1036786 - RNA, 19 nt, Homo sapiens
  misc_RNA (1)...(19): siRNA sense strand
ggauggugguuggagaaga

SEQ ID NO: 1036787 - RNA, 19 nt, Homo sapiens
  misc_RNA (1)...(19): siRNA sense strand
guucagaccagaagaaugc

SEQ ID NO: 1036788 - RNA, 19 nt, Homo sapiens
  misc_RNA (1)...(19): siRNA sense strand
guaggcuuaucaaauaugg

SEQ ID NO: 1036789 - RNA, 19 nt, Homo sapiens
  misc_RNA (1)...(19): siRNA sense strand
cuauggcgcuggaguuuac

SEQ ID NO: 1036790 - RNA, 19 nt, Homo sapiens
  misc_RNA (1)...(19): siRNA sense strand
guaaugguaggcuuaucaa

SEQ ID NO: 1036791 - RNA, 19 nt, Homo sapiens
  misc_RNA (1)...(19): siRNA sense strand
gaagucagugauuuauagu

SEQ ID NO: 1036792 - RNA, 19 nt, Homo sapiens
  misc_RNA (1)...(19): siRNA sense strand
gaucccgacuguggagaug

SEQ ID NO: 1036793 - RNA, 19 nt, Homo sapiens
  misc_RNA (1)...(19): siRNA sense strand
agauguggaagaaacuuua

SEQ ID NO: 1036794 - RNA, 19 nt, Homo sapiens
  misc_RNA (1)...(19): siRNA sense strand
acaguucacucagcugaug

SEQ ID NO: 1036795 - RNA, 19 nt, Homo sapiens
  misc_RNA (1)...(19): siRNA sense strand
aaggcuggcuggagauaga

SEQ ID NO: 1036796 - RNA, 19 nt, Homo sapiens
  misc_RNA (1)...(19): siRNA sense strand
ccaagauuaucacguccau

SEQ ID NO: 1036797 - RNA, 19 nt, Homo sapiens
  misc_RNA (1)...(19): siRNA sense strand
auccucaagugguguauaa

SEQ ID NO: 1036798 - RNA, 19 nt, Homo sapiens
  misc_RNA (1)...(19): siRNA sense strand
aaugguaggcuuaucaaau

SEQ ID NO: 1036799 - RNA, 19 nt, Homo sapiens
  misc_RNA (1)...(19): siRNA sense strand
aaccuuacagcaacagaua

SEQ ID NO: 1036800 - RNA, 19 nt, Homo sapiens
  misc_RNA (1)...(19): siRNA sense strand
caagauccugucucacuuc

SEQ ID NO: 1036801 - RNA, 19 nt, Homo sapiens
  misc_RNA (1)...(19): siRNA sense strand
cacuaaaacugcacaaaau

SEQ ID NO: 1036802 - RNA, 19 nt, Homo sapiens
  misc_RNA (1)...(19): siRNA sense strand
cgaguucagaccagaagaa

SEQ ID NO: 1036803 - RNA, 19 nt, Homo sapiens
  misc_RNA (1)...(19): siRNA sense strand
gauguggaagaaacuuuau

SEQ ID NO: 1036804 - RNA, 19 nt, Homo sapiens
  misc_RNA (1)...(19): siRNA sense strand
ggagcugagucuggcuuuc

SEQ ID NO: 1036805 - RNA, 19 nt, Homo sapiens
  misc_RNA (1)...(19): siRNA sense strand
ucacuaaaacugcacaaaa

SEQ ID NO: 1036806 - RNA, 19 nt, Homo sapiens
  misc_RNA (1)...(19): siRNA sense strand
uacagcaacagauaaauca

SEQ ID NO: 1036807 - RNA, 19 nt, Homo sapiens
  misc_RNA (1)...(19): siRNA sense strand
aagaucuccucaacuggaa

SEQ ID NO: 1036808 - RNA, 19 nt, Homo sapiens
  misc_RNA (1)...(19): siRNA sense strand
acgaggaugucacucuuag

SEQ ID NO: 1036809 - RNA, 19 nt, Homo sapiens
  misc_RNA (1)...(19): siRNA sense strand
uuacagcaacagauaaauc

SEQ ID NO: 1036810 - RNA, 19 nt, Homo sapiens
  misc_RNA (1)...(19): siRNA sense strand
ggcagcauacuacaggaaa

SEQ ID NO: 1036811 - RNA, 19 nt, Homo sapiens
  misc_RNA (1)...(19): siRNA sense strand
gcuuaucaaauauggaguu

SEQ ID NO: 1036812 - RNA, 19 nt, Homo sapiens
  misc_RNA (1)...(19): siRNA sense strand
gucagugauuuauaguuca

SEQ ID NO: 1036813 - RNA, 19 nt, Homo sapiens
  misc_RNA (1)...(19): siRNA sense strand
gacauugcccaaaaccuua

SEQ ID NO: 1036814 - RNA, 19 nt, Homo sapiens
  misc_RNA (1)...(19): siRNA sense strand
uugccggucucuccuauuc

SEQ ID NO: 1036815 - RNA, 19 nt, Homo sapiens
  misc_RNA (1)...(19): siRNA sense strand
ggugguuggagaagauaaa

SEQ ID NO: 1036816 - RNA, 19 nt, Homo sapiens
  misc_RNA (1)...(19): siRNA sense strand
uuauggacccuccuggaaa

SEQ ID NO: 1036817 - RNA, 19 nt, Homo sapiens
  misc_RNA (1)...(19): siRNA sense strand
gcugaugacauugcccaaa

SEQ ID NO: 1036818 - RNA, 19 nt, Homo sapiens
  misc_RNA (1)...(19): siRNA sense strand
uguaaugguaggcuuauca

SEQ ID NO: 1036819 - RNA, 19 nt, Homo sapiens
  misc_RNA (1)...(19): siRNA sense strand
uauuccaaguggcucauga

SEQ ID NO: 1036820 - RNA, 19 nt, Homo sapiens
  misc_RNA (1)...(19): siRNA sense strand
ccuuacagcaacagauaaa

SEQ ID NO: 1036821 - RNA, 19 nt, Homo sapiens
  misc_RNA (1)...(19): siRNA sense strand
gcagcauacuacaggaaaa

SEQ ID NO: 1036822 - RNA, 19 nt, Homo sapiens
  misc_RNA (1)...(19): siRNA sense strand
gguaggcuuaucaaauaug

SEQ ID NO: 1036823 - RNA, 19 nt, Homo sapiens
  misc_RNA (1)...(19): siRNA sense strand
gugcugugaccgcugcuuu

SEQ ID NO: 1036824 - RNA, 19 nt, Homo sapiens
  misc_RNA (1)...(19): siRNA sense strand
augcuaugcuggacuuugu

SEQ ID NO: 1036825 - RNA, 19 nt, Homo sapiens
  misc_RNA (1)...(19): siRNA sense strand
ugguaggcuuaucaaauau

SEQ ID NO: 1036826 - RNA, 19 nt, Homo sapiens
  misc_RNA (1)...(19): siRNA sense strand
gauaaggguuucuuucaua

SEQ ID NO: 1036827 - RNA, 19 nt, Homo sapiens
  misc_RNA (1)...(19): siRNA sense strand
gagagaaggucuauaaaug

SEQ ID NO: 1036828 - RNA, 19 nt, Homo sapiens
  misc_RNA (1)...(19): siRNA sense strand
ggaaaggccuucagucaga

SEQ ID NO: 1036829 - RNA, 19 nt, Homo sapiens
  misc_RNA (1)...(19): siRNA sense strand
ggaaggggcuuuaguaaua

SEQ ID NO: 1036830 - RNA, 19 nt, Homo sapiens
  misc_RNA (1)...(19): siRNA sense strand
gagagaagcccuuuaaaug

SEQ ID NO: 1036831 - RNA, 19 nt, Homo sapiens
  misc_RNA (1)...(19): siRNA sense strand
gagaaacccuauaaauguu

SEQ ID NO: 1036832 - RNA, 19 nt, Homo sapiens
  misc_RNA (1)...(19): siRNA sense strand
gagaagcccuuuaaaugug

SEQ ID NO: 1036833 - RNA, 19 nt, Homo sapiens
  misc_RNA (1)...(19): siRNA sense strand
gagaagcccuauaaauguu

SEQ ID NO: 1036834 - RNA, 19 nt, Homo sapiens
  misc_RNA (1)...(19): siRNA sense strand
gagaaacccuauagauguu

SEQ ID NO: 1036835 - RNA, 19 nt, Homo sapiens
  misc_RNA (1)...(19): siRNA sense strand
gagagaaacccuauaaaug

SEQ ID NO: 1036836 - RNA, 19 nt, Homo sapiens
  misc_RNA (1)...(19): siRNA sense strand
ggagagaaacccuauaaau

SEQ ID NO: 1036837 - RNA, 19 nt, Homo sapiens
  misc_RNA (1)...(19): siRNA sense strand
gagaaggucuauaaaugug

SEQ ID NO: 1036838 - RNA, 19 nt, Homo sapiens
  misc_RNA (1)...(19): siRNA sense strand
ggagaagcccuauaaaugu

SEQ ID NO: 1036839 - RNA, 19 nt, Homo sapiens
  misc_RNA (1)...(19): siRNA sense strand
ggagagaagcccuuuaaau

SEQ ID NO: 1036840 - RNA, 19 nt, Homo sapiens
  misc_RNA (1)...(19): siRNA sense strand
gagcucccaucuucaaauu

SEQ ID NO: 1036841 - RNA, 19 nt, Homo sapiens
  misc_RNA (1)...(19): siRNA sense strand
gagagaaacccuauagaug

SEQ ID NO: 1036842 - RNA, 19 nt, Homo sapiens
  misc_RNA (1)...(19): siRNA sense strand
ggagagaaggucuauaaau

SEQ ID NO: 1036843 - RNA, 19 nt, Homo sapiens
  misc_RNA (1)...(19): siRNA sense strand
ggagagaaacccuauagau

SEQ ID NO: 1036844 - RNA, 19 nt, Homo sapiens
  misc_RNA (1)...(19): siRNA sense strand
caggagagaaggucuauaa

SEQ ID NO: 1036845 - RNA, 19 nt, Homo sapiens
  misc_RNA (1)...(19): siRNA sense strand
ccauaaaugugacaagugu

SEQ ID NO: 1036846 - RNA, 19 nt, Homo sapiens
  misc_RNA (1)...(19): siRNA sense strand
agagaaacccuauaaaugu

SEQ ID NO: 1036847 - RNA, 19 nt, Homo sapiens
  misc_RNA (1)...(19): siRNA sense strand
ggcaaagccuucaauugga

SEQ ID NO: 1036848 - RNA, 19 nt, Homo sapiens
  misc_RNA (1)...(19): siRNA sense strand
gggaaggcguucagucaga

SEQ ID NO: 1036849 - RNA, 19 nt, Homo sapiens
  misc_RNA (1)...(19): siRNA sense strand
gcucccaucuucaaauuca

SEQ ID NO: 1036850 - RNA, 19 nt, Homo sapiens
  misc_RNA (1)...(19): siRNA sense strand
gaaggucuauaaaugugau

SEQ ID NO: 1036851 - RNA, 19 nt, Homo sapiens
  misc_RNA (1)...(19): siRNA sense strand
gagaaaccguaugucugua

SEQ ID NO: 1036852 - RNA, 19 nt, Homo sapiens
  misc_RNA (1)...(19): siRNA sense strand
uggagaagcccuauaaaug

SEQ ID NO: 1036853 - RNA, 19 nt, Homo sapiens
  misc_RNA (1)...(19): siRNA sense strand
gaaaccaucucaaaauauc

SEQ ID NO: 1036854 - RNA, 19 nt, Homo sapiens
  misc_RNA (1)...(19): siRNA sense strand
cuauaaauguuacgagugu

SEQ ID NO: 1036855 - RNA, 19 nt, Homo sapiens
  misc_RNA (1)...(19): siRNA sense strand
caggagagaaacccuauaa

SEQ ID NO: 1036856 - RNA, 19 nt, Homo sapiens
  misc_RNA (1)...(19): siRNA sense strand
agagaaacccuauagaugu

SEQ ID NO: 1036857 - RNA, 19 nt, Homo sapiens
  misc_RNA (1)...(19): siRNA sense strand
cuauagauguuguggaugu

SEQ ID NO: 1036858 - RNA, 19 nt, Homo sapiens
  misc_RNA (1)...(19): siRNA sense strand
gcggaaaggccuucaguca

SEQ ID NO: 1036859 - RNA, 19 nt, Homo sapiens
  misc_RNA (1)...(19): siRNA sense strand
gaacuucauauucauugga

SEQ ID NO: 1036860 - RNA, 19 nt, Homo sapiens
  misc_RNA (1)...(19): siRNA sense strand
gaaacccuauagauguugu

SEQ ID NO: 1036861 - RNA, 19 nt, Homo sapiens
  misc_RNA (1)...(19): siRNA sense strand
gaaaccguaugucuguagu

SEQ ID NO: 1036862 - RNA, 19 nt, Homo sapiens
  misc_RNA (1)...(19): siRNA sense strand
aauuggagcucccaucuuc

SEQ ID NO: 1036863 - RNA, 19 nt, Homo sapiens
  misc_RNA (1)...(19): siRNA sense strand
agagaagcccuuuaaaugu

SEQ ID NO: 1036864 - RNA, 19 nt, Homo sapiens
  misc_RNA (1)...(19): siRNA sense strand
ugagaaaccguaugucugu

SEQ ID NO: 1036865 - RNA, 19 nt, Homo sapiens
  misc_RNA (1)...(19): siRNA sense strand
ggguuucuuucauauauca

SEQ ID NO: 1036866 - RNA, 19 nt, Homo sapiens
  misc_RNA (1)...(19): siRNA sense strand
uggcaaagccuucaauugg

SEQ ID NO: 1036867 - RNA, 19 nt, Homo sapiens
  misc_RNA (1)...(19): siRNA sense strand
ugauaaggguuucuuucau

SEQ ID NO: 1036868 - RNA, 19 nt, Homo sapiens
  misc_RNA (1)...(19): siRNA sense strand
ccggagagaagcccuuuaa

SEQ ID NO: 1036869 - RNA, 19 nt, Homo sapiens
  misc_RNA (1)...(19): siRNA sense strand
caguggagaagcccuauaa

SEQ ID NO: 1036870 - RNA, 19 nt, Homo sapiens
  misc_RNA (1)...(19): siRNA sense strand
guggagaagcccuauaaau

SEQ ID NO: 1036871 - RNA, 19 nt, Homo sapiens
  misc_RNA (1)...(19): siRNA sense strand
agaagcccuuuaaauguga

SEQ ID NO: 1036872 - RNA, 19 nt, Homo sapiens
  misc_RNA (1)...(19): siRNA sense strand
gugauaaggguuucuuuca

SEQ ID NO: 1036873 - RNA, 19 nt, Homo sapiens
  misc_RNA (1)...(19): siRNA sense strand
caaaggagagaaaccaucu

SEQ ID NO: 1036874 - RNA, 19 nt, Homo sapiens
  misc_RNA (1)...(19): siRNA sense strand
agagaaggucuauaaaugu

SEQ ID NO: 1036875 - RNA, 19 nt, Homo sapiens
  misc_RNA (1)...(19): siRNA sense strand
caaauucauaugagaguuc

SEQ ID NO: 1036876 - RNA, 19 nt, Homo sapiens
  misc_RNA (1)...(19): siRNA sense strand
ccagagaguccacacaaag

SEQ ID NO: 1036877 - RNA, 19 nt, Homo sapiens
  misc_RNA (1)...(19): siRNA sense strand
cuuuaaaugugaagagugu

SEQ ID NO: 1036878 - RNA, 19 nt, Homo sapiens
  misc_RNA (1)...(19): siRNA sense strand
acacaggagagaaaccuuu

SEQ ID NO: 1036879 - RNA, 19 nt, Homo sapiens
  misc_RNA (1)...(19): siRNA sense strand
gguaaggauuuuagcacua

SEQ ID NO: 1036880 - RNA, 19 nt, Homo sapiens
  misc_RNA (1)...(19): siRNA sense strand
aaaugugacaagugugaua

SEQ ID NO: 1036881 - RNA, 19 nt, Homo sapiens
  misc_RNA (1)...(19): siRNA sense strand
gaagcccuuuaaaugugaa

SEQ ID NO: 1036882 - RNA, 19 nt, Homo sapiens
  misc_RNA (1)...(19): siRNA sense strand
guaugucuguagugagugu

SEQ ID NO: 1036883 - RNA, 19 nt, Homo sapiens
  misc_RNA (1)...(19): siRNA sense strand
ggugagaaaccguaugucu

SEQ ID NO: 1036884 - RNA, 19 nt, Homo sapiens
  misc_RNA (1)...(19): siRNA sense strand
ggagcucccaucuucaaau

SEQ ID NO: 1036885 - RNA, 19 nt, Homo sapiens
  misc_RNA (1)...(19): siRNA sense strand
cagaacuucauauucauug

SEQ ID NO: 1036886 - RNA, 19 nt, Homo sapiens
  misc_RNA (1)...(19): siRNA sense strand
gaagcccuauaaauguuac

SEQ ID NO: 1036887 - RNA, 19 nt, Homo sapiens
  misc_RNA (1)...(19): siRNA sense strand
cccuauagauguuguggau

SEQ ID NO: 1036888 - RNA, 19 nt, Homo sapiens
  misc_RNA (1)...(19): siRNA sense strand
aaccguaugucuguaguga

SEQ ID NO: 1036889 - RNA, 19 nt, Homo sapiens
  misc_RNA (1)...(19): siRNA sense strand
agaagcccuauaaauguua

SEQ ID NO: 1036890 - RNA, 19 nt, Homo sapiens
  misc_RNA (1)...(19): siRNA sense strand
guacgagccucugcaucca

SEQ ID NO: 1036891 - RNA, 19 nt, Homo sapiens
  misc_RNA (1)...(19): siRNA sense strand
auaaaugugacaaguguga

SEQ ID NO: 1036892 - RNA, 19 nt, Homo sapiens
  misc_RNA (1)...(19): siRNA sense strand
gggcuuuaguaauaguuca

SEQ ID NO: 1036893 - RNA, 19 nt, Homo sapiens
  misc_RNA (1)...(19): siRNA sense strand
ccguaugucuguagugagu

SEQ ID NO: 1036894 - RNA, 19 nt, Homo sapiens
  misc_RNA (1)...(19): siRNA sense strand
gaugauugugguaaggauu

SEQ ID NO: 1036895 - RNA, 19 nt, Homo sapiens
  misc_RNA (1)...(19): siRNA sense strand
acaagugugauaaggguuu

SEQ ID NO: 1036896 - RNA, 19 nt, Homo sapiens
  misc_RNA (1)...(19): siRNA sense strand
guggcaaagccuucaauug

SEQ ID NO: 1036897 - RNA, 19 nt, Homo sapiens
  misc_RNA (1)...(19): siRNA sense strand
gcacuacaacaaaacuuaa

SEQ ID NO: 1036898 - RNA, 19 nt, Homo sapiens
  misc_RNA (1)...(19): siRNA sense strand
gugggaaggcguucaguca

SEQ ID NO: 1036899 - RNA, 19 nt, Homo sapiens
  misc_RNA (1)...(19): siRNA sense strand
caccagagaguccacacaa

SEQ ID NO: 1036900 - RNA, 19 nt, Homo sapiens
  misc_RNA (1)...(19): siRNA sense strand
caagugugauaaggguuuc

SEQ ID NO: 1036901 - RNA, 19 nt, Homo sapiens
  misc_RNA (1)...(19): siRNA sense strand
gauuuuagcacuacaacaa

SEQ ID NO: 1036902 - RNA, 19 nt, Homo sapiens
  misc_RNA (1)...(19): siRNA sense strand
gaaggggcuuuaguaauag

SEQ ID NO: 1036903 - RNA, 19 nt, Homo sapiens
  misc_RNA (1)...(19): siRNA sense strand
caggugagaaaccguaugu

SEQ ID NO: 1036904 - RNA, 19 nt, Homo sapiens
  misc_RNA (1)...(19): siRNA sense strand
accagagaguccacacaaa

SEQ ID NO: 1036905 - RNA, 19 nt, Homo sapiens
  misc_RNA (1)...(19): siRNA sense strand
gaaauagccucgagacauu

SEQ ID NO: 1036906 - RNA, 19 nt, Homo sapiens
  misc_RNA (1)...(19): siRNA sense strand
gaaggcagaucauaccaua

SEQ ID NO: 1036907 - RNA, 19 nt, Homo sapiens
  misc_RNA (1)...(19): siRNA sense strand
gaacagagccaucuccaaa

SEQ ID NO: 1036908 - RNA, 19 nt, Homo sapiens
  misc_RNA (1)...(19): siRNA sense strand
gcacauucuugguaucuua

SEQ ID NO: 1036909 - RNA, 19 nt, Homo sapiens
  misc_RNA (1)...(19): siRNA sense strand
gaagaaagaauacacauga

SEQ ID NO: 1036910 - RNA, 19 nt, Homo sapiens
  misc_RNA (1)...(19): siRNA sense strand
gcaauaaguuacacaguug

SEQ ID NO: 1036911 - RNA, 19 nt, Homo sapiens
  misc_RNA (1)...(19): siRNA sense strand
gauaguaacucaaguagca

SEQ ID NO: 1036912 - RNA, 19 nt, Homo sapiens
  misc_RNA (1)...(19): siRNA sense strand
gaccaucuguacaacauua

SEQ ID NO: 1036913 - RNA, 19 nt, Homo sapiens
  misc_RNA (1)...(19): siRNA sense strand
caagagcuaugagaaauaa

SEQ ID NO: 1036914 - RNA, 19 nt, Homo sapiens
  misc_RNA (1)...(19): siRNA sense strand
gaagagacacaguaugaaa

SEQ ID NO: 1036915 - RNA, 19 nt, Homo sapiens
  misc_RNA (1)...(19): siRNA sense strand
uaacauggauaguaacuca

SEQ ID NO: 1036916 - RNA, 19 nt, Homo sapiens
  misc_RNA (1)...(19): siRNA sense strand
acagagccaucuccaaaua

SEQ ID NO: 1036917 - RNA, 19 nt, Homo sapiens
  misc_RNA (1)...(19): siRNA sense strand
uaauaaugcugcaggcuuu

SEQ ID NO: 1036918 - RNA, 19 nt, Homo sapiens
  misc_RNA (1)...(19): siRNA sense strand
caacauuaccuguggagua

SEQ ID NO: 1036919 - RNA, 19 nt, Homo sapiens
  misc_RNA (1)...(19): siRNA sense strand
gcaagagcuaugagaaaua

SEQ ID NO: 1036920 - RNA, 19 nt, Homo sapiens
  misc_RNA (1)...(19): siRNA sense strand
gaucauaccauaucacaca

SEQ ID NO: 1036921 - RNA, 19 nt, Homo sapiens
  misc_RNA (1)...(19): siRNA sense strand
gacgcuagcugaugccauu

SEQ ID NO: 1036922 - RNA, 19 nt, Homo sapiens
  misc_RNA (1)...(19): siRNA sense strand
guucagaagcucuuaguuu

SEQ ID NO: 1036923 - RNA, 19 nt, Homo sapiens
  misc_RNA (1)...(19): siRNA sense strand
uagcugaugccauuaauaa

SEQ ID NO: 1036924 - RNA, 19 nt, Homo sapiens
  misc_RNA (1)...(19): siRNA sense strand
aaauagagaugucaacaag

SEQ ID NO: 1036925 - RNA, 19 nt, Homo sapiens
  misc_RNA (1)...(19): siRNA sense strand
auagagaugucaacaaguu

SEQ ID NO: 1036926 - RNA, 19 nt, Homo sapiens
  misc_RNA (1)...(19): siRNA sense strand
gcaaucagaaucaagaaau

SEQ ID NO: 1036927 - RNA, 19 nt, Homo sapiens
  misc_RNA (1)...(19): siRNA sense strand
gaaaagaagagacacagua

SEQ ID NO: 1036928 - RNA, 19 nt, Homo sapiens
  misc_RNA (1)...(19): siRNA sense strand
ucaacaaguuucaagaugu

SEQ ID NO: 1036929 - RNA, 19 nt, Homo sapiens
  misc_RNA (1)...(19): siRNA sense strand
aagaagagacacaguauga

SEQ ID NO: 1036930 - RNA, 19 nt, Homo sapiens
  misc_RNA (1)...(19): siRNA sense strand
gggcuguccuuguuauuuc

SEQ ID NO: 1036931 - RNA, 19 nt, Homo sapiens
  misc_RNA (1)...(19): siRNA sense strand
aaaguuugaugaaggagaa

SEQ ID NO: 1036932 - RNA, 19 nt, Homo sapiens
  misc_RNA (1)...(19): siRNA sense strand
guacaacauugaugagcau

SEQ ID NO: 1036933 - RNA, 19 nt, Homo sapiens
  misc_RNA (1)...(19): siRNA sense strand
cauuugugcuucuuucuau

SEQ ID NO: 1036934 - RNA, 19 nt, Homo sapiens
  misc_RNA (1)...(19): siRNA sense strand
cagaagcucuuaguuugug

SEQ ID NO: 1036935 - RNA, 19 nt, Homo sapiens
  misc_RNA (1)...(19): siRNA sense strand
uucagaagcucuuaguuug

SEQ ID NO: 1036936 - RNA, 19 nt, Homo sapiens
  misc_RNA (1)...(19): siRNA sense strand
gcagcaagagcuaugagaa

SEQ ID NO: 1036937 - RNA, 19 nt, Homo sapiens
  misc_RNA (1)...(19): siRNA sense strand
gucaacaaguuucaagaug

SEQ ID NO: 1036938 - RNA, 19 nt, Homo sapiens
  misc_RNA (1)...(19): siRNA sense strand
caacauugaugagcauuuu

SEQ ID NO: 1036939 - RNA, 19 nt, Homo sapiens
  misc_RNA (1)...(19): siRNA sense strand
auacugcgguuguucagaa

SEQ ID NO: 1036940 - RNA, 19 nt, Homo sapiens
  misc_RNA (1)...(19): siRNA sense strand
uaacucaaguagcaauaag

SEQ ID NO: 1036941 - RNA, 19 nt, Homo sapiens
  misc_RNA (1)...(19): siRNA sense strand
cagcaagagcuaugagaaa

SEQ ID NO: 1036942 - RNA, 19 nt, Homo sapiens
  misc_RNA (1)...(19): siRNA sense strand
caaauagagaugucaacaa

SEQ ID NO: 1036943 - RNA, 19 nt, Homo sapiens
  misc_RNA (1)...(19): siRNA sense strand
gguauacccaggauauuau

SEQ ID NO: 1036944 - RNA, 19 nt, Homo sapiens
  misc_RNA (1)...(19): siRNA sense strand
ucaaaaggguguguuauga

SEQ ID NO: 1036945 - RNA, 19 nt, Homo sapiens
  misc_RNA (1)...(19): siRNA sense strand
ucgagacauucaucacuaa

SEQ ID NO: 1036946 - RNA, 19 nt, Homo sapiens
  misc_RNA (1)...(19): siRNA sense strand
agcaauaaguuacacaguu

SEQ ID NO: 1036947 - RNA, 19 nt, Homo sapiens
  misc_RNA (1)...(19): siRNA sense strand
cuucccaacugaaauuauu

SEQ ID NO: 1036948 - RNA, 19 nt, Homo sapiens
  misc_RNA (1)...(19): siRNA sense strand
cauugaaccuucccaacug

SEQ ID NO: 1036949 - RNA, 19 nt, Homo sapiens
  misc_RNA (1)...(19): siRNA sense strand
caacaaauagagaugucaa

SEQ ID NO: 1036950 - RNA, 19 nt, Homo sapiens
  misc_RNA (1)...(19): siRNA sense strand
acauucagcucucacaauc

SEQ ID NO: 1036951 - RNA, 19 nt, Homo sapiens
  misc_RNA (1)...(19): siRNA sense strand
aaccaucacucacguuuua

SEQ ID NO: 1036952 - RNA, 19 nt, Homo sapiens
  misc_RNA (1)...(19): siRNA sense strand
uaucuaacguuucuaacag

SEQ ID NO: 1036953 - RNA, 19 nt, Homo sapiens
  misc_RNA (1)...(19): siRNA sense strand
gagacacaguaugaaagaa

SEQ ID NO: 1036954 - RNA, 19 nt, Homo sapiens
  misc_RNA (1)...(19): siRNA sense strand
guccaacuauccagacguu

SEQ ID NO: 1036955 - RNA, 19 nt, Homo sapiens
  misc_RNA (1)...(19): siRNA sense strand
caaauacugcgguuguuca

SEQ ID NO: 1036956 - RNA, 19 nt, Homo sapiens
  misc_RNA (1)...(19): siRNA sense strand
gacacaguaugaaagaaca

SEQ ID NO: 1036957 - RNA, 19 nt, Homo sapiens
  misc_RNA (1)...(19): siRNA sense strand
gcuagcugaugccauuaau

SEQ ID NO: 1036958 - RNA, 19 nt, Homo sapiens
  misc_RNA (1)...(19): siRNA sense strand
guaacucaaguagcaauaa

SEQ ID NO: 1036959 - RNA, 19 nt, Homo sapiens
  misc_RNA (1)...(19): siRNA sense strand
gaaccuucccaacugaaau

SEQ ID NO: 1036960 - RNA, 19 nt, Homo sapiens
  misc_RNA (1)...(19): siRNA sense strand
gcugcaggcuuugguuuca

SEQ ID NO: 1036961 - RNA, 19 nt, Homo sapiens
  misc_RNA (1)...(19): siRNA sense strand
caggcccacuuugcucuua

SEQ ID NO: 1036962 - RNA, 19 nt, Homo sapiens
  misc_RNA (1)...(19): siRNA sense strand
agacagcucuuuggcucaa

SEQ ID NO: 1036963 - RNA, 19 nt, Homo sapiens
  misc_RNA (1)...(19): siRNA sense strand
cauaccauaucacacaauc

SEQ ID NO: 1036964 - RNA, 19 nt, Homo sapiens
  misc_RNA (1)...(19): siRNA sense strand
agaaauagccucgagacau

SEQ ID NO: 1036965 - RNA, 19 nt, Homo sapiens
  misc_RNA (1)...(19): siRNA sense strand
cucgagacauucaucacua

SEQ ID NO: 1036966 - RNA, 19 nt, Homo sapiens
  misc_RNA (1)...(19): siRNA sense strand
gcugggacuuaauuuccaa

SEQ ID NO: 1036967 - RNA, 19 nt, Homo sapiens
  misc_RNA (1)...(19): siRNA sense strand
ucaaguagcaauaaguuac

SEQ ID NO: 1036968 - RNA, 19 nt, Homo sapiens
  misc_RNA (1)...(19): siRNA sense strand
gaugagcauuuucaagcua

SEQ ID NO: 1036969 - RNA, 19 nt, Homo sapiens
  misc_RNA (1)...(19): siRNA sense strand
uuacagcuccugguauuau

SEQ ID NO: 1036970 - RNA, 19 nt, Homo sapiens
  misc_RNA (1)...(19): siRNA sense strand
uuugugggcuguccuuguu

SEQ ID NO: 1036971 - RNA, 19 nt, Homo sapiens
  misc_RNA (1)...(19): siRNA sense strand
cauucuugguaucuuagua

SEQ ID NO: 1036972 - RNA, 19 nt, Homo sapiens
  misc_RNA (1)...(19): siRNA sense strand
gaaagaacagagccaucuc

SEQ ID NO: 1036973 - RNA, 19 nt, Homo sapiens
  misc_RNA (1)...(19): siRNA sense strand
agcaagagcuaugagaaau

SEQ ID NO: 1036974 - RNA, 19 nt, Homo sapiens
  misc_RNA (1)...(19): siRNA sense strand
gauguuucuugauaauugg

SEQ ID NO: 1036975 - RNA, 19 nt, Homo sapiens
  misc_RNA (1)...(19): siRNA sense strand
ccaacuauccagacguuca

SEQ ID NO: 1036976 - RNA, 19 nt, Homo sapiens
  misc_RNA (1)...(19): siRNA sense strand
caaagaagaaagaauacac

SEQ ID NO: 1036977 - RNA, 19 nt, Homo sapiens
  misc_RNA (1)...(19): siRNA sense strand
cauuaccuguggaguacaa

SEQ ID NO: 1036978 - RNA, 19 nt, Homo sapiens
  misc_RNA (1)...(19): siRNA sense strand
gaaaauucuuugggacaga

SEQ ID NO: 1036979 - RNA, 19 nt, Homo sapiens
  misc_RNA (1)...(19): siRNA sense strand
uacagcuccugguauuauu

SEQ ID NO: 1036980 - RNA, 19 nt, Homo sapiens
  misc_RNA (1)...(19): siRNA sense strand
gagcuaugagaaauaacuu

SEQ ID NO: 1036981 - RNA, 19 nt, Homo sapiens
  misc_RNA (1)...(19): siRNA sense strand
ggcagaucauaccauauca

SEQ ID NO: 1036982 - RNA, 19 nt, Homo sapiens
  misc_RNA (1)...(19): siRNA sense strand
agagacacaguaugaaaga

SEQ ID NO: 1036983 - RNA, 19 nt, Homo sapiens
  misc_RNA (1)...(19): siRNA sense strand
uuauuucacuugaccaucu

SEQ ID NO: 1036984 - RNA, 19 nt, Homo sapiens
  misc_RNA (1)...(19): siRNA sense strand
agacauucaucacuaaagc

SEQ ID NO: 1036985 - RNA, 19 nt, Homo sapiens
  misc_RNA (1)...(19): siRNA sense strand
ccauuugugcuucuuucua

SEQ ID NO: 1036986 - RNA, 19 nt, Homo sapiens
  misc_RNA (1)...(19): siRNA sense strand
caaguagcaauaaguuaca

SEQ ID NO: 1036987 - RNA, 19 nt, Homo sapiens
  misc_RNA (1)...(19): siRNA sense strand
gagaauucaacaaauagag

SEQ ID NO: 1036988 - RNA, 19 nt, Homo sapiens
  misc_RNA (1)...(19): siRNA sense strand
ccuguggaguacaacauug

SEQ ID NO: 1036989 - RNA, 19 nt, Homo sapiens
  misc_RNA (1)...(19): siRNA sense strand
ugaaagaacagagccaucu

SEQ ID NO: 1036990 - RNA, 19 nt, Homo sapiens
  misc_RNA (1)...(19): siRNA sense strand
uggaguauuugaguuacaa

SEQ ID NO: 1036991 - RNA, 19 nt, Homo sapiens
  misc_RNA (1)...(19): siRNA sense strand
ugccagacccaaauacuau

SEQ ID NO: 1036992 - RNA, 19 nt, Homo sapiens
  misc_RNA (1)...(19): siRNA sense strand
uggaguacaacauugauga

SEQ ID NO: 1036993 - RNA, 19 nt, Homo sapiens
  misc_RNA (1)...(19): siRNA sense strand
cgaaccuccuucaguccaa

SEQ ID NO: 1036994 - RNA, 19 nt, Homo sapiens
  misc_RNA (1)...(19): siRNA sense strand
uucauucucucugccauuu

SEQ ID NO: 1036995 - RNA, 19 nt, Homo sapiens
  misc_RNA (1)...(19): siRNA sense strand
gagaugucaacaaguuuca

SEQ ID NO: 1036996 - RNA, 19 nt, Homo sapiens
  misc_RNA (1)...(19): siRNA sense strand
cacacaaucuggugaaaau

SEQ ID NO: 1036997 - RNA, 19 nt, Homo sapiens
  misc_RNA (1)...(19): siRNA sense strand
cagaucauaccauaucaca

SEQ ID NO: 1036998 - RNA, 19 nt, Homo sapiens
  misc_RNA (1)...(19): siRNA sense strand
uuucagaggguaugacgaa

SEQ ID NO: 1036999 - RNA, 19 nt, Homo sapiens
  misc_RNA (1)...(19): siRNA sense strand
gagacauucaucacuaaag

SEQ ID NO: 1037000 - RNA, 19 nt, Homo sapiens
  misc_RNA (1)...(19): siRNA sense strand
cgagacauucaucacuaaa

SEQ ID NO: 1037001 - RNA, 19 nt, Homo sapiens
  misc_RNA (1)...(19): siRNA sense strand
agaagaaagaauacacaug

SEQ ID NO: 1037002 - RNA, 19 nt, Homo sapiens
  misc_RNA (1)...(19): siRNA sense strand
uauuauugccugcacauuc

SEQ ID NO: 1037003 - RNA, 19 nt, Homo sapiens
  misc_RNA (1)...(19): siRNA sense strand
ccaaauacugcgguuguuc

SEQ ID NO: 1037004 - RNA, 19 nt, Homo sapiens
  misc_RNA (1)...(19): siRNA sense strand
gaaaauggaaaagaagaga

SEQ ID NO: 1037005 - RNA, 19 nt, Homo sapiens
  misc_RNA (1)...(19): siRNA sense strand
gagaaacucuuaaagcaaa

SEQ ID NO: 1037006 - RNA, 19 nt, Homo sapiens
  misc_RNA (1)...(19): siRNA sense strand
gcacaaugguuaacucuga

SEQ ID NO: 1037007 - RNA, 19 nt, Homo sapiens
  misc_RNA (1)...(19): siRNA sense strand
gaggacauauuucuucuuu

SEQ ID NO: 1037008 - RNA, 19 nt, Homo sapiens
  misc_RNA (1)...(19): siRNA sense strand
gaaguaaccaaucacaaua

SEQ ID NO: 1037009 - RNA, 19 nt, Homo sapiens
  misc_RNA (1)...(19): siRNA sense strand
gugagaaguuggauguuua

SEQ ID NO: 1037010 - RNA, 19 nt, Homo sapiens
  misc_RNA (1)...(19): siRNA sense strand
gaagguggauaaucauuuc

SEQ ID NO: 1037011 - RNA, 19 nt, Homo sapiens
  misc_RNA (1)...(19): siRNA sense strand
ggaaaugugucauaaacca

SEQ ID NO: 1037012 - RNA, 19 nt, Homo sapiens
  misc_RNA (1)...(19): siRNA sense strand
aagaauagcacaaugguua

SEQ ID NO: 1037013 - RNA, 19 nt, Homo sapiens
  misc_RNA (1)...(19): siRNA sense strand
gggagaaacucuuaaagca

SEQ ID NO: 1037014 - RNA, 19 nt, Homo sapiens
  misc_RNA (1)...(19): siRNA sense strand
ugacagaucugacuauuuu

SEQ ID NO: 1037015 - RNA, 19 nt, Homo sapiens
  misc_RNA (1)...(19): siRNA sense strand
gggcacagaugaucaggaa

SEQ ID NO: 1037016 - RNA, 19 nt, Homo sapiens
  misc_RNA (1)...(19): siRNA sense strand
ggacauauuucuucuuuug

SEQ ID NO: 1037017 - RNA, 19 nt, Homo sapiens
  misc_RNA (1)...(19): siRNA sense strand
gaaagaaauguaucaggaa

SEQ ID NO: 1037018 - RNA, 19 nt, Homo sapiens
  misc_RNA (1)...(19): siRNA sense strand
uuacccagcuggcuccuua

SEQ ID NO: 1037019 - RNA, 19 nt, Homo sapiens
  misc_RNA (1)...(19): siRNA sense strand
gcacagaugaucaggaaug

SEQ ID NO: 1037020 - RNA, 19 nt, Homo sapiens
  misc_RNA (1)...(19): siRNA sense strand
caccaagaguucccucaua

SEQ ID NO: 1037021 - RNA, 19 nt, Homo sapiens
  misc_RNA (1)...(19): siRNA sense strand
gaacucaccugcgucaucu

SEQ ID NO: 1037022 - RNA, 19 nt, Homo sapiens
  misc_RNA (1)...(19): siRNA sense strand
gaacaaggaauaccaagag

SEQ ID NO: 1037023 - RNA, 19 nt, Homo sapiens
  misc_RNA (1)...(19): siRNA sense strand
gguuaacucugaggacaua

SEQ ID NO: 1037024 - RNA, 19 nt, Homo sapiens
  misc_RNA (1)...(19): siRNA sense strand
caaggaauaccaagagauu

SEQ ID NO: 1037025 - RNA, 19 nt, Homo sapiens
  misc_RNA (1)...(19): siRNA sense strand
ccagagaaguugggucaaa

SEQ ID NO: 1037026 - RNA, 19 nt, Homo sapiens
  misc_RNA (1)...(19): siRNA sense strand
agaaauguaucaggaacua

SEQ ID NO: 1037027 - RNA, 19 nt, Homo sapiens
  misc_RNA (1)...(19): siRNA sense strand
caaacaccaucccaucgaa

SEQ ID NO: 1037028 - RNA, 19 nt, Homo sapiens
  misc_RNA (1)...(19): siRNA sense strand
uagagagacugaacaagga

SEQ ID NO: 1037029 - RNA, 19 nt, Homo sapiens
  misc_RNA (1)...(19): siRNA sense strand
ccagcuggcuccuuaacuu

SEQ ID NO: 1037030 - RNA, 19 nt, Homo sapiens
  misc_RNA (1)...(19): siRNA sense strand
ggagaaacucuuaaagcaa

SEQ ID NO: 1037031 - RNA, 19 nt, Homo sapiens
  misc_RNA (1)...(19): siRNA sense strand
ucaccugcgucaucuguuu

SEQ ID NO: 1037032 - RNA, 19 nt, Homo sapiens
  misc_RNA (1)...(19): siRNA sense strand
ucagagaaaucuauaugag

SEQ ID NO: 1037033 - RNA, 19 nt, Homo sapiens
  misc_RNA (1)...(19): siRNA sense strand
caaaauggaucaaaagagu

SEQ ID NO: 1037034 - RNA, 19 nt, Homo sapiens
  misc_RNA (1)...(19): siRNA sense strand
gaaaguggaagugugaguu

SEQ ID NO: 1037035 - RNA, 19 nt, Homo sapiens
  misc_RNA (1)...(19): siRNA sense strand
gccagggucuucuccuuug

SEQ ID NO: 1037036 - RNA, 19 nt, Homo sapiens
  misc_RNA (1)...(19): siRNA sense strand
gaaguugggucaaaaugga

SEQ ID NO: 1037037 - RNA, 19 nt, Homo sapiens
  misc_RNA (1)...(19): siRNA sense strand
gagccagggucuucuccuu

SEQ ID NO: 1037038 - RNA, 19 nt, Homo sapiens
  misc_RNA (1)...(19): siRNA sense strand
ugaaguaaccaaucacaau

SEQ ID NO: 1037039 - RNA, 19 nt, Homo sapiens
  misc_RNA (1)...(19): siRNA sense strand
guugguguguuucuugauu

SEQ ID NO: 1037040 - RNA, 19 nt, Homo sapiens
  misc_RNA (1)...(19): siRNA sense strand
ggucuucuccuuugggaaa

SEQ ID NO: 1037041 - RNA, 19 nt, Homo sapiens
  misc_RNA (1)...(19): siRNA sense strand
ugugagaaguuggauguuu

SEQ ID NO: 1037042 - RNA, 19 nt, Homo sapiens
  misc_RNA (1)...(19): siRNA sense strand
uaacucugaggacauauuu

SEQ ID NO: 1037043 - RNA, 19 nt, Homo sapiens
  misc_RNA (1)...(19): siRNA sense strand
ggacucagacuucucacau

SEQ ID NO: 1037044 - RNA, 19 nt, Homo sapiens
  misc_RNA (1)...(19): siRNA sense strand
gaagaauagcacaaugguu

SEQ ID NO: 1037045 - RNA, 19 nt, Homo sapiens
  misc_RNA (1)...(19): siRNA sense strand
gaugugagaaguuggaugu

SEQ ID NO: 1037046 - RNA, 19 nt, Homo sapiens
  misc_RNA (1)...(19): siRNA sense strand
gaguaaacacuugaaagaa

SEQ ID NO: 1037047 - RNA, 19 nt, Homo sapiens
  misc_RNA (1)...(19): siRNA sense strand
agaguaaacacuugaaaga

SEQ ID NO: 1037048 - RNA, 19 nt, Homo sapiens
  misc_RNA (1)...(19): siRNA sense strand
cgaagaggcagcugaggaa

SEQ ID NO: 1037049 - RNA, 19 nt, Homo sapiens
  misc_RNA (1)...(19): siRNA sense strand
cuaauggaaaugugucaua

SEQ ID NO: 1037050 - RNA, 19 nt, Homo sapiens
  misc_RNA (1)...(19): siRNA sense strand
guuuagacguggaccuuug

SEQ ID NO: 1037051 - RNA, 19 nt, Homo sapiens
  misc_RNA (1)...(19): siRNA sense strand
agacguggaccuuugaauu

SEQ ID NO: 1037052 - RNA, 19 nt, Homo sapiens
  misc_RNA (1)...(19): siRNA sense strand
ggcaauuccugagcucuga

SEQ ID NO: 1037053 - RNA, 19 nt, Homo sapiens
  misc_RNA (1)...(19): siRNA sense strand
caagaguucccucauaugg

SEQ ID NO: 1037054 - RNA, 19 nt, Homo sapiens
  misc_RNA (1)...(19): siRNA sense strand
gucugaagguggauaauca

SEQ ID NO: 1037055 - RNA, 19 nt, Homo sapiens
  misc_RNA (1)...(19): siRNA sense strand
gacguggaccuuugaauuc

SEQ ID NO: 1037056 - RNA, 19 nt, Homo sapiens
  misc_RNA (1)...(19): siRNA sense strand
gaucaggaaugaguauagg

SEQ ID NO: 1037057 - RNA, 19 nt, Homo sapiens
  misc_RNA (1)...(19): siRNA sense strand
ggacccauaggcaaacaaa

SEQ ID NO: 1037058 - RNA, 19 nt, Homo sapiens
  misc_RNA (1)...(19): siRNA sense strand
gagcucugagaaacaaaua

SEQ ID NO: 1037059 - RNA, 19 nt, Homo sapiens
  misc_RNA (1)...(19): siRNA sense strand
ugaagguggauaaucauuu

SEQ ID NO: 1037060 - RNA, 19 nt, Homo sapiens
  misc_RNA (1)...(19): siRNA sense strand
ggaagaauagcacaauggu

SEQ ID NO: 1037061 - RNA, 19 nt, Homo sapiens
  misc_RNA (1)...(19): siRNA sense strand
ggaacucaccugcgucauc

SEQ ID NO: 1037062 - RNA, 19 nt, Homo sapiens
  misc_RNA (1)...(19): siRNA sense strand
cacaauaucaggcucuuug

SEQ ID NO: 1037063 - RNA, 19 nt, Homo sapiens
  misc_RNA (1)...(19): siRNA sense strand
ucacuggacugguguacag

SEQ ID NO: 1037064 - RNA, 19 nt, Homo sapiens
  misc_RNA (1)...(19): siRNA sense strand
gcucugagaaacaaauaug

SEQ ID NO: 1037065 - RNA, 19 nt, Homo sapiens
  misc_RNA (1)...(19): siRNA sense strand
accaagaguucccucauau

SEQ ID NO: 1037066 - RNA, 19 nt, Homo sapiens
  misc_RNA (1)...(19): siRNA sense strand
gaaauguaucaggaacuaa

SEQ ID NO: 1037067 - RNA, 19 nt, Homo sapiens
  misc_RNA (1)...(19): siRNA sense strand
gguggauaaucauuucaau

SEQ ID NO: 1037068 - RNA, 19 nt, Homo sapiens
  misc_RNA (1)...(19): siRNA sense strand
ggaacuaauggaaaugugu

SEQ ID NO: 1037069 - RNA, 19 nt, Homo sapiens
  misc_RNA (1)...(19): siRNA sense strand
uaucaggaacuaauggaaa

SEQ ID NO: 1037070 - RNA, 19 nt, Homo sapiens
  misc_RNA (1)...(19): siRNA sense strand
caacauuuagagagacuga

SEQ ID NO: 1037071 - RNA, 19 nt, Homo sapiens
  misc_RNA (1)...(19): siRNA sense strand
ggauaaucauuucaaucuc

SEQ ID NO: 1037072 - RNA, 19 nt, Homo sapiens
  misc_RNA (1)...(19): siRNA sense strand
cacagaugaucaggaauga

SEQ ID NO: 1037073 - RNA, 19 nt, Homo sapiens
  misc_RNA (1)...(19): siRNA sense strand
ggguugguguguuucuuga

SEQ ID NO: 1037074 - RNA, 19 nt, Homo sapiens
  misc_RNA (1)...(19): siRNA sense strand
ggagacaucguggcaagga

SEQ ID NO: 1037075 - RNA, 19 nt, Homo sapiens
  misc_RNA (1)...(19): siRNA sense strand
ccugagcucugagaaacaa

SEQ ID NO: 1037076 - RNA, 19 nt, Homo sapiens
  misc_RNA (1)...(19): siRNA sense strand
aaaguggaagugugaguuu

SEQ ID NO: 1037077 - RNA, 19 nt, Homo sapiens
  misc_RNA (1)...(19): siRNA sense strand
gaacaccgggagaaacucu

SEQ ID NO: 1037078 - RNA, 19 nt, Homo sapiens
  misc_RNA (1)...(19): siRNA sense strand
gacucagacuucucacaug

SEQ ID NO: 1037079 - RNA, 19 nt, Homo sapiens
  misc_RNA (1)...(19): siRNA sense strand
guggaccuuugaauucuga

SEQ ID NO: 1037080 - RNA, 19 nt, Homo sapiens
  misc_RNA (1)...(19): siRNA sense strand
ugcauccgguucuccauaa

SEQ ID NO: 1037081 - RNA, 19 nt, Homo sapiens
  misc_RNA (1)...(19): siRNA sense strand
gaugaucaggaaugaguau

SEQ ID NO: 1037082 - RNA, 19 nt, Homo sapiens
  misc_RNA (1)...(19): siRNA sense strand
ucaaaagaguaaacacuug

SEQ ID NO: 1037083 - RNA, 19 nt, Homo sapiens
  misc_RNA (1)...(19): siRNA sense strand
gaggggcaaugugguuuua

SEQ ID NO: 1037084 - RNA, 19 nt, Homo sapiens
  misc_RNA (1)...(19): siRNA sense strand
ugaagaauuuagugaccau

SEQ ID NO: 1037085 - RNA, 19 nt, Homo sapiens
  misc_RNA (1)...(19): siRNA sense strand
cagaugaucaggaaugagu

SEQ ID NO: 1037086 - RNA, 19 nt, Homo sapiens
  misc_RNA (1)...(19): siRNA sense strand
uagugaccauugccagaaa

SEQ ID NO: 1037087 - RNA, 19 nt, Homo sapiens
  misc_RNA (1)...(19): siRNA sense strand
cagcuggcuccuuaacuuu

SEQ ID NO: 1037088 - RNA, 19 nt, Homo sapiens
  misc_RNA (1)...(19): siRNA sense strand
uaaggaagaauagcacaau

SEQ ID NO: 1037089 - RNA, 19 nt, Homo sapiens
  misc_RNA (1)...(19): siRNA sense strand
ucaggaaugaguauaggaa

SEQ ID NO: 1037090 - RNA, 19 nt, Homo sapiens
  misc_RNA (1)...(19): siRNA sense strand
agaauagcacaaugguuaa

SEQ ID NO: 1037091 - RNA, 19 nt, Homo sapiens
  misc_RNA (1)...(19): siRNA sense strand
acaccgggagaaacucuua

SEQ ID NO: 1037092 - RNA, 19 nt, Homo sapiens
  misc_RNA (1)...(19): siRNA sense strand
aaggaagaauagcacaaug

SEQ ID NO: 1037093 - RNA, 19 nt, Homo sapiens
  misc_RNA (1)...(19): siRNA sense strand
cagggaaccaucaccgaaa

SEQ ID NO: 1037094 - RNA, 19 nt, Homo sapiens
  misc_RNA (1)...(19): siRNA sense strand
gcacggggcucacaaacac

SEQ ID NO: 1037095 - RNA, 19 nt, Homo sapiens
  misc_RNA (1)...(19): siRNA sense strand
aacaaggaauaccaagaga

SEQ ID NO: 1037096 - RNA, 19 nt, Homo sapiens
  misc_RNA (1)...(19): siRNA sense strand
ugaacaaggaauaccaaga

SEQ ID NO: 1037097 - RNA, 19 nt, Homo sapiens
  misc_RNA (1)...(19): siRNA sense strand
ccaagaguucccucauaug

SEQ ID NO: 1037098 - RNA, 19 nt, Homo sapiens
  misc_RNA (1)...(19): siRNA sense strand
gaaaauggacuucaaaacc

SEQ ID NO: 1037099 - RNA, 19 nt, Homo sapiens
  misc_RNA (1)...(19): siRNA sense strand
gaggaugugagaaguugga

SEQ ID NO: 1037100 - RNA, 19 nt, Homo sapiens
  misc_RNA (1)...(19): siRNA sense strand
guaaccaaucacaauauca

SEQ ID NO: 1037101 - RNA, 19 nt, Homo sapiens
  misc_RNA (1)...(19): siRNA sense strand
aaaauggacuucaaaacca

SEQ ID NO: 1037102 - RNA, 19 nt, Homo sapiens
  misc_RNA (1)...(19): siRNA sense strand
uugaggaugugagaaguug

SEQ ID NO: 1037103 - RNA, 19 nt, Homo sapiens
  misc_RNA (1)...(19): siRNA sense strand
gaagaauuuagugaccauu

SEQ ID NO: 1037104 - RNA, 19 nt, Homo sapiens
  misc_RNA (1)...(19): siRNA sense strand
cauaggcaaacaaagaaga

SEQ ID NO: 1037105 - RNA, 19 nt, Homo sapiens
  misc_RNA (1)...(19): siRNA sense strand
cgaacugccuuuccucuuu

SEQ ID NO: 1037106 - RNA, 19 nt, Homo sapiens
  misc_RNA (1)...(19): siRNA sense strand
gaacugccuuuccucuuug

SEQ ID NO: 1037107 - RNA, 19 nt, Homo sapiens
  misc_RNA (1)...(19): siRNA sense strand
acucggaacuggcggaaua

SEQ ID NO: 1037108 - RNA, 19 nt, Homo sapiens
  misc_RNA (1)...(19): siRNA sense strand
ggacaucguugugaaaggu

SEQ ID NO: 1037109 - RNA, 19 nt, Homo sapiens
  misc_RNA (1)...(19): siRNA sense strand
ggacuaugguggcuucucu

SEQ ID NO: 1037110 - RNA, 19 nt, Homo sapiens
  misc_RNA (1)...(19): siRNA sense strand
cgucgaggcuucacucuuc

SEQ ID NO: 1037111 - RNA, 19 nt, Homo sapiens
  misc_RNA (1)...(19): siRNA sense strand
gcaacgcauucgcgcugua

SEQ ID NO: 1037112 - RNA, 19 nt, Homo sapiens
  misc_RNA (1)...(19): siRNA sense strand
guucggcgcugcucgguau

SEQ ID NO: 1037113 - RNA, 19 nt, Homo sapiens
  misc_RNA (1)...(19): siRNA sense strand
ggaacccgauucugagaca

SEQ ID NO: 1037114 - RNA, 19 nt, Homo sapiens
  misc_RNA (1)...(19): siRNA sense strand
gcuggugaaugccuacuug

SEQ ID NO: 1037115 - RNA, 19 nt, Homo sapiens
  misc_RNA (1)...(19): siRNA sense strand
gggaagugaucgccuccaa

SEQ ID NO: 1037116 - RNA, 19 nt, Homo sapiens
  misc_RNA (1)...(19): siRNA sense strand
gcuccgggaugaacucuuc

SEQ ID NO: 1037117 - RNA, 19 nt, Homo sapiens
  misc_RNA (1)...(19): siRNA sense strand
gacugugucuggucggaaa

SEQ ID NO: 1037118 - RNA, 19 nt, Homo sapiens
  misc_RNA (1)...(19): siRNA sense strand
ggaauaugcgcgcuucauc

SEQ ID NO: 1037119 - RNA, 19 nt, Homo sapiens
  misc_RNA (1)...(19): siRNA sense strand
caacuccucaccugcauga

SEQ ID NO: 1037120 - RNA, 19 nt, Homo sapiens
  misc_RNA (1)...(19): siRNA sense strand
ucaccagguuugagaacuu

SEQ ID NO: 1037121 - RNA, 19 nt, Homo sapiens
  misc_RNA (1)...(19): siRNA sense strand
gcucagggacauacaggaa

SEQ ID NO: 1037122 - RNA, 19 nt, Homo sapiens
  misc_RNA (1)...(19): siRNA sense strand
ucaugcagcuggugaaugc

SEQ ID NO: 1037123 - RNA, 19 nt, Homo sapiens
  misc_RNA (1)...(19): siRNA sense strand
cgaggacgaggaaaccuuu

SEQ ID NO: 1037124 - RNA, 19 nt, Homo sapiens
  misc_RNA (1)...(19): siRNA sense strand
cugaggaacccgauucuga

SEQ ID NO: 1037125 - RNA, 19 nt, Homo sapiens
  misc_RNA (1)...(19): siRNA sense strand
gaggaacccgauucugaga

SEQ ID NO: 1037126 - RNA, 19 nt, Homo sapiens
  misc_RNA (1)...(19): siRNA sense strand
cauccacagugucagcuau

SEQ ID NO: 1037127 - RNA, 19 nt, Homo sapiens
  misc_RNA (1)...(19): siRNA sense strand
ucagggacauacaggaaag

SEQ ID NO: 1037128 - RNA, 19 nt, Homo sapiens
  misc_RNA (1)...(19): siRNA sense strand
gacuaugucugcgucuuca

SEQ ID NO: 1037129 - RNA, 19 nt, Homo sapiens
  misc_RNA (1)...(19): siRNA sense strand
ugucagcuauggccaugug

SEQ ID NO: 1037130 - RNA, 19 nt, Homo sapiens
  misc_RNA (1)...(19): siRNA sense strand
caccagguuugagaacuug

SEQ ID NO: 1037131 - RNA, 19 nt, Homo sapiens
  misc_RNA (1)...(19): siRNA sense strand
gagccugcaucgggacuuc

SEQ ID NO: 1037132 - RNA, 19 nt, Homo sapiens
  misc_RNA (1)...(19): siRNA sense strand
ccgacgugcucaccagguu

SEQ ID NO: 1037133 - RNA, 19 nt, Homo sapiens
  misc_RNA (1)...(19): siRNA sense strand
ugugaaagguuggcuguac

SEQ ID NO: 1037134 - RNA, 19 nt, Homo sapiens
  misc_RNA (1)...(19): siRNA sense strand
gagcccauccacaguguca

SEQ ID NO: 1037135 - RNA, 19 nt, Homo sapiens
  misc_RNA (1)...(19): siRNA sense strand
gaugcagggugugcuccaa

SEQ ID NO: 1037136 - RNA, 19 nt, Homo sapiens
  misc_RNA (1)...(19): siRNA sense strand
gaucaugcagcuggugaau

SEQ ID NO: 1037137 - RNA, 19 nt, Homo sapiens
  misc_RNA (1)...(19): siRNA sense strand
ggagccucaucccggagaa

SEQ ID NO: 1037138 - RNA, 19 nt, Homo sapiens
  misc_RNA (1)...(19): siRNA sense strand
ggacgaggaaaccuuugag

SEQ ID NO: 1037139 - RNA, 19 nt, Homo sapiens
  misc_RNA (1)...(19): siRNA sense strand
cgaggacgaggacgaggaa

SEQ ID NO: 1037140 - RNA, 19 nt, Homo sapiens
  misc_RNA (1)...(19): siRNA sense strand
gggacauacaggaaaguug

SEQ ID NO: 1037141 - RNA, 19 nt, Homo sapiens
  misc_RNA (1)...(19): siRNA sense strand
cccagacggucacgaacug

SEQ ID NO: 1037142 - RNA, 19 nt, Homo sapiens
  misc_RNA (1)...(19): siRNA sense strand
gcgcaggcguaaggagaca

SEQ ID NO: 1037143 - RNA, 19 nt, Homo sapiens
  misc_RNA (1)...(19): siRNA sense strand
gacgugcucaccagguuug

SEQ ID NO: 1037144 - RNA, 19 nt, Homo sapiens
  misc_RNA (1)...(19): siRNA sense strand
cgacugggcuguuggagau

SEQ ID NO: 1037145 - RNA, 19 nt, Homo sapiens
  misc_RNA (1)...(19): siRNA sense strand
gaacgccgcaggcuguuug

SEQ ID NO: 1037146 - RNA, 19 nt, Homo sapiens
  misc_RNA (1)...(19): siRNA sense strand
caugauuccggucagauua

SEQ ID NO: 1037147 - RNA, 19 nt, Homo sapiens
  misc_RNA (1)...(19): siRNA sense strand
ucagauuacuacgggauuu

SEQ ID NO: 1037148 - RNA, 19 nt, Homo sapiens
  misc_RNA (1)...(19): siRNA sense strand
cgagggaagcagccuuuga

SEQ ID NO: 1037149 - RNA, 19 nt, Homo sapiens
  misc_RNA (1)...(19): siRNA sense strand
ucagcagcucgcuuucuua

SEQ ID NO: 1037150 - RNA, 19 nt, Homo sapiens
  misc_RNA (1)...(19): siRNA sense strand
cuucgcugcugucgcguuu

SEQ ID NO: 1037151 - RNA, 19 nt, Homo sapiens
  misc_RNA (1)...(19): siRNA sense strand
cagcagcucgcuuucuuag

SEQ ID NO: 1037152 - RNA, 19 nt, Homo sapiens
  misc_RNA (1)...(19): siRNA sense strand
gagggaagcagccuuugac

SEQ ID NO: 1037153 - RNA, 19 nt, Homo sapiens
  misc_RNA (1)...(19): siRNA sense strand
acuacgggauuucgaggaa

SEQ ID NO: 1037154 - RNA, 19 nt, Homo sapiens
  misc_RNA (1)...(19): siRNA sense strand
ccaugauuccggucagauu

SEQ ID NO: 1037155 - RNA, 19 nt, Homo sapiens
  misc_RNA (1)...(19): siRNA sense strand
aaauuaaccggcagcuguu

SEQ ID NO: 1037156 - RNA, 19 nt, Homo sapiens
  misc_RNA (1)...(19): siRNA sense strand
ggaacgccgcaggcuguuu

SEQ ID NO: 1037157 - RNA, 19 nt, Homo sapiens
  misc_RNA (1)...(19): siRNA sense strand
ggcgagggaagcagccuuu

SEQ ID NO: 1037158 - RNA, 19 nt, Homo sapiens
  misc_RNA (1)...(19): siRNA sense strand
cccaucagcagcucgcuuu

SEQ ID NO: 1037159 - RNA, 19 nt, Homo sapiens
  misc_RNA (1)...(19): siRNA sense strand
gaacuucucaucucacuuc

SEQ ID NO: 1037160 - RNA, 19 nt, Homo sapiens
  misc_RNA (1)...(19): siRNA sense strand
ccacguggcuucauacuac

SEQ ID NO: 1037161 - RNA, 19 nt, Homo sapiens
  misc_RNA (1)...(19): siRNA sense strand
gcuuggcgcugucaucuau

SEQ ID NO: 1037162 - RNA, 19 nt, Homo sapiens
  misc_RNA (1)...(19): siRNA sense strand
ccaacuggucggaggauua

SEQ ID NO: 1037163 - RNA, 19 nt, Homo sapiens
  misc_RNA (1)...(19): siRNA sense strand
caucucacuucaaccguuu

SEQ ID NO: 1037164 - RNA, 19 nt, Homo sapiens
  misc_RNA (1)...(19): siRNA sense strand
gcccaccacugccuacuuc

SEQ ID NO: 1037165 - RNA, 19 nt, Homo sapiens
  misc_RNA (1)...(19): siRNA sense strand
aaaccuggccucagaacuu

SEQ ID NO: 1037166 - RNA, 19 nt, Homo sapiens
  misc_RNA (1)...(19): siRNA sense strand
gcccaggaguucaucuaug

SEQ ID NO: 1037167 - RNA, 19 nt, Homo sapiens
  misc_RNA (1)...(19): siRNA sense strand
gcguccacguggcuucaua

SEQ ID NO: 1037168 - RNA, 19 nt, Homo sapiens
  misc_RNA (1)...(19): siRNA sense strand
gcgcugucaucuauaacug

SEQ ID NO: 1037169 - RNA, 19 nt, Homo sapiens
  misc_RNA (1)...(19): siRNA sense strand
cccaagaccuggagaagac

SEQ ID NO: 1037170 - RNA, 19 nt, Homo sapiens
  misc_RNA (1)...(19): siRNA sense strand
guggauggacggcacauau

SEQ ID NO: 1037171 - RNA, 19 nt, Homo sapiens
  misc_RNA (1)...(19): siRNA sense strand
ugcccgaggugcccaugua

SEQ ID NO: 1037172 - RNA, 19 nt, Homo sapiens
  misc_RNA (1)...(19): siRNA sense strand
uggauggacggcacauaua

SEQ ID NO: 1037173 - RNA, 19 nt, Homo sapiens
  misc_RNA (1)...(19): siRNA sense strand
caaauucuggguuguggau

SEQ ID NO: 1037174 - RNA, 19 nt, Homo sapiens
  misc_RNA (1)...(19): siRNA sense strand
ggauggacggcacauauac

SEQ ID NO: 1037175 - RNA, 19 nt, Homo sapiens
  misc_RNA (1)...(19): siRNA sense strand
gagggacuccugccagcuu

SEQ ID NO: 1037176 - RNA, 19 nt, Homo sapiens
  misc_RNA (1)...(19): siRNA sense strand
gcccuuccacggccucuuu

SEQ ID NO: 1037177 - RNA, 19 nt, Homo sapiens
  misc_RNA (1)...(19): siRNA sense strand
cagcuuguccuuguggaaa

SEQ ID NO: 1037178 - RNA, 19 nt, Homo sapiens
  misc_RNA (1)...(19): siRNA sense strand
cccaggaguucaucuaugc

SEQ ID NO: 1037179 - RNA, 19 nt, Homo sapiens
  misc_RNA (1)...(19): siRNA sense strand
uuggcgcugucaucuauaa

SEQ ID NO: 1037180 - RNA, 19 nt, Homo sapiens
  misc_RNA (1)...(19): siRNA sense strand
ccugccagcuuguccuugu

SEQ ID NO: 1037181 - RNA, 19 nt, Homo sapiens
  misc_RNA (1)...(19): siRNA sense strand
cuucucaucucacuucaac

SEQ ID NO: 1037182 - RNA, 19 nt, Homo sapiens
  misc_RNA (1)...(19): siRNA sense strand
gcccaagaccuggagaaga

SEQ ID NO: 1037183 - RNA, 19 nt, Homo sapiens
  misc_RNA (1)...(19): siRNA sense strand
gauggacggcacauauaca

SEQ ID NO: 1037184 - RNA, 19 nt, Homo sapiens
  misc_RNA (1)...(19): siRNA sense strand
acagagaggcuggcacguu

SEQ ID NO: 1037185 - RNA, 19 nt, Homo sapiens
  misc_RNA (1)...(19): siRNA sense strand
gagcuuggcgcugucaucu

SEQ ID NO: 1037186 - RNA, 19 nt, Homo sapiens
  misc_RNA (1)...(19): siRNA sense strand
cccaaaaccuggccucaga

SEQ ID NO: 1037187 - RNA, 19 nt, Homo sapiens
  misc_RNA (1)...(19): siRNA sense strand
gcgcccaggaguucaucua

SEQ ID NO: 1037188 - RNA, 19 nt, Homo sapiens
  misc_RNA (1)...(19): siRNA sense strand
gcagggugaaccacagcaa

SEQ ID NO: 1037189 - RNA, 19 nt, Homo sapiens
  misc_RNA (1)...(19): siRNA sense strand
caacuggucggaggauuac

SEQ ID NO: 1037190 - RNA, 19 nt, Homo sapiens
  misc_RNA (1)...(19): siRNA sense strand
ggaaguaccucuuuaauua

SEQ ID NO: 1037191 - RNA, 19 nt, Homo sapiens
  misc_RNA (1)...(19): siRNA sense strand
gaaauucuaccaccuauua

SEQ ID NO: 1037192 - RNA, 19 nt, Homo sapiens
  misc_RNA (1)...(19): siRNA sense strand
gaagaaggcuaaccucgaa

SEQ ID NO: 1037193 - RNA, 19 nt, Homo sapiens
  misc_RNA (1)...(19): siRNA sense strand
gaacaauuccgaagugaaa

SEQ ID NO: 1037194 - RNA, 19 nt, Homo sapiens
  misc_RNA (1)...(19): siRNA sense strand
gcauauaucaggcauuuaa

SEQ ID NO: 1037195 - RNA, 19 nt, Homo sapiens
  misc_RNA (1)...(19): siRNA sense strand
ggaaggcacuggaggaguu

SEQ ID NO: 1037196 - RNA, 19 nt, Homo sapiens
  misc_RNA (1)...(19): siRNA sense strand
gagaggagcucagaagaga

SEQ ID NO: 1037197 - RNA, 19 nt, Homo sapiens
  misc_RNA (1)...(19): siRNA sense strand
gggcauauaucaggcauuu

SEQ ID NO: 1037198 - RNA, 19 nt, Homo sapiens
  misc_RNA (1)...(19): siRNA sense strand
gagaagagaagaaggcuaa

SEQ ID NO: 1037199 - RNA, 19 nt, Homo sapiens
  misc_RNA (1)...(19): siRNA sense strand
ggagaaugaugcagcaguu

SEQ ID NO: 1037200 - RNA, 19 nt, Homo sapiens
  misc_RNA (1)...(19): siRNA sense strand
gaccuaaaguuaagcagaa

SEQ ID NO: 1037201 - RNA, 19 nt, Homo sapiens
  misc_RNA (1)...(19): siRNA sense strand
gaugaugaaucucuacaau

SEQ ID NO: 1037202 - RNA, 19 nt, Homo sapiens
  misc_RNA (1)...(19): siRNA sense strand
gcuauaggguucggaagua

SEQ ID NO: 1037203 - RNA, 19 nt, Homo sapiens
  misc_RNA (1)...(19): siRNA sense strand
agauaucaccgaaguauua

SEQ ID NO: 1037204 - RNA, 19 nt, Homo sapiens
  misc_RNA (1)...(19): siRNA sense strand
caccgaagaccuaaaguua

SEQ ID NO: 1037205 - RNA, 19 nt, Homo sapiens
  misc_RNA (1)...(19): siRNA sense strand
guucggaaguaccucuuua

SEQ ID NO: 1037206 - RNA, 19 nt, Homo sapiens
  misc_RNA (1)...(19): siRNA sense strand
ccaccagccuuacugauug

SEQ ID NO: 1037207 - RNA, 19 nt, Homo sapiens
  misc_RNA (1)...(19): siRNA sense strand
ucaacuaacugugcaggua

SEQ ID NO: 1037208 - RNA, 19 nt, Homo sapiens
  misc_RNA (1)...(19): siRNA sense strand
ggaggaguuugcagaaaug

SEQ ID NO: 1037209 - RNA, 19 nt, Homo sapiens
  misc_RNA (1)...(19): siRNA sense strand
caugggagcugcaauuaca

SEQ ID NO: 1037210 - RNA, 19 nt, Homo sapiens
  misc_RNA (1)...(19): siRNA sense strand
gaaagaaagagaagagaag

SEQ ID NO: 1037211 - RNA, 19 nt, Homo sapiens
  misc_RNA (1)...(19): siRNA sense strand
aaagaacaauuccgaagug

SEQ ID NO: 1037212 - RNA, 19 nt, Homo sapiens
  misc_RNA (1)...(19): siRNA sense strand
ggaguuugcagaaaugaaa

SEQ ID NO: 1037213 - RNA, 19 nt, Homo sapiens
  misc_RNA (1)...(19): siRNA sense strand
gcaaguaugguccuauuuc

SEQ ID NO: 1037214 - RNA, 19 nt, Homo sapiens
  misc_RNA (1)...(19): siRNA sense strand
gaaugaugcagcaguuaaa

SEQ ID NO: 1037215 - RNA, 19 nt, Homo sapiens
  misc_RNA (1)...(19): siRNA sense strand
gaaccaaucgaugaguuaa

SEQ ID NO: 1037216 - RNA, 19 nt, Homo sapiens
  misc_RNA (1)...(19): siRNA sense strand
ggauuuccagacuguauua

SEQ ID NO: 1037217 - RNA, 19 nt, Homo sapiens
  misc_RNA (1)...(19): siRNA sense strand
uaacugugcagguagcaua

SEQ ID NO: 1037218 - RNA, 19 nt, Homo sapiens
  misc_RNA (1)...(19): siRNA sense strand
gaaaugaaagaaagagaag

SEQ ID NO: 1037219 - RNA, 19 nt, Homo sapiens
  misc_RNA (1)...(19): siRNA sense strand
gcagguagcauauuauacu

SEQ ID NO: 1037220 - RNA, 19 nt, Homo sapiens
  misc_RNA (1)...(19): siRNA sense strand
gaugucaaguucgggcaua

SEQ ID NO: 1037221 - RNA, 19 nt, Homo sapiens
  misc_RNA (1)...(19): siRNA sense strand
ugacaaggauuuccagacu

SEQ ID NO: 1037222 - RNA, 19 nt, Homo sapiens
  misc_RNA (1)...(19): siRNA sense strand
aguaugguccuauuucuua

SEQ ID NO: 1037223 - RNA, 19 nt, Homo sapiens
  misc_RNA (1)...(19): siRNA sense strand
gcagaaagcaauaucaacu

SEQ ID NO: 1037224 - RNA, 19 nt, Homo sapiens
  misc_RNA (1)...(19): siRNA sense strand
ugcaauggcugucaggauu

SEQ ID NO: 1037225 - RNA, 19 nt, Homo sapiens
  misc_RNA (1)...(19): siRNA sense strand
ccgaagaccuaaaguuaag

SEQ ID NO: 1037226 - RNA, 19 nt, Homo sapiens
  misc_RNA (1)...(19): siRNA sense strand
ugaugaaucucuacaaugc

SEQ ID NO: 1037227 - RNA, 19 nt, Homo sapiens
  misc_RNA (1)...(19): siRNA sense strand
gcauuuaucaagcaaguau

SEQ ID NO: 1037228 - RNA, 19 nt, Homo sapiens
  misc_RNA (1)...(19): siRNA sense strand
acaauucacccuucagaaa

SEQ ID NO: 1037229 - RNA, 19 nt, Homo sapiens
  misc_RNA (1)...(19): siRNA sense strand
cagguagcauauuauacua

SEQ ID NO: 1037230 - RNA, 19 nt, Homo sapiens
  misc_RNA (1)...(19): siRNA sense strand
cagaaccaaucgaugaguu

SEQ ID NO: 1037231 - RNA, 19 nt, Homo sapiens
  misc_RNA (1)...(19): siRNA sense strand
caaguucgggcauauauca

SEQ ID NO: 1037232 - RNA, 19 nt, Homo sapiens
  misc_RNA (1)...(19): siRNA sense strand
gagcucuucucaaaguaug

SEQ ID NO: 1037233 - RNA, 19 nt, Homo sapiens
  misc_RNA (1)...(19): siRNA sense strand
agaaauggaucugugacaa

SEQ ID NO: 1037234 - RNA, 19 nt, Homo sapiens
  misc_RNA (1)...(19): siRNA sense strand
caaguaugguccuauuucu

SEQ ID NO: 1037235 - RNA, 19 nt, Homo sapiens
  misc_RNA (1)...(19): siRNA sense strand
aagcaaguaugguccuauu

SEQ ID NO: 1037236 - RNA, 19 nt, Homo sapiens
  misc_RNA (1)...(19): siRNA sense strand
gagaaugaugcagcaguua

SEQ ID NO: 1037237 - RNA, 19 nt, Homo sapiens
  misc_RNA (1)...(19): siRNA sense strand
cagaaagcaauaucaacua

SEQ ID NO: 1037238 - RNA, 19 nt, Homo sapiens
  misc_RNA (1)...(19): siRNA sense strand
gagauuaccaagcccgaaa

SEQ ID NO: 1037239 - RNA, 19 nt, Homo sapiens
  misc_RNA (1)...(19): siRNA sense strand
agagaccaaugaugcaauu

SEQ ID NO: 1037240 - RNA, 19 nt, Homo sapiens
  misc_RNA (1)...(19): siRNA sense strand
gugcagguagcauauuaua

SEQ ID NO: 1037241 - RNA, 19 nt, Homo sapiens
  misc_RNA (1)...(19): siRNA sense strand
cggaaguaccucuuuaauu

SEQ ID NO: 1037242 - RNA, 19 nt, Homo sapiens
  misc_RNA (1)...(19): siRNA sense strand
acaaggauuuccagacugu

SEQ ID NO: 1037243 - RNA, 19 nt, Homo sapiens
  misc_RNA (1)...(19): siRNA sense strand
gaaauggaucugugacaag

SEQ ID NO: 1037244 - RNA, 19 nt, Homo sapiens
  misc_RNA (1)...(19): siRNA sense strand
agagaggaauggcugcaaa

SEQ ID NO: 1037245 - RNA, 19 nt, Homo sapiens
  misc_RNA (1)...(19): siRNA sense strand
ccaaugaugcaauuaggaa

SEQ ID NO: 1037246 - RNA, 19 nt, Homo sapiens
  misc_RNA (1)...(19): siRNA sense strand
gaaagaguaccugaaaguc

SEQ ID NO: 1037247 - RNA, 19 nt, Homo sapiens
  misc_RNA (1)...(19): siRNA sense strand
caaagaacaauuccgaagu

SEQ ID NO: 1037248 - RNA, 19 nt, Homo sapiens
  misc_RNA (1)...(19): siRNA sense strand
gaccaaugaugcaauuagg

SEQ ID NO: 1037249 - RNA, 19 nt, Homo sapiens
  misc_RNA (1)...(19): siRNA sense strand
cugugcagguagcauauua

SEQ ID NO: 1037250 - RNA, 19 nt, Homo sapiens
  misc_RNA (1)...(19): siRNA sense strand
caaagcugguuucgaggau

SEQ ID NO: 1037251 - RNA, 19 nt, Homo sapiens
  misc_RNA (1)...(19): siRNA sense strand
ucaaugcauuuaucaagca

SEQ ID NO: 1037252 - RNA, 19 nt, Homo sapiens
  misc_RNA (1)...(19): siRNA sense strand
cgagauaucaccgaaguau

SEQ ID NO: 1037253 - RNA, 19 nt, Homo sapiens
  misc_RNA (1)...(19): siRNA sense strand
cgaaagggaagagaagaaa

SEQ ID NO: 1037254 - RNA, 19 nt, Homo sapiens
  misc_RNA (1)...(19): siRNA sense strand
ugaaagaguaccugaaagu

SEQ ID NO: 1037255 - RNA, 19 nt, Homo sapiens
  misc_RNA (1)...(19): siRNA sense strand
uguuguagauccauuuaga

SEQ ID NO: 1037256 - RNA, 19 nt, Homo sapiens
  misc_RNA (1)...(19): siRNA sense strand
uggaggaguuugcagaaau

SEQ ID NO: 1037257 - RNA, 19 nt, Homo sapiens
  misc_RNA (1)...(19): siRNA sense strand
gguccuauuucuuacaaag

SEQ ID NO: 1037258 - RNA, 19 nt, Homo sapiens
  misc_RNA (1)...(19): siRNA sense strand
ugaaagaaagagaagagaa

SEQ ID NO: 1037259 - RNA, 19 nt, Homo sapiens
  misc_RNA (1)...(19): siRNA sense strand
uuaccaagcccgaaagaug

SEQ ID NO: 1037260 - RNA, 19 nt, Homo sapiens
  misc_RNA (1)...(19): siRNA sense strand
gaagugaaaauccuaagaa

SEQ ID NO: 1037261 - RNA, 19 nt, Homo sapiens
  misc_RNA (1)...(19): siRNA sense strand
gcauuuaaacaggauugua

SEQ ID NO: 1037262 - RNA, 19 nt, Homo sapiens
  misc_RNA (1)...(19): siRNA sense strand
uggcagaaccaaucgauga

SEQ ID NO: 1037263 - RNA, 19 nt, Homo sapiens
  misc_RNA (1)...(19): siRNA sense strand
uugcagaaaugaaagaaag

SEQ ID NO: 1037264 - RNA, 19 nt, Homo sapiens
  misc_RNA (1)...(19): siRNA sense strand
gugaaaauccuaagaaaug

SEQ ID NO: 1037265 - RNA, 19 nt, Homo sapiens
  misc_RNA (1)...(19): siRNA sense strand
guacaucccaucaaugcau

SEQ ID NO: 1037266 - RNA, 19 nt, Homo sapiens
  misc_RNA (1)...(19): siRNA sense strand
ucaccgaaguauuagaaca

SEQ ID NO: 1037267 - RNA, 19 nt, Homo sapiens
  misc_RNA (1)...(19): siRNA sense strand
agaaugaugcagcaguuaa

SEQ ID NO: 1037268 - RNA, 19 nt, Homo sapiens
  misc_RNA (1)...(19): siRNA sense strand
gaagagaagaaaagagauu

SEQ ID NO: 1037269 - RNA, 19 nt, Homo sapiens
  misc_RNA (1)...(19): siRNA sense strand
aaaaguacaucccaucaau

SEQ ID NO: 1037270 - RNA, 19 nt, Homo sapiens
  misc_RNA (1)...(19): siRNA sense strand
uaacacaccgaagaccuaa

SEQ ID NO: 1037271 - RNA, 19 nt, Homo sapiens
  misc_RNA (1)...(19): siRNA sense strand
gagauaucaccgaaguauu

SEQ ID NO: 1037272 - RNA, 19 nt, Homo sapiens
  misc_RNA (1)...(19): siRNA sense strand
agaaccaaucgaugaguua

SEQ ID NO: 1037273 - RNA, 19 nt, Homo sapiens
  misc_RNA (1)...(19): siRNA sense strand
gaagaaaagagauuaccaa

SEQ ID NO: 1037274 - RNA, 19 nt, Homo sapiens
  misc_RNA (1)...(19): siRNA sense strand
uaucaccgaaguauuagaa

SEQ ID NO: 1037275 - RNA, 19 nt, Homo sapiens
  misc_RNA (1)...(19): siRNA sense strand
caaucgaugaguuaaaguu

SEQ ID NO: 1037276 - RNA, 19 nt, Homo sapiens
  misc_RNA (1)...(19): siRNA sense strand
cuaagaaauggaucuguga

SEQ ID NO: 1037277 - RNA, 19 nt, Homo sapiens
  misc_RNA (1)...(19): siRNA sense strand
caucaaugcauuuaucaag

SEQ ID NO: 1037278 - RNA, 19 nt, Homo sapiens
  misc_RNA (1)...(19): siRNA sense strand
gcaauggcugucaggauuc

SEQ ID NO: 1037279 - RNA, 19 nt, Homo sapiens
  misc_RNA (1)...(19): siRNA sense strand
aagcuggacagauuguaua

SEQ ID NO: 1037280 - RNA, 19 nt, Homo sapiens
  misc_RNA (1)...(19): siRNA sense strand
aagaacaauuccgaaguga

SEQ ID NO: 1037281 - RNA, 19 nt, Homo sapiens
  misc_RNA (1)...(19): siRNA sense strand
ucaagcaaguaugguccua

SEQ ID NO: 1037282 - RNA, 19 nt, Homo sapiens
  misc_RNA (1)...(19): siRNA sense strand
uuucgaggaugucaaguuc

SEQ ID NO: 1037283 - RNA, 19 nt, Homo sapiens
  misc_RNA (1)...(19): siRNA sense strand
gaaggcacuggaggaguuu

SEQ ID NO: 1037284 - RNA, 19 nt, Homo sapiens
  misc_RNA (1)...(19): siRNA sense strand
ggaucugugacaaggauuu

SEQ ID NO: 1037285 - RNA, 19 nt, Homo sapiens
  misc_RNA (1)...(19): siRNA sense strand
ccagagaggagcucagaag

SEQ ID NO: 1037286 - RNA, 19 nt, Homo sapiens
  misc_RNA (1)...(19): siRNA sense strand
caauggcugucaggauuca

SEQ ID NO: 1037287 - RNA, 19 nt, Homo sapiens
  misc_RNA (1)...(19): siRNA sense strand
uucaaaagcuggacagauu

SEQ ID NO: 1037288 - RNA, 19 nt, Homo sapiens
  misc_RNA (1)...(19): siRNA sense strand
caaugcauuuaucaagcaa

SEQ ID NO: 1037289 - RNA, 19 nt, Homo sapiens
  misc_RNA (1)...(19): siRNA sense strand
cuaugaugaugaaucucua

SEQ ID NO: 1037290 - RNA, 19 nt, Homo sapiens
  misc_RNA (1)...(19): siRNA sense strand
ccagggcccuuacgacuuu

SEQ ID NO: 1037291 - RNA, 19 nt, Homo sapiens
  misc_RNA (1)...(19): siRNA sense strand
gggccaacuuccuguauga

SEQ ID NO: 1037292 - RNA, 19 nt, Homo sapiens
  misc_RNA (1)...(19): siRNA sense strand
gugcagaccuuauguacag

SEQ ID NO: 1037293 - RNA, 19 nt, Homo sapiens
  misc_RNA (1)...(19): siRNA sense strand
ggugaaggcugcagcugau

SEQ ID NO: 1037294 - RNA, 19 nt, Homo sapiens
  misc_RNA (1)...(19): siRNA sense strand
gagacuguguccugcagaa

SEQ ID NO: 1037295 - RNA, 19 nt, Homo sapiens
  misc_RNA (1)...(19): siRNA sense strand
ccagagcgccgacuucaug

SEQ ID NO: 1037296 - RNA, 19 nt, Homo sapiens
  misc_RNA (1)...(19): siRNA sense strand
ggagcuggcuugggagugu

SEQ ID NO: 1037297 - RNA, 19 nt, Homo sapiens
  misc_RNA (1)...(19): siRNA sense strand
ucacaggcuuugaaaccaa

SEQ ID NO: 1037298 - RNA, 19 nt, Homo sapiens
  misc_RNA (1)...(19): siRNA sense strand
uggccgagauggcuaagaa

SEQ ID NO: 1037299 - RNA, 19 nt, Homo sapiens
  misc_RNA (1)...(19): siRNA sense strand
gaccuuauguacaguucga

SEQ ID NO: 1037300 - RNA, 19 nt, Homo sapiens
  misc_RNA (1)...(19): siRNA sense strand
ccucaagguuggccagaug

SEQ ID NO: 1037301 - RNA, 19 nt, Homo sapiens
  misc_RNA (1)...(19): siRNA sense strand
ucacagaccauuacaucga

SEQ ID NO: 1037302 - RNA, 19 nt, Homo sapiens
  misc_RNA (1)...(19): siRNA sense strand
ugcgggagcuguuugaguu

SEQ ID NO: 1037303 - RNA, 19 nt, Homo sapiens
  misc_RNA (1)...(19): siRNA sense strand
gcuggcagaugcugagagu

SEQ ID NO: 1037304 - RNA, 19 nt, Homo sapiens
  misc_RNA (1)...(19): siRNA sense strand
ucagagcgauguccagaac

SEQ ID NO: 1037305 - RNA, 19 nt, Homo sapiens
  misc_RNA (1)...(19): siRNA sense strand
gcccucagcugcagcacau

SEQ ID NO: 1037306 - RNA, 19 nt, Homo sapiens
  misc_RNA (1)...(19): siRNA sense strand
cggcauagcccagagcauu

SEQ ID NO: 1037307 - RNA, 19 nt, Homo sapiens
  misc_RNA (1)...(19): siRNA sense strand
guucacagaccauuacauc

SEQ ID NO: 1037308 - RNA, 19 nt, Homo sapiens
  misc_RNA (1)...(19): siRNA sense strand
caaauuccucacaggcuuu

SEQ ID NO: 1037309 - RNA, 19 nt, Homo sapiens
  misc_RNA (1)...(19): siRNA sense strand
cggcuugugcccagaauuu

SEQ ID NO: 1037310 - RNA, 19 nt, Homo sapiens
  misc_RNA (1)...(19): siRNA sense strand
ggagguggccgugaagauc

SEQ ID NO: 1037311 - RNA, 19 nt, Homo sapiens
  misc_RNA (1)...(19): siRNA sense strand
ccagggaccucaaauuccu

SEQ ID NO: 1037312 - RNA, 19 nt, Homo sapiens
  misc_RNA (1)...(19): siRNA sense strand
ggauugugcagaccuuaug

SEQ ID NO: 1037313 - RNA, 19 nt, Homo sapiens
  misc_RNA (1)...(19): siRNA sense strand
cagaguucacagaccauua

SEQ ID NO: 1037314 - RNA, 19 nt, Homo sapiens
  misc_RNA (1)...(19): siRNA sense strand
gaccugcggaaccagauuu

SEQ ID NO: 1037315 - RNA, 19 nt, Homo sapiens
  misc_RNA (1)...(19): siRNA sense strand
cuggguggaucccucauga

SEQ ID NO: 1037316 - RNA, 19 nt, Homo sapiens
  misc_RNA (1)...(19): siRNA sense strand
gaaggcugcagcugaugga

SEQ ID NO: 1037317 - RNA, 19 nt, Homo sapiens
  misc_RNA (1)...(19): siRNA sense strand
ccacguggaggcagugaug

SEQ ID NO: 1037318 - RNA, 19 nt, Homo sapiens
  misc_RNA (1)...(19): siRNA sense strand
gcuuugaaaccaaggcauu

SEQ ID NO: 1037319 - RNA, 19 nt, Homo sapiens
  misc_RNA (1)...(19): siRNA sense strand
caggacaacagcuucauca

SEQ ID NO: 1037320 - RNA, 19 nt, Homo sapiens
  misc_RNA (1)...(19): siRNA sense strand
gcagaccuuauguacaguu

SEQ ID NO: 1037321 - RNA, 19 nt, Homo sapiens
  misc_RNA (1)...(19): siRNA sense strand
uggcagaugcugagaguuc

SEQ ID NO: 1037322 - RNA, 19 nt, Homo sapiens
  misc_RNA (1)...(19): siRNA sense strand
gcauagcccagagcauuca

SEQ ID NO: 1037323 - RNA, 19 nt, Homo sapiens
  misc_RNA (1)...(19): siRNA sense strand
ggaccucaaauuccucaca

SEQ ID NO: 1037324 - RNA, 19 nt, Homo sapiens
  misc_RNA (1)...(19): siRNA sense strand
uaggaguacuggccgagau

SEQ ID NO: 1037325 - RNA, 19 nt, Homo sapiens
  misc_RNA (1)...(19): siRNA sense strand
uggaggaggugcccuuugc

SEQ ID NO: 1037326 - RNA, 19 nt, Homo sapiens
  misc_RNA (1)...(19): siRNA sense strand
ggaccugcggaaccagauu

SEQ ID NO: 1037327 - RNA, 19 nt, Homo sapiens
  misc_RNA (1)...(19): siRNA sense strand
ucccagccgugguuaagga

SEQ ID NO: 1037328 - RNA, 19 nt, Homo sapiens
  misc_RNA (1)...(19): siRNA sense strand
gaccagugccagggccuaa

SEQ ID NO: 1037329 - RNA, 19 nt, Homo sapiens
  misc_RNA (1)...(19): siRNA sense strand
gccgggaguuugggacaga

SEQ ID NO: 1037330 - RNA, 19 nt, Homo sapiens
  misc_RNA (1)...(19): siRNA sense strand
ggugcaagccgggaguuug

SEQ ID NO: 1037331 - RNA, 19 nt, Homo sapiens
  misc_RNA (1)...(19): siRNA sense strand
cuuugccgcugccucaauu

SEQ ID NO: 1037332 - RNA, 19 nt, Homo sapiens
  misc_RNA (1)...(19): siRNA sense strand
gccaacuuccuguaugaug

SEQ ID NO: 1037333 - RNA, 19 nt, Homo sapiens
  misc_RNA (1)...(19): siRNA sense strand
ugacccugcuggacuuugg

SEQ ID NO: 1037334 - RNA, 19 nt, Homo sapiens
  misc_RNA (1)...(19): siRNA sense strand
ggaguuugggacagaguuc

SEQ ID NO: 1037335 - RNA, 19 nt, Homo sapiens
  misc_RNA (1)...(19): siRNA sense strand
gcagucagagggugguucu

SEQ ID NO: 1037336 - RNA, 19 nt, Homo sapiens
  misc_RNA (1)...(19): siRNA sense strand
gaccugugcuugcuaaaga

SEQ ID NO: 1037337 - RNA, 19 nt, Homo sapiens
  misc_RNA (1)...(19): siRNA sense strand
gcagcgggcucaucacuca

SEQ ID NO: 1037338 - RNA, 19 nt, Homo sapiens
  misc_RNA (1)...(19): siRNA sense strand
gaggaccugugcuugcuaa

SEQ ID NO: 1037339 - RNA, 19 nt, Homo sapiens
  misc_RNA (1)...(19): siRNA sense strand
gaaaggaaagaccaaagug

SEQ ID NO: 1037340 - RNA, 19 nt, Homo sapiens
  misc_RNA (1)...(19): siRNA sense strand
uaaagaaggaggagaagga

SEQ ID NO: 1037341 - RNA, 19 nt, Homo sapiens
  misc_RNA (1)...(19): siRNA sense strand
ccaaggagccugagaagag

SEQ ID NO: 1037342 - RNA, 19 nt, Homo sapiens
  misc_RNA (1)...(19): siRNA sense strand
gcaucgagaccaagaaaga

SEQ ID NO: 1037343 - RNA, 19 nt, Homo sapiens
  misc_RNA (1)...(19): siRNA sense strand
ggaaaggaaagaccaaagu

SEQ ID NO: 1037344 - RNA, 19 nt, Homo sapiens
  misc_RNA (1)...(19): siRNA sense strand
gaggugcccugugccauga

SEQ ID NO: 1037345 - RNA, 19 nt, Homo sapiens
  misc_RNA (1)...(19): siRNA sense strand
ucgcucaacuggcacauga

SEQ ID NO: 1037346 - RNA, 19 nt, Homo sapiens
  misc_RNA (1)...(19): siRNA sense strand
ugaagaacguggugaucug

SEQ ID NO: 1037347 - RNA, 19 nt, Homo sapiens
  misc_RNA (1)...(19): siRNA sense strand
ccagcgcccucuuugagaa

SEQ ID NO: 1037348 - RNA, 19 nt, Homo sapiens
  misc_RNA (1)...(19): siRNA sense strand
ggagaaggaggagccagua

SEQ ID NO: 1037349 - RNA, 19 nt, Homo sapiens
  misc_RNA (1)...(19): siRNA sense strand
ggacggcagcgacauguca

SEQ ID NO: 1037350 - RNA, 19 nt, Homo sapiens
  misc_RNA (1)...(19): siRNA sense strand
gcacaugaucauccauuca

SEQ ID NO: 1037351 - RNA, 19 nt, Homo sapiens
  misc_RNA (1)...(19): siRNA sense strand
agaacguggugaucuggua

SEQ ID NO: 1037352 - RNA, 19 nt, Homo sapiens
  misc_RNA (1)...(19): siRNA sense strand
ucaacuggcacaugaagaa

SEQ ID NO: 1037353 - RNA, 19 nt, Homo sapiens
  misc_RNA (1)...(19): siRNA sense strand
gcgugcacauucccuuuga

SEQ ID NO: 1037354 - RNA, 19 nt, Homo sapiens
  misc_RNA (1)...(19): siRNA sense strand
ccacgucaaucuugugcau

SEQ ID NO: 1037355 - RNA, 19 nt, Homo sapiens
  misc_RNA (1)...(19): siRNA sense strand
gcaacaacggugccugaga

SEQ ID NO: 1037356 - RNA, 19 nt, Homo sapiens
  misc_RNA (1)...(19): siRNA sense strand
uagcaggcaucgagaccaa

SEQ ID NO: 1037357 - RNA, 19 nt, Homo sapiens
  misc_RNA (1)...(19): siRNA sense strand
aacgugaacugccugaaga

SEQ ID NO: 1037358 - RNA, 19 nt, Homo sapiens
  misc_RNA (1)...(19): siRNA sense strand
cauccuggcuguggcaaga

SEQ ID NO: 1037359 - RNA, 19 nt, Homo sapiens
  misc_RNA (1)...(19): siRNA sense strand
cgacaugucagccaucauc

SEQ ID NO: 1037360 - RNA, 19 nt, Homo sapiens
  misc_RNA (1)...(19): siRNA sense strand
gaggguagccagccuagca

SEQ ID NO: 1037361 - RNA, 19 nt, Homo sapiens
  misc_RNA (1)...(19): siRNA sense strand
caugucagccaucaucuau

SEQ ID NO: 1037362 - RNA, 19 nt, Homo sapiens
  misc_RNA (1)...(19): siRNA sense strand
gaggugcaguacaacuuca

SEQ ID NO: 1037363 - RNA, 19 nt, Homo sapiens
  misc_RNA (1)...(19): siRNA sense strand
cagaaccacgucaaucuug

SEQ ID NO: 1037364 - RNA, 19 nt, Homo sapiens
  misc_RNA (1)...(19): siRNA sense strand
gaaccacgucaaucuugug

SEQ ID NO: 1037365 - RNA, 19 nt, Homo sapiens
  misc_RNA (1)...(19): siRNA sense strand
ggaggugcaguacaacuuc

SEQ ID NO: 1037366 - RNA, 19 nt, Homo sapiens
  misc_RNA (1)...(19): siRNA sense strand
ugaacugccugaagaacgu

SEQ ID NO: 1037367 - RNA, 19 nt, Homo sapiens
  misc_RNA (1)...(19): siRNA sense strand
gcaggcaucgagaccaaga

SEQ ID NO: 1037368 - RNA, 19 nt, Homo sapiens
  misc_RNA (1)...(19): siRNA sense strand
caacgugaacugccugaag

SEQ ID NO: 1037369 - RNA, 19 nt, Homo sapiens
  misc_RNA (1)...(19): siRNA sense strand
cauggacgccaccgcagua

SEQ ID NO: 1037370 - RNA, 19 nt, Homo sapiens
  misc_RNA (1)...(19): siRNA sense strand
ccgccuaccucaucucucu

SEQ ID NO: 1037371 - RNA, 19 nt, Homo sapiens
  misc_RNA (1)...(19): siRNA sense strand
caggagggcgugcacauuc

SEQ ID NO: 1037372 - RNA, 19 nt, Homo sapiens
  misc_RNA (1)...(19): siRNA sense strand
ggcacaugaucauccauuc

SEQ ID NO: 1037373 - RNA, 19 nt, Homo sapiens
  misc_RNA (1)...(19): siRNA sense strand
cugaagcccuggagacagu

SEQ ID NO: 1037374 - RNA, 19 nt, Homo sapiens
  misc_RNA (1)...(19): siRNA sense strand
ccagaaccacgucaaucuu

SEQ ID NO: 1037375 - RNA, 19 nt, Homo sapiens
  misc_RNA (1)...(19): siRNA sense strand
aaaggaaagaccaaagugu

SEQ ID NO: 1037376 - RNA, 19 nt, Homo sapiens
  misc_RNA (1)...(19): siRNA sense strand
gcucugccucugacucuga

SEQ ID NO: 1037377 - RNA, 19 nt, Homo sapiens
  misc_RNA (1)...(19): siRNA sense strand
gggcauucaccucaacaug

SEQ ID NO: 1037378 - RNA, 19 nt, Homo sapiens
  misc_RNA (1)...(19): siRNA sense strand
gagcuagaccccacuuuug

SEQ ID NO: 1037379 - RNA, 19 nt, Homo sapiens
  misc_RNA (1)...(19): siRNA sense strand
ggagcuagaccccacuuuu

SEQ ID NO: 1037380 - RNA, 19 nt, Homo sapiens
  misc_RNA (1)...(19): siRNA sense strand
agaaccacgucaaucuugu

SEQ ID NO: 1037381 - RNA, 19 nt, Homo sapiens
  misc_RNA (1)...(19): siRNA sense strand
gggcgugcacauucccuuu

SEQ ID NO: 1037382 - RNA, 19 nt, Homo sapiens
  misc_RNA (1)...(19): siRNA sense strand
ggaggaccugugcuugcua

SEQ ID NO: 1037383 - RNA, 19 nt, Homo sapiens
  misc_RNA (1)...(19): siRNA sense strand
gcucuggcucugccucuga

SEQ ID NO: 1037384 - RNA, 19 nt, Homo sapiens
  misc_RNA (1)...(19): siRNA sense strand
agaaggaggaccugugcuu

SEQ ID NO: 1037385 - RNA, 19 nt, Homo sapiens
  misc_RNA (1)...(19): siRNA sense strand
gagaaggaggagccaguag

SEQ ID NO: 1037386 - RNA, 19 nt, Homo sapiens
  misc_RNA (1)...(19): siRNA sense strand
gugacaaagugggcaaugg

SEQ ID NO: 1037387 - RNA, 19 nt, Homo sapiens
  misc_RNA (1)...(19): siRNA sense strand
cagccuacacccagacaga

SEQ ID NO: 1037388 - RNA, 19 nt, Homo sapiens
  misc_RNA (1)...(19): siRNA sense strand
ggaccugugcuugcuaaag

SEQ ID NO: 1037389 - RNA, 19 nt, Homo sapiens
  misc_RNA (1)...(19): siRNA sense strand
gcucaacuggcacaugaag

SEQ ID NO: 1037390 - RNA, 19 nt, Homo sapiens
  misc_RNA (1)...(19): siRNA sense strand
gauguuccacugcccauac

SEQ ID NO: 1037391 - RNA, 19 nt, Homo sapiens
  misc_RNA (1)...(19): siRNA sense strand
ucgagucccggaagaggua

SEQ ID NO: 1037392 - RNA, 19 nt, Homo sapiens
  misc_RNA (1)...(19): siRNA sense strand
caaguuccacacgcucaaa

SEQ ID NO: 1037393 - RNA, 19 nt, Homo sapiens
  misc_RNA (1)...(19): siRNA sense strand
gguacgaggaccacaagca

SEQ ID NO: 1037394 - RNA, 19 nt, Homo sapiens
  misc_RNA (1)...(19): siRNA sense strand
gcaauaaacucaccaacua

SEQ ID NO: 1037395 - RNA, 19 nt, Homo sapiens
  misc_RNA (1)...(19): siRNA sense strand
ccaacuacgugugguauuu

SEQ ID NO: 1037396 - RNA, 19 nt, Homo sapiens
  misc_RNA (1)...(19): siRNA sense strand
ggacguuuccuuacagauu

SEQ ID NO: 1037397 - RNA, 19 nt, Homo sapiens
  misc_RNA (1)...(19): siRNA sense strand
ccuuacagauucuagcaua

SEQ ID NO: 1037398 - RNA, 19 nt, Homo sapiens
  misc_RNA (1)...(19): siRNA sense strand
uguggaagcuauucaguga

SEQ ID NO: 1037399 - RNA, 19 nt, Homo sapiens
  misc_RNA (1)...(19): siRNA sense strand
gauacuguguggaagcuau

SEQ ID NO: 1037400 - RNA, 19 nt, Homo sapiens
  misc_RNA (1)...(19): siRNA sense strand
aacaacaguucuucuggua

SEQ ID NO: 1037401 - RNA, 19 nt, Homo sapiens
  misc_RNA (1)...(19): siRNA sense strand
caacaguucuucugguacu

SEQ ID NO: 1037402 - RNA, 19 nt, Homo sapiens
  misc_RNA (1)...(19): siRNA sense strand
ccuggaaccugcacauguu

SEQ ID NO: 1037403 - RNA, 19 nt, Homo sapiens
  misc_RNA (1)...(19): siRNA sense strand
ggaguauaaucgugaacau

SEQ ID NO: 1037404 - RNA, 19 nt, Homo sapiens
  misc_RNA (1)...(19): siRNA sense strand
gaguauaaucgugaacaua

SEQ ID NO: 1037405 - RNA, 19 nt, Homo sapiens
  misc_RNA (1)...(19): siRNA sense strand
gacguuuccuuacagauuc

SEQ ID NO: 1037406 - RNA, 19 nt, Homo sapiens
  misc_RNA (1)...(19): siRNA sense strand
gggcaaacuuccuaugcau

SEQ ID NO: 1037407 - RNA, 19 nt, Homo sapiens
  misc_RNA (1)...(19): siRNA sense strand
ucagugggcuucaagugau

SEQ ID NO: 1037408 - RNA, 19 nt, Homo sapiens
  misc_RNA (1)...(19): siRNA sense strand
acacugcugucaauuaucu

SEQ ID NO: 1037409 - RNA, 19 nt, Homo sapiens
  misc_RNA (1)...(19): siRNA sense strand
cgaaugggcaaacuuccua

SEQ ID NO: 1037410 - RNA, 19 nt, Homo sapiens
  misc_RNA (1)...(19): siRNA sense strand
ugauuccgcuugcacuuug

SEQ ID NO: 1037411 - RNA, 19 nt, Homo sapiens
  misc_RNA (1)...(19): siRNA sense strand
gauucuagcauauggauuc

SEQ ID NO: 1037412 - RNA, 19 nt, Homo sapiens
  misc_RNA (1)...(19): siRNA sense strand
cuauaaauguugccagagu

SEQ ID NO: 1037413 - RNA, 19 nt, Homo sapiens
  misc_RNA (1)...(19): siRNA sense strand
cuaaguuguuugcugauuc

SEQ ID NO: 1037414 - RNA, 19 nt, Homo sapiens
  misc_RNA (1)...(19): siRNA sense strand
gauacugccuggucaucuc

SEQ ID NO: 1037415 - RNA, 19 nt, Homo sapiens
  misc_RNA (1)...(19): siRNA sense strand
ugaaggaaucuguuucuca

SEQ ID NO: 1037416 - RNA, 19 nt, Homo sapiens
  misc_RNA (1)...(19): siRNA sense strand
uggaagcuauucagugauc

SEQ ID NO: 1037417 - RNA, 19 nt, Homo sapiens
  misc_RNA (1)...(19): siRNA sense strand
caugaugcuuauaguaaca

SEQ ID NO: 1037418 - RNA, 19 nt, Homo sapiens
  misc_RNA (1)...(19): siRNA sense strand
gcuauucagugaucuucca

SEQ ID NO: 1037419 - RNA, 19 nt, Homo sapiens
  misc_RNA (1)...(19): siRNA sense strand
ucaugcaacuauccaagau

SEQ ID NO: 1037420 - RNA, 19 nt, Homo sapiens
  misc_RNA (1)...(19): siRNA sense strand
guuguggaguggaacauca

SEQ ID NO: 1037421 - RNA, 19 nt, Homo sapiens
  misc_RNA (1)...(19): siRNA sense strand
caucagaguagucaugcaa

SEQ ID NO: 1037422 - RNA, 19 nt, Homo sapiens
  misc_RNA (1)...(19): siRNA sense strand
ggaguggaacaucauuuua

SEQ ID NO: 1037423 - RNA, 19 nt, Homo sapiens
  misc_RNA (1)...(19): siRNA sense strand
ccuaaguuguuugcugauu

SEQ ID NO: 1037424 - RNA, 19 nt, Homo sapiens
  misc_RNA (1)...(19): siRNA sense strand
uccuaugcauccagcaaua

SEQ ID NO: 1037425 - RNA, 19 nt, Homo sapiens
  misc_RNA (1)...(19): siRNA sense strand
gcacuuuggaguauaaucg

SEQ ID NO: 1037426 - RNA, 19 nt, Homo sapiens
  misc_RNA (1)...(19): siRNA sense strand
gaagcuauucagugaucuu

SEQ ID NO: 1037427 - RNA, 19 nt, Homo sapiens
  misc_RNA (1)...(19): siRNA sense strand
guacuggagaauaauaaca

SEQ ID NO: 1037428 - RNA, 19 nt, Homo sapiens
  misc_RNA (1)...(19): siRNA sense strand
agugaaaacugcagcaaaa

SEQ ID NO: 1037429 - RNA, 19 nt, Homo sapiens
  misc_RNA (1)...(19): siRNA sense strand
cauauugccgcacccuuga

SEQ ID NO: 1037430 - RNA, 19 nt, Homo sapiens
  misc_RNA (1)...(19): siRNA sense strand
gcauccagcaauaaacuca

SEQ ID NO: 1037431 - RNA, 19 nt, Homo sapiens
  misc_RNA (1)...(19): siRNA sense strand
ccgcuugcacuuuggagua

SEQ ID NO: 1037432 - RNA, 19 nt, Homo sapiens
  misc_RNA (1)...(19): siRNA sense strand
ucuagcauauggauucagu

SEQ ID NO: 1037433 - RNA, 19 nt, Homo sapiens
  misc_RNA (1)...(19): siRNA sense strand
cuugcacuuuggaguauaa

SEQ ID NO: 1037434 - RNA, 19 nt, Homo sapiens
  misc_RNA (1)...(19): siRNA sense strand
aaauguugccagagugaaa

SEQ ID NO: 1037435 - RNA, 19 nt, Homo sapiens
  misc_RNA (1)...(19): siRNA sense strand
uauuguauuucccgaaugg

SEQ ID NO: 1037436 - RNA, 19 nt, Homo sapiens
  misc_RNA (1)...(19): siRNA sense strand
gcuggacguuuccuuacag

SEQ ID NO: 1037437 - RNA, 19 nt, Homo sapiens
  misc_RNA (1)...(19): siRNA sense strand
gcuugcacuuuggaguaua

SEQ ID NO: 1037438 - RNA, 19 nt, Homo sapiens
  misc_RNA (1)...(19): siRNA sense strand
ucaugaugcuuauaguaac

SEQ ID NO: 1037439 - RNA, 19 nt, Homo sapiens
  misc_RNA (1)...(19): siRNA sense strand
gcuuauaguaacaacaguu

SEQ ID NO: 1037440 - RNA, 19 nt, Homo sapiens
  misc_RNA (1)...(19): siRNA sense strand
gaaugggcaaacuuccuau

SEQ ID NO: 1037441 - RNA, 19 nt, Homo sapiens
  misc_RNA (1)...(19): siRNA sense strand
cuugauggcugggaguaug

SEQ ID NO: 1037442 - RNA, 19 nt, Homo sapiens
  misc_RNA (1)...(19): siRNA sense strand
caauaaacucaccaacuac

SEQ ID NO: 1037443 - RNA, 19 nt, Homo sapiens
  misc_RNA (1)...(19): siRNA sense strand
uuacagauucuagcauaug

SEQ ID NO: 1037444 - RNA, 19 nt, Homo sapiens
  misc_RNA (1)...(19): siRNA sense strand
cuaugcauccagcaauaaa

SEQ ID NO: 1037445 - RNA, 19 nt, Homo sapiens
  misc_RNA (1)...(19): siRNA sense strand
ucagaguagucaugcaacu

SEQ ID NO: 1037446 - RNA, 19 nt, Homo sapiens
  misc_RNA (1)...(19): siRNA sense strand
uacagauucuagcauaugg

SEQ ID NO: 1037447 - RNA, 19 nt, Homo sapiens
  misc_RNA (1)...(19): siRNA sense strand
cuuacagauucuagcauau

SEQ ID NO: 1037448 - RNA, 19 nt, Homo sapiens
  misc_RNA (1)...(19): siRNA sense strand
uaaguuguuugcugauucc

SEQ ID NO: 1037449 - RNA, 19 nt, Homo sapiens
  misc_RNA (1)...(19): siRNA sense strand
caucaagccuggccucuuc

SEQ ID NO: 1037450 - RNA, 19 nt, Homo sapiens
  misc_RNA (1)...(19): siRNA sense strand
ggcgugagcuccaggaaug

SEQ ID NO: 1037451 - RNA, 19 nt, Homo sapiens
  misc_RNA (1)...(19): siRNA sense strand
ccacaggccuucgaugaga

SEQ ID NO: 1037452 - RNA, 19 nt, Homo sapiens
  misc_RNA (1)...(19): siRNA sense strand
gaaccugcaggauguguuu

SEQ ID NO: 1037453 - RNA, 19 nt, Homo sapiens
  misc_RNA (1)...(19): siRNA sense strand
ccacgucgaugacccuaug

SEQ ID NO: 1037454 - RNA, 19 nt, Homo sapiens
  misc_RNA (1)...(19): siRNA sense strand
gaugaguucuccaccaagu

SEQ ID NO: 1037455 - RNA, 19 nt, Homo sapiens
  misc_RNA (1)...(19): siRNA sense strand
ggcuggagcugaaauccuu

SEQ ID NO: 1037456 - RNA, 19 nt, Homo sapiens
  misc_RNA (1)...(19): siRNA sense strand
ucgaugacccuaugagauu

SEQ ID NO: 1037457 - RNA, 19 nt, Homo sapiens
  misc_RNA (1)...(19): siRNA sense strand
ucaagccucuguucaggau

SEQ ID NO: 1037458 - RNA, 19 nt, Homo sapiens
  misc_RNA (1)...(19): siRNA sense strand
ccuggccucuucaaaggua

SEQ ID NO: 1037459 - RNA, 19 nt, Homo sapiens
  misc_RNA (1)...(19): siRNA sense strand
acauccagauugugaagaa

SEQ ID NO: 1037460 - RNA, 19 nt, Homo sapiens
  misc_RNA (1)...(19): siRNA sense strand
gagaugcucaagaacauuc

SEQ ID NO: 1037461 - RNA, 19 nt, Homo sapiens
  misc_RNA (1)...(19): siRNA sense strand
gaaccagcgcaacuucaau

SEQ ID NO: 1037462 - RNA, 19 nt, Homo sapiens
  misc_RNA (1)...(19): siRNA sense strand
gugcauguacggccacaaa

SEQ ID NO: 1037463 - RNA, 19 nt, Homo sapiens
  misc_RNA (1)...(19): siRNA sense strand
gagauucaagccucuguuc

SEQ ID NO: 1037464 - RNA, 19 nt, Homo sapiens
  misc_RNA (1)...(19): siRNA sense strand
gccacggccuggagauugu

SEQ ID NO: 1037465 - RNA, 19 nt, Homo sapiens
  misc_RNA (1)...(19): siRNA sense strand
aggaugaguucuccaccaa

SEQ ID NO: 1037466 - RNA, 19 nt, Homo sapiens
  misc_RNA (1)...(19): siRNA sense strand
gagaaccagcgcaacuuca

SEQ ID NO: 1037467 - RNA, 19 nt, Homo sapiens
  misc_RNA (1)...(19): siRNA sense strand
ccacggccacauccagauu

SEQ ID NO: 1037468 - RNA, 19 nt, Homo sapiens
  misc_RNA (1)...(19): siRNA sense strand
cgaugacccuaugagauuc

SEQ ID NO: 1037469 - RNA, 19 nt, Homo sapiens
  misc_RNA (1)...(19): siRNA sense strand
gcuccaggaaugaggacua

SEQ ID NO: 1037470 - RNA, 19 nt, Homo sapiens
  misc_RNA (1)...(19): siRNA sense strand
gcacaugcaggagcucauc

SEQ ID NO: 1037471 - RNA, 19 nt, Homo sapiens
  misc_RNA (1)...(19): siRNA sense strand
cgagaaccagcgcaacuuc

SEQ ID NO: 1037472 - RNA, 19 nt, Homo sapiens
  misc_RNA (1)...(19): siRNA sense strand
gaaauccuucagccuguac

SEQ ID NO: 1037473 - RNA, 19 nt, Homo sapiens
  misc_RNA (1)...(19): siRNA sense strand
agacggaccaccacaggau

SEQ ID NO: 1037474 - RNA, 19 nt, Homo sapiens
  misc_RNA (1)...(19): siRNA sense strand
gauucaagccucuguucag

SEQ ID NO: 1037475 - RNA, 19 nt, Homo sapiens
  misc_RNA (1)...(19): siRNA sense strand
gcauguacggccacaaagg

SEQ ID NO: 1037476 - RNA, 19 nt, Homo sapiens
  misc_RNA (1)...(19): siRNA sense strand
gcaaauaucuucucuguca

SEQ ID NO: 1037477 - RNA, 19 nt, Homo sapiens
  misc_RNA (1)...(19): siRNA sense strand
gcacagagcuacuagucaa

SEQ ID NO: 1037478 - RNA, 19 nt, Homo sapiens
  misc_RNA (1)...(19): siRNA sense strand
caucacagcugcccucuuc

SEQ ID NO: 1037479 - RNA, 19 nt, Homo sapiens
  misc_RNA (1)...(19): siRNA sense strand
cagcugcccucuucucuaa

SEQ ID NO: 1037480 - RNA, 19 nt, Homo sapiens
  misc_RNA (1)...(19): siRNA sense strand
ugauugaccugacagagua

SEQ ID NO: 1037481 - RNA, 19 nt, Homo sapiens
  misc_RNA (1)...(19): siRNA sense strand
cagugaagcuuccugacua

SEQ ID NO: 1037482 - RNA, 19 nt, Homo sapiens
  misc_RNA (1)...(19): siRNA sense strand
gacgauggcuccuucuuca

SEQ ID NO: 1037483 - RNA, 19 nt, Homo sapiens
  misc_RNA (1)...(19): siRNA sense strand
ggacacaccgcaaauaucu

SEQ ID NO: 1037484 - RNA, 19 nt, Homo sapiens
  misc_RNA (1)...(19): siRNA sense strand
acaagaagcugcucuccau

SEQ ID NO: 1037485 - RNA, 19 nt, Homo sapiens
  misc_RNA (1)...(19): siRNA sense strand
ugaaacagcaagccaauga

SEQ ID NO: 1037486 - RNA, 19 nt, Homo sapiens
  misc_RNA (1)...(19): siRNA sense strand
uaucuucucugucaaguuc

SEQ ID NO: 1037487 - RNA, 19 nt, Homo sapiens
  misc_RNA (1)...(19): siRNA sense strand
ccgcaaauaucuucucugu

SEQ ID NO: 1037488 - RNA, 19 nt, Homo sapiens
  misc_RNA (1)...(19): siRNA sense strand
ccauucagcuuuacagcaa

SEQ ID NO: 1037489 - RNA, 19 nt, Homo sapiens
  misc_RNA (1)...(19): siRNA sense strand
ccaauggccugcaccuuca

SEQ ID NO: 1037490 - RNA, 19 nt, Homo sapiens
  misc_RNA (1)...(19): siRNA sense strand
gcagcaacgcucaguauau

SEQ ID NO: 1037491 - RNA, 19 nt, Homo sapiens
  misc_RNA (1)...(19): siRNA sense strand
gaaagucaacauaacuaga

SEQ ID NO: 1037492 - RNA, 19 nt, Homo sapiens
  misc_RNA (1)...(19): siRNA sense strand
cagcagcgcuugugaugca

SEQ ID NO: 1037493 - RNA, 19 nt, Homo sapiens
  misc_RNA (1)...(19): siRNA sense strand
cagcaacgcucaguauauc

SEQ ID NO: 1037494 - RNA, 19 nt, Homo sapiens
  misc_RNA (1)...(19): siRNA sense strand
ucaacugucuggaguggaa

SEQ ID NO: 1037495 - RNA, 19 nt, Homo sapiens
  misc_RNA (1)...(19): siRNA sense strand
gcaaggacuccaucucaga

SEQ ID NO: 1037496 - RNA, 19 nt, Homo sapiens
  misc_RNA (1)...(19): siRNA sense strand
ggaguggaaugagaaagga

SEQ ID NO: 1037497 - RNA, 19 nt, Homo sapiens
  misc_RNA (1)...(19): siRNA sense strand
gagcgaagcuacgacuauc

SEQ ID NO: 1037498 - RNA, 19 nt, Homo sapiens
  misc_RNA (1)...(19): siRNA sense strand
gcgaaagucaacauaacua

SEQ ID NO: 1037499 - RNA, 19 nt, Homo sapiens
  misc_RNA (1)...(19): siRNA sense strand
gcaguggacccaagccauu

SEQ ID NO: 1037500 - RNA, 19 nt, Homo sapiens
  misc_RNA (1)...(19): siRNA sense strand
ucaaggccaucucccuaaa

SEQ ID NO: 1037501 - RNA, 19 nt, Homo sapiens
  misc_RNA (1)...(19): siRNA sense strand
acucggaggugcugauuga

SEQ ID NO: 1037502 - RNA, 19 nt, Homo sapiens
  misc_RNA (1)...(19): siRNA sense strand
gagcagcagccuacaugaa

SEQ ID NO: 1037503 - RNA, 19 nt, Homo sapiens
  misc_RNA (1)...(19): siRNA sense strand
ggagaccauccacauguuu

SEQ ID NO: 1037504 - RNA, 19 nt, Homo sapiens
  misc_RNA (1)...(19): siRNA sense strand
gaagcuacgacuaucaguu

SEQ ID NO: 1037505 - RNA, 19 nt, Homo sapiens
  misc_RNA (1)...(19): siRNA sense strand
ggacggugcagcccaguau

SEQ ID NO: 1037506 - RNA, 19 nt, Homo sapiens
  misc_RNA (1)...(19): siRNA sense strand
gacauccgcaugauccaua

SEQ ID NO: 1037507 - RNA, 19 nt, Homo sapiens
  misc_RNA (1)...(19): siRNA sense strand
uaucaaagaggccaauuuc

SEQ ID NO: 1037508 - RNA, 19 nt, Homo sapiens
  misc_RNA (1)...(19): siRNA sense strand
ggagcgaagcuacgacuau

SEQ ID NO: 1037509 - RNA, 19 nt, Homo sapiens
  misc_RNA (1)...(19): siRNA sense strand
gaaugagaaaggagacuug

SEQ ID NO: 1037510 - RNA, 19 nt, Homo sapiens
  misc_RNA (1)...(19): siRNA sense strand
gaagcuuccugacuacaac

SEQ ID NO: 1037511 - RNA, 19 nt, Homo sapiens
  misc_RNA (1)...(19): siRNA sense strand
uaaaggagaccauccacau

SEQ ID NO: 1037512 - RNA, 19 nt, Homo sapiens
  misc_RNA (1)...(19): siRNA sense strand
gugcacgaccugacaguaa

SEQ ID NO: 1037513 - RNA, 19 nt, Homo sapiens
  misc_RNA (1)...(19): siRNA sense strand
gggcuuauccgccaguaug

SEQ ID NO: 1037514 - RNA, 19 nt, Homo sapiens
  misc_RNA (1)...(19): siRNA sense strand
gcaacaccaccacggauau

SEQ ID NO: 1037515 - RNA, 19 nt, Homo sapiens
  misc_RNA (1)...(19): siRNA sense strand
gcucaaguauguggcugaa

SEQ ID NO: 1037516 - RNA, 19 nt, Homo sapiens
  misc_RNA (1)...(19): siRNA sense strand
caugauccauaaccacaga

SEQ ID NO: 1037517 - RNA, 19 nt, Homo sapiens
  misc_RNA (1)...(19): siRNA sense strand
gguccagaauggcaagaug

SEQ ID NO: 1037518 - RNA, 19 nt, Homo sapiens
  misc_RNA (1)...(19): siRNA sense strand
caaauaucuucucugucaa

SEQ ID NO: 1037519 - RNA, 19 nt, Homo sapiens
  misc_RNA (1)...(19): siRNA sense strand
cgacuucaaagggaaauuu

SEQ ID NO: 1037520 - RNA, 19 nt, Homo sapiens
  misc_RNA (1)...(19): siRNA sense strand
cuacaacaaccguuugaga

SEQ ID NO: 1037521 - RNA, 19 nt, Homo sapiens
  misc_RNA (1)...(19): siRNA sense strand
uggcaucgauccuguugug

SEQ ID NO: 1037522 - RNA, 19 nt, Homo sapiens
  misc_RNA (1)...(19): siRNA sense strand
ccaacgguguguccaaugg

SEQ ID NO: 1037523 - RNA, 19 nt, Homo sapiens
  misc_RNA (1)...(19): siRNA sense strand
aguaugaccuucgagagaa

SEQ ID NO: 1037524 - RNA, 19 nt, Homo sapiens
  misc_RNA (1)...(19): siRNA sense strand
caggaugugucaacugucu

SEQ ID NO: 1037525 - RNA, 19 nt, Homo sapiens
  misc_RNA (1)...(19): siRNA sense strand
ggcagcaacgcucaguaua

SEQ ID NO: 1037526 - RNA, 19 nt, Homo sapiens
  misc_RNA (1)...(19): siRNA sense strand
ccaccacggauaucaaaga

SEQ ID NO: 1037527 - RNA, 19 nt, Homo sapiens
  misc_RNA (1)...(19): siRNA sense strand
ggacgacuucaaagggaaa

SEQ ID NO: 1037528 - RNA, 19 nt, Homo sapiens
  misc_RNA (1)...(19): siRNA sense strand
ggaaugagaaaggagacuu

SEQ ID NO: 1037529 - RNA, 19 nt, Homo sapiens
  misc_RNA (1)...(19): siRNA sense strand
gagaccauccacauguuug

SEQ ID NO: 1037530 - RNA, 19 nt, Homo sapiens
  misc_RNA (1)...(19): siRNA sense strand
gaggugaugcugcucaaca

SEQ ID NO: 1037531 - RNA, 19 nt, Homo sapiens
  misc_RNA (1)...(19): siRNA sense strand
ugcacgaccugacaguaaa

SEQ ID NO: 1037532 - RNA, 19 nt, Homo sapiens
  misc_RNA (1)...(19): siRNA sense strand
ugucuggaguggaaugaga

SEQ ID NO: 1037533 - RNA, 19 nt, Homo sapiens
  misc_RNA (1)...(19): siRNA sense strand
gggaugaguccauugucaa

SEQ ID NO: 1037534 - RNA, 19 nt, Homo sapiens
  misc_RNA (1)...(19): siRNA sense strand
gaagauauggagggugcuu

SEQ ID NO: 1037535 - RNA, 19 nt, Homo sapiens
  misc_RNA (1)...(19): siRNA sense strand
gccgagucguggaagauau

SEQ ID NO: 1037536 - RNA, 19 nt, Homo sapiens
  misc_RNA (1)...(19): siRNA sense strand
cgagagaacagcaaacacu

SEQ ID NO: 1037537 - RNA, 19 nt, Homo sapiens
  misc_RNA (1)...(19): siRNA sense strand
ucacaaugccaugcuuuau

SEQ ID NO: 1037538 - RNA, 19 nt, Homo sapiens
  misc_RNA (1)...(19): siRNA sense strand
acagaaagagcaugaagca

SEQ ID NO: 1037539 - RNA, 19 nt, Homo sapiens
  misc_RNA (1)...(19): siRNA sense strand
caguaugaccuucgagaga

SEQ ID NO: 1037540 - RNA, 19 nt, Homo sapiens
  misc_RNA (1)...(19): siRNA sense strand
aacaugggcuaccggauca

SEQ ID NO: 1037541 - RNA, 19 nt, Homo sapiens
  misc_RNA (1)...(19): siRNA sense strand
ccgcaaggacuccaucuca

SEQ ID NO: 1037542 - RNA, 19 nt, Homo sapiens
  misc_RNA (1)...(19): siRNA sense strand
uggagugccuggacgacuu

SEQ ID NO: 1037543 - RNA, 19 nt, Homo sapiens
  misc_RNA (1)...(19): siRNA sense strand
ccaccugaaggcacacuuu

SEQ ID NO: 1037544 - RNA, 19 nt, Homo sapiens
  misc_RNA (1)...(19): siRNA sense strand
cacaaugccaugcuuuaug

SEQ ID NO: 1037545 - RNA, 19 nt, Homo sapiens
  misc_RNA (1)...(19): siRNA sense strand
ccaccuaugugaccuucag

SEQ ID NO: 1037546 - RNA, 19 nt, Homo sapiens
  misc_RNA (1)...(19): siRNA sense strand
gagugcugguugccaccua

SEQ ID NO: 1037547 - RNA, 19 nt, Homo sapiens
  misc_RNA (1)...(19): siRNA sense strand
cagcgcuugugaugcauug

SEQ ID NO: 1037548 - RNA, 19 nt, Homo sapiens
  misc_RNA (1)...(19): siRNA sense strand
gccguacaccuuccucuug

SEQ ID NO: 1037549 - RNA, 19 nt, Homo sapiens
  misc_RNA (1)...(19): siRNA sense strand
ccacagaaagagcaugaag

SEQ ID NO: 1037550 - RNA, 19 nt, Homo sapiens
  misc_RNA (1)...(19): siRNA sense strand
cgaaagucaacauaacuag

SEQ ID NO: 1037551 - RNA, 19 nt, Homo sapiens
  misc_RNA (1)...(19): siRNA sense strand
gccugcaccuucauagcaa

SEQ ID NO: 1037552 - RNA, 19 nt, Homo sapiens
  misc_RNA (1)...(19): siRNA sense strand
acacaccgcaaauaucuuc

SEQ ID NO: 1037553 - RNA, 19 nt, Homo sapiens
  misc_RNA (1)...(19): siRNA sense strand
gaugaccagcacacgauug

SEQ ID NO: 1037554 - RNA, 19 nt, Homo sapiens
  misc_RNA (1)...(19): siRNA sense strand
aagcuacgacuaucaguuc

SEQ ID NO: 1037555 - RNA, 19 nt, Homo sapiens
  misc_RNA (1)...(19): siRNA sense strand
gugccuggacgacuucaaa

SEQ ID NO: 1037556 - RNA, 19 nt, Homo sapiens
  misc_RNA (1)...(19): siRNA sense strand
aaaggagaccauccacaug

SEQ ID NO: 1037557 - RNA, 19 nt, Homo sapiens
  misc_RNA (1)...(19): siRNA sense strand
caccaccacggauaucaaa

SEQ ID NO: 1037558 - RNA, 19 nt, Homo sapiens
  misc_RNA (1)...(19): siRNA sense strand
caauggcacagagcuacua

SEQ ID NO: 1037559 - RNA, 19 nt, Homo sapiens
  misc_RNA (1)...(19): siRNA sense strand
acggugcagcccaguauua

SEQ ID NO: 1037560 - RNA, 19 nt, Homo sapiens
  misc_RNA (1)...(19): siRNA sense strand
cgggacacaccgcaaauau

SEQ ID NO: 1037561 - RNA, 19 nt, Homo sapiens
  misc_RNA (1)...(19): siRNA sense strand
aaagucaacauaacuagag

SEQ ID NO: 1037562 - RNA, 19 nt, Homo sapiens
  misc_RNA (1)...(19): siRNA sense strand
aggagaccauccacauguu

SEQ ID NO: 1037563 - RNA, 19 nt, Homo sapiens
  misc_RNA (1)...(19): siRNA sense strand
ggccgagucguggaagaua

SEQ ID NO: 1037564 - RNA, 19 nt, Homo sapiens
  misc_RNA (1)...(19): siRNA sense strand
ugacgauggcuccuucuuc

SEQ ID NO: 1037565 - RNA, 19 nt, Homo sapiens
  misc_RNA (1)...(19): siRNA sense strand
cucaggaugugucaacugu

SEQ ID NO: 1037566 - RNA, 19 nt, Homo sapiens
  misc_RNA (1)...(19): siRNA sense strand
gaaacagcaagccaaugag

SEQ ID NO: 1037567 - RNA, 19 nt, Homo sapiens
  misc_RNA (1)...(19): siRNA sense strand
gacuacaacaaccguuuga

SEQ ID NO: 1037568 - RNA, 19 nt, Homo sapiens
  misc_RNA (1)...(19): siRNA sense strand
gggacacaccgcaaauauc

SEQ ID NO: 1037569 - RNA, 19 nt, Homo sapiens
  misc_RNA (1)...(19): siRNA sense strand
aaggagaccauccacaugu

SEQ ID NO: 1037570 - RNA, 19 nt, Homo sapiens
  misc_RNA (1)...(19): siRNA sense strand
caccacggauaucaaagag

SEQ ID NO: 1037571 - RNA, 19 nt, Homo sapiens
  misc_RNA (1)...(19): siRNA sense strand
uguuugacuugacuuacaa

SEQ ID NO: 1037572 - RNA, 19 nt, Homo sapiens
  misc_RNA (1)...(19): siRNA sense strand
ugacuacaacaaccguuug

SEQ ID NO: 1037573 - RNA, 19 nt, Homo sapiens
  misc_RNA (1)...(19): siRNA sense strand
gcagggucacucaggaugu

SEQ ID NO: 1037574 - RNA, 19 nt, Homo sapiens
  misc_RNA (1)...(19): siRNA sense strand
agaagcugcucuccaugca

SEQ ID NO: 1037575 - RNA, 19 nt, Homo sapiens
  misc_RNA (1)...(19): siRNA sense strand
gauaucaaagaggccaauu

SEQ ID NO: 1037576 - RNA, 19 nt, Homo sapiens
  misc_RNA (1)...(19): siRNA sense strand
gagggcagcuguugagaug

SEQ ID NO: 1037577 - RNA, 19 nt, Homo sapiens
  misc_RNA (1)...(19): siRNA sense strand
gccacgagguugcaaauuc

SEQ ID NO: 1037578 - RNA, 19 nt, Homo sapiens
  misc_RNA (1)...(19): siRNA sense strand
gcucauggaucacucuuuu

SEQ ID NO: 1037579 - RNA, 19 nt, Homo sapiens
  misc_RNA (1)...(19): siRNA sense strand
ugaagaaucagcaucaugu

SEQ ID NO: 1037580 - RNA, 19 nt, Homo sapiens
  misc_RNA (1)...(19): siRNA sense strand
gaagaaucagcaucauguu

SEQ ID NO: 1037581 - RNA, 19 nt, Homo sapiens
  misc_RNA (1)...(19): siRNA sense strand
gaaucagcaucauguuugg

SEQ ID NO: 1037582 - RNA, 19 nt, Homo sapiens
  misc_RNA (1)...(19): siRNA sense strand
agaaucagcaucauguuug

SEQ ID NO: 1037583 - RNA, 19 nt, Homo sapiens
  misc_RNA (1)...(19): siRNA sense strand
ggaucacucuuuuguggua

SEQ ID NO: 1037584 - RNA, 19 nt, Homo sapiens
  misc_RNA (1)...(19): siRNA sense strand
guugcaaauucgugaagaa

SEQ ID NO: 1037585 - RNA, 19 nt, Homo sapiens
  misc_RNA (1)...(19): siRNA sense strand
ccacgagguugcaaauucg

SEQ ID NO: 1037586 - RNA, 19 nt, Homo sapiens
  misc_RNA (1)...(19): siRNA sense strand
aagaaucagcaucauguuu

SEQ ID NO: 1037587 - RNA, 19 nt, Homo sapiens
  misc_RNA (1)...(19): siRNA sense strand
ggagggcagcuguugagau

SEQ ID NO: 1037588 - RNA, 19 nt, Homo sapiens
  misc_RNA (1)...(19): siRNA sense strand
gguugcaaauucgugaaga

SEQ ID NO: 1037589 - RNA, 19 nt, Homo sapiens
  misc_RNA (1)...(19): siRNA sense strand
gugaagaaucagcaucaug

SEQ ID NO: 1037590 - RNA, 19 nt, Homo sapiens
  misc_RNA (1)...(19): siRNA sense strand
ccgggaagccugucuagag

SEQ ID NO: 1037591 - RNA, 19 nt, Homo sapiens
  misc_RNA (1)...(19): siRNA sense strand
gaggaaagguuacauuaaa

SEQ ID NO: 1037592 - RNA, 19 nt, Homo sapiens
  misc_RNA (1)...(19): siRNA sense strand
gcaagauugucauggauuu

SEQ ID NO: 1037593 - RNA, 19 nt, Homo sapiens
  misc_RNA (1)...(19): siRNA sense strand
guuaugaguuccacuauga

SEQ ID NO: 1037594 - RNA, 19 nt, Homo sapiens
  misc_RNA (1)...(19): siRNA sense strand
gaaaagaaguaguggauga

SEQ ID NO: 1037595 - RNA, 19 nt, Homo sapiens
  misc_RNA (1)...(19): siRNA sense strand
acauaaaccugaucaaaug

SEQ ID NO: 1037596 - RNA, 19 nt, Homo sapiens
  misc_RNA (1)...(19): siRNA sense strand
uaacaagccguacucauuu

SEQ ID NO: 1037597 - RNA, 19 nt, Homo sapiens
  misc_RNA (1)...(19): siRNA sense strand
gaagauacagacaaucaaa

SEQ ID NO: 1037598 - RNA, 19 nt, Homo sapiens
  misc_RNA (1)...(19): siRNA sense strand
auacagaacuacagaagaa

SEQ ID NO: 1037599 - RNA, 19 nt, Homo sapiens
  misc_RNA (1)...(19): siRNA sense strand
gaacuacagaagaaucuaa

SEQ ID NO: 1037600 - RNA, 19 nt, Homo sapiens
  misc_RNA (1)...(19): siRNA sense strand
gcugagacaugaaggcauu

SEQ ID NO: 1037601 - RNA, 19 nt, Homo sapiens
  misc_RNA (1)...(19): siRNA sense strand
aaagaucacucuguauuug

SEQ ID NO: 1037602 - RNA, 19 nt, Homo sapiens
  misc_RNA (1)...(19): siRNA sense strand
gacagaagauacagacaau

SEQ ID NO: 1037603 - RNA, 19 nt, Homo sapiens
  misc_RNA (1)...(19): siRNA sense strand
ucuaagagagccuauguua

SEQ ID NO: 1037604 - RNA, 19 nt, Homo sapiens
  misc_RNA (1)...(19): siRNA sense strand
ugacauuugugaaagcuuu

SEQ ID NO: 1037605 - RNA, 19 nt, Homo sapiens
  misc_RNA (1)...(19): siRNA sense strand
gguggaugcucucuuaaug

SEQ ID NO: 1037606 - RNA, 19 nt, Homo sapiens
  misc_RNA (1)...(19): siRNA sense strand
gaucaaaugaccauaaauc

SEQ ID NO: 1037607 - RNA, 19 nt, Homo sapiens
  misc_RNA (1)...(19): siRNA sense strand
gagaaaugguugaggaaag

SEQ ID NO: 1037608 - RNA, 19 nt, Homo sapiens
  misc_RNA (1)...(19): siRNA sense strand
gcaaccaucaaaguaauua

SEQ ID NO: 1037609 - RNA, 19 nt, Homo sapiens
  misc_RNA (1)...(19): siRNA sense strand
agaaguaguggaugauuua

SEQ ID NO: 1037610 - RNA, 19 nt, Homo sapiens
  misc_RNA (1)...(19): siRNA sense strand
ggacagaagauacagacaa

SEQ ID NO: 1037611 - RNA, 19 nt, Homo sapiens
  misc_RNA (1)...(19): siRNA sense strand
gacaaaagaucacucugua

SEQ ID NO: 1037612 - RNA, 19 nt, Homo sapiens
  misc_RNA (1)...(19): siRNA sense strand
ggacagcaaccaucaaagu

SEQ ID NO: 1037613 - RNA, 19 nt, Homo sapiens
  misc_RNA (1)...(19): siRNA sense strand
caaaugaccauaaaucagu

SEQ ID NO: 1037614 - RNA, 19 nt, Homo sapiens
  misc_RNA (1)...(19): siRNA sense strand
cuaacaagccguacucauu

SEQ ID NO: 1037615 - RNA, 19 nt, Homo sapiens
  misc_RNA (1)...(19): siRNA sense strand
acagaagaguaaagcauuu

SEQ ID NO: 1037616 - RNA, 19 nt, Homo sapiens
  misc_RNA (1)...(19): siRNA sense strand
gagaacaacaauguagaua

SEQ ID NO: 1037617 - RNA, 19 nt, Homo sapiens
  misc_RNA (1)...(19): siRNA sense strand
gacagcaaccaucaaagua

SEQ ID NO: 1037618 - RNA, 19 nt, Homo sapiens
  misc_RNA (1)...(19): siRNA sense strand
caugguaguagaagaaaua

SEQ ID NO: 1037619 - RNA, 19 nt, Homo sapiens
  misc_RNA (1)...(19): siRNA sense strand
aagaaguaguggaugauuu

SEQ ID NO: 1037620 - RNA, 19 nt, Homo sapiens
  misc_RNA (1)...(19): siRNA sense strand
gcauugagacaguauccua

SEQ ID NO: 1037621 - RNA, 19 nt, Homo sapiens
  misc_RNA (1)...(19): siRNA sense strand
gaguaaagcauuuugguua

SEQ ID NO: 1037622 - RNA, 19 nt, Homo sapiens
  misc_RNA (1)...(19): siRNA sense strand
acugguggaugcucucuua

SEQ ID NO: 1037623 - RNA, 19 nt, Homo sapiens
  misc_RNA (1)...(19): siRNA sense strand
cagcaaccaucaaaguaau

SEQ ID NO: 1037624 - RNA, 19 nt, Homo sapiens
  misc_RNA (1)...(19): siRNA sense strand
ggaaagguuacauuaaaca

SEQ ID NO: 1037625 - RNA, 19 nt, Homo sapiens
  misc_RNA (1)...(19): siRNA sense strand
gagccuauguuacccucaa

SEQ ID NO: 1037626 - RNA, 19 nt, Homo sapiens
  misc_RNA (1)...(19): siRNA sense strand
guacucauuugcaagauac

SEQ ID NO: 1037627 - RNA, 19 nt, Homo sapiens
  misc_RNA (1)...(19): siRNA sense strand
cagaagauacagacaauca

SEQ ID NO: 1037628 - RNA, 19 nt, Homo sapiens
  misc_RNA (1)...(19): siRNA sense strand
ugaggaaagguuacauuaa

SEQ ID NO: 1037629 - RNA, 19 nt, Homo sapiens
  misc_RNA (1)...(19): siRNA sense strand
cagauuaaagccaagcaua

SEQ ID NO: 1037630 - RNA, 19 nt, Homo sapiens
  misc_RNA (1)...(19): siRNA sense strand
guaugaaccugggcaagau

SEQ ID NO: 1037631 - RNA, 19 nt, Homo sapiens
  misc_RNA (1)...(19): siRNA sense strand
caagauacagaacuacaga

SEQ ID NO: 1037632 - RNA, 19 nt, Homo sapiens
  misc_RNA (1)...(19): siRNA sense strand
ggagaaaugguugaggaaa

SEQ ID NO: 1037633 - RNA, 19 nt, Homo sapiens
  misc_RNA (1)...(19): siRNA sense strand
caaaagaucacucuguauu

SEQ ID NO: 1037634 - RNA, 19 nt, Homo sapiens
  misc_RNA (1)...(19): siRNA sense strand
cguacucauuugcaagaua

SEQ ID NO: 1037635 - RNA, 19 nt, Homo sapiens
  misc_RNA (1)...(19): siRNA sense strand
gggcaagauugucauggau

SEQ ID NO: 1037636 - RNA, 19 nt, Homo sapiens
  misc_RNA (1)...(19): siRNA sense strand
cugaucaaaugaccauaaa

SEQ ID NO: 1037637 - RNA, 19 nt, Homo sapiens
  misc_RNA (1)...(19): siRNA sense strand
aguaguggaugauuuagga

SEQ ID NO: 1037638 - RNA, 19 nt, Homo sapiens
  misc_RNA (1)...(19): siRNA sense strand
uauguuacccucaauggaa

SEQ ID NO: 1037639 - RNA, 19 nt, Homo sapiens
  misc_RNA (1)...(19): siRNA sense strand
auacuuugcugagacauga

SEQ ID NO: 1037640 - RNA, 19 nt, Homo sapiens
  misc_RNA (1)...(19): siRNA sense strand
ugaaggcauugagacagua

SEQ ID NO: 1037641 - RNA, 19 nt, Homo sapiens
  misc_RNA (1)...(19): siRNA sense strand
gauacagaacuacagaaga

SEQ ID NO: 1037642 - RNA, 19 nt, Homo sapiens
  misc_RNA (1)...(19): siRNA sense strand
gguuaugaguuccacuaug

SEQ ID NO: 1037643 - RNA, 19 nt, Homo sapiens
  misc_RNA (1)...(19): siRNA sense strand
uaagagagccuauguuacc

SEQ ID NO: 1037644 - RNA, 19 nt, Homo sapiens
  misc_RNA (1)...(19): siRNA sense strand
acagcaaccaucaaaguaa

SEQ ID NO: 1037645 - RNA, 19 nt, Homo sapiens
  misc_RNA (1)...(19): siRNA sense strand
gagccugguuguugccaau

SEQ ID NO: 1037646 - RNA, 19 nt, Homo sapiens
  misc_RNA (1)...(19): siRNA sense strand
uugaggaaagguuacauua

SEQ ID NO: 1037647 - RNA, 19 nt, Homo sapiens
  misc_RNA (1)...(19): siRNA sense strand
agaucacucuguauuugaa

SEQ ID NO: 1037648 - RNA, 19 nt, Homo sapiens
  misc_RNA (1)...(19): siRNA sense strand
acucagagccugguuguug

SEQ ID NO: 1037649 - RNA, 19 nt, Homo sapiens
  misc_RNA (1)...(19): siRNA sense strand
uaaggaaacagauuaaagc

SEQ ID NO: 1037650 - RNA, 19 nt, Homo sapiens
  misc_RNA (1)...(19): siRNA sense strand
cacagaagaguaaagcauu

SEQ ID NO: 1037651 - RNA, 19 nt, Homo sapiens
  misc_RNA (1)...(19): siRNA sense strand
guggaugauuuaggacaaa

SEQ ID NO: 1037652 - RNA, 19 nt, Homo sapiens
  misc_RNA (1)...(19): siRNA sense strand
ggacaaaagaucacucugu

SEQ ID NO: 1037653 - RNA, 19 nt, Homo sapiens
  misc_RNA (1)...(19): siRNA sense strand
cauaaaccugaucaaauga

SEQ ID NO: 1037654 - RNA, 19 nt, Homo sapiens
  misc_RNA (1)...(19): siRNA sense strand
gaaggcauugagacaguau

SEQ ID NO: 1037655 - RNA, 19 nt, Homo sapiens
  misc_RNA (1)...(19): siRNA sense strand
aacaagccguacucauuug

SEQ ID NO: 1037656 - RNA, 19 nt, Homo sapiens
  misc_RNA (1)...(19): siRNA sense strand
ccugaucaaaugaccauaa

SEQ ID NO: 1037657 - RNA, 19 nt, Homo sapiens
  misc_RNA (1)...(19): siRNA sense strand
agaaaugguugaggaaagg

SEQ ID NO: 1037658 - RNA, 19 nt, Homo sapiens
  misc_RNA (1)...(19): siRNA sense strand
guucuuaaggaaacagauu

SEQ ID NO: 1037659 - RNA, 19 nt, Homo sapiens
  misc_RNA (1)...(19): siRNA sense strand
uacagaagaaucuaagaga

SEQ ID NO: 1037660 - RNA, 19 nt, Homo sapiens
  misc_RNA (1)...(19): siRNA sense strand
uuugcaagauacagaacua

SEQ ID NO: 1037661 - RNA, 19 nt, Homo sapiens
  misc_RNA (1)...(19): siRNA sense strand
gcaagauacagaacuacag

SEQ ID NO: 1037662 - RNA, 19 nt, Homo sapiens
  misc_RNA (1)...(19): siRNA sense strand
ggcaagauugucauggauu

SEQ ID NO: 1037663 - RNA, 19 nt, Homo sapiens
  misc_RNA (1)...(19): siRNA sense strand
uaugagaacaacaauguag

SEQ ID NO: 1037664 - RNA, 19 nt, Homo sapiens
  misc_RNA (1)...(19): siRNA sense strand
acuaugagaacaacaaugu

SEQ ID NO: 1037665 - RNA, 19 nt, Homo sapiens
  misc_RNA (1)...(19): siRNA sense strand
agacaugaaggcauugaga

SEQ ID NO: 1037666 - RNA, 19 nt, Homo sapiens
  misc_RNA (1)...(19): siRNA sense strand
gcauuuugguuaugaguuc

SEQ ID NO: 1037667 - RNA, 19 nt, Homo sapiens
  misc_RNA (1)...(19): siRNA sense strand
ugggcaagauugucaugga

SEQ ID NO: 1037668 - RNA, 19 nt, Homo sapiens
  misc_RNA (1)...(19): siRNA sense strand
guugaggaaagguuacauu

SEQ ID NO: 1037669 - RNA, 19 nt, Homo sapiens
  misc_RNA (1)...(19): siRNA sense strand
aaagaaguaguggaugauu

SEQ ID NO: 1037670 - RNA, 19 nt, Homo sapiens
  misc_RNA (1)...(19): siRNA sense strand
ugagaacaacaauguagau

SEQ ID NO: 1037671 - RNA, 19 nt, Homo sapiens
  misc_RNA (1)...(19): siRNA sense strand
aaucuaagagagccuaugu

SEQ ID NO: 1037672 - RNA, 19 nt, Homo sapiens
  misc_RNA (1)...(19): siRNA sense strand
ucaaaugaccauaaaucag

SEQ ID NO: 1037673 - RNA, 19 nt, Homo sapiens
  misc_RNA (1)...(19): siRNA sense strand
gauuaaagccaagcauacu

SEQ ID NO: 1037674 - RNA, 19 nt, Homo sapiens
  misc_RNA (1)...(19): siRNA sense strand
gaaauguggacugguggau

SEQ ID NO: 1037675 - RNA, 19 nt, Homo sapiens
  misc_RNA (1)...(19): siRNA sense strand
guaaagcauuuugguuaug

SEQ ID NO: 1037676 - RNA, 19 nt, Homo sapiens
  misc_RNA (1)...(19): siRNA sense strand
gaaguaguggaugauuuag

SEQ ID NO: 1037677 - RNA, 19 nt, Homo sapiens
  misc_RNA (1)...(19): siRNA sense strand
ccacucagagccugguugu

SEQ ID NO: 1037678 - RNA, 19 nt, Homo sapiens
  misc_RNA (1)...(19): siRNA sense strand
acacagaagaguaaagcau

SEQ ID NO: 1037679 - RNA, 19 nt, Homo sapiens
  misc_RNA (1)...(19): siRNA sense strand
cuacagaagaaucuaagag

SEQ ID NO: 1037680 - RNA, 19 nt, Homo sapiens
  misc_RNA (1)...(19): siRNA sense strand
aggaaagguuacauuaaac

SEQ ID NO: 1037681 - RNA, 19 nt, Homo sapiens
  misc_RNA (1)...(19): siRNA sense strand
aagaucacucuguauuuga

SEQ ID NO: 1037682 - RNA, 19 nt, Homo sapiens
  misc_RNA (1)...(19): siRNA sense strand
caauggugguuuggguaau

SEQ ID NO: 1037683 - RNA, 19 nt, Homo sapiens
  misc_RNA (1)...(19): siRNA sense strand
aauggugguuuggguaaug

SEQ ID NO: 1037684 - RNA, 19 nt, Homo sapiens
  misc_RNA (1)...(19): siRNA sense strand
gggucuuccugacauuugu

SEQ ID NO: 1037685 - RNA, 19 nt, Homo sapiens
  misc_RNA (1)...(19): siRNA sense strand
guugauuggacagaagaua

SEQ ID NO: 1037686 - RNA, 19 nt, Homo sapiens
  misc_RNA (1)...(19): siRNA sense strand
ggacucaugguaguagaag

SEQ ID NO: 1037687 - RNA, 19 nt, Homo sapiens
  misc_RNA (1)...(19): siRNA sense strand
gauagaagcucucaaggau

SEQ ID NO: 1037688 - RNA, 19 nt, Homo sapiens
  misc_RNA (1)...(19): siRNA sense strand
gaaaugaagucugugauag

SEQ ID NO: 1037689 - RNA, 19 nt, Homo sapiens
  misc_RNA (1)...(19): siRNA sense strand
uagaagcucucaaggauaa

SEQ ID NO: 1037690 - RNA, 19 nt, Homo sapiens
  misc_RNA (1)...(19): siRNA sense strand
caaaccagagugaauauua

SEQ ID NO: 1037691 - RNA, 19 nt, Homo sapiens
  misc_RNA (1)...(19): siRNA sense strand
gaaaguggaaugaaucuga

SEQ ID NO: 1037692 - RNA, 19 nt, Homo sapiens
  misc_RNA (1)...(19): siRNA sense strand
ugaacaagcugaagaaauc

SEQ ID NO: 1037693 - RNA, 19 nt, Homo sapiens
  misc_RNA (1)...(19): siRNA sense strand
caagaaagccaaagccaaa

SEQ ID NO: 1037694 - RNA, 19 nt, Homo sapiens
  misc_RNA (1)...(19): siRNA sense strand
uaucaaggcuauaagagaa

SEQ ID NO: 1037695 - RNA, 19 nt, Homo sapiens
  misc_RNA (1)...(19): siRNA sense strand
gagaaaugcuggugaaacu

SEQ ID NO: 1037696 - RNA, 19 nt, Homo sapiens
  misc_RNA (1)...(19): siRNA sense strand
gaagaaaugaagucuguga

SEQ ID NO: 1037697 - RNA, 19 nt, Homo sapiens
  misc_RNA (1)...(19): siRNA sense strand
gaagacagugcaugaaaga

SEQ ID NO: 1037698 - RNA, 19 nt, Homo sapiens
  misc_RNA (1)...(19): siRNA sense strand
ugacaagauugcuguggua

SEQ ID NO: 1037699 - RNA, 19 nt, Homo sapiens
  misc_RNA (1)...(19): siRNA sense strand
uggaagaggugaaugaaga

SEQ ID NO: 1037700 - RNA, 19 nt, Homo sapiens
  misc_RNA (1)...(19): siRNA sense strand
caaagaacuccuuggauga

SEQ ID NO: 1037701 - RNA, 19 nt, Homo sapiens
  misc_RNA (1)...(19): siRNA sense strand
ccaaauggccgaugacaca

SEQ ID NO: 1037702 - RNA, 19 nt, Homo sapiens
  misc_RNA (1)...(19): siRNA sense strand
uaucagacccguuucagaa

SEQ ID NO: 1037703 - RNA, 19 nt, Homo sapiens
  misc_RNA (1)...(19): siRNA sense strand
cacccuaccuuucgcaauu

SEQ ID NO: 1037704 - RNA, 19 nt, Homo sapiens
  misc_RNA (1)...(19): siRNA sense strand
caacauggccauaggcaau

SEQ ID NO: 1037705 - RNA, 19 nt, Homo sapiens
  misc_RNA (1)...(19): siRNA sense strand
aaacagaucagccaaaugg

SEQ ID NO: 1037706 - RNA, 19 nt, Homo sapiens
  misc_RNA (1)...(19): siRNA sense strand
caacaaggccaaagacucu

SEQ ID NO: 1037707 - RNA, 19 nt, Homo sapiens
  misc_RNA (1)...(19): siRNA sense strand
gaaagacaacauggccaua

SEQ ID NO: 1037708 - RNA, 19 nt, Homo sapiens
  misc_RNA (1)...(19): siRNA sense strand
acagagaaaugcuggugaa

SEQ ID NO: 1037709 - RNA, 19 nt, Homo sapiens
  misc_RNA (1)...(19): siRNA sense strand
agaaaugaagucugugaua

SEQ ID NO: 1037710 - RNA, 19 nt, Homo sapiens
  misc_RNA (1)...(19): siRNA sense strand
gaaguggaagggacgcuaa

SEQ ID NO: 1037711 - RNA, 19 nt, Homo sapiens
  misc_RNA (1)...(19): siRNA sense strand
gacagugcaugaaagacaa

SEQ ID NO: 1037712 - RNA, 19 nt, Homo sapiens
  misc_RNA (1)...(19): siRNA sense strand
agaaacagaucagccaaau

SEQ ID NO: 1037713 - RNA, 19 nt, Homo sapiens
  misc_RNA (1)...(19): siRNA sense strand
ccaaacagaacaccaacaa

SEQ ID NO: 1037714 - RNA, 19 nt, Homo sapiens
  misc_RNA (1)...(19): siRNA sense strand
aagagaaaguggaaugaau

SEQ ID NO: 1037715 - RNA, 19 nt, Homo sapiens
  misc_RNA (1)...(19): siRNA sense strand
caagauugcugugguaacu

SEQ ID NO: 1037716 - RNA, 19 nt, Homo sapiens
  misc_RNA (1)...(19): siRNA sense strand
agaggugaaugaagaaaug

SEQ ID NO: 1037717 - RNA, 19 nt, Homo sapiens
  misc_RNA (1)...(19): siRNA sense strand
aaugaagucugugauagaa

SEQ ID NO: 1037718 - RNA, 19 nt, Homo sapiens
  misc_RNA (1)...(19): siRNA sense strand
aaaguggaaugaaucugaa

SEQ ID NO: 1037719 - RNA, 19 nt, Homo sapiens
  misc_RNA (1)...(19): siRNA sense strand
gcagcuaucaaggcuauaa

SEQ ID NO: 1037720 - RNA, 19 nt, Homo sapiens
  misc_RNA (1)...(19): siRNA sense strand
gagaaacagaucagccaaa

SEQ ID NO: 1037721 - RNA, 19 nt, Homo sapiens
  misc_RNA (1)...(19): siRNA sense strand
ggaagaggugaaugaagaa

SEQ ID NO: 1037722 - RNA, 19 nt, Homo sapiens
  misc_RNA (1)...(19): siRNA sense strand
uauuaaugcugccuugguu

SEQ ID NO: 1037723 - RNA, 19 nt, Homo sapiens
  misc_RNA (1)...(19): siRNA sense strand
gaaacuggccaaacagaac

SEQ ID NO: 1037724 - RNA, 19 nt, Homo sapiens
  misc_RNA (1)...(19): siRNA sense strand
auaaggaccucaccaggau

SEQ ID NO: 1037725 - RNA, 19 nt, Homo sapiens
  misc_RNA (1)...(19): siRNA sense strand
ggauauaaucaacuuggaa

SEQ ID NO: 1037726 - RNA, 19 nt, Homo sapiens
  misc_RNA (1)...(19): siRNA sense strand
ugaagacagugcaugaaag

SEQ ID NO: 1037727 - RNA, 19 nt, Homo sapiens
  misc_RNA (1)...(19): siRNA sense strand
gcuaauagagaaacagauc

SEQ ID NO: 1037728 - RNA, 19 nt, Homo sapiens
  misc_RNA (1)...(19): siRNA sense strand
gcuauaagagaaaguggaa

SEQ ID NO: 1037729 - RNA, 19 nt, Homo sapiens
  misc_RNA (1)...(19): siRNA sense strand
caaugaacaagcugaagaa

SEQ ID NO: 1037730 - RNA, 19 nt, Homo sapiens
  misc_RNA (1)...(19): siRNA sense strand
gaagaggugaaugaagaaa

SEQ ID NO: 1037731 - RNA, 19 nt, Homo sapiens
  misc_RNA (1)...(19): siRNA sense strand
gaaacagaucagccaaaug

SEQ ID NO: 1037732 - RNA, 19 nt, Homo sapiens
  misc_RNA (1)...(19): siRNA sense strand
ccagagagcacagagaaau

SEQ ID NO: 1037733 - RNA, 19 nt, Homo sapiens
  misc_RNA (1)...(19): siRNA sense strand
ucaaugaacaagcugaaga

SEQ ID NO: 1037734 - RNA, 19 nt, Homo sapiens
  misc_RNA (1)...(19): siRNA sense strand
augaagaaaugaagucugu

SEQ ID NO: 1037735 - RNA, 19 nt, Homo sapiens
  misc_RNA (1)...(19): siRNA sense strand
ccaaggauacagucucaga

SEQ ID NO: 1037736 - RNA, 19 nt, Homo sapiens
  misc_RNA (1)...(19): siRNA sense strand
uaaaccagauuagccagau

SEQ ID NO: 1037737 - RNA, 19 nt, Homo sapiens
  misc_RNA (1)...(19): siRNA sense strand
gaagcucucaaggauaauu

SEQ ID NO: 1037738 - RNA, 19 nt, Homo sapiens
  misc_RNA (1)...(19): siRNA sense strand
ucaccaggaucccuugaca

SEQ ID NO: 1037739 - RNA, 19 nt, Homo sapiens
  misc_RNA (1)...(19): siRNA sense strand
gaagaccaaagaacuccuu

SEQ ID NO: 1037740 - RNA, 19 nt, Homo sapiens
  misc_RNA (1)...(19): siRNA sense strand
acaggcaucuggcagugaa

SEQ ID NO: 1037741 - RNA, 19 nt, Homo sapiens
  misc_RNA (1)...(19): siRNA sense strand
uauaagagaaaguggaaug

SEQ ID NO: 1037742 - RNA, 19 nt, Homo sapiens
  misc_RNA (1)...(19): siRNA sense strand
gcaccaacucaaugaacaa

SEQ ID NO: 1037743 - RNA, 19 nt, Homo sapiens
  misc_RNA (1)...(19): siRNA sense strand
uaagagaaaguggaaugaa

SEQ ID NO: 1037744 - RNA, 19 nt, Homo sapiens
  misc_RNA (1)...(19): siRNA sense strand
gaacaccaacaaggccaaa

SEQ ID NO: 1037745 - RNA, 19 nt, Homo sapiens
  misc_RNA (1)...(19): siRNA sense strand
ugauagaagcucucaagga

SEQ ID NO: 1037746 - RNA, 19 nt, Homo sapiens
  misc_RNA (1)...(19): siRNA sense strand
agccagaucuccaugaagu

SEQ ID NO: 1037747 - RNA, 19 nt, Homo sapiens
  misc_RNA (1)...(19): siRNA sense strand
aaaugaagucugugauaga

SEQ ID NO: 1037748 - RNA, 19 nt, Homo sapiens
  misc_RNA (1)...(19): siRNA sense strand
gaagucgccacagcugauu

SEQ ID NO: 1037749 - RNA, 19 nt, Homo sapiens
  misc_RNA (1)...(19): siRNA sense strand
cagacccguuucagaaguu

SEQ ID NO: 1037750 - RNA, 19 nt, Homo sapiens
  misc_RNA (1)...(19): siRNA sense strand
cauggccuauucagcugua

SEQ ID NO: 1037751 - RNA, 19 nt, Homo sapiens
  misc_RNA (1)...(19): siRNA sense strand
uggugaaacuggccaaaca

SEQ ID NO: 1037752 - RNA, 19 nt, Homo sapiens
  misc_RNA (1)...(19): siRNA sense strand
gagaaaguggaaugaaucu

SEQ ID NO: 1037753 - RNA, 19 nt, Homo sapiens
  misc_RNA (1)...(19): siRNA sense strand
cugcagcuaucaaggcuau

SEQ ID NO: 1037754 - RNA, 19 nt, Homo sapiens
  misc_RNA (1)...(19): siRNA sense strand
uuagccagaucuccaugaa

SEQ ID NO: 1037755 - RNA, 19 nt, Homo sapiens
  misc_RNA (1)...(19): siRNA sense strand
caacuuggaagaggugaau

SEQ ID NO: 1037756 - RNA, 19 nt, Homo sapiens
  misc_RNA (1)...(19): siRNA sense strand
ccaacucaaugaacaagcu

SEQ ID NO: 1037757 - RNA, 19 nt, Homo sapiens
  misc_RNA (1)...(19): siRNA sense strand
gacaagauugcugugguaa

SEQ ID NO: 1037758 - RNA, 19 nt, Homo sapiens
  misc_RNA (1)...(19): siRNA sense strand
ugaaacuggccaaacagaa

SEQ ID NO: 1037759 - RNA, 19 nt, Homo sapiens
  misc_RNA (1)...(19): siRNA sense strand
ucagacccguuucagaagu

SEQ ID NO: 1037760 - RNA, 19 nt, Homo sapiens
  misc_RNA (1)...(19): siRNA sense strand
guucgcaccaacucaauga

SEQ ID NO: 1037761 - RNA, 19 nt, Homo sapiens
  misc_RNA (1)...(19): siRNA sense strand
ucccaaaccagagugaaua

SEQ ID NO: 1037762 - RNA, 19 nt, Homo sapiens
  misc_RNA (1)...(19): siRNA sense strand
gcagugaagaccaaagaac

SEQ ID NO: 1037763 - RNA, 19 nt, Homo sapiens
  misc_RNA (1)...(19): siRNA sense strand
cugaagacagugcaugaaa

SEQ ID NO: 1037764 - RNA, 19 nt, Homo sapiens
  misc_RNA (1)...(19): siRNA sense strand
agacccguuucagaaguua

SEQ ID NO: 1037765 - RNA, 19 nt, Homo sapiens
  misc_RNA (1)...(19): siRNA sense strand
cuaauucggguacccauuc

SEQ ID NO: 1037766 - RNA, 19 nt, Homo sapiens
  misc_RNA (1)...(19): siRNA sense strand
agacagugcaugaaagaca

SEQ ID NO: 1037767 - RNA, 19 nt, Homo sapiens
  misc_RNA (1)...(19): siRNA sense strand
ucucagaggacaccauuag

SEQ ID NO: 1037768 - RNA, 19 nt, Homo sapiens
  misc_RNA (1)...(19): siRNA sense strand
gaagguucgcaccaacuca

SEQ ID NO: 1037769 - RNA, 19 nt, Homo sapiens
  misc_RNA (1)...(19): siRNA sense strand
guggaagggacgcuaauuc

SEQ ID NO: 1037770 - RNA, 19 nt, Homo sapiens
  misc_RNA (1)...(19): siRNA sense strand
cagcugauuuuggugaaua

SEQ ID NO: 1037771 - RNA, 19 nt, Homo sapiens
  misc_RNA (1)...(19): siRNA sense strand
ugccuugguugaggauaua

SEQ ID NO: 1037772 - RNA, 19 nt, Homo sapiens
  misc_RNA (1)...(19): siRNA sense strand
gaaugaagaaaugaagucu

SEQ ID NO: 1037773 - RNA, 19 nt, Homo sapiens
  misc_RNA (1)...(19): siRNA sense strand
agccaaagccaaagggaaa

SEQ ID NO: 1037774 - RNA, 19 nt, Homo sapiens
  misc_RNA (1)...(19): siRNA sense strand
agagaaaguggaaugaauc

SEQ ID NO: 1037775 - RNA, 19 nt, Homo sapiens
  misc_RNA (1)...(19): siRNA sense strand
acccuaccuuucgcaauua

SEQ ID NO: 1037776 - RNA, 19 nt, Homo sapiens
  misc_RNA (1)...(19): siRNA sense strand
cuaucaaggcuauaagaga

SEQ ID NO: 1037777 - RNA, 19 nt, Homo sapiens
  misc_RNA (1)...(19): siRNA sense strand
gugaaacuggccaaacaga

SEQ ID NO: 1037778 - RNA, 19 nt, Homo sapiens
  misc_RNA (1)...(19): siRNA sense strand
aaccagagagcacagagaa

SEQ ID NO: 1037779 - RNA, 19 nt, Homo sapiens
  misc_RNA (1)...(19): siRNA sense strand
gaggugaaugaagaaauga

SEQ ID NO: 1037780 - RNA, 19 nt, Homo sapiens
  misc_RNA (1)...(19): siRNA sense strand
caugguccacccuaccuuu

SEQ ID NO: 1037781 - RNA, 19 nt, Homo sapiens
  misc_RNA (1)...(19): siRNA sense strand
ggaagguucgcaccaacuc

SEQ ID NO: 1037782 - RNA, 19 nt, Homo sapiens
  misc_RNA (1)...(19): siRNA sense strand
ccaaaccagagugaauauu

SEQ ID NO: 1037783 - RNA, 19 nt, Homo sapiens
  misc_RNA (1)...(19): siRNA sense strand
cagagagcacagagaaaug

SEQ ID NO: 1037784 - RNA, 19 nt, Homo sapiens
  misc_RNA (1)...(19): siRNA sense strand
ugaaugaagaaaugaaguc

SEQ ID NO: 1037785 - RNA, 19 nt, Homo sapiens
  misc_RNA (1)...(19): siRNA sense strand
uuaaugcugccuugguuga

SEQ ID NO: 1037786 - RNA, 19 nt, Homo sapiens
  misc_RNA (1)...(19): siRNA sense strand
acaccaacaaggccaaaga

SEQ ID NO: 1037787 - RNA, 19 nt, Homo sapiens
  misc_RNA (1)...(19): siRNA sense strand
gagaaacauuacaggauua

SEQ ID NO: 1037788 - RNA, 19 nt, Homo sapiens
  misc_RNA (1)...(19): siRNA sense strand
cgacagaggacuccaauaa

SEQ ID NO: 1037789 - RNA, 19 nt, Homo sapiens
  misc_RNA (1)...(19): siRNA sense strand
cacaggaccuuauggauuu

SEQ ID NO: 1037790 - RNA, 19 nt, Homo sapiens
  misc_RNA (1)...(19): siRNA sense strand
ucaaggagcuaaaccaaug

SEQ ID NO: 1037791 - RNA, 19 nt, Homo sapiens
  misc_RNA (1)...(19): siRNA sense strand
ggaaaguggucgcuuaugg

SEQ ID NO: 1037792 - RNA, 19 nt, Homo sapiens
  misc_RNA (1)...(19): siRNA sense strand
caagaagaaugugguggua

SEQ ID NO: 1037793 - RNA, 19 nt, Homo sapiens
  misc_RNA (1)...(19): siRNA sense strand
agaggaaaguggucgcuua

SEQ ID NO: 1037794 - RNA, 19 nt, Homo sapiens
  misc_RNA (1)...(19): siRNA sense strand
agagaaacauuacaggauu

SEQ ID NO: 1037795 - RNA, 19 nt, Homo sapiens
  misc_RNA (1)...(19): siRNA sense strand
acagagaagaggaguauua

SEQ ID NO: 1037796 - RNA, 19 nt, Homo sapiens
  misc_RNA (1)...(19): siRNA sense strand
gguagugacuguacucuag

SEQ ID NO: 1037797 - RNA, 19 nt, Homo sapiens
  misc_RNA (1)...(19): siRNA sense strand
gacaagagcaggaacaugu

SEQ ID NO: 1037798 - RNA, 19 nt, Homo sapiens
  misc_RNA (1)...(19): siRNA sense strand
ggacugguugcuuguauuu

SEQ ID NO: 1037799 - RNA, 19 nt, Homo sapiens
  misc_RNA (1)...(19): siRNA sense strand
acacuucccugacagagaa

SEQ ID NO: 1037800 - RNA, 19 nt, Homo sapiens
  misc_RNA (1)...(19): siRNA sense strand
caccguagcuguuccuaau

SEQ ID NO: 1037801 - RNA, 19 nt, Homo sapiens
  misc_RNA (1)...(19): siRNA sense strand
acagaggacuccaauaaca

SEQ ID NO: 1037802 - RNA, 19 nt, Homo sapiens
  misc_RNA (1)...(19): siRNA sense strand
guauagaagccaagaagaa

SEQ ID NO: 1037803 - RNA, 19 nt, Homo sapiens
  misc_RNA (1)...(19): siRNA sense strand
aaaccaauggccagauuua

SEQ ID NO: 1037804 - RNA, 19 nt, Homo sapiens
  misc_RNA (1)...(19): siRNA sense strand
gcaggaacauguggaguag

SEQ ID NO: 1037805 - RNA, 19 nt, Homo sapiens
  misc_RNA (1)...(19): siRNA sense strand
ggacagggcagcagaagag

SEQ ID NO: 1037806 - RNA, 19 nt, Homo sapiens
  misc_RNA (1)...(19): siRNA sense strand
cuaaaccaauggccagauu

SEQ ID NO: 1037807 - RNA, 19 nt, Homo sapiens
  misc_RNA (1)...(19): siRNA sense strand
ucacaggaccuuauggauu

SEQ ID NO: 1037808 - RNA, 19 nt, Homo sapiens
  misc_RNA (1)...(19): siRNA sense strand
gagaguauucgguggcuaa

SEQ ID NO: 1037809 - RNA, 19 nt, Homo sapiens
  misc_RNA (1)...(19): siRNA sense strand
ggagcacacuucccugaca

SEQ ID NO: 1037810 - RNA, 19 nt, Homo sapiens
  misc_RNA (1)...(19): siRNA sense strand
gagagaaacauuacaggau

SEQ ID NO: 1037811 - RNA, 19 nt, Homo sapiens
  misc_RNA (1)...(19): siRNA sense strand
ggacuccaauaacacugaa

SEQ ID NO: 1037812 - RNA, 19 nt, Homo sapiens
  misc_RNA (1)...(19): siRNA sense strand
cagcacagcagccuuucua

SEQ ID NO: 1037813 - RNA, 19 nt, Homo sapiens
  misc_RNA (1)...(19): siRNA sense strand
aguauucgguggcuaauuc

SEQ ID NO: 1037814 - RNA, 19 nt, Homo sapiens
  misc_RNA (1)...(19): siRNA sense strand
gaaaguggucgcuuauggu

SEQ ID NO: 1037815 - RNA, 19 nt, Homo sapiens
  misc_RNA (1)...(19): siRNA sense strand
guagcuguuccuaauauuu

SEQ ID NO: 1037816 - RNA, 19 nt, Homo sapiens
  misc_RNA (1)...(19): siRNA sense strand
agaauguggugguaacuca

SEQ ID NO: 1037817 - RNA, 19 nt, Homo sapiens
  misc_RNA (1)...(19): siRNA sense strand
ccaauaacacugaaagucu

SEQ ID NO: 1037818 - RNA, 19 nt, Homo sapiens
  misc_RNA (1)...(19): siRNA sense strand
ugacagagaagaggaguau

SEQ ID NO: 1037819 - RNA, 19 nt, Homo sapiens
  misc_RNA (1)...(19): siRNA sense strand
ccguagcuguuccuaauau

SEQ ID NO: 1037820 - RNA, 19 nt, Homo sapiens
  misc_RNA (1)...(19): siRNA sense strand
gaggaaaguggucgcuuau

SEQ ID NO: 1037821 - RNA, 19 nt, Homo sapiens
  misc_RNA (1)...(19): siRNA sense strand
gagaagaggaguauuacac

SEQ ID NO: 1037822 - RNA, 19 nt, Homo sapiens
  misc_RNA (1)...(19): siRNA sense strand
gaccaaauaggcccucuuc

SEQ ID NO: 1037823 - RNA, 19 nt, Homo sapiens
  misc_RNA (1)...(19): siRNA sense strand
ggugaacugugaggagaga

SEQ ID NO: 1037824 - RNA, 19 nt, Homo sapiens
  misc_RNA (1)...(19): siRNA sense strand
uaacucaagccgaccaaau

SEQ ID NO: 1037825 - RNA, 19 nt, Homo sapiens
  misc_RNA (1)...(19): siRNA sense strand
guacucuaguccuguuuua

SEQ ID NO: 1037826 - RNA, 19 nt, Homo sapiens
  misc_RNA (1)...(19): siRNA sense strand
gcaccguagcuguuccuaa

SEQ ID NO: 1037827 - RNA, 19 nt, Homo sapiens
  misc_RNA (1)...(19): siRNA sense strand
ugugaggagagaaacauua

SEQ ID NO: 1037828 - RNA, 19 nt, Homo sapiens
  misc_RNA (1)...(19): siRNA sense strand
ggacaagagcaggaacaug

SEQ ID NO: 1037829 - RNA, 19 nt, Homo sapiens
  misc_RNA (1)...(19): siRNA sense strand
gaacacuggaaacacugaa

SEQ ID NO: 1037830 - RNA, 19 nt, Homo sapiens
  misc_RNA (1)...(19): siRNA sense strand
cagccuuucuaccagguuu

SEQ ID NO: 1037831 - RNA, 19 nt, Homo sapiens
  misc_RNA (1)...(19): siRNA sense strand
guggacugguugcuuguau

SEQ ID NO: 1037832 - RNA, 19 nt, Homo sapiens
  misc_RNA (1)...(19): siRNA sense strand
aacucaagccgaccaaaua

SEQ ID NO: 1037833 - RNA, 19 nt, Homo sapiens
  misc_RNA (1)...(19): siRNA sense strand
agaagaauguggugguaac

SEQ ID NO: 1037834 - RNA, 19 nt, Homo sapiens
  misc_RNA (1)...(19): siRNA sense strand
acacugaaagucugaaauc

SEQ ID NO: 1037835 - RNA, 19 nt, Homo sapiens
  misc_RNA (1)...(19): siRNA sense strand
uauagaagccaagaagaau

SEQ ID NO: 1037836 - RNA, 19 nt, Homo sapiens
  misc_RNA (1)...(19): siRNA sense strand
uaacacugaaagucugaaa

SEQ ID NO: 1037837 - RNA, 19 nt, Homo sapiens
  misc_RNA (1)...(19): siRNA sense strand
cauucgaacugagaguauu

SEQ ID NO: 1037838 - RNA, 19 nt, Homo sapiens
  misc_RNA (1)...(19): siRNA sense strand
gguauagaagccaagaaga

SEQ ID NO: 1037839 - RNA, 19 nt, Homo sapiens
  misc_RNA (1)...(19): siRNA sense strand
uaaaccaauggccagauuu

SEQ ID NO: 1037840 - RNA, 19 nt, Homo sapiens
  misc_RNA (1)...(19): siRNA sense strand
ccccaaaggugaacuguga

SEQ ID NO: 1037841 - RNA, 19 nt, Homo sapiens
  misc_RNA (1)...(19): siRNA sense strand
cccaaacgguagugacugu

SEQ ID NO: 1037842 - RNA, 19 nt, Homo sapiens
  misc_RNA (1)...(19): siRNA sense strand
uuacacagagccagaagug

SEQ ID NO: 1037843 - RNA, 19 nt, Homo sapiens
  misc_RNA (1)...(19): siRNA sense strand
uagaagccaagaagaaugu

SEQ ID NO: 1037844 - RNA, 19 nt, Homo sapiens
  misc_RNA (1)...(19): siRNA sense strand
uaaucagacagguauagaa

SEQ ID NO: 1037845 - RNA, 19 nt, Homo sapiens
  misc_RNA (1)...(19): siRNA sense strand
acagaucgaacacuggaaa

SEQ ID NO: 1037846 - RNA, 19 nt, Homo sapiens
  misc_RNA (1)...(19): siRNA sense strand
gaggagagaaacauuacag

SEQ ID NO: 1037847 - RNA, 19 nt, Homo sapiens
  misc_RNA (1)...(19): siRNA sense strand
gugaugcugucugugauuc

SEQ ID NO: 1037848 - RNA, 19 nt, Homo sapiens
  misc_RNA (1)...(19): siRNA sense strand
cguagcuguuccuaauauu

SEQ ID NO: 1037849 - RNA, 19 nt, Homo sapiens
  misc_RNA (1)...(19): siRNA sense strand
ucucagcacagcagccuuu

SEQ ID NO: 1037850 - RNA, 19 nt, Homo sapiens
  misc_RNA (1)...(19): siRNA sense strand
cuucccagcacuuugauaa

SEQ ID NO: 1037851 - RNA, 19 nt, Homo sapiens
  misc_RNA (1)...(19): siRNA sense strand
cguggagguugcagaggaa

SEQ ID NO: 1037852 - RNA, 19 nt, Homo sapiens
  misc_RNA (1)...(19): siRNA sense strand
ccucuucccagcacuuuga

SEQ ID NO: 1037853 - RNA, 19 nt, Homo sapiens
  misc_RNA (1)...(19): siRNA sense strand
auuuccagcucuucacuuu

SEQ ID NO: 1037854 - RNA, 19 nt, Homo sapiens
  misc_RNA (1)...(19): siRNA sense strand
gaauguggugguaacucaa

SEQ ID NO: 1037855 - RNA, 19 nt, Homo sapiens
  misc_RNA (1)...(19): siRNA sense strand
gacagaggacuccaauaac

SEQ ID NO: 1037856 - RNA, 19 nt, Homo sapiens
  misc_RNA (1)...(19): siRNA sense strand
uggacugguugcuuguauu

SEQ ID NO: 1037857 - RNA, 19 nt, Homo sapiens
  misc_RNA (1)...(19): siRNA sense strand
agaagaggaguauuacaca

SEQ ID NO: 1037858 - RNA, 19 nt, Homo sapiens
  misc_RNA (1)...(19): siRNA sense strand
ggugaugcugucugugauu

SEQ ID NO: 1037859 - RNA, 19 nt, Homo sapiens
  misc_RNA (1)...(19): siRNA sense strand
gaaacauuacaggauuaga

SEQ ID NO: 1037860 - RNA, 19 nt, Homo sapiens
  misc_RNA (1)...(19): siRNA sense strand
gaggagcggaggacucaag

SEQ ID NO: 1037861 - RNA, 19 nt, Homo sapiens
  misc_RNA (1)...(19): siRNA sense strand
aagaggaguauuacacaga

SEQ ID NO: 1037862 - RNA, 19 nt, Homo sapiens
  misc_RNA (1)...(19): siRNA sense strand
ggagguugcagaggaaagu

SEQ ID NO: 1037863 - RNA, 19 nt, Homo sapiens
  misc_RNA (1)...(19): siRNA sense strand
gcuaauuccaggacaagag

SEQ ID NO: 1037864 - RNA, 19 nt, Homo sapiens
  misc_RNA (1)...(19): siRNA sense strand
uauguaugcuaccauucga

SEQ ID NO: 1037865 - RNA, 19 nt, Homo sapiens
  misc_RNA (1)...(19): siRNA sense strand
ugaacugugaggagagaaa

SEQ ID NO: 1037866 - RNA, 19 nt, Homo sapiens
  misc_RNA (1)...(19): siRNA sense strand
gcuuguauuuuccuuauuc

SEQ ID NO: 1037867 - RNA, 19 nt, Homo sapiens
  misc_RNA (1)...(19): siRNA sense strand
uggaaacacugaaaaucuu

SEQ ID NO: 1037868 - RNA, 19 nt, Homo sapiens
  misc_RNA (1)...(19): siRNA sense strand
gggcauuuccagcucuuca

SEQ ID NO: 1037869 - RNA, 19 nt, Homo sapiens
  misc_RNA (1)...(19): siRNA sense strand
cacccaaggcgaucacaug

SEQ ID NO: 1037870 - RNA, 19 nt, Homo sapiens
  misc_RNA (1)...(19): siRNA sense strand
aaucagacagguauagaag

SEQ ID NO: 1037871 - RNA, 19 nt, Homo sapiens
  misc_RNA (1)...(19): siRNA sense strand
cagcagaagaggccaaugc

SEQ ID NO: 1037872 - RNA, 19 nt, Homo sapiens
  misc_RNA (1)...(19): siRNA sense strand
ggaauggaaucccaaaguu

SEQ ID NO: 1037873 - RNA, 19 nt, Homo sapiens
  misc_RNA (1)...(19): siRNA sense strand
gcagacagcuggagaaggu

SEQ ID NO: 1037874 - RNA, 19 nt, Homo sapiens
  misc_RNA (1)...(19): siRNA sense strand
gagaggaccuacagugcua

SEQ ID NO: 1037875 - RNA, 19 nt, Homo sapiens
  misc_RNA (1)...(19): siRNA sense strand
gaauggaaucccaaaguua

SEQ ID NO: 1037876 - RNA, 19 nt, Homo sapiens
  misc_RNA (1)...(19): siRNA sense strand
gaaacaggcccaaguguca

SEQ ID NO: 1037877 - RNA, 19 nt, Homo sapiens
  misc_RNA (1)...(19): siRNA sense strand
ccacaaagcaggaucaaug

SEQ ID NO: 1037878 - RNA, 19 nt, Homo sapiens
  misc_RNA (1)...(19): siRNA sense strand
gcagcaacauccacaccua

SEQ ID NO: 1037879 - RNA, 19 nt, Homo sapiens
  misc_RNA (1)...(19): siRNA sense strand
ggagaaagaaauacgauau

SEQ ID NO: 1037880 - RNA, 19 nt, Homo sapiens
  misc_RNA (1)...(19): siRNA sense strand
gaauucagccugcuuaagu

SEQ ID NO: 1037881 - RNA, 19 nt, Homo sapiens
  misc_RNA (1)...(19): siRNA sense strand
gaguaaaggcuuccacaaa

SEQ ID NO: 1037882 - RNA, 19 nt, Homo sapiens
  misc_RNA (1)...(19): siRNA sense strand
ggagaaggccaacaguuug

SEQ ID NO: 1037883 - RNA, 19 nt, Homo sapiens
  misc_RNA (1)...(19): siRNA sense strand
ggaccuacagugcuaauug

SEQ ID NO: 1037884 - RNA, 19 nt, Homo sapiens
  misc_RNA (1)...(19): siRNA sense strand
gaaaugucguugccugaag

SEQ ID NO: 1037885 - RNA, 19 nt, Homo sapiens
  misc_RNA (1)...(19): siRNA sense strand
agacaccacugcugacuug

SEQ ID NO: 1037886 - RNA, 19 nt, Homo sapiens
  misc_RNA (1)...(19): siRNA sense strand
gacaagugcuuugggagaa

SEQ ID NO: 1037887 - RNA, 19 nt, Homo sapiens
  misc_RNA (1)...(19): siRNA sense strand
aaacucuccuucucacauu

SEQ ID NO: 1037888 - RNA, 19 nt, Homo sapiens
  misc_RNA (1)...(19): siRNA sense strand
ucugaucacuccucugaaa

SEQ ID NO: 1037889 - RNA, 19 nt, Homo sapiens
  misc_RNA (1)...(19): siRNA sense strand
gcgacaauccauauaugua

SEQ ID NO: 1037890 - RNA, 19 nt, Homo sapiens
  misc_RNA (1)...(19): siRNA sense strand
gaucacuccucugaaaugu

SEQ ID NO: 1037891 - RNA, 19 nt, Homo sapiens
  misc_RNA (1)...(19): siRNA sense strand
gaggaauucagccugcuua

SEQ ID NO: 1037892 - RNA, 19 nt, Homo sapiens
  misc_RNA (1)...(19): siRNA sense strand
gagaaggccaacaguuuga

SEQ ID NO: 1037893 - RNA, 19 nt, Homo sapiens
  misc_RNA (1)...(19): siRNA sense strand
gaaacucuccuucucacau

SEQ ID NO: 1037894 - RNA, 19 nt, Homo sapiens
  misc_RNA (1)...(19): siRNA sense strand
aguaaaggcuuccacaaag

SEQ ID NO: 1037895 - RNA, 19 nt, Homo sapiens
  misc_RNA (1)...(19): siRNA sense strand
ucaauagugccuuaugaaa

SEQ ID NO: 1037896 - RNA, 19 nt, Homo sapiens
  misc_RNA (1)...(19): siRNA sense strand
ucaaugcucccaccaguga

SEQ ID NO: 1037897 - RNA, 19 nt, Homo sapiens
  misc_RNA (1)...(19): siRNA sense strand
aauggaaucccaaaguuaa

SEQ ID NO: 1037898 - RNA, 19 nt, Homo sapiens
  misc_RNA (1)...(19): siRNA sense strand
uugaggagcuugacaacug

SEQ ID NO: 1037899 - RNA, 19 nt, Homo sapiens
  misc_RNA (1)...(19): siRNA sense strand
gggagaaagaaauacgaua

SEQ ID NO: 1037900 - RNA, 19 nt, Homo sapiens
  misc_RNA (1)...(19): siRNA sense strand
gaaggccaacaguuugaaa

SEQ ID NO: 1037901 - RNA, 19 nt, Homo sapiens
  misc_RNA (1)...(19): siRNA sense strand
gcagccagcagugcccuua

SEQ ID NO: 1037902 - RNA, 19 nt, Homo sapiens
  misc_RNA (1)...(19): siRNA sense strand
uuucaauagugccuuauga

SEQ ID NO: 1037903 - RNA, 19 nt, Homo sapiens
  misc_RNA (1)...(19): siRNA sense strand
agaggacgguggacaagug

SEQ ID NO: 1037904 - RNA, 19 nt, Homo sapiens
  misc_RNA (1)...(19): siRNA sense strand
aggagaaggccaacaguuu

SEQ ID NO: 1037905 - RNA, 19 nt, Homo sapiens
  misc_RNA (1)...(19): siRNA sense strand
cgauauugaucccaggaau

SEQ ID NO: 1037906 - RNA, 19 nt, Homo sapiens
  misc_RNA (1)...(19): siRNA sense strand
gauauugaucccaggaaug

SEQ ID NO: 1037907 - RNA, 19 nt, Homo sapiens
  misc_RNA (1)...(19): siRNA sense strand
cacaacacccucuggcaaa

SEQ ID NO: 1037908 - RNA, 19 nt, Homo sapiens
  misc_RNA (1)...(19): siRNA sense strand
gaccuacagugcuaauugc

SEQ ID NO: 1037909 - RNA, 19 nt, Homo sapiens
  misc_RNA (1)...(19): siRNA sense strand
gaucggaaacucuccuucu

SEQ ID NO: 1037910 - RNA, 19 nt, Homo sapiens
  misc_RNA (1)...(19): siRNA sense strand
gcagugcuucuuuaaugga

SEQ ID NO: 1037911 - RNA, 19 nt, Homo sapiens
  misc_RNA (1)...(19): siRNA sense strand
ccauauauguacccagaac

SEQ ID NO: 1037912 - RNA, 19 nt, Homo sapiens
  misc_RNA (1)...(19): siRNA sense strand
uuaaguugcagacgaaaga

SEQ ID NO: 1037913 - RNA, 19 nt, Homo sapiens
  misc_RNA (1)...(19): siRNA sense strand
gaaggagaaggccaacagu

SEQ ID NO: 1037914 - RNA, 19 nt, Homo sapiens
  misc_RNA (1)...(19): siRNA sense strand
cgacaauccauauauguac

SEQ ID NO: 1037915 - RNA, 19 nt, Homo sapiens
  misc_RNA (1)...(19): siRNA sense strand
ugacuuggaucggaaacuc

SEQ ID NO: 1037916 - RNA, 19 nt, Homo sapiens
  misc_RNA (1)...(19): siRNA sense strand
acaagugcuuugggagaaa

SEQ ID NO: 1037917 - RNA, 19 nt, Homo sapiens
  misc_RNA (1)...(19): siRNA sense strand
caccacugcugacuuggau

SEQ ID NO: 1037918 - RNA, 19 nt, Homo sapiens
  misc_RNA (1)...(19): siRNA sense strand
gcacaugcuacaccuuucu

SEQ ID NO: 1037919 - RNA, 19 nt, Homo sapiens
  misc_RNA (1)...(19): siRNA sense strand
gagccucuuccacaaauuc

SEQ ID NO: 1037920 - RNA, 19 nt, Homo sapiens
  misc_RNA (1)...(19): siRNA sense strand
caauagugccuuaugaaaa

SEQ ID NO: 1037921 - RNA, 19 nt, Homo sapiens
  misc_RNA (1)...(19): siRNA sense strand
aauucagccugcuuaaguu

SEQ ID NO: 1037922 - RNA, 19 nt, Homo sapiens
  misc_RNA (1)...(19): siRNA sense strand
ggaauucagccugcuuaag

SEQ ID NO: 1037923 - RNA, 19 nt, Homo sapiens
  misc_RNA (1)...(19): siRNA sense strand
aggcgacaauccauauaug

SEQ ID NO: 1037924 - RNA, 19 nt, Homo sapiens
  misc_RNA (1)...(19): siRNA sense strand
ccaggcgacaauccauaua

SEQ ID NO: 1037925 - RNA, 19 nt, Homo sapiens
  misc_RNA (1)...(19): siRNA sense strand
ggacgguggacaagugcuu

SEQ ID NO: 1037926 - RNA, 19 nt, Homo sapiens
  misc_RNA (1)...(19): siRNA sense strand
aaaagggacucuggcauga

SEQ ID NO: 1037927 - RNA, 19 nt, Homo sapiens
  misc_RNA (1)...(19): siRNA sense strand
gucguugccugaaguccaa

SEQ ID NO: 1037928 - RNA, 19 nt, Homo sapiens
  misc_RNA (1)...(19): siRNA sense strand
aaaugucguugccugaagu

SEQ ID NO: 1037929 - RNA, 19 nt, Homo sapiens
  misc_RNA (1)...(19): siRNA sense strand
cagcagugcccuuaaugca

SEQ ID NO: 1037930 - RNA, 19 nt, Homo sapiens
  misc_RNA (1)...(19): siRNA sense strand
ugaaaugucguugccugaa

SEQ ID NO: 1037931 - RNA, 19 nt, Homo sapiens
  misc_RNA (1)...(19): siRNA sense strand
cagagaggacgguggacaa

SEQ ID NO: 1037932 - RNA, 19 nt, Homo sapiens
  misc_RNA (1)...(19): siRNA sense strand
acaccuaccacgucggaaa

SEQ ID NO: 1037933 - RNA, 19 nt, Homo sapiens
  misc_RNA (1)...(19): siRNA sense strand
uuccacaaauucccaacuu

SEQ ID NO: 1037934 - RNA, 19 nt, Homo sapiens
  misc_RNA (1)...(19): siRNA sense strand
ugaucacuccucugaaaug

SEQ ID NO: 1037935 - RNA, 19 nt, Homo sapiens
  misc_RNA (1)...(19): siRNA sense strand
acaagagguugaggagcuu

SEQ ID NO: 1037936 - RNA, 19 nt, Homo sapiens
  misc_RNA (1)...(19): siRNA sense strand
uccacaaauucccaacuug

SEQ ID NO: 1037937 - RNA, 19 nt, Homo sapiens
  misc_RNA (1)...(19): siRNA sense strand
caggcgacaauccauauau

SEQ ID NO: 1037938 - RNA, 19 nt, Homo sapiens
  misc_RNA (1)...(19): siRNA sense strand
ccaggaauggaaucccaaa

SEQ ID NO: 1037939 - RNA, 19 nt, Homo sapiens
  misc_RNA (1)...(19): siRNA sense strand
ggaaacucuccuucucaca

SEQ ID NO: 1037940 - RNA, 19 nt, Homo sapiens
  misc_RNA (1)...(19): siRNA sense strand
gcccuuaaugcacaugcua

SEQ ID NO: 1037941 - RNA, 19 nt, Homo sapiens
  misc_RNA (1)...(19): siRNA sense strand
gugcuaauugcagugauuu

SEQ ID NO: 1037942 - RNA, 19 nt, Homo sapiens
  misc_RNA (1)...(19): siRNA sense strand
ggcgacaauccauauaugu

SEQ ID NO: 1037943 - RNA, 19 nt, Homo sapiens
  misc_RNA (1)...(19): siRNA sense strand
cuucuuuaauggagucuuc

SEQ ID NO: 1037944 - RNA, 19 nt, Homo sapiens
  misc_RNA (1)...(19): siRNA sense strand
guacccagaacagaguaaa

SEQ ID NO: 1037945 - RNA, 19 nt, Homo sapiens
  misc_RNA (1)...(19): siRNA sense strand
ucuggaaucuaagggaugu

SEQ ID NO: 1037946 - RNA, 19 nt, Homo sapiens
  misc_RNA (1)...(19): siRNA sense strand
ugaaggagaaggccaacag

SEQ ID NO: 1037947 - RNA, 19 nt, Homo sapiens
  misc_RNA (1)...(19): siRNA sense strand
uugagccucuuccacaaau

SEQ ID NO: 1037948 - RNA, 19 nt, Homo sapiens
  misc_RNA (1)...(19): siRNA sense strand
agugcuaauugcagugauu

SEQ ID NO: 1037949 - RNA, 19 nt, Homo sapiens
  misc_RNA (1)...(19): siRNA sense strand
acaaggaucuccauuacaa

SEQ ID NO: 1037950 - RNA, 19 nt, Homo sapiens
  misc_RNA (1)...(19): siRNA sense strand
cgaaagcccaccacacuua

SEQ ID NO: 1037951 - RNA, 19 nt, Homo sapiens
  misc_RNA (1)...(19): siRNA sense strand
aaacaaggaucuccauuac

SEQ ID NO: 1037952 - RNA, 19 nt, Homo sapiens
  misc_RNA (1)...(19): siRNA sense strand
gcagacagccucuccaugu

SEQ ID NO: 1037953 - RNA, 19 nt, Homo sapiens
  misc_RNA (1)...(19): siRNA sense strand
ucaaguccaucucuaauuc

SEQ ID NO: 1037954 - RNA, 19 nt, Homo sapiens
  misc_RNA (1)...(19): siRNA sense strand
aaucagacaucacagaaga

SEQ ID NO: 1037955 - RNA, 19 nt, Homo sapiens
  misc_RNA (1)...(19): siRNA sense strand
agaagaggcugcaggcaau

SEQ ID NO: 1037956 - RNA, 19 nt, Homo sapiens
  misc_RNA (1)...(19): siRNA sense strand
gaaccuggaccuggagaaa

SEQ ID NO: 1037957 - RNA, 19 nt, Homo sapiens
  misc_RNA (1)...(19): siRNA sense strand
cauaaugaaucagacauca

SEQ ID NO: 1037958 - RNA, 19 nt, Homo sapiens
  misc_RNA (1)...(19): siRNA sense strand
agacaucacagaagaaaga

SEQ ID NO: 1037959 - RNA, 19 nt, Homo sapiens
  misc_RNA (1)...(19): siRNA sense strand
ucaacaagcaagauucaaa

SEQ ID NO: 1037960 - RNA, 19 nt, Homo sapiens
  misc_RNA (1)...(19): siRNA sense strand
gcagagcgacccgcagaaa

SEQ ID NO: 1037961 - RNA, 19 nt, Homo sapiens
  misc_RNA (1)...(19): siRNA sense strand
cccaaggucuccaccaaga

SEQ ID NO: 1037962 - RNA, 19 nt, Homo sapiens
  misc_RNA (1)...(19): siRNA sense strand
aagcugacgucucccagaa

SEQ ID NO: 1037963 - RNA, 19 nt, Homo sapiens
  misc_RNA (1)...(19): siRNA sense strand
ccaagaagccacgcauuuc

SEQ ID NO: 1037964 - RNA, 19 nt, Homo sapiens
  misc_RNA (1)...(19): siRNA sense strand
gaaagcccaccacacuuag

SEQ ID NO: 1037965 - RNA, 19 nt, Homo sapiens
  misc_RNA (1)...(19): siRNA sense strand
ugaaucagacaucacagaa

SEQ ID NO: 1037966 - RNA, 19 nt, Homo sapiens
  misc_RNA (1)...(19): siRNA sense strand
aaaacaaggaucuccauua

SEQ ID NO: 1037967 - RNA, 19 nt, Homo sapiens
  misc_RNA (1)...(19): siRNA sense strand
uaaugaaucagacaucaca

SEQ ID NO: 1037968 - RNA, 19 nt, Homo sapiens
  misc_RNA (1)...(19): siRNA sense strand
ccucaagucccuccuggaa

SEQ ID NO: 1037969 - RNA, 19 nt, Homo sapiens
  misc_RNA (1)...(19): siRNA sense strand
uacaagggcaggccagaaa

SEQ ID NO: 1037970 - RNA, 19 nt, Homo sapiens
  misc_RNA (1)...(19): siRNA sense strand
ucagacaucacagaagaaa

SEQ ID NO: 1037971 - RNA, 19 nt, Homo sapiens
  misc_RNA (1)...(19): siRNA sense strand
caacaagcaagauucaaaa

SEQ ID NO: 1037972 - RNA, 19 nt, Homo sapiens
  misc_RNA (1)...(19): siRNA sense strand
gcgaaagcccaccacacuu

SEQ ID NO: 1037973 - RNA, 19 nt, Homo sapiens
  misc_RNA (1)...(19): siRNA sense strand
gucaaguccaucucuaauu

SEQ ID NO: 1037974 - RNA, 19 nt, Homo sapiens
  misc_RNA (1)...(19): siRNA sense strand
gaccaagaagccacgcauu

SEQ ID NO: 1037975 - RNA, 19 nt, Homo sapiens
  misc_RNA (1)...(19): siRNA sense strand
gagcaucugaagcgggaaa

SEQ ID NO: 1037976 - RNA, 19 nt, Homo sapiens
  misc_RNA (1)...(19): siRNA sense strand
guacaagggcaggccagaa

SEQ ID NO: 1037977 - RNA, 19 nt, Homo sapiens
  misc_RNA (1)...(19): siRNA sense strand
gaaucagacaucacagaag

SEQ ID NO: 1037978 - RNA, 19 nt, Homo sapiens
  misc_RNA (1)...(19): siRNA sense strand
accaagaagccacgcauuu

SEQ ID NO: 1037979 - RNA, 19 nt, Homo sapiens
  misc_RNA (1)...(19): siRNA sense strand
ugucaagcuuccagucugu

SEQ ID NO: 1037980 - RNA, 19 nt, Homo sapiens
  misc_RNA (1)...(19): siRNA sense strand
gaaaacaaggaucuccauu

SEQ ID NO: 1037981 - RNA, 19 nt, Homo sapiens
  misc_RNA (1)...(19): siRNA sense strand
ucugucaaguccaucucua

SEQ ID NO: 1037982 - RNA, 19 nt, Homo sapiens
  misc_RNA (1)...(19): siRNA sense strand
gaagaggcugcaggcaaug

SEQ ID NO: 1037983 - RNA, 19 nt, Homo sapiens
  misc_RNA (1)...(19): siRNA sense strand
caaguccaucucuaauuca

SEQ ID NO: 1037984 - RNA, 19 nt, Homo sapiens
  misc_RNA (1)...(19): siRNA sense strand
gagcugcggcaccucaagu

SEQ ID NO: 1037985 - RNA, 19 nt, Homo sapiens
  misc_RNA (1)...(19): siRNA sense strand
caagcaagauucaaaagcu

SEQ ID NO: 1037986 - RNA, 19 nt, Homo sapiens
  misc_RNA (1)...(19): siRNA sense strand
aaagauggccccucaggaa

SEQ ID NO: 1037987 - RNA, 19 nt, Homo sapiens
  misc_RNA (1)...(19): siRNA sense strand
ggaaacagcacuucaucaa

SEQ ID NO: 1037988 - RNA, 19 nt, Homo sapiens
  misc_RNA (1)...(19): siRNA sense strand
caacaacgccaccuaugug

SEQ ID NO: 1037989 - RNA, 19 nt, Homo sapiens
  misc_RNA (1)...(19): siRNA sense strand
gcaacaacgccaccuaugu

SEQ ID NO: 1037990 - RNA, 19 nt, Homo sapiens
  misc_RNA (1)...(19): siRNA sense strand
guggaggucuggaacgauu

SEQ ID NO: 1037991 - RNA, 19 nt, Homo sapiens
  misc_RNA (1)...(19): siRNA sense strand
ggaagcggcagaugaaggu

SEQ ID NO: 1037992 - RNA, 19 nt, Homo sapiens
  misc_RNA (1)...(19): siRNA sense strand
gaaacagcacuucaucaac

SEQ ID NO: 1037993 - RNA, 19 nt, Homo sapiens
  misc_RNA (1)...(19): siRNA sense strand
gcagaugaaggucaguaau

SEQ ID NO: 1037994 - RNA, 19 nt, Homo sapiens
  misc_RNA (1)...(19): siRNA sense strand
ggucuggaacgauuucaug

SEQ ID NO: 1037995 - RNA, 19 nt, Homo sapiens
  misc_RNA (1)...(19): siRNA sense strand
ugacccugcuggagacaga

SEQ ID NO: 1037996 - RNA, 19 nt, Homo sapiens
  misc_RNA (1)...(19): siRNA sense strand
cagaugaaggucaguaauc

SEQ ID NO: 1037997 - RNA, 19 nt, Homo sapiens
  misc_RNA (1)...(19): siRNA sense strand
gagcaggagcggguucuuc

SEQ ID NO: 1037998 - RNA, 19 nt, Homo sapiens
  misc_RNA (1)...(19): siRNA sense strand
gcucccaggugaagagacu

SEQ ID NO: 1037999 - RNA, 19 nt, Homo sapiens
  misc_RNA (1)...(19): siRNA sense strand
gccaguacauggaccucau

SEQ ID NO: 1038000 - RNA, 19 nt, Homo sapiens
  misc_RNA (1)...(19): siRNA sense strand
gcggaaacagcacuucauc

SEQ ID NO: 1038001 - RNA, 19 nt, Homo sapiens
  misc_RNA (1)...(19): siRNA sense strand
ggcagaugaaggucaguaa

SEQ ID NO: 1038002 - RNA, 19 nt, Homo sapiens
  misc_RNA (1)...(19): siRNA sense strand
ggaggucuggaacgauuuc

SEQ ID NO: 1038003 - RNA, 19 nt, Homo sapiens
  misc_RNA (1)...(19): siRNA sense strand
cuggaacgauuucaugaac

SEQ ID NO: 1038004 - RNA, 19 nt, Homo sapiens
  misc_RNA (1)...(19): siRNA sense strand
agaugaaggucaguaaucg

SEQ ID NO: 1038005 - RNA, 19 nt, Homo sapiens
  misc_RNA (1)...(19): siRNA sense strand
gaauggagauugcuugaug

SEQ ID NO: 1038006 - RNA, 19 nt, Homo sapiens
  misc_RNA (1)...(19): siRNA sense strand
ggagagaagucacauagga

SEQ ID NO: 1038007 - RNA, 19 nt, Homo sapiens
  misc_RNA (1)...(19): siRNA sense strand
gggaaguuauuuagagaua

SEQ ID NO: 1038008 - RNA, 19 nt, Homo sapiens
  misc_RNA (1)...(19): siRNA sense strand
ggagaaagaccuuauaagu

SEQ ID NO: 1038009 - RNA, 19 nt, Homo sapiens
  misc_RNA (1)...(19): siRNA sense strand
ggauguggcugucuacuuc

SEQ ID NO: 1038010 - RNA, 19 nt, Homo sapiens
  misc_RNA (1)...(19): siRNA sense strand
gagaaaggccuuacaagug

SEQ ID NO: 1038011 - RNA, 19 nt, Homo sapiens
  misc_RNA (1)...(19): siRNA sense strand
gcaaugugaugcuggagaa

SEQ ID NO: 1038012 - RNA, 19 nt, Homo sapiens
  misc_RNA (1)...(19): siRNA sense strand
gagaaagaccuuauaagug

SEQ ID NO: 1038013 - RNA, 19 nt, Homo sapiens
  misc_RNA (1)...(19): siRNA sense strand
gagaauuccagccuuguua

SEQ ID NO: 1038014 - RNA, 19 nt, Homo sapiens
  misc_RNA (1)...(19): siRNA sense strand
gagaauuccacccuaguua

SEQ ID NO: 1038015 - RNA, 19 nt, Homo sapiens
  misc_RNA (1)...(19): siRNA sense strand
cauaggagcuccaaaagua

SEQ ID NO: 1038016 - RNA, 19 nt, Homo sapiens
  misc_RNA (1)...(19): siRNA sense strand
agagauauguccaaccuuu

SEQ ID NO: 1038017 - RNA, 19 nt, Homo sapiens
  misc_RNA (1)...(19): siRNA sense strand
gaaugugggagauuguuua

SEQ ID NO: 1038018 - RNA, 19 nt, Homo sapiens
  misc_RNA (1)...(19): siRNA sense strand
uaacccagcuggagucaug

SEQ ID NO: 1038019 - RNA, 19 nt, Homo sapiens
  misc_RNA (1)...(19): siRNA sense strand
gaaugugggaaguuauuua

SEQ ID NO: 1038020 - RNA, 19 nt, Homo sapiens
  misc_RNA (1)...(19): siRNA sense strand
ucagagaaguccuugcaaa

SEQ ID NO: 1038021 - RNA, 19 nt, Homo sapiens
  misc_RNA (1)...(19): siRNA sense strand
gagacuacaugcugggaaa

SEQ ID NO: 1038022 - RNA, 19 nt, Homo sapiens
  misc_RNA (1)...(19): siRNA sense strand
ggagaaaggccuuacaagu

SEQ ID NO: 1038023 - RNA, 19 nt, Homo sapiens
  misc_RNA (1)...(19): siRNA sense strand
gcucaacccucaugcaaca

SEQ ID NO: 1038024 - RNA, 19 nt, Homo sapiens
  misc_RNA (1)...(19): siRNA sense strand
gcucaagccucaugcaaca

SEQ ID NO: 1038025 - RNA, 19 nt, Homo sapiens
  misc_RNA (1)...(19): siRNA sense strand
gagaaguccuugcaaagca

SEQ ID NO: 1038026 - RNA, 19 nt, Homo sapiens
  misc_RNA (1)...(19): siRNA sense strand
guucaaacauucagcaaca

SEQ ID NO: 1038027 - RNA, 19 nt, Homo sapiens
  misc_RNA (1)...(19): siRNA sense strand
gcagcacuguggagagaaa

SEQ ID NO: 1038028 - RNA, 19 nt, Homo sapiens
  misc_RNA (1)...(19): siRNA sense strand
cgccacaacuccagucuuu

SEQ ID NO: 1038029 - RNA, 19 nt, Homo sapiens
  misc_RNA (1)...(19): siRNA sense strand
gggagauucuuuagagaga

SEQ ID NO: 1038030 - RNA, 19 nt, Homo sapiens
  misc_RNA (1)...(19): siRNA sense strand
cagggaaugugggaaauuu

SEQ ID NO: 1038031 - RNA, 19 nt, Homo sapiens
  misc_RNA (1)...(19): siRNA sense strand
gcaaaguucaccuaucaga

SEQ ID NO: 1038032 - RNA, 19 nt, Homo sapiens
  misc_RNA (1)...(19): siRNA sense strand
ggagggcuaugugaccuuu

SEQ ID NO: 1038033 - RNA, 19 nt, Homo sapiens
  misc_RNA (1)...(19): siRNA sense strand
gauucacacuggagaaaug

SEQ ID NO: 1038034 - RNA, 19 nt, Homo sapiens
  misc_RNA (1)...(19): siRNA sense strand
ggagauuguuuagagagaa

SEQ ID NO: 1038035 - RNA, 19 nt, Homo sapiens
  misc_RNA (1)...(19): siRNA sense strand
cuggagaacuuuacacuuc

SEQ ID NO: 1038036 - RNA, 19 nt, Homo sapiens
  misc_RNA (1)...(19): siRNA sense strand
cagcgacugugggaaauuu

SEQ ID NO: 1038037 - RNA, 19 nt, Homo sapiens
  misc_RNA (1)...(19): siRNA sense strand
cagugaaugugggaaguua

SEQ ID NO: 1038038 - RNA, 19 nt, Homo sapiens
  misc_RNA (1)...(19): siRNA sense strand
gcucagguguucucaagca

SEQ ID NO: 1038039 - RNA, 19 nt, Homo sapiens
  misc_RNA (1)...(19): siRNA sense strand
uugcaaaguucaccuauca

SEQ ID NO: 1038040 - RNA, 19 nt, Homo sapiens
  misc_RNA (1)...(19): siRNA sense strand
ggaaggcccuccugaucag

SEQ ID NO: 1038041 - RNA, 19 nt, Homo sapiens
  misc_RNA (1)...(19): siRNA sense strand
gaaaauccuuuagccguaa

SEQ ID NO: 1038042 - RNA, 19 nt, Homo sapiens
  misc_RNA (1)...(19): siRNA sense strand
gaaaggccuuacgggugua

SEQ ID NO: 1038043 - RNA, 19 nt, Homo sapiens
  misc_RNA (1)...(19): siRNA sense strand
cagggaaugugggaaguuu

SEQ ID NO: 1038044 - RNA, 19 nt, Homo sapiens
  misc_RNA (1)...(19): siRNA sense strand
gagauuguuuagagagaau

SEQ ID NO: 1038045 - RNA, 19 nt, Homo sapiens
  misc_RNA (1)...(19): siRNA sense strand
gaauuccacccuaguuaga

SEQ ID NO: 1038046 - RNA, 19 nt, Homo sapiens
  misc_RNA (1)...(19): siRNA sense strand
gggagauuguuuagagaga

SEQ ID NO: 1038047 - RNA, 19 nt, Homo sapiens
  misc_RNA (1)...(19): siRNA sense strand
aggcauaauuccacacuug

SEQ ID NO: 1038048 - RNA, 19 nt, Homo sapiens
  misc_RNA (1)...(19): siRNA sense strand
gaauuccagccuuguuaaa

SEQ ID NO: 1038049 - RNA, 19 nt, Homo sapiens
  misc_RNA (1)...(19): siRNA sense strand
gggaaggcccuccugauca

SEQ ID NO: 1038050 - RNA, 19 nt, Homo sapiens
  misc_RNA (1)...(19): siRNA sense strand
aaaguucaccuaucagaga

SEQ ID NO: 1038051 - RNA, 19 nt, Homo sapiens
  misc_RNA (1)...(19): siRNA sense strand
caacuccagccucaugaaa

SEQ ID NO: 1038052 - RNA, 19 nt, Homo sapiens
  misc_RNA (1)...(19): siRNA sense strand
cagcucagguguucucaag

SEQ ID NO: 1038053 - RNA, 19 nt, Homo sapiens
  misc_RNA (1)...(19): siRNA sense strand
gugggaaguuauuuagaga

SEQ ID NO: 1038054 - RNA, 19 nt, Homo sapiens
  misc_RNA (1)...(19): siRNA sense strand
agccacaaguccaaccuua

SEQ ID NO: 1038055 - RNA, 19 nt, Homo sapiens
  misc_RNA (1)...(19): siRNA sense strand
ccacacuuguucagcauca

SEQ ID NO: 1038056 - RNA, 19 nt, Homo sapiens
  misc_RNA (1)...(19): siRNA sense strand
ccuuauaagugcagugaau

SEQ ID NO: 1038057 - RNA, 19 nt, Homo sapiens
  misc_RNA (1)...(19): siRNA sense strand
gcaaugaaugugggagauu

SEQ ID NO: 1038058 - RNA, 19 nt, Homo sapiens
  misc_RNA (1)...(19): siRNA sense strand
gcaaugaaugugggagauu

SEQ ID NO: 1038059 - RNA, 19 nt, Homo sapiens
  misc_RNA (1)...(19): siRNA sense strand
aguccaaccuuaucaaaca

SEQ ID NO: 1038060 - RNA, 19 nt, Homo sapiens
  misc_RNA (1)...(19): siRNA sense strand
caaguccaaccuuaucaaa

SEQ ID NO: 1038061 - RNA, 19 nt, Homo sapiens
  misc_RNA (1)...(19): siRNA sense strand
uuccaagacccaugaaaua

SEQ ID NO: 1038062 - RNA, 19 nt, Homo sapiens
  misc_RNA (1)...(19): siRNA sense strand
uuacaaaugcagugaaugu

SEQ ID NO: 1038063 - RNA, 19 nt, Homo sapiens
  misc_RNA (1)...(19): siRNA sense strand
ccacaaguccaaccuuauc

SEQ ID NO: 1038064 - RNA, 19 nt, Homo sapiens
  misc_RNA (1)...(19): siRNA sense strand
aaacaucgaaggauucaca

SEQ ID NO: 1038065 - RNA, 19 nt, Homo sapiens
  misc_RNA (1)...(19): siRNA sense strand
cugcagacuugcuuacaga

SEQ ID NO: 1038066 - RNA, 19 nt, Homo sapiens
  misc_RNA (1)...(19): siRNA sense strand
ccaaccuuaucaaacauug

SEQ ID NO: 1038067 - RNA, 19 nt, Homo sapiens
  misc_RNA (1)...(19): siRNA sense strand
aagcagcacuguggagaga

SEQ ID NO: 1038068 - RNA, 19 nt, Homo sapiens
  misc_RNA (1)...(19): siRNA sense strand
gcauaauuccacacuuguu

SEQ ID NO: 1038069 - RNA, 19 nt, Homo sapiens
  misc_RNA (1)...(19): siRNA sense strand
gugcagcgacugugggaaa

SEQ ID NO: 1038070 - RNA, 19 nt, Homo sapiens
  misc_RNA (1)...(19): siRNA sense strand
ugugggagauuguuuagag

SEQ ID NO: 1038071 - RNA, 19 nt, Homo sapiens
  misc_RNA (1)...(19): siRNA sense strand
gcagggaaugugggaaauu

SEQ ID NO: 1038072 - RNA, 19 nt, Homo sapiens
  misc_RNA (1)...(19): siRNA sense strand
ugugggagauucuuuagag

SEQ ID NO: 1038073 - RNA, 19 nt, Homo sapiens
  misc_RNA (1)...(19): siRNA sense strand
caggagagaagucacauag

SEQ ID NO: 1038074 - RNA, 19 nt, Homo sapiens
  misc_RNA (1)...(19): siRNA sense strand
ggagcaaagccuuaugagu

SEQ ID NO: 1038075 - RNA, 19 nt, Homo sapiens
  misc_RNA (1)...(19): siRNA sense strand
ccaaagcucaacccucaug

SEQ ID NO: 1038076 - RNA, 19 nt, Homo sapiens
  misc_RNA (1)...(19): siRNA sense strand
ggagcaaagccuuaugagu

SEQ ID NO: 1038077 - RNA, 19 nt, Homo sapiens
  misc_RNA (1)...(19): siRNA sense strand
gugaaugugggaaguuauu

SEQ ID NO: 1038078 - RNA, 19 nt, Homo sapiens
  misc_RNA (1)...(19): siRNA sense strand
uccaagacccaugaaauaa

SEQ ID NO: 1038079 - RNA, 19 nt, Homo sapiens
  misc_RNA (1)...(19): siRNA sense strand
uugaggaguugcaaaguuc

SEQ ID NO: 1038080 - RNA, 19 nt, Homo sapiens
  misc_RNA (1)...(19): siRNA sense strand
aguugugacuucagccaua

SEQ ID NO: 1038081 - RNA, 19 nt, Homo sapiens
  misc_RNA (1)...(19): siRNA sense strand
acacuggagcaaagccuua

SEQ ID NO: 1038082 - RNA, 19 nt, Homo sapiens
  misc_RNA (1)...(19): siRNA sense strand
acacuggagcaaagccuua

SEQ ID NO: 1038083 - RNA, 19 nt, Homo sapiens
  misc_RNA (1)...(19): siRNA sense strand
guaugaaugcagugaaugu

SEQ ID NO: 1038084 - RNA, 19 nt, Homo sapiens
  misc_RNA (1)...(19): siRNA sense strand
guggagagaaacccuuaaa

SEQ ID NO: 1038085 - RNA, 19 nt, Homo sapiens
  misc_RNA (1)...(19): siRNA sense strand
caagacccaugaaauaacc

SEQ ID NO: 1038086 - RNA, 19 nt, Homo sapiens
  misc_RNA (1)...(19): siRNA sense strand
cauaauuccacacuuguuc

SEQ ID NO: 1038087 - RNA, 19 nt, Homo sapiens
  misc_RNA (1)...(19): siRNA sense strand
cugcucaguucaaacauuc

SEQ ID NO: 1038088 - RNA, 19 nt, Homo sapiens
  misc_RNA (1)...(19): siRNA sense strand
gaccuuauaagugcaguga

SEQ ID NO: 1038089 - RNA, 19 nt, Homo sapiens
  misc_RNA (1)...(19): siRNA sense strand
aauggagauugcuugauga

SEQ ID NO: 1038090 - RNA, 19 nt, Homo sapiens
  misc_RNA (1)...(19): siRNA sense strand
gcagugaaugugggaaguu

SEQ ID NO: 1038091 - RNA, 19 nt, Homo sapiens
  misc_RNA (1)...(19): siRNA sense strand
agaauuccagccuuguuaa

SEQ ID NO: 1038092 - RNA, 19 nt, Homo sapiens
  misc_RNA (1)...(19): siRNA sense strand
gugggagauuguuuagaga

SEQ ID NO: 1038093 - RNA, 19 nt, Homo sapiens
  misc_RNA (1)...(19): siRNA sense strand
gugcagggaaugugggaaa

SEQ ID NO: 1038094 - RNA, 19 nt, Homo sapiens
  misc_RNA (1)...(19): siRNA sense strand
gugggagauucuuuagaga

SEQ ID NO: 1038095 - RNA, 19 nt, Homo sapiens
  misc_RNA (1)...(19): siRNA sense strand
ggaggaauggagauugcuu

SEQ ID NO: 1038096 - RNA, 19 nt, Homo sapiens
  misc_RNA (1)...(19): siRNA sense strand
ugugggaaguuauuuagag

SEQ ID NO: 1038097 - RNA, 19 nt, Homo sapiens
  misc_RNA (1)...(19): siRNA sense strand
gaucagcucagguguucuc

SEQ ID NO: 1038098 - RNA, 19 nt, Homo sapiens
  misc_RNA (1)...(19): siRNA sense strand
ugaaugugggagauuguuu

SEQ ID NO: 1038099 - RNA, 19 nt, Homo sapiens
  misc_RNA (1)...(19): siRNA sense strand
aaaguucacauuggagaaa

SEQ ID NO: 1038100 - RNA, 19 nt, Homo sapiens
  misc_RNA (1)...(19): siRNA sense strand
uuagagauauguccaaccu

SEQ ID NO: 1038101 - RNA, 19 nt, Homo sapiens
  misc_RNA (1)...(19): siRNA sense strand
ucacauaggagcuccaaaa

SEQ ID NO: 1038102 - RNA, 19 nt, Homo sapiens
  misc_RNA (1)...(19): siRNA sense strand
ccuuaugagugcagugaau

SEQ ID NO: 1038103 - RNA, 19 nt, Homo sapiens
  misc_RNA (1)...(19): siRNA sense strand
uugaggauguggcugucua

SEQ ID NO: 1038104 - RNA, 19 nt, Homo sapiens
  misc_RNA (1)...(19): siRNA sense strand
cagugaauguggaaaauug

SEQ ID NO: 1038105 - RNA, 19 nt, Homo sapiens
  misc_RNA (1)...(19): siRNA sense strand
ggaaagcgauuacccuuga

SEQ ID NO: 1038106 - RNA, 19 nt, Homo sapiens
  misc_RNA (1)...(19): siRNA sense strand
gcaaaggccuuagaucuug

SEQ ID NO: 1038107 - RNA, 19 nt, Homo sapiens
  misc_RNA (1)...(19): siRNA sense strand
caaagcgaguucacaaaua

SEQ ID NO: 1038108 - RNA, 19 nt, Homo sapiens
  misc_RNA (1)...(19): siRNA sense strand
ggagaaggcugaguuugau

SEQ ID NO: 1038109 - RNA, 19 nt, Homo sapiens
  misc_RNA (1)...(19): siRNA sense strand
ggacauguacauagaaaug

SEQ ID NO: 1038110 - RNA, 19 nt, Homo sapiens
  misc_RNA (1)...(19): siRNA sense strand
caacaaggacauguacaua

SEQ ID NO: 1038111 - RNA, 19 nt, Homo sapiens
  misc_RNA (1)...(19): siRNA sense strand
gaccagagccagccaaaug

SEQ ID NO: 1038112 - RNA, 19 nt, Homo sapiens
  misc_RNA (1)...(19): siRNA sense strand
acaaggacauguacauaga

SEQ ID NO: 1038113 - RNA, 19 nt, Homo sapiens
  misc_RNA (1)...(19): siRNA sense strand
aaagcgaguucacaaauag

SEQ ID NO: 1038114 - RNA, 19 nt, Homo sapiens
  misc_RNA (1)...(19): siRNA sense strand
ggagagguuucaugcaagu

SEQ ID NO: 1038115 - RNA, 19 nt, Homo sapiens
  misc_RNA (1)...(19): siRNA sense strand
aaggguggcuugugagauu

SEQ ID NO: 1038116 - RNA, 19 nt, Homo sapiens
  misc_RNA (1)...(19): siRNA sense strand
guacauagaaaugcugaaa

SEQ ID NO: 1038117 - RNA, 19 nt, Homo sapiens
  misc_RNA (1)...(19): siRNA sense strand
ccucaaauuggaaguguua

SEQ ID NO: 1038118 - RNA, 19 nt, Homo sapiens
  misc_RNA (1)...(19): siRNA sense strand
ggaaguguuacgacgauuu

SEQ ID NO: 1038119 - RNA, 19 nt, Homo sapiens
  misc_RNA (1)...(19): siRNA sense strand
gaaguguuacgacgauuug

SEQ ID NO: 1038120 - RNA, 19 nt, Homo sapiens
  misc_RNA (1)...(19): siRNA sense strand
ggccuuagaucuugcuauc

SEQ ID NO: 1038121 - RNA, 19 nt, Homo sapiens
  misc_RNA (1)...(19): siRNA sense strand
gcaacaaggacauguacau

SEQ ID NO: 1038122 - RNA, 19 nt, Homo sapiens
  misc_RNA (1)...(19): siRNA sense strand
cauucgagauaguaaagaa

SEQ ID NO: 1038123 - RNA, 19 nt, Homo sapiens
  misc_RNA (1)...(19): siRNA sense strand
ggcugaguuugaugacuua

SEQ ID NO: 1038124 - RNA, 19 nt, Homo sapiens
  misc_RNA (1)...(19): siRNA sense strand
ucaaagcgaguucacaaau

SEQ ID NO: 1038125 - RNA, 19 nt, Homo sapiens
  misc_RNA (1)...(19): siRNA sense strand
ugucaucccuagugccaaa

SEQ ID NO: 1038126 - RNA, 19 nt, Homo sapiens
  misc_RNA (1)...(19): siRNA sense strand
gcaacugucaucccuagug

SEQ ID NO: 1038127 - RNA, 19 nt, Homo sapiens
  misc_RNA (1)...(19): siRNA sense strand
ggaaaggcccacagaugca

SEQ ID NO: 1038128 - RNA, 19 nt, Homo sapiens
  misc_RNA (1)...(19): siRNA sense strand
gaaaggcccacagaugcaa

SEQ ID NO: 1038129 - RNA, 19 nt, Homo sapiens
  misc_RNA (1)...(19): siRNA sense strand
aaggacauguacauagaaa

SEQ ID NO: 1038130 - RNA, 19 nt, Homo sapiens
  misc_RNA (1)...(19): siRNA sense strand
caaauagcuacuccucuga

SEQ ID NO: 1038131 - RNA, 19 nt, Homo sapiens
  misc_RNA (1)...(19): siRNA sense strand
acggagagguuucaugcaa

SEQ ID NO: 1038132 - RNA, 19 nt, Homo sapiens
  misc_RNA (1)...(19): siRNA sense strand
gaccucaaauuggaagugu

SEQ ID NO: 1038133 - RNA, 19 nt, Homo sapiens
  misc_RNA (1)...(19): siRNA sense strand
ucagaucgcaaaggccuua

SEQ ID NO: 1038134 - RNA, 19 nt, Homo sapiens
  misc_RNA (1)...(19): siRNA sense strand
aaucaaagcgaguucacaa

SEQ ID NO: 1038135 - RNA, 19 nt, Homo sapiens
  misc_RNA (1)...(19): siRNA sense strand
ugaaaagcaucaucgaaga

SEQ ID NO: 1038136 - RNA, 19 nt, Homo sapiens
  misc_RNA (1)...(19): siRNA sense strand
caaggacauguacauagaa

SEQ ID NO: 1038137 - RNA, 19 nt, Homo sapiens
  misc_RNA (1)...(19): siRNA sense strand
aggagaaggcugaguuuga

SEQ ID NO: 1038138 - RNA, 19 nt, Homo sapiens
  misc_RNA (1)...(19): siRNA sense strand
gaaaagcaucaucgaagaa

SEQ ID NO: 1038139 - RNA, 19 nt, Homo sapiens
  misc_RNA (1)...(19): siRNA sense strand
guggcgaccauucgagaua

SEQ ID NO: 1038140 - RNA, 19 nt, Homo sapiens
  misc_RNA (1)...(19): siRNA sense strand
gagguuucaugcaagucaa

SEQ ID NO: 1038141 - RNA, 19 nt, Homo sapiens
  misc_RNA (1)...(19): siRNA sense strand
aggcugaguuugaugacuu

SEQ ID NO: 1038142 - RNA, 19 nt, Homo sapiens
  misc_RNA (1)...(19): siRNA sense strand
caaauuggaaguguuacga

SEQ ID NO: 1038143 - RNA, 19 nt, Homo sapiens
  misc_RNA (1)...(19): siRNA sense strand
gaucgcaaaggccuuagau

SEQ ID NO: 1038144 - RNA, 19 nt, Homo sapiens
  misc_RNA (1)...(19): siRNA sense strand
ccagcaacaaggacaugua

SEQ ID NO: 1038145 - RNA, 19 nt, Homo sapiens
  misc_RNA (1)...(19): siRNA sense strand
gcgcagcucccagcaacaa

SEQ ID NO: 1038146 - RNA, 19 nt, Homo sapiens
  misc_RNA (1)...(19): siRNA sense strand
cgcaaaggccuuagaucuu

SEQ ID NO: 1038147 - RNA, 19 nt, Homo sapiens
  misc_RNA (1)...(19): siRNA sense strand
gcgugaacauggcgaaggu

SEQ ID NO: 1038148 - RNA, 19 nt, Homo sapiens
  misc_RNA (1)...(19): siRNA sense strand
uggcgaagguucucaaacg

SEQ ID NO: 1038149 - RNA, 19 nt, Homo sapiens
  misc_RNA (1)...(19): siRNA sense strand
ucgcaaaggccuuagaucu

SEQ ID NO: 1038150 - RNA, 19 nt, Homo sapiens
  misc_RNA (1)...(19): siRNA sense strand
caucgaagaaggugaguac

SEQ ID NO: 1038151 - RNA, 19 nt, Homo sapiens
  misc_RNA (1)...(19): siRNA sense strand
ugaguuugaugacuuacag

SEQ ID NO: 1038152 - RNA, 19 nt, Homo sapiens
  misc_RNA (1)...(19): siRNA sense strand
gugcagugauggagagcau

SEQ ID NO: 1038153 - RNA, 19 nt, Homo sapiens
  misc_RNA (1)...(19): siRNA sense strand
aauagcuacuccucugaga

SEQ ID NO: 1038154 - RNA, 19 nt, Homo sapiens
  misc_RNA (1)...(19): siRNA sense strand
gaaagcgauuacccuugac

SEQ ID NO: 1038155 - RNA, 19 nt, Homo sapiens
  misc_RNA (1)...(19): siRNA sense strand
agaaggcugaguuugauga

SEQ ID NO: 1038156 - RNA, 19 nt, Homo sapiens
  misc_RNA (1)...(19): siRNA sense strand
cgaccauucgagauaguaa

SEQ ID NO: 1038157 - RNA, 19 nt, Homo sapiens
  misc_RNA (1)...(19): siRNA sense strand
gaccauucgagauaguaaa

SEQ ID NO: 1038158 - RNA, 19 nt, Homo sapiens
  misc_RNA (1)...(19): siRNA sense strand
ugacuuacagcgugaacau

SEQ ID NO: 1038159 - RNA, 19 nt, Homo sapiens
  misc_RNA (1)...(19): siRNA sense strand
gagaaggcugaguuugaug

SEQ ID NO: 1038160 - RNA, 19 nt, Homo sapiens
  misc_RNA (1)...(19): siRNA sense strand
gauuugaagcgggugagaa

SEQ ID NO: 1038161 - RNA, 19 nt, Homo sapiens
  misc_RNA (1)...(19): siRNA sense strand
gcacuucucuguuugauga

SEQ ID NO: 1038162 - RNA, 19 nt, Homo sapiens
  misc_RNA (1)...(19): siRNA sense strand
gagccaagauugucaaaga

SEQ ID NO: 1038163 - RNA, 19 nt, Homo sapiens
  misc_RNA (1)...(19): siRNA sense strand
gcaaggauguucuguucuu

SEQ ID NO: 1038164 - RNA, 19 nt, Homo sapiens
  misc_RNA (1)...(19): siRNA sense strand
agaaggagcugaacuacuu

SEQ ID NO: 1038165 - RNA, 19 nt, Homo sapiens
  misc_RNA (1)...(19): siRNA sense strand
gaagaauggugugaagauu

SEQ ID NO: 1038166 - RNA, 19 nt, Homo sapiens
  misc_RNA (1)...(19): siRNA sense strand
gauuggcacuucucuguuu

SEQ ID NO: 1038167 - RNA, 19 nt, Homo sapiens
  misc_RNA (1)...(19): siRNA sense strand
gagcugaacuacuuugcaa

SEQ ID NO: 1038168 - RNA, 19 nt, Homo sapiens
  misc_RNA (1)...(19): siRNA sense strand
gagcuaaaguugcagacaa

SEQ ID NO: 1038169 - RNA, 19 nt, Homo sapiens
  misc_RNA (1)...(19): siRNA sense strand
ucaaagaccuaauguccaa

SEQ ID NO: 1038170 - RNA, 19 nt, Homo sapiens
  misc_RNA (1)...(19): siRNA sense strand
gggcaaggauguucuguuc

SEQ ID NO: 1038171 - RNA, 19 nt, Homo sapiens
  misc_RNA (1)...(19): siRNA sense strand
acagaaggcugguggguuu

SEQ ID NO: 1038172 - RNA, 19 nt, Homo sapiens
  misc_RNA (1)...(19): siRNA sense strand
caaagucaaugagaugauu

SEQ ID NO: 1038173 - RNA, 19 nt, Homo sapiens
  misc_RNA (1)...(19): siRNA sense strand
gaagagggagccaagauug

SEQ ID NO: 1038174 - RNA, 19 nt, Homo sapiens
  misc_RNA (1)...(19): siRNA sense strand
aagauuaccuugccuguug

SEQ ID NO: 1038175 - RNA, 19 nt, Homo sapiens
  misc_RNA (1)...(19): siRNA sense strand
acaaacaaccagaggauua

SEQ ID NO: 1038176 - RNA, 19 nt, Homo sapiens
  misc_RNA (1)...(19): siRNA sense strand
gauaaagucagccauguga

SEQ ID NO: 1038177 - RNA, 19 nt, Homo sapiens
  misc_RNA (1)...(19): siRNA sense strand
ggacaaagucaaugagaug

SEQ ID NO: 1038178 - RNA, 19 nt, Homo sapiens
  misc_RNA (1)...(19): siRNA sense strand
ucaauaauaugcuggacaa

SEQ ID NO: 1038179 - RNA, 19 nt, Homo sapiens
  misc_RNA (1)...(19): siRNA sense strand
agauccagcucaucaauaa

SEQ ID NO: 1038180 - RNA, 19 nt, Homo sapiens
  misc_RNA (1)...(19): siRNA sense strand
uggacaagcuggacguuaa

SEQ ID NO: 1038181 - RNA, 19 nt, Homo sapiens
  misc_RNA (1)...(19): siRNA sense strand
cuaagcagauuguguggaa

SEQ ID NO: 1038182 - RNA, 19 nt, Homo sapiens
  misc_RNA (1)...(19): siRNA sense strand
gaaagcagcaagaaguaug

SEQ ID NO: 1038183 - RNA, 19 nt, Homo sapiens
  misc_RNA (1)...(19): siRNA sense strand
uaccuugccuguugacuuu

SEQ ID NO: 1038184 - RNA, 19 nt, Homo sapiens
  misc_RNA (1)...(19): siRNA sense strand
guccaaagcugagaagaau

SEQ ID NO: 1038185 - RNA, 19 nt, Homo sapiens
  misc_RNA (1)...(19): siRNA sense strand
gaaccaaagcucucaugga

SEQ ID NO: 1038186 - RNA, 19 nt, Homo sapiens
  misc_RNA (1)...(19): siRNA sense strand
aaccaaagcucucauggau

SEQ ID NO: 1038187 - RNA, 19 nt, Homo sapiens
  misc_RNA (1)...(19): siRNA sense strand
ugaagaaggagcugaacua

SEQ ID NO: 1038188 - RNA, 19 nt, Homo sapiens
  misc_RNA (1)...(19): siRNA sense strand
ugacaaguuugaugagaau

SEQ ID NO: 1038189 - RNA, 19 nt, Homo sapiens
  misc_RNA (1)...(19): siRNA sense strand
gagagucgacuucaauguu

SEQ ID NO: 1038190 - RNA, 19 nt, Homo sapiens
  misc_RNA (1)...(19): siRNA sense strand
caaacaaccagaggauuaa

SEQ ID NO: 1038191 - RNA, 19 nt, Homo sapiens
  misc_RNA (1)...(19): siRNA sense strand
gaacacggaggauaaaguc

SEQ ID NO: 1038192 - RNA, 19 nt, Homo sapiens
  misc_RNA (1)...(19): siRNA sense strand
gggcggagcuaaaguugca

SEQ ID NO: 1038193 - RNA, 19 nt, Homo sapiens
  misc_RNA (1)...(19): siRNA sense strand
cgacuucaauguuccuaug

SEQ ID NO: 1038194 - RNA, 19 nt, Homo sapiens
  misc_RNA (1)...(19): siRNA sense strand
ccaagucgguaguccuuau

SEQ ID NO: 1038195 - RNA, 19 nt, Homo sapiens
  misc_RNA (1)...(19): siRNA sense strand
gauuauuggugguggaaug

SEQ ID NO: 1038196 - RNA, 19 nt, Homo sapiens
  misc_RNA (1)...(19): siRNA sense strand
gaagaacaaccagauaaca

SEQ ID NO: 1038197 - RNA, 19 nt, Homo sapiens
  misc_RNA (1)...(19): siRNA sense strand
gacaagauccagcucauca

SEQ ID NO: 1038198 - RNA, 19 nt, Homo sapiens
  misc_RNA (1)...(19): siRNA sense strand
ggacaagcuggacguuaaa

SEQ ID NO: 1038199 - RNA, 19 nt, Homo sapiens
  misc_RNA (1)...(19): siRNA sense strand
gagaaccuccgcuuucaug

SEQ ID NO: 1038200 - RNA, 19 nt, Homo sapiens
  misc_RNA (1)...(19): siRNA sense strand
ggaugucuaugucaaugau

SEQ ID NO: 1038201 - RNA, 19 nt, Homo sapiens
  misc_RNA (1)...(19): siRNA sense strand
aagaauggugugaagauua

SEQ ID NO: 1038202 - RNA, 19 nt, Homo sapiens
  misc_RNA (1)...(19): siRNA sense strand
ggaagcgggucguuaugag

SEQ ID NO: 1038203 - RNA, 19 nt, Homo sapiens
  misc_RNA (1)...(19): siRNA sense strand
gcccaugccugacaaguac

SEQ ID NO: 1038204 - RNA, 19 nt, Homo sapiens
  misc_RNA (1)...(19): siRNA sense strand
cacuguggcuucuggcaua

SEQ ID NO: 1038205 - RNA, 19 nt, Homo sapiens
  misc_RNA (1)...(19): siRNA sense strand
ucaauguuccuaugaagaa

SEQ ID NO: 1038206 - RNA, 19 nt, Homo sapiens
  misc_RNA (1)...(19): siRNA sense strand
auaauaugcuggacaaagu

SEQ ID NO: 1038207 - RNA, 19 nt, Homo sapiens
  misc_RNA (1)...(19): siRNA sense strand
uaacaaacaaccagaggau

SEQ ID NO: 1038208 - RNA, 19 nt, Homo sapiens
  misc_RNA (1)...(19): siRNA sense strand
gcugacaaguuugaugaga

SEQ ID NO: 1038209 - RNA, 19 nt, Homo sapiens
  misc_RNA (1)...(19): siRNA sense strand
agaacaaccagauaacaaa

SEQ ID NO: 1038210 - RNA, 19 nt, Homo sapiens
  misc_RNA (1)...(19): siRNA sense strand
ugagaagaauggugugaag

SEQ ID NO: 1038211 - RNA, 19 nt, Homo sapiens
  misc_RNA (1)...(19): siRNA sense strand
ucaacaacauggagauugg

SEQ ID NO: 1038212 - RNA, 19 nt, Homo sapiens
  misc_RNA (1)...(19): siRNA sense strand
gaaggagcugaacuacuuu

SEQ ID NO: 1038213 - RNA, 19 nt, Homo sapiens
  misc_RNA (1)...(19): siRNA sense strand
gaagauuaccuugccuguu

SEQ ID NO: 1038214 - RNA, 19 nt, Homo sapiens
  misc_RNA (1)...(19): siRNA sense strand
acaaccagauaacaaacaa

SEQ ID NO: 1038215 - RNA, 19 nt, Homo sapiens
  misc_RNA (1)...(19): siRNA sense strand
uuaaggugcucaacaacau

SEQ ID NO: 1038216 - RNA, 19 nt, Homo sapiens
  misc_RNA (1)...(19): siRNA sense strand
gaaccuccgcuuucaugug

SEQ ID NO: 1038217 - RNA, 19 nt, Homo sapiens
  misc_RNA (1)...(19): siRNA sense strand
gaagcgggucguuaugaga

SEQ ID NO: 1038218 - RNA, 19 nt, Homo sapiens
  misc_RNA (1)...(19): siRNA sense strand
gaacaaccagauaacaaac

SEQ ID NO: 1038219 - RNA, 19 nt, Homo sapiens
  misc_RNA (1)...(19): siRNA sense strand
agagucgacuucaauguuc

SEQ ID NO: 1038220 - RNA, 19 nt, Homo sapiens
  misc_RNA (1)...(19): siRNA sense strand
gcccagaaguggagaaagc

SEQ ID NO: 1038221 - RNA, 19 nt, Homo sapiens
  misc_RNA (1)...(19): siRNA sense strand
ggaacacggaggauaaagu

SEQ ID NO: 1038222 - RNA, 19 nt, Homo sapiens
  misc_RNA (1)...(19): siRNA sense strand
agaauggugugaagauuac

SEQ ID NO: 1038223 - RNA, 19 nt, Homo sapiens
  misc_RNA (1)...(19): siRNA sense strand
gaagaaggagcugaacuac

SEQ ID NO: 1038224 - RNA, 19 nt, Homo sapiens
  misc_RNA (1)...(19): siRNA sense strand
gggaagcgggucguuauga

SEQ ID NO: 1038225 - RNA, 19 nt, Homo sapiens
  misc_RNA (1)...(19): siRNA sense strand
gcuuucauguggaggaaga

SEQ ID NO: 1038226 - RNA, 19 nt, Homo sapiens
  misc_RNA (1)...(19): siRNA sense strand
ugaagagggagccaagauu

SEQ ID NO: 1038227 - RNA, 19 nt, Homo sapiens
  misc_RNA (1)...(19): siRNA sense strand
uaugaagaacaaccagaua

SEQ ID NO: 1038228 - RNA, 19 nt, Homo sapiens
  misc_RNA (1)...(19): siRNA sense strand
caagauccagcucaucaau

SEQ ID NO: 1038229 - RNA, 19 nt, Homo sapiens
  misc_RNA (1)...(19): siRNA sense strand
uaaaguugcagacaagauc

SEQ ID NO: 1038230 - RNA, 19 nt, Homo sapiens
  misc_RNA (1)...(19): siRNA sense strand
aaagggaagcgggucguua

SEQ ID NO: 1038231 - RNA, 19 nt, Homo sapiens
  misc_RNA (1)...(19): siRNA sense strand
ggauaaagucagccaugug

SEQ ID NO: 1038232 - RNA, 19 nt, Homo sapiens
  misc_RNA (1)...(19): siRNA sense strand
cugacaaguuugaugagaa

SEQ ID NO: 1038233 - RNA, 19 nt, Homo sapiens
  misc_RNA (1)...(19): siRNA sense strand
caagauugucaaagaccua

SEQ ID NO: 1038234 - RNA, 19 nt, Homo sapiens
  misc_RNA (1)...(19): siRNA sense strand
aauggaacacggaggauaa

SEQ ID NO: 1038235 - RNA, 19 nt, Homo sapiens
  misc_RNA (1)...(19): siRNA sense strand
caaauucugcuuggacaau

SEQ ID NO: 1038236 - RNA, 19 nt, Homo sapiens
  misc_RNA (1)...(19): siRNA sense strand
gagaagaauggugugaaga

SEQ ID NO: 1038237 - RNA, 19 nt, Homo sapiens
  misc_RNA (1)...(19): siRNA sense strand
ccaaagcugagaagaaugg

SEQ ID NO: 1038238 - RNA, 19 nt, Homo sapiens
  misc_RNA (1)...(19): siRNA sense strand
agagccaguugcuguagaa

SEQ ID NO: 1038239 - RNA, 19 nt, Homo sapiens
  misc_RNA (1)...(19): siRNA sense strand
uaugagagucgacuucaau

SEQ ID NO: 1038240 - RNA, 19 nt, Homo sapiens
  misc_RNA (1)...(19): siRNA sense strand
aagaacaaccagauaacaa

SEQ ID NO: 1038241 - RNA, 19 nt, Homo sapiens
  misc_RNA (1)...(19): siRNA sense strand
gacaaagucaaugagauga

SEQ ID NO: 1038242 - RNA, 19 nt, Homo sapiens
  misc_RNA (1)...(19): siRNA sense strand
cuguagaacucaaaucucu

SEQ ID NO: 1038243 - RNA, 19 nt, Homo sapiens
  misc_RNA (1)...(19): siRNA sense strand
ugacaaguacuccuuagag

SEQ ID NO: 1038244 - RNA, 19 nt, Homo sapiens
  misc_RNA (1)...(19): siRNA sense strand
ucacugcugacaaguuuga

SEQ ID NO: 1038245 - RNA, 19 nt, Homo sapiens
  misc_RNA (1)...(19): siRNA sense strand
cagacaagauccagcucau

SEQ ID NO: 1038246 - RNA, 19 nt, Homo sapiens
  misc_RNA (1)...(19): siRNA sense strand
aggauguucuguucuugaa

SEQ ID NO: 1038247 - RNA, 19 nt, Homo sapiens
  misc_RNA (1)...(19): siRNA sense strand
uggaugagguggugaaagc

SEQ ID NO: 1038248 - RNA, 19 nt, Homo sapiens
  misc_RNA (1)...(19): siRNA sense strand
ccugaaagcagcaagaagu

SEQ ID NO: 1038249 - RNA, 19 nt, Homo sapiens
  misc_RNA (1)...(19): siRNA sense strand
acauggagauuggcacuuc

SEQ ID NO: 1038250 - RNA, 19 nt, Homo sapiens
  misc_RNA (1)...(19): siRNA sense strand
gggcugcaucaccaucaua

SEQ ID NO: 1038251 - RNA, 19 nt, Homo sapiens
  misc_RNA (1)...(19): siRNA sense strand
augaagaacaaccagauaa

SEQ ID NO: 1038252 - RNA, 19 nt, Homo sapiens
  misc_RNA (1)...(19): siRNA sense strand
cugaaagcagcaagaagua

SEQ ID NO: 1038253 - RNA, 19 nt, Homo sapiens
  misc_RNA (1)...(19): siRNA sense strand
agaagaauggugugaagau

SEQ ID NO: 1038254 - RNA, 19 nt, Homo sapiens
  misc_RNA (1)...(19): siRNA sense strand
aagauccagcucaucaaua

SEQ ID NO: 1038255 - RNA, 19 nt, Homo sapiens
  misc_RNA (1)...(19): siRNA sense strand
gcaucaaauucugcuugga

SEQ ID NO: 1038256 - RNA, 19 nt, Homo sapiens
  misc_RNA (1)...(19): siRNA sense strand
guauuugaaugggaagcuu

SEQ ID NO: 1038257 - RNA, 19 nt, Homo sapiens
  misc_RNA (1)...(19): siRNA sense strand
gauugucaaagaccuaaug

SEQ ID NO: 1038258 - RNA, 19 nt, Homo sapiens
  misc_RNA (1)...(19): siRNA sense strand
gcucaacaacauggagauu

SEQ ID NO: 1038259 - RNA, 19 nt, Homo sapiens
  misc_RNA (1)...(19): siRNA sense strand
uggacaaagucaaugagau

SEQ ID NO: 1038260 - RNA, 19 nt, Homo sapiens
  misc_RNA (1)...(19): siRNA sense strand
auccagcucaucaauaaua

SEQ ID NO: 1038261 - RNA, 19 nt, Homo sapiens
  misc_RNA (1)...(19): siRNA sense strand
caugcuggcuuuaaauaua

SEQ ID NO: 1038262 - RNA, 19 nt, Homo sapiens
  misc_RNA (1)...(19): siRNA sense strand
gcagaucuccgcugugcua

SEQ ID NO: 1038263 - RNA, 19 nt, Homo sapiens
  misc_RNA (1)...(19): siRNA sense strand
ccaugaaucuauguacuuu

SEQ ID NO: 1038264 - RNA, 19 nt, Homo sapiens
  misc_RNA (1)...(19): siRNA sense strand
gcaacaagaauaaucacaa

SEQ ID NO: 1038265 - RNA, 19 nt, Homo sapiens
  misc_RNA (1)...(19): siRNA sense strand
ugaagcaggccacuccuua

SEQ ID NO: 1038266 - RNA, 19 nt, Homo sapiens
  misc_RNA (1)...(19): siRNA sense strand
caagaauaaucacaaccuu

SEQ ID NO: 1038267 - RNA, 19 nt, Homo sapiens
  misc_RNA (1)...(19): siRNA sense strand
caacaagaauaaucacaac

SEQ ID NO: 1038268 - RNA, 19 nt, Homo sapiens
  misc_RNA (1)...(19): siRNA sense strand
gaaucuauguacuuucauc

SEQ ID NO: 1038269 - RNA, 19 nt, Homo sapiens
  misc_RNA (1)...(19): siRNA sense strand
gcaggccacuccuuacauc

SEQ ID NO: 1038270 - RNA, 19 nt, Homo sapiens
  misc_RNA (1)...(19): siRNA sense strand
uuaaugaccaccaaugauu

SEQ ID NO: 1038271 - RNA, 19 nt, Homo sapiens
  misc_RNA (1)...(19): siRNA sense strand
cugcagaaguggaucauag

SEQ ID NO: 1038272 - RNA, 19 nt, Homo sapiens
  misc_RNA (1)...(19): siRNA sense strand
uaaugaccaccaaugauuu

SEQ ID NO: 1038273 - RNA, 19 nt, Homo sapiens
  misc_RNA (1)...(19): siRNA sense strand
uggagccucucuuccuaua

SEQ ID NO: 1038274 - RNA, 19 nt, Homo sapiens
  misc_RNA (1)...(19): siRNA sense strand
ugaucaugcuggcuuuaaa

SEQ ID NO: 1038275 - RNA, 19 nt, Homo sapiens
  misc_RNA (1)...(19): siRNA sense strand
gaucaugcuggcuuuaaau

SEQ ID NO: 1038276 - RNA, 19 nt, Homo sapiens
  misc_RNA (1)...(19): siRNA sense strand
caaccuuaaugaccaccaa

SEQ ID NO: 1038277 - RNA, 19 nt, Homo sapiens
  misc_RNA (1)...(19): siRNA sense strand
ccucagccuuccgaguuua

SEQ ID NO: 1038278 - RNA, 19 nt, Homo sapiens
  misc_RNA (1)...(19): siRNA sense strand
ggccucagccuuccgaguu

SEQ ID NO: 1038279 - RNA, 19 nt, Homo sapiens
  misc_RNA (1)...(19): siRNA sense strand
gccucagccuuccgaguuu

SEQ ID NO: 1038280 - RNA, 19 nt, Homo sapiens
  misc_RNA (1)...(19): siRNA sense strand
uugcacagcuccagugucu

SEQ ID NO: 1038281 - RNA, 19 nt, Homo sapiens
  misc_RNA (1)...(19): siRNA sense strand
cuuggagccucucuuccua

SEQ ID NO: 1038282 - RNA, 19 nt, Homo sapiens
  misc_RNA (1)...(19): siRNA sense strand
gccaugaaucuauguacuu

SEQ ID NO: 1038283 - RNA, 19 nt, Homo sapiens
  misc_RNA (1)...(19): siRNA sense strand
gaagcaggccacuccuuac

SEQ ID NO: 1038284 - RNA, 19 nt, Homo sapiens
  misc_RNA (1)...(19): siRNA sense strand
cuauaccugugcaacaaga

SEQ ID NO: 1038285 - RNA, 19 nt, Homo sapiens
  misc_RNA (1)...(19): siRNA sense strand
gacgagagacucaggaacu

SEQ ID NO: 1038286 - RNA, 19 nt, Homo sapiens
  misc_RNA (1)...(19): siRNA sense strand
ggccaugaaucuauguacu

SEQ ID NO: 1038287 - RNA, 19 nt, Homo sapiens
  misc_RNA (1)...(19): siRNA sense strand
ugacuuggagccucucuuc

SEQ ID NO: 1038288 - RNA, 19 nt, Homo sapiens
  misc_RNA (1)...(19): siRNA sense strand
cggaagaccgcuauaaagg

SEQ ID NO: 1038289 - RNA, 19 nt, Homo sapiens
  misc_RNA (1)...(19): siRNA sense strand
gagccucucuuccuauacc

SEQ ID NO: 1038290 - RNA, 19 nt, Homo sapiens
  misc_RNA (1)...(19): siRNA sense strand
gguaacagugacaguacuu

SEQ ID NO: 1038291 - RNA, 19 nt, Homo sapiens
  misc_RNA (1)...(19): siRNA sense strand
gugaucaugcuggcuuuaa

SEQ ID NO: 1038292 - RNA, 19 nt, Homo sapiens
  misc_RNA (1)...(19): siRNA sense strand
ccuuaaugaccaccaauga

SEQ ID NO: 1038293 - RNA, 19 nt, Homo sapiens
  misc_RNA (1)...(19): siRNA sense strand
ccggaagaccgcuauaaag

SEQ ID NO: 1038294 - RNA, 19 nt, Homo sapiens
  misc_RNA (1)...(19): siRNA sense strand
uaccugugcaacaagaaua

SEQ ID NO: 1038295 - RNA, 19 nt, Homo sapiens
  misc_RNA (1)...(19): siRNA sense strand
cuccugcucuguaucuuuc

SEQ ID NO: 1038296 - RNA, 19 nt, Homo sapiens
  misc_RNA (1)...(19): siRNA sense strand
uccuauaccugugcaacaa

SEQ ID NO: 1038297 - RNA, 19 nt, Homo sapiens
  misc_RNA (1)...(19): siRNA sense strand
gcgguaccaguguuacuau

SEQ ID NO: 1038298 - RNA, 19 nt, Homo sapiens
  misc_RNA (1)...(19): siRNA sense strand
aauauauggguaacaguga

SEQ ID NO: 1038299 - RNA, 19 nt, Homo sapiens
  misc_RNA (1)...(19): siRNA sense strand
uagagaagcucaacaaguu

SEQ ID NO: 1038300 - RNA, 19 nt, Homo sapiens
  misc_RNA (1)...(19): siRNA sense strand
gaaauuaugugggcgcaaa

SEQ ID NO: 1038301 - RNA, 19 nt, Homo sapiens
  misc_RNA (1)...(19): siRNA sense strand
ccaguaaccucuucucuug

SEQ ID NO: 1038302 - RNA, 19 nt, Homo sapiens
  misc_RNA (1)...(19): siRNA sense strand
gcugaugucugauuuauuc

SEQ ID NO: 1038303 - RNA, 19 nt, Homo sapiens
  misc_RNA (1)...(19): siRNA sense strand
gaacccacaucccuacaaa

SEQ ID NO: 1038304 - RNA, 19 nt, Homo sapiens
  misc_RNA (1)...(19): siRNA sense strand
guacaggcauggagaguga

SEQ ID NO: 1038305 - RNA, 19 nt, Homo sapiens
  misc_RNA (1)...(19): siRNA sense strand
gagcugcccugacuaugaa

SEQ ID NO: 1038306 - RNA, 19 nt, Homo sapiens
  misc_RNA (1)...(19): siRNA sense strand
ugaagagucuggaguuuau

SEQ ID NO: 1038307 - RNA, 19 nt, Homo sapiens
  misc_RNA (1)...(19): siRNA sense strand
cuacaaagcaggaaaguau

SEQ ID NO: 1038308 - RNA, 19 nt, Homo sapiens
  misc_RNA (1)...(19): siRNA sense strand
gcugagcucugugugauuu

SEQ ID NO: 1038309 - RNA, 19 nt, Homo sapiens
  misc_RNA (1)...(19): siRNA sense strand
uaacaccucuaacaacuuc

SEQ ID NO: 1038310 - RNA, 19 nt, Homo sapiens
  misc_RNA (1)...(19): siRNA sense strand
ggucacagaugcaccacaa

SEQ ID NO: 1038311 - RNA, 19 nt, Homo sapiens
  misc_RNA (1)...(19): siRNA sense strand
uaacagaugaggaaacuga

SEQ ID NO: 1038312 - RNA, 19 nt, Homo sapiens
  misc_RNA (1)...(19): siRNA sense strand
caggaaaguucaucucaga

SEQ ID NO: 1038313 - RNA, 19 nt, Homo sapiens
  misc_RNA (1)...(19): siRNA sense strand
gaaucgagcugcccugacu

SEQ ID NO: 1038314 - RNA, 19 nt, Homo sapiens
  misc_RNA (1)...(19): siRNA sense strand
gcaggccggauguaaguua

SEQ ID NO: 1038315 - RNA, 19 nt, Homo sapiens
  misc_RNA (1)...(19): siRNA sense strand
ccacuuaacagaugaggaa

SEQ ID NO: 1038316 - RNA, 19 nt, Homo sapiens
  misc_RNA (1)...(19): siRNA sense strand
ggacccuguuucucucuuu

SEQ ID NO: 1038317 - RNA, 19 nt, Homo sapiens
  misc_RNA (1)...(19): siRNA sense strand
gcuuucaccagccauauua

SEQ ID NO: 1038318 - RNA, 19 nt, Homo sapiens
  misc_RNA (1)...(19): siRNA sense strand
cccaaccaauucaguauuu

SEQ ID NO: 1038319 - RNA, 19 nt, Homo sapiens
  misc_RNA (1)...(19): siRNA sense strand
gcaugacccuggcagaauc

SEQ ID NO: 1038320 - RNA, 19 nt, Homo sapiens
  misc_RNA (1)...(19): siRNA sense strand
gagaggagcauuugugucu

SEQ ID NO: 1038321 - RNA, 19 nt, Homo sapiens
  misc_RNA (1)...(19): siRNA sense strand
gcucauggcccucagaauc

SEQ ID NO: 1038322 - RNA, 19 nt, Homo sapiens
  misc_RNA (1)...(19): siRNA sense strand
gcauggcccucccaaccaa

SEQ ID NO: 1038323 - RNA, 19 nt, Homo sapiens
  misc_RNA (1)...(19): siRNA sense strand
gcucucagucaccacauua

SEQ ID NO: 1038324 - RNA, 19 nt, Homo sapiens
  misc_RNA (1)...(19): siRNA sense strand
gugaagagucuggaguuua

SEQ ID NO: 1038325 - RNA, 19 nt, Homo sapiens
  misc_RNA (1)...(19): siRNA sense strand
uccaugagguagcuacuaa

SEQ ID NO: 1038326 - RNA, 19 nt, Homo sapiens
  misc_RNA (1)...(19): siRNA sense strand
gguccuggcugacuguugu

SEQ ID NO: 1038327 - RNA, 19 nt, Homo sapiens
  misc_RNA (1)...(19): siRNA sense strand
agacaagggugcccagaca

SEQ ID NO: 1038328 - RNA, 19 nt, Homo sapiens
  misc_RNA (1)...(19): siRNA sense strand
gaaacugaggccuagagaa

SEQ ID NO: 1038329 - RNA, 19 nt, Homo sapiens
  misc_RNA (1)...(19): siRNA sense strand
gagcaggccggauguaagu

SEQ ID NO: 1038330 - RNA, 19 nt, Homo sapiens
  misc_RNA (1)...(19): siRNA sense strand
gcacugggaacaggaauuc

SEQ ID NO: 1038331 - RNA, 19 nt, Homo sapiens
  misc_RNA (1)...(19): siRNA sense strand
ugaaaugcauccagacacu

SEQ ID NO: 1038332 - RNA, 19 nt, Homo sapiens
  misc_RNA (1)...(19): siRNA sense strand
aaacugaggccuagagaag

SEQ ID NO: 1038333 - RNA, 19 nt, Homo sapiens
  misc_RNA (1)...(19): siRNA sense strand
ugacuguugugacuguuga

SEQ ID NO: 1038334 - RNA, 19 nt, Homo sapiens
  misc_RNA (1)...(19): siRNA sense strand
gaggagcauuugugucucu

SEQ ID NO: 1038335 - RNA, 19 nt, Homo sapiens
  misc_RNA (1)...(19): siRNA sense strand
caaguugccuaaguuccaa

SEQ ID NO: 1038336 - RNA, 19 nt, Homo sapiens
  misc_RNA (1)...(19): siRNA sense strand
gggacucguugcucauguu

SEQ ID NO: 1038337 - RNA, 19 nt, Homo sapiens
  misc_RNA (1)...(19): siRNA sense strand
uucccuaacuagacaauuu

SEQ ID NO: 1038338 - RNA, 19 nt, Homo sapiens
  misc_RNA (1)...(19): siRNA sense strand
uugccuaaguuccaaguuu

SEQ ID NO: 1038339 - RNA, 19 nt, Homo sapiens
  misc_RNA (1)...(19): siRNA sense strand
agaaugacuccaugaggua

SEQ ID NO: 1038340 - RNA, 19 nt, Homo sapiens
  misc_RNA (1)...(19): siRNA sense strand
cgagcugcccugacuauga

SEQ ID NO: 1038341 - RNA, 19 nt, Homo sapiens
  misc_RNA (1)...(19): siRNA sense strand
ucuaaggcgucagaaugua

SEQ ID NO: 1038342 - RNA, 19 nt, Homo sapiens
  misc_RNA (1)...(19): siRNA sense strand
uauaugcccagccucauuu

SEQ ID NO: 1038343 - RNA, 19 nt, Homo sapiens
  misc_RNA (1)...(19): siRNA sense strand
gaaugccaccugcugaugu

SEQ ID NO: 1038344 - RNA, 19 nt, Homo sapiens
  misc_RNA (1)...(19): siRNA sense strand
ccuguacugucuuucugua

SEQ ID NO: 1038345 - RNA, 19 nt, Homo sapiens
  misc_RNA (1)...(19): siRNA sense strand
ggaaacugaggccuagaga

SEQ ID NO: 1038346 - RNA, 19 nt, Homo sapiens
  misc_RNA (1)...(19): siRNA sense strand
guucaucucagacccuaaa

SEQ ID NO: 1038347 - RNA, 19 nt, Homo sapiens
  misc_RNA (1)...(19): siRNA sense strand
aaucuaaggcgucagaaug

SEQ ID NO: 1038348 - RNA, 19 nt, Homo sapiens
  misc_RNA (1)...(19): siRNA sense strand
ggaagcguguugcaaucca

SEQ ID NO: 1038349 - RNA, 19 nt, Homo sapiens
  misc_RNA (1)...(19): siRNA sense strand
uuucuugucuguagucugu

SEQ ID NO: 1038350 - RNA, 19 nt, Homo sapiens
  misc_RNA (1)...(19): siRNA sense strand
ggccggauguaaguuauca

SEQ ID NO: 1038351 - RNA, 19 nt, Homo sapiens
  misc_RNA (1)...(19): siRNA sense strand
ggugagaggagcauuugug

SEQ ID NO: 1038352 - RNA, 19 nt, Homo sapiens
  misc_RNA (1)...(19): siRNA sense strand
cuuaacaccucuaacaacu

SEQ ID NO: 1038353 - RNA, 19 nt, Homo sapiens
  misc_RNA (1)...(19): siRNA sense strand
cuguuucucucuuugcuuu

SEQ ID NO: 1038354 - RNA, 19 nt, Homo sapiens
  misc_RNA (1)...(19): siRNA sense strand
cuaaggcgucagaauguaa

SEQ ID NO: 1038355 - RNA, 19 nt, Homo sapiens
  misc_RNA (1)...(19): siRNA sense strand
gccaccugcugaugucuga

SEQ ID NO: 1038356 - RNA, 19 nt, Homo sapiens
  misc_RNA (1)...(19): siRNA sense strand
caacuuccccuggcacuua

SEQ ID NO: 1038357 - RNA, 19 nt, Homo sapiens
  misc_RNA (1)...(19): siRNA sense strand
ccacgucaugccacgcuua

SEQ ID NO: 1038358 - RNA, 19 nt, Homo sapiens
  misc_RNA (1)...(19): siRNA sense strand
gacccuguuucucucuuug

SEQ ID NO: 1038359 - RNA, 19 nt, Homo sapiens
  misc_RNA (1)...(19): siRNA sense strand
uguacugucuuucuguaga

SEQ ID NO: 1038360 - RNA, 19 nt, Homo sapiens
  misc_RNA (1)...(19): siRNA sense strand
gaagcguguugcaauccau

SEQ ID NO: 1038361 - RNA, 19 nt, Homo sapiens
  misc_RNA (1)...(19): siRNA sense strand
gagaaacaagggagacaag

SEQ ID NO: 1038362 - RNA, 19 nt, Homo sapiens
  misc_RNA (1)...(19): siRNA sense strand
cugcugaugucugauuuau

SEQ ID NO: 1038363 - RNA, 19 nt, Homo sapiens
  misc_RNA (1)...(19): siRNA sense strand
ccucuucccuaacuagaca

SEQ ID NO: 1038364 - RNA, 19 nt, Homo sapiens
  misc_RNA (1)...(19): siRNA sense strand
ggacagcgucuggcuccuu

SEQ ID NO: 1038365 - RNA, 19 nt, Homo sapiens
  misc_RNA (1)...(19): siRNA sense strand
gggaggacacgcaaguuca

SEQ ID NO: 1038366 - RNA, 19 nt, Homo sapiens
  misc_RNA (1)...(19): siRNA sense strand
ucaucauccucacuuguug

SEQ ID NO: 1038367 - RNA, 19 nt, Homo sapiens
  misc_RNA (1)...(19): siRNA sense strand
gggcucuccauggaaauua

SEQ ID NO: 1038368 - RNA, 19 nt, Homo sapiens
  misc_RNA (1)...(19): siRNA sense strand
cuagagaagcucaacaagu

SEQ ID NO: 1038369 - RNA, 19 nt, Homo sapiens
  misc_RNA (1)...(19): siRNA sense strand
cacauuagcucagggguuu

SEQ ID NO: 1038370 - RNA, 19 nt, Homo sapiens
  misc_RNA (1)...(19): siRNA sense strand
uaaauccagccacgucaug

SEQ ID NO: 1038371 - RNA, 19 nt, Homo sapiens
  misc_RNA (1)...(19): siRNA sense strand
aaccaagacuuccguucug

SEQ ID NO: 1038372 - RNA, 19 nt, Homo sapiens
  misc_RNA (1)...(19): siRNA sense strand
ggagcaggccggauguaag

SEQ ID NO: 1038373 - RNA, 19 nt, Homo sapiens
  misc_RNA (1)...(19): siRNA sense strand
cagggaagcguguugcaau

SEQ ID NO: 1038374 - RNA, 19 nt, Homo sapiens
  misc_RNA (1)...(19): siRNA sense strand
ugugccaagugguuuauau

SEQ ID NO: 1038375 - RNA, 19 nt, Homo sapiens
  misc_RNA (1)...(19): siRNA sense strand
gaaucugcgucacauacac

SEQ ID NO: 1038376 - RNA, 19 nt, Homo sapiens
  misc_RNA (1)...(19): siRNA sense strand
agugaagagucuggaguuu

SEQ ID NO: 1038377 - RNA, 19 nt, Homo sapiens
  misc_RNA (1)...(19): siRNA sense strand
agaaaucuaaggcgucaga

SEQ ID NO: 1038378 - RNA, 19 nt, Homo sapiens
  misc_RNA (1)...(19): siRNA sense strand
caugauaacccagcuccuu

SEQ ID NO: 1038379 - RNA, 19 nt, Homo sapiens
  misc_RNA (1)...(19): siRNA sense strand
ugccuaaguuccaaguuuc

SEQ ID NO: 1038380 - RNA, 19 nt, Homo sapiens
  misc_RNA (1)...(19): siRNA sense strand
gcguugagcaggccauuag

SEQ ID NO: 1038381 - RNA, 19 nt, Homo sapiens
  misc_RNA (1)...(19): siRNA sense strand
gccaggagggucacagaug

SEQ ID NO: 1038382 - RNA, 19 nt, Homo sapiens
  misc_RNA (1)...(19): siRNA sense strand
gcaccacaaggcacucugu

SEQ ID NO: 1038383 - RNA, 19 nt, Homo sapiens
  misc_RNA (1)...(19): siRNA sense strand
aaaccaagacuuccguucu

SEQ ID NO: 1038384 - RNA, 19 nt, Homo sapiens
  misc_RNA (1)...(19): siRNA sense strand
cgucaugccacgcuuaaca

SEQ ID NO: 1038385 - RNA, 19 nt, Homo sapiens
  misc_RNA (1)...(19): siRNA sense strand
ccuuugggcucagugaaga

SEQ ID NO: 1038386 - RNA, 19 nt, Homo sapiens
  misc_RNA (1)...(19): siRNA sense strand
ugaggcgccuguacugucu

SEQ ID NO: 1038387 - RNA, 19 nt, Homo sapiens
  misc_RNA (1)...(19): siRNA sense strand
gguagccccuggagacauu

SEQ ID NO: 1038388 - RNA, 19 nt, Homo sapiens
  misc_RNA (1)...(19): siRNA sense strand
gccuagagaagcucaacaa

SEQ ID NO: 1038389 - RNA, 19 nt, Homo sapiens
  misc_RNA (1)...(19): siRNA sense strand
ucaccugggagaagccuuu

SEQ ID NO: 1038390 - RNA, 19 nt, Homo sapiens
  misc_RNA (1)...(19): siRNA sense strand
ucucuugggugggugaaug

SEQ ID NO: 1038391 - RNA, 19 nt, Homo sapiens
  misc_RNA (1)...(19): siRNA sense strand
caggccggauguaaguuau

SEQ ID NO: 1038392 - RNA, 19 nt, Homo sapiens
  misc_RNA (1)...(19): siRNA sense strand
cugcugagcucugugugau

SEQ ID NO: 1038393 - RNA, 19 nt, Homo sapiens
  misc_RNA (1)...(19): siRNA sense strand
cuuaacagaugaggaaacu

SEQ ID NO: 1038394 - RNA, 19 nt, Homo sapiens
  misc_RNA (1)...(19): siRNA sense strand
gcggugagaggagcauuug

SEQ ID NO: 1038395 - RNA, 19 nt, Homo sapiens
  misc_RNA (1)...(19): siRNA sense strand
ggacucguugcucauguuc

SEQ ID NO: 1038396 - RNA, 19 nt, Homo sapiens
  misc_RNA (1)...(19): siRNA sense strand
ggagagugaggcgccugua

SEQ ID NO: 1038397 - RNA, 19 nt, Homo sapiens
  misc_RNA (1)...(19): siRNA sense strand
cuccuacccucuccucuuc

SEQ ID NO: 1038398 - RNA, 19 nt, Homo sapiens
  misc_RNA (1)...(19): siRNA sense strand
gagagaaacaagggagaca

SEQ ID NO: 1038399 - RNA, 19 nt, Homo sapiens
  misc_RNA (1)...(19): siRNA sense strand
ucucagagcuguucuacua

SEQ ID NO: 1038400 - RNA, 19 nt, Homo sapiens
  misc_RNA (1)...(19): siRNA sense strand
acgaagagcucaacgcuuu

SEQ ID NO: 1038401 - RNA, 19 nt, Homo sapiens
  misc_RNA (1)...(19): siRNA sense strand
ggacgugcgcauccuguua

SEQ ID NO: 1038402 - RNA, 19 nt, Homo sapiens
  misc_RNA (1)...(19): siRNA sense strand
gagaagauucgaacuaagu

SEQ ID NO: 1038403 - RNA, 19 nt, Homo sapiens
  misc_RNA (1)...(19): siRNA sense strand
ccaagaaccugaggaacau

SEQ ID NO: 1038404 - RNA, 19 nt, Homo sapiens
  misc_RNA (1)...(19): siRNA sense strand
gagcugccuuggacaccua

SEQ ID NO: 1038405 - RNA, 19 nt, Homo sapiens
  misc_RNA (1)...(19): siRNA sense strand
uugagaagauucgaacuaa

SEQ ID NO: 1038406 - RNA, 19 nt, Homo sapiens
  misc_RNA (1)...(19): siRNA sense strand
gacguugccugcuugaugu

SEQ ID NO: 1038407 - RNA, 19 nt, Homo sapiens
  misc_RNA (1)...(19): siRNA sense strand
ggagcugacugcggacuau

SEQ ID NO: 1038408 - RNA, 19 nt, Homo sapiens
  misc_RNA (1)...(19): siRNA sense strand
gagccaguuucccgagauu

SEQ ID NO: 1038409 - RNA, 19 nt, Homo sapiens
  misc_RNA (1)...(19): siRNA sense strand
gcagugacccaaaguccuu

SEQ ID NO: 1038410 - RNA, 19 nt, Homo sapiens
  misc_RNA (1)...(19): siRNA sense strand
gcagagaguguuugagaag

SEQ ID NO: 1038411 - RNA, 19 nt, Homo sapiens
  misc_RNA (1)...(19): siRNA sense strand
ggacgccaccugugacguu

SEQ ID NO: 1038412 - RNA, 19 nt, Homo sapiens
  misc_RNA (1)...(19): siRNA sense strand
caccuuggcuaccaguuug

SEQ ID NO: 1038413 - RNA, 19 nt, Homo sapiens
  misc_RNA (1)...(19): siRNA sense strand
gugcagagaguguuugaga

SEQ ID NO: 1038414 - RNA, 19 nt, Homo sapiens
  misc_RNA (1)...(19): siRNA sense strand
gccaagaaccugaggaaca

SEQ ID NO: 1038415 - RNA, 19 nt, Homo sapiens
  misc_RNA (1)...(19): siRNA sense strand
gaggaggccaccauugaga

SEQ ID NO: 1038416 - RNA, 19 nt, Homo sapiens
  misc_RNA (1)...(19): siRNA sense strand
aggcaaacguggugugugu

SEQ ID NO: 1038417 - RNA, 19 nt, Homo sapiens
  misc_RNA (1)...(19): siRNA sense strand
guccucagcuucucacucu

SEQ ID NO: 1038418 - RNA, 19 nt, Homo sapiens
  misc_RNA (1)...(19): siRNA sense strand
cuacaagcaccauuacaug

SEQ ID NO: 1038419 - RNA, 19 nt, Homo sapiens
  misc_RNA (1)...(19): siRNA sense strand
caucguggacuacucagaa

SEQ ID NO: 1038420 - RNA, 19 nt, Homo sapiens
  misc_RNA (1)...(19): siRNA sense strand
ggaucccacuggugaaugg

SEQ ID NO: 1038421 - RNA, 19 nt, Homo sapiens
  misc_RNA (1)...(19): siRNA sense strand
ugacguugccugcuugaug

SEQ ID NO: 1038422 - RNA, 19 nt, Homo sapiens
  misc_RNA (1)...(19): siRNA sense strand
ccaccuuggcuaccaguuu

SEQ ID NO: 1038423 - RNA, 19 nt, Homo sapiens
  misc_RNA (1)...(19): siRNA sense strand
ucacccagcucgccaccau

SEQ ID NO: 1038424 - RNA, 19 nt, Homo sapiens
  misc_RNA (1)...(19): siRNA sense strand
ccagaaggccguccugcau

SEQ ID NO: 1038425 - RNA, 19 nt, Homo sapiens
  misc_RNA (1)...(19): siRNA sense strand
gcgucuacaagcaccauua

SEQ ID NO: 1038426 - RNA, 19 nt, Homo sapiens
  misc_RNA (1)...(19): siRNA sense strand
uuccagaaauccugcuuug

SEQ ID NO: 1038427 - RNA, 19 nt, Homo sapiens
  misc_RNA (1)...(19): siRNA sense strand
ugagaagauucgaacuaag

SEQ ID NO: 1038428 - RNA, 19 nt, Homo sapiens
  misc_RNA (1)...(19): siRNA sense strand
cugaggaggccaccauuga

SEQ ID NO: 1038429 - RNA, 19 nt, Homo sapiens
  misc_RNA (1)...(19): siRNA sense strand
gguuuccucuuccugaaca

SEQ ID NO: 1038430 - RNA, 19 nt, Homo sapiens
  misc_RNA (1)...(19): siRNA sense strand
gccaguuucccgagauuga

SEQ ID NO: 1038431 - RNA, 19 nt, Homo sapiens
  misc_RNA (1)...(19): siRNA sense strand
ccugugacguugccugcuu

SEQ ID NO: 1038432 - RNA, 19 nt, Homo sapiens
  misc_RNA (1)...(19): siRNA sense strand
gcccaugccaucacaguca

SEQ ID NO: 1038433 - RNA, 19 nt, Homo sapiens
  misc_RNA (1)...(19): siRNA sense strand
gacuaucucuccccucuga

SEQ ID NO: 1038434 - RNA, 19 nt, Homo sapiens
  misc_RNA (1)...(19): siRNA sense strand
uggugugugugguguauga

SEQ ID NO: 1038435 - RNA, 19 nt, Homo sapiens
  misc_RNA (1)...(19): siRNA sense strand
agaccugcguggaguguuc

SEQ ID NO: 1038436 - RNA, 19 nt, Homo sapiens
  misc_RNA (1)...(19): siRNA sense strand
agagaguguuugagaagca

SEQ ID NO: 1038437 - RNA, 19 nt, Homo sapiens
  misc_RNA (1)...(19): siRNA sense strand
aguggacccuggugaccua

SEQ ID NO: 1038438 - RNA, 19 nt, Homo sapiens
  misc_RNA (1)...(19): siRNA sense strand
gcgcggaggagaucacgau

SEQ ID NO: 1038439 - RNA, 19 nt, Homo sapiens
  misc_RNA (1)...(19): siRNA sense strand
gaaguacuugauccucugu

SEQ ID NO: 1038440 - RNA, 19 nt, Homo sapiens
  misc_RNA (1)...(19): siRNA sense strand
ugcagagaguguuugagaa

SEQ ID NO: 1038441 - RNA, 19 nt, Homo sapiens
  misc_RNA (1)...(19): siRNA sense strand
ccuggaugguuuccucuuc

SEQ ID NO: 1038442 - RNA, 19 nt, Homo sapiens
  misc_RNA (1)...(19): siRNA sense strand
cugcaucccucuuccuucu

SEQ ID NO: 1038443 - RNA, 19 nt, Homo sapiens
  misc_RNA (1)...(19): siRNA sense strand
gcccagcaccaccaucuuc

SEQ ID NO: 1038444 - RNA, 19 nt, Homo sapiens
  misc_RNA (1)...(19): siRNA sense strand
ggccaccauugagaagauu

SEQ ID NO: 1038445 - RNA, 19 nt, Homo sapiens
  misc_RNA (1)...(19): siRNA sense strand
aguacuugauccucuguga

SEQ ID NO: 1038446 - RNA, 19 nt, Homo sapiens
  misc_RNA (1)...(19): siRNA sense strand
ucuucaggcucucagauca

SEQ ID NO: 1038447 - RNA, 19 nt, Homo sapiens
  misc_RNA (1)...(19): siRNA sense strand
gagcccagcaccaccaucu

SEQ ID NO: 1038448 - RNA, 19 nt, Homo sapiens
  misc_RNA (1)...(19): siRNA sense strand
guugccugcuugauguuug

SEQ ID NO: 1038449 - RNA, 19 nt, Homo sapiens
  misc_RNA (1)...(19): siRNA sense strand
agacgguggugugcaggaa

SEQ ID NO: 1038450 - RNA, 19 nt, Homo sapiens
  misc_RNA (1)...(19): siRNA sense strand
ccaggcccaugccaucaca

SEQ ID NO: 1038451 - RNA, 19 nt, Homo sapiens
  misc_RNA (1)...(19): siRNA sense strand
caauugaacucccagauua

SEQ ID NO: 1038452 - RNA, 19 nt, Homo sapiens
  misc_RNA (1)...(19): siRNA sense strand
uuaaagagcuucaaagaga

SEQ ID NO: 1038453 - RNA, 19 nt, Homo sapiens
  misc_RNA (1)...(19): siRNA sense strand
caaacuagaugcacaaaga

SEQ ID NO: 1038454 - RNA, 19 nt, Homo sapiens
  misc_RNA (1)...(19): siRNA sense strand
ggaggaagaucuuaagaga

SEQ ID NO: 1038455 - RNA, 19 nt, Homo sapiens
  misc_RNA (1)...(19): siRNA sense strand
gaaauugccaagcuaaaua

SEQ ID NO: 1038456 - RNA, 19 nt, Homo sapiens
  misc_RNA (1)...(19): siRNA sense strand
gaaagcaccucaagcuguu

SEQ ID NO: 1038457 - RNA, 19 nt, Homo sapiens
  misc_RNA (1)...(19): siRNA sense strand
gagcaacgccagaauuaua

SEQ ID NO: 1038458 - RNA, 19 nt, Homo sapiens
  misc_RNA (1)...(19): siRNA sense strand
gcaaauacaauucgaaaga

SEQ ID NO: 1038459 - RNA, 19 nt, Homo sapiens
  misc_RNA (1)...(19): siRNA sense strand
gaaagauggugucaaucaa

SEQ ID NO: 1038460 - RNA, 19 nt, Homo sapiens
  misc_RNA (1)...(19): siRNA sense strand
ggacuucucuggaaaccuu

SEQ ID NO: 1038461 - RNA, 19 nt, Homo sapiens
  misc_RNA (1)...(19): siRNA sense strand
ccagaaagauggugucaau

SEQ ID NO: 1038462 - RNA, 19 nt, Homo sapiens
  misc_RNA (1)...(19): siRNA sense strand
cuaaauaacuccaguccaa

SEQ ID NO: 1038463 - RNA, 19 nt, Homo sapiens
  misc_RNA (1)...(19): siRNA sense strand
uagccaaucugaauucuaa

SEQ ID NO: 1038464 - RNA, 19 nt, Homo sapiens
  misc_RNA (1)...(19): siRNA sense strand
caagcuggcucacaucaaa

SEQ ID NO: 1038465 - RNA, 19 nt, Homo sapiens
  misc_RNA (1)...(19): siRNA sense strand
gacuguagcuagaagauuu

SEQ ID NO: 1038466 - RNA, 19 nt, Homo sapiens
  misc_RNA (1)...(19): siRNA sense strand
cauggaaccuucagcaauu

SEQ ID NO: 1038467 - RNA, 19 nt, Homo sapiens
  misc_RNA (1)...(19): siRNA sense strand
cuaaggaccucucauauac

SEQ ID NO: 1038468 - RNA, 19 nt, Homo sapiens
  misc_RNA (1)...(19): siRNA sense strand
ggaccucucauauaccuua

SEQ ID NO: 1038469 - RNA, 19 nt, Homo sapiens
  misc_RNA (1)...(19): siRNA sense strand
aaauauaccucuaggacuu

SEQ ID NO: 1038470 - RNA, 19 nt, Homo sapiens
  misc_RNA (1)...(19): siRNA sense strand
gcuagaagauuuaucaaac

SEQ ID NO: 1038471 - RNA, 19 nt, Homo sapiens
  misc_RNA (1)...(19): siRNA sense strand
caaagagacuggccuggau

SEQ ID NO: 1038472 - RNA, 19 nt, Homo sapiens
  misc_RNA (1)...(19): siRNA sense strand
gcuaauaggugaauuugac

SEQ ID NO: 1038473 - RNA, 19 nt, Homo sapiens
  misc_RNA (1)...(19): siRNA sense strand
gaacagaguaccaccaaca

SEQ ID NO: 1038474 - RNA, 19 nt, Homo sapiens
  misc_RNA (1)...(19): siRNA sense strand
gcaauugaacucccagauu

SEQ ID NO: 1038475 - RNA, 19 nt, Homo sapiens
  misc_RNA (1)...(19): siRNA sense strand
aggaagaucuuaagagaga

SEQ ID NO: 1038476 - RNA, 19 nt, Homo sapiens
  misc_RNA (1)...(19): siRNA sense strand
ggaaaaggaccaaauaaaa

SEQ ID NO: 1038477 - RNA, 19 nt, Homo sapiens
  misc_RNA (1)...(19): siRNA sense strand
caagacaaauauaccucua

SEQ ID NO: 1038478 - RNA, 19 nt, Homo sapiens
  misc_RNA (1)...(19): siRNA sense strand
ugacuucaaugcagaguau

SEQ ID NO: 1038479 - RNA, 19 nt, Homo sapiens
  misc_RNA (1)...(19): siRNA sense strand
gauggagacuguagcuaga

SEQ ID NO: 1038480 - RNA, 19 nt, Homo sapiens
  misc_RNA (1)...(19): siRNA sense strand
cuaaauccgucucagaaug

SEQ ID NO: 1038481 - RNA, 19 nt, Homo sapiens
  misc_RNA (1)...(19): siRNA sense strand
gaauaucucaccugacgaa

SEQ ID NO: 1038482 - RNA, 19 nt, Homo sapiens
  misc_RNA (1)...(19): siRNA sense strand
uaagagagaagaggaaauu

SEQ ID NO: 1038483 - RNA, 19 nt, Homo sapiens
  misc_RNA (1)...(19): siRNA sense strand
ucaauugccugggauuuau

SEQ ID NO: 1038484 - RNA, 19 nt, Homo sapiens
  misc_RNA (1)...(19): siRNA sense strand
caaacccgguggaccauau

SEQ ID NO: 1038485 - RNA, 19 nt, Homo sapiens
  misc_RNA (1)...(19): siRNA sense strand
ucagaauguucaugaagaa

SEQ ID NO: 1038486 - RNA, 19 nt, Homo sapiens
  misc_RNA (1)...(19): siRNA sense strand
ucuaaggaccucucauaua

SEQ ID NO: 1038487 - RNA, 19 nt, Homo sapiens
  misc_RNA (1)...(19): siRNA sense strand
caacagguagccaaucuga

SEQ ID NO: 1038488 - RNA, 19 nt, Homo sapiens
  misc_RNA (1)...(19): siRNA sense strand
ggaaauugccaagcuaaau

SEQ ID NO: 1038489 - RNA, 19 nt, Homo sapiens
  misc_RNA (1)...(19): siRNA sense strand
caugaacccugcaaauaca

SEQ ID NO: 1038490 - RNA, 19 nt, Homo sapiens
  misc_RNA (1)...(19): siRNA sense strand
caaccuaucugcccaucuc

SEQ ID NO: 1038491 - RNA, 19 nt, Homo sapiens
  misc_RNA (1)...(19): siRNA sense strand
agucagugcucucuagaaa

SEQ ID NO: 1038492 - RNA, 19 nt, Homo sapiens
  misc_RNA (1)...(19): siRNA sense strand
cagaguuuauugauccuuu

SEQ ID NO: 1038493 - RNA, 19 nt, Homo sapiens
  misc_RNA (1)...(19): siRNA sense strand
acucccagauuauuugaua

SEQ ID NO: 1038494 - RNA, 19 nt, Homo sapiens
  misc_RNA (1)...(19): siRNA sense strand
gcacgacauugagacuauu

SEQ ID NO: 1038495 - RNA, 19 nt, Homo sapiens
  misc_RNA (1)...(19): siRNA sense strand
cagaaucuccuguauguuc

SEQ ID NO: 1038496 - RNA, 19 nt, Homo sapiens
  misc_RNA (1)...(19): siRNA sense strand
gaauguucaugaagaaguc

SEQ ID NO: 1038497 - RNA, 19 nt, Homo sapiens
  misc_RNA (1)...(19): siRNA sense strand
uaccagagccacaagaauu

SEQ ID NO: 1038498 - RNA, 19 nt, Homo sapiens
  misc_RNA (1)...(19): siRNA sense strand
guagcuagaagauuuauca

SEQ ID NO: 1038499 - RNA, 19 nt, Homo sapiens
  misc_RNA (1)...(19): siRNA sense strand
caacaucaccguacugcau

SEQ ID NO: 1038500 - RNA, 19 nt, Homo sapiens
  misc_RNA (1)...(19): siRNA sense strand
ccugaaggccuacaagaaa

SEQ ID NO: 1038501 - RNA, 19 nt, Homo sapiens
  misc_RNA (1)...(19): siRNA sense strand
gaggaaauugccaagcuaa

SEQ ID NO: 1038502 - RNA, 19 nt, Homo sapiens
  misc_RNA (1)...(19): siRNA sense strand
agaaagauggugucaauca

SEQ ID NO: 1038503 - RNA, 19 nt, Homo sapiens
  misc_RNA (1)...(19): siRNA sense strand
gaacucccagauuauuuga

SEQ ID NO: 1038504 - RNA, 19 nt, Homo sapiens
  misc_RNA (1)...(19): siRNA sense strand
ggaccagcaagacaaauau

SEQ ID NO: 1038505 - RNA, 19 nt, Homo sapiens
  misc_RNA (1)...(19): siRNA sense strand
ugucaaaugugggcaaaga

SEQ ID NO: 1038506 - RNA, 19 nt, Homo sapiens
  misc_RNA (1)...(19): siRNA sense strand
ucuccuguauguucuagua

SEQ ID NO: 1038507 - RNA, 19 nt, Homo sapiens
  misc_RNA (1)...(19): siRNA sense strand
gaccagcaagacaaauaua

SEQ ID NO: 1038508 - RNA, 19 nt, Homo sapiens
  misc_RNA (1)...(19): siRNA sense strand
caagaaaccggagcuacuu

SEQ ID NO: 1038509 - RNA, 19 nt, Homo sapiens
  misc_RNA (1)...(19): siRNA sense strand
aaaaugauccccucaauga

SEQ ID NO: 1038510 - RNA, 19 nt, Homo sapiens
  misc_RNA (1)...(19): siRNA sense strand
agaggaaauugccaagcua

SEQ ID NO: 1038511 - RNA, 19 nt, Homo sapiens
  misc_RNA (1)...(19): siRNA sense strand
cagaguaccaccaacacua

SEQ ID NO: 1038512 - RNA, 19 nt, Homo sapiens
  misc_RNA (1)...(19): siRNA sense strand
uaucagaugacacgagaaa

SEQ ID NO: 1038513 - RNA, 19 nt, Homo sapiens
  misc_RNA (1)...(19): siRNA sense strand
uaaaguguccaaagccuau

SEQ ID NO: 1038514 - RNA, 19 nt, Homo sapiens
  misc_RNA (1)...(19): siRNA sense strand
caaauacaauucgaaagac

SEQ ID NO: 1038515 - RNA, 19 nt, Homo sapiens
  misc_RNA (1)...(19): siRNA sense strand
ucagaugacacgagaaaga

SEQ ID NO: 1038516 - RNA, 19 nt, Homo sapiens
  misc_RNA (1)...(19): siRNA sense strand
gaacccugcaaauacaauu

SEQ ID NO: 1038517 - RNA, 19 nt, Homo sapiens
  misc_RNA (1)...(19): siRNA sense strand
guaucagaauguucaugaa

SEQ ID NO: 1038518 - RNA, 19 nt, Homo sapiens
  misc_RNA (1)...(19): siRNA sense strand
cuacuaaaguguccaaagc

SEQ ID NO: 1038519 - RNA, 19 nt, Homo sapiens
  misc_RNA (1)...(19): siRNA sense strand
gaaauagacagacggucau

SEQ ID NO: 1038520 - RNA, 19 nt, Homo sapiens
  misc_RNA (1)...(19): siRNA sense strand
uugcuagacuccagaaaga

SEQ ID NO: 1038521 - RNA, 19 nt, Homo sapiens
  misc_RNA (1)...(19): siRNA sense strand
acaauucgaaagacacaua

SEQ ID NO: 1038522 - RNA, 19 nt, Homo sapiens
  misc_RNA (1)...(19): siRNA sense strand
uucagaaucuccuguaugu

SEQ ID NO: 1038523 - RNA, 19 nt, Homo sapiens
  misc_RNA (1)...(19): siRNA sense strand
aaacuaaauccgucucaga

SEQ ID NO: 1038524 - RNA, 19 nt, Homo sapiens
  misc_RNA (1)...(19): siRNA sense strand
aaagauggugucaaucaaa

SEQ ID NO: 1038525 - RNA, 19 nt, Homo sapiens
  misc_RNA (1)...(19): siRNA sense strand
gcacaaaaguuaucaaacc

SEQ ID NO: 1038526 - RNA, 19 nt, Homo sapiens
  misc_RNA (1)...(19): siRNA sense strand
ccagagccacaagaauuua

SEQ ID NO: 1038527 - RNA, 19 nt, Homo sapiens
  misc_RNA (1)...(19): siRNA sense strand
cccaugaacccugcaaaua

SEQ ID NO: 1038528 - RNA, 19 nt, Homo sapiens
  misc_RNA (1)...(19): siRNA sense strand
cuccucagauuguaaauuc

SEQ ID NO: 1038529 - RNA, 19 nt, Homo sapiens
  misc_RNA (1)...(19): siRNA sense strand
auaacaagcuggcucacau

SEQ ID NO: 1038530 - RNA, 19 nt, Homo sapiens
  misc_RNA (1)...(19): siRNA sense strand
caaagccuauggaagaaaa

SEQ ID NO: 1038531 - RNA, 19 nt, Homo sapiens
  misc_RNA (1)...(19): siRNA sense strand
gaagauaaagcagucuagu

SEQ ID NO: 1038532 - RNA, 19 nt, Homo sapiens
  misc_RNA (1)...(19): siRNA sense strand
gaugacacgagaaagaaug

SEQ ID NO: 1038533 - RNA, 19 nt, Homo sapiens
  misc_RNA (1)...(19): siRNA sense strand
caaaagaguaucagaaugu

SEQ ID NO: 1038534 - RNA, 19 nt, Homo sapiens
  misc_RNA (1)...(19): siRNA sense strand
gaaaaggaggaagaucuua

SEQ ID NO: 1038535 - RNA, 19 nt, Homo sapiens
  misc_RNA (1)...(19): siRNA sense strand
cauugagacuauugaggaa

SEQ ID NO: 1038536 - RNA, 19 nt, Homo sapiens
  misc_RNA (1)...(19): siRNA sense strand
ucuaggacuucucuggaaa

SEQ ID NO: 1038537 - RNA, 19 nt, Homo sapiens
  misc_RNA (1)...(19): siRNA sense strand
ucacauccuccucagauug

SEQ ID NO: 1038538 - RNA, 19 nt, Homo sapiens
  misc_RNA (1)...(19): siRNA sense strand
aaagagacuggccuggaua

SEQ ID NO: 1038539 - RNA, 19 nt, Homo sapiens
  misc_RNA (1)...(19): siRNA sense strand
ccaugaacccugcaaauac

SEQ ID NO: 1038540 - RNA, 19 nt, Homo sapiens
  misc_RNA (1)...(19): siRNA sense strand
gcuagacuccagaaagaug

SEQ ID NO: 1038541 - RNA, 19 nt, Homo sapiens
  misc_RNA (1)...(19): siRNA sense strand
ccaauuaccaugaagaaaa

SEQ ID NO: 1038542 - RNA, 19 nt, Homo sapiens
  misc_RNA (1)...(19): siRNA sense strand
ucaaugcagaguaugauga

SEQ ID NO: 1038543 - RNA, 19 nt, Homo sapiens
  misc_RNA (1)...(19): siRNA sense strand
uaaauaacuccaguccaaa

SEQ ID NO: 1038544 - RNA, 19 nt, Homo sapiens
  misc_RNA (1)...(19): siRNA sense strand
gauucagaguuuauugauc

SEQ ID NO: 1038545 - RNA, 19 nt, Homo sapiens
  misc_RNA (1)...(19): siRNA sense strand
caccagccguucagaaucu

SEQ ID NO: 1038546 - RNA, 19 nt, Homo sapiens
  misc_RNA (1)...(19): siRNA sense strand
acagguagccaaucugaau

SEQ ID NO: 1038547 - RNA, 19 nt, Homo sapiens
  misc_RNA (1)...(19): siRNA sense strand
ggacuccacgggcuuguca

SEQ ID NO: 1038548 - RNA, 19 nt, Homo sapiens
  misc_RNA (1)...(19): siRNA sense strand
agaaacggcuuuuggauuc

SEQ ID NO: 1038549 - RNA, 19 nt, Homo sapiens
  misc_RNA (1)...(19): siRNA sense strand
ugaacucccagauuauuug

SEQ ID NO: 1038550 - RNA, 19 nt, Homo sapiens
  misc_RNA (1)...(19): siRNA sense strand
uaaggaaaaggaccaaaua

SEQ ID NO: 1038551 - RNA, 19 nt, Homo sapiens
  misc_RNA (1)...(19): siRNA sense strand
gaccauggcuuucaaauau

SEQ ID NO: 1038552 - RNA, 19 nt, Homo sapiens
  misc_RNA (1)...(19): siRNA sense strand
caacaaaggugaagaagug

SEQ ID NO: 1038553 - RNA, 19 nt, Homo sapiens
  misc_RNA (1)...(19): siRNA sense strand
ggacaaaguucagaauaau

SEQ ID NO: 1038554 - RNA, 19 nt, Homo sapiens
  misc_RNA (1)...(19): siRNA sense strand
cagaagaguuauccuauga

SEQ ID NO: 1038555 - RNA, 19 nt, Homo sapiens
  misc_RNA (1)...(19): siRNA sense strand
cuaaagaagagcugaauuu

SEQ ID NO: 1038556 - RNA, 19 nt, Homo sapiens
  misc_RNA (1)...(19): siRNA sense strand
gaagaguuauccuaugaag

SEQ ID NO: 1038557 - RNA, 19 nt, Homo sapiens
  misc_RNA (1)...(19): siRNA sense strand
gaguauccauguuucuaaa

SEQ ID NO: 1038558 - RNA, 19 nt, Homo sapiens
  misc_RNA (1)...(19): siRNA sense strand
caaagaacuuagccucaug

SEQ ID NO: 1038559 - RNA, 19 nt, Homo sapiens
  misc_RNA (1)...(19): siRNA sense strand
caacaacaaaggugaagaa

SEQ ID NO: 1038560 - RNA, 19 nt, Homo sapiens
  misc_RNA (1)...(19): siRNA sense strand
gaagugaagaggauagaau

SEQ ID NO: 1038561 - RNA, 19 nt, Homo sapiens
  misc_RNA (1)...(19): siRNA sense strand
aggacaaaguucagaauaa

SEQ ID NO: 1038562 - RNA, 19 nt, Homo sapiens
  misc_RNA (1)...(19): siRNA sense strand
gugaagaagugaagaggau

SEQ ID NO: 1038563 - RNA, 19 nt, Homo sapiens
  misc_RNA (1)...(19): siRNA sense strand
gaaguuaucaacauacaag

SEQ ID NO: 1038564 - RNA, 19 nt, Homo sapiens
  misc_RNA (1)...(19): siRNA sense strand
ugggagggauggagauuaa

SEQ ID NO: 1038565 - RNA, 19 nt, Homo sapiens
  misc_RNA (1)...(19): siRNA sense strand
uaauaacggucgcuuugug

SEQ ID NO: 1038566 - RNA, 19 nt, Homo sapiens
  misc_RNA (1)...(19): siRNA sense strand
gcauggauaagcucuauga

SEQ ID NO: 1038567 - RNA, 19 nt, Homo sapiens
  misc_RNA (1)...(19): siRNA sense strand
agaguuauccuaugaaguu

SEQ ID NO: 1038568 - RNA, 19 nt, Homo sapiens
  misc_RNA (1)...(19): siRNA sense strand
ccagaagaguuauccuaug

SEQ ID NO: 1038569 - RNA, 19 nt, Homo sapiens
  misc_RNA (1)...(19): siRNA sense strand
gcagcugacagaaauauau

SEQ ID NO: 1038570 - RNA, 19 nt, Homo sapiens
  misc_RNA (1)...(19): siRNA sense strand
gaguuauccuaugaaguua

SEQ ID NO: 1038571 - RNA, 19 nt, Homo sapiens
  misc_RNA (1)...(19): siRNA sense strand
gaauaauaacggucgcuuu

SEQ ID NO: 1038572 - RNA, 19 nt, Homo sapiens
  misc_RNA (1)...(19): siRNA sense strand
caugauggaugaguuauag

SEQ ID NO: 1038573 - RNA, 19 nt, Homo sapiens
  misc_RNA (1)...(19): siRNA sense strand
ggacucaucagaauguuca

SEQ ID NO: 1038574 - RNA, 19 nt, Homo sapiens
  misc_RNA (1)...(19): siRNA sense strand
ggauggagauuaagaaacc

SEQ ID NO: 1038575 - RNA, 19 nt, Homo sapiens
  misc_RNA (1)...(19): siRNA sense strand
caagcaugguggaaacuau

SEQ ID NO: 1038576 - RNA, 19 nt, Homo sapiens
  misc_RNA (1)...(19): siRNA sense strand
ugaccauggcuuucaaaua

SEQ ID NO: 1038577 - RNA, 19 nt, Homo sapiens
  misc_RNA (1)...(19): siRNA sense strand
ccuaugaaguuaucaacau

SEQ ID NO: 1038578 - RNA, 19 nt, Homo sapiens
  misc_RNA (1)...(19): siRNA sense strand
gcuccaaacccucuugcua

SEQ ID NO: 1038579 - RNA, 19 nt, Homo sapiens
  misc_RNA (1)...(19): siRNA sense strand
ucaaagaacuuagccucau

SEQ ID NO: 1038580 - RNA, 19 nt, Homo sapiens
  misc_RNA (1)...(19): siRNA sense strand
cagcauggauaagcucuau

SEQ ID NO: 1038581 - RNA, 19 nt, Homo sapiens
  misc_RNA (1)...(19): siRNA sense strand
ucaugugucuggaucauca

SEQ ID NO: 1038582 - RNA, 19 nt, Homo sapiens
  misc_RNA (1)...(19): siRNA sense strand
ggcagacacuccucaucuu

SEQ ID NO: 1038583 - RNA, 19 nt, Homo sapiens
  misc_RNA (1)...(19): siRNA sense strand
ggagggauggagauuaaga

SEQ ID NO: 1038584 - RNA, 19 nt, Homo sapiens
  misc_RNA (1)...(19): siRNA sense strand
uaaagaagagcugaauuuc

SEQ ID NO: 1038585 - RNA, 19 nt, Homo sapiens
  misc_RNA (1)...(19): siRNA sense strand
uccaaacccucuugcuaaa

SEQ ID NO: 1038586 - RNA, 19 nt, Homo sapiens
  misc_RNA (1)...(19): siRNA sense strand
gaaacugggaacuaacaug

SEQ ID NO: 1038587 - RNA, 19 nt, Homo sapiens
  misc_RNA (1)...(19): siRNA sense strand
gaaguuccaggacucauca

SEQ ID NO: 1038588 - RNA, 19 nt, Homo sapiens
  misc_RNA (1)...(19): siRNA sense strand
gaacaagcagcgcuaacca

SEQ ID NO: 1038589 - RNA, 19 nt, Homo sapiens
  misc_RNA (1)...(19): siRNA sense strand
uaagcucuaugaccugaug

SEQ ID NO: 1038590 - RNA, 19 nt, Homo sapiens
  misc_RNA (1)...(19): siRNA sense strand
aauaauaacggucgcuuug

SEQ ID NO: 1038591 - RNA, 19 nt, Homo sapiens
  misc_RNA (1)...(19): siRNA sense strand
gaggauagaauucaagcau

SEQ ID NO: 1038592 - RNA, 19 nt, Homo sapiens
  misc_RNA (1)...(19): siRNA sense strand
gaagaagugaagaggauag

SEQ ID NO: 1038593 - RNA, 19 nt, Homo sapiens
  misc_RNA (1)...(19): siRNA sense strand
caaccauccugcagcaagu

SEQ ID NO: 1038594 - RNA, 19 nt, Homo sapiens
  misc_RNA (1)...(19): siRNA sense strand
ccauggcuuucaaauauca

SEQ ID NO: 1038595 - RNA, 19 nt, Homo sapiens
  misc_RNA (1)...(19): siRNA sense strand
gcagacacuccucaucuuc

SEQ ID NO: 1038596 - RNA, 19 nt, Homo sapiens
  misc_RNA (1)...(19): siRNA sense strand
cgaguauccauguuucuaa

SEQ ID NO: 1038597 - RNA, 19 nt, Homo sapiens
  misc_RNA (1)...(19): siRNA sense strand
uaaaggacaaaguucagaa

SEQ ID NO: 1038598 - RNA, 19 nt, Homo sapiens
  misc_RNA (1)...(19): siRNA sense strand
ucuaugaccugaugaccau

SEQ ID NO: 1038599 - RNA, 19 nt, Homo sapiens
  misc_RNA (1)...(19): siRNA sense strand
aaccaggccagaagaguua

SEQ ID NO: 1038600 - RNA, 19 nt, Homo sapiens
  misc_RNA (1)...(19): siRNA sense strand
uaaccaggccagaagaguu

SEQ ID NO: 1038601 - RNA, 19 nt, Homo sapiens
  misc_RNA (1)...(19): siRNA sense strand
uaacauguacagcgugaau

SEQ ID NO: 1038602 - RNA, 19 nt, Homo sapiens
  misc_RNA (1)...(19): siRNA sense strand
gaagaggauagaauucaag

SEQ ID NO: 1038603 - RNA, 19 nt, Homo sapiens
  misc_RNA (1)...(19): siRNA sense strand
ggccagaagaguuauccua

SEQ ID NO: 1038604 - RNA, 19 nt, Homo sapiens
  misc_RNA (1)...(19): siRNA sense strand
cuaugucccugcacccaaa

SEQ ID NO: 1038605 - RNA, 19 nt, Homo sapiens
  misc_RNA (1)...(19): siRNA sense strand
ugaagaagaggaacaagca

SEQ ID NO: 1038606 - RNA, 19 nt, Homo sapiens
  misc_RNA (1)...(19): siRNA sense strand
gcuaaagaagagcugaauu

SEQ ID NO: 1038607 - RNA, 19 nt, Homo sapiens
  misc_RNA (1)...(19): siRNA sense strand
agacacuccucaucuucuu

SEQ ID NO: 1038608 - RNA, 19 nt, Homo sapiens
  misc_RNA (1)...(19): siRNA sense strand
gccagaagaguuauccuau

SEQ ID NO: 1038609 - RNA, 19 nt, Homo sapiens
  misc_RNA (1)...(19): siRNA sense strand
cuccaaacccucuugcuaa

SEQ ID NO: 1038610 - RNA, 19 nt, Homo sapiens
  misc_RNA (1)...(19): siRNA sense strand
uguggaaacucaugugucu

SEQ ID NO: 1038611 - RNA, 19 nt, Homo sapiens
  misc_RNA (1)...(19): siRNA sense strand
gaaucagccuguggaaacu

SEQ ID NO: 1038612 - RNA, 19 nt, Homo sapiens
  misc_RNA (1)...(19): siRNA sense strand
aaacugggaacuaacaugu

SEQ ID NO: 1038613 - RNA, 19 nt, Homo sapiens
  misc_RNA (1)...(19): siRNA sense strand
gaccugcacauccgaguau

SEQ ID NO: 1038614 - RNA, 19 nt, Homo sapiens
  misc_RNA (1)...(19): siRNA sense strand
uggauaccaucaagggauu

SEQ ID NO: 1038615 - RNA, 19 nt, Homo sapiens
  misc_RNA (1)...(19): siRNA sense strand
ccaggacucaucagaaugu

SEQ ID NO: 1038616 - RNA, 19 nt, Homo sapiens
  misc_RNA (1)...(19): siRNA sense strand
cauccgaguauccauguuu

SEQ ID NO: 1038617 - RNA, 19 nt, Homo sapiens
  misc_RNA (1)...(19): siRNA sense strand
uaacggucgcuuuguguug

SEQ ID NO: 1038618 - RNA, 19 nt, Homo sapiens
  misc_RNA (1)...(19): siRNA sense strand
guuauccuaugaaguuauc

SEQ ID NO: 1038619 - RNA, 19 nt, Homo sapiens
  misc_RNA (1)...(19): siRNA sense strand
gugucuggaucaucaaaga

SEQ ID NO: 1038620 - RNA, 19 nt, Homo sapiens
  misc_RNA (1)...(19): siRNA sense strand
ugaaucagccuguggaaac

SEQ ID NO: 1038621 - RNA, 19 nt, Homo sapiens
  misc_RNA (1)...(19): siRNA sense strand
aaggacaaaguucagaaua

SEQ ID NO: 1038622 - RNA, 19 nt, Homo sapiens
  misc_RNA (1)...(19): siRNA sense strand
gagggauggagauuaagaa

SEQ ID NO: 1038623 - RNA, 19 nt, Homo sapiens
  misc_RNA (1)...(19): siRNA sense strand
ucaaucacuuggauaccau

SEQ ID NO: 1038624 - RNA, 19 nt, Homo sapiens
  misc_RNA (1)...(19): siRNA sense strand
guauccauguuucuaaagg

SEQ ID NO: 1038625 - RNA, 19 nt, Homo sapiens
  misc_RNA (1)...(19): siRNA sense strand
uuccaggacucaucagaau

SEQ ID NO: 1038626 - RNA, 19 nt, Homo sapiens
  misc_RNA (1)...(19): siRNA sense strand
uauccauguuucuaaagga

SEQ ID NO: 1038627 - RNA, 19 nt, Homo sapiens
  misc_RNA (1)...(19): siRNA sense strand
ugaugaccauggcuuucaa

SEQ ID NO: 1038628 - RNA, 19 nt, Homo sapiens
  misc_RNA (1)...(19): siRNA sense strand
gcgcuaaccaggccagaag

SEQ ID NO: 1038629 - RNA, 19 nt, Homo sapiens
  misc_RNA (1)...(19): siRNA sense strand
uccugaaacugggaacuaa

SEQ ID NO: 1038630 - RNA, 19 nt, Homo sapiens
  misc_RNA (1)...(19): siRNA sense strand
ccauguuucuaaaggacaa

SEQ ID NO: 1038631 - RNA, 19 nt, Homo sapiens
  misc_RNA (1)...(19): siRNA sense strand
caaaggugaagaagugaag

SEQ ID NO: 1038632 - RNA, 19 nt, Homo sapiens
  misc_RNA (1)...(19): siRNA sense strand
ugcggcagcugacagaaau

SEQ ID NO: 1038633 - RNA, 19 nt, Homo sapiens
  misc_RNA (1)...(19): siRNA sense strand
uaccaccgaugaagaagag

SEQ ID NO: 1038634 - RNA, 19 nt, Homo sapiens
  misc_RNA (1)...(19): siRNA sense strand
gaaacucaugugucuggau

SEQ ID NO: 1038635 - RNA, 19 nt, Homo sapiens
  misc_RNA (1)...(19): siRNA sense strand
gcuggucacuuucaaucac

SEQ ID NO: 1038636 - RNA, 19 nt, Homo sapiens
  misc_RNA (1)...(19): siRNA sense strand
gaggaacaagcagcgcuaa

SEQ ID NO: 1038637 - RNA, 19 nt, Homo sapiens
  misc_RNA (1)...(19): siRNA sense strand
gaugaccauggcuuucaaa

SEQ ID NO: 1038638 - RNA, 19 nt, Homo sapiens
  misc_RNA (1)...(19): siRNA sense strand
gagaccgaguccugaaacu

SEQ ID NO: 1038639 - RNA, 19 nt, Homo sapiens
  misc_RNA (1)...(19): siRNA sense strand
ugaagaagugaagaggaua

SEQ ID NO: 1038640 - RNA, 19 nt, Homo sapiens
  misc_RNA (1)...(19): siRNA sense strand
uaaccaggccagcauggau

SEQ ID NO: 1038641 - RNA, 19 nt, Homo sapiens
  misc_RNA (1)...(19): siRNA sense strand
gaugggagggauggagauu

SEQ ID NO: 1038642 - RNA, 19 nt, Homo sapiens
  misc_RNA (1)...(19): siRNA sense strand
cagcugacagaaauauaug

SEQ ID NO: 1038643 - RNA, 19 nt, Homo sapiens
  misc_RNA (1)...(19): siRNA sense strand
aauauaugguggucucucu

SEQ ID NO: 1038644 - RNA, 19 nt, Homo sapiens
  misc_RNA (1)...(19): siRNA sense strand
guuccaggacucaucagaa

SEQ ID NO: 1038645 - RNA, 19 nt, Homo sapiens
  misc_RNA (1)...(19): siRNA sense strand
ggcuuucaaauaucaagua

SEQ ID NO: 1038646 - RNA, 19 nt, Homo sapiens
  misc_RNA (1)...(19): siRNA sense strand
gaucaucaaagaacuuagc

SEQ ID NO: 1038647 - RNA, 19 nt, Homo sapiens
  misc_RNA (1)...(19): siRNA sense strand
uggaucaucaaagaacuua

SEQ ID NO: 1038648 - RNA, 19 nt, Homo sapiens
  misc_RNA (1)...(19): siRNA sense strand
gaauucaagcaugguggaa

SEQ ID NO: 1038649 - RNA, 19 nt, Homo sapiens
  misc_RNA (1)...(19): siRNA sense strand
acgauuugcucgccaugau

SEQ ID NO: 1038650 - RNA, 19 nt, Homo sapiens
  misc_RNA (1)...(19): siRNA sense strand
aaccaggccagcauggaua

SEQ ID NO: 1038651 - RNA, 19 nt, Homo sapiens
  misc_RNA (1)...(19): siRNA sense strand
uggaagaguugaagaagua

SEQ ID NO: 1038652 - RNA, 19 nt, Homo sapiens
  misc_RNA (1)...(19): siRNA sense strand
ugaagaaguaccugucgua

SEQ ID NO: 1038653 - RNA, 19 nt, Homo sapiens
  misc_RNA (1)...(19): siRNA sense strand
cucaagaggugguggaaga

SEQ ID NO: 1038654 - RNA, 19 nt, Homo sapiens
  misc_RNA (1)...(19): siRNA sense strand
gaggaggcgaccguuguua

SEQ ID NO: 1038655 - RNA, 19 nt, Homo sapiens
  misc_RNA (1)...(19): siRNA sense strand
ggaggaggcgaccguuguu

SEQ ID NO: 1038656 - RNA, 19 nt, Homo sapiens
  misc_RNA (1)...(19): siRNA sense strand
gcucuggacugggauuaag

SEQ ID NO: 1038657 - RNA, 19 nt, Homo sapiens
  misc_RNA (1)...(19): siRNA sense strand
guggaagaguugaagaagu

SEQ ID NO: 1038658 - RNA, 19 nt, Homo sapiens
  misc_RNA (1)...(19): siRNA sense strand
ccccagagcuuccaguaaa

SEQ ID NO: 1038659 - RNA, 19 nt, Homo sapiens
  misc_RNA (1)...(19): siRNA sense strand
ggaggcgaccguuguuauc

SEQ ID NO: 1038660 - RNA, 19 nt, Homo sapiens
  misc_RNA (1)...(19): siRNA sense strand
aagaggugguggaagaguu

SEQ ID NO: 1038661 - RNA, 19 nt, Homo sapiens
  misc_RNA (1)...(19): siRNA sense strand
uaaaggugaacccgacgaa

SEQ ID NO: 1038662 - RNA, 19 nt, Homo sapiens
  misc_RNA (1)...(19): siRNA sense strand
gagcucuggacugggauua

SEQ ID NO: 1038663 - RNA, 19 nt, Homo sapiens
  misc_RNA (1)...(19): siRNA sense strand
gaagaaaccuccagucugu

SEQ ID NO: 1038664 - RNA, 19 nt, Homo sapiens
  misc_RNA (1)...(19): siRNA sense strand
caaaggcgaugucauggua

SEQ ID NO: 1038665 - RNA, 19 nt, Homo sapiens
  misc_RNA (1)...(19): siRNA sense strand
ccaaagcaaugucaaguuu

SEQ ID NO: 1038666 - RNA, 19 nt, Homo sapiens
  misc_RNA (1)...(19): siRNA sense strand
gaggagcaguucccaguua

SEQ ID NO: 1038667 - RNA, 19 nt, Homo sapiens
  misc_RNA (1)...(19): siRNA sense strand
gcaaagauccucuggaaga

SEQ ID NO: 1038668 - RNA, 19 nt, Homo sapiens
  misc_RNA (1)...(19): siRNA sense strand
gaaugugugucaccucuuu

SEQ ID NO: 1038669 - RNA, 19 nt, Homo sapiens
  misc_RNA (1)...(19): siRNA sense strand
cagcaaagauccucuggaa

SEQ ID NO: 1038670 - RNA, 19 nt, Homo sapiens
  misc_RNA (1)...(19): siRNA sense strand
cuacacaucuggagucuau

SEQ ID NO: 1038671 - RNA, 19 nt, Homo sapiens
  misc_RNA (1)...(19): siRNA sense strand
caagagagccaaagcaaug

SEQ ID NO: 1038672 - RNA, 19 nt, Homo sapiens
  misc_RNA (1)...(19): siRNA sense strand
ggacagucauucauuccaa

SEQ ID NO: 1038673 - RNA, 19 nt, Homo sapiens
  misc_RNA (1)...(19): siRNA sense strand
gaacagcagcccucucuuc

SEQ ID NO: 1038674 - RNA, 19 nt, Homo sapiens
  misc_RNA (1)...(19): siRNA sense strand
acaaguaccugcucuucaa

SEQ ID NO: 1038675 - RNA, 19 nt, Homo sapiens
  misc_RNA (1)...(19): siRNA sense strand
gcauuacacugacggacaa

SEQ ID NO: 1038676 - RNA, 19 nt, Homo sapiens
  misc_RNA (1)...(19): siRNA sense strand
ggagaagggugggcaagug

SEQ ID NO: 1038677 - RNA, 19 nt, Homo sapiens
  misc_RNA (1)...(19): siRNA sense strand
gaacagcugguccgccauu

SEQ ID NO: 1038678 - RNA, 19 nt, Homo sapiens
  misc_RNA (1)...(19): siRNA sense strand
gacgaggccuggacugaug

SEQ ID NO: 1038679 - RNA, 19 nt, Homo sapiens
  misc_RNA (1)...(19): siRNA sense strand
ccaagcaccgggacaagua

SEQ ID NO: 1038680 - RNA, 19 nt, Homo sapiens
  misc_RNA (1)...(19): siRNA sense strand
uaccugcucuucaaccuuu

SEQ ID NO: 1038681 - RNA, 19 nt, Homo sapiens
  misc_RNA (1)...(19): siRNA sense strand
aaagcaaugucaaguuugu

SEQ ID NO: 1038682 - RNA, 19 nt, Homo sapiens
  misc_RNA (1)...(19): siRNA sense strand
ggacaagguggccacagaa

SEQ ID NO: 1038683 - RNA, 19 nt, Homo sapiens
  misc_RNA (1)...(19): siRNA sense strand
gaucagggacagucauuca

SEQ ID NO: 1038684 - RNA, 19 nt, Homo sapiens
  misc_RNA (1)...(19): siRNA sense strand
ggacuccuaugagaacuuc

SEQ ID NO: 1038685 - RNA, 19 nt, Homo sapiens
  misc_RNA (1)...(19): siRNA sense strand
ccucagagcucaccuacac

SEQ ID NO: 1038686 - RNA, 19 nt, Homo sapiens
  misc_RNA (1)...(19): siRNA sense strand
gcacguggucguacuauac

SEQ ID NO: 1038687 - RNA, 19 nt, Homo sapiens
  misc_RNA (1)...(19): siRNA sense strand
ggagagggaggcuggagaa

SEQ ID NO: 1038688 - RNA, 19 nt, Homo sapiens
  misc_RNA (1)...(19): siRNA sense strand
caucguuucugccuacaug

SEQ ID NO: 1038689 - RNA, 19 nt, Homo sapiens
  misc_RNA (1)...(19): siRNA sense strand
gacaagcugugcuccaucu

SEQ ID NO: 1038690 - RNA, 19 nt, Homo sapiens
  misc_RNA (1)...(19): siRNA sense strand
ccauugcccugcugaagga

SEQ ID NO: 1038691 - RNA, 19 nt, Homo sapiens
  misc_RNA (1)...(19): siRNA sense strand
gagaagggugggcaaguga

SEQ ID NO: 1038692 - RNA, 19 nt, Homo sapiens
  misc_RNA (1)...(19): siRNA sense strand
ggacaaguaccugcucuuc

SEQ ID NO: 1038693 - RNA, 19 nt, Homo sapiens
  misc_RNA (1)...(19): siRNA sense strand
ccagugagcccuacuuugg

SEQ ID NO: 1038694 - RNA, 19 nt, Homo sapiens
  misc_RNA (1)...(19): siRNA sense strand
ccucaaaggcgaugucaug

SEQ ID NO: 1038695 - RNA, 19 nt, Homo sapiens
  misc_RNA (1)...(19): siRNA sense strand
uauguaaggugaccaucga

SEQ ID NO: 1038696 - RNA, 19 nt, Homo sapiens
  misc_RNA (1)...(19): siRNA sense strand
ccuccacgcugaccacaga

SEQ ID NO: 1038697 - RNA, 19 nt, Homo sapiens
  misc_RNA (1)...(19): siRNA sense strand
caccugggauccaccaaau

SEQ ID NO: 1038698 - RNA, 19 nt, Homo sapiens
  misc_RNA (1)...(19): siRNA sense strand
caucgagacugggcccaaa

SEQ ID NO: 1038699 - RNA, 19 nt, Homo sapiens
  misc_RNA (1)...(19): siRNA sense strand
cagggacagucauucauuc

SEQ ID NO: 1038700 - RNA, 19 nt, Homo sapiens
  misc_RNA (1)...(19): siRNA sense strand
gcaccugggauccaccaaa

SEQ ID NO: 1038701 - RNA, 19 nt, Homo sapiens
  misc_RNA (1)...(19): siRNA sense strand
ugaccucaguggagacaga

SEQ ID NO: 1038702 - RNA, 19 nt, Homo sapiens
  misc_RNA (1)...(19): siRNA sense strand
gcccagagcaggcaucauc

SEQ ID NO: 1038703 - RNA, 19 nt, Homo sapiens
  misc_RNA (1)...(19): siRNA sense strand
acccugcccuggugacaua

SEQ ID NO: 1038704 - RNA, 19 nt, Homo sapiens
  misc_RNA (1)...(19): siRNA sense strand
cgauauaucagcuacuuca

SEQ ID NO: 1038705 - RNA, 19 nt, Homo sapiens
  misc_RNA (1)...(19): siRNA sense strand
gaaauucugcgaggacaag

SEQ ID NO: 1038706 - RNA, 19 nt, Homo sapiens
  misc_RNA (1)...(19): siRNA sense strand
gggaccaccuccaagaucu

SEQ ID NO: 1038707 - RNA, 19 nt, Homo sapiens
  misc_RNA (1)...(19): siRNA sense strand
ccaaaggggugaagaucaa

SEQ ID NO: 1038708 - RNA, 19 nt, Homo sapiens
  misc_RNA (1)...(19): siRNA sense strand
cauccaaguucugguacaa

SEQ ID NO: 1038709 - RNA, 19 nt, Homo sapiens
  misc_RNA (1)...(19): siRNA sense strand
uacaugcacuacagcaaga

SEQ ID NO: 1038710 - RNA, 19 nt, Homo sapiens
  misc_RNA (1)...(19): siRNA sense strand
caccagcuguuguccacuu

SEQ ID NO: 1038711 - RNA, 19 nt, Homo sapiens
  misc_RNA (1)...(19): siRNA sense strand
ucuggagucuaucacauug

SEQ ID NO: 1038712 - RNA, 19 nt, Homo sapiens
  misc_RNA (1)...(19): siRNA sense strand
caagguggccacagaacug

SEQ ID NO: 1038713 - RNA, 19 nt, Homo sapiens
  misc_RNA (1)...(19): siRNA sense strand
gcacuggccacucuuacca

SEQ ID NO: 1038714 - RNA, 19 nt, Homo sapiens
  misc_RNA (1)...(19): siRNA sense strand
ccagugcccaccaacauga

SEQ ID NO: 1038715 - RNA, 19 nt, Homo sapiens
  misc_RNA (1)...(19): siRNA sense strand
ucagggacagucauucauu

SEQ ID NO: 1038716 - RNA, 19 nt, Homo sapiens
  misc_RNA (1)...(19): siRNA sense strand
cagcuugucuacacaucug

SEQ ID NO: 1038717 - RNA, 19 nt, Homo sapiens
  misc_RNA (1)...(19): siRNA sense strand
gucgauauaucagcuacuu

SEQ ID NO: 1038718 - RNA, 19 nt, Homo sapiens
  misc_RNA (1)...(19): siRNA sense strand
cuacuucagugggcugcua

SEQ ID NO: 1038719 - RNA, 19 nt, Homo sapiens
  misc_RNA (1)...(19): siRNA sense strand
ugacggacaaccaaaggaa

SEQ ID NO: 1038720 - RNA, 19 nt, Homo sapiens
  misc_RNA (1)...(19): siRNA sense strand
gccaaagcaaugucaaguu

SEQ ID NO: 1038721 - RNA, 19 nt, Homo sapiens
  misc_RNA (1)...(19): siRNA sense strand
gcagugcuucgucagaguu

SEQ ID NO: 1038722 - RNA, 19 nt, Homo sapiens
  misc_RNA (1)...(19): siRNA sense strand
cacgagggcugcuccuaca

SEQ ID NO: 1038723 - RNA, 19 nt, Homo sapiens
  misc_RNA (1)...(19): siRNA sense strand
caucuggagucuaucacau

SEQ ID NO: 1038724 - RNA, 19 nt, Homo sapiens
  misc_RNA (1)...(19): siRNA sense strand
gacaaguaccugcucuuca

SEQ ID NO: 1038725 - RNA, 19 nt, Homo sapiens
  misc_RNA (1)...(19): siRNA sense strand
gcagcgugcucuacuugac

SEQ ID NO: 1038726 - RNA, 19 nt, Homo sapiens
  misc_RNA (1)...(19): siRNA sense strand
gagaagguuuuccggaaga

SEQ ID NO: 1038727 - RNA, 19 nt, Homo sapiens
  misc_RNA (1)...(19): siRNA sense strand
ccaugcagcuugucuacac

SEQ ID NO: 1038728 - RNA, 19 nt, Homo sapiens
  misc_RNA (1)...(19): siRNA sense strand
ucuucaaccuuucagagaa

SEQ ID NO: 1038729 - RNA, 19 nt, Homo sapiens
  misc_RNA (1)...(19): siRNA sense strand
gcuuccagcccuuccuuaa

SEQ ID NO: 1038730 - RNA, 19 nt, Homo sapiens
  misc_RNA (1)...(19): siRNA sense strand
gaccaccuccaagaucuuu

SEQ ID NO: 1038731 - RNA, 19 nt, Homo sapiens
  misc_RNA (1)...(19): siRNA sense strand
gguccgccauuuccucauc

SEQ ID NO: 1038732 - RNA, 19 nt, Homo sapiens
  misc_RNA (1)...(19): siRNA sense strand
ucaaguuuguccaggauac

SEQ ID NO: 1038733 - RNA, 19 nt, Homo sapiens
  misc_RNA (1)...(19): siRNA sense strand
cacaagagagccaaagcaa

SEQ ID NO: 1038734 - RNA, 19 nt, Homo sapiens
  misc_RNA (1)...(19): siRNA sense strand
ugacuggccucaggaaagg

SEQ ID NO: 1038735 - RNA, 19 nt, Homo sapiens
  misc_RNA (1)...(19): siRNA sense strand
ggaggagcaguucccaguu

SEQ ID NO: 1038736 - RNA, 19 nt, Homo sapiens
  misc_RNA (1)...(19): siRNA sense strand
cagaaaaugugaagcaaag

SEQ ID NO: 1038737 - RNA, 19 nt, Homo sapiens
  misc_RNA (1)...(19): siRNA sense strand
aggacaagguggccacaga

SEQ ID NO: 1038738 - RNA, 19 nt, Homo sapiens
  misc_RNA (1)...(19): siRNA sense strand
auacauccaaguucuggua

SEQ ID NO: 1038739 - RNA, 19 nt, Homo sapiens
  misc_RNA (1)...(19): siRNA sense strand
gcgagacggccauccuaga

SEQ ID NO: 1038740 - RNA, 19 nt, Homo sapiens
  misc_RNA (1)...(19): siRNA sense strand
gacgggaccaccuccaaga

SEQ ID NO: 1038741 - RNA, 19 nt, Homo sapiens
  misc_RNA (1)...(19): siRNA sense strand
cgagacggccauccuagau

SEQ ID NO: 1038742 - RNA, 19 nt, Homo sapiens
  misc_RNA (1)...(19): siRNA sense strand
cccaugugcugcaauccaa

SEQ ID NO: 1038743 - RNA, 19 nt, Homo sapiens
  misc_RNA (1)...(19): siRNA sense strand
cagcuguuguccacuucaa

SEQ ID NO: 1038744 - RNA, 19 nt, Homo sapiens
  misc_RNA (1)...(19): siRNA sense strand
cccagagccuccuacacaa

SEQ ID NO: 1038745 - RNA, 19 nt, Homo sapiens
  misc_RNA (1)...(19): siRNA sense strand
acgaagagcagcccacugu

SEQ ID NO: 1038746 - RNA, 19 nt, Homo sapiens
  misc_RNA (1)...(19): siRNA sense strand
cuucaucaccaaaguucua

SEQ ID NO: 1038747 - RNA, 19 nt, Homo sapiens
  misc_RNA (1)...(19): siRNA sense strand
ucaccuucaucaccaaagu

SEQ ID NO: 1038748 - RNA, 19 nt, Homo sapiens
  misc_RNA (1)...(19): siRNA sense strand
ccucaagaccggagaugga

SEQ ID NO: 1038749 - RNA, 19 nt, Homo sapiens
  misc_RNA (1)...(19): siRNA sense strand
cagagccuccuacacaaga

SEQ ID NO: 1038750 - RNA, 19 nt, Homo sapiens
  misc_RNA (1)...(19): siRNA sense strand
gcucaccuacaccugcuuu

SEQ ID NO: 1038751 - RNA, 19 nt, Homo sapiens
  misc_RNA (1)...(19): siRNA sense strand
ggccucagcaggaccuuug

SEQ ID NO: 1038752 - RNA, 19 nt, Homo sapiens
  misc_RNA (1)...(19): siRNA sense strand
ggagagggcagaggguauc

SEQ ID NO: 1038753 - RNA, 19 nt, Homo sapiens
  misc_RNA (1)...(19): siRNA sense strand
gcugugcuccaucugcaaa

SEQ ID NO: 1038754 - RNA, 19 nt, Homo sapiens
  misc_RNA (1)...(19): siRNA sense strand
gccauugucaccuucauca

SEQ ID NO: 1038755 - RNA, 19 nt, Homo sapiens
  misc_RNA (1)...(19): siRNA sense strand
caaagcagcgcagcacucu

SEQ ID NO: 1038756 - RNA, 19 nt, Homo sapiens
  misc_RNA (1)...(19): siRNA sense strand
gcugggacuccuaugagaa

SEQ ID NO: 1038757 - RNA, 19 nt, Homo sapiens
  misc_RNA (1)...(19): siRNA sense strand
ccuccagucugugcaguau

SEQ ID NO: 1038758 - RNA, 19 nt, Homo sapiens
  misc_RNA (1)...(19): siRNA sense strand
ggaaauucugcgaggacaa

SEQ ID NO: 1038759 - RNA, 19 nt, Homo sapiens
  misc_RNA (1)...(19): siRNA sense strand
ccacgggcuggcuccauuu

SEQ ID NO: 1038760 - RNA, 19 nt, Homo sapiens
  misc_RNA (1)...(19): siRNA sense strand
gcgcauucccagcaaagau

SEQ ID NO: 1038761 - RNA, 19 nt, Homo sapiens
  misc_RNA (1)...(19): siRNA sense strand
uccagucugugcaguaugu

SEQ ID NO: 1038762 - RNA, 19 nt, Homo sapiens
  misc_RNA (1)...(19): siRNA sense strand
ggauccaccaaaucucuga

SEQ ID NO: 1038763 - RNA, 19 nt, Homo sapiens
  misc_RNA (1)...(19): siRNA sense strand
gaagaaaccuccagucugu

SEQ ID NO: 1038764 - RNA, 19 nt, Homo sapiens
  misc_RNA (1)...(19): siRNA sense strand
caaaggcgaugucauggua

SEQ ID NO: 1038765 - RNA, 19 nt, Homo sapiens
  misc_RNA (1)...(19): siRNA sense strand
ccaaagcaaugucaaguuu

SEQ ID NO: 1038766 - RNA, 19 nt, Homo sapiens
  misc_RNA (1)...(19): siRNA sense strand
gaggagcaguucccaguua

SEQ ID NO: 1038767 - RNA, 19 nt, Homo sapiens
  misc_RNA (1)...(19): siRNA sense strand
gcaaagauccucuggaaga

SEQ ID NO: 1038768 - RNA, 19 nt, Homo sapiens
  misc_RNA (1)...(19): siRNA sense strand
gaaugugugucaccucuuu

SEQ ID NO: 1038769 - RNA, 19 nt, Homo sapiens
  misc_RNA (1)...(19): siRNA sense strand
cagcaaagauccucuggaa

SEQ ID NO: 1038770 - RNA, 19 nt, Homo sapiens
  misc_RNA (1)...(19): siRNA sense strand
cuacacaucuggagucuau

SEQ ID NO: 1038771 - RNA, 19 nt, Homo sapiens
  misc_RNA (1)...(19): siRNA sense strand
caagagagccaaagcaaug

SEQ ID NO: 1038772 - RNA, 19 nt, Homo sapiens
  misc_RNA (1)...(19): siRNA sense strand
ggacagucauucauuccaa

SEQ ID NO: 1038773 - RNA, 19 nt, Homo sapiens
  misc_RNA (1)...(19): siRNA sense strand
gaacagcagcccucucuuc

SEQ ID NO: 1038774 - RNA, 19 nt, Homo sapiens
  misc_RNA (1)...(19): siRNA sense strand
acaaguaccugcucuucaa

SEQ ID NO: 1038775 - RNA, 19 nt, Homo sapiens
  misc_RNA (1)...(19): siRNA sense strand
gcauuacacugacggacaa

SEQ ID NO: 1038776 - RNA, 19 nt, Homo sapiens
  misc_RNA (1)...(19): siRNA sense strand
ggagaagggugggcaagug

SEQ ID NO: 1038777 - RNA, 19 nt, Homo sapiens
  misc_RNA (1)...(19): siRNA sense strand
gaacagcugguccgccauu

SEQ ID NO: 1038778 - RNA, 19 nt, Homo sapiens
  misc_RNA (1)...(19): siRNA sense strand
gacgaggccuggacugaug

SEQ ID NO: 1038779 - RNA, 19 nt, Homo sapiens
  misc_RNA (1)...(19): siRNA sense strand
ccaagcaccgggacaagua

SEQ ID NO: 1038780 - RNA, 19 nt, Homo sapiens
  misc_RNA (1)...(19): siRNA sense strand
uaccugcucuucaaccuuu

SEQ ID NO: 1038781 - RNA, 19 nt, Homo sapiens
  misc_RNA (1)...(19): siRNA sense strand
aaagcaaugucaaguuugu

SEQ ID NO: 1038782 - RNA, 19 nt, Homo sapiens
  misc_RNA (1)...(19): siRNA sense strand
ggacaagguggccacagaa

SEQ ID NO: 1038783 - RNA, 19 nt, Homo sapiens
  misc_RNA (1)...(19): siRNA sense strand
gaucagggacagucauuca

SEQ ID NO: 1038784 - RNA, 19 nt, Homo sapiens
  misc_RNA (1)...(19): siRNA sense strand
ggacuccuaugagaacuuc

SEQ ID NO: 1038785 - RNA, 19 nt, Homo sapiens
  misc_RNA (1)...(19): siRNA sense strand
ccucagagcucaccuacac

SEQ ID NO: 1038786 - RNA, 19 nt, Homo sapiens
  misc_RNA (1)...(19): siRNA sense strand
gcacguggucguacuauac

SEQ ID NO: 1038787 - RNA, 19 nt, Homo sapiens
  misc_RNA (1)...(19): siRNA sense strand
ggagagggaggcuggagaa

SEQ ID NO: 1038788 - RNA, 19 nt, Homo sapiens
  misc_RNA (1)...(19): siRNA sense strand
caucguuucugccuacaug

SEQ ID NO: 1038789 - RNA, 19 nt, Homo sapiens
  misc_RNA (1)...(19): siRNA sense strand
gacaagcugugcuccaucu

SEQ ID NO: 1038790 - RNA, 19 nt, Homo sapiens
  misc_RNA (1)...(19): siRNA sense strand
ccauugcccugcugaagga

SEQ ID NO: 1038791 - RNA, 19 nt, Homo sapiens
  misc_RNA (1)...(19): siRNA sense strand
gagaagggugggcaaguga

SEQ ID NO: 1038792 - RNA, 19 nt, Homo sapiens
  misc_RNA (1)...(19): siRNA sense strand
ggacaaguaccugcucuuc

SEQ ID NO: 1038793 - RNA, 19 nt, Homo sapiens
  misc_RNA (1)...(19): siRNA sense strand
ccagugagcccuacuuugg

SEQ ID NO: 1038794 - RNA, 19 nt, Homo sapiens
  misc_RNA (1)...(19): siRNA sense strand
ccucaaaggcgaugucaug

SEQ ID NO: 1038795 - RNA, 19 nt, Homo sapiens
  misc_RNA (1)...(19): siRNA sense strand
uauguaaggugaccaucga

SEQ ID NO: 1038796 - RNA, 19 nt, Homo sapiens
  misc_RNA (1)...(19): siRNA sense strand
ccuccacgcugaccacaga

SEQ ID NO: 1038797 - RNA, 19 nt, Homo sapiens
  misc_RNA (1)...(19): siRNA sense strand
caccugggauccaccaaau

SEQ ID NO: 1038798 - RNA, 19 nt, Homo sapiens
  misc_RNA (1)...(19): siRNA sense strand
caucgagacugggcccaaa

SEQ ID NO: 1038799 - RNA, 19 nt, Homo sapiens
  misc_RNA (1)...(19): siRNA sense strand
cagggacagucauucauuc

SEQ ID NO: 1038800 - RNA, 19 nt, Homo sapiens
  misc_RNA (1)...(19): siRNA sense strand
gcaccugggauccaccaaa

SEQ ID NO: 1038801 - RNA, 19 nt, Homo sapiens
  misc_RNA (1)...(19): siRNA sense strand
ugaccucaguggagacaga

SEQ ID NO: 1038802 - RNA, 19 nt, Homo sapiens
  misc_RNA (1)...(19): siRNA sense strand
gcccagagcaggcaucauc

SEQ ID NO: 1038803 - RNA, 19 nt, Homo sapiens
  misc_RNA (1)...(19): siRNA sense strand
acccugcccuggugacaua

SEQ ID NO: 1038804 - RNA, 19 nt, Homo sapiens
  misc_RNA (1)...(19): siRNA sense strand
cgauauaucagcuacuuca

SEQ ID NO: 1038805 - RNA, 19 nt, Homo sapiens
  misc_RNA (1)...(19): siRNA sense strand
gaaauucugcgaggacaag

SEQ ID NO: 1038806 - RNA, 19 nt, Homo sapiens
  misc_RNA (1)...(19): siRNA sense strand
gggaccaccuccaagaucu

SEQ ID NO: 1038807 - RNA, 19 nt, Homo sapiens
  misc_RNA (1)...(19): siRNA sense strand
ccaaaggggugaagaucaa

SEQ ID NO: 1038808 - RNA, 19 nt, Homo sapiens
  misc_RNA (1)...(19): siRNA sense strand
cauccaaguucugguacaa

SEQ ID NO: 1038809 - RNA, 19 nt, Homo sapiens
  misc_RNA (1)...(19): siRNA sense strand
uacaugcacuacagcaaga

SEQ ID NO: 1038810 - RNA, 19 nt, Homo sapiens
  misc_RNA (1)...(19): siRNA sense strand
caccagcuguuguccacuu

SEQ ID NO: 1038811 - RNA, 19 nt, Homo sapiens
  misc_RNA (1)...(19): siRNA sense strand
ucuggagucuaucacauug

SEQ ID NO: 1038812 - RNA, 19 nt, Homo sapiens
  misc_RNA (1)...(19): siRNA sense strand
caagguggccacagaacug

SEQ ID NO: 1038813 - RNA, 19 nt, Homo sapiens
  misc_RNA (1)...(19): siRNA sense strand
gcacuggccacucuuacca

SEQ ID NO: 1038814 - RNA, 19 nt, Homo sapiens
  misc_RNA (1)...(19): siRNA sense strand
ccagugcccaccaacauga

SEQ ID NO: 1038815 - RNA, 19 nt, Homo sapiens
  misc_RNA (1)...(19): siRNA sense strand
ucagggacagucauucauu

SEQ ID NO: 1038816 - RNA, 19 nt, Homo sapiens
  misc_RNA (1)...(19): siRNA sense strand
cagcuugucuacacaucug

SEQ ID NO: 1038817 - RNA, 19 nt, Homo sapiens
  misc_RNA (1)...(19): siRNA sense strand
gucgauauaucagcuacuu

SEQ ID NO: 1038818 - RNA, 19 nt, Homo sapiens
  misc_RNA (1)...(19): siRNA sense strand
cuacuucagugggcugcua

SEQ ID NO: 1038819 - RNA, 19 nt, Homo sapiens
  misc_RNA (1)...(19): siRNA sense strand
ugacggacaaccaaaggaa

SEQ ID NO: 1038820 - RNA, 19 nt, Homo sapiens
  misc_RNA (1)...(19): siRNA sense strand
gccaaagcaaugucaaguu

SEQ ID NO: 1038821 - RNA, 19 nt, Homo sapiens
  misc_RNA (1)...(19): siRNA sense strand
gcagugcuucgucagaguu

SEQ ID NO: 1038822 - RNA, 19 nt, Homo sapiens
  misc_RNA (1)...(19): siRNA sense strand
cacgagggcugcuccuaca

SEQ ID NO: 1038823 - RNA, 19 nt, Homo sapiens
  misc_RNA (1)...(19): siRNA sense strand
caucuggagucuaucacau

SEQ ID NO: 1038824 - RNA, 19 nt, Homo sapiens
  misc_RNA (1)...(19): siRNA sense strand
gacaaguaccugcucuuca

SEQ ID NO: 1038825 - RNA, 19 nt, Homo sapiens
  misc_RNA (1)...(19): siRNA sense strand
gcagcgugcucuacuugac

SEQ ID NO: 1038826 - RNA, 19 nt, Homo sapiens
  misc_RNA (1)...(19): siRNA sense strand
gagaagguuuuccggaaga

SEQ ID NO: 1038827 - RNA, 19 nt, Homo sapiens
  misc_RNA (1)...(19): siRNA sense strand
ccaugcagcuugucuacac

SEQ ID NO: 1038828 - RNA, 19 nt, Homo sapiens
  misc_RNA (1)...(19): siRNA sense strand
ucuucaaccuuucagagaa

SEQ ID NO: 1038829 - RNA, 19 nt, Homo sapiens
  misc_RNA (1)...(19): siRNA sense strand
gcuuccagcccuuccuuaa

SEQ ID NO: 1038830 - RNA, 19 nt, Homo sapiens
  misc_RNA (1)...(19): siRNA sense strand
gaccaccuccaagaucuuu

SEQ ID NO: 1038831 - RNA, 19 nt, Homo sapiens
  misc_RNA (1)...(19): siRNA sense strand
gguccgccauuuccucauc

SEQ ID NO: 1038832 - RNA, 19 nt, Homo sapiens
  misc_RNA (1)...(19): siRNA sense strand
ucaaguuuguccaggauac

SEQ ID NO: 1038833 - RNA, 19 nt, Homo sapiens
  misc_RNA (1)...(19): siRNA sense strand
cacaagagagccaaagcaa

SEQ ID NO: 1038834 - RNA, 19 nt, Homo sapiens
  misc_RNA (1)...(19): siRNA sense strand
ugacuggccucaggaaagg

SEQ ID NO: 1038835 - RNA, 19 nt, Homo sapiens
  misc_RNA (1)...(19): siRNA sense strand
ggaggagcaguucccaguu

SEQ ID NO: 1038836 - RNA, 19 nt, Homo sapiens
  misc_RNA (1)...(19): siRNA sense strand
cagaaaaugugaagcaaag

SEQ ID NO: 1038837 - RNA, 19 nt, Homo sapiens
  misc_RNA (1)...(19): siRNA sense strand
aggacaagguggccacaga

SEQ ID NO: 1038838 - RNA, 19 nt, Homo sapiens
  misc_RNA (1)...(19): siRNA sense strand
auacauccaaguucuggua

SEQ ID NO: 1038839 - RNA, 19 nt, Homo sapiens
  misc_RNA (1)...(19): siRNA sense strand
gcgagacggccauccuaga

SEQ ID NO: 1038840 - RNA, 19 nt, Homo sapiens
  misc_RNA (1)...(19): siRNA sense strand
gacgggaccaccuccaaga

SEQ ID NO: 1038841 - RNA, 19 nt, Homo sapiens
  misc_RNA (1)...(19): siRNA sense strand
cgagacggccauccuagau

SEQ ID NO: 1038842 - RNA, 19 nt, Homo sapiens
  misc_RNA (1)...(19): siRNA sense strand
cccaugugcugcaauccaa

SEQ ID NO: 1038843 - RNA, 19 nt, Homo sapiens
  misc_RNA (1)...(19): siRNA sense strand
cagcuguuguccacuucaa

SEQ ID NO: 1038844 - RNA, 19 nt, Homo sapiens
  misc_RNA (1)...(19): siRNA sense strand
cccagagccuccuacacaa

SEQ ID NO: 1038845 - RNA, 19 nt, Homo sapiens
  misc_RNA (1)...(19): siRNA sense strand
acgaagagcagcccacugu

SEQ ID NO: 1038846 - RNA, 19 nt, Homo sapiens
  misc_RNA (1)...(19): siRNA sense strand
cuucaucaccaaaguucua

SEQ ID NO: 1038847 - RNA, 19 nt, Homo sapiens
  misc_RNA (1)...(19): siRNA sense strand
ucaccuucaucaccaaagu

SEQ ID NO: 1038848 - RNA, 19 nt, Homo sapiens
  misc_RNA (1)...(19): siRNA sense strand
ccucaagaccggagaugga

SEQ ID NO: 1038849 - RNA, 19 nt, Homo sapiens
  misc_RNA (1)...(19): siRNA sense strand
cagagccuccuacacaaga

SEQ ID NO: 1038850 - RNA, 19 nt, Homo sapiens
  misc_RNA (1)...(19): siRNA sense strand
gcucaccuacaccugcuuu

SEQ ID NO: 1038851 - RNA, 19 nt, Homo sapiens
  misc_RNA (1)...(19): siRNA sense strand
ggccucagcaggaccuuug

SEQ ID NO: 1038852 - RNA, 19 nt, Homo sapiens
  misc_RNA (1)...(19): siRNA sense strand
ggagagggcagaggguauc

SEQ ID NO: 1038853 - RNA, 19 nt, Homo sapiens
  misc_RNA (1)...(19): siRNA sense strand
gcugugcuccaucugcaaa

SEQ ID NO: 1038854 - RNA, 19 nt, Homo sapiens
  misc_RNA (1)...(19): siRNA sense strand
gccauugucaccuucauca

SEQ ID NO: 1038855 - RNA, 19 nt, Homo sapiens
  misc_RNA (1)...(19): siRNA sense strand
caaagcagcgcagcacucu

SEQ ID NO: 1038856 - RNA, 19 nt, Homo sapiens
  misc_RNA (1)...(19): siRNA sense strand
gcugggacuccuaugagaa

SEQ ID NO: 1038857 - RNA, 19 nt, Homo sapiens
  misc_RNA (1)...(19): siRNA sense strand
ccuccagucugugcaguau

SEQ ID NO: 1038858 - RNA, 19 nt, Homo sapiens
  misc_RNA (1)...(19): siRNA sense strand
ggaaauucugcgaggacaa

SEQ ID NO: 1038859 - RNA, 19 nt, Homo sapiens
  misc_RNA (1)...(19): siRNA sense strand
ccacgggcuggcuccauuu

SEQ ID NO: 1038860 - RNA, 19 nt, Homo sapiens
  misc_RNA (1)...(19): siRNA sense strand
gcgcauucccagcaaagau

SEQ ID NO: 1038861 - RNA, 19 nt, Homo sapiens
  misc_RNA (1)...(19): siRNA sense strand
uccagucugugcaguaugu

SEQ ID NO: 1038862 - RNA, 19 nt, Homo sapiens
  misc_RNA (1)...(19): siRNA sense strand
ggauccaccaaaucucuga

SEQ ID NO: 1038863 - RNA, 19 nt, Homo sapiens
  misc_RNA (1)...(19): siRNA sense strand
caaaggcgaugucauggua

SEQ ID NO: 1038864 - RNA, 19 nt, Homo sapiens
  misc_RNA (1)...(19): siRNA sense strand
ccaaagcaaugucaaguuu

SEQ ID NO: 1038865 - RNA, 19 nt, Homo sapiens
  misc_RNA (1)...(19): siRNA sense strand
gaggagcaguucccaguua

SEQ ID NO: 1038866 - RNA, 19 nt, Homo sapiens
  misc_RNA (1)...(19): siRNA sense strand
gcaaagauccucuggaaga

SEQ ID NO: 1038867 - RNA, 19 nt, Homo sapiens
  misc_RNA (1)...(19): siRNA sense strand
gaaugugugucaccucuuu

SEQ ID NO: 1038868 - RNA, 19 nt, Homo sapiens
  misc_RNA (1)...(19): siRNA sense strand
cagcaaagauccucuggaa

SEQ ID NO: 1038869 - RNA, 19 nt, Homo sapiens
  misc_RNA (1)...(19): siRNA sense strand
cuacacaucuggagucuau

SEQ ID NO: 1038870 - RNA, 19 nt, Homo sapiens
  misc_RNA (1)...(19): siRNA sense strand
caagagagccaaagcaaug

SEQ ID NO: 1038871 - RNA, 19 nt, Homo sapiens
  misc_RNA (1)...(19): siRNA sense strand
ggacagucauucauuccaa

SEQ ID NO: 1038872 - RNA, 19 nt, Homo sapiens
  misc_RNA (1)...(19): siRNA sense strand
gaacagcagcccucucuuc

SEQ ID NO: 1038873 - RNA, 19 nt, Homo sapiens
  misc_RNA (1)...(19): siRNA sense strand
acaaguaccugcucuucaa

SEQ ID NO: 1038874 - RNA, 19 nt, Homo sapiens
  misc_RNA (1)...(19): siRNA sense strand
gcauuacacugacggacaa

SEQ ID NO: 1038875 - RNA, 19 nt, Homo sapiens
  misc_RNA (1)...(19): siRNA sense strand
ggagaagggugggcaagug

SEQ ID NO: 1038876 - RNA, 19 nt, Homo sapiens
  misc_RNA (1)...(19): siRNA sense strand
gaacagcugguccgccauu

SEQ ID NO: 1038877 - RNA, 19 nt, Homo sapiens
  misc_RNA (1)...(19): siRNA sense strand
gacgaggccuggacugaug

SEQ ID NO: 1038878 - RNA, 19 nt, Homo sapiens
  misc_RNA (1)...(19): siRNA sense strand
ccaagcaccgggacaagua

SEQ ID NO: 1038879 - RNA, 19 nt, Homo sapiens
  misc_RNA (1)...(19): siRNA sense strand
uaccugcucuucaaccuuu

SEQ ID NO: 1038880 - RNA, 19 nt, Homo sapiens
  misc_RNA (1)...(19): siRNA sense strand
aaagcaaugucaaguuugu

SEQ ID NO: 1038881 - RNA, 19 nt, Homo sapiens
  misc_RNA (1)...(19): siRNA sense strand
ggacaagguggccacagaa

SEQ ID NO: 1038882 - RNA, 19 nt, Homo sapiens
  misc_RNA (1)...(19): siRNA sense strand
gaucagggacagucauuca

SEQ ID NO: 1038883 - RNA, 19 nt, Homo sapiens
  misc_RNA (1)...(19): siRNA sense strand
ggacuccuaugagaacuuc

SEQ ID NO: 1038884 - RNA, 19 nt, Homo sapiens
  misc_RNA (1)...(19): siRNA sense strand
ccucagagcucaccuacac

SEQ ID NO: 1038885 - RNA, 19 nt, Homo sapiens
  misc_RNA (1)...(19): siRNA sense strand
gcacguggucguacuauac

SEQ ID NO: 1038886 - RNA, 19 nt, Homo sapiens
  misc_RNA (1)...(19): siRNA sense strand
ggagagggaggcuggagaa

SEQ ID NO: 1038887 - RNA, 19 nt, Homo sapiens
  misc_RNA (1)...(19): siRNA sense strand
caucguuucugccuacaug

SEQ ID NO: 1038888 - RNA, 19 nt, Homo sapiens
  misc_RNA (1)...(19): siRNA sense strand
gacaagcugugcuccaucu

SEQ ID NO: 1038889 - RNA, 19 nt, Homo sapiens
  misc_RNA (1)...(19): siRNA sense strand
ccauugcccugcugaagga

SEQ ID NO: 1038890 - RNA, 19 nt, Homo sapiens
  misc_RNA (1)...(19): siRNA sense strand
gagaagggugggcaaguga

SEQ ID NO: 1038891 - RNA, 19 nt, Homo sapiens
  misc_RNA (1)...(19): siRNA sense strand
ccucaaaggcgaugucaug

SEQ ID NO: 1038892 - RNA, 19 nt, Homo sapiens
  misc_RNA (1)...(19): siRNA sense strand
ccagugagcccuacuuugg

SEQ ID NO: 1038893 - RNA, 19 nt, Homo sapiens
  misc_RNA (1)...(19): siRNA sense strand
ggacaaguaccugcucuuc

SEQ ID NO: 1038894 - RNA, 19 nt, Homo sapiens
  misc_RNA (1)...(19): siRNA sense strand
ccuccacgcugaccacaga

SEQ ID NO: 1038895 - RNA, 19 nt, Homo sapiens
  misc_RNA (1)...(19): siRNA sense strand
cagggacagucauucauuc

SEQ ID NO: 1038896 - RNA, 19 nt, Homo sapiens
  misc_RNA (1)...(19): siRNA sense strand
caucgagacugggcccaaa

SEQ ID NO: 1038897 - RNA, 19 nt, Homo sapiens
  misc_RNA (1)...(19): siRNA sense strand
cgauauaucagcuacuuca

SEQ ID NO: 1038898 - RNA, 19 nt, Homo sapiens
  misc_RNA (1)...(19): siRNA sense strand
ugaccucaguggagacaga

SEQ ID NO: 1038899 - RNA, 19 nt, Homo sapiens
  misc_RNA (1)...(19): siRNA sense strand
gcccagagcaggcaucauc

SEQ ID NO: 1038900 - RNA, 19 nt, Homo sapiens
  misc_RNA (1)...(19): siRNA sense strand
acccugcccuggugacaua

SEQ ID NO: 1038901 - RNA, 19 nt, Homo sapiens
  misc_RNA (1)...(19): siRNA sense strand
gaaauucugcgaggacaag

SEQ ID NO: 1038902 - RNA, 19 nt, Homo sapiens
  misc_RNA (1)...(19): siRNA sense strand
gggaccaccuccaagaucu

SEQ ID NO: 1038903 - RNA, 19 nt, Homo sapiens
  misc_RNA (1)...(19): siRNA sense strand
ccaaaggggugaagaucaa

SEQ ID NO: 1038904 - RNA, 19 nt, Homo sapiens
  misc_RNA (1)...(19): siRNA sense strand
cauccaaguucugguacaa

SEQ ID NO: 1038905 - RNA, 19 nt, Homo sapiens
  misc_RNA (1)...(19): siRNA sense strand
uacaugcacuacagcaaga

SEQ ID NO: 1038906 - RNA, 19 nt, Homo sapiens
  misc_RNA (1)...(19): siRNA sense strand
caccagcuguuguccacuu

SEQ ID NO: 1038907 - RNA, 19 nt, Homo sapiens
  misc_RNA (1)...(19): siRNA sense strand
ucuggagucuaucacauug

SEQ ID NO: 1038908 - RNA, 19 nt, Homo sapiens
  misc_RNA (1)...(19): siRNA sense strand
caagguggccacagaacug

SEQ ID NO: 1038909 - RNA, 19 nt, Homo sapiens
  misc_RNA (1)...(19): siRNA sense strand
gcacuggccacucuuacca

SEQ ID NO: 1038910 - RNA, 19 nt, Homo sapiens
  misc_RNA (1)...(19): siRNA sense strand
ccagugcccaccaacauga

SEQ ID NO: 1038911 - RNA, 19 nt, Homo sapiens
  misc_RNA (1)...(19): siRNA sense strand
ucagggacagucauucauu

SEQ ID NO: 1038912 - RNA, 19 nt, Homo sapiens
  misc_RNA (1)...(19): siRNA sense strand
cagcuugucuacacaucug

SEQ ID NO: 1038913 - RNA, 19 nt, Homo sapiens
  misc_RNA (1)...(19): siRNA sense strand
gucgauauaucagcuacuu

SEQ ID NO: 1038914 - RNA, 19 nt, Homo sapiens
  misc_RNA (1)...(19): siRNA sense strand
cuacuucagugggcugcua

SEQ ID NO: 1038915 - RNA, 19 nt, Homo sapiens
  misc_RNA (1)...(19): siRNA sense strand
ugacggacaaccaaaggaa

SEQ ID NO: 1038916 - RNA, 19 nt, Homo sapiens
  misc_RNA (1)...(19): siRNA sense strand
gccaaagcaaugucaaguu

SEQ ID NO: 1038917 - RNA, 19 nt, Homo sapiens
  misc_RNA (1)...(19): siRNA sense strand
gcagugcuucgucagaguu

SEQ ID NO: 1038918 - RNA, 19 nt, Homo sapiens
  misc_RNA (1)...(19): siRNA sense strand
cacgagggcugcuccuaca

SEQ ID NO: 1038919 - RNA, 19 nt, Homo sapiens
  misc_RNA (1)...(19): siRNA sense strand
caucuggagucuaucacau

SEQ ID NO: 1038920 - RNA, 19 nt, Homo sapiens
  misc_RNA (1)...(19): siRNA sense strand
ccaugcagcuugucuacac

SEQ ID NO: 1038921 - RNA, 19 nt, Homo sapiens
  misc_RNA (1)...(19): siRNA sense strand
gcagcgugcucuacuugac

SEQ ID NO: 1038922 - RNA, 19 nt, Homo sapiens
  misc_RNA (1)...(19): siRNA sense strand
ucuucaaccuuucagagaa

SEQ ID NO: 1038923 - RNA, 19 nt, Homo sapiens
  misc_RNA (1)...(19): siRNA sense strand
gacaaguaccugcucuuca

SEQ ID NO: 1038924 - RNA, 19 nt, Homo sapiens
  misc_RNA (1)...(19): siRNA sense strand
gcuuccagcccuuccuuaa

SEQ ID NO: 1038925 - RNA, 19 nt, Homo sapiens
  misc_RNA (1)...(19): siRNA sense strand
gaccaccuccaagaucuuu

SEQ ID NO: 1038926 - RNA, 19 nt, Homo sapiens
  misc_RNA (1)...(19): siRNA sense strand
gguccgccauuuccucauc

SEQ ID NO: 1038927 - RNA, 19 nt, Homo sapiens
  misc_RNA (1)...(19): siRNA sense strand
ucaaguuuguccaggauac

SEQ ID NO: 1038928 - RNA, 19 nt, Homo sapiens
  misc_RNA (1)...(19): siRNA sense strand
cacaagagagccaaagcaa

SEQ ID NO: 1038929 - RNA, 19 nt, Homo sapiens
  misc_RNA (1)...(19): siRNA sense strand
ugacuggccucaggaaagg

SEQ ID NO: 1038930 - RNA, 19 nt, Homo sapiens
  misc_RNA (1)...(19): siRNA sense strand
ggaggagcaguucccaguu

SEQ ID NO: 1038931 - RNA, 19 nt, Homo sapiens
  misc_RNA (1)...(19): siRNA sense strand
aggacaagguggccacaga

SEQ ID NO: 1038932 - RNA, 19 nt, Homo sapiens
  misc_RNA (1)...(19): siRNA sense strand
auacauccaaguucuggua

SEQ ID NO: 1038933 - RNA, 19 nt, Homo sapiens
  misc_RNA (1)...(19): siRNA sense strand
gcgagacggccauccuaga

SEQ ID NO: 1038934 - RNA, 19 nt, Homo sapiens
  misc_RNA (1)...(19): siRNA sense strand
gacgggaccaccuccaaga

SEQ ID NO: 1038935 - RNA, 19 nt, Homo sapiens
  misc_RNA (1)...(19): siRNA sense strand
cccaugugcugcaauccaa

SEQ ID NO: 1038936 - RNA, 19 nt, Homo sapiens
  misc_RNA (1)...(19): siRNA sense strand
cagcuguuguccacuucaa

SEQ ID NO: 1038937 - RNA, 19 nt, Homo sapiens
  misc_RNA (1)...(19): siRNA sense strand
cccagagccuccuacacaa

SEQ ID NO: 1038938 - RNA, 19 nt, Homo sapiens
  misc_RNA (1)...(19): siRNA sense strand
cgagacggccauccuagau

SEQ ID NO: 1038939 - RNA, 19 nt, Homo sapiens
  misc_RNA (1)...(19): siRNA sense strand
acgaagagcagcccacugu

SEQ ID NO: 1038940 - RNA, 19 nt, Homo sapiens
  misc_RNA (1)...(19): siRNA sense strand
cuucaucaccaaaguucua

SEQ ID NO: 1038941 - RNA, 19 nt, Homo sapiens
  misc_RNA (1)...(19): siRNA sense strand
ucaccuucaucaccaaagu

SEQ ID NO: 1038942 - RNA, 19 nt, Homo sapiens
  misc_RNA (1)...(19): siRNA sense strand
ccucaagaccggagaugga

SEQ ID NO: 1038943 - RNA, 19 nt, Homo sapiens
  misc_RNA (1)...(19): siRNA sense strand
cagagccuccuacacaaga

SEQ ID NO: 1038944 - RNA, 19 nt, Homo sapiens
  misc_RNA (1)...(19): siRNA sense strand
gcucaccuacaccugcuuu

SEQ ID NO: 1038945 - RNA, 19 nt, Homo sapiens
  misc_RNA (1)...(19): siRNA sense strand
ggccucagcaggaccuuug

SEQ ID NO: 1038946 - RNA, 19 nt, Homo sapiens
  misc_RNA (1)...(19): siRNA sense strand
ggagagggcagaggguauc

SEQ ID NO: 1038947 - RNA, 19 nt, Homo sapiens
  misc_RNA (1)...(19): siRNA sense strand
ggaaauucugcgaggacaa

SEQ ID NO: 1038948 - RNA, 19 nt, Homo sapiens
  misc_RNA (1)...(19): siRNA sense strand
gccauugucaccuucauca

SEQ ID NO: 1038949 - RNA, 19 nt, Homo sapiens
  misc_RNA (1)...(19): siRNA sense strand
gcugggacuccuaugagaa

SEQ ID NO: 1038950 - RNA, 19 nt, Homo sapiens
  misc_RNA (1)...(19): siRNA sense strand
gcugugcuccaucugcaaa

SEQ ID NO: 1038951 - RNA, 19 nt, Homo sapiens
  misc_RNA (1)...(19): siRNA sense strand
ccacgggcuggcuccauuu

SEQ ID NO: 1038952 - RNA, 19 nt, Homo sapiens
  misc_RNA (1)...(19): siRNA sense strand
gcgcauucccagcaaagau

SEQ ID NO: 1038953 - RNA, 19 nt, Homo sapiens
  misc_RNA (1)...(19): siRNA sense strand
gggaaacaagggcaagcuu

SEQ ID NO: 1038954 - RNA, 19 nt, Homo sapiens
  misc_RNA (1)...(19): siRNA sense strand
ugucaaguuuguccaggau

SEQ ID NO: 1038955 - RNA, 19 nt, Homo sapiens
  misc_RNA (1)...(19): siRNA sense strand
acacaucuggagucuauca

SEQ ID NO: 1038956 - RNA, 19 nt, Homo sapiens
  misc_RNA (1)...(19): siRNA sense strand
ggaccaccuccaagaucuu

SEQ ID NO: 1038957 - RNA, 19 nt, Homo sapiens
  misc_RNA (1)...(19): siRNA sense strand
gagccaaagcaaugucaag

SEQ ID NO: 1038958 - RNA, 19 nt, Homo sapiens
  misc_RNA (1)...(19): siRNA sense strand
gagagccaaagcaauguca

SEQ ID NO: 1038959 - RNA, 19 nt, Homo sapiens
  misc_RNA (1)...(19): siRNA sense strand
gaccugacccgcuuaaacc

SEQ ID NO: 1038960 - RNA, 19 nt, Homo sapiens
  misc_RNA (1)...(19): siRNA sense strand
gcaggaccuuuggcaucug

SEQ ID NO: 1038961 - RNA, 19 nt, Homo sapiens
  misc_RNA (1)...(19): siRNA sense strand
guggagacagagucacuga

SEQ ID NO: 1038962 - RNA, 19 nt, Homo sapiens
  misc_RNA (1)...(19): siRNA sense strand
ugacaccaauggccuuagc

SEQ ID NO: 1038963 - RNA, 19 nt, Homo sapiens
  misc_RNA (1)...(19): siRNA sense strand
gaagagauaugucagaaua

SEQ ID NO: 1038964 - RNA, 19 nt, Homo sapiens
  misc_RNA (1)...(19): siRNA sense strand
gaauggauguggagaaaua

SEQ ID NO: 1038965 - RNA, 19 nt, Homo sapiens
  misc_RNA (1)...(19): siRNA sense strand
gaagagaucugcauguugu

SEQ ID NO: 1038966 - RNA, 19 nt, Homo sapiens
  misc_RNA (1)...(19): siRNA sense strand
acacagagcuauucuauug

SEQ ID NO: 1038967 - RNA, 19 nt, Homo sapiens
  misc_RNA (1)...(19): siRNA sense strand
gcaaugcucugaccacaaa

SEQ ID NO: 1038968 - RNA, 19 nt, Homo sapiens
  misc_RNA (1)...(19): siRNA sense strand
caacaagaguuaccaagaa

SEQ ID NO: 1038969 - RNA, 19 nt, Homo sapiens
  misc_RNA (1)...(19): siRNA sense strand
cagaaacacuggacaauga

SEQ ID NO: 1038970 - RNA, 19 nt, Homo sapiens
  misc_RNA (1)...(19): siRNA sense strand
gaaaugccaauuacagaua

SEQ ID NO: 1038971 - RNA, 19 nt, Homo sapiens
  misc_RNA (1)...(19): siRNA sense strand
gaauucacuugcauuguuu

SEQ ID NO: 1038972 - RNA, 19 nt, Homo sapiens
  misc_RNA (1)...(19): siRNA sense strand
ucaggaaacuucaguguga

SEQ ID NO: 1038973 - RNA, 19 nt, Homo sapiens
  misc_RNA (1)...(19): siRNA sense strand
guucagaagucaaauguug

SEQ ID NO: 1038974 - RNA, 19 nt, Homo sapiens
  misc_RNA (1)...(19): siRNA sense strand
gcugaucucuuugaugaua

SEQ ID NO: 1038975 - RNA, 19 nt, Homo sapiens
  misc_RNA (1)...(19): siRNA sense strand
gaucucagcagcacauaua

SEQ ID NO: 1038976 - RNA, 19 nt, Homo sapiens
  misc_RNA (1)...(19): siRNA sense strand
gaucugccauucucugaaa

SEQ ID NO: 1038977 - RNA, 19 nt, Homo sapiens
  misc_RNA (1)...(19): siRNA sense strand
gaaccaagaugacaguuuu

SEQ ID NO: 1038978 - RNA, 19 nt, Homo sapiens
  misc_RNA (1)...(19): siRNA sense strand
cauggagccuuguuucaua

SEQ ID NO: 1038979 - RNA, 19 nt, Homo sapiens
  misc_RNA (1)...(19): siRNA sense strand
ugaauucacuugcauuguu

SEQ ID NO: 1038980 - RNA, 19 nt, Homo sapiens
  misc_RNA (1)...(19): siRNA sense strand
gcaggaaacuuacauaucc

SEQ ID NO: 1038981 - RNA, 19 nt, Homo sapiens
  misc_RNA (1)...(19): siRNA sense strand
gaaguugcuuagauacauu

SEQ ID NO: 1038982 - RNA, 19 nt, Homo sapiens
  misc_RNA (1)...(19): siRNA sense strand
gaaaugccuugcugccuau

SEQ ID NO: 1038983 - RNA, 19 nt, Homo sapiens
  misc_RNA (1)...(19): siRNA sense strand
ugagaucacuuucugaaga

SEQ ID NO: 1038984 - RNA, 19 nt, Homo sapiens
  misc_RNA (1)...(19): siRNA sense strand
gaacagaagacgaaaauuu

SEQ ID NO: 1038985 - RNA, 19 nt, Homo sapiens
  misc_RNA (1)...(19): siRNA sense strand
gaacaaguuucuggcaguu

SEQ ID NO: 1038986 - RNA, 19 nt, Homo sapiens
  misc_RNA (1)...(19): siRNA sense strand
gauggugacccucaaauuu

SEQ ID NO: 1038987 - RNA, 19 nt, Homo sapiens
  misc_RNA (1)...(19): siRNA sense strand
uaaagaacuuggcuuacaa

SEQ ID NO: 1038988 - RNA, 19 nt, Homo sapiens
  misc_RNA (1)...(19): siRNA sense strand
uagcaaagaugacuuccuu

SEQ ID NO: 1038989 - RNA, 19 nt, Homo sapiens
  misc_RNA (1)...(19): siRNA sense strand
ugacaacucuguguuauag

SEQ ID NO: 1038990 - RNA, 19 nt, Homo sapiens
  misc_RNA (1)...(19): siRNA sense strand
gaaaguccaucuccauugc

SEQ ID NO: 1038991 - RNA, 19 nt, Homo sapiens
  misc_RNA (1)...(19): siRNA sense strand
gcuauucuauugguuauga

SEQ ID NO: 1038992 - RNA, 19 nt, Homo sapiens
  misc_RNA (1)...(19): siRNA sense strand
gaaagucacccuucagagu

SEQ ID NO: 1038993 - RNA, 19 nt, Homo sapiens
  misc_RNA (1)...(19): siRNA sense strand
ggaaguugcuuagauacau

SEQ ID NO: 1038994 - RNA, 19 nt, Homo sapiens
  misc_RNA (1)...(19): siRNA sense strand
auucagaucuugaugguaa

SEQ ID NO: 1038995 - RNA, 19 nt, Homo sapiens
  misc_RNA (1)...(19): siRNA sense strand
uaagaagacuaucagaauc

SEQ ID NO: 1038996 - RNA, 19 nt, Homo sapiens
  misc_RNA (1)...(19): siRNA sense strand
gaagagacagccagcaguu

SEQ ID NO: 1038997 - RNA, 19 nt, Homo sapiens
  misc_RNA (1)...(19): siRNA sense strand
gggaacaucuuuggcagaa

SEQ ID NO: 1038998 - RNA, 19 nt, Homo sapiens
  misc_RNA (1)...(19): siRNA sense strand
cugcugaucucuuugauga

SEQ ID NO: 1038999 - RNA, 19 nt, Homo sapiens
  misc_RNA (1)...(19): siRNA sense strand
uaacacagagcuauucuau

SEQ ID NO: 1039000 - RNA, 19 nt, Homo sapiens
  misc_RNA (1)...(19): siRNA sense strand
gaaacucuuugcaauaguc

SEQ ID NO: 1039001 - RNA, 19 nt, Homo sapiens
  misc_RNA (1)...(19): siRNA sense strand
ucucugaucuuugcaaauu

SEQ ID NO: 1039002 - RNA, 19 nt, Homo sapiens
  misc_RNA (1)...(19): siRNA sense strand
acaaccagauaacaaagua

SEQ ID NO: 1039003 - RNA, 19 nt, Homo sapiens
  misc_RNA (1)...(19): siRNA sense strand
ggacauugcaacugagauu

SEQ ID NO: 1039004 - RNA, 19 nt, Homo sapiens
  misc_RNA (1)...(19): siRNA sense strand
gaaagugagauugcuguaa

SEQ ID NO: 1039005 - RNA, 19 nt, Homo sapiens
  misc_RNA (1)...(19): siRNA sense strand
gauaaacagagcuuucaaa

SEQ ID NO: 1039006 - RNA, 19 nt, Homo sapiens
  misc_RNA (1)...(19): siRNA sense strand
ucacugagaucacuuucug

SEQ ID NO: 1039007 - RNA, 19 nt, Homo sapiens
  misc_RNA (1)...(19): siRNA sense strand
guugaaacuugcuuuguug

SEQ ID NO: 1039008 - RNA, 19 nt, Homo sapiens
  misc_RNA (1)...(19): siRNA sense strand
ucaagaacaugcucuccaa

SEQ ID NO: 1039009 - RNA, 19 nt, Homo sapiens
  misc_RNA (1)...(19): siRNA sense strand
uagaaacucuuugcaauag

SEQ ID NO: 1039010 - RNA, 19 nt, Homo sapiens
  misc_RNA (1)...(19): siRNA sense strand
acaauuugcaggaaacuua

SEQ ID NO: 1039011 - RNA, 19 nt, Homo sapiens
  misc_RNA (1)...(19): siRNA sense strand
gaaguauaaugaugucucu

SEQ ID NO: 1039012 - RNA, 19 nt, Homo sapiens
  misc_RNA (1)...(19): siRNA sense strand
ugacagcacuucugauuuu

SEQ ID NO: 1039013 - RNA, 19 nt, Homo sapiens
  misc_RNA (1)...(19): siRNA sense strand
ccacugguuugcacaggua

SEQ ID NO: 1039014 - RNA, 19 nt, Homo sapiens
  misc_RNA (1)...(19): siRNA sense strand
gagcuauucuauugguuau

SEQ ID NO: 1039015 - RNA, 19 nt, Homo sapiens
  misc_RNA (1)...(19): siRNA sense strand
gcagaugucaguaguagga

SEQ ID NO: 1039016 - RNA, 19 nt, Homo sapiens
  misc_RNA (1)...(19): siRNA sense strand
cugaaagccugaacaaguu

SEQ ID NO: 1039017 - RNA, 19 nt, Homo sapiens
  misc_RNA (1)...(19): siRNA sense strand
ggguaaagaacuuggcuua

SEQ ID NO: 1039018 - RNA, 19 nt, Homo sapiens
  misc_RNA (1)...(19): siRNA sense strand
ucacuuacuugcuuuagau

SEQ ID NO: 1039019 - RNA, 19 nt, Homo sapiens
  misc_RNA (1)...(19): siRNA sense strand
gaaacacuggacaaugaua

SEQ ID NO: 1039020 - RNA, 19 nt, Homo sapiens
  misc_RNA (1)...(19): siRNA sense strand
acagugcaguggaaauuaa

SEQ ID NO: 1039021 - RNA, 19 nt, Homo sapiens
  misc_RNA (1)...(19): siRNA sense strand
gcauaggucuagggaaaug

SEQ ID NO: 1039022 - RNA, 19 nt, Homo sapiens
  misc_RNA (1)...(19): siRNA sense strand
ggaaaucuaaguccuagug

SEQ ID NO: 1039023 - RNA, 19 nt, Homo sapiens
  misc_RNA (1)...(19): siRNA sense strand
aggcauaggucuagggaaa

SEQ ID NO: 1039024 - RNA, 19 nt, Homo sapiens
  misc_RNA (1)...(19): siRNA sense strand
caaagcaaacuguagcaaa

SEQ ID NO: 1039025 - RNA, 19 nt, Homo sapiens
  misc_RNA (1)...(19): siRNA sense strand
caagaaagaaacugaaaca

SEQ ID NO: 1039026 - RNA, 19 nt, Homo sapiens
  misc_RNA (1)...(19): siRNA sense strand
cagaagcccuauuguaucu

SEQ ID NO: 1039027 - RNA, 19 nt, Homo sapiens
  misc_RNA (1)...(19): siRNA sense strand
aacaagaauucaugggaua

SEQ ID NO: 1039028 - RNA, 19 nt, Homo sapiens
  misc_RNA (1)...(19): siRNA sense strand
aaugaugucucugaucuuu

SEQ ID NO: 1039029 - RNA, 19 nt, Homo sapiens
  misc_RNA (1)...(19): siRNA sense strand
gaaauuggaguuaaugacu

SEQ ID NO: 1039030 - RNA, 19 nt, Homo sapiens
  misc_RNA (1)...(19): siRNA sense strand
cuucagauaugcuuggauu

SEQ ID NO: 1039031 - RNA, 19 nt, Homo sapiens
  misc_RNA (1)...(19): siRNA sense strand
gggaugaucugccauucuc

SEQ ID NO: 1039032 - RNA, 19 nt, Homo sapiens
  misc_RNA (1)...(19): siRNA sense strand
acagucaacuccaauuuca

SEQ ID NO: 1039033 - RNA, 19 nt, Homo sapiens
  misc_RNA (1)...(19): siRNA sense strand
aaagcaaacuguagcaaag

SEQ ID NO: 1039034 - RNA, 19 nt, Homo sapiens
  misc_RNA (1)...(19): siRNA sense strand
gcuuuaagaucaucacaag

SEQ ID NO: 1039035 - RNA, 19 nt, Homo sapiens
  misc_RNA (1)...(19): siRNA sense strand
uggcaguucuugaaaguga

SEQ ID NO: 1039036 - RNA, 19 nt, Homo sapiens
  misc_RNA (1)...(19): siRNA sense strand
gcaauaguccaaauagaag

SEQ ID NO: 1039037 - RNA, 19 nt, Homo sapiens
  misc_RNA (1)...(19): siRNA sense strand
uuuggaaguugcuuagaua

SEQ ID NO: 1039038 - RNA, 19 nt, Homo sapiens
  misc_RNA (1)...(19): siRNA sense strand
gaaacauauuagacaagga

SEQ ID NO: 1039039 - RNA, 19 nt, Homo sapiens
  misc_RNA (1)...(19): siRNA sense strand
ucauuucccugaucaacaa

SEQ ID NO: 1039040 - RNA, 19 nt, Homo sapiens
  misc_RNA (1)...(19): siRNA sense strand
ccaugaaacugauagugau

SEQ ID NO: 1039041 - RNA, 19 nt, Homo sapiens
  misc_RNA (1)...(19): siRNA sense strand
aaucagaagcccuauugua

SEQ ID NO: 1039042 - RNA, 19 nt, Homo sapiens
  misc_RNA (1)...(19): siRNA sense strand
ggaaaugccaauuacagau

SEQ ID NO: 1039043 - RNA, 19 nt, Homo sapiens
  misc_RNA (1)...(19): siRNA sense strand
ugauacaacucagaaucua

SEQ ID NO: 1039044 - RNA, 19 nt, Homo sapiens
  misc_RNA (1)...(19): siRNA sense strand
ucacuugcauuguuucaca

SEQ ID NO: 1039045 - RNA, 19 nt, Homo sapiens
  misc_RNA (1)...(19): siRNA sense strand
caccucagcugcacccuau

SEQ ID NO: 1039046 - RNA, 19 nt, Homo sapiens
  misc_RNA (1)...(19): siRNA sense strand
aacaagaguuaccaagaaa

SEQ ID NO: 1039047 - RNA, 19 nt, Homo sapiens
  misc_RNA (1)...(19): siRNA sense strand
caacuaacagauaaugaug

SEQ ID NO: 1039048 - RNA, 19 nt, Homo sapiens
  misc_RNA (1)...(19): siRNA sense strand
caagaguuaccaagaaaga

SEQ ID NO: 1039049 - RNA, 19 nt, Homo sapiens
  misc_RNA (1)...(19): siRNA sense strand
ggagccuuguuucauauau

SEQ ID NO: 1039050 - RNA, 19 nt, Homo sapiens
  misc_RNA (1)...(19): siRNA sense strand
cagauacaaacuuuccuua

SEQ ID NO: 1039051 - RNA, 19 nt, Homo sapiens
  misc_RNA (1)...(19): siRNA sense strand
gccaugaaacugauaguga

SEQ ID NO: 1039052 - RNA, 19 nt, Homo sapiens
  misc_RNA (1)...(19): siRNA sense strand
caucaugaaauuggaguua

SEQ ID NO: 1039053 - RNA, 19 nt, Homo sapiens
  misc_RNA (1)...(19): siRNA sense strand
aacaaucacuuacuugcuu

SEQ ID NO: 1039054 - RNA, 19 nt, Homo sapiens
  misc_RNA (1)...(19): siRNA sense strand
ggaaacuuacauauccuuu

SEQ ID NO: 1039055 - RNA, 19 nt, Homo sapiens
  misc_RNA (1)...(19): siRNA sense strand
uauuguaggugguccaaga

SEQ ID NO: 1039056 - RNA, 19 nt, Homo sapiens
  misc_RNA (1)...(19): siRNA sense strand
aaucuggaaaugccaauua

SEQ ID NO: 1039057 - RNA, 19 nt, Homo sapiens
  misc_RNA (1)...(19): siRNA sense strand
aaagugagauugcuguaac

SEQ ID NO: 1039058 - RNA, 19 nt, Homo sapiens
  misc_RNA (1)...(19): siRNA sense strand
gagccuuguuucauauaug

SEQ ID NO: 1039059 - RNA, 19 nt, Homo sapiens
  misc_RNA (1)...(19): siRNA sense strand
caacguaacacagagcuau

SEQ ID NO: 1039060 - RNA, 19 nt, Homo sapiens
  misc_RNA (1)...(19): siRNA sense strand
aaacugauagugaugaaug

SEQ ID NO: 1039061 - RNA, 19 nt, Homo sapiens
  misc_RNA (1)...(19): siRNA sense strand
ugaaacugauagugaugaa

SEQ ID NO: 1039062 - RNA, 19 nt, Homo sapiens
  misc_RNA (1)...(19): siRNA sense strand
ucaagacuuuguuccaugu

SEQ ID NO: 1039063 - RNA, 19 nt, Homo sapiens
  misc_RNA (1)...(19): siRNA sense strand
gaaauugaguuuacuguug

SEQ ID NO: 1039064 - RNA, 19 nt, Homo sapiens
  misc_RNA (1)...(19): siRNA sense strand
ucaaagcagugucaaguua

SEQ ID NO: 1039065 - RNA, 19 nt, Homo sapiens
  misc_RNA (1)...(19): siRNA sense strand
caaguuacgugagcaaaua

SEQ ID NO: 1039066 - RNA, 19 nt, Homo sapiens
  misc_RNA (1)...(19): siRNA sense strand
gagcaaauacuagacuuaa

SEQ ID NO: 1039067 - RNA, 19 nt, Homo sapiens
  misc_RNA (1)...(19): siRNA sense strand
caacaaccaagacaucaaa

SEQ ID NO: 1039068 - RNA, 19 nt, Homo sapiens
  misc_RNA (1)...(19): siRNA sense strand
gugcuucuauggcaggaua

SEQ ID NO: 1039069 - RNA, 19 nt, Homo sapiens
  misc_RNA (1)...(19): siRNA sense strand
ggagaacaaaguugacuau

SEQ ID NO: 1039070 - RNA, 19 nt, Homo sapiens
  misc_RNA (1)...(19): siRNA sense strand
gcacuauacuuuucaacaa

SEQ ID NO: 1039071 - RNA, 19 nt, Homo sapiens
  misc_RNA (1)...(19): siRNA sense strand
gcuuguauuuggacucauu

SEQ ID NO: 1039072 - RNA, 19 nt, Homo sapiens
  misc_RNA (1)...(19): siRNA sense strand
gagaacaaaguugacuaua

SEQ ID NO: 1039073 - RNA, 19 nt, Homo sapiens
  misc_RNA (1)...(19): siRNA sense strand
gccaguaaccacaaauaaa

SEQ ID NO: 1039074 - RNA, 19 nt, Homo sapiens
  misc_RNA (1)...(19): siRNA sense strand
ggaauuuggugccaguaac

SEQ ID NO: 1039075 - RNA, 19 nt, Homo sapiens
  misc_RNA (1)...(19): siRNA sense strand
uggugaagcuggagaacaa

SEQ ID NO: 1039076 - RNA, 19 nt, Homo sapiens
  misc_RNA (1)...(19): siRNA sense strand
gaagcuggagaacaaaguu

SEQ ID NO: 1039077 - RNA, 19 nt, Homo sapiens
  misc_RNA (1)...(19): siRNA sense strand
gcaaauacuagacuuaagc

SEQ ID NO: 1039078 - RNA, 19 nt, Homo sapiens
  misc_RNA (1)...(19): siRNA sense strand
aaauaugucccagaaauug

SEQ ID NO: 1039079 - RNA, 19 nt, Homo sapiens
  misc_RNA (1)...(19): siRNA sense strand
gaacaauugcuguccuucu

SEQ ID NO: 1039080 - RNA, 19 nt, Homo sapiens
  misc_RNA (1)...(19): siRNA sense strand
caaccaagacaucaaagca

SEQ ID NO: 1039081 - RNA, 19 nt, Homo sapiens
  misc_RNA (1)...(19): siRNA sense strand
acgaaugucucgggcagua

SEQ ID NO: 1039082 - RNA, 19 nt, Homo sapiens
  misc_RNA (1)...(19): siRNA sense strand
ugagcaaauacuagacuua

SEQ ID NO: 1039083 - RNA, 19 nt, Homo sapiens
  misc_RNA (1)...(19): siRNA sense strand
gggaauuuggugccaguaa

SEQ ID NO: 1039084 - RNA, 19 nt, Homo sapiens
  misc_RNA (1)...(19): siRNA sense strand
ugaguuuacuguugcuugu

SEQ ID NO: 1039085 - RNA, 19 nt, Homo sapiens
  misc_RNA (1)...(19): siRNA sense strand
caucaaagcagugucaagu

SEQ ID NO: 1039086 - RNA, 19 nt, Homo sapiens
  misc_RNA (1)...(19): siRNA sense strand
gaucugaaaagaacaauug

SEQ ID NO: 1039087 - RNA, 19 nt, Homo sapiens
  misc_RNA (1)...(19): siRNA sense strand
ucccagaaauugaguuuac

SEQ ID NO: 1039088 - RNA, 19 nt, Homo sapiens
  misc_RNA (1)...(19): siRNA sense strand
ccaguaaccacaaauaaaa

SEQ ID NO: 1039089 - RNA, 19 nt, Homo sapiens
  misc_RNA (1)...(19): siRNA sense strand
ugauguuacugcacuauac

SEQ ID NO: 1039090 - RNA, 19 nt, Homo sapiens
  misc_RNA (1)...(19): siRNA sense strand
gauugauguuacugcacua

SEQ ID NO: 1039091 - RNA, 19 nt, Homo sapiens
  misc_RNA (1)...(19): siRNA sense strand
aagaacaauugcuguccuu

SEQ ID NO: 1039092 - RNA, 19 nt, Homo sapiens
  misc_RNA (1)...(19): siRNA sense strand
caggauaugcggaucugaa

SEQ ID NO: 1039093 - RNA, 19 nt, Homo sapiens
  misc_RNA (1)...(19): siRNA sense strand
gugagcaaauacuagacuu

SEQ ID NO: 1039094 - RNA, 19 nt, Homo sapiens
  misc_RNA (1)...(19): siRNA sense strand
gcagccaacaccaccaaug

SEQ ID NO: 1039095 - RNA, 19 nt, Homo sapiens
  misc_RNA (1)...(19): siRNA sense strand
gugccaguaaccacaaaua

SEQ ID NO: 1039096 - RNA, 19 nt, Homo sapiens
  misc_RNA (1)...(19): siRNA sense strand
caaauacuagacuuaagca

SEQ ID NO: 1039097 - RNA, 19 nt, Homo sapiens
  misc_RNA (1)...(19): siRNA sense strand
gaaugucucgggcaguauc

SEQ ID NO: 1039098 - RNA, 19 nt, Homo sapiens
  misc_RNA (1)...(19): siRNA sense strand
caaugguacuagugggaau

SEQ ID NO: 1039099 - RNA, 19 nt, Homo sapiens
  misc_RNA (1)...(19): siRNA sense strand
aacaauugcuguccuucug

SEQ ID NO: 1039100 - RNA, 19 nt, Homo sapiens
  misc_RNA (1)...(19): siRNA sense strand
uugcuguccuucuggauga

SEQ ID NO: 1039101 - RNA, 19 nt, Homo sapiens
  misc_RNA (1)...(19): siRNA sense strand
ggacucauuuggggauuga

SEQ ID NO: 1039102 - RNA, 19 nt, Homo sapiens
  misc_RNA (1)...(19): siRNA sense strand
cacaguggaugucgagaac

SEQ ID NO: 1039103 - RNA, 19 nt, Homo sapiens
  misc_RNA (1)...(19): siRNA sense strand
ugccaguaaccacaaauaa

SEQ ID NO: 1039104 - RNA, 19 nt, Homo sapiens
  misc_RNA (1)...(19): siRNA sense strand
caagacaucaaagcagugu

SEQ ID NO: 1039105 - RNA, 19 nt, Homo sapiens
  misc_RNA (1)...(19): siRNA sense strand
ucaaguuacgugagcaaau

SEQ ID NO: 1039106 - RNA, 19 nt, Homo sapiens
  misc_RNA (1)...(19): siRNA sense strand
caaagcagugucaaguuac

SEQ ID NO: 1039107 - RNA, 19 nt, Homo sapiens
  misc_RNA (1)...(19): siRNA sense strand
ucaacaaccaagacaucaa

SEQ ID NO: 1039108 - RNA, 19 nt, Homo sapiens
  misc_RNA (1)...(19): siRNA sense strand
acacaguggaugucgagaa

SEQ ID NO: 1039109 - RNA, 19 nt, Homo sapiens
  misc_RNA (1)...(19): siRNA sense strand
cagaaauugaguuuacugu

SEQ ID NO: 1039110 - RNA, 19 nt, Homo sapiens
  misc_RNA (1)...(19): siRNA sense strand
gcaagucucuuuacagaaa

SEQ ID NO: 1039111 - RNA, 19 nt, Homo sapiens
  misc_RNA (1)...(19): siRNA sense strand
gaauagauuugcuggauuu

SEQ ID NO: 1039112 - RNA, 19 nt, Homo sapiens
  misc_RNA (1)...(19): siRNA sense strand
gugaacagcugaauagauu

SEQ ID NO: 1039113 - RNA, 19 nt, Homo sapiens
  misc_RNA (1)...(19): siRNA sense strand
guucugacguuauacuuua

SEQ ID NO: 1039114 - RNA, 19 nt, Homo sapiens
  misc_RNA (1)...(19): siRNA sense strand
gcacauccuugcauuguuc

SEQ ID NO: 1039115 - RNA, 19 nt, Homo sapiens
  misc_RNA (1)...(19): siRNA sense strand
caaggaacacgcacaauaa

SEQ ID NO: 1039116 - RNA, 19 nt, Homo sapiens
  misc_RNA (1)...(19): siRNA sense strand
gccaaugucagguuaauua

SEQ ID NO: 1039117 - RNA, 19 nt, Homo sapiens
  misc_RNA (1)...(19): siRNA sense strand
uuacauaaauggaguccua

SEQ ID NO: 1039118 - RNA, 19 nt, Homo sapiens
  misc_RNA (1)...(19): siRNA sense strand
gcagaaggcauaauuagug

SEQ ID NO: 1039119 - RNA, 19 nt, Homo sapiens
  misc_RNA (1)...(19): siRNA sense strand
uaaauggaguccuaaacaa

SEQ ID NO: 1039120 - RNA, 19 nt, Homo sapiens
  misc_RNA (1)...(19): siRNA sense strand
caagggagguuuuacauaa

SEQ ID NO: 1039121 - RNA, 19 nt, Homo sapiens
  misc_RNA (1)...(19): siRNA sense strand
auacagaccuuggcuauga

SEQ ID NO: 1039122 - RNA, 19 nt, Homo sapiens
  misc_RNA (1)...(19): siRNA sense strand
guuuggugcuguuauaaua

SEQ ID NO: 1039123 - RNA, 19 nt, Homo sapiens
  misc_RNA (1)...(19): siRNA sense strand
gggagugccucauagcaaa

SEQ ID NO: 1039124 - RNA, 19 nt, Homo sapiens
  misc_RNA (1)...(19): siRNA sense strand
ucaaggaacacgcacaaua

SEQ ID NO: 1039125 - RNA, 19 nt, Homo sapiens
  misc_RNA (1)...(19): siRNA sense strand
gaacuuauugcuaacuuug

SEQ ID NO: 1039126 - RNA, 19 nt, Homo sapiens
  misc_RNA (1)...(19): siRNA sense strand
gagaaagacuuacaauagc

SEQ ID NO: 1039127 - RNA, 19 nt, Homo sapiens
  misc_RNA (1)...(19): siRNA sense strand
gaacagcugaauagauuug

SEQ ID NO: 1039128 - RNA, 19 nt, Homo sapiens
  misc_RNA (1)...(19): siRNA sense strand
ggaaugagagacuguauca

SEQ ID NO: 1039129 - RNA, 19 nt, Homo sapiens
  misc_RNA (1)...(19): siRNA sense strand
gaaguuuguccuacuaauu

SEQ ID NO: 1039130 - RNA, 19 nt, Homo sapiens
  misc_RNA (1)...(19): siRNA sense strand
gcucaguuauucagaaguu

SEQ ID NO: 1039131 - RNA, 19 nt, Homo sapiens
  misc_RNA (1)...(19): siRNA sense strand
cuacugaaaucccuaacuu

SEQ ID NO: 1039132 - RNA, 19 nt, Homo sapiens
  misc_RNA (1)...(19): siRNA sense strand
uaacuuacgugguggcaau

SEQ ID NO: 1039133 - RNA, 19 nt, Homo sapiens
  misc_RNA (1)...(19): siRNA sense strand
ggagcagaaggcauaauua

SEQ ID NO: 1039134 - RNA, 19 nt, Homo sapiens
  misc_RNA (1)...(19): siRNA sense strand
gcagugaacagcugaauag

SEQ ID NO: 1039135 - RNA, 19 nt, Homo sapiens
  misc_RNA (1)...(19): siRNA sense strand
cagaaggcauaauuaguga

SEQ ID NO: 1039136 - RNA, 19 nt, Homo sapiens
  misc_RNA (1)...(19): siRNA sense strand
gaaggaauuggaagaguga

SEQ ID NO: 1039137 - RNA, 19 nt, Homo sapiens
  misc_RNA (1)...(19): siRNA sense strand
uuccagaacuuauugcuaa

SEQ ID NO: 1039138 - RNA, 19 nt, Homo sapiens
  misc_RNA (1)...(19): siRNA sense strand
ucagaaguuuguccuacua

SEQ ID NO: 1039139 - RNA, 19 nt, Homo sapiens
  misc_RNA (1)...(19): siRNA sense strand
ggaaaggaaugggaaguac

SEQ ID NO: 1039140 - RNA, 19 nt, Homo sapiens
  misc_RNA (1)...(19): siRNA sense strand
agagaaagacuuacaauag

SEQ ID NO: 1039141 - RNA, 19 nt, Homo sapiens
  misc_RNA (1)...(19): siRNA sense strand
uaacuuugcugccagucuu

SEQ ID NO: 1039142 - RNA, 19 nt, Homo sapiens
  misc_RNA (1)...(19): siRNA sense strand
gcaggaggaaggaguguuu

SEQ ID NO: 1039143 - RNA, 19 nt, Homo sapiens
  misc_RNA (1)...(19): siRNA sense strand
gagcagaaggcauaauuag

SEQ ID NO: 1039144 - RNA, 19 nt, Homo sapiens
  misc_RNA (1)...(19): siRNA sense strand
augagagacuguaucaaua

SEQ ID NO: 1039145 - RNA, 19 nt, Homo sapiens
  misc_RNA (1)...(19): siRNA sense strand
cagcaagucugauugaaac

SEQ ID NO: 1039146 - RNA, 19 nt, Homo sapiens
  misc_RNA (1)...(19): siRNA sense strand
gaacaccuucuacugaaau

SEQ ID NO: 1039147 - RNA, 19 nt, Homo sapiens
  misc_RNA (1)...(19): siRNA sense strand
uaccaucucacuccauuua

SEQ ID NO: 1039148 - RNA, 19 nt, Homo sapiens
  misc_RNA (1)...(19): siRNA sense strand
ugaauagauuugcuggauu

SEQ ID NO: 1039149 - RNA, 19 nt, Homo sapiens
  misc_RNA (1)...(19): siRNA sense strand
gaaggcauaauuagugaau

SEQ ID NO: 1039150 - RNA, 19 nt, Homo sapiens
  misc_RNA (1)...(19): siRNA sense strand
uaaagaaggaauuggaaga

SEQ ID NO: 1039151 - RNA, 19 nt, Homo sapiens
  misc_RNA (1)...(19): siRNA sense strand
ccauuuacagucaucaaua

SEQ ID NO: 1039152 - RNA, 19 nt, Homo sapiens
  misc_RNA (1)...(19): siRNA sense strand
agaguauguuggaugcuua

SEQ ID NO: 1039153 - RNA, 19 nt, Homo sapiens
  misc_RNA (1)...(19): siRNA sense strand
ugaaaucccuaacuuacgu

SEQ ID NO: 1039154 - RNA, 19 nt, Homo sapiens
  misc_RNA (1)...(19): siRNA sense strand
uugcaagucucuuuacaga

SEQ ID NO: 1039155 - RNA, 19 nt, Homo sapiens
  misc_RNA (1)...(19): siRNA sense strand
caucaucagcucaguuauu

SEQ ID NO: 1039156 - RNA, 19 nt, Homo sapiens
  misc_RNA (1)...(19): siRNA sense strand
ggaguguguuaaagaagga

SEQ ID NO: 1039157 - RNA, 19 nt, Homo sapiens
  misc_RNA (1)...(19): siRNA sense strand
gcaugggagugccucauag

SEQ ID NO: 1039158 - RNA, 19 nt, Homo sapiens
  misc_RNA (1)...(19): siRNA sense strand
uaaaggguuuggugcuguu

SEQ ID NO: 1039159 - RNA, 19 nt, Homo sapiens
  misc_RNA (1)...(19): siRNA sense strand
caauacagaccuuggcuau

SEQ ID NO: 1039160 - RNA, 19 nt, Homo sapiens
  misc_RNA (1)...(19): siRNA sense strand
uucauggaguucuucauua

SEQ ID NO: 1039161 - RNA, 19 nt, Homo sapiens
  misc_RNA (1)...(19): siRNA sense strand
aggaaggaguguuugguuu

SEQ ID NO: 1039162 - RNA, 19 nt, Homo sapiens
  misc_RNA (1)...(19): siRNA sense strand
gaggaaggaguguuugguu

SEQ ID NO: 1039163 - RNA, 19 nt, Homo sapiens
  misc_RNA (1)...(19): siRNA sense strand
uacaucaucagcucaguua

SEQ ID NO: 1039164 - RNA, 19 nt, Homo sapiens
  misc_RNA (1)...(19): siRNA sense strand
gcaccgccuucacauucaa

SEQ ID NO: 1039165 - RNA, 19 nt, Homo sapiens
  misc_RNA (1)...(19): siRNA sense strand
cguuauacuuuacccauug

SEQ ID NO: 1039166 - RNA, 19 nt, Homo sapiens
  misc_RNA (1)...(19): siRNA sense strand
gcucagcauuaccaucuca

SEQ ID NO: 1039167 - RNA, 19 nt, Homo sapiens
  misc_RNA (1)...(19): siRNA sense strand
cgacuucuuccgcuucuuu

SEQ ID NO: 1039168 - RNA, 19 nt, Homo sapiens
  misc_RNA (1)...(19): siRNA sense strand
gaaacagugcagagugaga

SEQ ID NO: 1039169 - RNA, 19 nt, Homo sapiens
  misc_RNA (1)...(19): siRNA sense strand
acaaauaggagaacaccuu

SEQ ID NO: 1039170 - RNA, 19 nt, Homo sapiens
  misc_RNA (1)...(19): siRNA sense strand
gaaaggaaugggaaguaca

SEQ ID NO: 1039171 - RNA, 19 nt, Homo sapiens
  misc_RNA (1)...(19): siRNA sense strand
aaauggaguccuaaacaaa

SEQ ID NO: 1039172 - RNA, 19 nt, Homo sapiens
  misc_RNA (1)...(19): siRNA sense strand
cagaacuuauugcuaacuu

SEQ ID NO: 1039173 - RNA, 19 nt, Homo sapiens
  misc_RNA (1)...(19): siRNA sense strand
caagucugauugaaacagu

SEQ ID NO: 1039174 - RNA, 19 nt, Homo sapiens
  misc_RNA (1)...(19): siRNA sense strand
guauguuggaugcuuauuu

SEQ ID NO: 1039175 - RNA, 19 nt, Homo sapiens
  misc_RNA (1)...(19): siRNA sense strand
ccuacuaauucuaaagaga

SEQ ID NO: 1039176 - RNA, 19 nt, Homo sapiens
  misc_RNA (1)...(19): siRNA sense strand
gugagauaauucgagauaa

SEQ ID NO: 1039177 - RNA, 19 nt, Homo sapiens
  misc_RNA (1)...(19): siRNA sense strand
uugaaacagugcagaguga

SEQ ID NO: 1039178 - RNA, 19 nt, Homo sapiens
  misc_RNA (1)...(19): siRNA sense strand
ggaauuggaagagugauag

SEQ ID NO: 1039179 - RNA, 19 nt, Homo sapiens
  misc_RNA (1)...(19): siRNA sense strand
aaugagagacuguaucaau

SEQ ID NO: 1039180 - RNA, 19 nt, Homo sapiens
  misc_RNA (1)...(19): siRNA sense strand
cagaguauguuggaugcuu

SEQ ID NO: 1039181 - RNA, 19 nt, Homo sapiens
  misc_RNA (1)...(19): siRNA sense strand
ucagcucaguuauucagaa

SEQ ID NO: 1039182 - RNA, 19 nt, Homo sapiens
  misc_RNA (1)...(19): siRNA sense strand
gaucuucccuacggugcuu

SEQ ID NO: 1039183 - RNA, 19 nt, Homo sapiens
  misc_RNA (1)...(19): siRNA sense strand
ccucauagcaaacgacuuc

SEQ ID NO: 1039184 - RNA, 19 nt, Homo sapiens
  misc_RNA (1)...(19): siRNA sense strand
ucuuuguucugacguuaua

SEQ ID NO: 1039185 - RNA, 19 nt, Homo sapiens
  misc_RNA (1)...(19): siRNA sense strand
uagauuugcuggauuuggu

SEQ ID NO: 1039186 - RNA, 19 nt, Homo sapiens
  misc_RNA (1)...(19): siRNA sense strand
cugaauagauuugcuggau

SEQ ID NO: 1039187 - RNA, 19 nt, Homo sapiens
  misc_RNA (1)...(19): siRNA sense strand
ucauggaguucuucauuac

SEQ ID NO: 1039188 - RNA, 19 nt, Homo sapiens
  misc_RNA (1)...(19): siRNA sense strand
auggaguccuaaacaaaua

SEQ ID NO: 1039189 - RNA, 19 nt, Homo sapiens
  misc_RNA (1)...(19): siRNA sense strand
cgagauaauacuggcauuu

SEQ ID NO: 1039190 - RNA, 19 nt, Homo sapiens
  misc_RNA (1)...(19): siRNA sense strand
cuaaagagaaagacuuaca

SEQ ID NO: 1039191 - RNA, 19 nt, Homo sapiens
  misc_RNA (1)...(19): siRNA sense strand
agugagauaauucgagaua

SEQ ID NO: 1039192 - RNA, 19 nt, Homo sapiens
  misc_RNA (1)...(19): siRNA sense strand
aggguuuggugcuguuaua

SEQ ID NO: 1039193 - RNA, 19 nt, Homo sapiens
  misc_RNA (1)...(19): siRNA sense strand
ggaaggaguguuugguuuu

SEQ ID NO: 1039194 - RNA, 19 nt, Homo sapiens
  misc_RNA (1)...(19): siRNA sense strand
ccaucucacuccauuuaca

SEQ ID NO: 1039195 - RNA, 19 nt, Homo sapiens
  misc_RNA (1)...(19): siRNA sense strand
guuaaagaaggaauuggaa

SEQ ID NO: 1039196 - RNA, 19 nt, Homo sapiens
  misc_RNA (1)...(19): siRNA sense strand
gugcagagugagauaauuc

SEQ ID NO: 1039197 - RNA, 19 nt, Homo sapiens
  misc_RNA (1)...(19): siRNA sense strand
guucuucauuacaucauca

SEQ ID NO: 1039198 - RNA, 19 nt, Homo sapiens
  misc_RNA (1)...(19): siRNA sense strand
ggcacauccuugcauuguu

SEQ ID NO: 1039199 - RNA, 19 nt, Homo sapiens
  misc_RNA (1)...(19): siRNA sense strand
cuaaacaaauaggagaaca

SEQ ID NO: 1039200 - RNA, 19 nt, Homo sapiens
  misc_RNA (1)...(19): siRNA sense strand
gacuuacaauagccaccua

SEQ ID NO: 1039201 - RNA, 19 nt, Homo sapiens
  misc_RNA (1)...(19): siRNA sense strand
ggaguucuucauuacauca

SEQ ID NO: 1039202 - RNA, 19 nt, Homo sapiens
  misc_RNA (1)...(19): siRNA sense strand
cauagcaaacgacuucuuc

SEQ ID NO: 1039203 - RNA, 19 nt, Homo sapiens
  misc_RNA (1)...(19): siRNA sense strand
auaaauggaguccuaaaca

SEQ ID NO: 1039204 - RNA, 19 nt, Homo sapiens
  misc_RNA (1)...(19): siRNA sense strand
agaaguuuguccuacuaau

SEQ ID NO: 1039205 - RNA, 19 nt, Homo sapiens
  misc_RNA (1)...(19): siRNA sense strand
cagcucaguuauucagaag

SEQ ID NO: 1039206 - RNA, 19 nt, Homo sapiens
  misc_RNA (1)...(19): siRNA sense strand
cuucauggaguucuucauu

SEQ ID NO: 1039207 - RNA, 19 nt, Homo sapiens
  misc_RNA (1)...(19): siRNA sense strand
gagauaauacuggcauuuu

SEQ ID NO: 1039208 - RNA, 19 nt, Homo sapiens
  misc_RNA (1)...(19): siRNA sense strand
aaugucagguuaauuacca

SEQ ID NO: 1039209 - RNA, 19 nt, Homo sapiens
  misc_RNA (1)...(19): siRNA sense strand
uuuggaguguguuaaagaa

SEQ ID NO: 1039210 - RNA, 19 nt, Homo sapiens
  misc_RNA (1)...(19): siRNA sense strand
ggacaaagaugcugggaaa

SEQ ID NO: 1039211 - RNA, 19 nt, Homo sapiens
  misc_RNA (1)...(19): siRNA sense strand
gaacaacgauagacugcua

SEQ ID NO: 1039212 - RNA, 19 nt, Homo sapiens
  misc_RNA (1)...(19): siRNA sense strand
ggucaucuaucuugaaaua

SEQ ID NO: 1039213 - RNA, 19 nt, Homo sapiens
  misc_RNA (1)...(19): siRNA sense strand
ggaauaaagucuucacguu

SEQ ID NO: 1039214 - RNA, 19 nt, Homo sapiens
  misc_RNA (1)...(19): siRNA sense strand
gagaggagauauuaaagaa

SEQ ID NO: 1039215 - RNA, 19 nt, Homo sapiens
  misc_RNA (1)...(19): siRNA sense strand
gaacagaaguacauugaag

SEQ ID NO: 1039216 - RNA, 19 nt, Homo sapiens
  misc_RNA (1)...(19): siRNA sense strand
gaacauuaauacccaaaga

SEQ ID NO: 1039217 - RNA, 19 nt, Homo sapiens
  misc_RNA (1)...(19): siRNA sense strand
caaaguugcuauaccauug

SEQ ID NO: 1039218 - RNA, 19 nt, Homo sapiens
  misc_RNA (1)...(19): siRNA sense strand
ggaagaagaagaugacaaa

SEQ ID NO: 1039219 - RNA, 19 nt, Homo sapiens
  misc_RNA (1)...(19): siRNA sense strand
ggaacgagaggagauauua

SEQ ID NO: 1039220 - RNA, 19 nt, Homo sapiens
  misc_RNA (1)...(19): siRNA sense strand
caucagagcggaaggguua

SEQ ID NO: 1039221 - RNA, 19 nt, Homo sapiens
  misc_RNA (1)...(19): siRNA sense strand
uaucagaccuacacagaaa

SEQ ID NO: 1039222 - RNA, 19 nt, Homo sapiens
  misc_RNA (1)...(19): siRNA sense strand
caaggagucucgcugcuuu

SEQ ID NO: 1039223 - RNA, 19 nt, Homo sapiens
  misc_RNA (1)...(19): siRNA sense strand
gaaguacauugaagaggaa

SEQ ID NO: 1039224 - RNA, 19 nt, Homo sapiens
  misc_RNA (1)...(19): siRNA sense strand
gaggaggagucauugauau

SEQ ID NO: 1039225 - RNA, 19 nt, Homo sapiens
  misc_RNA (1)...(19): siRNA sense strand
cagagucccuucagaugua

SEQ ID NO: 1039226 - RNA, 19 nt, Homo sapiens
  misc_RNA (1)...(19): siRNA sense strand
agaagaagaugacaaagau

SEQ ID NO: 1039227 - RNA, 19 nt, Homo sapiens
  misc_RNA (1)...(19): siRNA sense strand
aaagaaauauagcccauug

SEQ ID NO: 1039228 - RNA, 19 nt, Homo sapiens
  misc_RNA (1)...(19): siRNA sense strand
ggagggaacaauuugauuu

SEQ ID NO: 1039229 - RNA, 19 nt, Homo sapiens
  misc_RNA (1)...(19): siRNA sense strand
gauagacugcuaacacaua

SEQ ID NO: 1039230 - RNA, 19 nt, Homo sapiens
  misc_RNA (1)...(19): siRNA sense strand
ugacacaauuggaguuaaa

SEQ ID NO: 1039231 - RNA, 19 nt, Homo sapiens
  misc_RNA (1)...(19): siRNA sense strand
gaugugacccuuacucuga

SEQ ID NO: 1039232 - RNA, 19 nt, Homo sapiens
  misc_RNA (1)...(19): siRNA sense strand
ugacaaugcuaaugaggaa

SEQ ID NO: 1039233 - RNA, 19 nt, Homo sapiens
  misc_RNA (1)...(19): siRNA sense strand
ucugaaagauccucauuau

SEQ ID NO: 1039234 - RNA, 19 nt, Homo sapiens
  misc_RNA (1)...(19): siRNA sense strand
acagaaagccuacgucuug

SEQ ID NO: 1039235 - RNA, 19 nt, Homo sapiens
  misc_RNA (1)...(19): siRNA sense strand
gaacgagaggagauauuaa

SEQ ID NO: 1039236 - RNA, 19 nt, Homo sapiens
  misc_RNA (1)...(19): siRNA sense strand
gaagugacaguuuaugaug

SEQ ID NO: 1039237 - RNA, 19 nt, Homo sapiens
  misc_RNA (1)...(19): siRNA sense strand
gaaagccuacgucuugaaa

SEQ ID NO: 1039238 - RNA, 19 nt, Homo sapiens
  misc_RNA (1)...(19): siRNA sense strand
ccugaaagaugugggauuu

SEQ ID NO: 1039239 - RNA, 19 nt, Homo sapiens
  misc_RNA (1)...(19): siRNA sense strand
cuaaacagcugcuacuaag

SEQ ID NO: 1039240 - RNA, 19 nt, Homo sapiens
  misc_RNA (1)...(19): siRNA sense strand
gaaaccagauccuucucau

SEQ ID NO: 1039241 - RNA, 19 nt, Homo sapiens
  misc_RNA (1)...(19): siRNA sense strand
gaagaaagaggaggaguca

SEQ ID NO: 1039242 - RNA, 19 nt, Homo sapiens
  misc_RNA (1)...(19): siRNA sense strand
gcaauaccaagaacugaaa

SEQ ID NO: 1039243 - RNA, 19 nt, Homo sapiens
  misc_RNA (1)...(19): siRNA sense strand
acaaugaacuacuugacuu

SEQ ID NO: 1039244 - RNA, 19 nt, Homo sapiens
  misc_RNA (1)...(19): siRNA sense strand
gaaggaacgagaggagaua

SEQ ID NO: 1039245 - RNA, 19 nt, Homo sapiens
  misc_RNA (1)...(19): siRNA sense strand
gaugugacaaugcuaauga

SEQ ID NO: 1039246 - RNA, 19 nt, Homo sapiens
  misc_RNA (1)...(19): siRNA sense strand
ugagauacauuguccuugu

SEQ ID NO: 1039247 - RNA, 19 nt, Homo sapiens
  misc_RNA (1)...(19): siRNA sense strand
uaacacauacugucuacaa

SEQ ID NO: 1039248 - RNA, 19 nt, Homo sapiens
  misc_RNA (1)...(19): siRNA sense strand
gaaaagugccugcaauuug

SEQ ID NO: 1039249 - RNA, 19 nt, Homo sapiens
  misc_RNA (1)...(19): siRNA sense strand
gaaagaggaggagucauug

SEQ ID NO: 1039250 - RNA, 19 nt, Homo sapiens
  misc_RNA (1)...(19): siRNA sense strand
aauaaagucuucacguuca

SEQ ID NO: 1039251 - RNA, 19 nt, Homo sapiens
  misc_RNA (1)...(19): siRNA sense strand
aaacagcugcuacuaagaa

SEQ ID NO: 1039252 - RNA, 19 nt, Homo sapiens
  misc_RNA (1)...(19): siRNA sense strand
gcuauaccauugcugucua

SEQ ID NO: 1039253 - RNA, 19 nt, Homo sapiens
  misc_RNA (1)...(19): siRNA sense strand
aaagauauccauucaguuc

SEQ ID NO: 1039254 - RNA, 19 nt, Homo sapiens
  misc_RNA (1)...(19): siRNA sense strand
gaacugaaaccagauccuu

SEQ ID NO: 1039255 - RNA, 19 nt, Homo sapiens
  misc_RNA (1)...(19): siRNA sense strand
ccaaagaacagaaguacau

SEQ ID NO: 1039256 - RNA, 19 nt, Homo sapiens
  misc_RNA (1)...(19): siRNA sense strand
agggagccauuguauauaa

SEQ ID NO: 1039257 - RNA, 19 nt, Homo sapiens
  misc_RNA (1)...(19): siRNA sense strand
gggcaucaauaaauuuaca

SEQ ID NO: 1039258 - RNA, 19 nt, Homo sapiens
  misc_RNA (1)...(19): siRNA sense strand
ccauugcugucuauucaaa

SEQ ID NO: 1039259 - RNA, 19 nt, Homo sapiens
  misc_RNA (1)...(19): siRNA sense strand
agaaagaggaggagucauu

SEQ ID NO: 1039260 - RNA, 19 nt, Homo sapiens
  misc_RNA (1)...(19): siRNA sense strand
agagcaagauuaugccaaa

SEQ ID NO: 1039261 - RNA, 19 nt, Homo sapiens
  misc_RNA (1)...(19): siRNA sense strand
gaaagauccucauuauccu

SEQ ID NO: 1039262 - RNA, 19 nt, Homo sapiens
  misc_RNA (1)...(19): siRNA sense strand
cagcaucucugaccugucu

SEQ ID NO: 1039263 - RNA, 19 nt, Homo sapiens
  misc_RNA (1)...(19): siRNA sense strand
cagcuuacgaacauuaaua

SEQ ID NO: 1039264 - RNA, 19 nt, Homo sapiens
  misc_RNA (1)...(19): siRNA sense strand
uaccauugcugucuauuca

SEQ ID NO: 1039265 - RNA, 19 nt, Homo sapiens
  misc_RNA (1)...(19): siRNA sense strand
cagcuggacauuacauuaa

SEQ ID NO: 1039266 - RNA, 19 nt, Homo sapiens
  misc_RNA (1)...(19): siRNA sense strand
ggacgaggaagaagaagau

SEQ ID NO: 1039267 - RNA, 19 nt, Homo sapiens
  misc_RNA (1)...(19): siRNA sense strand
uuagggagccauuguauau

SEQ ID NO: 1039268 - RNA, 19 nt, Homo sapiens
  misc_RNA (1)...(19): siRNA sense strand
gaacuacuugacuuccuuu

SEQ ID NO: 1039269 - RNA, 19 nt, Homo sapiens
  misc_RNA (1)...(19): siRNA sense strand
ggacgagugauccauaugu

SEQ ID NO: 1039270 - RNA, 19 nt, Homo sapiens
  misc_RNA (1)...(19): siRNA sense strand
gaaguacaagagcaagauu

SEQ ID NO: 1039271 - RNA, 19 nt, Homo sapiens
  misc_RNA (1)...(19): siRNA sense strand
ugaaagauccucauuaucc

SEQ ID NO: 1039272 - RNA, 19 nt, Homo sapiens
  misc_RNA (1)...(19): siRNA sense strand
gggagccauuguauauaaa

SEQ ID NO: 1039273 - RNA, 19 nt, Homo sapiens
  misc_RNA (1)...(19): siRNA sense strand
uaaacaggcccacagaugu

SEQ ID NO: 1039274 - RNA, 19 nt, Homo sapiens
  misc_RNA (1)...(19): siRNA sense strand
ccagcuggacauuacauua

SEQ ID NO: 1039275 - RNA, 19 nt, Homo sapiens
  misc_RNA (1)...(19): siRNA sense strand
ggagaggaauagucagcau

SEQ ID NO: 1039276 - RNA, 19 nt, Homo sapiens
  misc_RNA (1)...(19): siRNA sense strand
guccauaugcaauugauaa

SEQ ID NO: 1039277 - RNA, 19 nt, Homo sapiens
  misc_RNA (1)...(19): siRNA sense strand
gacaguuuaugaugaagau

SEQ ID NO: 1039278 - RNA, 19 nt, Homo sapiens
  misc_RNA (1)...(19): siRNA sense strand
gucuucacguucaacauua

SEQ ID NO: 1039279 - RNA, 19 nt, Homo sapiens
  misc_RNA (1)...(19): siRNA sense strand
gcuaacacauacugucuac

SEQ ID NO: 1039280 - RNA, 19 nt, Homo sapiens
  misc_RNA (1)...(19): siRNA sense strand
aagaaggggucaaaguuua

SEQ ID NO: 1039281 - RNA, 19 nt, Homo sapiens
  misc_RNA (1)...(19): siRNA sense strand
gagggacgagugauccaua

SEQ ID NO: 1039282 - RNA, 19 nt, Homo sapiens
  misc_RNA (1)...(19): siRNA sense strand
cagaaagccuacgucuuga

SEQ ID NO: 1039283 - RNA, 19 nt, Homo sapiens
  misc_RNA (1)...(19): siRNA sense strand
ucucauagcccauauaaaa

SEQ ID NO: 1039284 - RNA, 19 nt, Homo sapiens
  misc_RNA (1)...(19): siRNA sense strand
gaaaacagacucucuaaac

SEQ ID NO: 1039285 - RNA, 19 nt, Homo sapiens
  misc_RNA (1)...(19): siRNA sense strand
gacgagugauccauaugug

SEQ ID NO: 1039286 - RNA, 19 nt, Homo sapiens
  misc_RNA (1)...(19): siRNA sense strand
gagauacauuguccuuguc

SEQ ID NO: 1039287 - RNA, 19 nt, Homo sapiens
  misc_RNA (1)...(19): siRNA sense strand
gauauccauucaguucuug

SEQ ID NO: 1039288 - RNA, 19 nt, Homo sapiens
  misc_RNA (1)...(19): siRNA sense strand
cgagaggagauauuaaaga

SEQ ID NO: 1039289 - RNA, 19 nt, Homo sapiens
  misc_RNA (1)...(19): siRNA sense strand
ggacuacaggaugacuuua

SEQ ID NO: 1039290 - RNA, 19 nt, Homo sapiens
  misc_RNA (1)...(19): siRNA sense strand
aagaagaugacaaagauga

SEQ ID NO: 1039291 - RNA, 19 nt, Homo sapiens
  misc_RNA (1)...(19): siRNA sense strand
ucuaaacagcugcuacuaa

SEQ ID NO: 1039292 - RNA, 19 nt, Homo sapiens
  misc_RNA (1)...(19): siRNA sense strand
ucaaaauggugaacagaaa

SEQ ID NO: 1039293 - RNA, 19 nt, Homo sapiens
  misc_RNA (1)...(19): siRNA sense strand
aagcuuguauucugguuga

SEQ ID NO: 1039294 - RNA, 19 nt, Homo sapiens
  misc_RNA (1)...(19): siRNA sense strand
ggaggagucauugauauca

SEQ ID NO: 1039295 - RNA, 19 nt, Homo sapiens
  misc_RNA (1)...(19): siRNA sense strand
ugguagaacugaacaacga

SEQ ID NO: 1039296 - RNA, 19 nt, Homo sapiens
  misc_RNA (1)...(19): siRNA sense strand
ugaacuacuugacuuccuu

SEQ ID NO: 1039297 - RNA, 19 nt, Homo sapiens
  misc_RNA (1)...(19): siRNA sense strand
gauaacaaugaacuacuug

SEQ ID NO: 1039298 - RNA, 19 nt, Homo sapiens
  misc_RNA (1)...(19): siRNA sense strand
gaagaagaugacaaagaug

SEQ ID NO: 1039299 - RNA, 19 nt, Homo sapiens
  misc_RNA (1)...(19): siRNA sense strand
aagaagaagaugacaaaga

SEQ ID NO: 1039300 - RNA, 19 nt, Homo sapiens
  misc_RNA (1)...(19): siRNA sense strand
cuacguuaauaguugcuuu

SEQ ID NO: 1039301 - RNA, 19 nt, Homo sapiens
  misc_RNA (1)...(19): siRNA sense strand
gcugcauacuacguuaaua

SEQ ID NO: 1039302 - RNA, 19 nt, Homo sapiens
  misc_RNA (1)...(19): siRNA sense strand
agaaugaaacguuguguca

SEQ ID NO: 1039303 - RNA, 19 nt, Homo sapiens
  misc_RNA (1)...(19): siRNA sense strand
gcuggacauuacauuaaga

SEQ ID NO: 1039304 - RNA, 19 nt, Homo sapiens
  misc_RNA (1)...(19): siRNA sense strand
guagaacugaacaacgaua

SEQ ID NO: 1039305 - RNA, 19 nt, Homo sapiens
  misc_RNA (1)...(19): siRNA sense strand
aaguuuagcugcucgagau

SEQ ID NO: 1039306 - RNA, 19 nt, Homo sapiens
  misc_RNA (1)...(19): siRNA sense strand
gcauuccgcugagauacau

SEQ ID NO: 1039307 - RNA, 19 nt, Homo sapiens
  misc_RNA (1)...(19): siRNA sense strand
aagaacagaaguacauuga

SEQ ID NO: 1039308 - RNA, 19 nt, Homo sapiens
  misc_RNA (1)...(19): siRNA sense strand
caaagaacagaaguacauu

SEQ ID NO: 1039309 - RNA, 19 nt, Homo sapiens
  misc_RNA (1)...(19): siRNA sense strand
uauagcccauugaggauau

SEQ ID NO: 1039310 - RNA, 19 nt, Homo sapiens
  misc_RNA (1)...(19): siRNA sense strand
gaagaaagcacaguaauua

SEQ ID NO: 1039311 - RNA, 19 nt, Homo sapiens
  misc_RNA (1)...(19): siRNA sense strand
gaagaaagccgauugaaau

SEQ ID NO: 1039312 - RNA, 19 nt, Homo sapiens
  misc_RNA (1)...(19): siRNA sense strand
ccaaagagcuggaguaucu

SEQ ID NO: 1039313 - RNA, 19 nt, Homo sapiens
  misc_RNA (1)...(19): siRNA sense strand
gaaauuagaguacaacuug

SEQ ID NO: 1039314 - RNA, 19 nt, Homo sapiens
  misc_RNA (1)...(19): siRNA sense strand
gaagagagaugaagaaagc

SEQ ID NO: 1039315 - RNA, 19 nt, Homo sapiens
  misc_RNA (1)...(19): siRNA sense strand
gaaagcaauuuaucagcua

SEQ ID NO: 1039316 - RNA, 19 nt, Homo sapiens
  misc_RNA (1)...(19): siRNA sense strand
gaaauuggcuaaacuucug

SEQ ID NO: 1039317 - RNA, 19 nt, Homo sapiens
  misc_RNA (1)...(19): siRNA sense strand
gaucugggauugcgaagaa

SEQ ID NO: 1039318 - RNA, 19 nt, Homo sapiens
  misc_RNA (1)...(19): siRNA sense strand
gaucaacucugaacugcaa

SEQ ID NO: 1039319 - RNA, 19 nt, Homo sapiens
  misc_RNA (1)...(19): siRNA sense strand
gggaagcacuuggagaaua

SEQ ID NO: 1039320 - RNA, 19 nt, Homo sapiens
  misc_RNA (1)...(19): siRNA sense strand
gauaaagcgucaaaggauu

SEQ ID NO: 1039321 - RNA, 19 nt, Homo sapiens
  misc_RNA (1)...(19): siRNA sense strand
ggaagcacuuggagaauau

SEQ ID NO: 1039322 - RNA, 19 nt, Homo sapiens
  misc_RNA (1)...(19): siRNA sense strand
gaggagcucuauaacauug

SEQ ID NO: 1039323 - RNA, 19 nt, Homo sapiens
  misc_RNA (1)...(19): siRNA sense strand
gaaagccgauugaaauugg

SEQ ID NO: 1039324 - RNA, 19 nt, Homo sapiens
  misc_RNA (1)...(19): siRNA sense strand
gaaagaagaaagccgauug

SEQ ID NO: 1039325 - RNA, 19 nt, Homo sapiens
  misc_RNA (1)...(19): siRNA sense strand
uugagaagcuggagaauga

SEQ ID NO: 1039326 - RNA, 19 nt, Homo sapiens
  misc_RNA (1)...(19): siRNA sense strand
gaggaugacuuguauaaac

SEQ ID NO: 1039327 - RNA, 19 nt, Homo sapiens
  misc_RNA (1)...(19): siRNA sense strand
ccacacagauaguagaaga

SEQ ID NO: 1039328 - RNA, 19 nt, Homo sapiens
  misc_RNA (1)...(19): siRNA sense strand
aaacaaaggaugaccagua

SEQ ID NO: 1039329 - RNA, 19 nt, Homo sapiens
  misc_RNA (1)...(19): siRNA sense strand
ggacaaauucgaugaaauc

SEQ ID NO: 1039330 - RNA, 19 nt, Homo sapiens
  misc_RNA (1)...(19): siRNA sense strand
gaaguccgccacacagaua

SEQ ID NO: 1039331 - RNA, 19 nt, Homo sapiens
  misc_RNA (1)...(19): siRNA sense strand
agauuuggcugaugaauga

SEQ ID NO: 1039332 - RNA, 19 nt, Homo sapiens
  misc_RNA (1)...(19): siRNA sense strand
ccaaugauguccucaagau

SEQ ID NO: 1039333 - RNA, 19 nt, Homo sapiens
  misc_RNA (1)...(19): siRNA sense strand
gugaggagcucuauaacau

SEQ ID NO: 1039334 - RNA, 19 nt, Homo sapiens
  misc_RNA (1)...(19): siRNA sense strand
gaagaagagagaugaagaa

SEQ ID NO: 1039335 - RNA, 19 nt, Homo sapiens
  misc_RNA (1)...(19): siRNA sense strand
gaauacaacaugaucaaga

SEQ ID NO: 1039336 - RNA, 19 nt, Homo sapiens
  misc_RNA (1)...(19): siRNA sense strand
gaagaucaaucgccugcau

SEQ ID NO: 1039337 - RNA, 19 nt, Homo sapiens
  misc_RNA (1)...(19): siRNA sense strand
cuggugaacuucuuccuua

SEQ ID NO: 1039338 - RNA, 19 nt, Homo sapiens
  misc_RNA (1)...(19): siRNA sense strand
gaacaggugaagaauguga

SEQ ID NO: 1039339 - RNA, 19 nt, Homo sapiens
  misc_RNA (1)...(19): siRNA sense strand
uguauaaacuggugaacuu

SEQ ID NO: 1039340 - RNA, 19 nt, Homo sapiens
  misc_RNA (1)...(19): siRNA sense strand
gaaagcauuugagguggaa

SEQ ID NO: 1039341 - RNA, 19 nt, Homo sapiens
  misc_RNA (1)...(19): siRNA sense strand
gaagagggcaagcagaaga

SEQ ID NO: 1039342 - RNA, 19 nt, Homo sapiens
  misc_RNA (1)...(19): siRNA sense strand
acacagccuuggagaagua

SEQ ID NO: 1039343 - RNA, 19 nt, Homo sapiens
  misc_RNA (1)...(19): siRNA sense strand
ugaagaaaguagaggacua

SEQ ID NO: 1039344 - RNA, 19 nt, Homo sapiens
  misc_RNA (1)...(19): siRNA sense strand
aagaacaggugaagaaugu

SEQ ID NO: 1039345 - RNA, 19 nt, Homo sapiens
  misc_RNA (1)...(19): siRNA sense strand
gcuaaaccaagagaaauua

SEQ ID NO: 1039346 - RNA, 19 nt, Homo sapiens
  misc_RNA (1)...(19): siRNA sense strand
gaauugaaagugaggauga

SEQ ID NO: 1039347 - RNA, 19 nt, Homo sapiens
  misc_RNA (1)...(19): siRNA sense strand
ugaaggauuugaagaaaca

SEQ ID NO: 1039348 - RNA, 19 nt, Homo sapiens
  misc_RNA (1)...(19): siRNA sense strand
gaaaguagaggacuaugag

SEQ ID NO: 1039349 - RNA, 19 nt, Homo sapiens
  misc_RNA (1)...(19): siRNA sense strand
gaacguggacgagcacuug

SEQ ID NO: 1039350 - RNA, 19 nt, Homo sapiens
  misc_RNA (1)...(19): siRNA sense strand
ucaaucgccugcaugauau

SEQ ID NO: 1039351 - RNA, 19 nt, Homo sapiens
  misc_RNA (1)...(19): siRNA sense strand
gcacuuguccacccagauu

SEQ ID NO: 1039352 - RNA, 19 nt, Homo sapiens
  misc_RNA (1)...(19): siRNA sense strand
gaagaaaguagaggacuau

SEQ ID NO: 1039353 - RNA, 19 nt, Homo sapiens
  misc_RNA (1)...(19): siRNA sense strand
ugaagaaacagucagauga

SEQ ID NO: 1039354 - RNA, 19 nt, Homo sapiens
  misc_RNA (1)...(19): siRNA sense strand
gaugaaaucaccucaaagu

SEQ ID NO: 1039355 - RNA, 19 nt, Homo sapiens
  misc_RNA (1)...(19): siRNA sense strand
gagauaaagcgucaaagga

SEQ ID NO: 1039356 - RNA, 19 nt, Homo sapiens
  misc_RNA (1)...(19): siRNA sense strand
gaagaacaggugaagaaug

SEQ ID NO: 1039357 - RNA, 19 nt, Homo sapiens
  misc_RNA (1)...(19): siRNA sense strand
ucgaugaaaucaccucaaa

SEQ ID NO: 1039358 - RNA, 19 nt, Homo sapiens
  misc_RNA (1)...(19): siRNA sense strand
auaucgagcucaccguuua

SEQ ID NO: 1039359 - RNA, 19 nt, Homo sapiens
  misc_RNA (1)...(19): siRNA sense strand
gauaguagaagaaaugcuu

SEQ ID NO: 1039360 - RNA, 19 nt, Homo sapiens
  misc_RNA (1)...(19): siRNA sense strand
ccuaauagccagagccuuu

SEQ ID NO: 1039361 - RNA, 19 nt, Homo sapiens
  misc_RNA (1)...(19): siRNA sense strand
caagagaaauuagaguaca

SEQ ID NO: 1039362 - RNA, 19 nt, Homo sapiens
  misc_RNA (1)...(19): siRNA sense strand
gaugaagaaagcacaguaa

SEQ ID NO: 1039363 - RNA, 19 nt, Homo sapiens
  misc_RNA (1)...(19): siRNA sense strand
agaaagccaugaggcauuu

SEQ ID NO: 1039364 - RNA, 19 nt, Homo sapiens
  misc_RNA (1)...(19): siRNA sense strand
caaaggaugaccaguaugu

SEQ ID NO: 1039365 - RNA, 19 nt, Homo sapiens
  misc_RNA (1)...(19): siRNA sense strand
ucaaggagcuacagaaagc

SEQ ID NO: 1039366 - RNA, 19 nt, Homo sapiens
  misc_RNA (1)...(19): siRNA sense strand
gagcuggaguaucuuaaca

SEQ ID NO: 1039367 - RNA, 19 nt, Homo sapiens
  misc_RNA (1)...(19): siRNA sense strand
ggugaagaaugugaugaaa

SEQ ID NO: 1039368 - RNA, 19 nt, Homo sapiens
  misc_RNA (1)...(19): siRNA sense strand
ggagcaggaugugcagauu

SEQ ID NO: 1039369 - RNA, 19 nt, Homo sapiens
  misc_RNA (1)...(19): siRNA sense strand
ugaagaaagcacaguaauu

SEQ ID NO: 1039370 - RNA, 19 nt, Homo sapiens
  misc_RNA (1)...(19): siRNA sense strand
gcagaggaaagcaauuuau

SEQ ID NO: 1039371 - RNA, 19 nt, Homo sapiens
  misc_RNA (1)...(19): siRNA sense strand
ccagguggcuauagauauc

SEQ ID NO: 1039372 - RNA, 19 nt, Homo sapiens
  misc_RNA (1)...(19): siRNA sense strand
gugaacuucuuccuuaaau

SEQ ID NO: 1039373 - RNA, 19 nt, Homo sapiens
  misc_RNA (1)...(19): siRNA sense strand
gugaggaugacuuguauaa

SEQ ID NO: 1039374 - RNA, 19 nt, Homo sapiens
  misc_RNA (1)...(19): siRNA sense strand
gaucaaagcaagagcuaca

SEQ ID NO: 1039375 - RNA, 19 nt, Homo sapiens
  misc_RNA (1)...(19): siRNA sense strand
aacaaaggaugaccaguau

SEQ ID NO: 1039376 - RNA, 19 nt, Homo sapiens
  misc_RNA (1)...(19): siRNA sense strand
caagagcuacaaacagaaa

SEQ ID NO: 1039377 - RNA, 19 nt, Homo sapiens
  misc_RNA (1)...(19): siRNA sense strand
gaagaauacaacaugauca

SEQ ID NO: 1039378 - RNA, 19 nt, Homo sapiens
  misc_RNA (1)...(19): siRNA sense strand
gggaagagggcaagcagaa

SEQ ID NO: 1039379 - RNA, 19 nt, Homo sapiens
  misc_RNA (1)...(19): siRNA sense strand
ccgaguuggugacaaauau

SEQ ID NO: 1039380 - RNA, 19 nt, Homo sapiens
  misc_RNA (1)...(19): siRNA sense strand
agcaagagcuacaaacaga

SEQ ID NO: 1039381 - RNA, 19 nt, Homo sapiens
  misc_RNA (1)...(19): siRNA sense strand
agaagaaagccgauugaaa

SEQ ID NO: 1039382 - RNA, 19 nt, Homo sapiens
  misc_RNA (1)...(19): siRNA sense strand
ggaggcgaaggaccuaaua

SEQ ID NO: 1039383 - RNA, 19 nt, Homo sapiens
  misc_RNA (1)...(19): siRNA sense strand
ggaagaaagccugguggaa

SEQ ID NO: 1039384 - RNA, 19 nt, Homo sapiens
  misc_RNA (1)...(19): siRNA sense strand
ggauugagaagcuggagaa

SEQ ID NO: 1039385 - RNA, 19 nt, Homo sapiens
  misc_RNA (1)...(19): siRNA sense strand
acuccaagaucaacucuga

SEQ ID NO: 1039386 - RNA, 19 nt, Homo sapiens
  misc_RNA (1)...(19): siRNA sense strand
gagcucaccguuuaucuuc

SEQ ID NO: 1039387 - RNA, 19 nt, Homo sapiens
  misc_RNA (1)...(19): siRNA sense strand
ccaguaauaagaagaaaug

SEQ ID NO: 1039388 - RNA, 19 nt, Homo sapiens
  misc_RNA (1)...(19): siRNA sense strand
gcacuuggagaauauuuag

SEQ ID NO: 1039389 - RNA, 19 nt, Homo sapiens
  misc_RNA (1)...(19): siRNA sense strand
caggacaaauucgaugaaa

SEQ ID NO: 1039390 - RNA, 19 nt, Homo sapiens
  misc_RNA (1)...(19): siRNA sense strand
ggagauaaagcgucaaagg

SEQ ID NO: 1039391 - RNA, 19 nt, Homo sapiens
  misc_RNA (1)...(19): siRNA sense strand
cgggagauuuggcugauga

SEQ ID NO: 1039392 - RNA, 19 nt, Homo sapiens
  misc_RNA (1)...(19): siRNA sense strand
gaaggagagugaggaggau

SEQ ID NO: 1039393 - RNA, 19 nt, Homo sapiens
  misc_RNA (1)...(19): siRNA sense strand
accaguaugugaaggauuu

SEQ ID NO: 1039394 - RNA, 19 nt, Homo sapiens
  misc_RNA (1)...(19): siRNA sense strand
gaggagauaaagcgucaaa

SEQ ID NO: 1039395 - RNA, 19 nt, Homo sapiens
  misc_RNA (1)...(19): siRNA sense strand
cagcagaggaaagcaauuu

SEQ ID NO: 1039396 - RNA, 19 nt, Homo sapiens
  misc_RNA (1)...(19): siRNA sense strand
gcuacaaacagaaagaaga

SEQ ID NO: 1039397 - RNA, 19 nt, Homo sapiens
  misc_RNA (1)...(19): siRNA sense strand
gaagcuggagaaugaaguu

SEQ ID NO: 1039398 - RNA, 19 nt, Homo sapiens
  misc_RNA (1)...(19): siRNA sense strand
gagauuuggcugaugaaug

SEQ ID NO: 1039399 - RNA, 19 nt, Homo sapiens
  misc_RNA (1)...(19): siRNA sense strand
uggaagaacaggugaagaa

SEQ ID NO: 1039400 - RNA, 19 nt, Homo sapiens
  misc_RNA (1)...(19): siRNA sense strand
ugugaaggauuugaagaaa

SEQ ID NO: 1039401 - RNA, 19 nt, Homo sapiens
  misc_RNA (1)...(19): siRNA sense strand
cuacaaacagaaagaagaa

SEQ ID NO: 1039402 - RNA, 19 nt, Homo sapiens
  misc_RNA (1)...(19): siRNA sense strand
gcgggaagcacuuggagaa

SEQ ID NO: 1039403 - RNA, 19 nt, Homo sapiens
  misc_RNA (1)...(19): siRNA sense strand
cgaguuacagcaggaguua

SEQ ID NO: 1039404 - RNA, 19 nt, Homo sapiens
  misc_RNA (1)...(19): siRNA sense strand
caagaucaacucugaacug

SEQ ID NO: 1039405 - RNA, 19 nt, Homo sapiens
  misc_RNA (1)...(19): siRNA sense strand
gaagagaauuccccaagag

SEQ ID NO: 1039406 - RNA, 19 nt, Homo sapiens
  misc_RNA (1)...(19): siRNA sense strand
gauugaaauuggcuaaacu

SEQ ID NO: 1039407 - RNA, 19 nt, Homo sapiens
  misc_RNA (1)...(19): siRNA sense strand
acagauaguagaagaaaug

SEQ ID NO: 1039408 - RNA, 19 nt, Homo sapiens
  misc_RNA (1)...(19): siRNA sense strand
ggaagaacaggugaagaau

SEQ ID NO: 1039409 - RNA, 19 nt, Homo sapiens
  misc_RNA (1)...(19): siRNA sense strand
ugaagaagagagaugaaga

SEQ ID NO: 1039410 - RNA, 19 nt, Homo sapiens
  misc_RNA (1)...(19): siRNA sense strand
gaagagaaguuuaccuuua

SEQ ID NO: 1039411 - RNA, 19 nt, Homo sapiens
  misc_RNA (1)...(19): siRNA sense strand
gaacaucucuucguacuaa

SEQ ID NO: 1039412 - RNA, 19 nt, Homo sapiens
  misc_RNA (1)...(19): siRNA sense strand
cccaacagcuuccuuaaua

SEQ ID NO: 1039413 - RNA, 19 nt, Homo sapiens
  misc_RNA (1)...(19): siRNA sense strand
gcugaugcauugcucauua

SEQ ID NO: 1039414 - RNA, 19 nt, Homo sapiens
  misc_RNA (1)...(19): siRNA sense strand
gaacacaggugagccaaug

SEQ ID NO: 1039415 - RNA, 19 nt, Homo sapiens
  misc_RNA (1)...(19): siRNA sense strand
gaaagucuguggcgauuca

SEQ ID NO: 1039416 - RNA, 19 nt, Homo sapiens
  misc_RNA (1)...(19): siRNA sense strand
gggaaacacuuauagaugu

SEQ ID NO: 1039417 - RNA, 19 nt, Homo sapiens
  misc_RNA (1)...(19): siRNA sense strand
gaaguaggcguaugggaua

SEQ ID NO: 1039418 - RNA, 19 nt, Homo sapiens
  misc_RNA (1)...(19): siRNA sense strand
aaacauaagcccaguguaa

SEQ ID NO: 1039419 - RNA, 19 nt, Homo sapiens
  misc_RNA (1)...(19): siRNA sense strand
ggacagggaaacacuuaua

SEQ ID NO: 1039420 - RNA, 19 nt, Homo sapiens
  misc_RNA (1)...(19): siRNA sense strand
ggguagcccugaauucuuu

SEQ ID NO: 1039421 - RNA, 19 nt, Homo sapiens
  misc_RNA (1)...(19): siRNA sense strand
cagaagcccugauuaaaca

SEQ ID NO: 1039422 - RNA, 19 nt, Homo sapiens
  misc_RNA (1)...(19): siRNA sense strand
ggauaacuauuguguaaag

SEQ ID NO: 1039423 - RNA, 19 nt, Homo sapiens
  misc_RNA (1)...(19): siRNA sense strand
ugggauaacuauuguguaa

SEQ ID NO: 1039424 - RNA, 19 nt, Homo sapiens
  misc_RNA (1)...(19): siRNA sense strand
gccagaacaucucuucgua

SEQ ID NO: 1039425 - RNA, 19 nt, Homo sapiens
  misc_RNA (1)...(19): siRNA sense strand
gcuggaaugucuucucuga

SEQ ID NO: 1039426 - RNA, 19 nt, Homo sapiens
  misc_RNA (1)...(19): siRNA sense strand
uggaaugucuucucugaaa

SEQ ID NO: 1039427 - RNA, 19 nt, Homo sapiens
  misc_RNA (1)...(19): siRNA sense strand
ugaaacugauacaagcuua

SEQ ID NO: 1039428 - RNA, 19 nt, Homo sapiens
  misc_RNA (1)...(19): siRNA sense strand
ggagacaucaaacuuacua

SEQ ID NO: 1039429 - RNA, 19 nt, Homo sapiens
  misc_RNA (1)...(19): siRNA sense strand
aaagcaagaugaaccuauu

SEQ ID NO: 1039430 - RNA, 19 nt, Homo sapiens
  misc_RNA (1)...(19): siRNA sense strand
ggaaacacuuauagaugug

SEQ ID NO: 1039431 - RNA, 19 nt, Homo sapiens
  misc_RNA (1)...(19): siRNA sense strand
gcacugugauugccaccaa

SEQ ID NO: 1039432 - RNA, 19 nt, Homo sapiens
  misc_RNA (1)...(19): siRNA sense strand
gagaagagaaguuuaccuu

SEQ ID NO: 1039433 - RNA, 19 nt, Homo sapiens
  misc_RNA (1)...(19): siRNA sense strand
cgauucagauaaaggauuu

SEQ ID NO: 1039434 - RNA, 19 nt, Homo sapiens
  misc_RNA (1)...(19): siRNA sense strand
caacagcccaggaugauau

SEQ ID NO: 1039435 - RNA, 19 nt, Homo sapiens
  misc_RNA (1)...(19): siRNA sense strand
gcuggagacaucaaacuua

SEQ ID NO: 1039436 - RNA, 19 nt, Homo sapiens
  misc_RNA (1)...(19): siRNA sense strand
gaucaaaggaccaaauaag

SEQ ID NO: 1039437 - RNA, 19 nt, Homo sapiens
  misc_RNA (1)...(19): siRNA sense strand
ggacaugcaggacuuguau

SEQ ID NO: 1039438 - RNA, 19 nt, Homo sapiens
  misc_RNA (1)...(19): siRNA sense strand
augcaggacuuguauauga

SEQ ID NO: 1039439 - RNA, 19 nt, Homo sapiens
  misc_RNA (1)...(19): siRNA sense strand
uaacgugucauuagaguau

SEQ ID NO: 1039440 - RNA, 19 nt, Homo sapiens
  misc_RNA (1)...(19): siRNA sense strand
gcagaagcccugauuaaac

SEQ ID NO: 1039441 - RNA, 19 nt, Homo sapiens
  misc_RNA (1)...(19): siRNA sense strand
gagcacggcauccugauau

SEQ ID NO: 1039442 - RNA, 19 nt, Homo sapiens
  misc_RNA (1)...(19): siRNA sense strand
cgugaaagcugaaagaaaa

SEQ ID NO: 1039443 - RNA, 19 nt, Homo sapiens
  misc_RNA (1)...(19): siRNA sense strand
ccaugaagaugcucguuuc

SEQ ID NO: 1039444 - RNA, 19 nt, Homo sapiens
  misc_RNA (1)...(19): siRNA sense strand
ugauauaacuggugauggu

SEQ ID NO: 1039445 - RNA, 19 nt, Homo sapiens
  misc_RNA (1)...(19): siRNA sense strand
gagcuggaaugucuucucu

SEQ ID NO: 1039446 - RNA, 19 nt, Homo sapiens
  misc_RNA (1)...(19): siRNA sense strand
ugaacuugcagaugucuua

SEQ ID NO: 1039447 - RNA, 19 nt, Homo sapiens
  misc_RNA (1)...(19): siRNA sense strand
gaaacaggcggaucucuac

SEQ ID NO: 1039448 - RNA, 19 nt, Homo sapiens
  misc_RNA (1)...(19): siRNA sense strand
uuggagagcugcugaaaca

SEQ ID NO: 1039449 - RNA, 19 nt, Homo sapiens
  misc_RNA (1)...(19): siRNA sense strand
ucagauaaaggauuuguug

SEQ ID NO: 1039450 - RNA, 19 nt, Homo sapiens
  misc_RNA (1)...(19): siRNA sense strand
gaaacugauacaagcuuaa

SEQ ID NO: 1039451 - RNA, 19 nt, Homo sapiens
  misc_RNA (1)...(19): siRNA sense strand
caaaguaagcagagagaug

SEQ ID NO: 1039452 - RNA, 19 nt, Homo sapiens
  misc_RNA (1)...(19): siRNA sense strand
ccaaauaagcacacacuca

SEQ ID NO: 1039453 - RNA, 19 nt, Homo sapiens
  misc_RNA (1)...(19): siRNA sense strand
cuauugaucucuucaugau

SEQ ID NO: 1039454 - RNA, 19 nt, Homo sapiens
  misc_RNA (1)...(19): siRNA sense strand
gaagcccugauuaaacaua

SEQ ID NO: 1039455 - RNA, 19 nt, Homo sapiens
  misc_RNA (1)...(19): siRNA sense strand
ggcagaagcccugauuaaa

SEQ ID NO: 1039456 - RNA, 19 nt, Homo sapiens
  misc_RNA (1)...(19): siRNA sense strand
aggcggaucucuacauuuc

SEQ ID NO: 1039457 - RNA, 19 nt, Homo sapiens
  misc_RNA (1)...(19): siRNA sense strand
caagagugcagaagagaga

SEQ ID NO: 1039458 - RNA, 19 nt, Homo sapiens
  misc_RNA (1)...(19): siRNA sense strand
uugcagaugucuuaacaga

SEQ ID NO: 1039459 - RNA, 19 nt, Homo sapiens
  misc_RNA (1)...(19): siRNA sense strand
gaugguacgacuucuaaug

SEQ ID NO: 1039460 - RNA, 19 nt, Homo sapiens
  misc_RNA (1)...(19): siRNA sense strand
ggagcacggcauccugaua

SEQ ID NO: 1039461 - RNA, 19 nt, Homo sapiens
  misc_RNA (1)...(19): siRNA sense strand
caagaugaaccuauugauc

SEQ ID NO: 1039462 - RNA, 19 nt, Homo sapiens
  misc_RNA (1)...(19): siRNA sense strand
ugaaacaggcggaucucua

SEQ ID NO: 1039463 - RNA, 19 nt, Homo sapiens
  misc_RNA (1)...(19): siRNA sense strand
ccaacagcuuccuuaauag

SEQ ID NO: 1039464 - RNA, 19 nt, Homo sapiens
  misc_RNA (1)...(19): siRNA sense strand
ggaaugucuucucugaaag

SEQ ID NO: 1039465 - RNA, 19 nt, Homo sapiens
  misc_RNA (1)...(19): siRNA sense strand
caugcgagcuggaaugucu

SEQ ID NO: 1039466 - RNA, 19 nt, Homo sapiens
  misc_RNA (1)...(19): siRNA sense strand
gcucauuauucccaagguu

SEQ ID NO: 1039467 - RNA, 19 nt, Homo sapiens
  misc_RNA (1)...(19): siRNA sense strand
uggcagaagcccugauuaa

SEQ ID NO: 1039468 - RNA, 19 nt, Homo sapiens
  misc_RNA (1)...(19): siRNA sense strand
gaaguuuaccuuuauugag

SEQ ID NO: 1039469 - RNA, 19 nt, Homo sapiens
  misc_RNA (1)...(19): siRNA sense strand
gcaacagcccaggaugaua

SEQ ID NO: 1039470 - RNA, 19 nt, Homo sapiens
  misc_RNA (1)...(19): siRNA sense strand
cagaacaucucuucguacu

SEQ ID NO: 1039471 - RNA, 19 nt, Homo sapiens
  misc_RNA (1)...(19): siRNA sense strand
gagaaguuuaccuuuauug

SEQ ID NO: 1039472 - RNA, 19 nt, Homo sapiens
  misc_RNA (1)...(19): siRNA sense strand
augcauacauccucacuug

SEQ ID NO: 1039473 - RNA, 19 nt, Homo sapiens
  misc_RNA (1)...(19): siRNA sense strand
gaacuugcagaugucuuaa

SEQ ID NO: 1039474 - RNA, 19 nt, Homo sapiens
  misc_RNA (1)...(19): siRNA sense strand
gaggcugacucuugcuugu

SEQ ID NO: 1039475 - RNA, 19 nt, Homo sapiens
  misc_RNA (1)...(19): siRNA sense strand
auugaucucuucaugauug

SEQ ID NO: 1039476 - RNA, 19 nt, Homo sapiens
  misc_RNA (1)...(19): siRNA sense strand
gugaugguacgacuucuaa

SEQ ID NO: 1039477 - RNA, 19 nt, Homo sapiens
  misc_RNA (1)...(19): siRNA sense strand
gcguaugggauaacuauug

SEQ ID NO: 1039478 - RNA, 19 nt, Homo sapiens
  misc_RNA (1)...(19): siRNA sense strand
cuucaggaaacauuaguua

SEQ ID NO: 1039479 - RNA, 19 nt, Homo sapiens
  misc_RNA (1)...(19): siRNA sense strand
gaguauacauugggagaag

SEQ ID NO: 1039480 - RNA, 19 nt, Homo sapiens
  misc_RNA (1)...(19): siRNA sense strand
gaagugaauucuggcuuuu

SEQ ID NO: 1039481 - RNA, 19 nt, Homo sapiens
  misc_RNA (1)...(19): siRNA sense strand
gcacggcauccugauauga

SEQ ID NO: 1039482 - RNA, 19 nt, Homo sapiens
  misc_RNA (1)...(19): siRNA sense strand
gcggaucucuacauuucug

SEQ ID NO: 1039483 - RNA, 19 nt, Homo sapiens
  misc_RNA (1)...(19): siRNA sense strand
acaggcggaucucuacauu

SEQ ID NO: 1039484 - RNA, 19 nt, Homo sapiens
  misc_RNA (1)...(19): siRNA sense strand
uuaaucagagggcuuguuu

SEQ ID NO: 1039485 - RNA, 19 nt, Homo sapiens
  misc_RNA (1)...(19): siRNA sense strand
cguaugggauaacuauugu

SEQ ID NO: 1039486 - RNA, 19 nt, Homo sapiens
  misc_RNA (1)...(19): siRNA sense strand
uuacaagagugcagaagag

SEQ ID NO: 1039487 - RNA, 19 nt, Homo sapiens
  misc_RNA (1)...(19): siRNA sense strand
gauauaacuggugauggua

SEQ ID NO: 1039488 - RNA, 19 nt, Homo sapiens
  misc_RNA (1)...(19): siRNA sense strand
gaucaugcgagcuggaaug

SEQ ID NO: 1039489 - RNA, 19 nt, Homo sapiens
  misc_RNA (1)...(19): siRNA sense strand
cauugaagauaggguuaaa

SEQ ID NO: 1039490 - RNA, 19 nt, Homo sapiens
  misc_RNA (1)...(19): siRNA sense strand
ggaagaagucaaaguaagc

SEQ ID NO: 1039491 - RNA, 19 nt, Homo sapiens
  misc_RNA (1)...(19): siRNA sense strand
uggaagaagucaaaguaag

SEQ ID NO: 1039492 - RNA, 19 nt, Homo sapiens
  misc_RNA (1)...(19): siRNA sense strand
ggccuucauccuagaauaa

SEQ ID NO: 1039493 - RNA, 19 nt, Homo sapiens
  misc_RNA (1)...(19): siRNA sense strand
caucaaacuuacuaaagac

SEQ ID NO: 1039494 - RNA, 19 nt, Homo sapiens
  misc_RNA (1)...(19): siRNA sense strand
gacaucaaacuuacuaaag

SEQ ID NO: 1039495 - RNA, 19 nt, Homo sapiens
  misc_RNA (1)...(19): siRNA sense strand
ucaagcagaacauucagaa

SEQ ID NO: 1039496 - RNA, 19 nt, Homo sapiens
  misc_RNA (1)...(19): siRNA sense strand
ggaaguggcaauggcagaa

SEQ ID NO: 1039497 - RNA, 19 nt, Homo sapiens
  misc_RNA (1)...(19): siRNA sense strand
ucaaaggaccaaauaagca

SEQ ID NO: 1039498 - RNA, 19 nt, Homo sapiens
  misc_RNA (1)...(19): siRNA sense strand
gaagaagucaaaguaagca

SEQ ID NO: 1039499 - RNA, 19 nt, Homo sapiens
  misc_RNA (1)...(19): siRNA sense strand
augcugaacuugcagaugu

SEQ ID NO: 1039500 - RNA, 19 nt, Homo sapiens
  misc_RNA (1)...(19): siRNA sense strand
ucacauuauugaucaaagg

SEQ ID NO: 1039501 - RNA, 19 nt, Homo sapiens
  misc_RNA (1)...(19): siRNA sense strand
gaugauauaacuggugaug

SEQ ID NO: 1039502 - RNA, 19 nt, Homo sapiens
  misc_RNA (1)...(19): siRNA sense strand
guaacaacccucguucugu

SEQ ID NO: 1039503 - RNA, 19 nt, Homo sapiens
  misc_RNA (1)...(19): siRNA sense strand
cuuguaacgugucauuaga

SEQ ID NO: 1039504 - RNA, 19 nt, Homo sapiens
  misc_RNA (1)...(19): siRNA sense strand
gcaagaugaaccuauugau

SEQ ID NO: 1039505 - RNA, 19 nt, Homo sapiens
  misc_RNA (1)...(19): siRNA sense strand
cagcuuccuuaauagcaaa

SEQ ID NO: 1039506 - RNA, 19 nt, Homo sapiens
  misc_RNA (1)...(19): siRNA sense strand
aaugguggcagcagaagua

SEQ ID NO: 1039507 - RNA, 19 nt, Homo sapiens
  misc_RNA (1)...(19): siRNA sense strand
gcaaauucaacacccaaca

SEQ ID NO: 1039508 - RNA, 19 nt, Homo sapiens
  misc_RNA (1)...(19): siRNA sense strand
acacccaacagcuuccuua

SEQ ID NO: 1039509 - RNA, 19 nt, Homo sapiens
  misc_RNA (1)...(19): siRNA sense strand
aagcccugauuaaacauaa

SEQ ID NO: 1039510 - RNA, 19 nt, Homo sapiens
  misc_RNA (1)...(19): siRNA sense strand
gccaguaucucguaugauu

SEQ ID NO: 1039511 - RNA, 19 nt, Homo sapiens
  misc_RNA (1)...(19): siRNA sense strand
ggacuccuguuccucauga

SEQ ID NO: 1039512 - RNA, 19 nt, Homo sapiens
  misc_RNA (1)...(19): siRNA sense strand
gcaccugcuucauuuaaga

SEQ ID NO: 1039513 - RNA, 19 nt, Homo sapiens
  misc_RNA (1)...(19): siRNA sense strand
cugcaucgcuuauccguuu

SEQ ID NO: 1039514 - RNA, 19 nt, Homo sapiens
  misc_RNA (1)...(19): siRNA sense strand
ccauuucccucuguacuua

SEQ ID NO: 1039515 - RNA, 19 nt, Homo sapiens
  misc_RNA (1)...(19): siRNA sense strand
ucccaaagcuaauuuauag

SEQ ID NO: 1039516 - RNA, 19 nt, Homo sapiens
  misc_RNA (1)...(19): siRNA sense strand
gaccaagauugcacagcua

SEQ ID NO: 1039517 - RNA, 19 nt, Homo sapiens
  misc_RNA (1)...(19): siRNA sense strand
gcacggccaucaaguacca

SEQ ID NO: 1039518 - RNA, 19 nt, Homo sapiens
  misc_RNA (1)...(19): siRNA sense strand
gguuacagcugguccaucu

SEQ ID NO: 1039519 - RNA, 19 nt, Homo sapiens
  misc_RNA (1)...(19): siRNA sense strand
ccaagaccauacagcaaga

SEQ ID NO: 1039520 - RNA, 19 nt, Homo sapiens
  misc_RNA (1)...(19): siRNA sense strand
ggacaucgacacccucauc

SEQ ID NO: 1039521 - RNA, 19 nt, Homo sapiens
  misc_RNA (1)...(19): siRNA sense strand
ggcagagacuccacgguau

SEQ ID NO: 1039522 - RNA, 19 nt, Homo sapiens
  misc_RNA (1)...(19): siRNA sense strand
aguggcaccugcuucauuu

SEQ ID NO: 1039523 - RNA, 19 nt, Homo sapiens
  misc_RNA (1)...(19): siRNA sense strand
gcagagacuccacgguaug

SEQ ID NO: 1039524 - RNA, 19 nt, Homo sapiens
  misc_RNA (1)...(19): siRNA sense strand
ccgccaguaucucguauga

SEQ ID NO: 1039525 - RNA, 19 nt, Homo sapiens
  misc_RNA (1)...(19): siRNA sense strand
gaaccggcucccaaagcua

SEQ ID NO: 1039526 - RNA, 19 nt, Homo sapiens
  misc_RNA (1)...(19): siRNA sense strand
gaguggcaccugcuucauu

SEQ ID NO: 1039527 - RNA, 19 nt, Homo sapiens
  misc_RNA (1)...(19): siRNA sense strand
ccucaugacagggauauuu

SEQ ID NO: 1039528 - RNA, 19 nt, Homo sapiens
  misc_RNA (1)...(19): siRNA sense strand
uuacagcugguccaucuuu

SEQ ID NO: 1039529 - RNA, 19 nt, Homo sapiens
  misc_RNA (1)...(19): siRNA sense strand
uuuauuagccggaccaaga

SEQ ID NO: 1039530 - RNA, 19 nt, Homo sapiens
  misc_RNA (1)...(19): siRNA sense strand
ucgcuuauccguuuauuag

SEQ ID NO: 1039531 - RNA, 19 nt, Homo sapiens
  misc_RNA (1)...(19): siRNA sense strand
caguaucucguaugauuug

SEQ ID NO: 1039532 - RNA, 19 nt, Homo sapiens
  misc_RNA (1)...(19): siRNA sense strand
ccagaagaaccgccugaug

SEQ ID NO: 1039533 - RNA, 19 nt, Homo sapiens
  misc_RNA (1)...(19): siRNA sense strand
cccauccgcuugcgaaaca

SEQ ID NO: 1039534 - RNA, 19 nt, Homo sapiens
  misc_RNA (1)...(19): siRNA sense strand
caagauugcacagcuaaag

SEQ ID NO: 1039535 - RNA, 19 nt, Homo sapiens
  misc_RNA (1)...(19): siRNA sense strand
gcucgucacggccaucuuc

SEQ ID NO: 1039536 - RNA, 19 nt, Homo sapiens
  misc_RNA (1)...(19): siRNA sense strand
ccaguaucucguaugauuu

SEQ ID NO: 1039537 - RNA, 19 nt, Homo sapiens
  misc_RNA (1)...(19): siRNA sense strand
caguuuaggcuuuauugug

SEQ ID NO: 1039538 - RNA, 19 nt, Homo sapiens
  misc_RNA (1)...(19): siRNA sense strand
uagccugccugcugaugug

SEQ ID NO: 1039539 - RNA, 19 nt, Homo sapiens
  misc_RNA (1)...(19): siRNA sense strand
gcgaaacauuccuuuuaau

SEQ ID NO: 1039540 - RNA, 19 nt, Homo sapiens
  misc_RNA (1)...(19): siRNA sense strand
gcaguuuaggcuuuauugu

SEQ ID NO: 1039541 - RNA, 19 nt, Homo sapiens
  misc_RNA (1)...(19): siRNA sense strand
cuggugcaguuuaggcuuu

SEQ ID NO: 1039542 - RNA, 19 nt, Homo sapiens
  misc_RNA (1)...(19): siRNA sense strand
uggcaccugcuucauuuaa

SEQ ID NO: 1039543 - RNA, 19 nt, Homo sapiens
  misc_RNA (1)...(19): siRNA sense strand
gaccauacagcaagaugag

SEQ ID NO: 1039544 - RNA, 19 nt, Homo sapiens
  misc_RNA (1)...(19): siRNA sense strand
cagagacuccacgguauga

SEQ ID NO: 1039545 - RNA, 19 nt, Homo sapiens
  misc_RNA (1)...(19): siRNA sense strand
ugaaccggcucccaaagcu

SEQ ID NO: 1039546 - RNA, 19 nt, Homo sapiens
  misc_RNA (1)...(19): siRNA sense strand
gcucccaaagcuaauuuau

SEQ ID NO: 1039547 - RNA, 19 nt, Homo sapiens
  misc_RNA (1)...(19): siRNA sense strand
ugcgaaacauuccuuuuaa

SEQ ID NO: 1039548 - RNA, 19 nt, Homo sapiens
  misc_RNA (1)...(19): siRNA sense strand
cucccaaagcuaauuuaua

SEQ ID NO: 1039549 - RNA, 19 nt, Homo sapiens
  misc_RNA (1)...(19): siRNA sense strand
ucgacacccucauccugaa

SEQ ID NO: 1039550 - RNA, 19 nt, Homo sapiens
  misc_RNA (1)...(19): siRNA sense strand
gggauauuuugcaccauuu

SEQ ID NO: 1039551 - RNA, 19 nt, Homo sapiens
  misc_RNA (1)...(19): siRNA sense strand
caucgcuuauccguuuauu

SEQ ID NO: 1039552 - RNA, 19 nt, Homo sapiens
  misc_RNA (1)...(19): siRNA sense strand
uaucucguaugauuugaac

SEQ ID NO: 1039553 - RNA, 19 nt, Homo sapiens
  misc_RNA (1)...(19): siRNA sense strand
cgacacccucauccugaaa

SEQ ID NO: 1039554 - RNA, 19 nt, Homo sapiens
  misc_RNA (1)...(19): siRNA sense strand
aaccggcucccaaagcuaa

SEQ ID NO: 1039555 - RNA, 19 nt, Homo sapiens
  misc_RNA (1)...(19): siRNA sense strand
ggcaccugcuucauuuaag

SEQ ID NO: 1039556 - RNA, 19 nt, Homo sapiens
  misc_RNA (1)...(19): siRNA sense strand
gaacaaggguggaauggaa

SEQ ID NO: 1039557 - RNA, 19 nt, Homo sapiens
  misc_RNA (1)...(19): siRNA sense strand
gaccagcccuugaagauca

SEQ ID NO: 1039558 - RNA, 19 nt, Homo sapiens
  misc_RNA (1)...(19): siRNA sense strand
gaaugaagccacucacaga

SEQ ID NO: 1039559 - RNA, 19 nt, Homo sapiens
  misc_RNA (1)...(19): siRNA sense strand
caggguacccggcaaauuu

SEQ ID NO: 1039560 - RNA, 19 nt, Homo sapiens
  misc_RNA (1)...(19): siRNA sense strand
ccugacaucucacacauug

SEQ ID NO: 1039561 - RNA, 19 nt, Homo sapiens
  misc_RNA (1)...(19): siRNA sense strand
ccaacacccugucaugaau

SEQ ID NO: 1039562 - RNA, 19 nt, Homo sapiens
  misc_RNA (1)...(19): siRNA sense strand
gcacaguggcuuuaagauc

SEQ ID NO: 1039563 - RNA, 19 nt, Homo sapiens
  misc_RNA (1)...(19): siRNA sense strand
gcuuuaagauccucaacug

SEQ ID NO: 1039564 - RNA, 19 nt, Homo sapiens
  misc_RNA (1)...(19): siRNA sense strand
cgacgguccugacaucuca

SEQ ID NO: 1039565 - RNA, 19 nt, Homo sapiens
  misc_RNA (1)...(19): siRNA sense strand
gaaaagauacuucugcaau

SEQ ID NO: 1039566 - RNA, 19 nt, Homo sapiens
  misc_RNA (1)...(19): siRNA sense strand
ucacagagggcaugaggaa

SEQ ID NO: 1039567 - RNA, 19 nt, Homo sapiens
  misc_RNA (1)...(19): siRNA sense strand
ucaaugacaacaacucuau

SEQ ID NO: 1039568 - RNA, 19 nt, Homo sapiens
  misc_RNA (1)...(19): siRNA sense strand
gaagggugcaagcgaguug

SEQ ID NO: 1039569 - RNA, 19 nt, Homo sapiens
  misc_RNA (1)...(19): siRNA sense strand
aagcagccguuggcagaua

SEQ ID NO: 1039570 - RNA, 19 nt, Homo sapiens
  misc_RNA (1)...(19): siRNA sense strand
gaaucaaguggcacccuuu

SEQ ID NO: 1039571 - RNA, 19 nt, Homo sapiens
  misc_RNA (1)...(19): siRNA sense strand
ggcccaggcugcagaaagu

SEQ ID NO: 1039572 - RNA, 19 nt, Homo sapiens
  misc_RNA (1)...(19): siRNA sense strand
gccaacacccugucaugaa

SEQ ID NO: 1039573 - RNA, 19 nt, Homo sapiens
  misc_RNA (1)...(19): siRNA sense strand
auccagaaauuguguauuc

SEQ ID NO: 1039574 - RNA, 19 nt, Homo sapiens
  misc_RNA (1)...(19): siRNA sense strand
gggaagcuaugaugaacac

SEQ ID NO: 1039575 - RNA, 19 nt, Homo sapiens
  misc_RNA (1)...(19): siRNA sense strand
ccgacucgcugguguaugg

SEQ ID NO: 1039576 - RNA, 19 nt, Homo sapiens
  misc_RNA (1)...(19): siRNA sense strand
cagagggcaugaggaagaa

SEQ ID NO: 1039577 - RNA, 19 nt, Homo sapiens
  misc_RNA (1)...(19): siRNA sense strand
cugcaauccuggacaugaa

SEQ ID NO: 1039578 - RNA, 19 nt, Homo sapiens
  misc_RNA (1)...(19): siRNA sense strand
ccacgggaagcuaugauga

SEQ ID NO: 1039579 - RNA, 19 nt, Homo sapiens
  misc_RNA (1)...(19): siRNA sense strand
ugaagaucaucagcaguga

SEQ ID NO: 1039580 - RNA, 19 nt, Homo sapiens
  misc_RNA (1)...(19): siRNA sense strand
gggaccagcccuugaagau

SEQ ID NO: 1039581 - RNA, 19 nt, Homo sapiens
  misc_RNA (1)...(19): siRNA sense strand
ggccgucucuuccuguaca

SEQ ID NO: 1039582 - RNA, 19 nt, Homo sapiens
  misc_RNA (1)...(19): siRNA sense strand
acagagggcaugaggaaga

SEQ ID NO: 1039583 - RNA, 19 nt, Homo sapiens
  misc_RNA (1)...(19): siRNA sense strand
ggagcagugucuggcuuug

SEQ ID NO: 1039584 - RNA, 19 nt, Homo sapiens
  misc_RNA (1)...(19): siRNA sense strand
ggcuggacaugcccucuug

SEQ ID NO: 1039585 - RNA, 19 nt, Homo sapiens
  misc_RNA (1)...(19): siRNA sense strand
gccaguggauccauacaac

SEQ ID NO: 1039586 - RNA, 19 nt, Homo sapiens
  misc_RNA (1)...(19): siRNA sense strand
gaagcuaugaugaacacau

SEQ ID NO: 1039587 - RNA, 19 nt, Homo sapiens
  misc_RNA (1)...(19): siRNA sense strand
gccacgugcuggagccauu

SEQ ID NO: 1039588 - RNA, 19 nt, Homo sapiens
  misc_RNA (1)...(19): siRNA sense strand
ccucauggcaggcacauca

SEQ ID NO: 1039589 - RNA, 19 nt, Homo sapiens
  misc_RNA (1)...(19): siRNA sense strand
ggacacacgaaacaugaag

SEQ ID NO: 1039590 - RNA, 19 nt, Homo sapiens
  misc_RNA (1)...(19): siRNA sense strand
ucaauucgaggccuggauu

SEQ ID NO: 1039591 - RNA, 19 nt, Homo sapiens
  misc_RNA (1)...(19): siRNA sense strand
caagacggcagaccugaag

SEQ ID NO: 1039592 - RNA, 19 nt, Homo sapiens
  misc_RNA (1)...(19): siRNA sense strand
uggucgagguccaaagaaa

SEQ ID NO: 1039593 - RNA, 19 nt, Homo sapiens
  misc_RNA (1)...(19): siRNA sense strand
ccaccugcuccuucuauga

SEQ ID NO: 1039594 - RNA, 19 nt, Homo sapiens
  misc_RNA (1)...(19): siRNA sense strand
ugcagaaaguggccucaug

SEQ ID NO: 1039595 - RNA, 19 nt, Homo sapiens
  misc_RNA (1)...(19): siRNA sense strand
aggccuggauugcugcuuu

SEQ ID NO: 1039596 - RNA, 19 nt, Homo sapiens
  misc_RNA (1)...(19): siRNA sense strand
aggguggaauggaaguuaa

SEQ ID NO: 1039597 - RNA, 19 nt, Homo sapiens
  misc_RNA (1)...(19): siRNA sense strand
agaugccaguggauccaua

SEQ ID NO: 1039598 - RNA, 19 nt, Homo sapiens
  misc_RNA (1)...(19): siRNA sense strand
caugaaugcagagaggaua

SEQ ID NO: 1039599 - RNA, 19 nt, Homo sapiens
  misc_RNA (1)...(19): siRNA sense strand
caacacccugucaugaaug

SEQ ID NO: 1039600 - RNA, 19 nt, Homo sapiens
  misc_RNA (1)...(19): siRNA sense strand
ccagaacaaggguggaaug

SEQ ID NO: 1039601 - RNA, 19 nt, Homo sapiens
  misc_RNA (1)...(19): siRNA sense strand
ggaccagcccuugaagauc

SEQ ID NO: 1039602 - RNA, 19 nt, Homo sapiens
  misc_RNA (1)...(19): siRNA sense strand
aaagauacuucugcaaucc

SEQ ID NO: 1039603 - RNA, 19 nt, Homo sapiens
  misc_RNA (1)...(19): siRNA sense strand
guccuuuccuagcaaccua

SEQ ID NO: 1039604 - RNA, 19 nt, Homo sapiens
  misc_RNA (1)...(19): siRNA sense strand
caaugacaacaacucuauu

SEQ ID NO: 1039605 - RNA, 19 nt, Homo sapiens
  misc_RNA (1)...(19): siRNA sense strand
guccugacaucucacacau

SEQ ID NO: 1039606 - RNA, 19 nt, Homo sapiens
  misc_RNA (1)...(19): siRNA sense strand
gcaugcacaguggcuuuaa

SEQ ID NO: 1039607 - RNA, 19 nt, Homo sapiens
  misc_RNA (1)...(19): siRNA sense strand
gcagcuccaccuccugaug

SEQ ID NO: 1039608 - RNA, 19 nt, Homo sapiens
  misc_RNA (1)...(19): siRNA sense strand
caugaaauggugucacauc

SEQ ID NO: 1039609 - RNA, 19 nt, Homo sapiens
  misc_RNA (1)...(19): siRNA sense strand
cauggcaggcacaucaauu

SEQ ID NO: 1039610 - RNA, 19 nt, Homo sapiens
  misc_RNA (1)...(19): siRNA sense strand
ccaagacggcagaccugaa

SEQ ID NO: 1039611 - RNA, 19 nt, Homo sapiens
  misc_RNA (1)...(19): siRNA sense strand
gcaauccuggacaugaaau

SEQ ID NO: 1039612 - RNA, 19 nt, Homo sapiens
  misc_RNA (1)...(19): siRNA sense strand
gcauccagaaauuguguau

SEQ ID NO: 1039613 - RNA, 19 nt, Homo sapiens
  misc_RNA (1)...(19): siRNA sense strand
uaggccgucucuuccugua

SEQ ID NO: 1039614 - RNA, 19 nt, Homo sapiens
  misc_RNA (1)...(19): siRNA sense strand
aaaagauacuucugcaauc

SEQ ID NO: 1039615 - RNA, 19 nt, Homo sapiens
  misc_RNA (1)...(19): siRNA sense strand
gagggcaugaggaagaaug

SEQ ID NO: 1039616 - RNA, 19 nt, Homo sapiens
  misc_RNA (1)...(19): siRNA sense strand
ggccuggauugcugcuuuc

SEQ ID NO: 1039617 - RNA, 19 nt, Homo sapiens
  misc_RNA (1)...(19): siRNA sense strand
aaugacaacaacucuauuc

SEQ ID NO: 1039618 - RNA, 19 nt, Homo sapiens
  misc_RNA (1)...(19): siRNA sense strand
ccaggguacccggcaaauu

SEQ ID NO: 1039619 - RNA, 19 nt, Homo sapiens
  misc_RNA (1)...(19): siRNA sense strand
ugggacacacgaaacauga

SEQ ID NO: 1039620 - RNA, 19 nt, Homo sapiens
  misc_RNA (1)...(19): siRNA sense strand
guaaaggccuuaauauugu

SEQ ID NO: 1039621 - RNA, 19 nt, Homo sapiens
  misc_RNA (1)...(19): siRNA sense strand
gaauuaaggcguauaaauc

SEQ ID NO: 1039622 - RNA, 19 nt, Homo sapiens
  misc_RNA (1)...(19): siRNA sense strand
ugaauuaccugaagacauc

SEQ ID NO: 1039623 - RNA, 19 nt, Homo sapiens
  misc_RNA (1)...(19): siRNA sense strand
uuacugaaauggacaagaa

SEQ ID NO: 1039624 - RNA, 19 nt, Homo sapiens
  misc_RNA (1)...(19): siRNA sense strand
uguaaaggccuuaauauug

SEQ ID NO: 1039625 - RNA, 19 nt, Homo sapiens
  misc_RNA (1)...(19): siRNA sense strand
ccaagaaauuacugaaaug

SEQ ID NO: 1039626 - RNA, 19 nt, Homo sapiens
  misc_RNA (1)...(19): siRNA sense strand
gaagacaucaggagaauac

SEQ ID NO: 1039627 - RNA, 19 nt, Homo sapiens
  misc_RNA (1)...(19): siRNA sense strand
ggagaaaguggcacagaaa

SEQ ID NO: 1039628 - RNA, 19 nt, Homo sapiens
  misc_RNA (1)...(19): siRNA sense strand
aaaggacggucgacaaaug

SEQ ID NO: 1039629 - RNA, 19 nt, Homo sapiens
  misc_RNA (1)...(19): siRNA sense strand
gaaucuuccucauuugaug

SEQ ID NO: 1039630 - RNA, 19 nt, Homo sapiens
  misc_RNA (1)...(19): siRNA sense strand
gcagaugaaaugugugaaa

SEQ ID NO: 1039631 - RNA, 19 nt, Homo sapiens
  misc_RNA (1)...(19): siRNA sense strand
ucacuggcaucccaucuug

SEQ ID NO: 1039632 - RNA, 19 nt, Homo sapiens
  misc_RNA (1)...(19): siRNA sense strand
aaaagagccuguacuguuu

SEQ ID NO: 1039633 - RNA, 19 nt, Homo sapiens
  misc_RNA (1)...(19): siRNA sense strand
cagaugauggugaugauuu

SEQ ID NO: 1039634 - RNA, 19 nt, Homo sapiens
  misc_RNA (1)...(19): siRNA sense strand
ugaaaggacggucgacaaa

SEQ ID NO: 1039635 - RNA, 19 nt, Homo sapiens
  misc_RNA (1)...(19): siRNA sense strand
cagcauaaacucagagaug

SEQ ID NO: 1039636 - RNA, 19 nt, Homo sapiens
  misc_RNA (1)...(19): siRNA sense strand
ugccugagauuuaccugua

SEQ ID NO: 1039637 - RNA, 19 nt, Homo sapiens
  misc_RNA (1)...(19): siRNA sense strand
caaagcagcagcauaaacu

SEQ ID NO: 1039638 - RNA, 19 nt, Homo sapiens
  misc_RNA (1)...(19): siRNA sense strand
caucccaucuugcaucuca

SEQ ID NO: 1039639 - RNA, 19 nt, Homo sapiens
  misc_RNA (1)...(19): siRNA sense strand
gacaucaggagaauacaaa

SEQ ID NO: 1039640 - RNA, 19 nt, Homo sapiens
  misc_RNA (1)...(19): siRNA sense strand
uaaaagagccuguacuguu

SEQ ID NO: 1039641 - RNA, 19 nt, Homo sapiens
  misc_RNA (1)...(19): siRNA sense strand
ggucucauuuguauuucuu

SEQ ID NO: 1039642 - RNA, 19 nt, Homo sapiens
  misc_RNA (1)...(19): siRNA sense strand
ucaggagaauacaaacuug

SEQ ID NO: 1039643 - RNA, 19 nt, Homo sapiens
  misc_RNA (1)...(19): siRNA sense strand
gaaaggacggucgacaaau

SEQ ID NO: 1039644 - RNA, 19 nt, Homo sapiens
  misc_RNA (1)...(19): siRNA sense strand
gcagcagcauaaacucaga

SEQ ID NO: 1039645 - RNA, 19 nt, Homo sapiens
  misc_RNA (1)...(19): siRNA sense strand
gaugaaaugugugaaaaga

SEQ ID NO: 1039646 - RNA, 19 nt, Homo sapiens
  misc_RNA (1)...(19): siRNA sense strand
uggagaaaguggcacagaa

SEQ ID NO: 1039647 - RNA, 19 nt, Homo sapiens
  misc_RNA (1)...(19): siRNA sense strand
gccuuaauauuguacauag

SEQ ID NO: 1039648 - RNA, 19 nt, Homo sapiens
  misc_RNA (1)...(19): siRNA sense strand
auacaaacuugcagguguu

SEQ ID NO: 1039649 - RNA, 19 nt, Homo sapiens
  misc_RNA (1)...(19): siRNA sense strand
gcauaaacucagagaugaa

SEQ ID NO: 1039650 - RNA, 19 nt, Homo sapiens
  misc_RNA (1)...(19): siRNA sense strand
uaaggcguauaaaucaguu

SEQ ID NO: 1039651 - RNA, 19 nt, Homo sapiens
  misc_RNA (1)...(19): siRNA sense strand
cagcagaugaaauguguga

SEQ ID NO: 1039652 - RNA, 19 nt, Homo sapiens
  misc_RNA (1)...(19): siRNA sense strand
agcauaaacucagagauga

SEQ ID NO: 1039653 - RNA, 19 nt, Homo sapiens
  misc_RNA (1)...(19): siRNA sense strand
gaaaguggcacagaaaaug

SEQ ID NO: 1039654 - RNA, 19 nt, Homo sapiens
  misc_RNA (1)...(19): siRNA sense strand
gauccaagaaauuacugaa

SEQ ID NO: 1039655 - RNA, 19 nt, Homo sapiens
  misc_RNA (1)...(19): siRNA sense strand
ugaaauggacaagaaaugu

SEQ ID NO: 1039656 - RNA, 19 nt, Homo sapiens
  misc_RNA (1)...(19): siRNA sense strand
ucuugcaucucauggguuu

SEQ ID NO: 1039657 - RNA, 19 nt, Homo sapiens
  misc_RNA (1)...(19): siRNA sense strand
gcagcugcuucuguaaugu

SEQ ID NO: 1039658 - RNA, 19 nt, Homo sapiens
  misc_RNA (1)...(19): siRNA sense strand
ucuuggaggucguucaaug

SEQ ID NO: 1039659 - RNA, 19 nt, Homo sapiens
  misc_RNA (1)...(19): siRNA sense strand
aaaagaacuuguuggagaa

SEQ ID NO: 1039660 - RNA, 19 nt, Homo sapiens
  misc_RNA (1)...(19): siRNA sense strand
cuguaaaggccuuaauauu

SEQ ID NO: 1039661 - RNA, 19 nt, Homo sapiens
  misc_RNA (1)...(19): siRNA sense strand
gugaaaggacggucgacaa

SEQ ID NO: 1039662 - RNA, 19 nt, Homo sapiens
  misc_RNA (1)...(19): siRNA sense strand
auccaaagcagcagcauaa

SEQ ID NO: 1039663 - RNA, 19 nt, Homo sapiens
  misc_RNA (1)...(19): siRNA sense strand
gccagaugauggugaugau

SEQ ID NO: 1039664 - RNA, 19 nt, Homo sapiens
  misc_RNA (1)...(19): siRNA sense strand
caagaaauuacugaaaugg

SEQ ID NO: 1039665 - RNA, 19 nt, Homo sapiens
  misc_RNA (1)...(19): siRNA sense strand
gagccuguacuguuugugu

SEQ ID NO: 1039666 - RNA, 19 nt, Homo sapiens
  misc_RNA (1)...(19): siRNA sense strand
ggccuuaauauuguacaua

SEQ ID NO: 1039667 - RNA, 19 nt, Homo sapiens
  misc_RNA (1)...(19): siRNA sense strand
ggacggucgacaaaugaug

SEQ ID NO: 1039668 - RNA, 19 nt, Homo sapiens
  misc_RNA (1)...(19): siRNA sense strand
cagaugaaaugugugaaaa

SEQ ID NO: 1039669 - RNA, 19 nt, Homo sapiens
  misc_RNA (1)...(19): siRNA sense strand
ccuguaaaggccuuaauau

SEQ ID NO: 1039670 - RNA, 19 nt, Homo sapiens
  misc_RNA (1)...(19): siRNA sense strand
cauccaaagcagcagcaua

SEQ ID NO: 1039671 - RNA, 19 nt, Homo sapiens
  misc_RNA (1)...(19): siRNA sense strand
gcucagcagaugaaaugug

SEQ ID NO: 1039672 - RNA, 19 nt, Homo sapiens
  misc_RNA (1)...(19): siRNA sense strand
cucagcagaugaaaugugu

SEQ ID NO: 1039673 - RNA, 19 nt, Homo sapiens
  misc_RNA (1)...(19): siRNA sense strand
gcguauaaaucaguuuuga

SEQ ID NO: 1039674 - RNA, 19 nt, Homo sapiens
  misc_RNA (1)...(19): siRNA sense strand
acacagauuuuguuuugga

SEQ ID NO: 1039675 - RNA, 19 nt, Homo sapiens
  misc_RNA (1)...(19): siRNA sense strand
ccaaagcagcagcauaaac

SEQ ID NO: 1039676 - RNA, 19 nt, Homo sapiens
  misc_RNA (1)...(19): siRNA sense strand
aaugcaagcuccccauaaa

SEQ ID NO: 1039677 - RNA, 19 nt, Homo sapiens
  misc_RNA (1)...(19): siRNA sense strand
ugagccagaugauggugau

SEQ ID NO: 1039678 - RNA, 19 nt, Homo sapiens
  misc_RNA (1)...(19): siRNA sense strand
aggcucagcagaugaaaug

SEQ ID NO: 1039679 - RNA, 19 nt, Homo sapiens
  misc_RNA (1)...(19): siRNA sense strand
gagaaaguggcacagaaaa

SEQ ID NO: 1039680 - RNA, 19 nt, Homo sapiens
  misc_RNA (1)...(19): siRNA sense strand
ugaagacaucaggagaaua

SEQ ID NO: 1039681 - RNA, 19 nt, Homo sapiens
  misc_RNA (1)...(19): siRNA sense strand
agacaucaggagaauacaa

SEQ ID NO: 1039682 - RNA, 19 nt, Homo sapiens
  misc_RNA (1)...(19): siRNA sense strand
gacggucgacaaaugaugu

SEQ ID NO: 1039683 - RNA, 19 nt, Homo sapiens
  misc_RNA (1)...(19): siRNA sense strand
ggaaugaggugcagauaaa

SEQ ID NO: 1039684 - RNA, 19 nt, Homo sapiens
  misc_RNA (1)...(19): siRNA sense strand
gaaggagggucagcuauua

SEQ ID NO: 1039685 - RNA, 19 nt, Homo sapiens
  misc_RNA (1)...(19): siRNA sense strand
gaagagagcuuuaagaacu

SEQ ID NO: 1039686 - RNA, 19 nt, Homo sapiens
  misc_RNA (1)...(19): siRNA sense strand
cgaugaggcuguuaaauua

SEQ ID NO: 1039687 - RNA, 19 nt, Homo sapiens
  misc_RNA (1)...(19): siRNA sense strand
gaaauacccuguaaagagu

SEQ ID NO: 1039688 - RNA, 19 nt, Homo sapiens
  misc_RNA (1)...(19): siRNA sense strand
ucacggaguuccauuauuu

SEQ ID NO: 1039689 - RNA, 19 nt, Homo sapiens
  misc_RNA (1)...(19): siRNA sense strand
gcaaaucuaucugcaagaa

SEQ ID NO: 1039690 - RNA, 19 nt, Homo sapiens
  misc_RNA (1)...(19): siRNA sense strand
gaaaccagaugaccggauu

SEQ ID NO: 1039691 - RNA, 19 nt, Homo sapiens
  misc_RNA (1)...(19): siRNA sense strand
ucagacagcucaucacauu

SEQ ID NO: 1039692 - RNA, 19 nt, Homo sapiens
  misc_RNA (1)...(19): siRNA sense strand
caaccucucugauuacauu

SEQ ID NO: 1039693 - RNA, 19 nt, Homo sapiens
  misc_RNA (1)...(19): siRNA sense strand
gaauccaccuccucucuuu

SEQ ID NO: 1039694 - RNA, 19 nt, Homo sapiens
  misc_RNA (1)...(19): siRNA sense strand
cgaacgcaauguauaauaa

SEQ ID NO: 1039695 - RNA, 19 nt, Homo sapiens
  misc_RNA (1)...(19): siRNA sense strand
gcaagaaagugacagauac

SEQ ID NO: 1039696 - RNA, 19 nt, Homo sapiens
  misc_RNA (1)...(19): siRNA sense strand
ggugaaaucgcuacuguua

SEQ ID NO: 1039697 - RNA, 19 nt, Homo sapiens
  misc_RNA (1)...(19): siRNA sense strand
ggauacagguugaugaguu

SEQ ID NO: 1039698 - RNA, 19 nt, Homo sapiens
  misc_RNA (1)...(19): siRNA sense strand
gacaugaaauacccuguaa

SEQ ID NO: 1039699 - RNA, 19 nt, Homo sapiens
  misc_RNA (1)...(19): siRNA sense strand
gagccaaccucuucaacuu

SEQ ID NO: 1039700 - RNA, 19 nt, Homo sapiens
  misc_RNA (1)...(19): siRNA sense strand
gaagaugauugaaccacaa

SEQ ID NO: 1039701 - RNA, 19 nt, Homo sapiens
  misc_RNA (1)...(19): siRNA sense strand
ccuaagggcuuuauucaug

SEQ ID NO: 1039702 - RNA, 19 nt, Homo sapiens
  misc_RNA (1)...(19): siRNA sense strand
uaaaguaugugcagaucuu

SEQ ID NO: 1039703 - RNA, 19 nt, Homo sapiens
  misc_RNA (1)...(19): siRNA sense strand
gcaagaauauagagcaaag

SEQ ID NO: 1039704 - RNA, 19 nt, Homo sapiens
  misc_RNA (1)...(19): siRNA sense strand
gaauuucucucaggacuau

SEQ ID NO: 1039705 - RNA, 19 nt, Homo sapiens
  misc_RNA (1)...(19): siRNA sense strand
ggagaaguuggaaguaaua

SEQ ID NO: 1039706 - RNA, 19 nt, Homo sapiens
  misc_RNA (1)...(19): siRNA sense strand
gaagaagagagcuuuaaga

SEQ ID NO: 1039707 - RNA, 19 nt, Homo sapiens
  misc_RNA (1)...(19): siRNA sense strand
ggacaagaaaggaaagaaa

SEQ ID NO: 1039708 - RNA, 19 nt, Homo sapiens
  misc_RNA (1)...(19): siRNA sense strand
ugaagucagugcuacagua

SEQ ID NO: 1039709 - RNA, 19 nt, Homo sapiens
  misc_RNA (1)...(19): siRNA sense strand
gcagaucuuuagaaaccua

SEQ ID NO: 1039710 - RNA, 19 nt, Homo sapiens
  misc_RNA (1)...(19): siRNA sense strand
aaacgugccuuggcgauaa

SEQ ID NO: 1039711 - RNA, 19 nt, Homo sapiens
  misc_RNA (1)...(19): siRNA sense strand
gaagaaggagggucagcua

SEQ ID NO: 1039712 - RNA, 19 nt, Homo sapiens
  misc_RNA (1)...(19): siRNA sense strand
uuagaaaccuagagaaugu

SEQ ID NO: 1039713 - RNA, 19 nt, Homo sapiens
  misc_RNA (1)...(19): siRNA sense strand
uaacauugcugggaaauac

SEQ ID NO: 1039714 - RNA, 19 nt, Homo sapiens
  misc_RNA (1)...(19): siRNA sense strand
gauacagguugaugaguug

SEQ ID NO: 1039715 - RNA, 19 nt, Homo sapiens
  misc_RNA (1)...(19): siRNA sense strand
ggacuaugauccagaacug

SEQ ID NO: 1039716 - RNA, 19 nt, Homo sapiens
  misc_RNA (1)...(19): siRNA sense strand
ggaaggauguaacgcauac

SEQ ID NO: 1039717 - RNA, 19 nt, Homo sapiens
  misc_RNA (1)...(19): siRNA sense strand
gaaaggaacaaaggagaaa

SEQ ID NO: 1039718 - RNA, 19 nt, Homo sapiens
  misc_RNA (1)...(19): siRNA sense strand
gaagucagugcuacaguaa

SEQ ID NO: 1039719 - RNA, 19 nt, Homo sapiens
  misc_RNA (1)...(19): siRNA sense strand
gcggacagcggaauagaua

SEQ ID NO: 1039720 - RNA, 19 nt, Homo sapiens
  misc_RNA (1)...(19): siRNA sense strand
ccaaggacauauagucgaa

SEQ ID NO: 1039721 - RNA, 19 nt, Homo sapiens
  misc_RNA (1)...(19): siRNA sense strand
ugacuacccugacguugaa

SEQ ID NO: 1039722 - RNA, 19 nt, Homo sapiens
  misc_RNA (1)...(19): siRNA sense strand
gagcaaagcaauccaagau

SEQ ID NO: 1039723 - RNA, 19 nt, Homo sapiens
  misc_RNA (1)...(19): siRNA sense strand
gaauauagagcaaagcaau

SEQ ID NO: 1039724 - RNA, 19 nt, Homo sapiens
  misc_RNA (1)...(19): siRNA sense strand
ggaguuccauuauuucgau

SEQ ID NO: 1039725 - RNA, 19 nt, Homo sapiens
  misc_RNA (1)...(19): siRNA sense strand
gaaaggaaagaaaggcaaa

SEQ ID NO: 1039726 - RNA, 19 nt, Homo sapiens
  misc_RNA (1)...(19): siRNA sense strand
gaaagggagcgcccaguga

SEQ ID NO: 1039727 - RNA, 19 nt, Homo sapiens
  misc_RNA (1)...(19): siRNA sense strand
caucgaaugcagaaauuua

SEQ ID NO: 1039728 - RNA, 19 nt, Homo sapiens
  misc_RNA (1)...(19): siRNA sense strand
ccacaaagaaaucagguuu

SEQ ID NO: 1039729 - RNA, 19 nt, Homo sapiens
  misc_RNA (1)...(19): siRNA sense strand
cugcaaaguuuaccagaaa

SEQ ID NO: 1039730 - RNA, 19 nt, Homo sapiens
  misc_RNA (1)...(19): siRNA sense strand
ggaagaaggauuacugauc

SEQ ID NO: 1039731 - RNA, 19 nt, Homo sapiens
  misc_RNA (1)...(19): siRNA sense strand
gaaaagaauuacagucaga

SEQ ID NO: 1039732 - RNA, 19 nt, Homo sapiens
  misc_RNA (1)...(19): siRNA sense strand
gaccuaaaguugauagaag

SEQ ID NO: 1039733 - RNA, 19 nt, Homo sapiens
  misc_RNA (1)...(19): siRNA sense strand
uaaagagccucagaagaug

SEQ ID NO: 1039734 - RNA, 19 nt, Homo sapiens
  misc_RNA (1)...(19): siRNA sense strand
ucacugcaguugaguuuau

SEQ ID NO: 1039735 - RNA, 19 nt, Homo sapiens
  misc_RNA (1)...(19): siRNA sense strand
auaaggaacugguggaaga

SEQ ID NO: 1039736 - RNA, 19 nt, Homo sapiens
  misc_RNA (1)...(19): siRNA sense strand
caucaagaaugaccuaaag

SEQ ID NO: 1039737 - RNA, 19 nt, Homo sapiens
  misc_RNA (1)...(19): siRNA sense strand
aagucaaccucucugauua

SEQ ID NO: 1039738 - RNA, 19 nt, Homo sapiens
  misc_RNA (1)...(19): siRNA sense strand
gaugagacaggaacuuaaa

SEQ ID NO: 1039739 - RNA, 19 nt, Homo sapiens
  misc_RNA (1)...(19): siRNA sense strand
acaaagaaaucuggaugaa

SEQ ID NO: 1039740 - RNA, 19 nt, Homo sapiens
  misc_RNA (1)...(19): siRNA sense strand
ugaaauacccuguaaagag

SEQ ID NO: 1039741 - RNA, 19 nt, Homo sapiens
  misc_RNA (1)...(19): siRNA sense strand
ucaaagaggagaaacgaaa

SEQ ID NO: 1039742 - RNA, 19 nt, Homo sapiens
  misc_RNA (1)...(19): siRNA sense strand
caagaaugaccuaaaguug

SEQ ID NO: 1039743 - RNA, 19 nt, Homo sapiens
  misc_RNA (1)...(19): siRNA sense strand
ggcaagaaagugacagaua

SEQ ID NO: 1039744 - RNA, 19 nt, Homo sapiens
  misc_RNA (1)...(19): siRNA sense strand
augcugaacuccaaucuuu

SEQ ID NO: 1039745 - RNA, 19 nt, Homo sapiens
  misc_RNA (1)...(19): siRNA sense strand
gauaaagagccucagaaga

SEQ ID NO: 1039746 - RNA, 19 nt, Homo sapiens
  misc_RNA (1)...(19): siRNA sense strand
caccuccucucuuuaauga

SEQ ID NO: 1039747 - RNA, 19 nt, Homo sapiens
  misc_RNA (1)...(19): siRNA sense strand
auaaagagccucagaagau

SEQ ID NO: 1039748 - RNA, 19 nt, Homo sapiens
  misc_RNA (1)...(19): siRNA sense strand
guacaaagaggaagaagag

SEQ ID NO: 1039749 - RNA, 19 nt, Homo sapiens
  misc_RNA (1)...(19): siRNA sense strand
agaaugaccuaaaguugau

SEQ ID NO: 1039750 - RNA, 19 nt, Homo sapiens
  misc_RNA (1)...(19): siRNA sense strand
ugaauccaguguacaaaga

SEQ ID NO: 1039751 - RNA, 19 nt, Homo sapiens
  misc_RNA (1)...(19): siRNA sense strand
guacggaaucuggccauua

SEQ ID NO: 1039752 - RNA, 19 nt, Homo sapiens
  misc_RNA (1)...(19): siRNA sense strand
caaagaaggauaaagaucu

SEQ ID NO: 1039753 - RNA, 19 nt, Homo sapiens
  misc_RNA (1)...(19): siRNA sense strand
gaauuacagucagagauca

SEQ ID NO: 1039754 - RNA, 19 nt, Homo sapiens
  misc_RNA (1)...(19): siRNA sense strand
ggagaaacgaaaagaauua

SEQ ID NO: 1039755 - RNA, 19 nt, Homo sapiens
  misc_RNA (1)...(19): siRNA sense strand
gcaaagaaggauaaagauc

SEQ ID NO: 1039756 - RNA, 19 nt, Homo sapiens
  misc_RNA (1)...(19): siRNA sense strand
gaaggagaaguuggaagua

SEQ ID NO: 1039757 - RNA, 19 nt, Homo sapiens
  misc_RNA (1)...(19): siRNA sense strand
caacguaaggaaacugaaa

SEQ ID NO: 1039758 - RNA, 19 nt, Homo sapiens
  misc_RNA (1)...(19): siRNA sense strand
cuaagggcuuuauucauga

SEQ ID NO: 1039759 - RNA, 19 nt, Homo sapiens
  misc_RNA (1)...(19): siRNA sense strand
aaggagaaguuggaaguaa

SEQ ID NO: 1039760 - RNA, 19 nt, Homo sapiens
  misc_RNA (1)...(19): siRNA sense strand
aagaagagagcuuuaagaa

SEQ ID NO: 1039761 - RNA, 19 nt, Homo sapiens
  misc_RNA (1)...(19): siRNA sense strand
gcucacagaucagagaauc

SEQ ID NO: 1039762 - RNA, 19 nt, Homo sapiens
  misc_RNA (1)...(19): siRNA sense strand
agaaagagaagaaggcaaa

SEQ ID NO: 1039763 - RNA, 19 nt, Homo sapiens
  misc_RNA (1)...(19): siRNA sense strand
ucgaugaggcuguuaaauu

SEQ ID NO: 1039764 - RNA, 19 nt, Homo sapiens
  misc_RNA (1)...(19): siRNA sense strand
caaagaaaucuggaugaaa

SEQ ID NO: 1039765 - RNA, 19 nt, Homo sapiens
  misc_RNA (1)...(19): siRNA sense strand
gcaugaauccaguguacaa

SEQ ID NO: 1039766 - RNA, 19 nt, Homo sapiens
  misc_RNA (1)...(19): siRNA sense strand
gugcagaucuuuagaaacc

SEQ ID NO: 1039767 - RNA, 19 nt, Homo sapiens
  misc_RNA (1)...(19): siRNA sense strand
gcagauaaagcaugaagag

SEQ ID NO: 1039768 - RNA, 19 nt, Homo sapiens
  misc_RNA (1)...(19): siRNA sense strand
uuaaaggcgugcucacaga

SEQ ID NO: 1039769 - RNA, 19 nt, Homo sapiens
  misc_RNA (1)...(19): siRNA sense strand
cagacuaugcuuccagaua

SEQ ID NO: 1039770 - RNA, 19 nt, Homo sapiens
  misc_RNA (1)...(19): siRNA sense strand
aaagucaaccucucugauu

SEQ ID NO: 1039771 - RNA, 19 nt, Homo sapiens
  misc_RNA (1)...(19): siRNA sense strand
gauccaggcucugaaaguc

SEQ ID NO: 1039772 - RNA, 19 nt, Homo sapiens
  misc_RNA (1)...(19): siRNA sense strand
ucaagaaugaccuaaaguu

SEQ ID NO: 1039773 - RNA, 19 nt, Homo sapiens
  misc_RNA (1)...(19): siRNA sense strand
gaaagucaaccucucugau

SEQ ID NO: 1039774 - RNA, 19 nt, Homo sapiens
  misc_RNA (1)...(19): siRNA sense strand
ucgagucucuguauaagga

SEQ ID NO: 1039775 - RNA, 19 nt, Homo sapiens
  misc_RNA (1)...(19): siRNA sense strand
auccagaacugaucaaaga

SEQ ID NO: 1039776 - RNA, 19 nt, Homo sapiens
  misc_RNA (1)...(19): siRNA sense strand
aaaccaagaggaagaagaa

SEQ ID NO: 1039777 - RNA, 19 nt, Homo sapiens
  misc_RNA (1)...(19): siRNA sense strand
ggagggucagcuauuauuu

SEQ ID NO: 1039778 - RNA, 19 nt, Homo sapiens
  misc_RNA (1)...(19): siRNA sense strand
gaaauuuaaccgggacauu

SEQ ID NO: 1039779 - RNA, 19 nt, Homo sapiens
  misc_RNA (1)...(19): siRNA sense strand
gcguggauaucaaggagaa

SEQ ID NO: 1039780 - RNA, 19 nt, Homo sapiens
  misc_RNA (1)...(19): siRNA sense strand
ucaggacuaugauccagaa

SEQ ID NO: 1039781 - RNA, 19 nt, Homo sapiens
  misc_RNA (1)...(19): siRNA sense strand
ggaagaagagagcuuuaag

SEQ ID NO: 1039782 - RNA, 19 nt, Homo sapiens
  misc_RNA (1)...(19): siRNA sense strand
aaagaaggauaaagaucug

SEQ ID NO: 1039783 - RNA, 19 nt, Homo sapiens
  misc_RNA (1)...(19): siRNA sense strand
gaacucugcugccuucuuu

SEQ ID NO: 1039784 - RNA, 19 nt, Homo sapiens
  misc_RNA (1)...(19): siRNA sense strand
aaagaaagcccaagaagua

SEQ ID NO: 1039785 - RNA, 19 nt, Homo sapiens
  misc_RNA (1)...(19): siRNA sense strand
cgacagcaguggacaguuu

SEQ ID NO: 1039786 - RNA, 19 nt, Homo sapiens
  misc_RNA (1)...(19): siRNA sense strand
gaacacagugguugccaua

SEQ ID NO: 1039787 - RNA, 19 nt, Homo sapiens
  misc_RNA (1)...(19): siRNA sense strand
gcagcagaauuacccauuu

SEQ ID NO: 1039788 - RNA, 19 nt, Homo sapiens
  misc_RNA (1)...(19): siRNA sense strand
gaaaaguggugcauuuauu

SEQ ID NO: 1039789 - RNA, 19 nt, Homo sapiens
  misc_RNA (1)...(19): siRNA sense strand
acagagugcuuacaaagaa

SEQ ID NO: 1039790 - RNA, 19 nt, Homo sapiens
  misc_RNA (1)...(19): siRNA sense strand
cuacauuuguuccagauuu

SEQ ID NO: 1039791 - RNA, 19 nt, Homo sapiens
  misc_RNA (1)...(19): siRNA sense strand
gcaaugguuugaauaccuu

SEQ ID NO: 1039792 - RNA, 19 nt, Homo sapiens
  misc_RNA (1)...(19): siRNA sense strand
acaacauccugcucaaaua

SEQ ID NO: 1039793 - RNA, 19 nt, Homo sapiens
  misc_RNA (1)...(19): siRNA sense strand
gaaugugggucccuuccuu

SEQ ID NO: 1039794 - RNA, 19 nt, Homo sapiens
  misc_RNA (1)...(19): siRNA sense strand
gcauuuauuuggugacuca

SEQ ID NO: 1039795 - RNA, 19 nt, Homo sapiens
  misc_RNA (1)...(19): siRNA sense strand
cagaugaaguuauugugaa

SEQ ID NO: 1039796 - RNA, 19 nt, Homo sapiens
  misc_RNA (1)...(19): siRNA sense strand
gaaguaugguggagacuac

SEQ ID NO: 1039797 - RNA, 19 nt, Homo sapiens
  misc_RNA (1)...(19): siRNA sense strand
agaugacccuggcccauua

SEQ ID NO: 1039798 - RNA, 19 nt, Homo sapiens
  misc_RNA (1)...(19): siRNA sense strand
gacagggucuauuucaaga

SEQ ID NO: 1039799 - RNA, 19 nt, Homo sapiens
  misc_RNA (1)...(19): siRNA sense strand
cagauuuaguggaguuuaa

SEQ ID NO: 1039800 - RNA, 19 nt, Homo sapiens
  misc_RNA (1)...(19): siRNA sense strand
ggaccaauuucuucaaacu

SEQ ID NO: 1039801 - RNA, 19 nt, Homo sapiens
  misc_RNA (1)...(19): siRNA sense strand
caacauuacagagugcuua

SEQ ID NO: 1039802 - RNA, 19 nt, Homo sapiens
  misc_RNA (1)...(19): siRNA sense strand
aaagaaaaguggugcauuu

SEQ ID NO: 1039803 - RNA, 19 nt, Homo sapiens
  misc_RNA (1)...(19): siRNA sense strand
gugcuggucaucaauguua

SEQ ID NO: 1039804 - RNA, 19 nt, Homo sapiens
  misc_RNA (1)...(19): siRNA sense strand
agaaccagcuggacauguu

SEQ ID NO: 1039805 - RNA, 19 nt, Homo sapiens
  misc_RNA (1)...(19): siRNA sense strand
uagaguacuuggaccauga

SEQ ID NO: 1039806 - RNA, 19 nt, Homo sapiens
  misc_RNA (1)...(19): siRNA sense strand
gaaacuaacagucuagaac

SEQ ID NO: 1039807 - RNA, 19 nt, Homo sapiens
  misc_RNA (1)...(19): siRNA sense strand
cagaauuacccauuucaaa

SEQ ID NO: 1039808 - RNA, 19 nt, Homo sapiens
  misc_RNA (1)...(19): siRNA sense strand
caucaauguuacucaggua

SEQ ID NO: 1039809 - RNA, 19 nt, Homo sapiens
  misc_RNA (1)...(19): siRNA sense strand
caaagaaagcccaagaagu

SEQ ID NO: 1039810 - RNA, 19 nt, Homo sapiens
  misc_RNA (1)...(19): siRNA sense strand
ugacaggaauuagccgaaa

SEQ ID NO: 1039811 - RNA, 19 nt, Homo sapiens
  misc_RNA (1)...(19): siRNA sense strand
uaagaugcgucaguuuaau

SEQ ID NO: 1039812 - RNA, 19 nt, Homo sapiens
  misc_RNA (1)...(19): siRNA sense strand
cagcagaauuacccauuuc

SEQ ID NO: 1039813 - RNA, 19 nt, Homo sapiens
  misc_RNA (1)...(19): siRNA sense strand
cagcuacuuugucaucuug

SEQ ID NO: 1039814 - RNA, 19 nt, Homo sapiens
  misc_RNA (1)...(19): siRNA sense strand
ucacgacugucuuuagcaa

SEQ ID NO: 1039815 - RNA, 19 nt, Homo sapiens
  misc_RNA (1)...(19): siRNA sense strand
guggaccaauuucuucaaa

SEQ ID NO: 1039816 - RNA, 19 nt, Homo sapiens
  misc_RNA (1)...(19): siRNA sense strand
uuuaagaugcgucaguuua

SEQ ID NO: 1039817 - RNA, 19 nt, Homo sapiens
  misc_RNA (1)...(19): siRNA sense strand
ccagaguggugucaauauc

SEQ ID NO: 1039818 - RNA, 19 nt, Homo sapiens
  misc_RNA (1)...(19): siRNA sense strand
gcgcuuacaggaagauaaa

SEQ ID NO: 1039819 - RNA, 19 nt, Homo sapiens
  misc_RNA (1)...(19): siRNA sense strand
ucucaaggcucaggaacuu

SEQ ID NO: 1039820 - RNA, 19 nt, Homo sapiens
  misc_RNA (1)...(19): siRNA sense strand
gcacaacauccugcucaaa

SEQ ID NO: 1039821 - RNA, 19 nt, Homo sapiens
  misc_RNA (1)...(19): siRNA sense strand
gagaugacccuggcccauu

SEQ ID NO: 1039822 - RNA, 19 nt, Homo sapiens
  misc_RNA (1)...(19): siRNA sense strand
ccagaugaaguuauuguga

SEQ ID NO: 1039823 - RNA, 19 nt, Homo sapiens
  misc_RNA (1)...(19): siRNA sense strand
ccuugcagcagcagaauua

SEQ ID NO: 1039824 - RNA, 19 nt, Homo sapiens
  misc_RNA (1)...(19): siRNA sense strand
gacccuggcccauuaucua

SEQ ID NO: 1039825 - RNA, 19 nt, Homo sapiens
  misc_RNA (1)...(19): siRNA sense strand
gacaggaauuagccgaaau

SEQ ID NO: 1039826 - RNA, 19 nt, Homo sapiens
  misc_RNA (1)...(19): siRNA sense strand
ugggcagggugguggauua

SEQ ID NO: 1039827 - RNA, 19 nt, Homo sapiens
  misc_RNA (1)...(19): siRNA sense strand
cagagugcuuacaaagaaa

SEQ ID NO: 1039828 - RNA, 19 nt, Homo sapiens
  misc_RNA (1)...(19): siRNA sense strand
ccuaaccgcugcagagagu

SEQ ID NO: 1039829 - RNA, 19 nt, Homo sapiens
  misc_RNA (1)...(19): siRNA sense strand
gaauuacccauuucaaagg

SEQ ID NO: 1039830 - RNA, 19 nt, Homo sapiens
  misc_RNA (1)...(19): siRNA sense strand
gcaguggacaguuuguuuc

SEQ ID NO: 1039831 - RNA, 19 nt, Homo sapiens
  misc_RNA (1)...(19): siRNA sense strand
gcagaauuacccauuucaa

SEQ ID NO: 1039832 - RNA, 19 nt, Homo sapiens
  misc_RNA (1)...(19): siRNA sense strand
gcuauggccaggcaaaguu

SEQ ID NO: 1039833 - RNA, 19 nt, Homo sapiens
  misc_RNA (1)...(19): siRNA sense strand
gaaagcccaagaaguaugg

SEQ ID NO: 1039834 - RNA, 19 nt, Homo sapiens
  misc_RNA (1)...(19): siRNA sense strand
gaccaauuucuucaaacua

SEQ ID NO: 1039835 - RNA, 19 nt, Homo sapiens
  misc_RNA (1)...(19): siRNA sense strand
cgacugucuuuagcaauga

SEQ ID NO: 1039836 - RNA, 19 nt, Homo sapiens
  misc_RNA (1)...(19): siRNA sense strand
gcuacuuugucaucuugaa

SEQ ID NO: 1039837 - RNA, 19 nt, Homo sapiens
  misc_RNA (1)...(19): siRNA sense strand
gaauaccuuacuacauuug

SEQ ID NO: 1039838 - RNA, 19 nt, Homo sapiens
  misc_RNA (1)...(19): siRNA sense strand
gcccagaaaguuuaagaug

SEQ ID NO: 1039839 - RNA, 19 nt, Homo sapiens
  misc_RNA (1)...(19): siRNA sense strand
ccaaagaagcucccuugca

SEQ ID NO: 1039840 - RNA, 19 nt, Homo sapiens
  misc_RNA (1)...(19): siRNA sense strand
uagccgaaaucccuacugu

SEQ ID NO: 1039841 - RNA, 19 nt, Homo sapiens
  misc_RNA (1)...(19): siRNA sense strand
caacaaucaggcaaugguu

SEQ ID NO: 1039842 - RNA, 19 nt, Homo sapiens
  misc_RNA (1)...(19): siRNA sense strand
gccaggcaaaguuaaagua

SEQ ID NO: 1039843 - RNA, 19 nt, Homo sapiens
  misc_RNA (1)...(19): siRNA sense strand
gaagaaccagcuggacaug

SEQ ID NO: 1039844 - RNA, 19 nt, Homo sapiens
  misc_RNA (1)...(19): siRNA sense strand
caacauccugcucaaauac

SEQ ID NO: 1039845 - RNA, 19 nt, Homo sapiens
  misc_RNA (1)...(19): siRNA sense strand
cacaacauccugcucaaau

SEQ ID NO: 1039846 - RNA, 19 nt, Homo sapiens
  misc_RNA (1)...(19): siRNA sense strand
uuaaugacccugacaacau

SEQ ID NO: 1039847 - RNA, 19 nt, Homo sapiens
  misc_RNA (1)...(19): siRNA sense strand
ccagcuacuuugucaucuu

SEQ ID NO: 1039848 - RNA, 19 nt, Homo sapiens
  misc_RNA (1)...(19): siRNA sense strand
uggaguauaucucgucgau

SEQ ID NO: 1039849 - RNA, 19 nt, Homo sapiens
  misc_RNA (1)...(19): siRNA sense strand
gcuguauggucucacuuca

SEQ ID NO: 1039850 - RNA, 19 nt, Homo sapiens
  misc_RNA (1)...(19): siRNA sense strand
uuuggugacucaacaauca

SEQ ID NO: 1039851 - RNA, 19 nt, Homo sapiens
  misc_RNA (1)...(19): siRNA sense strand
guggaggcccagaaaguuu

SEQ ID NO: 1039852 - RNA, 19 nt, Homo sapiens
  misc_RNA (1)...(19): siRNA sense strand
ccuucuggguauuauuaua

SEQ ID NO: 1039853 - RNA, 19 nt, Homo sapiens
  misc_RNA (1)...(19): siRNA sense strand
agaguggugucaauaucaa

SEQ ID NO: 1039854 - RNA, 19 nt, Homo sapiens
  misc_RNA (1)...(19): siRNA sense strand
agaauuacccauuucaaag

SEQ ID NO: 1039855 - RNA, 19 nt, Homo sapiens
  misc_RNA (1)...(19): siRNA sense strand
ucaaagaaagcccaagaag

SEQ ID NO: 1039856 - RNA, 19 nt, Homo sapiens
  misc_RNA (1)...(19): siRNA sense strand
cccauuaucuaccgcacaa

SEQ ID NO: 1039857 - RNA, 19 nt, Homo sapiens
  misc_RNA (1)...(19): siRNA sense strand
aacuaacagucuagaacua

SEQ ID NO: 1039858 - RNA, 19 nt, Homo sapiens
  misc_RNA (1)...(19): siRNA sense strand
cagcgacugguacaacuuu

SEQ ID NO: 1039859 - RNA, 19 nt, Homo sapiens
  misc_RNA (1)...(19): siRNA sense strand
guacuuggaccaugagacu

SEQ ID NO: 1039860 - RNA, 19 nt, Homo sapiens
  misc_RNA (1)...(19): siRNA sense strand
gucgaugccugggagauga

SEQ ID NO: 1039861 - RNA, 19 nt, Homo sapiens
  misc_RNA (1)...(19): siRNA sense strand
uggaggcccagaaaguuua

SEQ ID NO: 1039862 - RNA, 19 nt, Homo sapiens
  misc_RNA (1)...(19): siRNA sense strand
ggaaucugccccuguguaa

SEQ ID NO: 1039863 - RNA, 19 nt, Homo sapiens
  misc_RNA (1)...(19): siRNA sense strand
cagggucuauuucaagagu

SEQ ID NO: 1039864 - RNA, 19 nt, Homo sapiens
  misc_RNA (1)...(19): siRNA sense strand
ccaggcaaaguuaaaguau

SEQ ID NO: 1039865 - RNA, 19 nt, Homo sapiens
  misc_RNA (1)...(19): siRNA sense strand
gcacaagcugcauccagau

SEQ ID NO: 1039866 - RNA, 19 nt, Homo sapiens
  misc_RNA (1)...(19): siRNA sense strand
caggcaaaguuaaaguauc

SEQ ID NO: 1039867 - RNA, 19 nt, Homo sapiens
  misc_RNA (1)...(19): siRNA sense strand
ugguucaugugcaggauuu

SEQ ID NO: 1039868 - RNA, 19 nt, Homo sapiens
  misc_RNA (1)...(19): siRNA sense strand
acgacugucuuuagcaaug

SEQ ID NO: 1039869 - RNA, 19 nt, Homo sapiens
  misc_RNA (1)...(19): siRNA sense strand
aaaguggugcauuuauuug

SEQ ID NO: 1039870 - RNA, 19 nt, Homo sapiens
  misc_RNA (1)...(19): siRNA sense strand
ggaggcccagaaaguuuaa

SEQ ID NO: 1039871 - RNA, 19 nt, Homo sapiens
  misc_RNA (1)...(19): siRNA sense strand
cagaguucuucagcgcuua

SEQ ID NO: 1039872 - RNA, 19 nt, Homo sapiens
  misc_RNA (1)...(19): siRNA sense strand
gaauggguuuuacaagguu

SEQ ID NO: 1039873 - RNA, 19 nt, Homo sapiens
  misc_RNA (1)...(19): siRNA sense strand
caacagcgacugguacaac

SEQ ID NO: 1039874 - RNA, 19 nt, Homo sapiens
  misc_RNA (1)...(19): siRNA sense strand
ggcaaugguuugaauaccu

SEQ ID NO: 1039875 - RNA, 19 nt, Homo sapiens
  misc_RNA (1)...(19): siRNA sense strand
ucaggcaaugguuugaaua

SEQ ID NO: 1039876 - RNA, 19 nt, Homo sapiens
  misc_RNA (1)...(19): siRNA sense strand
cuaacagucuagaacuauc

SEQ ID NO: 1039877 - RNA, 19 nt, Homo sapiens
  misc_RNA (1)...(19): siRNA sense strand
ggaccugauuggguaacug

SEQ ID NO: 1039878 - RNA, 19 nt, Homo sapiens
  misc_RNA (1)...(19): siRNA sense strand
ccugaaaggucuccuaacc

SEQ ID NO: 1039879 - RNA, 19 nt, Homo sapiens
  misc_RNA (1)...(19): siRNA sense strand
cagaguggugucaauauca

SEQ ID NO: 1039880 - RNA, 19 nt, Homo sapiens
  misc_RNA (1)...(19): siRNA sense strand
acaaucaggcaaugguuug

SEQ ID NO: 1039881 - RNA, 19 nt, Homo sapiens
  misc_RNA (1)...(19): siRNA sense strand
gaggugagccuuuucaaca

SEQ ID NO: 1039882 - RNA, 19 nt, Homo sapiens
  misc_RNA (1)...(19): siRNA sense strand
ccagauuuaguggaguuua

SEQ ID NO: 1039883 - RNA, 19 nt, Homo sapiens
  misc_RNA (1)...(19): siRNA sense strand
gaagucaacugcacugcua

SEQ ID NO: 1039884 - RNA, 19 nt, Homo sapiens
  misc_RNA (1)...(19): siRNA sense strand
ggaaagcucacucggauua

SEQ ID NO: 1039885 - RNA, 19 nt, Homo sapiens
  misc_RNA (1)...(19): siRNA sense strand
guacauacuucacucauga

SEQ ID NO: 1039886 - RNA, 19 nt, Homo sapiens
  misc_RNA (1)...(19): siRNA sense strand
gagagucgaugaugaaaug

SEQ ID NO: 1039887 - RNA, 19 nt, Homo sapiens
  misc_RNA (1)...(19): siRNA sense strand
gcagugaacucaaaguauc

SEQ ID NO: 1039888 - RNA, 19 nt, Homo sapiens
  misc_RNA (1)...(19): siRNA sense strand
ugacaaacgucucaauuuc

SEQ ID NO: 1039889 - RNA, 19 nt, Homo sapiens
  misc_RNA (1)...(19): siRNA sense strand
ggucagacauguacacugu

SEQ ID NO: 1039890 - RNA, 19 nt, Homo sapiens
  misc_RNA (1)...(19): siRNA sense strand
agacacagcuauaaucaau

SEQ ID NO: 1039891 - RNA, 19 nt, Homo sapiens
  misc_RNA (1)...(19): siRNA sense strand
gaugaucgauauccagaga

SEQ ID NO: 1039892 - RNA, 19 nt, Homo sapiens
  misc_RNA (1)...(19): siRNA sense strand
ucagaugacuuauccucua

SEQ ID NO: 1039893 - RNA, 19 nt, Homo sapiens
  misc_RNA (1)...(19): siRNA sense strand
gaaagaguacuucaucuag

SEQ ID NO: 1039894 - RNA, 19 nt, Homo sapiens
  misc_RNA (1)...(19): siRNA sense strand
ccaacaggcagaccauuua

SEQ ID NO: 1039895 - RNA, 19 nt, Homo sapiens
  misc_RNA (1)...(19): siRNA sense strand
cagaacaacuccgaagaaa

SEQ ID NO: 1039896 - RNA, 19 nt, Homo sapiens
  misc_RNA (1)...(19): siRNA sense strand
gaugguaacuugggugaga

SEQ ID NO: 1039897 - RNA, 19 nt, Homo sapiens
  misc_RNA (1)...(19): siRNA sense strand
guaaucugaugaucgauau

SEQ ID NO: 1039898 - RNA, 19 nt, Homo sapiens
  misc_RNA (1)...(19): siRNA sense strand
gaagaguggucagacaugu

SEQ ID NO: 1039899 - RNA, 19 nt, Homo sapiens
  misc_RNA (1)...(19): siRNA sense strand
gcaaaucggagguggaaga

SEQ ID NO: 1039900 - RNA, 19 nt, Homo sapiens
  misc_RNA (1)...(19): siRNA sense strand
cgaaagacgugacagugau

SEQ ID NO: 1039901 - RNA, 19 nt, Homo sapiens
  misc_RNA (1)...(19): siRNA sense strand
uauaaucaaugcagaagga

SEQ ID NO: 1039902 - RNA, 19 nt, Homo sapiens
  misc_RNA (1)...(19): siRNA sense strand
cggauuauaugcuguaugu

SEQ ID NO: 1039903 - RNA, 19 nt, Homo sapiens
  misc_RNA (1)...(19): siRNA sense strand
ggacagcagguuucaguug

SEQ ID NO: 1039904 - RNA, 19 nt, Homo sapiens
  misc_RNA (1)...(19): siRNA sense strand
ccagcgguaucuagaagua

SEQ ID NO: 1039905 - RNA, 19 nt, Homo sapiens
  misc_RNA (1)...(19): siRNA sense strand
gagagacacugcgguggaa

SEQ ID NO: 1039906 - RNA, 19 nt, Homo sapiens
  misc_RNA (1)...(19): siRNA sense strand
gguggaaggugaggagauu

SEQ ID NO: 1039907 - RNA, 19 nt, Homo sapiens
  misc_RNA (1)...(19): siRNA sense strand
gaaaguuacaccaccauca

SEQ ID NO: 1039908 - RNA, 19 nt, Homo sapiens
  misc_RNA (1)...(19): siRNA sense strand
gcagacacagcuauaauca

SEQ ID NO: 1039909 - RNA, 19 nt, Homo sapiens
  misc_RNA (1)...(19): siRNA sense strand
aaagcucacucggauuaua

SEQ ID NO: 1039910 - RNA, 19 nt, Homo sapiens
  misc_RNA (1)...(19): siRNA sense strand
acauaaagguacauacuuc

SEQ ID NO: 1039911 - RNA, 19 nt, Homo sapiens
  misc_RNA (1)...(19): siRNA sense strand
acaggcagaccauuuauuu

SEQ ID NO: 1039912 - RNA, 19 nt, Homo sapiens
  misc_RNA (1)...(19): siRNA sense strand
ccaaccuguucaucaauaa

SEQ ID NO: 1039913 - RNA, 19 nt, Homo sapiens
  misc_RNA (1)...(19): siRNA sense strand
caagugcacauucagauga

SEQ ID NO: 1039914 - RNA, 19 nt, Homo sapiens
  misc_RNA (1)...(19): siRNA sense strand
ucagacauguacacuguga

SEQ ID NO: 1039915 - RNA, 19 nt, Homo sapiens
  misc_RNA (1)...(19): siRNA sense strand
gaccaucaguugccaaguc

SEQ ID NO: 1039916 - RNA, 19 nt, Homo sapiens
  misc_RNA (1)...(19): siRNA sense strand
gaacaacuccgaagaaaag

SEQ ID NO: 1039917 - RNA, 19 nt, Homo sapiens
  misc_RNA (1)...(19): siRNA sense strand
gcgcuugaguuaacaugug

SEQ ID NO: 1039918 - RNA, 19 nt, Homo sapiens
  misc_RNA (1)...(19): siRNA sense strand
cccaaccuguucaucaaua

SEQ ID NO: 1039919 - RNA, 19 nt, Homo sapiens
  misc_RNA (1)...(19): siRNA sense strand
gaugacuuauccucuacaa

SEQ ID NO: 1039920 - RNA, 19 nt, Homo sapiens
  misc_RNA (1)...(19): siRNA sense strand
agaaagaguacuucaucua

SEQ ID NO: 1039921 - RNA, 19 nt, Homo sapiens
  misc_RNA (1)...(19): siRNA sense strand
aaagaaagaguacuucauc

SEQ ID NO: 1039922 - RNA, 19 nt, Homo sapiens
  misc_RNA (1)...(19): siRNA sense strand
gguacauacuucacucaug

SEQ ID NO: 1039923 - RNA, 19 nt, Homo sapiens
  misc_RNA (1)...(19): siRNA sense strand
acaaacgucucaauuucug

SEQ ID NO: 1039924 - RNA, 19 nt, Homo sapiens
  misc_RNA (1)...(19): siRNA sense strand
ggcccaaccuguucaucaa

SEQ ID NO: 1039925 - RNA, 19 nt, Homo sapiens
  misc_RNA (1)...(19): siRNA sense strand
ggugagagucgaugaugaa

SEQ ID NO: 1039926 - RNA, 19 nt, Homo sapiens
  misc_RNA (1)...(19): siRNA sense strand
gacauaaagguacauacuu

SEQ ID NO: 1039927 - RNA, 19 nt, Homo sapiens
  misc_RNA (1)...(19): siRNA sense strand
gcagaaggaggacagaaca

SEQ ID NO: 1039928 - RNA, 19 nt, Homo sapiens
  misc_RNA (1)...(19): siRNA sense strand
ggaagaguggucagacaug

SEQ ID NO: 1039929 - RNA, 19 nt, Homo sapiens
  misc_RNA (1)...(19): siRNA sense strand
caacaggcagaccauuuau

SEQ ID NO: 1039930 - RNA, 19 nt, Homo sapiens
  misc_RNA (1)...(19): siRNA sense strand
ucaguugccaagucaauaa

SEQ ID NO: 1039931 - RNA, 19 nt, Homo sapiens
  misc_RNA (1)...(19): siRNA sense strand
gggugagagucgaugauga

SEQ ID NO: 1039932 - RNA, 19 nt, Homo sapiens
  misc_RNA (1)...(19): siRNA sense strand
uagcagugaacucaaagua

SEQ ID NO: 1039933 - RNA, 19 nt, Homo sapiens
  misc_RNA (1)...(19): siRNA sense strand
gggacgcgcuugaguuaac

SEQ ID NO: 1039934 - RNA, 19 nt, Homo sapiens
  misc_RNA (1)...(19): siRNA sense strand
caaagggaacacagagcua

SEQ ID NO: 1039935 - RNA, 19 nt, Homo sapiens
  misc_RNA (1)...(19): siRNA sense strand
gcaagccagccacgacuau

SEQ ID NO: 1039936 - RNA, 19 nt, Homo sapiens
  misc_RNA (1)...(19): siRNA sense strand
cacguaaucugaugaucga

SEQ ID NO: 1039937 - RNA, 19 nt, Homo sapiens
  misc_RNA (1)...(19): siRNA sense strand
guucaucaauaaccuaaac

SEQ ID NO: 1039938 - RNA, 19 nt, Homo sapiens
  misc_RNA (1)...(19): siRNA sense strand
agaaucuguuuacgaaaga

SEQ ID NO: 1039939 - RNA, 19 nt, Homo sapiens
  misc_RNA (1)...(19): siRNA sense strand
acacagcuauaaucaaugc

SEQ ID NO: 1039940 - RNA, 19 nt, Homo sapiens
  misc_RNA (1)...(19): siRNA sense strand
ccacaagugcacauucaga

SEQ ID NO: 1039941 - RNA, 19 nt, Homo sapiens
  misc_RNA (1)...(19): siRNA sense strand
caaaguaucauugacaaac

SEQ ID NO: 1039942 - RNA, 19 nt, Homo sapiens
  misc_RNA (1)...(19): siRNA sense strand
gaaagacgugacagugauc

SEQ ID NO: 1039943 - RNA, 19 nt, Homo sapiens
  misc_RNA (1)...(19): siRNA sense strand
caaaacagauaaugguaca

SEQ ID NO: 1039944 - RNA, 19 nt, Homo sapiens
  misc_RNA (1)...(19): siRNA sense strand
guaucuagaaguacaguau

SEQ ID NO: 1039945 - RNA, 19 nt, Homo sapiens
  misc_RNA (1)...(19): siRNA sense strand
ugaucgauauccagagaga

SEQ ID NO: 1039946 - RNA, 19 nt, Homo sapiens
  misc_RNA (1)...(19): siRNA sense strand
cguaaucugaugaucgaua

SEQ ID NO: 1039947 - RNA, 19 nt, Homo sapiens
  misc_RNA (1)...(19): siRNA sense strand
cgucucaauuucugaugaa

SEQ ID NO: 1039948 - RNA, 19 nt, Homo sapiens
  misc_RNA (1)...(19): siRNA sense strand
ugaugaaggaagauacuuu

SEQ ID NO: 1039949 - RNA, 19 nt, Homo sapiens
  misc_RNA (1)...(19): siRNA sense strand
acagaacaacuccgaagaa

SEQ ID NO: 1039950 - RNA, 19 nt, Homo sapiens
  misc_RNA (1)...(19): siRNA sense strand
gacagaacaacuccgaaga

SEQ ID NO: 1039951 - RNA, 19 nt, Homo sapiens
  misc_RNA (1)...(19): siRNA sense strand
gacaaacgucucaauuucu

SEQ ID NO: 1039952 - RNA, 19 nt, Homo sapiens
  misc_RNA (1)...(19): siRNA sense strand
agacgcagacacagcuaua

SEQ ID NO: 1039953 - RNA, 19 nt, Homo sapiens
  misc_RNA (1)...(19): siRNA sense strand
ggacgcgcuugaguuaaca

SEQ ID NO: 1039954 - RNA, 19 nt, Homo sapiens
  misc_RNA (1)...(19): siRNA sense strand
aaagggaacacagagcuaa

SEQ ID NO: 1039955 - RNA, 19 nt, Homo sapiens
  misc_RNA (1)...(19): siRNA sense strand
ucagggacuucaggccuuu

SEQ ID NO: 1039956 - RNA, 19 nt, Homo sapiens
  misc_RNA (1)...(19): siRNA sense strand
gaaggaggacagaacaacu

SEQ ID NO: 1039957 - RNA, 19 nt, Homo sapiens
  misc_RNA (1)...(19): siRNA sense strand
cucaauuucugaugaagga

SEQ ID NO: 1039958 - RNA, 19 nt, Homo sapiens
  misc_RNA (1)...(19): siRNA sense strand
gaaaagaaagaguacuuca

SEQ ID NO: 1039959 - RNA, 19 nt, Homo sapiens
  misc_RNA (1)...(19): siRNA sense strand
guggaagaguggucagaca

SEQ ID NO: 1039960 - RNA, 19 nt, Homo sapiens
  misc_RNA (1)...(19): siRNA sense strand
aggcagaccauuuauuuca

SEQ ID NO: 1039961 - RNA, 19 nt, Homo sapiens
  misc_RNA (1)...(19): siRNA sense strand
cagaugacuuauccucuac

SEQ ID NO: 1039962 - RNA, 19 nt, Homo sapiens
  misc_RNA (1)...(19): siRNA sense strand
gaaagcucacucggauuau

SEQ ID NO: 1039963 - RNA, 19 nt, Homo sapiens
  misc_RNA (1)...(19): siRNA sense strand
ggagagguugcgaccauca

SEQ ID NO: 1039964 - RNA, 19 nt, Homo sapiens
  misc_RNA (1)...(19): siRNA sense strand
aagaaagaguacuucaucu

SEQ ID NO: 1039965 - RNA, 19 nt, Homo sapiens
  misc_RNA (1)...(19): siRNA sense strand
gggcccaaccuguucauca

SEQ ID NO: 1039966 - RNA, 19 nt, Homo sapiens
  misc_RNA (1)...(19): siRNA sense strand
gaugaaggaagauacuuuu

SEQ ID NO: 1039967 - RNA, 19 nt, Homo sapiens
  misc_RNA (1)...(19): siRNA sense strand
cauaaagguacauacuuca

SEQ ID NO: 1039968 - RNA, 19 nt, Homo sapiens
  misc_RNA (1)...(19): siRNA sense strand
ugaacucaaaguaucauug

SEQ ID NO: 1039969 - RNA, 19 nt, Homo sapiens
  misc_RNA (1)...(19): siRNA sense strand
ccagacauaaagguacaua

SEQ ID NO: 1039970 - RNA, 19 nt, Homo sapiens
  misc_RNA (1)...(19): siRNA sense strand
ccaccauccuuaccaucau

SEQ ID NO: 1039971 - RNA, 19 nt, Homo sapiens
  misc_RNA (1)...(19): siRNA sense strand
acuaucaggugguucaaag

SEQ ID NO: 1039972 - RNA, 19 nt, Homo sapiens
  misc_RNA (1)...(19): siRNA sense strand
ggaaggugaggagauugaa

SEQ ID NO: 1039973 - RNA, 19 nt, Homo sapiens
  misc_RNA (1)...(19): siRNA sense strand
cccaacaggcagaccauuu

SEQ ID NO: 1039974 - RNA, 19 nt, Homo sapiens
  misc_RNA (1)...(19): siRNA sense strand
ccaccaccauccuuaccau

SEQ ID NO: 1039975 - RNA, 19 nt, Homo sapiens
  misc_RNA (1)...(19): siRNA sense strand
ucaacacgccguacugucu

SEQ ID NO: 1039976 - RNA, 19 nt, Homo sapiens
  misc_RNA (1)...(19): siRNA sense strand
acgaaagacgugacaguga

SEQ ID NO: 1039977 - RNA, 19 nt, Homo sapiens
  misc_RNA (1)...(19): siRNA sense strand
gaaggugaggagauugaag

SEQ ID NO: 1039978 - RNA, 19 nt, Homo sapiens
  misc_RNA (1)...(19): siRNA sense strand
ccauuuauuucagggacuu

SEQ ID NO: 1039979 - RNA, 19 nt, Homo sapiens
  misc_RNA (1)...(19): siRNA sense strand
agacauaaagguacauacu

SEQ ID NO: 1039980 - RNA, 19 nt, Homo sapiens
  misc_RNA (1)...(19): siRNA sense strand
ggugaagaaggcucgauca

SEQ ID NO: 1039981 - RNA, 19 nt, Homo sapiens
  misc_RNA (1)...(19): siRNA sense strand
gacgcagacacagcuauaa

SEQ ID NO: 1039982 - RNA, 19 nt, Homo sapiens
  misc_RNA (1)...(19): siRNA sense strand
gcagacgcagacacagcua

SEQ ID NO: 1039983 - RNA, 19 nt, Homo sapiens
  misc_RNA (1)...(19): siRNA sense strand
gaaaggagaccacaaggaa

SEQ ID NO: 1039984 - RNA, 19 nt, Homo sapiens
  misc_RNA (1)...(19): siRNA sense strand
caaggaaucugguucugaa

SEQ ID NO: 1039985 - RNA, 19 nt, Homo sapiens
  misc_RNA (1)...(19): siRNA sense strand
aaagcaggcucucuucaaa

SEQ ID NO: 1039986 - RNA, 19 nt, Homo sapiens
  misc_RNA (1)...(19): siRNA sense strand
gaaagcaggcucucuucaa

SEQ ID NO: 1039987 - RNA, 19 nt, Homo sapiens
  misc_RNA (1)...(19): siRNA sense strand
ccuuuaacaugccauauaa

SEQ ID NO: 1039988 - RNA, 19 nt, Homo sapiens
  misc_RNA (1)...(19): siRNA sense strand
caaagaagcaggagagagu

SEQ ID NO: 1039989 - RNA, 19 nt, Homo sapiens
  misc_RNA (1)...(19): siRNA sense strand
cugaggagcugcauuggaa

SEQ ID NO: 1039990 - RNA, 19 nt, Homo sapiens
  misc_RNA (1)...(19): siRNA sense strand
ggaaaggagaccacaagga

SEQ ID NO: 1039991 - RNA, 19 nt, Homo sapiens
  misc_RNA (1)...(19): siRNA sense strand
gcugggagcuaggaaagga

SEQ ID NO: 1039992 - RNA, 19 nt, Homo sapiens
  misc_RNA (1)...(19): siRNA sense strand
gcaggaaccacaccgugaa

SEQ ID NO: 1039993 - RNA, 19 nt, Homo sapiens
  misc_RNA (1)...(19): siRNA sense strand
caagcuccauggacacuca

SEQ ID NO: 1039994 - RNA, 19 nt, Homo sapiens
  misc_RNA (1)...(19): siRNA sense strand
ccuugaaacuccagaagau

SEQ ID NO: 1039995 - RNA, 19 nt, Homo sapiens
  misc_RNA (1)...(19): siRNA sense strand
caggagagagugaacaaga

SEQ ID NO: 1039996 - RNA, 19 nt, Homo sapiens
  misc_RNA (1)...(19): siRNA sense strand
ggccaucccugccaucaac

SEQ ID NO: 1039997 - RNA, 19 nt, Homo sapiens
  misc_RNA (1)...(19): siRNA sense strand
gaaaggcugggagcuagga

SEQ ID NO: 1039998 - RNA, 19 nt, Homo sapiens
  misc_RNA (1)...(19): siRNA sense strand
ccagugaguguuuaaaaua

SEQ ID NO: 1039999 - RNA, 19 nt, Homo sapiens
  misc_RNA (1)...(19): siRNA sense strand
gaaccacaccgugaacucu

SEQ ID NO: 1040000 - RNA, 19 nt, Homo sapiens
  misc_RNA (1)...(19): siRNA sense strand
cagaugcacuccccaaaga

SEQ ID NO: 1040001 - RNA, 19 nt, Homo sapiens
  misc_RNA (1)...(19): siRNA sense strand
agaagaugaaguacaggua

SEQ ID NO: 1040002 - RNA, 19 nt, Homo sapiens
  misc_RNA (1)...(19): siRNA sense strand
gucgugagguccaggaaca

SEQ ID NO: 1040003 - RNA, 19 nt, Homo sapiens
  misc_RNA (1)...(19): siRNA sense strand
guaccaguauaagggauca

SEQ ID NO: 1040004 - RNA, 19 nt, Homo sapiens
  misc_RNA (1)...(19): siRNA sense strand
uaaaagccagugaguguuu

SEQ ID NO: 1040005 - RNA, 19 nt, Homo sapiens
  misc_RNA (1)...(19): siRNA sense strand
ccacaaggaaucugguucu

SEQ ID NO: 1040006 - RNA, 19 nt, Homo sapiens
  misc_RNA (1)...(19): siRNA sense strand
cgaaagcaggcucucuuca

SEQ ID NO: 1040007 - RNA, 19 nt, Homo sapiens
  misc_RNA (1)...(19): siRNA sense strand
uccagaagaugaaguacag

SEQ ID NO: 1040008 - RNA, 19 nt, Homo sapiens
  misc_RNA (1)...(19): siRNA sense strand
uugaaacuccagaagauga

SEQ ID NO: 1040009 - RNA, 19 nt, Homo sapiens
  misc_RNA (1)...(19): siRNA sense strand
ugaaacuccagaagaugaa

SEQ ID NO: 1040010 - RNA, 19 nt, Homo sapiens
  misc_RNA (1)...(19): siRNA sense strand
uggcugaggagcugcauug

SEQ ID NO: 1040011 - RNA, 19 nt, Homo sapiens
  misc_RNA (1)...(19): siRNA sense strand
caguauaagggaucaagga

SEQ ID NO: 1040012 - RNA, 19 nt, Homo sapiens
  misc_RNA (1)...(19): siRNA sense strand
gcugaggagcugcauugga

SEQ ID NO: 1040013 - RNA, 19 nt, Homo sapiens
  misc_RNA (1)...(19): siRNA sense strand
acaaggaaucugguucuga

SEQ ID NO: 1040014 - RNA, 19 nt, Homo sapiens
  misc_RNA (1)...(19): siRNA sense strand
ggaaccacaccgugaacuc

SEQ ID NO: 1040015 - RNA, 19 nt, Homo sapiens
  misc_RNA (1)...(19): siRNA sense strand
aaaccuuuaacaugccaua

SEQ ID NO: 1040016 - RNA, 19 nt, Homo sapiens
  misc_RNA (1)...(19): siRNA sense strand
gccagugaguguuuaaaau

SEQ ID NO: 1040017 - RNA, 19 nt, Homo sapiens
  misc_RNA (1)...(19): siRNA sense strand
uauaaaagccagugagugu

SEQ ID NO: 1040018 - RNA, 19 nt, Homo sapiens
  misc_RNA (1)...(19): siRNA sense strand
uaggaaaggagaccacaag

SEQ ID NO: 1040019 - RNA, 19 nt, Homo sapiens
  misc_RNA (1)...(19): siRNA sense strand
aaaagccagugaguguuua

SEQ ID NO: 1040020 - RNA, 19 nt, Homo sapiens
  misc_RNA (1)...(19): siRNA sense strand
gcacaaaacucugguaaua

SEQ ID NO: 1040021 - RNA, 19 nt, Homo sapiens
  misc_RNA (1)...(19): siRNA sense strand
gaacaacuccaaggaaaua

SEQ ID NO: 1040022 - RNA, 19 nt, Homo sapiens
  misc_RNA (1)...(19): siRNA sense strand
gcaaguggccuaucaacua

SEQ ID NO: 1040023 - RNA, 19 nt, Homo sapiens
  misc_RNA (1)...(19): siRNA sense strand
gaaagucaguggugaaauc

SEQ ID NO: 1040024 - RNA, 19 nt, Homo sapiens
  misc_RNA (1)...(19): siRNA sense strand
gaaccucucucuccucaga

SEQ ID NO: 1040025 - RNA, 19 nt, Homo sapiens
  misc_RNA (1)...(19): siRNA sense strand
ggauuuggcugcuauugaa

SEQ ID NO: 1040026 - RNA, 19 nt, Homo sapiens
  misc_RNA (1)...(19): siRNA sense strand
ucaaagaggcaaagaauuu

SEQ ID NO: 1040027 - RNA, 19 nt, Homo sapiens
  misc_RNA (1)...(19): siRNA sense strand
uguaaucucuggaggaaua

SEQ ID NO: 1040028 - RNA, 19 nt, Homo sapiens
  misc_RNA (1)...(19): siRNA sense strand
ggaagaacguggauuggau

SEQ ID NO: 1040029 - RNA, 19 nt, Homo sapiens
  misc_RNA (1)...(19): siRNA sense strand
ggugaaauccuucuccaua

SEQ ID NO: 1040030 - RNA, 19 nt, Homo sapiens
  misc_RNA (1)...(19): siRNA sense strand
cagaacaacuccaaggaaa

SEQ ID NO: 1040031 - RNA, 19 nt, Homo sapiens
  misc_RNA (1)...(19): siRNA sense strand
uccaggagcugaagaagua

SEQ ID NO: 1040032 - RNA, 19 nt, Homo sapiens
  misc_RNA (1)...(19): siRNA sense strand
gggaagcacuggcucauca

SEQ ID NO: 1040033 - RNA, 19 nt, Homo sapiens
  misc_RNA (1)...(19): siRNA sense strand
gaagaaggagucaccugua

SEQ ID NO: 1040034 - RNA, 19 nt, Homo sapiens
  misc_RNA (1)...(19): siRNA sense strand
gcacuaugaucgauuugga

SEQ ID NO: 1040035 - RNA, 19 nt, Homo sapiens
  misc_RNA (1)...(19): siRNA sense strand
ggaagagacugaagaaagc

SEQ ID NO: 1040036 - RNA, 19 nt, Homo sapiens
  misc_RNA (1)...(19): siRNA sense strand
ggagucaccuguaaucucu

SEQ ID NO: 1040037 - RNA, 19 nt, Homo sapiens
  misc_RNA (1)...(19): siRNA sense strand
gcaguuaucuacaaacacu

SEQ ID NO: 1040038 - RNA, 19 nt, Homo sapiens
  misc_RNA (1)...(19): siRNA sense strand
ggacuuagacggucaacau

SEQ ID NO: 1040039 - RNA, 19 nt, Homo sapiens
  misc_RNA (1)...(19): siRNA sense strand
ggaagaaggccagccauga

SEQ ID NO: 1040040 - RNA, 19 nt, Homo sapiens
  misc_RNA (1)...(19): siRNA sense strand
ggcagaagauggccaacaa

SEQ ID NO: 1040041 - RNA, 19 nt, Homo sapiens
  misc_RNA (1)...(19): siRNA sense strand
gggaggaguucguuugaau

SEQ ID NO: 1040042 - RNA, 19 nt, Homo sapiens
  misc_RNA (1)...(19): siRNA sense strand
gaugagcguuuacagugaa

SEQ ID NO: 1040043 - RNA, 19 nt, Homo sapiens
  misc_RNA (1)...(19): siRNA sense strand
aagaaggagucaccuguaa

SEQ ID NO: 1040044 - RNA, 19 nt, Homo sapiens
  misc_RNA (1)...(19): siRNA sense strand
gugaaauccuucuccauau

SEQ ID NO: 1040045 - RNA, 19 nt, Homo sapiens
  misc_RNA (1)...(19): siRNA sense strand
guucaucaaucugucauuu

SEQ ID NO: 1040046 - RNA, 19 nt, Homo sapiens
  misc_RNA (1)...(19): siRNA sense strand
caagaggccagcagaguuu

SEQ ID NO: 1040047 - RNA, 19 nt, Homo sapiens
  misc_RNA (1)...(19): siRNA sense strand
acacuaaaguacacuauca

SEQ ID NO: 1040048 - RNA, 19 nt, Homo sapiens
  misc_RNA (1)...(19): siRNA sense strand
ggaagugcacugucuguga

SEQ ID NO: 1040049 - RNA, 19 nt, Homo sapiens
  misc_RNA (1)...(19): siRNA sense strand
gcgcagcuaaggauuauaa

SEQ ID NO: 1040050 - RNA, 19 nt, Homo sapiens
  misc_RNA (1)...(19): siRNA sense strand
uaaagaauguuugccuaga

SEQ ID NO: 1040051 - RNA, 19 nt, Homo sapiens
  misc_RNA (1)...(19): siRNA sense strand
gaagaaggccagccaugau

SEQ ID NO: 1040052 - RNA, 19 nt, Homo sapiens
  misc_RNA (1)...(19): siRNA sense strand
guacagagccaagagcaaa

SEQ ID NO: 1040053 - RNA, 19 nt, Homo sapiens
  misc_RNA (1)...(19): siRNA sense strand
gaggauacuguaagcauaa

SEQ ID NO: 1040054 - RNA, 19 nt, Homo sapiens
  misc_RNA (1)...(19): siRNA sense strand
aaagaauguuugccuagaa

SEQ ID NO: 1040055 - RNA, 19 nt, Homo sapiens
  misc_RNA (1)...(19): siRNA sense strand
acagaagacucagaggaua

SEQ ID NO: 1040056 - RNA, 19 nt, Homo sapiens
  misc_RNA (1)...(19): siRNA sense strand
aaggagagcugacaguugu

SEQ ID NO: 1040057 - RNA, 19 nt, Homo sapiens
  misc_RNA (1)...(19): siRNA sense strand
gaaggagucaccuguaauc

SEQ ID NO: 1040058 - RNA, 19 nt, Homo sapiens
  misc_RNA (1)...(19): siRNA sense strand
gaagagcagucggagcaau

SEQ ID NO: 1040059 - RNA, 19 nt, Homo sapiens
  misc_RNA (1)...(19): siRNA sense strand
ggaguucguuugaauucug

SEQ ID NO: 1040060 - RNA, 19 nt, Homo sapiens
  misc_RNA (1)...(19): siRNA sense strand
caacaagcguaagaccaaa

SEQ ID NO: 1040061 - RNA, 19 nt, Homo sapiens
  misc_RNA (1)...(19): siRNA sense strand
gaaauccuucuccauauca

SEQ ID NO: 1040062 - RNA, 19 nt, Homo sapiens
  misc_RNA (1)...(19): siRNA sense strand
agaggauacuguaagcaua

SEQ ID NO: 1040063 - RNA, 19 nt, Homo sapiens
  misc_RNA (1)...(19): siRNA sense strand
gcaaagccaccaagcacaa

SEQ ID NO: 1040064 - RNA, 19 nt, Homo sapiens
  misc_RNA (1)...(19): siRNA sense strand
uagaaguguucaucaaaga

SEQ ID NO: 1040065 - RNA, 19 nt, Homo sapiens
  misc_RNA (1)...(19): siRNA sense strand
uaugaucgauuuggacgua

SEQ ID NO: 1040066 - RNA, 19 nt, Homo sapiens
  misc_RNA (1)...(19): siRNA sense strand
cauaggagaugaaaagaaa

SEQ ID NO: 1040067 - RNA, 19 nt, Homo sapiens
  misc_RNA (1)...(19): siRNA sense strand
gcaccaauccagaauucaa

SEQ ID NO: 1040068 - RNA, 19 nt, Homo sapiens
  misc_RNA (1)...(19): siRNA sense strand
gaggaauacuagaaguguu

SEQ ID NO: 1040069 - RNA, 19 nt, Homo sapiens
  misc_RNA (1)...(19): siRNA sense strand
gauuugagugagucauuua

SEQ ID NO: 1040070 - RNA, 19 nt, Homo sapiens
  misc_RNA (1)...(19): siRNA sense strand
caucaaagaggcaaagaau

SEQ ID NO: 1040071 - RNA, 19 nt, Homo sapiens
  misc_RNA (1)...(19): siRNA sense strand
aaaccugggccuaaucuuu

SEQ ID NO: 1040072 - RNA, 19 nt, Homo sapiens
  misc_RNA (1)...(19): siRNA sense strand
caaguggccuaucaacuac

SEQ ID NO: 1040073 - RNA, 19 nt, Homo sapiens
  misc_RNA (1)...(19): siRNA sense strand
gcuauagcuuggacuuaga

SEQ ID NO: 1040074 - RNA, 19 nt, Homo sapiens
  misc_RNA (1)...(19): siRNA sense strand
ucagacacuucaccuguug

SEQ ID NO: 1040075 - RNA, 19 nt, Homo sapiens
  misc_RNA (1)...(19): siRNA sense strand
ugaaauccuucuccauauc

SEQ ID NO: 1040076 - RNA, 19 nt, Homo sapiens
  misc_RNA (1)...(19): siRNA sense strand
gucaagaauugcagaaauc

SEQ ID NO: 1040077 - RNA, 19 nt, Homo sapiens
  misc_RNA (1)...(19): siRNA sense strand
gaguuuguguucacuguca

SEQ ID NO: 1040078 - RNA, 19 nt, Homo sapiens
  misc_RNA (1)...(19): siRNA sense strand
aaccagaggagaaaucaua

SEQ ID NO: 1040079 - RNA, 19 nt, Homo sapiens
  misc_RNA (1)...(19): siRNA sense strand
cauaucagcuacugcuaca

SEQ ID NO: 1040080 - RNA, 19 nt, Homo sapiens
  misc_RNA (1)...(19): siRNA sense strand
ggaggaguucguuugaauu

SEQ ID NO: 1040081 - RNA, 19 nt, Homo sapiens
  misc_RNA (1)...(19): siRNA sense strand
gaaacacuaaaguacacua

SEQ ID NO: 1040082 - RNA, 19 nt, Homo sapiens
  misc_RNA (1)...(19): siRNA sense strand
ugucaagaauugcagaaau

SEQ ID NO: 1040083 - RNA, 19 nt, Homo sapiens
  misc_RNA (1)...(19): siRNA sense strand
gcuaccugcucccugauga

SEQ ID NO: 1040084 - RNA, 19 nt, Homo sapiens
  misc_RNA (1)...(19): siRNA sense strand
gccuagaacuuacuaucug

SEQ ID NO: 1040085 - RNA, 19 nt, Homo sapiens
  misc_RNA (1)...(19): siRNA sense strand
ucaauguucucggcacuga

SEQ ID NO: 1040086 - RNA, 19 nt, Homo sapiens
  misc_RNA (1)...(19): siRNA sense strand
gaggaguucguuugaauuc

SEQ ID NO: 1040087 - RNA, 19 nt, Homo sapiens
  misc_RNA (1)...(19): siRNA sense strand
ugacaguuguuuuacguua

SEQ ID NO: 1040088 - RNA, 19 nt, Homo sapiens
  misc_RNA (1)...(19): siRNA sense strand
ggagagcugacaguuguuu

SEQ ID NO: 1040089 - RNA, 19 nt, Homo sapiens
  misc_RNA (1)...(19): siRNA sense strand
caaaggagagcugacaguu

SEQ ID NO: 1040090 - RNA, 19 nt, Homo sapiens
  misc_RNA (1)...(19): siRNA sense strand
gaucgauuuggacguaaua

SEQ ID NO: 1040091 - RNA, 19 nt, Homo sapiens
  misc_RNA (1)...(19): siRNA sense strand
ugaugagcguuuacaguga

SEQ ID NO: 1040092 - RNA, 19 nt, Homo sapiens
  misc_RNA (1)...(19): siRNA sense strand
gagaauaaggaagcugaaa

SEQ ID NO: 1040093 - RNA, 19 nt, Homo sapiens
  misc_RNA (1)...(19): siRNA sense strand
cuagaaguguucaucaaag

SEQ ID NO: 1040094 - RNA, 19 nt, Homo sapiens
  misc_RNA (1)...(19): siRNA sense strand
uaucagcuacugcuacaaa

SEQ ID NO: 1040095 - RNA, 19 nt, Homo sapiens
  misc_RNA (1)...(19): siRNA sense strand
caaagagucaccgcagaaa

SEQ ID NO: 1040096 - RNA, 19 nt, Homo sapiens
  misc_RNA (1)...(19): siRNA sense strand
gggaagagcagcgccuuug

SEQ ID NO: 1040097 - RNA, 19 nt, Homo sapiens
  misc_RNA (1)...(19): siRNA sense strand
ggaggaauacuagaagugu

SEQ ID NO: 1040098 - RNA, 19 nt, Homo sapiens
  misc_RNA (1)...(19): siRNA sense strand
caacuccaaggaaauaaga

SEQ ID NO: 1040099 - RNA, 19 nt, Homo sapiens
  misc_RNA (1)...(19): siRNA sense strand
gugagucauuuacagaaga

SEQ ID NO: 1040100 - RNA, 19 nt, Homo sapiens
  misc_RNA (1)...(19): siRNA sense strand
uggcacaccuuccauagca

SEQ ID NO: 1040101 - RNA, 19 nt, Homo sapiens
  misc_RNA (1)...(19): siRNA sense strand
uggauuggauggacucuca

SEQ ID NO: 1040102 - RNA, 19 nt, Homo sapiens
  misc_RNA (1)...(19): siRNA sense strand
gauacuguaagcauaagaa

SEQ ID NO: 1040103 - RNA, 19 nt, Homo sapiens
  misc_RNA (1)...(19): siRNA sense strand
acagaaaccugggccuaau

SEQ ID NO: 1040104 - RNA, 19 nt, Homo sapiens
  misc_RNA (1)...(19): siRNA sense strand
gaagaaaaggcaaaacguu

SEQ ID NO: 1040105 - RNA, 19 nt, Homo sapiens
  misc_RNA (1)...(19): siRNA sense strand
guggaggacaagagaauaa

SEQ ID NO: 1040106 - RNA, 19 nt, Homo sapiens
  misc_RNA (1)...(19): siRNA sense strand
ccuguaaucucuggaggaa

SEQ ID NO: 1040107 - RNA, 19 nt, Homo sapiens
  misc_RNA (1)...(19): siRNA sense strand
ccagaacaacuccaaggaa

SEQ ID NO: 1040108 - RNA, 19 nt, Homo sapiens
  misc_RNA (1)...(19): siRNA sense strand
caaugaaacacuaaaguac

SEQ ID NO: 1040109 - RNA, 19 nt, Homo sapiens
  misc_RNA (1)...(19): siRNA sense strand
ccucgcaguuaucuacaaa

SEQ ID NO: 1040110 - RNA, 19 nt, Homo sapiens
  misc_RNA (1)...(19): siRNA sense strand
gaggacaagagaauaagga

SEQ ID NO: 1040111 - RNA, 19 nt, Homo sapiens
  misc_RNA (1)...(19): siRNA sense strand
cccaggauauaaagaaugu

SEQ ID NO: 1040112 - RNA, 19 nt, Homo sapiens
  misc_RNA (1)...(19): siRNA sense strand
gaauuugacagcagugaag

SEQ ID NO: 1040113 - RNA, 19 nt, Homo sapiens
  misc_RNA (1)...(19): siRNA sense strand
gaaaucauaacucccaaaa

SEQ ID NO: 1040114 - RNA, 19 nt, Homo sapiens
  misc_RNA (1)...(19): siRNA sense strand
cagcuaaggauuauaacug

SEQ ID NO: 1040115 - RNA, 19 nt, Homo sapiens
  misc_RNA (1)...(19): siRNA sense strand
gaacucugcagcucucagu

SEQ ID NO: 1040116 - RNA, 19 nt, Homo sapiens
  misc_RNA (1)...(19): siRNA sense strand
ccuaaagagagaugaauau

SEQ ID NO: 1040117 - RNA, 19 nt, Homo sapiens
  misc_RNA (1)...(19): siRNA sense strand
ccauggauuuggcugcuau

SEQ ID NO: 1040118 - RNA, 19 nt, Homo sapiens
  misc_RNA (1)...(19): siRNA sense strand
gucagacacuucaccuguu

SEQ ID NO: 1040119 - RNA, 19 nt, Homo sapiens
  misc_RNA (1)...(19): siRNA sense strand
ucaagcaagucaauguucu

SEQ ID NO: 1040120 - RNA, 19 nt, Homo sapiens
  misc_RNA (1)...(19): siRNA sense strand
acaagaagcugagaaacua

SEQ ID NO: 1040121 - RNA, 19 nt, Homo sapiens
  misc_RNA (1)...(19): siRNA sense strand
gaaucugaaugcaaagaca

SEQ ID NO: 1040122 - RNA, 19 nt, Homo sapiens
  misc_RNA (1)...(19): siRNA sense strand
gacacaagaagcugagaaa

SEQ ID NO: 1040123 - RNA, 19 nt, Homo sapiens
  misc_RNA (1)...(19): siRNA sense strand
agcggaaucugaaugcaaa

SEQ ID NO: 1040124 - RNA, 19 nt, Homo sapiens
  misc_RNA (1)...(19): siRNA sense strand
caagaaaacgacacaagaa

SEQ ID NO: 1040125 - RNA, 19 nt, Homo sapiens
  misc_RNA (1)...(19): siRNA sense strand
guaguguccugugcgucua

SEQ ID NO: 1040126 - RNA, 19 nt, Homo sapiens
  misc_RNA (1)...(19): siRNA sense strand
gaaugcaaagacagaacaa

SEQ ID NO: 1040127 - RNA, 19 nt, Homo sapiens
  misc_RNA (1)...(19): siRNA sense strand
gaaccaccaaccggcaauu

SEQ ID NO: 1040128 - RNA, 19 nt, Homo sapiens
  misc_RNA (1)...(19): siRNA sense strand
ggacagaucaagaaaacga

SEQ ID NO: 1040129 - RNA, 19 nt, Homo sapiens
  misc_RNA (1)...(19): siRNA sense strand
cgacacaagaagcugagaa

SEQ ID NO: 1040130 - RNA, 19 nt, Homo sapiens
  misc_RNA (1)...(19): siRNA sense strand
cacaagaagcugagaaacu

SEQ ID NO: 1040131 - RNA, 19 nt, Homo sapiens
  misc_RNA (1)...(19): siRNA sense strand
cagcggaaucugaaugcaa

SEQ ID NO: 1040132 - RNA, 19 nt, Homo sapiens
  misc_RNA (1)...(19): siRNA sense strand
ggggacagaucaagaaaac

SEQ ID NO: 1040133 - RNA, 19 nt, Homo sapiens
  misc_RNA (1)...(19): siRNA sense strand
ccacacagaucccuacuua

SEQ ID NO: 1040134 - RNA, 19 nt, Homo sapiens
  misc_RNA (1)...(19): siRNA sense strand
ccaaggagaugaugugcuu

SEQ ID NO: 1040135 - RNA, 19 nt, Homo sapiens
  misc_RNA (1)...(19): siRNA sense strand
gcacaacuccaaacucaug

SEQ ID NO: 1040136 - RNA, 19 nt, Homo sapiens
  misc_RNA (1)...(19): siRNA sense strand
ugaggaagcacccagauuu

SEQ ID NO: 1040137 - RNA, 19 nt, Homo sapiens
  misc_RNA (1)...(19): siRNA sense strand
gaaggcuguuauuuccaua

SEQ ID NO: 1040138 - RNA, 19 nt, Homo sapiens
  misc_RNA (1)...(19): siRNA sense strand
agacugaagugcaaagugu

SEQ ID NO: 1040139 - RNA, 19 nt, Homo sapiens
  misc_RNA (1)...(19): siRNA sense strand
gaaauuugaaggcuguuau

SEQ ID NO: 1040140 - RNA, 19 nt, Homo sapiens
  misc_RNA (1)...(19): siRNA sense strand
acuuuggccuccugaauua

SEQ ID NO: 1040141 - RNA, 19 nt, Homo sapiens
  misc_RNA (1)...(19): siRNA sense strand
gaaauucuggaguggauau

SEQ ID NO: 1040142 - RNA, 19 nt, Homo sapiens
  misc_RNA (1)...(19): siRNA sense strand
acaaaucugugaccaucaa

SEQ ID NO: 1040143 - RNA, 19 nt, Homo sapiens
  misc_RNA (1)...(19): siRNA sense strand
gauguaugccacacacuuu

SEQ ID NO: 1040144 - RNA, 19 nt, Homo sapiens
  misc_RNA (1)...(19): siRNA sense strand
gaagagaaacaagagacuu

SEQ ID NO: 1040145 - RNA, 19 nt, Homo sapiens
  misc_RNA (1)...(19): siRNA sense strand
ccaaacucauggacuacuu

SEQ ID NO: 1040146 - RNA, 19 nt, Homo sapiens
  misc_RNA (1)...(19): siRNA sense strand
ucccaggcauugagaaauu

SEQ ID NO: 1040147 - RNA, 19 nt, Homo sapiens
  misc_RNA (1)...(19): siRNA sense strand
uguggagacugaagagaaa

SEQ ID NO: 1040148 - RNA, 19 nt, Homo sapiens
  misc_RNA (1)...(19): siRNA sense strand
ccaacuacaugcacaacuc

SEQ ID NO: 1040149 - RNA, 19 nt, Homo sapiens
  misc_RNA (1)...(19): siRNA sense strand
gaucggcauuggaaauucu

SEQ ID NO: 1040150 - RNA, 19 nt, Homo sapiens
  misc_RNA (1)...(19): siRNA sense strand
ccuaguaucuacaaaucug

SEQ ID NO: 1040151 - RNA, 19 nt, Homo sapiens
  misc_RNA (1)...(19): siRNA sense strand
ugacuucccugucccugau

SEQ ID NO: 1040152 - RNA, 19 nt, Homo sapiens
  misc_RNA (1)...(19): siRNA sense strand
gaucccuacuuaccacuuc

SEQ ID NO: 1040153 - RNA, 19 nt, Homo sapiens
  misc_RNA (1)...(19): siRNA sense strand
ggagcucagucguguagca

SEQ ID NO: 1040154 - RNA, 19 nt, Homo sapiens
  misc_RNA (1)...(19): siRNA sense strand
aagagaaacaagagacuuu

SEQ ID NO: 1040155 - RNA, 19 nt, Homo sapiens
  misc_RNA (1)...(19): siRNA sense strand
ugaaggcuguuauuuccau

SEQ ID NO: 1040156 - RNA, 19 nt, Homo sapiens
  misc_RNA (1)...(19): siRNA sense strand
ggauguaugccacacacuu

SEQ ID NO: 1040157 - RNA, 19 nt, Homo sapiens
  misc_RNA (1)...(19): siRNA sense strand
gggaaaagaaucauaguga

SEQ ID NO: 1040158 - RNA, 19 nt, Homo sapiens
  misc_RNA (1)...(19): siRNA sense strand
augcacaacuccaaacuca

SEQ ID NO: 1040159 - RNA, 19 nt, Homo sapiens
  misc_RNA (1)...(19): siRNA sense strand
ggacuacuucgggauguau

SEQ ID NO: 1040160 - RNA, 19 nt, Homo sapiens
  misc_RNA (1)...(19): siRNA sense strand
agacugaagagaaacaaga

SEQ ID NO: 1040161 - RNA, 19 nt, Homo sapiens
  misc_RNA (1)...(19): siRNA sense strand
uggaaauucuggaguggau

SEQ ID NO: 1040162 - RNA, 19 nt, Homo sapiens
  misc_RNA (1)...(19): siRNA sense strand
ggaaauucuggaguggaua

SEQ ID NO: 1040163 - RNA, 19 nt, Homo sapiens
  misc_RNA (1)...(19): siRNA sense strand
ggucuuugauggggucuua

SEQ ID NO: 1040164 - RNA, 19 nt, Homo sapiens
  misc_RNA (1)...(19): siRNA sense strand
cuacaugcacaacuccaaa

SEQ ID NO: 1040165 - RNA, 19 nt, Homo sapiens
  misc_RNA (1)...(19): siRNA sense strand
cccaggcauugagaaauuu

SEQ ID NO: 1040166 - RNA, 19 nt, Homo sapiens
  misc_RNA (1)...(19): siRNA sense strand
gugaggaagcacccagauu

SEQ ID NO: 1040167 - RNA, 19 nt, Homo sapiens
  misc_RNA (1)...(19): siRNA sense strand
gcucagucguguagcaaaa

SEQ ID NO: 1040168 - RNA, 19 nt, Homo sapiens
  misc_RNA (1)...(19): siRNA sense strand
cacuuuggccuccugaauu

SEQ ID NO: 1040169 - RNA, 19 nt, Homo sapiens
  misc_RNA (1)...(19): siRNA sense strand
gugaucggcauuggaaauu

SEQ ID NO: 1040170 - RNA, 19 nt, Homo sapiens
  misc_RNA (1)...(19): siRNA sense strand
gagaaacaagagacuuugg

SEQ ID NO: 1040171 - RNA, 19 nt, Homo sapiens
  misc_RNA (1)...(19): siRNA sense strand
ggagaugaugugcuucagu

SEQ ID NO: 1040172 - RNA, 19 nt, Homo sapiens
  misc_RNA (1)...(19): siRNA sense strand
gaggaagcacccagauuuu

SEQ ID NO: 1040173 - RNA, 19 nt, Homo sapiens
  misc_RNA (1)...(19): siRNA sense strand
ccaucaauacuuccaagga

SEQ ID NO: 1040174 - RNA, 19 nt, Homo sapiens
  misc_RNA (1)...(19): siRNA sense strand
auagugaucggcauuggaa

SEQ ID NO: 1040175 - RNA, 19 nt, Homo sapiens
  misc_RNA (1)...(19): siRNA sense strand
caaacucauggacuacuuc

SEQ ID NO: 1040176 - RNA, 19 nt, Homo sapiens
  misc_RNA (1)...(19): siRNA sense strand
ucugugaccaucaauacuu

SEQ ID NO: 1040177 - RNA, 19 nt, Homo sapiens
  misc_RNA (1)...(19): siRNA sense strand
aauggacaaugggauguug

SEQ ID NO: 1040178 - RNA, 19 nt, Homo sapiens
  misc_RNA (1)...(19): siRNA sense strand
aaaucugugaccaucaaua

SEQ ID NO: 1040179 - RNA, 19 nt, Homo sapiens
  misc_RNA (1)...(19): siRNA sense strand
acacagaucccuacuuacc

SEQ ID NO: 1040180 - RNA, 19 nt, Homo sapiens
  misc_RNA (1)...(19): siRNA sense strand
uuugaaggcuguuauuucc

SEQ ID NO: 1040181 - RNA, 19 nt, Homo sapiens
  misc_RNA (1)...(19): siRNA sense strand
agaaauuugaaggcuguua

SEQ ID NO: 1040182 - RNA, 19 nt, Homo sapiens
  misc_RNA (1)...(19): siRNA sense strand
gaaaagagcugaaaaccuu

SEQ ID NO: 1040183 - RNA, 19 nt, Homo sapiens
  misc_RNA (1)...(19): siRNA sense strand
uaacuacacugaaagauga

SEQ ID NO: 1040184 - RNA, 19 nt, Homo sapiens
  misc_RNA (1)...(19): siRNA sense strand
ggaaaccacuguagaugaa

SEQ ID NO: 1040185 - RNA, 19 nt, Homo sapiens
  misc_RNA (1)...(19): siRNA sense strand
cgaauaagcugucagacuu

SEQ ID NO: 1040186 - RNA, 19 nt, Homo sapiens
  misc_RNA (1)...(19): siRNA sense strand
ugacagcuaucaacuuaua

SEQ ID NO: 1040187 - RNA, 19 nt, Homo sapiens
  misc_RNA (1)...(19): siRNA sense strand
caaaggaauucuucaguug

SEQ ID NO: 1040188 - RNA, 19 nt, Homo sapiens
  misc_RNA (1)...(19): siRNA sense strand
gaaaacaaguucagcaaaa

SEQ ID NO: 1040189 - RNA, 19 nt, Homo sapiens
  misc_RNA (1)...(19): siRNA sense strand
gcaaaccacuagccaguau

SEQ ID NO: 1040190 - RNA, 19 nt, Homo sapiens
  misc_RNA (1)...(19): siRNA sense strand
gagcagagccgccaucuuc

SEQ ID NO: 1040191 - RNA, 19 nt, Homo sapiens
  misc_RNA (1)...(19): siRNA sense strand
ugugacagcuaucaacuua

SEQ ID NO: 1040192 - RNA, 19 nt, Homo sapiens
  misc_RNA (1)...(19): siRNA sense strand
gaaaagaucuguguagguu

SEQ ID NO: 1040193 - RNA, 19 nt, Homo sapiens
  misc_RNA (1)...(19): siRNA sense strand
gccaguaucuuaucaggaa

SEQ ID NO: 1040194 - RNA, 19 nt, Homo sapiens
  misc_RNA (1)...(19): siRNA sense strand
gagccgccaucuucauaua

SEQ ID NO: 1040195 - RNA, 19 nt, Homo sapiens
  misc_RNA (1)...(19): siRNA sense strand
ggacagguguauguaaaug

SEQ ID NO: 1040196 - RNA, 19 nt, Homo sapiens
  misc_RNA (1)...(19): siRNA sense strand
ggauaaaguggacgucaua

SEQ ID NO: 1040197 - RNA, 19 nt, Homo sapiens
  misc_RNA (1)...(19): siRNA sense strand
gcaacuaauugucauucaa

SEQ ID NO: 1040198 - RNA, 19 nt, Homo sapiens
  misc_RNA (1)...(19): siRNA sense strand
cauauaagguaauguguca

SEQ ID NO: 1040199 - RNA, 19 nt, Homo sapiens
  misc_RNA (1)...(19): siRNA sense strand
caacuuauauccagauggu

SEQ ID NO: 1040200 - RNA, 19 nt, Homo sapiens
  misc_RNA (1)...(19): siRNA sense strand
gaaagcaugcucuacucua

SEQ ID NO: 1040201 - RNA, 19 nt, Homo sapiens
  misc_RNA (1)...(19): siRNA sense strand
acaaaggaauucuucaguu

SEQ ID NO: 1040202 - RNA, 19 nt, Homo sapiens
  misc_RNA (1)...(19): siRNA sense strand
ggaugucacugaaauugau

SEQ ID NO: 1040203 - RNA, 19 nt, Homo sapiens
  misc_RNA (1)...(19): siRNA sense strand
uaguagagauugauggaaa

SEQ ID NO: 1040204 - RNA, 19 nt, Homo sapiens
  misc_RNA (1)...(19): siRNA sense strand
caggacggcaucagaauua

SEQ ID NO: 1040205 - RNA, 19 nt, Homo sapiens
  misc_RNA (1)...(19): siRNA sense strand
gguaauaaccaucuuaaag

SEQ ID NO: 1040206 - RNA, 19 nt, Homo sapiens
  misc_RNA (1)...(19): siRNA sense strand
gaagaaagcaugcucuacu

SEQ ID NO: 1040207 - RNA, 19 nt, Homo sapiens
  misc_RNA (1)...(19): siRNA sense strand
gcaaaaggaugucacugaa

SEQ ID NO: 1040208 - RNA, 19 nt, Homo sapiens
  misc_RNA (1)...(19): siRNA sense strand
caaacuauacccucccuuu

SEQ ID NO: 1040209 - RNA, 19 nt, Homo sapiens
  misc_RNA (1)...(19): siRNA sense strand
acucagacauucaaacuau

SEQ ID NO: 1040210 - RNA, 19 nt, Homo sapiens
  misc_RNA (1)...(19): siRNA sense strand
guggacagguguauguaaa

SEQ ID NO: 1040211 - RNA, 19 nt, Homo sapiens
  misc_RNA (1)...(19): siRNA sense strand
aggagcagcugugguaaua

SEQ ID NO: 1040212 - RNA, 19 nt, Homo sapiens
  misc_RNA (1)...(19): siRNA sense strand
ugucagacuuugauaguga

SEQ ID NO: 1040213 - RNA, 19 nt, Homo sapiens
  misc_RNA (1)...(19): siRNA sense strand
gaauaagcugucagacuuu

SEQ ID NO: 1040214 - RNA, 19 nt, Homo sapiens
  misc_RNA (1)...(19): siRNA sense strand
gaaagaugauggggacaua

SEQ ID NO: 1040215 - RNA, 19 nt, Homo sapiens
  misc_RNA (1)...(19): siRNA sense strand
guaauaaccaucuuaaagg

SEQ ID NO: 1040216 - RNA, 19 nt, Homo sapiens
  misc_RNA (1)...(19): siRNA sense strand
gagcagcugugguaauaac

SEQ ID NO: 1040217 - RNA, 19 nt, Homo sapiens
  misc_RNA (1)...(19): siRNA sense strand
aaagcaugcucuacucuau

SEQ ID NO: 1040218 - RNA, 19 nt, Homo sapiens
  misc_RNA (1)...(19): siRNA sense strand
ggaauucuucaguuggaua

SEQ ID NO: 1040219 - RNA, 19 nt, Homo sapiens
  misc_RNA (1)...(19): siRNA sense strand
gagcaacguuuucccagua

SEQ ID NO: 1040220 - RNA, 19 nt, Homo sapiens
  misc_RNA (1)...(19): siRNA sense strand
cugaaaaccuugaagauaa

SEQ ID NO: 1040221 - RNA, 19 nt, Homo sapiens
  misc_RNA (1)...(19): siRNA sense strand
gaagagguaguagagauug

SEQ ID NO: 1040222 - RNA, 19 nt, Homo sapiens
  misc_RNA (1)...(19): siRNA sense strand
ggcaucagaauuaauguaa

SEQ ID NO: 1040223 - RNA, 19 nt, Homo sapiens
  misc_RNA (1)...(19): siRNA sense strand
guaacuacacugaaagaug

SEQ ID NO: 1040224 - RNA, 19 nt, Homo sapiens
  misc_RNA (1)...(19): siRNA sense strand
agacuuugauagugaagaa

SEQ ID NO: 1040225 - RNA, 19 nt, Homo sapiens
  misc_RNA (1)...(19): siRNA sense strand
aagaagagguaguagagau

SEQ ID NO: 1040226 - RNA, 19 nt, Homo sapiens
  misc_RNA (1)...(19): siRNA sense strand
gaauucuucaguuggauaa

SEQ ID NO: 1040227 - RNA, 19 nt, Homo sapiens
  misc_RNA (1)...(19): siRNA sense strand
ggaauugucaguguaagga

SEQ ID NO: 1040228 - RNA, 19 nt, Homo sapiens
  misc_RNA (1)...(19): siRNA sense strand
ccacaggacggcaucagaa

SEQ ID NO: 1040229 - RNA, 19 nt, Homo sapiens
  misc_RNA (1)...(19): siRNA sense strand
ggaguacucagacauucaa

SEQ ID NO: 1040230 - RNA, 19 nt, Homo sapiens
  misc_RNA (1)...(19): siRNA sense strand
cacuguagaugaagauguu

SEQ ID NO: 1040231 - RNA, 19 nt, Homo sapiens
  misc_RNA (1)...(19): siRNA sense strand
agcaugcucuacucuauuu

SEQ ID NO: 1040232 - RNA, 19 nt, Homo sapiens
  misc_RNA (1)...(19): siRNA sense strand
cagagccgccaucuucaua

SEQ ID NO: 1040233 - RNA, 19 nt, Homo sapiens
  misc_RNA (1)...(19): siRNA sense strand
cccaguuucugaauacaaa

SEQ ID NO: 1040234 - RNA, 19 nt, Homo sapiens
  misc_RNA (1)...(19): siRNA sense strand
ccacuagccaguaucuuau

SEQ ID NO: 1040235 - RNA, 19 nt, Homo sapiens
  misc_RNA (1)...(19): siRNA sense strand
aaagaucuguguagguucu

SEQ ID NO: 1040236 - RNA, 19 nt, Homo sapiens
  misc_RNA (1)...(19): siRNA sense strand
aaaccacuguagaugaaga

SEQ ID NO: 1040237 - RNA, 19 nt, Homo sapiens
  misc_RNA (1)...(19): siRNA sense strand
caacuaauugucauucaag

SEQ ID NO: 1040238 - RNA, 19 nt, Homo sapiens
  misc_RNA (1)...(19): siRNA sense strand
ccuggcaaguuaccugaaa

SEQ ID NO: 1040239 - RNA, 19 nt, Homo sapiens
  misc_RNA (1)...(19): siRNA sense strand
aaaaggaugucacugaaau

SEQ ID NO: 1040240 - RNA, 19 nt, Homo sapiens
  misc_RNA (1)...(19): siRNA sense strand
caucauggugguuggaauu

SEQ ID NO: 1040241 - RNA, 19 nt, Homo sapiens
  misc_RNA (1)...(19): siRNA sense strand
gacggcaucagaauuaaug

SEQ ID NO: 1040242 - RNA, 19 nt, Homo sapiens
  misc_RNA (1)...(19): siRNA sense strand
ucaagaagagguaguagag

SEQ ID NO: 1040243 - RNA, 19 nt, Homo sapiens
  misc_RNA (1)...(19): siRNA sense strand
gcugaaaaccuugaagaua

SEQ ID NO: 1040244 - RNA, 19 nt, Homo sapiens
  misc_RNA (1)...(19): siRNA sense strand
uguuuuaccuggcaaguua

SEQ ID NO: 1040245 - RNA, 19 nt, Homo sapiens
  misc_RNA (1)...(19): siRNA sense strand
aaacuauacccucccuuug

SEQ ID NO: 1040246 - RNA, 19 nt, Homo sapiens
  misc_RNA (1)...(19): siRNA sense strand
gaugucacugaaauugaua

SEQ ID NO: 1040247 - RNA, 19 nt, Homo sapiens
  misc_RNA (1)...(19): siRNA sense strand
aauaagcugucagacuuug

SEQ ID NO: 1040248 - RNA, 19 nt, Homo sapiens
  misc_RNA (1)...(19): siRNA sense strand
accacuagccaguaucuua

SEQ ID NO: 1040249 - RNA, 19 nt, Homo sapiens
  misc_RNA (1)...(19): siRNA sense strand
guacucagacauucaaacu

SEQ ID NO: 1040250 - RNA, 19 nt, Homo sapiens
  misc_RNA (1)...(19): siRNA sense strand
gguaguagagauugaugga

SEQ ID NO: 1040251 - RNA, 19 nt, Homo sapiens
  misc_RNA (1)...(19): siRNA sense strand
aaggaauucuucaguugga

SEQ ID NO: 1040252 - RNA, 19 nt, Homo sapiens
  misc_RNA (1)...(19): siRNA sense strand
cauggugguuggaauuaca

SEQ ID NO: 1040253 - RNA, 19 nt, Homo sapiens
  misc_RNA (1)...(19): siRNA sense strand
ccaguauucuuucaguuuu

SEQ ID NO: 1040254 - RNA, 19 nt, Homo sapiens
  misc_RNA (1)...(19): siRNA sense strand
gacagguguauguaaauga

SEQ ID NO: 1040255 - RNA, 19 nt, Homo sapiens
  misc_RNA (1)...(19): siRNA sense strand
gaacaucauggugguugga

SEQ ID NO: 1040256 - RNA, 19 nt, Homo sapiens
  misc_RNA (1)...(19): siRNA sense strand
uggaaaccacuguagauga

SEQ ID NO: 1040257 - RNA, 19 nt, Homo sapiens
  misc_RNA (1)...(19): siRNA sense strand
ggacggcaucagaauuaau

SEQ ID NO: 1040258 - RNA, 19 nt, Homo sapiens
  misc_RNA (1)...(19): siRNA sense strand
acuauacccucccuuugga

SEQ ID NO: 1040259 - RNA, 19 nt, Homo sapiens
  misc_RNA (1)...(19): siRNA sense strand
ucgagacagugacauuuua

SEQ ID NO: 1040260 - RNA, 19 nt, Homo sapiens
  misc_RNA (1)...(19): siRNA sense strand
aagaaagcaugcucuacuc

SEQ ID NO: 1040261 - RNA, 19 nt, Homo sapiens
  misc_RNA (1)...(19): siRNA sense strand
ggaaaacaaguucagcaaa

SEQ ID NO: 1040262 - RNA, 19 nt, Homo sapiens
  misc_RNA (1)...(19): siRNA sense strand
cccaguauucuuucaguuu

SEQ ID NO: 1040263 - RNA, 19 nt, Homo sapiens
  misc_RNA (1)...(19): siRNA sense strand
ggaagaaagcaugcucuac

SEQ ID NO: 1040264 - RNA, 19 nt, Homo sapiens
  misc_RNA (1)...(19): siRNA sense strand
uaucuaaacagcagguugu

SEQ ID NO: 1040265 - RNA, 19 nt, Homo sapiens
  misc_RNA (1)...(19): siRNA sense strand
gguguauguaaaugacuua

SEQ ID NO: 1040266 - RNA, 19 nt, Homo sapiens
  misc_RNA (1)...(19): siRNA sense strand
gcaucagaauuaauguaac

SEQ ID NO: 1040267 - RNA, 19 nt, Homo sapiens
  misc_RNA (1)...(19): siRNA sense strand
gcagagccgccaucuucau

SEQ ID NO: 1040268 - RNA, 19 nt, Homo sapiens
  misc_RNA (1)...(19): siRNA sense strand
gguguaacccgaauaagcu

SEQ ID NO: 1040269 - RNA, 19 nt, Homo sapiens
  misc_RNA (1)...(19): siRNA sense strand
cuaauugucauucaagaag

SEQ ID NO: 1040270 - RNA, 19 nt, Homo sapiens
  misc_RNA (1)...(19): siRNA sense strand
gcugucagacuuugauagu

SEQ ID NO: 1040271 - RNA, 19 nt, Homo sapiens
  misc_RNA (1)...(19): siRNA sense strand
cucagacauucaaacuaua

SEQ ID NO: 1040272 - RNA, 19 nt, Homo sapiens
  misc_RNA (1)...(19): siRNA sense strand
agaagagguaguagagauu

SEQ ID NO: 1040273 - RNA, 19 nt, Homo sapiens
  misc_RNA (1)...(19): siRNA sense strand
caagaagagguaguagaga

SEQ ID NO: 1040274 - RNA, 19 nt, Homo sapiens
  misc_RNA (1)...(19): siRNA sense strand
guaaggauuuuaguucaug

SEQ ID NO: 1040275 - RNA, 19 nt, Homo sapiens
  misc_RNA (1)...(19): siRNA sense strand
gccgccaucuucauauaag

SEQ ID NO: 1040276 - RNA, 19 nt, Homo sapiens
  misc_RNA (1)...(19): siRNA sense strand
uccagaugguccagagaaa

SEQ ID NO: 1040277 - RNA, 19 nt, Homo sapiens
  misc_RNA (1)...(19): siRNA sense strand
aagagguaguagagauuga

SEQ ID NO: 1040278 - RNA, 19 nt, Homo sapiens
  misc_RNA (1)...(19): siRNA sense strand
uaaaguggacgucauaccu

SEQ ID NO: 1040279 - RNA, 19 nt, Homo sapiens
  misc_RNA (1)...(19): siRNA sense strand
cggcaucagaauuaaugua

SEQ ID NO: 1040280 - RNA, 19 nt, Homo sapiens
  misc_RNA (1)...(19): siRNA sense strand
aauugucaguguaaggauu

SEQ ID NO: 1040281 - RNA, 19 nt, Homo sapiens
  misc_RNA (1)...(19): siRNA sense strand
ggagcagcugugguaauaa

SEQ ID NO: 1040282 - RNA, 19 nt, Homo sapiens
  misc_RNA (1)...(19): siRNA sense strand
uaacaaagcugaccugaaa

SEQ ID NO: 1040283 - RNA, 19 nt, Homo sapiens
  misc_RNA (1)...(19): siRNA sense strand
gaaccagccucaaaccaua

SEQ ID NO: 1040284 - RNA, 19 nt, Homo sapiens
  misc_RNA (1)...(19): siRNA sense strand
gagaaaggcuccuccaaga

SEQ ID NO: 1040285 - RNA, 19 nt, Homo sapiens
  misc_RNA (1)...(19): siRNA sense strand
gaacagguuugaagagguu

SEQ ID NO: 1040286 - RNA, 19 nt, Homo sapiens
  misc_RNA (1)...(19): siRNA sense strand
gaagcgagcuggcagaagu

SEQ ID NO: 1040287 - RNA, 19 nt, Homo sapiens
  misc_RNA (1)...(19): siRNA sense strand
gaaaagauccgaauuagug

SEQ ID NO: 1040288 - RNA, 19 nt, Homo sapiens
  misc_RNA (1)...(19): siRNA sense strand
ggaaggguuugcauguuau

SEQ ID NO: 1040289 - RNA, 19 nt, Homo sapiens
  misc_RNA (1)...(19): siRNA sense strand
aggaaggguuugcauguua

SEQ ID NO: 1040290 - RNA, 19 nt, Homo sapiens
  misc_RNA (1)...(19): siRNA sense strand
ccacguggaucuauuuaca

SEQ ID NO: 1040291 - RNA, 19 nt, Homo sapiens
  misc_RNA (1)...(19): siRNA sense strand
ucaauggccuguauaucuu

SEQ ID NO: 1040292 - RNA, 19 nt, Homo sapiens
  misc_RNA (1)...(19): siRNA sense strand
gaaaggcuccuccaagaag

SEQ ID NO: 1040293 - RNA, 19 nt, Homo sapiens
  misc_RNA (1)...(19): siRNA sense strand
guggaucuauuuacaaguu

SEQ ID NO: 1040294 - RNA, 19 nt, Homo sapiens
  misc_RNA (1)...(19): siRNA sense strand
gaacagggcaggcucacau

SEQ ID NO: 1040295 - RNA, 19 nt, Homo sapiens
  misc_RNA (1)...(19): siRNA sense strand
agagaaagcugcuagaaaa

SEQ ID NO: 1040296 - RNA, 19 nt, Homo sapiens
  misc_RNA (1)...(19): siRNA sense strand
gcaaguucaucaucuccuu

SEQ ID NO: 1040297 - RNA, 19 nt, Homo sapiens
  misc_RNA (1)...(19): siRNA sense strand
gcaccacguggaucuauuu

SEQ ID NO: 1040298 - RNA, 19 nt, Homo sapiens
  misc_RNA (1)...(19): siRNA sense strand
guagaaaagauccgaauua

SEQ ID NO: 1040299 - RNA, 19 nt, Homo sapiens
  misc_RNA (1)...(19): siRNA sense strand
uuugaaagguggaaacuau

SEQ ID NO: 1040300 - RNA, 19 nt, Homo sapiens
  misc_RNA (1)...(19): siRNA sense strand
uaaaggaacaaucagagaa

SEQ ID NO: 1040301 - RNA, 19 nt, Homo sapiens
  misc_RNA (1)...(19): siRNA sense strand
ccuacaagcagcaagaaua

SEQ ID NO: 1040302 - RNA, 19 nt, Homo sapiens
  misc_RNA (1)...(19): siRNA sense strand
acccaucgcuucuuuguug

SEQ ID NO: 1040303 - RNA, 19 nt, Homo sapiens
  misc_RNA (1)...(19): siRNA sense strand
uuagugagaugaagguuuc

SEQ ID NO: 1040304 - RNA, 19 nt, Homo sapiens
  misc_RNA (1)...(19): siRNA sense strand
cauaauggcggacaacuuc

SEQ ID NO: 1040305 - RNA, 19 nt, Homo sapiens
  misc_RNA (1)...(19): siRNA sense strand
uggcagaagucucccuuga

SEQ ID NO: 1040306 - RNA, 19 nt, Homo sapiens
  misc_RNA (1)...(19): siRNA sense strand
cagagaaagcugcuagaaa

SEQ ID NO: 1040307 - RNA, 19 nt, Homo sapiens
  misc_RNA (1)...(19): siRNA sense strand
guauaucuuuggagacuuc

SEQ ID NO: 1040308 - RNA, 19 nt, Homo sapiens
  misc_RNA (1)...(19): siRNA sense strand
gguuaugucuaucgugguu

SEQ ID NO: 1040309 - RNA, 19 nt, Homo sapiens
  misc_RNA (1)...(19): siRNA sense strand
cagagagggucaucuugga

SEQ ID NO: 1040310 - RNA, 19 nt, Homo sapiens
  misc_RNA (1)...(19): siRNA sense strand
gcccaggguuugucugaga

SEQ ID NO: 1040311 - RNA, 19 nt, Homo sapiens
  misc_RNA (1)...(19): siRNA sense strand
uggaaaugcucagaacaaa

SEQ ID NO: 1040312 - RNA, 19 nt, Homo sapiens
  misc_RNA (1)...(19): siRNA sense strand
gauccgaauuagugagaug

SEQ ID NO: 1040313 - RNA, 19 nt, Homo sapiens
  misc_RNA (1)...(19): siRNA sense strand
gcgagggccugguacaaag

SEQ ID NO: 1040314 - RNA, 19 nt, Homo sapiens
  misc_RNA (1)...(19): siRNA sense strand
cggcacccaucgcuucuuu

SEQ ID NO: 1040315 - RNA, 19 nt, Homo sapiens
  misc_RNA (1)...(19): siRNA sense strand
ggaucuauuuacaaguuug

SEQ ID NO: 1040316 - RNA, 19 nt, Homo sapiens
  misc_RNA (1)...(19): siRNA sense strand
caucaucuccuuugcugaa

SEQ ID NO: 1040317 - RNA, 19 nt, Homo sapiens
  misc_RNA (1)...(19): siRNA sense strand
cacuggagguuaugucuau

SEQ ID NO: 1040318 - RNA, 19 nt, Homo sapiens
  misc_RNA (1)...(19): siRNA sense strand
cacaaucgcaaguucuaua

SEQ ID NO: 1040319 - RNA, 19 nt, Homo sapiens
  misc_RNA (1)...(19): siRNA sense strand
guggucgacuuauggcuuu

SEQ ID NO: 1040320 - RNA, 19 nt, Homo sapiens
  misc_RNA (1)...(19): siRNA sense strand
caugaguggucgacuuaug

SEQ ID NO: 1040321 - RNA, 19 nt, Homo sapiens
  misc_RNA (1)...(19): siRNA sense strand
gagagcaaaggaaggguuu

SEQ ID NO: 1040322 - RNA, 19 nt, Homo sapiens
  misc_RNA (1)...(19): siRNA sense strand
aaaggaacaaucagagaaa

SEQ ID NO: 1040323 - RNA, 19 nt, Homo sapiens
  misc_RNA (1)...(19): siRNA sense strand
cauagcaaguucaucaucu

SEQ ID NO: 1040324 - RNA, 19 nt, Homo sapiens
  misc_RNA (1)...(19): siRNA sense strand
ucacaaugccucuuuggau

SEQ ID NO: 1040325 - RNA, 19 nt, Homo sapiens
  misc_RNA (1)...(19): siRNA sense strand
ccaggcaagugcaaauaca

SEQ ID NO: 1040326 - RNA, 19 nt, Homo sapiens
  misc_RNA (1)...(19): siRNA sense strand
ggacaagaagaagguagaa

SEQ ID NO: 1040327 - RNA, 19 nt, Homo sapiens
  misc_RNA (1)...(19): siRNA sense strand
caaagaagaaagccagagu

SEQ ID NO: 1040328 - RNA, 19 nt, Homo sapiens
  misc_RNA (1)...(19): siRNA sense strand
gcacccaucgcuucuuugu

SEQ ID NO: 1040329 - RNA, 19 nt, Homo sapiens
  misc_RNA (1)...(19): siRNA sense strand
gaaagcugcuagaaaaucu

SEQ ID NO: 1040330 - RNA, 19 nt, Homo sapiens
  misc_RNA (1)...(19): siRNA sense strand
gaagguuucucgggcugau

SEQ ID NO: 1040331 - RNA, 19 nt, Homo sapiens
  misc_RNA (1)...(19): siRNA sense strand
gggcugauccuaacaaagc

SEQ ID NO: 1040332 - RNA, 19 nt, Homo sapiens
  misc_RNA (1)...(19): siRNA sense strand
aaaggaaggguuugcaugu

SEQ ID NO: 1040333 - RNA, 19 nt, Homo sapiens
  misc_RNA (1)...(19): siRNA sense strand
gaaaugcucagaacaaaag

SEQ ID NO: 1040334 - RNA, 19 nt, Homo sapiens
  misc_RNA (1)...(19): siRNA sense strand
uggaugauguucugccaau

SEQ ID NO: 1040335 - RNA, 19 nt, Homo sapiens
  misc_RNA (1)...(19): siRNA sense strand
auucgugccuggacaagaa

SEQ ID NO: 1040336 - RNA, 19 nt, Homo sapiens
  misc_RNA (1)...(19): siRNA sense strand
aaaucucaauggccuguau

SEQ ID NO: 1040337 - RNA, 19 nt, Homo sapiens
  misc_RNA (1)...(19): siRNA sense strand
ccuuuggccuguuuggaaa

SEQ ID NO: 1040338 - RNA, 19 nt, Homo sapiens
  misc_RNA (1)...(19): siRNA sense strand
ggccagaacagguuugaag

SEQ ID NO: 1040339 - RNA, 19 nt, Homo sapiens
  misc_RNA (1)...(19): siRNA sense strand
cuaaaggaacaaucagaga

SEQ ID NO: 1040340 - RNA, 19 nt, Homo sapiens
  misc_RNA (1)...(19): siRNA sense strand
caaguucaucaucuccuuu

SEQ ID NO: 1040341 - RNA, 19 nt, Homo sapiens
  misc_RNA (1)...(19): siRNA sense strand
cagcacccauagcaaguuc

SEQ ID NO: 1040342 - RNA, 19 nt, Homo sapiens
  misc_RNA (1)...(19): siRNA sense strand
gaaaucagagagggucauc

SEQ ID NO: 1040343 - RNA, 19 nt, Homo sapiens
  misc_RNA (1)...(19): siRNA sense strand
caagcagcaagaauacauu

SEQ ID NO: 1040344 - RNA, 19 nt, Homo sapiens
  misc_RNA (1)...(19): siRNA sense strand
agaaaggcuccuccaagaa

SEQ ID NO: 1040345 - RNA, 19 nt, Homo sapiens
  misc_RNA (1)...(19): siRNA sense strand
gauguucugccaaucuaug

SEQ ID NO: 1040346 - RNA, 19 nt, Homo sapiens
  misc_RNA (1)...(19): siRNA sense strand
gaugauguucugccaaucu

SEQ ID NO: 1040347 - RNA, 19 nt, Homo sapiens
  misc_RNA (1)...(19): siRNA sense strand
ggguuugcauguuaugaca

SEQ ID NO: 1040348 - RNA, 19 nt, Homo sapiens
  misc_RNA (1)...(19): siRNA sense strand
aaggaaggguuugcauguu

SEQ ID NO: 1040349 - RNA, 19 nt, Homo sapiens
  misc_RNA (1)...(19): siRNA sense strand
gccacaaucgcaaguucua

SEQ ID NO: 1040350 - RNA, 19 nt, Homo sapiens
  misc_RNA (1)...(19): siRNA sense strand
gacaagaagaagguagaaa

SEQ ID NO: 1040351 - RNA, 19 nt, Homo sapiens
  misc_RNA (1)...(19): siRNA sense strand
gaauuagugagaugaaggu

SEQ ID NO: 1040352 - RNA, 19 nt, Homo sapiens
  misc_RNA (1)...(19): siRNA sense strand
guaagcggaucccguucag

SEQ ID NO: 1040353 - RNA, 19 nt, Homo sapiens
  misc_RNA (1)...(19): siRNA sense strand
ggaugagagaggcuucuug

SEQ ID NO: 1040354 - RNA, 19 nt, Homo sapiens
  misc_RNA (1)...(19): siRNA sense strand
caauggccuguauaucuuu

SEQ ID NO: 1040355 - RNA, 19 nt, Homo sapiens
  misc_RNA (1)...(19): siRNA sense strand
aaucagagagggucaucuu

SEQ ID NO: 1040356 - RNA, 19 nt, Homo sapiens
  misc_RNA (1)...(19): siRNA sense strand
gaggaggaagagccugaaa

SEQ ID NO: 1040357 - RNA, 19 nt, Homo sapiens
  misc_RNA (1)...(19): siRNA sense strand
ucagagaaagcugcuagaa

SEQ ID NO: 1040358 - RNA, 19 nt, Homo sapiens
  misc_RNA (1)...(19): siRNA sense strand
ggcgaccucuuacccaagu

SEQ ID NO: 1040359 - RNA, 19 nt, Homo sapiens
  misc_RNA (1)...(19): siRNA sense strand
cuccuuugcugaagaugaa

SEQ ID NO: 1040360 - RNA, 19 nt, Homo sapiens
  misc_RNA (1)...(19): siRNA sense strand
cuucaugaguggucgacuu

SEQ ID NO: 1040361 - RNA, 19 nt, Homo sapiens
  misc_RNA (1)...(19): siRNA sense strand
gccagaacagguuugaaga

SEQ ID NO: 1040362 - RNA, 19 nt, Homo sapiens
  misc_RNA (1)...(19): siRNA sense strand
ucagaccacucgccaagac

SEQ ID NO: 1040363 - RNA, 19 nt, Homo sapiens
  misc_RNA (1)...(19): siRNA sense strand
agaagaagguagaaaagau

SEQ ID NO: 1040364 - RNA, 19 nt, Homo sapiens
  misc_RNA (1)...(19): siRNA sense strand
uagaaaagauccgaauuag

SEQ ID NO: 1040365 - RNA, 19 nt, Homo sapiens
  misc_RNA (1)...(19): siRNA sense strand
aacuauggcuggagagcaa

SEQ ID NO: 1040366 - RNA, 19 nt, Homo sapiens
  misc_RNA (1)...(19): siRNA sense strand
caaagcugaccugaaauca

SEQ ID NO: 1040367 - RNA, 19 nt, Homo sapiens
  misc_RNA (1)...(19): siRNA sense strand
acaaugccucuuuggauga

SEQ ID NO: 1040368 - RNA, 19 nt, Homo sapiens
  misc_RNA (1)...(19): siRNA sense strand
uggccuggauggcuauaug

SEQ ID NO: 1040369 - RNA, 19 nt, Homo sapiens
  misc_RNA (1)...(19): siRNA sense strand
acaaagcugaccugaaauc

SEQ ID NO: 1040370 - RNA, 19 nt, Homo sapiens
  misc_RNA (1)...(19): siRNA sense strand
cuacaagcagcaagaauac

SEQ ID NO: 1040371 - RNA, 19 nt, Homo sapiens
  misc_RNA (1)...(19): siRNA sense strand
acuuauggcuuugcaggaa

SEQ ID NO: 1040372 - RNA, 19 nt, Homo sapiens
  misc_RNA (1)...(19): siRNA sense strand
caaugccucuuuggaugau

SEQ ID NO: 1040373 - RNA, 19 nt, Homo sapiens
  misc_RNA (1)...(19): siRNA sense strand
gaaggguuugcauguuaug

SEQ ID NO: 1040374 - RNA, 19 nt, Homo sapiens
  misc_RNA (1)...(19): siRNA sense strand
cuggauggcuauauguaca

SEQ ID NO: 1040375 - RNA, 19 nt, Homo sapiens
  misc_RNA (1)...(19): siRNA sense strand
ugaagaaccagccucaaac

SEQ ID NO: 1040376 - RNA, 19 nt, Homo sapiens
  misc_RNA (1)...(19): siRNA sense strand
ggaaaugcucagaacaaaa

SEQ ID NO: 1040377 - RNA, 19 nt, Homo sapiens
  misc_RNA (1)...(19): siRNA sense strand
ggaacaaucagagaaagcu

SEQ ID NO: 1040378 - RNA, 19 nt, Homo sapiens
  misc_RNA (1)...(19): siRNA sense strand
uaugggaucaggaacaugu

SEQ ID NO: 1040379 - RNA, 19 nt, Homo sapiens
  misc_RNA (1)...(19): siRNA sense strand
caaucgcaaguucuauauu

SEQ ID NO: 1040380 - RNA, 19 nt, Homo sapiens
  misc_RNA (1)...(19): siRNA sense strand
caccacguggaucuauuua

SEQ ID NO: 1040381 - RNA, 19 nt, Homo sapiens
  misc_RNA (1)...(19): siRNA sense strand
cucaauggccuguauaucu

SEQ ID NO: 1040382 - RNA, 19 nt, Homo sapiens
  misc_RNA (1)...(19): siRNA sense strand
acagugaucucuuggauua

SEQ ID NO: 1040383 - RNA, 19 nt, Homo sapiens
  misc_RNA (1)...(19): siRNA sense strand
gcaaacagcuguaugaaac

SEQ ID NO: 1040384 - RNA, 19 nt, Homo sapiens
  misc_RNA (1)...(19): siRNA sense strand
ggaacuaugugcucaacua

SEQ ID NO: 1040385 - RNA, 19 nt, Homo sapiens
  misc_RNA (1)...(19): siRNA sense strand
uaucagacccaaacaauua

SEQ ID NO: 1040386 - RNA, 19 nt, Homo sapiens
  misc_RNA (1)...(19): siRNA sense strand
gcaagaugauaacaaugua

SEQ ID NO: 1040387 - RNA, 19 nt, Homo sapiens
  misc_RNA (1)...(19): siRNA sense strand
gaauagcaaugacaugaug

SEQ ID NO: 1040388 - RNA, 19 nt, Homo sapiens
  misc_RNA (1)...(19): siRNA sense strand
ugacauaccucuucaagca

SEQ ID NO: 1040389 - RNA, 19 nt, Homo sapiens
  misc_RNA (1)...(19): siRNA sense strand
ggaaagaaucuaaacuuga

SEQ ID NO: 1040390 - RNA, 19 nt, Homo sapiens
  misc_RNA (1)...(19): siRNA sense strand
gaaaccagcaagaugauaa

SEQ ID NO: 1040391 - RNA, 19 nt, Homo sapiens
  misc_RNA (1)...(19): siRNA sense strand
gucagaagaucccuguuua

SEQ ID NO: 1040392 - RNA, 19 nt, Homo sapiens
  misc_RNA (1)...(19): siRNA sense strand
caaugaagaauuccacuua

SEQ ID NO: 1040393 - RNA, 19 nt, Homo sapiens
  misc_RNA (1)...(19): siRNA sense strand
uaucucagcuaaccaauga

SEQ ID NO: 1040394 - RNA, 19 nt, Homo sapiens
  misc_RNA (1)...(19): siRNA sense strand
ugacauggcugguuuacau

SEQ ID NO: 1040395 - RNA, 19 nt, Homo sapiens
  misc_RNA (1)...(19): siRNA sense strand
gguauuauccugcuuggua

SEQ ID NO: 1040396 - RNA, 19 nt, Homo sapiens
  misc_RNA (1)...(19): siRNA sense strand
ucacagacgucacaagguu

SEQ ID NO: 1040397 - RNA, 19 nt, Homo sapiens
  misc_RNA (1)...(19): siRNA sense strand
gagaaagccuugguugaau

SEQ ID NO: 1040398 - RNA, 19 nt, Homo sapiens
  misc_RNA (1)...(19): siRNA sense strand
guugauggcugaauugguu

SEQ ID NO: 1040399 - RNA, 19 nt, Homo sapiens
  misc_RNA (1)...(19): siRNA sense strand
gacuaugucuucagaaaug

SEQ ID NO: 1040400 - RNA, 19 nt, Homo sapiens
  misc_RNA (1)...(19): siRNA sense strand
acagaucgcuucagucaga

SEQ ID NO: 1040401 - RNA, 19 nt, Homo sapiens
  misc_RNA (1)...(19): siRNA sense strand
gaucagccuucuuagauuc

SEQ ID NO: 1040402 - RNA, 19 nt, Homo sapiens
  misc_RNA (1)...(19): siRNA sense strand
cacuacagcuucucaauga

SEQ ID NO: 1040403 - RNA, 19 nt, Homo sapiens
  misc_RNA (1)...(19): siRNA sense strand
gaaccaaucaccuccaaga

SEQ ID NO: 1040404 - RNA, 19 nt, Homo sapiens
  misc_RNA (1)...(19): siRNA sense strand
guucugggcuugaaugaug

SEQ ID NO: 1040405 - RNA, 19 nt, Homo sapiens
  misc_RNA (1)...(19): siRNA sense strand
cacaagcacuuauucaguu

SEQ ID NO: 1040406 - RNA, 19 nt, Homo sapiens
  misc_RNA (1)...(19): siRNA sense strand
guacagaucgcuucaguca

SEQ ID NO: 1040407 - RNA, 19 nt, Homo sapiens
  misc_RNA (1)...(19): siRNA sense strand
gagaucagccuucuuagau

SEQ ID NO: 1040408 - RNA, 19 nt, Homo sapiens
  misc_RNA (1)...(19): siRNA sense strand
gaccagcuguccaccauug

SEQ ID NO: 1040409 - RNA, 19 nt, Homo sapiens
  misc_RNA (1)...(19): siRNA sense strand
ccagcaagaugauaacaau

SEQ ID NO: 1040410 - RNA, 19 nt, Homo sapiens
  misc_RNA (1)...(19): siRNA sense strand
gaaagccuugguugaauuu

SEQ ID NO: 1040411 - RNA, 19 nt, Homo sapiens
  misc_RNA (1)...(19): siRNA sense strand
gaaacaguauugugaacag

SEQ ID NO: 1040412 - RNA, 19 nt, Homo sapiens
  misc_RNA (1)...(19): siRNA sense strand
gaacaucaucaucuuugaa

SEQ ID NO: 1040413 - RNA, 19 nt, Homo sapiens
  misc_RNA (1)...(19): siRNA sense strand
ccuaacagauucucguuug

SEQ ID NO: 1040414 - RNA, 19 nt, Homo sapiens
  misc_RNA (1)...(19): siRNA sense strand
acaagcacuuauucaguua

SEQ ID NO: 1040415 - RNA, 19 nt, Homo sapiens
  misc_RNA (1)...(19): siRNA sense strand
cgagaaaccagcaagauga

SEQ ID NO: 1040416 - RNA, 19 nt, Homo sapiens
  misc_RNA (1)...(19): siRNA sense strand
guaaugagaagcuagaguu

SEQ ID NO: 1040417 - RNA, 19 nt, Homo sapiens
  misc_RNA (1)...(19): siRNA sense strand
ggaugacuaugucuucaga

SEQ ID NO: 1040418 - RNA, 19 nt, Homo sapiens
  misc_RNA (1)...(19): siRNA sense strand
cuacagcacugggaauuug

SEQ ID NO: 1040419 - RNA, 19 nt, Homo sapiens
  misc_RNA (1)...(19): siRNA sense strand
uaggagaggucccaaagga

SEQ ID NO: 1040420 - RNA, 19 nt, Homo sapiens
  misc_RNA (1)...(19): siRNA sense strand
cuaagaaacaguauuguga

SEQ ID NO: 1040421 - RNA, 19 nt, Homo sapiens
  misc_RNA (1)...(19): siRNA sense strand
agaaagccuugguugaauu

SEQ ID NO: 1040422 - RNA, 19 nt, Homo sapiens
  misc_RNA (1)...(19): siRNA sense strand
gcagacuacuggcccgauu

SEQ ID NO: 1040423 - RNA, 19 nt, Homo sapiens
  misc_RNA (1)...(19): siRNA sense strand
cagcuaaccaaugaaauua

SEQ ID NO: 1040424 - RNA, 19 nt, Homo sapiens
  misc_RNA (1)...(19): siRNA sense strand
guugaauacugcaucauug

SEQ ID NO: 1040425 - RNA, 19 nt, Homo sapiens
  misc_RNA (1)...(19): siRNA sense strand
gaccauaugaacuuuauug

SEQ ID NO: 1040426 - RNA, 19 nt, Homo sapiens
  misc_RNA (1)...(19): siRNA sense strand
ggagaucagccuucuuaga

SEQ ID NO: 1040427 - RNA, 19 nt, Homo sapiens
  misc_RNA (1)...(19): siRNA sense strand
ucacguagcaccaagaaga

SEQ ID NO: 1040428 - RNA, 19 nt, Homo sapiens
  misc_RNA (1)...(19): siRNA sense strand
ucaagggcaucuccaucua

SEQ ID NO: 1040429 - RNA, 19 nt, Homo sapiens
  misc_RNA (1)...(19): siRNA sense strand
gcacuuauucaguuauaug

SEQ ID NO: 1040430 - RNA, 19 nt, Homo sapiens
  misc_RNA (1)...(19): siRNA sense strand
gaccuaagaaacaguauug

SEQ ID NO: 1040431 - RNA, 19 nt, Homo sapiens
  misc_RNA (1)...(19): siRNA sense strand
cuacuuggcuugauauugc

SEQ ID NO: 1040432 - RNA, 19 nt, Homo sapiens
  misc_RNA (1)...(19): siRNA sense strand
gcacuugacaccaugguau

SEQ ID NO: 1040433 - RNA, 19 nt, Homo sapiens
  misc_RNA (1)...(19): siRNA sense strand
cagccagucuuauuauuca

SEQ ID NO: 1040434 - RNA, 19 nt, Homo sapiens
  misc_RNA (1)...(19): siRNA sense strand
gaugcucuuugaauggaua

SEQ ID NO: 1040435 - RNA, 19 nt, Homo sapiens
  misc_RNA (1)...(19): siRNA sense strand
gguccuaagcgucuucaua

SEQ ID NO: 1040436 - RNA, 19 nt, Homo sapiens
  misc_RNA (1)...(19): siRNA sense strand
ucaguuauaugccagaauc

SEQ ID NO: 1040437 - RNA, 19 nt, Homo sapiens
  misc_RNA (1)...(19): siRNA sense strand
ucauguauauucucucuuc

SEQ ID NO: 1040438 - RNA, 19 nt, Homo sapiens
  misc_RNA (1)...(19): siRNA sense strand
gaaccucacgucaucaugu

SEQ ID NO: 1040439 - RNA, 19 nt, Homo sapiens
  misc_RNA (1)...(19): siRNA sense strand
ucaagcugcuccucucuau

SEQ ID NO: 1040440 - RNA, 19 nt, Homo sapiens
  misc_RNA (1)...(19): siRNA sense strand
uagagaaucugugcaaaca

SEQ ID NO: 1040441 - RNA, 19 nt, Homo sapiens
  misc_RNA (1)...(19): siRNA sense strand
cuaagcgucuucauaggaa

SEQ ID NO: 1040442 - RNA, 19 nt, Homo sapiens
  misc_RNA (1)...(19): siRNA sense strand
cccacaugcuggaaacuua

SEQ ID NO: 1040443 - RNA, 19 nt, Homo sapiens
  misc_RNA (1)...(19): siRNA sense strand
gcagagagggccaaguuuc

SEQ ID NO: 1040444 - RNA, 19 nt, Homo sapiens
  misc_RNA (1)...(19): siRNA sense strand
agacaccacccauccuuua

SEQ ID NO: 1040445 - RNA, 19 nt, Homo sapiens
  misc_RNA (1)...(19): siRNA sense strand
aggaaagaaucuaaacuug

SEQ ID NO: 1040446 - RNA, 19 nt, Homo sapiens
  misc_RNA (1)...(19): siRNA sense strand
gagacagguucacccagaa

SEQ ID NO: 1040447 - RNA, 19 nt, Homo sapiens
  misc_RNA (1)...(19): siRNA sense strand
gccaagaccagcuucauga

SEQ ID NO: 1040448 - RNA, 19 nt, Homo sapiens
  misc_RNA (1)...(19): siRNA sense strand
gaaauccucuaagcuguac

SEQ ID NO: 1040449 - RNA, 19 nt, Homo sapiens
  misc_RNA (1)...(19): siRNA sense strand
gauugaagaguaacuauca

SEQ ID NO: 1040450 - RNA, 19 nt, Homo sapiens
  misc_RNA (1)...(19): siRNA sense strand
gggccaaguuucucucuca

SEQ ID NO: 1040451 - RNA, 19 nt, Homo sapiens
  misc_RNA (1)...(19): siRNA sense strand
ugaugaaccuaacagauuc

SEQ ID NO: 1040452 - RNA, 19 nt, Homo sapiens
  misc_RNA (1)...(19): siRNA sense strand
ucagaaggaugacuauguc

SEQ ID NO: 1040453 - RNA, 19 nt, Homo sapiens
  misc_RNA (1)...(19): siRNA sense strand
gcgaaaucuucuuacgaaa

SEQ ID NO: 1040454 - RNA, 19 nt, Homo sapiens
  misc_RNA (1)...(19): siRNA sense strand
ggcuugauauugcuuaaug

SEQ ID NO: 1040455 - RNA, 19 nt, Homo sapiens
  misc_RNA (1)...(19): siRNA sense strand
acaaugcucugcagaccuu

SEQ ID NO: 1040456 - RNA, 19 nt, Homo sapiens
  misc_RNA (1)...(19): siRNA sense strand
caaaggaucaggucuaugc

SEQ ID NO: 1040457 - RNA, 19 nt, Homo sapiens
  misc_RNA (1)...(19): siRNA sense strand
caauugagcucugguacca

SEQ ID NO: 1040458 - RNA, 19 nt, Homo sapiens
  misc_RNA (1)...(19): siRNA sense strand
gagaggaugaagaucagua

SEQ ID NO: 1040459 - RNA, 19 nt, Homo sapiens
  misc_RNA (1)...(19): siRNA sense strand
caccaaagccuacaucaca

SEQ ID NO: 1040460 - RNA, 19 nt, Homo sapiens
  misc_RNA (1)...(19): siRNA sense strand
caacugggagaauugguaa

SEQ ID NO: 1040461 - RNA, 19 nt, Homo sapiens
  misc_RNA (1)...(19): siRNA sense strand
gaagaguaacuaucaacug

SEQ ID NO: 1040462 - RNA, 19 nt, Homo sapiens
  misc_RNA (1)...(19): siRNA sense strand
aaacaggcuucaggaaaga

SEQ ID NO: 1040463 - RNA, 19 nt, Homo sapiens
  misc_RNA (1)...(19): siRNA sense strand
cccagaaccugucagcauu

SEQ ID NO: 1040464 - RNA, 19 nt, Homo sapiens
  misc_RNA (1)...(19): siRNA sense strand
ccaaguuucucucucaucu

SEQ ID NO: 1040465 - RNA, 19 nt, Homo sapiens
  misc_RNA (1)...(19): siRNA sense strand
caggaaagaaucuaaacuu

SEQ ID NO: 1040466 - RNA, 19 nt, Homo sapiens
  misc_RNA (1)...(19): siRNA sense strand
gucaacgacucaaugaaga

SEQ ID NO: 1040467 - RNA, 19 nt, Homo sapiens
  misc_RNA (1)...(19): siRNA sense strand
ccaauggcaucuuacucuu

SEQ ID NO: 1040468 - RNA, 19 nt, Homo sapiens
  misc_RNA (1)...(19): siRNA sense strand
gcagcuacaugccuuacca

SEQ ID NO: 1040469 - RNA, 19 nt, Homo sapiens
  misc_RNA (1)...(19): siRNA sense strand
ucaugaugcucuuugaaug

SEQ ID NO: 1040470 - RNA, 19 nt, Homo sapiens
  misc_RNA (1)...(19): siRNA sense strand
cuacaugccuuaccaagcu

SEQ ID NO: 1040471 - RNA, 19 nt, Homo sapiens
  misc_RNA (1)...(19): siRNA sense strand
uuccaucccuccuucauuu

SEQ ID NO: 1040472 - RNA, 19 nt, Homo sapiens
  misc_RNA (1)...(19): siRNA sense strand
ucagcuaaccaaugaaauu

SEQ ID NO: 1040473 - RNA, 19 nt, Homo sapiens
  misc_RNA (1)...(19): siRNA sense strand
ggaugaagaucaguaugag

SEQ ID NO: 1040474 - RNA, 19 nt, Homo sapiens
  misc_RNA (1)...(19): siRNA sense strand
gaaguucugggcuugaaug

SEQ ID NO: 1040475 - RNA, 19 nt, Homo sapiens
  misc_RNA (1)...(19): siRNA sense strand
cuggagaucagccuucuua

SEQ ID NO: 1040476 - RNA, 19 nt, Homo sapiens
  misc_RNA (1)...(19): siRNA sense strand
cuucagaaaugcaaucaca

SEQ ID NO: 1040477 - RNA, 19 nt, Homo sapiens
  misc_RNA (1)...(19): siRNA sense strand
agcgaaaucuucuuacgaa

SEQ ID NO: 1040478 - RNA, 19 nt, Homo sapiens
  misc_RNA (1)...(19): siRNA sense strand
ugaacaucaucaucuuuga

SEQ ID NO: 1040479 - RNA, 19 nt, Homo sapiens
  misc_RNA (1)...(19): siRNA sense strand
ccacggugcugaacaucau

SEQ ID NO: 1040480 - RNA, 19 nt, Homo sapiens
  misc_RNA (1)...(19): siRNA sense strand
gugcagaaauccucuaagc

SEQ ID NO: 1040481 - RNA, 19 nt, Homo sapiens
  misc_RNA (1)...(19): siRNA sense strand
agagaaagccuugguugaa

SEQ ID NO: 1040482 - RNA, 19 nt, Homo sapiens
  misc_RNA (1)...(19): siRNA sense strand
gcaaacauaugaugaagaa

SEQ ID NO: 1040483 - RNA, 19 nt, Homo sapiens
  misc_RNA (1)...(19): siRNA sense strand
ggaugaagaucaauuaauc

SEQ ID NO: 1040484 - RNA, 19 nt, Homo sapiens
  misc_RNA (1)...(19): siRNA sense strand
gcaagcagcagaagagaaa

SEQ ID NO: 1040485 - RNA, 19 nt, Homo sapiens
  misc_RNA (1)...(19): siRNA sense strand
ggacaccagcccagacuua

SEQ ID NO: 1040486 - RNA, 19 nt, Homo sapiens
  misc_RNA (1)...(19): siRNA sense strand
gaugcuaaccuccaaguuu

SEQ ID NO: 1040487 - RNA, 19 nt, Homo sapiens
  misc_RNA (1)...(19): siRNA sense strand
gauuggaaauaauggauga

SEQ ID NO: 1040488 - RNA, 19 nt, Homo sapiens
  misc_RNA (1)...(19): siRNA sense strand
gaagagauacuuggagaug

SEQ ID NO: 1040489 - RNA, 19 nt, Homo sapiens
  misc_RNA (1)...(19): siRNA sense strand
ggaaauaauggaugaagau

SEQ ID NO: 1040490 - RNA, 19 nt, Homo sapiens
  misc_RNA (1)...(19): siRNA sense strand
ucaaagagcuaugcaagca

SEQ ID NO: 1040491 - RNA, 19 nt, Homo sapiens
  misc_RNA (1)...(19): siRNA sense strand
augcuaaccuccaaguuua

SEQ ID NO: 1040492 - RNA, 19 nt, Homo sapiens
  misc_RNA (1)...(19): siRNA sense strand
caaacagacggaagagaua

SEQ ID NO: 1040493 - RNA, 19 nt, Homo sapiens
  misc_RNA (1)...(19): siRNA sense strand
agagaaauccugugacuga

SEQ ID NO: 1040494 - RNA, 19 nt, Homo sapiens
  misc_RNA (1)...(19): siRNA sense strand
gauguaagcaccagcauuc

SEQ ID NO: 1040495 - RNA, 19 nt, Homo sapiens
  misc_RNA (1)...(19): siRNA sense strand
gagcaaacauaugaugaag

SEQ ID NO: 1040496 - RNA, 19 nt, Homo sapiens
  misc_RNA (1)...(19): siRNA sense strand
guuuaguccugcagagaua

SEQ ID NO: 1040497 - RNA, 19 nt, Homo sapiens
  misc_RNA (1)...(19): siRNA sense strand
agagauacuuggagaugaa

SEQ ID NO: 1040498 - RNA, 19 nt, Homo sapiens
  misc_RNA (1)...(19): siRNA sense strand
gcagagauagagaacauca

SEQ ID NO: 1040499 - RNA, 19 nt, Homo sapiens
  misc_RNA (1)...(19): siRNA sense strand
gaaguggagcaggauguaa

SEQ ID NO: 1040500 - RNA, 19 nt, Homo sapiens
  misc_RNA (1)...(19): siRNA sense strand
ccugugaagugaagccaaa

SEQ ID NO: 1040501 - RNA, 19 nt, Homo sapiens
  misc_RNA (1)...(19): siRNA sense strand
gcccagacuuagagaaauc

SEQ ID NO: 1040502 - RNA, 19 nt, Homo sapiens
  misc_RNA (1)...(19): siRNA sense strand
agagauagagaacaucaaa

SEQ ID NO: 1040503 - RNA, 19 nt, Homo sapiens
  misc_RNA (1)...(19): siRNA sense strand
ccuccuaccugugaaguga

SEQ ID NO: 1040504 - RNA, 19 nt, Homo sapiens
  misc_RNA (1)...(19): siRNA sense strand
agauagagaacaucaaaga

SEQ ID NO: 1040505 - RNA, 19 nt, Homo sapiens
  misc_RNA (1)...(19): siRNA sense strand
gaaauaauggaugaagauc

SEQ ID NO: 1040506 - RNA, 19 nt, Homo sapiens
  misc_RNA (1)...(19): siRNA sense strand
cagcauuccuuccuguauc

SEQ ID NO: 1040507 - RNA, 19 nt, Homo sapiens
  misc_RNA (1)...(19): siRNA sense strand
gccaaagcccaguguuaaa

SEQ ID NO: 1040508 - RNA, 19 nt, Homo sapiens
  misc_RNA (1)...(19): siRNA sense strand
aagccaaagcccaguguua

SEQ ID NO: 1040509 - RNA, 19 nt, Homo sapiens
  misc_RNA (1)...(19): siRNA sense strand
gaacaucaaagagcuaugc

SEQ ID NO: 1040510 - RNA, 19 nt, Homo sapiens
  misc_RNA (1)...(19): siRNA sense strand
uggaaauaauggaugaaga

SEQ ID NO: 1040511 - RNA, 19 nt, Homo sapiens
  misc_RNA (1)...(19): siRNA sense strand
guaagcaccagcauuccuu

SEQ ID NO: 1040512 - RNA, 19 nt, Homo sapiens
  misc_RNA (1)...(19): siRNA sense strand
cugcagagauagagaacau

SEQ ID NO: 1040513 - RNA, 19 nt, Homo sapiens
  misc_RNA (1)...(19): siRNA sense strand
cgucuuggauaaauuccuu

SEQ ID NO: 1040514 - RNA, 19 nt, Homo sapiens
  misc_RNA (1)...(19): siRNA sense strand
uuagagaaauccugugacu

SEQ ID NO: 1040515 - RNA, 19 nt, Homo sapiens
  misc_RNA (1)...(19): siRNA sense strand
ggauguaagcaccagcauu

SEQ ID NO: 1040516 - RNA, 19 nt, Homo sapiens
  misc_RNA (1)...(19): siRNA sense strand
ugucaggauuggaaauaau

SEQ ID NO: 1040517 - RNA, 19 nt, Homo sapiens
  misc_RNA (1)...(19): siRNA sense strand
gcccauaugucaggauugg

SEQ ID NO: 1040518 - RNA, 19 nt, Homo sapiens
  misc_RNA (1)...(19): siRNA sense strand
acaaacagacggaagagau

SEQ ID NO: 1040519 - RNA, 19 nt, Homo sapiens
  misc_RNA (1)...(19): siRNA sense strand
ccauaugucaggauuggaa

SEQ ID NO: 1040520 - RNA, 19 nt, Homo sapiens
  misc_RNA (1)...(19): siRNA sense strand
cagcccagacuuagagaaa

SEQ ID NO: 1040521 - RNA, 19 nt, Homo sapiens
  misc_RNA (1)...(19): siRNA sense strand
ugagcaaacauaugaugaa

SEQ ID NO: 1040522 - RNA, 19 nt, Homo sapiens
  misc_RNA (1)...(19): siRNA sense strand
gagaaguggagcaggaugu

SEQ ID NO: 1040523 - RNA, 19 nt, Homo sapiens
  misc_RNA (1)...(19): siRNA sense strand
aagagauacuuggagauga

SEQ ID NO: 1040524 - RNA, 19 nt, Homo sapiens
  misc_RNA (1)...(19): siRNA sense strand
gagaacaucaaagagcuau

SEQ ID NO: 1040525 - RNA, 19 nt, Homo sapiens
  misc_RNA (1)...(19): siRNA sense strand
uaugucaggauuggaaaua

SEQ ID NO: 1040526 - RNA, 19 nt, Homo sapiens
  misc_RNA (1)...(19): siRNA sense strand
gauagagaacaucaaagag

SEQ ID NO: 1040527 - RNA, 19 nt, Homo sapiens
  misc_RNA (1)...(19): siRNA sense strand
agccaaagcccaguguuaa

SEQ ID NO: 1040528 - RNA, 19 nt, Homo sapiens
  misc_RNA (1)...(19): siRNA sense strand
ggaagagauacuuggagau

SEQ ID NO: 1040529 - RNA, 19 nt, Homo sapiens
  misc_RNA (1)...(19): siRNA sense strand
ggacaaacagacggaagag

SEQ ID NO: 1040530 - RNA, 19 nt, Homo sapiens
  misc_RNA (1)...(19): siRNA sense strand
gaagccaaagcccaguguu

SEQ ID NO: 1040531 - RNA, 19 nt, Homo sapiens
  misc_RNA (1)...(19): siRNA sense strand
caugagcaaacauaugaug

SEQ ID NO: 1040532 - RNA, 19 nt, Homo sapiens
  misc_RNA (1)...(19): siRNA sense strand
gcugcugcuuccaggagaa

SEQ ID NO: 1040533 - RNA, 19 nt, Homo sapiens
  misc_RNA (1)...(19): siRNA sense strand
ccagcauuccuuccuguau

SEQ ID NO: 1040534 - RNA, 19 nt, Homo sapiens
  misc_RNA (1)...(19): siRNA sense strand
agaaguggagcaggaugua

SEQ ID NO: 1040535 - RNA, 19 nt, Homo sapiens
  misc_RNA (1)...(19): siRNA sense strand
uaauugucaugagcaaaca

SEQ ID NO: 1040536 - RNA, 19 nt, Homo sapiens
  misc_RNA (1)...(19): siRNA sense strand
uaugacaaugugaugcuaa

SEQ ID NO: 1040537 - RNA, 19 nt, Homo sapiens
  misc_RNA (1)...(19): siRNA sense strand
ggacagauacgaagcagua

SEQ ID NO: 1040538 - RNA, 19 nt, Homo sapiens
  misc_RNA (1)...(19): siRNA sense strand
ucacuuuccucaacuguua

SEQ ID NO: 1040539 - RNA, 19 nt, Homo sapiens
  misc_RNA (1)...(19): siRNA sense strand
gaagagauuuccaguacug

SEQ ID NO: 1040540 - RNA, 19 nt, Homo sapiens
  misc_RNA (1)...(19): siRNA sense strand
gaaaugcauugaggagaaa

SEQ ID NO: 1040541 - RNA, 19 nt, Homo sapiens
  misc_RNA (1)...(19): siRNA sense strand
gauaucagaugcuuacaca

SEQ ID NO: 1040542 - RNA, 19 nt, Homo sapiens
  misc_RNA (1)...(19): siRNA sense strand
gaggaugauuuauugauug

SEQ ID NO: 1040543 - RNA, 19 nt, Homo sapiens
  misc_RNA (1)...(19): siRNA sense strand
gaggagaaauuccaguuca

SEQ ID NO: 1040544 - RNA, 19 nt, Homo sapiens
  misc_RNA (1)...(19): siRNA sense strand
ugaaaugcauugaggagaa

SEQ ID NO: 1040545 - RNA, 19 nt, Homo sapiens
  misc_RNA (1)...(19): siRNA sense strand
uagaagagauuuccaguac

SEQ ID NO: 1040546 - RNA, 19 nt, Homo sapiens
  misc_RNA (1)...(19): siRNA sense strand
gaagaugccagccuaugaa

SEQ ID NO: 1040547 - RNA, 19 nt, Homo sapiens
  misc_RNA (1)...(19): siRNA sense strand
aaaggaagcauucaaagaa

SEQ ID NO: 1040548 - RNA, 19 nt, Homo sapiens
  misc_RNA (1)...(19): siRNA sense strand
caaacugauuccauagauu

SEQ ID NO: 1040549 - RNA, 19 nt, Homo sapiens
  misc_RNA (1)...(19): siRNA sense strand
gaagauacaacugagauau

SEQ ID NO: 1040550 - RNA, 19 nt, Homo sapiens
  misc_RNA (1)...(19): siRNA sense strand
caaagcagugugucugaua

SEQ ID NO: 1040551 - RNA, 19 nt, Homo sapiens
  misc_RNA (1)...(19): siRNA sense strand
ccacagcuuugucuacaga

SEQ ID NO: 1040552 - RNA, 19 nt, Homo sapiens
  misc_RNA (1)...(19): siRNA sense strand
gagcaauccagaucacuuu

SEQ ID NO: 1040553 - RNA, 19 nt, Homo sapiens
  misc_RNA (1)...(19): siRNA sense strand
ucacacucuuaccauauua

SEQ ID NO: 1040554 - RNA, 19 nt, Homo sapiens
  misc_RNA (1)...(19): siRNA sense strand
auacgaagcaguacuauga

SEQ ID NO: 1040555 - RNA, 19 nt, Homo sapiens
  misc_RNA (1)...(19): siRNA sense strand
gaugccagccuaugaacua

SEQ ID NO: 1040556 - RNA, 19 nt, Homo sapiens
  misc_RNA (1)...(19): siRNA sense strand
ccaaacugauuccauagau

SEQ ID NO: 1040557 - RNA, 19 nt, Homo sapiens
  misc_RNA (1)...(19): siRNA sense strand
ugaaguaucugagaaguac

SEQ ID NO: 1040558 - RNA, 19 nt, Homo sapiens
  misc_RNA (1)...(19): siRNA sense strand
gcuaugagaaguuuauuca

SEQ ID NO: 1040559 - RNA, 19 nt, Homo sapiens
  misc_RNA (1)...(19): siRNA sense strand
gaacuaacucuuggacaga

SEQ ID NO: 1040560 - RNA, 19 nt, Homo sapiens
  misc_RNA (1)...(19): siRNA sense strand
ccaggauucugaaaccaaa

SEQ ID NO: 1040561 - RNA, 19 nt, Homo sapiens
  misc_RNA (1)...(19): siRNA sense strand
cuacaauccugauguucuu

SEQ ID NO: 1040562 - RNA, 19 nt, Homo sapiens
  misc_RNA (1)...(19): siRNA sense strand
ccagaucacuuuccucaac

SEQ ID NO: 1040563 - RNA, 19 nt, Homo sapiens
  misc_RNA (1)...(19): siRNA sense strand
gcaaagcagugugucugau

SEQ ID NO: 1040564 - RNA, 19 nt, Homo sapiens
  misc_RNA (1)...(19): siRNA sense strand
ucauugauguugccuacaa

SEQ ID NO: 1040565 - RNA, 19 nt, Homo sapiens
  misc_RNA (1)...(19): siRNA sense strand
ugagaaaccucugaaaauu

SEQ ID NO: 1040566 - RNA, 19 nt, Homo sapiens
  misc_RNA (1)...(19): siRNA sense strand
agaccaaguuucaggcaaa

SEQ ID NO: 1040567 - RNA, 19 nt, Homo sapiens
  misc_RNA (1)...(19): siRNA sense strand
uuuggaaccuccuagauga

SEQ ID NO: 1040568 - RNA, 19 nt, Homo sapiens
  misc_RNA (1)...(19): siRNA sense strand
ugagggcuaugagaaguuu

SEQ ID NO: 1040569 - RNA, 19 nt, Homo sapiens
  misc_RNA (1)...(19): siRNA sense strand
cagugugucugauagaaga

SEQ ID NO: 1040570 - RNA, 19 nt, Homo sapiens
  misc_RNA (1)...(19): siRNA sense strand
ugaugggaauccaaacuga

SEQ ID NO: 1040571 - RNA, 19 nt, Homo sapiens
  misc_RNA (1)...(19): siRNA sense strand
ugaagaugccagccuauga

SEQ ID NO: 1040572 - RNA, 19 nt, Homo sapiens
  misc_RNA (1)...(19): siRNA sense strand
ugauugaaguaucugagaa

SEQ ID NO: 1040573 - RNA, 19 nt, Homo sapiens
  misc_RNA (1)...(19): siRNA sense strand
gaaccacagcuuugucuac

SEQ ID NO: 1040574 - RNA, 19 nt, Homo sapiens
  misc_RNA (1)...(19): siRNA sense strand
cagauacgaagcaguacua

SEQ ID NO: 1040575 - RNA, 19 nt, Homo sapiens
  misc_RNA (1)...(19): siRNA sense strand
ggucugcuuacccaaguua

SEQ ID NO: 1040576 - RNA, 19 nt, Homo sapiens
  misc_RNA (1)...(19): siRNA sense strand
gaucccagcuccccaauca

SEQ ID NO: 1040577 - RNA, 19 nt, Homo sapiens
  misc_RNA (1)...(19): siRNA sense strand
gagaagggaacuaacucuu

SEQ ID NO: 1040578 - RNA, 19 nt, Homo sapiens
  misc_RNA (1)...(19): siRNA sense strand
gagaaguacagauuacauc

SEQ ID NO: 1040579 - RNA, 19 nt, Homo sapiens
  misc_RNA (1)...(19): siRNA sense strand
gaagcaguacuaugagcaa

SEQ ID NO: 1040580 - RNA, 19 nt, Homo sapiens
  misc_RNA (1)...(19): siRNA sense strand
gaaaaggaccaagugaaaa

SEQ ID NO: 1040581 - RNA, 19 nt, Homo sapiens
  misc_RNA (1)...(19): siRNA sense strand
agaaaccucugaaaauuga

SEQ ID NO: 1040582 - RNA, 19 nt, Homo sapiens
  misc_RNA (1)...(19): siRNA sense strand
uacccaaguuacucaguuu

SEQ ID NO: 1040583 - RNA, 19 nt, Homo sapiens
  misc_RNA (1)...(19): siRNA sense strand
gaaaugaccacagcaaaau

SEQ ID NO: 1040584 - RNA, 19 nt, Homo sapiens
  misc_RNA (1)...(19): siRNA sense strand
guugaaaguugaauuaccu

SEQ ID NO: 1040585 - RNA, 19 nt, Homo sapiens
  misc_RNA (1)...(19): siRNA sense strand
uaucagaugcuuacacagu

SEQ ID NO: 1040586 - RNA, 19 nt, Homo sapiens
  misc_RNA (1)...(19): siRNA sense strand
uuacccaaguuacucaguu

SEQ ID NO: 1040587 - RNA, 19 nt, Homo sapiens
  misc_RNA (1)...(19): siRNA sense strand
agaagggaacuaacucuug

SEQ ID NO: 1040588 - RNA, 19 nt, Homo sapiens
  misc_RNA (1)...(19): siRNA sense strand
aaagcagugugucugauag

SEQ ID NO: 1040589 - RNA, 19 nt, Homo sapiens
  misc_RNA (1)...(19): siRNA sense strand
ccacgcuaaucaucacaau

SEQ ID NO: 1040590 - RNA, 19 nt, Homo sapiens
  misc_RNA (1)...(19): siRNA sense strand
ucagaugcuuacacaguca

SEQ ID NO: 1040591 - RNA, 19 nt, Homo sapiens
  misc_RNA (1)...(19): siRNA sense strand
cagaagauacaacugagau

SEQ ID NO: 1040592 - RNA, 19 nt, Homo sapiens
  misc_RNA (1)...(19): siRNA sense strand
ugagauaucagaugcuuac

SEQ ID NO: 1040593 - RNA, 19 nt, Homo sapiens
  misc_RNA (1)...(19): siRNA sense strand
agaagauacaacugagaua

SEQ ID NO: 1040594 - RNA, 19 nt, Homo sapiens
  misc_RNA (1)...(19): siRNA sense strand
gagaaaccucugaaaauug

SEQ ID NO: 1040595 - RNA, 19 nt, Homo sapiens
  misc_RNA (1)...(19): siRNA sense strand
gcaguacuaugagcaaucc

SEQ ID NO: 1040596 - RNA, 19 nt, Homo sapiens
  misc_RNA (1)...(19): siRNA sense strand
cucacacucuuaccauauu

SEQ ID NO: 1040597 - RNA, 19 nt, Homo sapiens
  misc_RNA (1)...(19): siRNA sense strand
ggcaaagcagugugucuga

SEQ ID NO: 1040598 - RNA, 19 nt, Homo sapiens
  misc_RNA (1)...(19): siRNA sense strand
gauacgaagcaguacuaug

SEQ ID NO: 1040599 - RNA, 19 nt, Homo sapiens
  misc_RNA (1)...(19): siRNA sense strand
aucaaccacucauccagua

SEQ ID NO: 1040600 - RNA, 19 nt, Homo sapiens
  misc_RNA (1)...(19): siRNA sense strand
aaccagaagauacaacuga

SEQ ID NO: 1040601 - RNA, 19 nt, Homo sapiens
  misc_RNA (1)...(19): siRNA sense strand
uggcaaaccagaagauaca

SEQ ID NO: 1040602 - RNA, 19 nt, Homo sapiens
  misc_RNA (1)...(19): siRNA sense strand
ucugugaccuuaguguuuc

SEQ ID NO: 1040603 - RNA, 19 nt, Homo sapiens
  misc_RNA (1)...(19): siRNA sense strand
gaccaaguuucaggcaaag

SEQ ID NO: 1040604 - RNA, 19 nt, Homo sapiens
  misc_RNA (1)...(19): siRNA sense strand
gcagcugaaagaagggaaa

SEQ ID NO: 1040605 - RNA, 19 nt, Homo sapiens
  misc_RNA (1)...(19): siRNA sense strand
aaccacagcuuugucuaca

SEQ ID NO: 1040606 - RNA, 19 nt, Homo sapiens
  misc_RNA (1)...(19): siRNA sense strand
acuaacucuuggacagaua

SEQ ID NO: 1040607 - RNA, 19 nt, Homo sapiens
  misc_RNA (1)...(19): siRNA sense strand
gcauugaggagaaauucca

SEQ ID NO: 1040608 - RNA, 19 nt, Homo sapiens
  misc_RNA (1)...(19): siRNA sense strand
uuacacagucauugauguu

SEQ ID NO: 1040609 - RNA, 19 nt, Homo sapiens
  misc_RNA (1)...(19): siRNA sense strand
agaaaaggaccaagugaaa

SEQ ID NO: 1040610 - RNA, 19 nt, Homo sapiens
  misc_RNA (1)...(19): siRNA sense strand
auagaagagauuuccagua

SEQ ID NO: 1040611 - RNA, 19 nt, Homo sapiens
  misc_RNA (1)...(19): siRNA sense strand
ccagaagauacaacugaga

SEQ ID NO: 1040612 - RNA, 19 nt, Homo sapiens
  misc_RNA (1)...(19): siRNA sense strand
uucugaggaugauuuauug

SEQ ID NO: 1040613 - RNA, 19 nt, Homo sapiens
  misc_RNA (1)...(19): siRNA sense strand
ggagacauccucaaaaggu

SEQ ID NO: 1040614 - RNA, 19 nt, Homo sapiens
  misc_RNA (1)...(19): siRNA sense strand
acucauccaguaccucuaa

SEQ ID NO: 1040615 - RNA, 19 nt, Homo sapiens
  misc_RNA (1)...(19): siRNA sense strand
aaucugaugggaauccaaa

SEQ ID NO: 1040616 - RNA, 19 nt, Homo sapiens
  misc_RNA (1)...(19): siRNA sense strand
ugccuacaauccugauguu

SEQ ID NO: 1040617 - RNA, 19 nt, Homo sapiens
  misc_RNA (1)...(19): siRNA sense strand
caaaccagaagauacaacu

SEQ ID NO: 1040618 - RNA, 19 nt, Homo sapiens
  misc_RNA (1)...(19): siRNA sense strand
ugaaaugaccacagcaaaa

SEQ ID NO: 1040619 - RNA, 19 nt, Homo sapiens
  misc_RNA (1)...(19): siRNA sense strand
gugagaaaccucugaaaau

SEQ ID NO: 1040620 - RNA, 19 nt, Homo sapiens
  misc_RNA (1)...(19): siRNA sense strand
gaugaagaugccagccuau

SEQ ID NO: 1040621 - RNA, 19 nt, Homo sapiens
  misc_RNA (1)...(19): siRNA sense strand
gcagugugucugauagaag

SEQ ID NO: 1040622 - RNA, 19 nt, Homo sapiens
  misc_RNA (1)...(19): siRNA sense strand
gccaaaagaccaaguuuca

SEQ ID NO: 1040623 - RNA, 19 nt, Homo sapiens
  misc_RNA (1)...(19): siRNA sense strand
gcagaaaaggaccaaguga

SEQ ID NO: 1040624 - RNA, 19 nt, Homo sapiens
  misc_RNA (1)...(19): siRNA sense strand
gaccaggauucugaaacca

SEQ ID NO: 1040625 - RNA, 19 nt, Homo sapiens
  misc_RNA (1)...(19): siRNA sense strand
gauugaaguaucugagaag

SEQ ID NO: 1040626 - RNA, 19 nt, Homo sapiens
  misc_RNA (1)...(19): siRNA sense strand
guauuaauucugucucucu

SEQ ID NO: 1040627 - RNA, 19 nt, Homo sapiens
  misc_RNA (1)...(19): siRNA sense strand
ccugagggcuaugagaagu

SEQ ID NO: 1040628 - RNA, 19 nt, Homo sapiens
  misc_RNA (1)...(19): siRNA sense strand
cagaucacuuuccucaacu

SEQ ID NO: 1040629 - RNA, 19 nt, Homo sapiens
  misc_RNA (1)...(19): siRNA sense strand
aaaaugagaagggaacuaa

SEQ ID NO: 1040630 - RNA, 19 nt, Homo sapiens
  misc_RNA (1)...(19): siRNA sense strand
guuggcaaaccagaagaua

SEQ ID NO: 1040631 - RNA, 19 nt, Homo sapiens
  misc_RNA (1)...(19): siRNA sense strand
gaugggaauccaaacugau

SEQ ID NO: 1040632 - RNA, 19 nt, Homo sapiens
  misc_RNA (1)...(19): siRNA sense strand
aacaaaaucugaugggaau

SEQ ID NO: 1040633 - RNA, 19 nt, Homo sapiens
  misc_RNA (1)...(19): siRNA sense strand
acucuuaccauauuaccaa

SEQ ID NO: 1040634 - RNA, 19 nt, Homo sapiens
  misc_RNA (1)...(19): siRNA sense strand
cuuacacagucauugaugu

SEQ ID NO: 1040635 - RNA, 19 nt, Homo sapiens
  misc_RNA (1)...(19): siRNA sense strand
ucucacacucuuaccauau

SEQ ID NO: 1040636 - RNA, 19 nt, Homo sapiens
  misc_RNA (1)...(19): siRNA sense strand
ggagagaagucauauauau

SEQ ID NO: 1040637 - RNA, 19 nt, Homo sapiens
  misc_RNA (1)...(19): siRNA sense strand
ggagagaagucauauauau

SEQ ID NO: 1040638 - RNA, 19 nt, Homo sapiens
  misc_RNA (1)...(19): siRNA sense strand
gaagggaaaucucauugua

SEQ ID NO: 1040639 - RNA, 19 nt, Homo sapiens
  misc_RNA (1)...(19): siRNA sense strand
gcucagaccucauuaacua

SEQ ID NO: 1040640 - RNA, 19 nt, Homo sapiens
  misc_RNA (1)...(19): siRNA sense strand
gaacaaugccauaaacaua

SEQ ID NO: 1040641 - RNA, 19 nt, Homo sapiens
  misc_RNA (1)...(19): siRNA sense strand
agucauagcuuaucacaua

SEQ ID NO: 1040642 - RNA, 19 nt, Homo sapiens
  misc_RNA (1)...(19): siRNA sense strand
gcaaagaugucugaagaga

SEQ ID NO: 1040643 - RNA, 19 nt, Homo sapiens
  misc_RNA (1)...(19): siRNA sense strand
gguaugaaaucaagaauuc

SEQ ID NO: 1040644 - RNA, 19 nt, Homo sapiens
  misc_RNA (1)...(19): siRNA sense strand
uaaagacucuguuaacaug

SEQ ID NO: 1040645 - RNA, 19 nt, Homo sapiens
  misc_RNA (1)...(19): siRNA sense strand
ggaaaaggcuucaucaaga

SEQ ID NO: 1040646 - RNA, 19 nt, Homo sapiens
  misc_RNA (1)...(19): siRNA sense strand
gauaaagacucuguuaaca

SEQ ID NO: 1040647 - RNA, 19 nt, Homo sapiens
  misc_RNA (1)...(19): siRNA sense strand
ggaaaaggcuucauccaaa

SEQ ID NO: 1040648 - RNA, 19 nt, Homo sapiens
  misc_RNA (1)...(19): siRNA sense strand
ggaaaaggcuucauucaga

SEQ ID NO: 1040649 - RNA, 19 nt, Homo sapiens
  misc_RNA (1)...(19): siRNA sense strand
guacaucagcgaauucaua

SEQ ID NO: 1040650 - RNA, 19 nt, Homo sapiens
  misc_RNA (1)...(19): siRNA sense strand
ccagaagacauguuuaaua

SEQ ID NO: 1040651 - RNA, 19 nt, Homo sapiens
  misc_RNA (1)...(19): siRNA sense strand
ggaaacaucauucaucaga

SEQ ID NO: 1040652 - RNA, 19 nt, Homo sapiens
  misc_RNA (1)...(19): siRNA sense strand
gaagacauguuuaauaucc

SEQ ID NO: 1040653 - RNA, 19 nt, Homo sapiens
  misc_RNA (1)...(19): siRNA sense strand
gaacaccagagaacucaua

SEQ ID NO: 1040654 - RNA, 19 nt, Homo sapiens
  misc_RNA (1)...(19): siRNA sense strand
ggagagaaacccuauguau

SEQ ID NO: 1040655 - RNA, 19 nt, Homo sapiens
  misc_RNA (1)...(19): siRNA sense strand
aagcaaagaugucugaaga

SEQ ID NO: 1040656 - RNA, 19 nt, Homo sapiens
  misc_RNA (1)...(19): siRNA sense strand
uaaaucaugucucaacaga

SEQ ID NO: 1040657 - RNA, 19 nt, Homo sapiens
  misc_RNA (1)...(19): siRNA sense strand
caagaagucucggcucauu

SEQ ID NO: 1040658 - RNA, 19 nt, Homo sapiens
  misc_RNA (1)...(19): siRNA sense strand
ccucauggaugcaguauau

SEQ ID NO: 1040659 - RNA, 19 nt, Homo sapiens
  misc_RNA (1)...(19): siRNA sense strand
gagagaaacccuaugaaug

SEQ ID NO: 1040660 - RNA, 19 nt, Homo sapiens
  misc_RNA (1)...(19): siRNA sense strand
gagagaaacccuauacaug

SEQ ID NO: 1040661 - RNA, 19 nt, Homo sapiens
  misc_RNA (1)...(19): siRNA sense strand
cagaugcacucuucaaguu

SEQ ID NO: 1040662 - RNA, 19 nt, Homo sapiens
  misc_RNA (1)...(19): siRNA sense strand
gagagaaacccuaugaaug

SEQ ID NO: 1040663 - RNA, 19 nt, Homo sapiens
  misc_RNA (1)...(19): siRNA sense strand
caagaaaguugacaaucau

SEQ ID NO: 1040664 - RNA, 19 nt, Homo sapiens
  misc_RNA (1)...(19): siRNA sense strand
gaaaucucauuguacauca

SEQ ID NO: 1040665 - RNA, 19 nt, Homo sapiens
  misc_RNA (1)...(19): siRNA sense strand
caagaagucucgccucauc

SEQ ID NO: 1040666 - RNA, 19 nt, Homo sapiens
  misc_RNA (1)...(19): siRNA sense strand
caaaccagaugcacucuuc

SEQ ID NO: 1040667 - RNA, 19 nt, Homo sapiens
  misc_RNA (1)...(19): siRNA sense strand
ggagagccauggacaguag

SEQ ID NO: 1040668 - RNA, 19 nt, Homo sapiens
  misc_RNA (1)...(19): siRNA sense strand
ggagagaaacccuaugaau

SEQ ID NO: 1040669 - RNA, 19 nt, Homo sapiens
  misc_RNA (1)...(19): siRNA sense strand
ugucaugccuuguuuauca

SEQ ID NO: 1040670 - RNA, 19 nt, Homo sapiens
  misc_RNA (1)...(19): siRNA sense strand
gaaaaggcuucauccaaaa

SEQ ID NO: 1040671 - RNA, 19 nt, Homo sapiens
  misc_RNA (1)...(19): siRNA sense strand
ggagagaaacccuaugaau

SEQ ID NO: 1040672 - RNA, 19 nt, Homo sapiens
  misc_RNA (1)...(19): siRNA sense strand
gaaaaggcuucaucaagaa

SEQ ID NO: 1040673 - RNA, 19 nt, Homo sapiens
  misc_RNA (1)...(19): siRNA sense strand
gaaaguugacaaucaucua

SEQ ID NO: 1040674 - RNA, 19 nt, Homo sapiens
  misc_RNA (1)...(19): siRNA sense strand
gagagaaacccuauguaug

SEQ ID NO: 1040675 - RNA, 19 nt, Homo sapiens
  misc_RNA (1)...(19): siRNA sense strand
aaagaugucugaagagagu

SEQ ID NO: 1040676 - RNA, 19 nt, Homo sapiens
  misc_RNA (1)...(19): siRNA sense strand
gauaaaucaugucucaaca

SEQ ID NO: 1040677 - RNA, 19 nt, Homo sapiens
  misc_RNA (1)...(19): siRNA sense strand
gagaaacccuauacaugca

SEQ ID NO: 1040678 - RNA, 19 nt, Homo sapiens
  misc_RNA (1)...(19): siRNA sense strand
gcucauuaaucaucagaga

SEQ ID NO: 1040679 - RNA, 19 nt, Homo sapiens
  misc_RNA (1)...(19): siRNA sense strand
acauacacgugaucucaua

SEQ ID NO: 1040680 - RNA, 19 nt, Homo sapiens
  misc_RNA (1)...(19): siRNA sense strand
gaaaaggcuucauucagaa

SEQ ID NO: 1040681 - RNA, 19 nt, Homo sapiens
  misc_RNA (1)...(19): siRNA sense strand
gaaacccuauguaugcaau

SEQ ID NO: 1040682 - RNA, 19 nt, Homo sapiens
  misc_RNA (1)...(19): siRNA sense strand
ugccaagcaugaacaauuu

SEQ ID NO: 1040683 - RNA, 19 nt, Homo sapiens
  misc_RNA (1)...(19): siRNA sense strand
ggagagaaacccuauacau

SEQ ID NO: 1040684 - RNA, 19 nt, Homo sapiens
  misc_RNA (1)...(19): siRNA sense strand
gaaaguccgggcucacuga

SEQ ID NO: 1040685 - RNA, 19 nt, Homo sapiens
  misc_RNA (1)...(19): siRNA sense strand
gaagguggaaauucuguga

SEQ ID NO: 1040686 - RNA, 19 nt, Homo sapiens
  misc_RNA (1)...(19): siRNA sense strand
ugaagagaguggaacaaug

SEQ ID NO: 1040687 - RNA, 19 nt, Homo sapiens
  misc_RNA (1)...(19): siRNA sense strand
gaaaauccuugcucagaga

SEQ ID NO: 1040688 - RNA, 19 nt, Homo sapiens
  misc_RNA (1)...(19): siRNA sense strand
agacaucggagaacucaua

SEQ ID NO: 1040689 - RNA, 19 nt, Homo sapiens
  misc_RNA (1)...(19): siRNA sense strand
caggagagaagucauauau

SEQ ID NO: 1040690 - RNA, 19 nt, Homo sapiens
  misc_RNA (1)...(19): siRNA sense strand
ggaaaucacagcucaaugc

SEQ ID NO: 1040691 - RNA, 19 nt, Homo sapiens
  misc_RNA (1)...(19): siRNA sense strand
ggagagaaaccacauggau

SEQ ID NO: 1040692 - RNA, 19 nt, Homo sapiens
  misc_RNA (1)...(19): siRNA sense strand
caggagagaagucauauau

SEQ ID NO: 1040693 - RNA, 19 nt, Homo sapiens
  misc_RNA (1)...(19): siRNA sense strand
guccagaaaucaagaaagu

SEQ ID NO: 1040694 - RNA, 19 nt, Homo sapiens
  misc_RNA (1)...(19): siRNA sense strand
ggaaaucacagcucaaugc

SEQ ID NO: 1040695 - RNA, 19 nt, Homo sapiens
  misc_RNA (1)...(19): siRNA sense strand
ccagaaaucaagaaaguug

SEQ ID NO: 1040696 - RNA, 19 nt, Homo sapiens
  misc_RNA (1)...(19): siRNA sense strand
ucacugaacaccagagaaa

SEQ ID NO: 1040697 - RNA, 19 nt, Homo sapiens
  misc_RNA (1)...(19): siRNA sense strand
gaagagaguggaacaaugc

SEQ ID NO: 1040698 - RNA, 19 nt, Homo sapiens
  misc_RNA (1)...(19): siRNA sense strand
gcucaaugcacaucagaaa

SEQ ID NO: 1040699 - RNA, 19 nt, Homo sapiens
  misc_RNA (1)...(19): siRNA sense strand
agagaaauguguagguuca

SEQ ID NO: 1040700 - RNA, 19 nt, Homo sapiens
  misc_RNA (1)...(19): siRNA sense strand
ccucaucuaucaucagaga

SEQ ID NO: 1040701 - RNA, 19 nt, Homo sapiens
  misc_RNA (1)...(19): siRNA sense strand
caagucaggucucauuaac

SEQ ID NO: 1040702 - RNA, 19 nt, Homo sapiens
  misc_RNA (1)...(19): siRNA sense strand
gaacaaggagagccaugga

SEQ ID NO: 1040703 - RNA, 19 nt, Homo sapiens
  misc_RNA (1)...(19): siRNA sense strand
gguccaggcucacugaaca

SEQ ID NO: 1040704 - RNA, 19 nt, Homo sapiens
  misc_RNA (1)...(19): siRNA sense strand
ggauaaagacucuguuaac

SEQ ID NO: 1040705 - RNA, 19 nt, Homo sapiens
  misc_RNA (1)...(19): siRNA sense strand
caggauaaagacucuguua

SEQ ID NO: 1040706 - RNA, 19 nt, Homo sapiens
  misc_RNA (1)...(19): siRNA sense strand
gaaauccacagccaaaucu

SEQ ID NO: 1040707 - RNA, 19 nt, Homo sapiens
  misc_RNA (1)...(19): siRNA sense strand
caacagacaucggagaacu

SEQ ID NO: 1040708 - RNA, 19 nt, Homo sapiens
  misc_RNA (1)...(19): siRNA sense strand
gaacaaaagguaugaaauc

SEQ ID NO: 1040709 - RNA, 19 nt, Homo sapiens
  misc_RNA (1)...(19): siRNA sense strand
gcucaaugcacaccagaaa

SEQ ID NO: 1040710 - RNA, 19 nt, Homo sapiens
  misc_RNA (1)...(19): siRNA sense strand
ggaacaaugccauaaacau

SEQ ID NO: 1040711 - RNA, 19 nt, Homo sapiens
  misc_RNA (1)...(19): siRNA sense strand
ggaaaucucauuguacauc

SEQ ID NO: 1040712 - RNA, 19 nt, Homo sapiens
  misc_RNA (1)...(19): siRNA sense strand
uaaguuuagucaaccagaa

SEQ ID NO: 1040713 - RNA, 19 nt, Homo sapiens
  misc_RNA (1)...(19): siRNA sense strand
ugacuuacaugggaaaaua

SEQ ID NO: 1040714 - RNA, 19 nt, Homo sapiens
  misc_RNA (1)...(19): siRNA sense strand
cauaaugcauuuggaaaca

SEQ ID NO: 1040715 - RNA, 19 nt, Homo sapiens
  misc_RNA (1)...(19): siRNA sense strand
gcucagagagucauagcuu

SEQ ID NO: 1040716 - RNA, 19 nt, Homo sapiens
  misc_RNA (1)...(19): siRNA sense strand
gccauaaacauaaugcauu

SEQ ID NO: 1040717 - RNA, 19 nt, Homo sapiens
  misc_RNA (1)...(19): siRNA sense strand
ccaagcagagagcaaagua

SEQ ID NO: 1040718 - RNA, 19 nt, Homo sapiens
  misc_RNA (1)...(19): siRNA sense strand
agagagaaauguguagguu

SEQ ID NO: 1040719 - RNA, 19 nt, Homo sapiens
  misc_RNA (1)...(19): siRNA sense strand
uaauaucccaucagagauu

SEQ ID NO: 1040720 - RNA, 19 nt, Homo sapiens
  misc_RNA (1)...(19): siRNA sense strand
ucagcgaacucaaaacaua

SEQ ID NO: 1040721 - RNA, 19 nt, Homo sapiens
  misc_RNA (1)...(19): siRNA sense strand
gagaaacccuaugaaugca

SEQ ID NO: 1040722 - RNA, 19 nt, Homo sapiens
  misc_RNA (1)...(19): siRNA sense strand
gcagauaguagaauuugca

SEQ ID NO: 1040723 - RNA, 19 nt, Homo sapiens
  misc_RNA (1)...(19): siRNA sense strand
gagcaaaguagccauugug

SEQ ID NO: 1040724 - RNA, 19 nt, Homo sapiens
  misc_RNA (1)...(19): siRNA sense strand
cuacagaugcacucacaaa

SEQ ID NO: 1040725 - RNA, 19 nt, Homo sapiens
  misc_RNA (1)...(19): siRNA sense strand
gagaaacccuauguaugca

SEQ ID NO: 1040726 - RNA, 19 nt, Homo sapiens
  misc_RNA (1)...(19): siRNA sense strand
gagaaacccuaugaaugca

SEQ ID NO: 1040727 - RNA, 19 nt, Homo sapiens
  misc_RNA (1)...(19): siRNA sense strand
agaagucucggcucauuaa

SEQ ID NO: 1040728 - RNA, 19 nt, Homo sapiens
  misc_RNA (1)...(19): siRNA sense strand
ccguauggaugcucugauu

SEQ ID NO: 1040729 - RNA, 19 nt, Homo sapiens
  misc_RNA (1)...(19): siRNA sense strand
acacaagucaggucucauu

SEQ ID NO: 1040730 - RNA, 19 nt, Homo sapiens
  misc_RNA (1)...(19): siRNA sense strand
gcgaauucauacuggagaa

SEQ ID NO: 1040731 - RNA, 19 nt, Homo sapiens
  misc_RNA (1)...(19): siRNA sense strand
acacaggagagaagucaua

SEQ ID NO: 1040732 - RNA, 19 nt, Homo sapiens
  misc_RNA (1)...(19): siRNA sense strand
agucucggcucauuaauca

SEQ ID NO: 1040733 - RNA, 19 nt, Homo sapiens
  misc_RNA (1)...(19): siRNA sense strand
ucacacaagucaggucuca

SEQ ID NO: 1040734 - RNA, 19 nt, Homo sapiens
  misc_RNA (1)...(19): siRNA sense strand
caggagagaaacccuauga

SEQ ID NO: 1040735 - RNA, 19 nt, Homo sapiens
  misc_RNA (1)...(19): siRNA sense strand
caggagagaaacccuauga

SEQ ID NO: 1040736 - RNA, 19 nt, Homo sapiens
  misc_RNA (1)...(19): siRNA sense strand
gaaccgccuuuguugauua

SEQ ID NO: 1040737 - RNA, 19 nt, Homo sapiens
  misc_RNA (1)...(19): siRNA sense strand
ggucaugguuugcaaauaa

SEQ ID NO: 1040738 - RNA, 19 nt, Homo sapiens
  misc_RNA (1)...(19): siRNA sense strand
gaacaccucuaacagaaga

SEQ ID NO: 1040739 - RNA, 19 nt, Homo sapiens
  misc_RNA (1)...(19): siRNA sense strand
gggagaaacugaagccaaa

SEQ ID NO: 1040740 - RNA, 19 nt, Homo sapiens
  misc_RNA (1)...(19): siRNA sense strand
ggaagagauugaacaagaa

SEQ ID NO: 1040741 - RNA, 19 nt, Homo sapiens
  misc_RNA (1)...(19): siRNA sense strand
aacaagaacugacgucuaa

SEQ ID NO: 1040742 - RNA, 19 nt, Homo sapiens
  misc_RNA (1)...(19): siRNA sense strand
cagaugcaguacaguauua

SEQ ID NO: 1040743 - RNA, 19 nt, Homo sapiens
  misc_RNA (1)...(19): siRNA sense strand
aaacgaaccggcaaaguua

SEQ ID NO: 1040744 - RNA, 19 nt, Homo sapiens
  misc_RNA (1)...(19): siRNA sense strand
ggucaaguccauucaauuu

SEQ ID NO: 1040745 - RNA, 19 nt, Homo sapiens
  misc_RNA (1)...(19): siRNA sense strand
gaacaagaacugacgucua

SEQ ID NO: 1040746 - RNA, 19 nt, Homo sapiens
  misc_RNA (1)...(19): siRNA sense strand
gaaaagugcuggacuggaa

SEQ ID NO: 1040747 - RNA, 19 nt, Homo sapiens
  misc_RNA (1)...(19): siRNA sense strand
uggaagagauugaacaaga

SEQ ID NO: 1040748 - RNA, 19 nt, Homo sapiens
  misc_RNA (1)...(19): siRNA sense strand
caaacgaaccggcaaaguu

SEQ ID NO: 1040749 - RNA, 19 nt, Homo sapiens
  misc_RNA (1)...(19): siRNA sense strand
acaguuaucucauccaguu

SEQ ID NO: 1040750 - RNA, 19 nt, Homo sapiens
  misc_RNA (1)...(19): siRNA sense strand
ggagugaaccgccuuuguu

SEQ ID NO: 1040751 - RNA, 19 nt, Homo sapiens
  misc_RNA (1)...(19): siRNA sense strand
ggccaaacaugaauccuau

SEQ ID NO: 1040752 - RNA, 19 nt, Homo sapiens
  misc_RNA (1)...(19): siRNA sense strand
gaaaauugcugccuuugau

SEQ ID NO: 1040753 - RNA, 19 nt, Homo sapiens
  misc_RNA (1)...(19): siRNA sense strand
gaacauccaggucaugguu

SEQ ID NO: 1040754 - RNA, 19 nt, Homo sapiens
  misc_RNA (1)...(19): siRNA sense strand
gaauugcagccaccguuua

SEQ ID NO: 1040755 - RNA, 19 nt, Homo sapiens
  misc_RNA (1)...(19): siRNA sense strand
gcaauaaacggauccuugu

SEQ ID NO: 1040756 - RNA, 19 nt, Homo sapiens
  misc_RNA (1)...(19): siRNA sense strand
caagacuccuauaacaauu

SEQ ID NO: 1040757 - RNA, 19 nt, Homo sapiens
  misc_RNA (1)...(19): siRNA sense strand
gaucuguauucacuucgua

SEQ ID NO: 1040758 - RNA, 19 nt, Homo sapiens
  misc_RNA (1)...(19): siRNA sense strand
uuugauagcuguacuuuca

SEQ ID NO: 1040759 - RNA, 19 nt, Homo sapiens
  misc_RNA (1)...(19): siRNA sense strand
gaaaacaaguugauucgau

SEQ ID NO: 1040760 - RNA, 19 nt, Homo sapiens
  misc_RNA (1)...(19): siRNA sense strand
gaucuccgcugcccaccaa

SEQ ID NO: 1040761 - RNA, 19 nt, Homo sapiens
  misc_RNA (1)...(19): siRNA sense strand
cagcauaccaagaaacuuu

SEQ ID NO: 1040762 - RNA, 19 nt, Homo sapiens
  misc_RNA (1)...(19): siRNA sense strand
gcacugcacccaagauuag

SEQ ID NO: 1040763 - RNA, 19 nt, Homo sapiens
  misc_RNA (1)...(19): siRNA sense strand
gaacagccaagacuccuau

SEQ ID NO: 1040764 - RNA, 19 nt, Homo sapiens
  misc_RNA (1)...(19): siRNA sense strand
ccaggcaucaucacaguua

SEQ ID NO: 1040765 - RNA, 19 nt, Homo sapiens
  misc_RNA (1)...(19): siRNA sense strand
gaagaugaagaauggcuuu

SEQ ID NO: 1040766 - RNA, 19 nt, Homo sapiens
  misc_RNA (1)...(19): siRNA sense strand
gaaugaagcuauggcuaca

SEQ ID NO: 1040767 - RNA, 19 nt, Homo sapiens
  misc_RNA (1)...(19): siRNA sense strand
uggaacaccucuaacagaa

SEQ ID NO: 1040768 - RNA, 19 nt, Homo sapiens
  misc_RNA (1)...(19): siRNA sense strand
acaggaagaugaagaaugg

SEQ ID NO: 1040769 - RNA, 19 nt, Homo sapiens
  misc_RNA (1)...(19): siRNA sense strand
uaaaccuccuccacaaauu

SEQ ID NO: 1040770 - RNA, 19 nt, Homo sapiens
  misc_RNA (1)...(19): siRNA sense strand
uuucaugucuuccaaauuc

SEQ ID NO: 1040771 - RNA, 19 nt, Homo sapiens
  misc_RNA (1)...(19): siRNA sense strand
ugugauaacuuugcugaaa

SEQ ID NO: 1040772 - RNA, 19 nt, Homo sapiens
  misc_RNA (1)...(19): siRNA sense strand
gccaggugcuugugaguga

SEQ ID NO: 1040773 - RNA, 19 nt, Homo sapiens
  misc_RNA (1)...(19): siRNA sense strand
ccaagaagacccagucguu

SEQ ID NO: 1040774 - RNA, 19 nt, Homo sapiens
  misc_RNA (1)...(19): siRNA sense strand
ggaaguccugggcccauua

SEQ ID NO: 1040775 - RNA, 19 nt, Homo sapiens
  misc_RNA (1)...(19): siRNA sense strand
gaagcuauggcuacagauu

SEQ ID NO: 1040776 - RNA, 19 nt, Homo sapiens
  misc_RNA (1)...(19): siRNA sense strand
ggagaaaauugcugccuuu

SEQ ID NO: 1040777 - RNA, 19 nt, Homo sapiens
  misc_RNA (1)...(19): siRNA sense strand
caaaucaagcagccaauga

SEQ ID NO: 1040778 - RNA, 19 nt, Homo sapiens
  misc_RNA (1)...(19): siRNA sense strand
ucacaaagcaguccuacau

SEQ ID NO: 1040779 - RNA, 19 nt, Homo sapiens
  misc_RNA (1)...(19): siRNA sense strand
gcuaaaacauugaaaagug

SEQ ID NO: 1040780 - RNA, 19 nt, Homo sapiens
  misc_RNA (1)...(19): siRNA sense strand
ggaagcaucgagacucuga

SEQ ID NO: 1040781 - RNA, 19 nt, Homo sapiens
  misc_RNA (1)...(19): siRNA sense strand
gcaaauaaugcaggucuga

SEQ ID NO: 1040782 - RNA, 19 nt, Homo sapiens
  misc_RNA (1)...(19): siRNA sense strand
ccaagacuccuauaacaau

SEQ ID NO: 1040783 - RNA, 19 nt, Homo sapiens
  misc_RNA (1)...(19): siRNA sense strand
uaauacaaguggaaugcuu

SEQ ID NO: 1040784 - RNA, 19 nt, Homo sapiens
  misc_RNA (1)...(19): siRNA sense strand
gcaguacaguauuaucagu

SEQ ID NO: 1040785 - RNA, 19 nt, Homo sapiens
  misc_RNA (1)...(19): siRNA sense strand
guugagucccuguacauua

SEQ ID NO: 1040786 - RNA, 19 nt, Homo sapiens
  misc_RNA (1)...(19): siRNA sense strand
guuacaagcugcuauccau

SEQ ID NO: 1040787 - RNA, 19 nt, Homo sapiens
  misc_RNA (1)...(19): siRNA sense strand
gcucuucucuguucgacau

SEQ ID NO: 1040788 - RNA, 19 nt, Homo sapiens
  misc_RNA (1)...(19): siRNA sense strand
caagauuagugacgacaca

SEQ ID NO: 1040789 - RNA, 19 nt, Homo sapiens
  misc_RNA (1)...(19): siRNA sense strand
aaagaucaguccaaacaag

SEQ ID NO: 1040790 - RNA, 19 nt, Homo sapiens
  misc_RNA (1)...(19): siRNA sense strand
ugacagugauggcauugug

SEQ ID NO: 1040791 - RNA, 19 nt, Homo sapiens
  misc_RNA (1)...(19): siRNA sense strand
uaugaucuccauugcaaua

SEQ ID NO: 1040792 - RNA, 19 nt, Homo sapiens
  misc_RNA (1)...(19): siRNA sense strand
gcuguacuuucacgaagaa

SEQ ID NO: 1040793 - RNA, 19 nt, Homo sapiens
  misc_RNA (1)...(19): siRNA sense strand
gcagaugcaguacaguauu

SEQ ID NO: 1040794 - RNA, 19 nt, Homo sapiens
  misc_RNA (1)...(19): siRNA sense strand
caguugcuauggcaccuua

SEQ ID NO: 1040795 - RNA, 19 nt, Homo sapiens
  misc_RNA (1)...(19): siRNA sense strand
gacaacauucagucuuaua

SEQ ID NO: 1040796 - RNA, 19 nt, Homo sapiens
  misc_RNA (1)...(19): siRNA sense strand
gcacaagcccaccguacug

SEQ ID NO: 1040797 - RNA, 19 nt, Homo sapiens
  misc_RNA (1)...(19): siRNA sense strand
ccaaacaugaauccuauug

SEQ ID NO: 1040798 - RNA, 19 nt, Homo sapiens
  misc_RNA (1)...(19): siRNA sense strand
uuuaugaucuccauugcaa

SEQ ID NO: 1040799 - RNA, 19 nt, Homo sapiens
  misc_RNA (1)...(19): siRNA sense strand
caguuuagcuucugaccau

SEQ ID NO: 1040800 - RNA, 19 nt, Homo sapiens
  misc_RNA (1)...(19): siRNA sense strand
acacaccacuggaaaugau

SEQ ID NO: 1040801 - RNA, 19 nt, Homo sapiens
  misc_RNA (1)...(19): siRNA sense strand
gucaaguccauucaauuua

SEQ ID NO: 1040802 - RNA, 19 nt, Homo sapiens
  misc_RNA (1)...(19): siRNA sense strand
guacaggacaucugcuuca

SEQ ID NO: 1040803 - RNA, 19 nt, Homo sapiens
  misc_RNA (1)...(19): siRNA sense strand
aaacaugaauccuauugcu

SEQ ID NO: 1040804 - RNA, 19 nt, Homo sapiens
  misc_RNA (1)...(19): siRNA sense strand
caaguggaaugcuucuagu

SEQ ID NO: 1040805 - RNA, 19 nt, Homo sapiens
  misc_RNA (1)...(19): siRNA sense strand
gagugaggauucugacagu

SEQ ID NO: 1040806 - RNA, 19 nt, Homo sapiens
  misc_RNA (1)...(19): siRNA sense strand
caucaagaaaucuggaauu

SEQ ID NO: 1040807 - RNA, 19 nt, Homo sapiens
  misc_RNA (1)...(19): siRNA sense strand
ccacuucccugcccaugag

SEQ ID NO: 1040808 - RNA, 19 nt, Homo sapiens
  misc_RNA (1)...(19): siRNA sense strand
gagugaaccgccuuuguug

SEQ ID NO: 1040809 - RNA, 19 nt, Homo sapiens
  misc_RNA (1)...(19): siRNA sense strand
gggccaaacaugaauccua

SEQ ID NO: 1040810 - RNA, 19 nt, Homo sapiens
  misc_RNA (1)...(19): siRNA sense strand
aaaccacaguuaucucauc

SEQ ID NO: 1040811 - RNA, 19 nt, Homo sapiens
  misc_RNA (1)...(19): siRNA sense strand
cagcuggacucugguuaga

SEQ ID NO: 1040812 - RNA, 19 nt, Homo sapiens
  misc_RNA (1)...(19): siRNA sense strand
gaucaguccaaacaaguug

SEQ ID NO: 1040813 - RNA, 19 nt, Homo sapiens
  misc_RNA (1)...(19): siRNA sense strand
ccucggcucucuccucuuc

SEQ ID NO: 1040814 - RNA, 19 nt, Homo sapiens
  misc_RNA (1)...(19): siRNA sense strand
gugcuggacuggaagagau

SEQ ID NO: 1040815 - RNA, 19 nt, Homo sapiens
  misc_RNA (1)...(19): siRNA sense strand
uagggaaaguggugacuca

SEQ ID NO: 1040816 - RNA, 19 nt, Homo sapiens
  misc_RNA (1)...(19): siRNA sense strand
uugagucccuguacauuau

SEQ ID NO: 1040817 - RNA, 19 nt, Homo sapiens
  misc_RNA (1)...(19): siRNA sense strand
ccaaaccacaguuaucuca

SEQ ID NO: 1040818 - RNA, 19 nt, Homo sapiens
  misc_RNA (1)...(19): siRNA sense strand
caaagcaguccuacaugga

SEQ ID NO: 1040819 - RNA, 19 nt, Homo sapiens
  misc_RNA (1)...(19): siRNA sense strand
gauuaugauuggcuacagu

SEQ ID NO: 1040820 - RNA, 19 nt, Homo sapiens
  misc_RNA (1)...(19): siRNA sense strand
aaaccuccuccacaaauuu

SEQ ID NO: 1040821 - RNA, 19 nt, Homo sapiens
  misc_RNA (1)...(19): siRNA sense strand
agacaccuauuuaugaucu

SEQ ID NO: 1040822 - RNA, 19 nt, Homo sapiens
  misc_RNA (1)...(19): siRNA sense strand
gaucuccauugcaauaaac

SEQ ID NO: 1040823 - RNA, 19 nt, Homo sapiens
  misc_RNA (1)...(19): siRNA sense strand
guaguugagucccuguaca

SEQ ID NO: 1040824 - RNA, 19 nt, Homo sapiens
  misc_RNA (1)...(19): siRNA sense strand
aaauaaugcaggucugaaa

SEQ ID NO: 1040825 - RNA, 19 nt, Homo sapiens
  misc_RNA (1)...(19): siRNA sense strand
caccaucuguauacucuuc

SEQ ID NO: 1040826 - RNA, 19 nt, Homo sapiens
  misc_RNA (1)...(19): siRNA sense strand
ugacuuucaugucuuccaa

SEQ ID NO: 1040827 - RNA, 19 nt, Homo sapiens
  misc_RNA (1)...(19): siRNA sense strand
aaaguggccugacaauggu

SEQ ID NO: 1040828 - RNA, 19 nt, Homo sapiens
  misc_RNA (1)...(19): siRNA sense strand
ugaucuccauugcaauaaa

SEQ ID NO: 1040829 - RNA, 19 nt, Homo sapiens
  misc_RNA (1)...(19): siRNA sense strand
gacaggaagaugaagaaug

SEQ ID NO: 1040830 - RNA, 19 nt, Homo sapiens
  misc_RNA (1)...(19): siRNA sense strand
gcuggacucugguuagaac

SEQ ID NO: 1040831 - RNA, 19 nt, Homo sapiens
  misc_RNA (1)...(19): siRNA sense strand
cgacacaccacuggaaaug

SEQ ID NO: 1040832 - RNA, 19 nt, Homo sapiens
  misc_RNA (1)...(19): siRNA sense strand
gccaagacuccuauaacaa

SEQ ID NO: 1040833 - RNA, 19 nt, Homo sapiens
  misc_RNA (1)...(19): siRNA sense strand
agaagacccagucguugua

SEQ ID NO: 1040834 - RNA, 19 nt, Homo sapiens
  misc_RNA (1)...(19): siRNA sense strand
gcaugagccguuuccagaa

SEQ ID NO: 1040835 - RNA, 19 nt, Homo sapiens
  misc_RNA (1)...(19): siRNA sense strand
agccaagacuccuauaaca

SEQ ID NO: 1040836 - RNA, 19 nt, Homo sapiens
  misc_RNA (1)...(19): siRNA sense strand
gcccauugcuaucuuauua

SEQ ID NO: 1040837 - RNA, 19 nt, Homo sapiens
  misc_RNA (1)...(19): siRNA sense strand
gaucguaucuggcuguauu

SEQ ID NO: 1040838 - RNA, 19 nt, Homo sapiens
  misc_RNA (1)...(19): siRNA sense strand
ggucacggcucaacauauu

SEQ ID NO: 1040839 - RNA, 19 nt, Homo sapiens
  misc_RNA (1)...(19): siRNA sense strand
cgucucagcugccuaauau

SEQ ID NO: 1040840 - RNA, 19 nt, Homo sapiens
  misc_RNA (1)...(19): siRNA sense strand
ccuaauaucugcguagaaa

SEQ ID NO: 1040841 - RNA, 19 nt, Homo sapiens
  misc_RNA (1)...(19): siRNA sense strand
caacauauuucuggcauuc

SEQ ID NO: 1040842 - RNA, 19 nt, Homo sapiens
  misc_RNA (1)...(19): siRNA sense strand
gaaccacaccaauaucuug

SEQ ID NO: 1040843 - RNA, 19 nt, Homo sapiens
  misc_RNA (1)...(19): siRNA sense strand
gaguugggccgaugugaua

SEQ ID NO: 1040844 - RNA, 19 nt, Homo sapiens
  misc_RNA (1)...(19): siRNA sense strand
ccagacaucucucaauugg

SEQ ID NO: 1040845 - RNA, 19 nt, Homo sapiens
  misc_RNA (1)...(19): siRNA sense strand
agucauagcugcucuccaa

SEQ ID NO: 1040846 - RNA, 19 nt, Homo sapiens
  misc_RNA (1)...(19): siRNA sense strand
gaaucaaaguuccagacau

SEQ ID NO: 1040847 - RNA, 19 nt, Homo sapiens
  misc_RNA (1)...(19): siRNA sense strand
acgcugaucuggugaguug

SEQ ID NO: 1040848 - RNA, 19 nt, Homo sapiens
  misc_RNA (1)...(19): siRNA sense strand
aaucaaaguuccagacauc

SEQ ID NO: 1040849 - RNA, 19 nt, Homo sapiens
  misc_RNA (1)...(19): siRNA sense strand
caagcuaccugucccuaca

SEQ ID NO: 1040850 - RNA, 19 nt, Homo sapiens
  misc_RNA (1)...(19): siRNA sense strand
gcugaaagccugcggaucu

SEQ ID NO: 1040851 - RNA, 19 nt, Homo sapiens
  misc_RNA (1)...(19): siRNA sense strand
gagaaggccagcauugugu

SEQ ID NO: 1040852 - RNA, 19 nt, Homo sapiens
  misc_RNA (1)...(19): siRNA sense strand
ucuccaagauccuacgauu

SEQ ID NO: 1040853 - RNA, 19 nt, Homo sapiens
  misc_RNA (1)...(19): siRNA sense strand
gagagcaucauuaaauaag

SEQ ID NO: 1040854 - RNA, 19 nt, Homo sapiens
  misc_RNA (1)...(19): siRNA sense strand
guaucuggcuguauuugca

SEQ ID NO: 1040855 - RNA, 19 nt, Homo sapiens
  misc_RNA (1)...(19): siRNA sense strand
cauagcugcucuccaagau

SEQ ID NO: 1040856 - RNA, 19 nt, Homo sapiens
  misc_RNA (1)...(19): siRNA sense strand
uuccagacaucucucaauu

SEQ ID NO: 1040857 - RNA, 19 nt, Homo sapiens
  misc_RNA (1)...(19): siRNA sense strand
ggcugaaacuacuguugaa

SEQ ID NO: 1040858 - RNA, 19 nt, Homo sapiens
  misc_RNA (1)...(19): siRNA sense strand
uugagucccugcaguuuga

SEQ ID NO: 1040859 - RNA, 19 nt, Homo sapiens
  misc_RNA (1)...(19): siRNA sense strand
cuucuucugcaaacuauua

SEQ ID NO: 1040860 - RNA, 19 nt, Homo sapiens
  misc_RNA (1)...(19): siRNA sense strand
ugaaacuacuguugaacca

SEQ ID NO: 1040861 - RNA, 19 nt, Homo sapiens
  misc_RNA (1)...(19): siRNA sense strand
ucaguaugaugaagauucu

SEQ ID NO: 1040862 - RNA, 19 nt, Homo sapiens
  misc_RNA (1)...(19): siRNA sense strand
gcaaccuucuucugcaaac

SEQ ID NO: 1040863 - RNA, 19 nt, Homo sapiens
  misc_RNA (1)...(19): siRNA sense strand
acauauuucuggcauucuu

SEQ ID NO: 1040864 - RNA, 19 nt, Homo sapiens
  misc_RNA (1)...(19): siRNA sense strand
ugagaaggccagcauugug

SEQ ID NO: 1040865 - RNA, 19 nt, Homo sapiens
  misc_RNA (1)...(19): siRNA sense strand
ggccucaguaucaguauga

SEQ ID NO: 1040866 - RNA, 19 nt, Homo sapiens
  misc_RNA (1)...(19): siRNA sense strand
ggccaauaagggagucaua

SEQ ID NO: 1040867 - RNA, 19 nt, Homo sapiens
  misc_RNA (1)...(19): siRNA sense strand
gcugggaaucaaaugcuuu

SEQ ID NO: 1040868 - RNA, 19 nt, Homo sapiens
  misc_RNA (1)...(19): siRNA sense strand
ucaacauauuucuggcauu

SEQ ID NO: 1040869 - RNA, 19 nt, Homo sapiens
  misc_RNA (1)...(19): siRNA sense strand
caaaguuccagacaucucu

SEQ ID NO: 1040870 - RNA, 19 nt, Homo sapiens
  misc_RNA (1)...(19): siRNA sense strand
gauccuacgauucuucaag

SEQ ID NO: 1040871 - RNA, 19 nt, Homo sapiens
  misc_RNA (1)...(19): siRNA sense strand
cagaagcugggaaucaaau

SEQ ID NO: 1040872 - RNA, 19 nt, Homo sapiens
  misc_RNA (1)...(19): siRNA sense strand
cagcauuguguacagcuuu

SEQ ID NO: 1040873 - RNA, 19 nt, Homo sapiens
  misc_RNA (1)...(19): siRNA sense strand
ccuguuggcccauugcuau

SEQ ID NO: 1040874 - RNA, 19 nt, Homo sapiens
  misc_RNA (1)...(19): siRNA sense strand
ucacggcucaacauauuuc

SEQ ID NO: 1040875 - RNA, 19 nt, Homo sapiens
  misc_RNA (1)...(19): siRNA sense strand
ggacaugcuccaggaccuu

SEQ ID NO: 1040876 - RNA, 19 nt, Homo sapiens
  misc_RNA (1)...(19): siRNA sense strand
uaaggugggcaucauugga

SEQ ID NO: 1040877 - RNA, 19 nt, Homo sapiens
  misc_RNA (1)...(19): siRNA sense strand
gaagcugggaaucaaaugc

SEQ ID NO: 1040878 - RNA, 19 nt, Homo sapiens
  misc_RNA (1)...(19): siRNA sense strand
cuguugaaccacaccaaua

SEQ ID NO: 1040879 - RNA, 19 nt, Homo sapiens
  misc_RNA (1)...(19): siRNA sense strand
uccaagauccuacgauucu

SEQ ID NO: 1040880 - RNA, 19 nt, Homo sapiens
  misc_RNA (1)...(19): siRNA sense strand
ucauagcugcucuccaaga

SEQ ID NO: 1040881 - RNA, 19 nt, Homo sapiens
  misc_RNA (1)...(19): siRNA sense strand
uguugaaccacaccaauau

SEQ ID NO: 1040882 - RNA, 19 nt, Homo sapiens
  misc_RNA (1)...(19): siRNA sense strand
uaacgcugaucuggugagu

SEQ ID NO: 1040883 - RNA, 19 nt, Homo sapiens
  misc_RNA (1)...(19): siRNA sense strand
cauauuucuggcauucuuu

SEQ ID NO: 1040884 - RNA, 19 nt, Homo sapiens
  misc_RNA (1)...(19): siRNA sense strand
aggcugaaacuacuguuga

SEQ ID NO: 1040885 - RNA, 19 nt, Homo sapiens
  misc_RNA (1)...(19): siRNA sense strand
agaaggccagcauugugua

SEQ ID NO: 1040886 - RNA, 19 nt, Homo sapiens
  misc_RNA (1)...(19): siRNA sense strand
ugauauuccucugcugcuu

SEQ ID NO: 1040887 - RNA, 19 nt, Homo sapiens
  misc_RNA (1)...(19): siRNA sense strand
agaaggagcugauugagaa

SEQ ID NO: 1040888 - RNA, 19 nt, Homo sapiens
  misc_RNA (1)...(19): siRNA sense strand
gaacgagcuccacaaccua

SEQ ID NO: 1040889 - RNA, 19 nt, Homo sapiens
  misc_RNA (1)...(19): siRNA sense strand
ucaaggcccuauucuggaa

SEQ ID NO: 1040890 - RNA, 19 nt, Homo sapiens
  misc_RNA (1)...(19): siRNA sense strand
gagaaggagcugauugaga

SEQ ID NO: 1040891 - RNA, 19 nt, Homo sapiens
  misc_RNA (1)...(19): siRNA sense strand
ccaaagggaaugugacuau

SEQ ID NO: 1040892 - RNA, 19 nt, Homo sapiens
  misc_RNA (1)...(19): siRNA sense strand
cgagagaucugcugcuacu

SEQ ID NO: 1040893 - RNA, 19 nt, Homo sapiens
  misc_RNA (1)...(19): siRNA sense strand
uacaguggcuuauucaaca

SEQ ID NO: 1040894 - RNA, 19 nt, Homo sapiens
  misc_RNA (1)...(19): siRNA sense strand
caccguggguuucaacaug

SEQ ID NO: 1040895 - RNA, 19 nt, Homo sapiens
  misc_RNA (1)...(19): siRNA sense strand
gaugagaaggagcugauug

SEQ ID NO: 1040896 - RNA, 19 nt, Homo sapiens
  misc_RNA (1)...(19): siRNA sense strand
caaagggaaugugacuauc

SEQ ID NO: 1040897 - RNA, 19 nt, Homo sapiens
  misc_RNA (1)...(19): siRNA sense strand
gagcauuggaugagaagga

SEQ ID NO: 1040898 - RNA, 19 nt, Homo sapiens
  misc_RNA (1)...(19): siRNA sense strand
acaagcugcuggacugguu

SEQ ID NO: 1040899 - RNA, 19 nt, Homo sapiens
  misc_RNA (1)...(19): siRNA sense strand
gcuacuccaucucuugcaa

SEQ ID NO: 1040900 - RNA, 19 nt, Homo sapiens
  misc_RNA (1)...(19): siRNA sense strand
gcaagaccaccuucgucaa

SEQ ID NO: 1040901 - RNA, 19 nt, Homo sapiens
  misc_RNA (1)...(19): siRNA sense strand
gcagggcaucccggucuua

SEQ ID NO: 1040902 - RNA, 19 nt, Homo sapiens
  misc_RNA (1)...(19): siRNA sense strand
agauugaggccucuaagaa

SEQ ID NO: 1040903 - RNA, 19 nt, Homo sapiens
  misc_RNA (1)...(19): siRNA sense strand
gaaggagcugauugagaaa

SEQ ID NO: 1040904 - RNA, 19 nt, Homo sapiens
  misc_RNA (1)...(19): siRNA sense strand
aagggaaugugacuaucaa

SEQ ID NO: 1040905 - RNA, 19 nt, Homo sapiens
  misc_RNA (1)...(19): siRNA sense strand
agaacgagcuccacaaccu

SEQ ID NO: 1040906 - RNA, 19 nt, Homo sapiens
  misc_RNA (1)...(19): siRNA sense strand
ggaaugugacuaucaagcu

SEQ ID NO: 1040907 - RNA, 19 nt, Homo sapiens
  misc_RNA (1)...(19): siRNA sense strand
gaagauugaggccucuaag

SEQ ID NO: 1040908 - RNA, 19 nt, Homo sapiens
  misc_RNA (1)...(19): siRNA sense strand
caaagaaaaggacaacauu

SEQ ID NO: 1040909 - RNA, 19 nt, Homo sapiens
  misc_RNA (1)...(19): siRNA sense strand
gggcaucccggucuuaguc

SEQ ID NO: 1040910 - RNA, 19 nt, Homo sapiens
  misc_RNA (1)...(19): siRNA sense strand
gaucgcgucaggacaguuc

SEQ ID NO: 1040911 - RNA, 19 nt, Homo sapiens
  misc_RNA (1)...(19): siRNA sense strand
gaaaaggacaacauugaca

SEQ ID NO: 1040912 - RNA, 19 nt, Homo sapiens
  misc_RNA (1)...(19): siRNA sense strand
aaagggaaugugacuauca

SEQ ID NO: 1040913 - RNA, 19 nt, Homo sapiens
  misc_RNA (1)...(19): siRNA sense strand
gauugaggccucuaagaac

SEQ ID NO: 1040914 - RNA, 19 nt, Homo sapiens
  misc_RNA (1)...(19): siRNA sense strand
cgggagcauuggaugagaa

SEQ ID NO: 1040915 - RNA, 19 nt, Homo sapiens
  misc_RNA (1)...(19): siRNA sense strand
caagaccaccuucgucaac

SEQ ID NO: 1040916 - RNA, 19 nt, Homo sapiens
  misc_RNA (1)...(19): siRNA sense strand
gcaaagaaaaggacaacau

SEQ ID NO: 1040917 - RNA, 19 nt, Homo sapiens
  misc_RNA (1)...(19): siRNA sense strand
guucaacgaggacaugauc

SEQ ID NO: 1040918 - RNA, 19 nt, Homo sapiens
  misc_RNA (1)...(19): siRNA sense strand
acauugacaucacccuaca

SEQ ID NO: 1040919 - RNA, 19 nt, Homo sapiens
  misc_RNA (1)...(19): siRNA sense strand
gagugagcgccaucgugua

SEQ ID NO: 1040920 - RNA, 19 nt, Homo sapiens
  misc_RNA (1)...(19): siRNA sense strand
uaagaacgagcuccacaac

SEQ ID NO: 1040921 - RNA, 19 nt, Homo sapiens
  misc_RNA (1)...(19): siRNA sense strand
cuaagaacgagcuccacaa

SEQ ID NO: 1040922 - RNA, 19 nt, Homo sapiens
  misc_RNA (1)...(19): siRNA sense strand
acccuacaguggcuuauuc

SEQ ID NO: 1040923 - RNA, 19 nt, Homo sapiens
  misc_RNA (1)...(19): siRNA sense strand
gcugcuacuccaucucuug

SEQ ID NO: 1040924 - RNA, 19 nt, Homo sapiens
  misc_RNA (1)...(19): siRNA sense strand
accgagagaucugcugcua

SEQ ID NO: 1040925 - RNA, 19 nt, Homo sapiens
  misc_RNA (1)...(19): siRNA sense strand
caaaaucaccaaagggaau

SEQ ID NO: 1040926 - RNA, 19 nt, Homo sapiens
  misc_RNA (1)...(19): siRNA sense strand
cgucaggacaguucaacga

SEQ ID NO: 1040927 - RNA, 19 nt, Homo sapiens
  misc_RNA (1)...(19): siRNA sense strand
ccacaaccuacuggacaaa

SEQ ID NO: 1040928 - RNA, 19 nt, Homo sapiens
  misc_RNA (1)...(19): siRNA sense strand
agaagauugaggccucuaa

SEQ ID NO: 1040929 - RNA, 19 nt, Homo sapiens
  misc_RNA (1)...(19): siRNA sense strand
gaaagaacuugaugaauuc

SEQ ID NO: 1040930 - RNA, 19 nt, Homo sapiens
  misc_RNA (1)...(19): siRNA sense strand
gaucagcaauuuagaagua

SEQ ID NO: 1040931 - RNA, 19 nt, Homo sapiens
  misc_RNA (1)...(19): siRNA sense strand
gcaaugggaucagcaauuu

SEQ ID NO: 1040932 - RNA, 19 nt, Homo sapiens
  misc_RNA (1)...(19): siRNA sense strand
gagagagacuuaaucaaga

SEQ ID NO: 1040933 - RNA, 19 nt, Homo sapiens
  misc_RNA (1)...(19): siRNA sense strand
uagcagagcugaagacgaa

SEQ ID NO: 1040934 - RNA, 19 nt, Homo sapiens
  misc_RNA (1)...(19): siRNA sense strand
gaaaagagcuccuggaagu

SEQ ID NO: 1040935 - RNA, 19 nt, Homo sapiens
  misc_RNA (1)...(19): siRNA sense strand
gauaaaagcuugucagaug

SEQ ID NO: 1040936 - RNA, 19 nt, Homo sapiens
  misc_RNA (1)...(19): siRNA sense strand
gggcacaucuagaaugauu

SEQ ID NO: 1040937 - RNA, 19 nt, Homo sapiens
  misc_RNA (1)...(19): siRNA sense strand
gaggaagucucgaguggaa

SEQ ID NO: 1040938 - RNA, 19 nt, Homo sapiens
  misc_RNA (1)...(19): siRNA sense strand
gaugaauucucuugaacaa

SEQ ID NO: 1040939 - RNA, 19 nt, Homo sapiens
  misc_RNA (1)...(19): siRNA sense strand
caauaaggcucuucaggau

SEQ ID NO: 1040940 - RNA, 19 nt, Homo sapiens
  misc_RNA (1)...(19): siRNA sense strand
guacagggcacaucuagaa

SEQ ID NO: 1040941 - RNA, 19 nt, Homo sapiens
  misc_RNA (1)...(19): siRNA sense strand
gaaauaaaacgccucaaua

SEQ ID NO: 1040942 - RNA, 19 nt, Homo sapiens
  misc_RNA (1)...(19): siRNA sense strand
caggaugccuugaauauca

SEQ ID NO: 1040943 - RNA, 19 nt, Homo sapiens
  misc_RNA (1)...(19): siRNA sense strand
gaggagcuacagcaaauua

SEQ ID NO: 1040944 - RNA, 19 nt, Homo sapiens
  misc_RNA (1)...(19): siRNA sense strand
acgccuaaaugaagaauua

SEQ ID NO: 1040945 - RNA, 19 nt, Homo sapiens
  misc_RNA (1)...(19): siRNA sense strand
gcugaaccaucaacaagaa

SEQ ID NO: 1040946 - RNA, 19 nt, Homo sapiens
  misc_RNA (1)...(19): siRNA sense strand
aagauaagguguuuggaaa

SEQ ID NO: 1040947 - RNA, 19 nt, Homo sapiens
  misc_RNA (1)...(19): siRNA sense strand
gaugagaacagaaauggaa

SEQ ID NO: 1040948 - RNA, 19 nt, Homo sapiens
  misc_RNA (1)...(19): siRNA sense strand
gcaaauauacgaagaagac

SEQ ID NO: 1040949 - RNA, 19 nt, Homo sapiens
  misc_RNA (1)...(19): siRNA sense strand
aaagagcuccuggaaguua

SEQ ID NO: 1040950 - RNA, 19 nt, Homo sapiens
  misc_RNA (1)...(19): siRNA sense strand
acacaaggcaaaugguuua

SEQ ID NO: 1040951 - RNA, 19 nt, Homo sapiens
  misc_RNA (1)...(19): siRNA sense strand
gagacuuaaucaagagaaa

SEQ ID NO: 1040952 - RNA, 19 nt, Homo sapiens
  misc_RNA (1)...(19): siRNA sense strand
gaaagaggagcuacagcaa

SEQ ID NO: 1040953 - RNA, 19 nt, Homo sapiens
  misc_RNA (1)...(19): siRNA sense strand
gaggagaugagaacagaaa

SEQ ID NO: 1040954 - RNA, 19 nt, Homo sapiens
  misc_RNA (1)...(19): siRNA sense strand
cagggcacaucuagaauga

SEQ ID NO: 1040955 - RNA, 19 nt, Homo sapiens
  misc_RNA (1)...(19): siRNA sense strand
aagaggagcuacagcaaau

SEQ ID NO: 1040956 - RNA, 19 nt, Homo sapiens
  misc_RNA (1)...(19): siRNA sense strand
ggaagucucgaguggaauu

SEQ ID NO: 1040957 - RNA, 19 nt, Homo sapiens
  misc_RNA (1)...(19): siRNA sense strand
gcauaaagagugugcugaa

SEQ ID NO: 1040958 - RNA, 19 nt, Homo sapiens
  misc_RNA (1)...(19): siRNA sense strand
cgagagagacuuaaucaag

SEQ ID NO: 1040959 - RNA, 19 nt, Homo sapiens
  misc_RNA (1)...(19): siRNA sense strand
caacacaaggcaaaugguu

SEQ ID NO: 1040960 - RNA, 19 nt, Homo sapiens
  misc_RNA (1)...(19): siRNA sense strand
gaaaaggaacgccuaaaug

SEQ ID NO: 1040961 - RNA, 19 nt, Homo sapiens
  misc_RNA (1)...(19): siRNA sense strand
uaaugaaacuucccaaucc

SEQ ID NO: 1040962 - RNA, 19 nt, Homo sapiens
  misc_RNA (1)...(19): siRNA sense strand
caggcugaauucccagaua

SEQ ID NO: 1040963 - RNA, 19 nt, Homo sapiens
  misc_RNA (1)...(19): siRNA sense strand
uaaagagugugcugaacca

SEQ ID NO: 1040964 - RNA, 19 nt, Homo sapiens
  misc_RNA (1)...(19): siRNA sense strand
aaagauaagguguuuggaa

SEQ ID NO: 1040965 - RNA, 19 nt, Homo sapiens
  misc_RNA (1)...(19): siRNA sense strand
caagauccauggguaccaa

SEQ ID NO: 1040966 - RNA, 19 nt, Homo sapiens
  misc_RNA (1)...(19): siRNA sense strand
gagcuacagcaaauuaaug

SEQ ID NO: 1040967 - RNA, 19 nt, Homo sapiens
  misc_RNA (1)...(19): siRNA sense strand
aaaguucuacggagcauaa

SEQ ID NO: 1040968 - RNA, 19 nt, Homo sapiens
  misc_RNA (1)...(19): siRNA sense strand
gaagcagcaggugcaaaua

SEQ ID NO: 1040969 - RNA, 19 nt, Homo sapiens
  misc_RNA (1)...(19): siRNA sense strand
aggcugaauucccagauaa

SEQ ID NO: 1040970 - RNA, 19 nt, Homo sapiens
  misc_RNA (1)...(19): siRNA sense strand
agcagcaggugcaaauaua

SEQ ID NO: 1040971 - RNA, 19 nt, Homo sapiens
  misc_RNA (1)...(19): siRNA sense strand
agagugugcugaaccauca

SEQ ID NO: 1040972 - RNA, 19 nt, Homo sapiens
  misc_RNA (1)...(19): siRNA sense strand
ggagaugagaacagaaaug

SEQ ID NO: 1040973 - RNA, 19 nt, Homo sapiens
  misc_RNA (1)...(19): siRNA sense strand
gaaccaucaacaagaaaga

SEQ ID NO: 1040974 - RNA, 19 nt, Homo sapiens
  misc_RNA (1)...(19): siRNA sense strand
uagaaugauugccgcagaa

SEQ ID NO: 1040975 - RNA, 19 nt, Homo sapiens
  misc_RNA (1)...(19): siRNA sense strand
aaaauacucuugcgaacaa

SEQ ID NO: 1040976 - RNA, 19 nt, Homo sapiens
  misc_RNA (1)...(19): siRNA sense strand
caaaugguuuauccucagu

SEQ ID NO: 1040977 - RNA, 19 nt, Homo sapiens
  misc_RNA (1)...(19): siRNA sense strand
aaauggaaguucugaagca

SEQ ID NO: 1040978 - RNA, 19 nt, Homo sapiens
  misc_RNA (1)...(19): siRNA sense strand
aaaggaacgccuaaaugaa

SEQ ID NO: 1040979 - RNA, 19 nt, Homo sapiens
  misc_RNA (1)...(19): siRNA sense strand
caaggcaaaugguuuaucc

SEQ ID NO: 1040980 - RNA, 19 nt, Homo sapiens
  misc_RNA (1)...(19): siRNA sense strand
gagaaggauccgcaucaga

SEQ ID NO: 1040981 - RNA, 19 nt, Homo sapiens
  misc_RNA (1)...(19): siRNA sense strand
gaguggaauucugccauga

SEQ ID NO: 1040982 - RNA, 19 nt, Homo sapiens
  misc_RNA (1)...(19): siRNA sense strand
cuugucagauggagaaaga

SEQ ID NO: 1040983 - RNA, 19 nt, Homo sapiens
  misc_RNA (1)...(19): siRNA sense strand
gagaacagaaauggaaguu

SEQ ID NO: 1040984 - RNA, 19 nt, Homo sapiens
  misc_RNA (1)...(19): siRNA sense strand
gagaugagaacagaaaugg

SEQ ID NO: 1040985 - RNA, 19 nt, Homo sapiens
  misc_RNA (1)...(19): siRNA sense strand
caaugggaucagcaauuua

SEQ ID NO: 1040986 - RNA, 19 nt, Homo sapiens
  misc_RNA (1)...(19): siRNA sense strand
ggagcuacagcaaauuaau

SEQ ID NO: 1040987 - RNA, 19 nt, Homo sapiens
  misc_RNA (1)...(19): siRNA sense strand
ugaagcagcaggugcaaau

SEQ ID NO: 1040988 - RNA, 19 nt, Homo sapiens
  misc_RNA (1)...(19): siRNA sense strand
ggaaaaggaacauuacgaa

SEQ ID NO: 1040989 - RNA, 19 nt, Homo sapiens
  misc_RNA (1)...(19): siRNA sense strand
gggagaaggauccgcauca

SEQ ID NO: 1040990 - RNA, 19 nt, Homo sapiens
  misc_RNA (1)...(19): siRNA sense strand
ggagaaggauccgcaucag

SEQ ID NO: 1040991 - RNA, 19 nt, Homo sapiens
  misc_RNA (1)...(19): siRNA sense strand
aaugguuuauccucaguaa

SEQ ID NO: 1040992 - RNA, 19 nt, Homo sapiens
  misc_RNA (1)...(19): siRNA sense strand
guacaacacaaggcaaaug

SEQ ID NO: 1040993 - RNA, 19 nt, Homo sapiens
  misc_RNA (1)...(19): siRNA sense strand
aaagaggagcuacagcaaa

SEQ ID NO: 1040994 - RNA, 19 nt, Homo sapiens
  misc_RNA (1)...(19): siRNA sense strand
cuugaugaauucucuugaa

SEQ ID NO: 1040995 - RNA, 19 nt, Homo sapiens
  misc_RNA (1)...(19): siRNA sense strand
ggaaaaggaacgccuaaau

SEQ ID NO: 1040996 - RNA, 19 nt, Homo sapiens
  misc_RNA (1)...(19): siRNA sense strand
gaucgagagagacuuaauc

SEQ ID NO: 1040997 - RNA, 19 nt, Homo sapiens
  misc_RNA (1)...(19): siRNA sense strand
aaaaggaacgccuaaauga

SEQ ID NO: 1040998 - RNA, 19 nt, Homo sapiens
  misc_RNA (1)...(19): siRNA sense strand
guucuacggagcauaaaga

SEQ ID NO: 1040999 - RNA, 19 nt, Homo sapiens
  misc_RNA (1)...(19): siRNA sense strand
gaaagguagcagagcugaa

SEQ ID NO: 1041000 - RNA, 19 nt, Homo sapiens
  misc_RNA (1)...(19): siRNA sense strand
gacuuaaucaagagaaaga

SEQ ID NO: 1041001 - RNA, 19 nt, Homo sapiens
  misc_RNA (1)...(19): siRNA sense strand
gugcaaauauacgaagaag

SEQ ID NO: 1041002 - RNA, 19 nt, Homo sapiens
  misc_RNA (1)...(19): siRNA sense strand
aagagcuccuggaaguuaa

SEQ ID NO: 1041003 - RNA, 19 nt, Homo sapiens
  misc_RNA (1)...(19): siRNA sense strand
caucagaggcagagaaagg

SEQ ID NO: 1041004 - RNA, 19 nt, Homo sapiens
  misc_RNA (1)...(19): siRNA sense strand
uuaaugaaacuucccaauc

SEQ ID NO: 1041005 - RNA, 19 nt, Homo sapiens
  misc_RNA (1)...(19): siRNA sense strand
agagagacuuaaucaagag

SEQ ID NO: 1041006 - RNA, 19 nt, Homo sapiens
  misc_RNA (1)...(19): siRNA sense strand
gaaaguucuacggagcaua

SEQ ID NO: 1041007 - RNA, 19 nt, Homo sapiens
  misc_RNA (1)...(19): siRNA sense strand
cgccagauguacaacacaa

SEQ ID NO: 1041008 - RNA, 19 nt, Homo sapiens
  misc_RNA (1)...(19): siRNA sense strand
caguugaacaggcugaauu

SEQ ID NO: 1041009 - RNA, 19 nt, Homo sapiens
  misc_RNA (1)...(19): siRNA sense strand
gaggacuguuugaggaagu

SEQ ID NO: 1041010 - RNA, 19 nt, Homo sapiens
  misc_RNA (1)...(19): siRNA sense strand
gcaggugcaaauauacgaa

SEQ ID NO: 1041011 - RNA, 19 nt, Homo sapiens
  misc_RNA (1)...(19): siRNA sense strand
aggaacgccuaaaugaaga

SEQ ID NO: 1041012 - RNA, 19 nt, Homo sapiens
  misc_RNA (1)...(19): siRNA sense strand
gcacaucuagaaugauugc

SEQ ID NO: 1041013 - RNA, 19 nt, Homo sapiens
  misc_RNA (1)...(19): siRNA sense strand
gggaucagcaauuuagaag

SEQ ID NO: 1041014 - RNA, 19 nt, Homo sapiens
  misc_RNA (1)...(19): siRNA sense strand
acaaggaaaaggaacauua

SEQ ID NO: 1041015 - RNA, 19 nt, Homo sapiens
  misc_RNA (1)...(19): siRNA sense strand
gaacuugaugaauucucuu

SEQ ID NO: 1041016 - RNA, 19 nt, Homo sapiens
  misc_RNA (1)...(19): siRNA sense strand
cagcaauuuagaaguauga

SEQ ID NO: 1041017 - RNA, 19 nt, Homo sapiens
  misc_RNA (1)...(19): siRNA sense strand
aaggaacgccuaaaugaag

SEQ ID NO: 1041018 - RNA, 19 nt, Homo sapiens
  misc_RNA (1)...(19): siRNA sense strand
uguauugcccacccuguaa

SEQ ID NO: 1041019 - RNA, 19 nt, Homo sapiens
  misc_RNA (1)...(19): siRNA sense strand
ucggaucgagagagacuua

SEQ ID NO: 1041020 - RNA, 19 nt, Homo sapiens
  misc_RNA (1)...(19): siRNA sense strand
gaaaaggaacauuacgaau

SEQ ID NO: 1041021 - RNA, 19 nt, Homo sapiens
  misc_RNA (1)...(19): siRNA sense strand
aagcagcaggugcaaauau

SEQ ID NO: 1041022 - RNA, 19 nt, Homo sapiens
  misc_RNA (1)...(19): siRNA sense strand
cauaaagagugugcugaac

SEQ ID NO: 1041023 - RNA, 19 nt, Homo sapiens
  misc_RNA (1)...(19): siRNA sense strand
ugucagauggagaaagaaa

SEQ ID NO: 1041024 - RNA, 19 nt, Homo sapiens
  misc_RNA (1)...(19): siRNA sense strand
caucaacaagaaagaacuu

SEQ ID NO: 1041025 - RNA, 19 nt, Homo sapiens
  misc_RNA (1)...(19): siRNA sense strand
ggaacgccuaaaugaagaa

SEQ ID NO: 1041026 - RNA, 19 nt, Homo sapiens
  misc_RNA (1)...(19): siRNA sense strand
uauccucaguaaagaaagu

SEQ ID NO: 1041027 - RNA, 19 nt, Homo sapiens
  misc_RNA (1)...(19): siRNA sense strand
ggagcacccaccagacugu

SEQ ID NO: 1041028 - RNA, 19 nt, Homo sapiens
  misc_RNA (1)...(19): siRNA sense strand
ucagcaauuuagaaguaug

SEQ ID NO: 1041029 - RNA, 19 nt, Homo sapiens
  misc_RNA (1)...(19): siRNA sense strand
gcacagaaaugauuaagaa

SEQ ID NO: 1041030 - RNA, 19 nt, Homo sapiens
  misc_RNA (1)...(19): siRNA sense strand
ggaagaagaugaugauuga

SEQ ID NO: 1041031 - RNA, 19 nt, Homo sapiens
  misc_RNA (1)...(19): siRNA sense strand
gcagauagguguucaaaga

SEQ ID NO: 1041032 - RNA, 19 nt, Homo sapiens
  misc_RNA (1)...(19): siRNA sense strand
caaagaaacuuaccaguga

SEQ ID NO: 1041033 - RNA, 19 nt, Homo sapiens
  misc_RNA (1)...(19): siRNA sense strand
gcaaugaaguguuugaugu

SEQ ID NO: 1041034 - RNA, 19 nt, Homo sapiens
  misc_RNA (1)...(19): siRNA sense strand
gaagauaagcugcagaauu

SEQ ID NO: 1041035 - RNA, 19 nt, Homo sapiens
  misc_RNA (1)...(19): siRNA sense strand
ggaacaggaucauaaauca

SEQ ID NO: 1041036 - RNA, 19 nt, Homo sapiens
  misc_RNA (1)...(19): siRNA sense strand
gaucagcgaugaagaggaa

SEQ ID NO: 1041037 - RNA, 19 nt, Homo sapiens
  misc_RNA (1)...(19): siRNA sense strand
gaaagaagaagaacguuug

SEQ ID NO: 1041038 - RNA, 19 nt, Homo sapiens
  misc_RNA (1)...(19): siRNA sense strand
gcucaaagauuacucaaag

SEQ ID NO: 1041039 - RNA, 19 nt, Homo sapiens
  misc_RNA (1)...(19): siRNA sense strand
aagauaagcugcagaauuc

SEQ ID NO: 1041040 - RNA, 19 nt, Homo sapiens
  misc_RNA (1)...(19): siRNA sense strand
guagaaauacccaaaguaa

SEQ ID NO: 1041041 - RNA, 19 nt, Homo sapiens
  misc_RNA (1)...(19): siRNA sense strand
gaagaugaauuugaagaug

SEQ ID NO: 1041042 - RNA, 19 nt, Homo sapiens
  misc_RNA (1)...(19): siRNA sense strand
gauaaucacucugaaagau

SEQ ID NO: 1041043 - RNA, 19 nt, Homo sapiens
  misc_RNA (1)...(19): siRNA sense strand
ucaaagacacagaagauua

SEQ ID NO: 1041044 - RNA, 19 nt, Homo sapiens
  misc_RNA (1)...(19): siRNA sense strand
ggaagcaugucccugcauu

SEQ ID NO: 1041045 - RNA, 19 nt, Homo sapiens
  misc_RNA (1)...(19): siRNA sense strand
gaacacaggcauucagaug

SEQ ID NO: 1041046 - RNA, 19 nt, Homo sapiens
  misc_RNA (1)...(19): siRNA sense strand
gaagauaaagcucaaagau

SEQ ID NO: 1041047 - RNA, 19 nt, Homo sapiens
  misc_RNA (1)...(19): siRNA sense strand
ggccucagcuuuccgauga

SEQ ID NO: 1041048 - RNA, 19 nt, Homo sapiens
  misc_RNA (1)...(19): siRNA sense strand
ggaacgagccagaaucuau

SEQ ID NO: 1041049 - RNA, 19 nt, Homo sapiens
  misc_RNA (1)...(19): siRNA sense strand
ggaaacgacuuauauuuug

SEQ ID NO: 1041050 - RNA, 19 nt, Homo sapiens
  misc_RNA (1)...(19): siRNA sense strand
gcacaaggaucugaugaag

SEQ ID NO: 1041051 - RNA, 19 nt, Homo sapiens
  misc_RNA (1)...(19): siRNA sense strand
gaacgagccagaaucuauu

SEQ ID NO: 1041052 - RNA, 19 nt, Homo sapiens
  misc_RNA (1)...(19): siRNA sense strand
gacaauagaucagaagcuu

SEQ ID NO: 1041053 - RNA, 19 nt, Homo sapiens
  misc_RNA (1)...(19): siRNA sense strand
gagggagcuucacaucaua

SEQ ID NO: 1041054 - RNA, 19 nt, Homo sapiens
  misc_RNA (1)...(19): siRNA sense strand
gccgguagcuucugauaau

SEQ ID NO: 1041055 - RNA, 19 nt, Homo sapiens
  misc_RNA (1)...(19): siRNA sense strand
ugaaagaucagacaauaga

SEQ ID NO: 1041056 - RNA, 19 nt, Homo sapiens
  misc_RNA (1)...(19): siRNA sense strand
aaccacagcugucugauga

SEQ ID NO: 1041057 - RNA, 19 nt, Homo sapiens
  misc_RNA (1)...(19): siRNA sense strand
cgagggagcuucacaucau

SEQ ID NO: 1041058 - RNA, 19 nt, Homo sapiens
  misc_RNA (1)...(19): siRNA sense strand
caacgcacagaaaugauua

SEQ ID NO: 1041059 - RNA, 19 nt, Homo sapiens
  misc_RNA (1)...(19): siRNA sense strand
gcagugauagugaagauga

SEQ ID NO: 1041060 - RNA, 19 nt, Homo sapiens
  misc_RNA (1)...(19): siRNA sense strand
gcaaaauucugaugaugaa

SEQ ID NO: 1041061 - RNA, 19 nt, Homo sapiens
  misc_RNA (1)...(19): siRNA sense strand
gaagaggaacaggaucaua

SEQ ID NO: 1041062 - RNA, 19 nt, Homo sapiens
  misc_RNA (1)...(19): siRNA sense strand
aagaaaugcuggaugaaga

SEQ ID NO: 1041063 - RNA, 19 nt, Homo sapiens
  misc_RNA (1)...(19): siRNA sense strand
gcguaaagauucugauucu

SEQ ID NO: 1041064 - RNA, 19 nt, Homo sapiens
  misc_RNA (1)...(19): siRNA sense strand
ggacagugccacacauaga

SEQ ID NO: 1041065 - RNA, 19 nt, Homo sapiens
  misc_RNA (1)...(19): siRNA sense strand
gggacaagcagucuuuaaa

SEQ ID NO: 1041066 - RNA, 19 nt, Homo sapiens
  misc_RNA (1)...(19): siRNA sense strand
guggaaccauggauuuauu

SEQ ID NO: 1041067 - RNA, 19 nt, Homo sapiens
  misc_RNA (1)...(19): siRNA sense strand
ucaggacaaccaaguaaua

SEQ ID NO: 1041068 - RNA, 19 nt, Homo sapiens
  misc_RNA (1)...(19): siRNA sense strand
gaagcugagcguaaagauu

SEQ ID NO: 1041069 - RNA, 19 nt, Homo sapiens
  misc_RNA (1)...(19): siRNA sense strand
aaacgaaacucaccuucag

SEQ ID NO: 1041070 - RNA, 19 nt, Homo sapiens
  misc_RNA (1)...(19): siRNA sense strand
gaugagagacaacagcuau

SEQ ID NO: 1041071 - RNA, 19 nt, Homo sapiens
  misc_RNA (1)...(19): siRNA sense strand
cgaaugaaacgcaagaaug

SEQ ID NO: 1041072 - RNA, 19 nt, Homo sapiens
  misc_RNA (1)...(19): siRNA sense strand
gaugaagaaggaaaugaaa

SEQ ID NO: 1041073 - RNA, 19 nt, Homo sapiens
  misc_RNA (1)...(19): siRNA sense strand
gaagaaaugcuggaugaag

SEQ ID NO: 1041074 - RNA, 19 nt, Homo sapiens
  misc_RNA (1)...(19): siRNA sense strand
agcagaagaugaugauaaa

SEQ ID NO: 1041075 - RNA, 19 nt, Homo sapiens
  misc_RNA (1)...(19): siRNA sense strand
caaagacacagaagauuag

SEQ ID NO: 1041076 - RNA, 19 nt, Homo sapiens
  misc_RNA (1)...(19): siRNA sense strand
gaggauacgccgagaugaa

SEQ ID NO: 1041077 - RNA, 19 nt, Homo sapiens
  misc_RNA (1)...(19): siRNA sense strand
uaaucacucugaaagauca

SEQ ID NO: 1041078 - RNA, 19 nt, Homo sapiens
  misc_RNA (1)...(19): siRNA sense strand
agaagaagauaaagcucaa

SEQ ID NO: 1041079 - RNA, 19 nt, Homo sapiens
  misc_RNA (1)...(19): siRNA sense strand
ggagaagacaaaccaccua

SEQ ID NO: 1041080 - RNA, 19 nt, Homo sapiens
  misc_RNA (1)...(19): siRNA sense strand
gaaugaaacgcaagaaugc

SEQ ID NO: 1041081 - RNA, 19 nt, Homo sapiens
  misc_RNA (1)...(19): siRNA sense strand
ggaaaaggcuaauucugau

SEQ ID NO: 1041082 - RNA, 19 nt, Homo sapiens
  misc_RNA (1)...(19): siRNA sense strand
uaaugaugaugaagacgaa

SEQ ID NO: 1041083 - RNA, 19 nt, Homo sapiens
  misc_RNA (1)...(19): siRNA sense strand
aagcagaagaugaugauaa

SEQ ID NO: 1041084 - RNA, 19 nt, Homo sapiens
  misc_RNA (1)...(19): siRNA sense strand
gggaucagaagaagauaaa

SEQ ID NO: 1041085 - RNA, 19 nt, Homo sapiens
  misc_RNA (1)...(19): siRNA sense strand
gaugagggaucagaagaag

SEQ ID NO: 1041086 - RNA, 19 nt, Homo sapiens
  misc_RNA (1)...(19): siRNA sense strand
gagcguaaagauucugauu

SEQ ID NO: 1041087 - RNA, 19 nt, Homo sapiens
  misc_RNA (1)...(19): siRNA sense strand
augaagaaaugcuggauga

SEQ ID NO: 1041088 - RNA, 19 nt, Homo sapiens
  misc_RNA (1)...(19): siRNA sense strand
gcccaacuuucucagugua

SEQ ID NO: 1041089 - RNA, 19 nt, Homo sapiens
  misc_RNA (1)...(19): siRNA sense strand
ccaaaguaaacacugauuu

SEQ ID NO: 1041090 - RNA, 19 nt, Homo sapiens
  misc_RNA (1)...(19): siRNA sense strand
gaagacaaaccaccuacuc

SEQ ID NO: 1041091 - RNA, 19 nt, Homo sapiens
  misc_RNA (1)...(19): siRNA sense strand
ugaaagugaucaggaugaa

SEQ ID NO: 1041092 - RNA, 19 nt, Homo sapiens
  misc_RNA (1)...(19): siRNA sense strand
gcaagaggcagugauagug

SEQ ID NO: 1041093 - RNA, 19 nt, Homo sapiens
  misc_RNA (1)...(19): siRNA sense strand
aagaggaacaggaucauaa

SEQ ID NO: 1041094 - RNA, 19 nt, Homo sapiens
  misc_RNA (1)...(19): siRNA sense strand
ggagagggcacaaggaucu

SEQ ID NO: 1041095 - RNA, 19 nt, Homo sapiens
  misc_RNA (1)...(19): siRNA sense strand
aagcaugucccugcauuua

SEQ ID NO: 1041096 - RNA, 19 nt, Homo sapiens
  misc_RNA (1)...(19): siRNA sense strand
ugauuuaggaaacgacuua

SEQ ID NO: 1041097 - RNA, 19 nt, Homo sapiens
  misc_RNA (1)...(19): siRNA sense strand
gaaauacccaaaguaaaca

SEQ ID NO: 1041098 - RNA, 19 nt, Homo sapiens
  misc_RNA (1)...(19): siRNA sense strand
gaauagaaguagaaauacc

SEQ ID NO: 1041099 - RNA, 19 nt, Homo sapiens
  misc_RNA (1)...(19): siRNA sense strand
gaccagaauagaaguagaa

SEQ ID NO: 1041100 - RNA, 19 nt, Homo sapiens
  misc_RNA (1)...(19): siRNA sense strand
gaugaaguuuuacgaauga

SEQ ID NO: 1041101 - RNA, 19 nt, Homo sapiens
  misc_RNA (1)...(19): siRNA sense strand
caagaggcagugauaguga

SEQ ID NO: 1041102 - RNA, 19 nt, Homo sapiens
  misc_RNA (1)...(19): siRNA sense strand
ccacaggccucagaugaag

SEQ ID NO: 1041103 - RNA, 19 nt, Homo sapiens
  misc_RNA (1)...(19): siRNA sense strand
gaucagaagccccuaauga

SEQ ID NO: 1041104 - RNA, 19 nt, Homo sapiens
  misc_RNA (1)...(19): siRNA sense strand
ggacaaccaaguaauaagg

SEQ ID NO: 1041105 - RNA, 19 nt, Homo sapiens
  misc_RNA (1)...(19): siRNA sense strand
gcaugucccugcauuuagg

SEQ ID NO: 1041106 - RNA, 19 nt, Homo sapiens
  misc_RNA (1)...(19): siRNA sense strand
acacaggcauucagaugau

SEQ ID NO: 1041107 - RNA, 19 nt, Homo sapiens
  misc_RNA (1)...(19): siRNA sense strand
ggauauggaggaucucuuc

SEQ ID NO: 1041108 - RNA, 19 nt, Homo sapiens
  misc_RNA (1)...(19): siRNA sense strand
gaagcaugucccugcauuu

SEQ ID NO: 1041109 - RNA, 19 nt, Homo sapiens
  misc_RNA (1)...(19): siRNA sense strand
aaccauggauuuauuugga

SEQ ID NO: 1041110 - RNA, 19 nt, Homo sapiens
  misc_RNA (1)...(19): siRNA sense strand
gcugucugaugaagagaaa

SEQ ID NO: 1041111 - RNA, 19 nt, Homo sapiens
  misc_RNA (1)...(19): siRNA sense strand
gaaccuuccggaaagagaa

SEQ ID NO: 1041112 - RNA, 19 nt, Homo sapiens
  misc_RNA (1)...(19): siRNA sense strand
guucaaagacacagaagau

SEQ ID NO: 1041113 - RNA, 19 nt, Homo sapiens
  misc_RNA (1)...(19): siRNA sense strand
uuuaggcaaugaaguguuu

SEQ ID NO: 1041114 - RNA, 19 nt, Homo sapiens
  misc_RNA (1)...(19): siRNA sense strand
gcaaugcucggauagucaa

SEQ ID NO: 1041115 - RNA, 19 nt, Homo sapiens
  misc_RNA (1)...(19): siRNA sense strand
gaagacgaaggucauagau

SEQ ID NO: 1041116 - RNA, 19 nt, Homo sapiens
  misc_RNA (1)...(19): siRNA sense strand
agaagaugaugauaaagca

SEQ ID NO: 1041117 - RNA, 19 nt, Homo sapiens
  misc_RNA (1)...(19): siRNA sense strand
gacagugccacacauagaa

SEQ ID NO: 1041118 - RNA, 19 nt, Homo sapiens
  misc_RNA (1)...(19): siRNA sense strand
ggacaagcagucuuuaaaa

SEQ ID NO: 1041119 - RNA, 19 nt, Homo sapiens
  misc_RNA (1)...(19): siRNA sense strand
agaaauacccaaaguaaac

SEQ ID NO: 1041120 - RNA, 19 nt, Homo sapiens
  misc_RNA (1)...(19): siRNA sense strand
caaguaauaaggaacuguu

SEQ ID NO: 1041121 - RNA, 19 nt, Homo sapiens
  misc_RNA (1)...(19): siRNA sense strand
gaaagugaucaggaugaaa

SEQ ID NO: 1041122 - RNA, 19 nt, Homo sapiens
  misc_RNA (1)...(19): siRNA sense strand
caggacaaccaaguaauaa

SEQ ID NO: 1041123 - RNA, 19 nt, Homo sapiens
  misc_RNA (1)...(19): siRNA sense strand
uaagaaagaagaagaacgu

SEQ ID NO: 1041124 - RNA, 19 nt, Homo sapiens
  misc_RNA (1)...(19): siRNA sense strand
acuauaagauggaggauac

SEQ ID NO: 1041125 - RNA, 19 nt, Homo sapiens
  misc_RNA (1)...(19): siRNA sense strand
gagaugaagaaggaaauga

SEQ ID NO: 1041126 - RNA, 19 nt, Homo sapiens
  misc_RNA (1)...(19): siRNA sense strand
aagcugagcguaaagauuc

SEQ ID NO: 1041127 - RNA, 19 nt, Homo sapiens
  misc_RNA (1)...(19): siRNA sense strand
agaaagaagaagaacguuu

SEQ ID NO: 1041128 - RNA, 19 nt, Homo sapiens
  misc_RNA (1)...(19): siRNA sense strand
gaaugccaacgcacagaaa

SEQ ID NO: 1041129 - RNA, 19 nt, Homo sapiens
  misc_RNA (1)...(19): siRNA sense strand
ggacaaggauuaagaaugu

SEQ ID NO: 1041130 - RNA, 19 nt, Homo sapiens
  misc_RNA (1)...(19): siRNA sense strand
gagacaaacucaauguuaa

SEQ ID NO: 1041131 - RNA, 19 nt, Homo sapiens
  misc_RNA (1)...(19): siRNA sense strand
ccacgaaguuucauaguuu

SEQ ID NO: 1041132 - RNA, 19 nt, Homo sapiens
  misc_RNA (1)...(19): siRNA sense strand
gucaagugcuuacugauuu

SEQ ID NO: 1041133 - RNA, 19 nt, Homo sapiens
  misc_RNA (1)...(19): siRNA sense strand
gcaggaguauuugcucuuu

SEQ ID NO: 1041134 - RNA, 19 nt, Homo sapiens
  misc_RNA (1)...(19): siRNA sense strand
caauugaugucauguguca

SEQ ID NO: 1041135 - RNA, 19 nt, Homo sapiens
  misc_RNA (1)...(19): siRNA sense strand
caagaagaacaggauauua

SEQ ID NO: 1041136 - RNA, 19 nt, Homo sapiens
  misc_RNA (1)...(19): siRNA sense strand
gaagagacaaacucaaugu

SEQ ID NO: 1041137 - RNA, 19 nt, Homo sapiens
  misc_RNA (1)...(19): siRNA sense strand
gcagaugaguuaguucuuc

SEQ ID NO: 1041138 - RNA, 19 nt, Homo sapiens
  misc_RNA (1)...(19): siRNA sense strand
gaacaggauauuaauagga

SEQ ID NO: 1041139 - RNA, 19 nt, Homo sapiens
  misc_RNA (1)...(19): siRNA sense strand
agagacaaacucaauguua

SEQ ID NO: 1041140 - RNA, 19 nt, Homo sapiens
  misc_RNA (1)...(19): siRNA sense strand
aaaguggcaucaagaagaa

SEQ ID NO: 1041141 - RNA, 19 nt, Homo sapiens
  misc_RNA (1)...(19): siRNA sense strand
gauuuaacauuccaacaca

SEQ ID NO: 1041142 - RNA, 19 nt, Homo sapiens
  misc_RNA (1)...(19): siRNA sense strand
caacagcuccucccagauc

SEQ ID NO: 1041143 - RNA, 19 nt, Homo sapiens
  misc_RNA (1)...(19): siRNA sense strand
ugguguacuuccugaauua

SEQ ID NO: 1041144 - RNA, 19 nt, Homo sapiens
  misc_RNA (1)...(19): siRNA sense strand
ggauuaagaauguggauca

SEQ ID NO: 1041145 - RNA, 19 nt, Homo sapiens
  misc_RNA (1)...(19): siRNA sense strand
gcauagcgccucucugauc

SEQ ID NO: 1041146 - RNA, 19 nt, Homo sapiens
  misc_RNA (1)...(19): siRNA sense strand
ucagaagaguaauggugua

SEQ ID NO: 1041147 - RNA, 19 nt, Homo sapiens
  misc_RNA (1)...(19): siRNA sense strand
ugaguuaguucuucauucu

SEQ ID NO: 1041148 - RNA, 19 nt, Homo sapiens
  misc_RNA (1)...(19): siRNA sense strand
cagaagagacaaacucaau

SEQ ID NO: 1041149 - RNA, 19 nt, Homo sapiens
  misc_RNA (1)...(19): siRNA sense strand
ggagugaccacgaaguuuc

SEQ ID NO: 1041150 - RNA, 19 nt, Homo sapiens
  misc_RNA (1)...(19): siRNA sense strand
uuccaaauguuuaccauga

SEQ ID NO: 1041151 - RNA, 19 nt, Homo sapiens
  misc_RNA (1)...(19): siRNA sense strand
cugcauggcucaggugauu

SEQ ID NO: 1041152 - RNA, 19 nt, Homo sapiens
  misc_RNA (1)...(19): siRNA sense strand
gaaguuauggauucuuaca

SEQ ID NO: 1041153 - RNA, 19 nt, Homo sapiens
  misc_RNA (1)...(19): siRNA sense strand
cagaugaguuaguucuuca

SEQ ID NO: 1041154 - RNA, 19 nt, Homo sapiens
  misc_RNA (1)...(19): siRNA sense strand
uguaugguuugacagauuu

SEQ ID NO: 1041155 - RNA, 19 nt, Homo sapiens
  misc_RNA (1)...(19): siRNA sense strand
gauauuaauaggaggauuc

SEQ ID NO: 1041156 - RNA, 19 nt, Homo sapiens
  misc_RNA (1)...(19): siRNA sense strand
ucaagcagguuuuaaauca

SEQ ID NO: 1041157 - RNA, 19 nt, Homo sapiens
  misc_RNA (1)...(19): siRNA sense strand
ucaagugcuuacugauuug

SEQ ID NO: 1041158 - RNA, 19 nt, Homo sapiens
  misc_RNA (1)...(19): siRNA sense strand
gcuccucccagaucauaua

SEQ ID NO: 1041159 - RNA, 19 nt, Homo sapiens
  misc_RNA (1)...(19): siRNA sense strand
gcauauagaaaucaucaag

SEQ ID NO: 1041160 - RNA, 19 nt, Homo sapiens
  misc_RNA (1)...(19): siRNA sense strand
ucaagaagaacaggauauu

SEQ ID NO: 1041161 - RNA, 19 nt, Homo sapiens
  misc_RNA (1)...(19): siRNA sense strand
uuauuucagugucauggua

SEQ ID NO: 1041162 - RNA, 19 nt, Homo sapiens
  misc_RNA (1)...(19): siRNA sense strand
aaucuccaauguaugguuu

SEQ ID NO: 1041163 - RNA, 19 nt, Homo sapiens
  misc_RNA (1)...(19): siRNA sense strand
agauguggcaggaguauuu

SEQ ID NO: 1041164 - RNA, 19 nt, Homo sapiens
  misc_RNA (1)...(19): siRNA sense strand
gauuaagaauguggaucaa

SEQ ID NO: 1041165 - RNA, 19 nt, Homo sapiens
  misc_RNA (1)...(19): siRNA sense strand
caauguaugguuugacaga

SEQ ID NO: 1041166 - RNA, 19 nt, Homo sapiens
  misc_RNA (1)...(19): siRNA sense strand
ugucaugugucaagugcuu

SEQ ID NO: 1041167 - RNA, 19 nt, Homo sapiens
  misc_RNA (1)...(19): siRNA sense strand
gcccagaacaccuugaauc

SEQ ID NO: 1041168 - RNA, 19 nt, Homo sapiens
  misc_RNA (1)...(19): siRNA sense strand
ggauauuaauaggaggauu

SEQ ID NO: 1041169 - RNA, 19 nt, Homo sapiens
  misc_RNA (1)...(19): siRNA sense strand
caucaagaagaacaggaua

SEQ ID NO: 1041170 - RNA, 19 nt, Homo sapiens
  misc_RNA (1)...(19): siRNA sense strand
cugauuugauugaugaaga

SEQ ID NO: 1041171 - RNA, 19 nt, Homo sapiens
  misc_RNA (1)...(19): siRNA sense strand
ugugucaagugcuuacuga

SEQ ID NO: 1041172 - RNA, 19 nt, Homo sapiens
  misc_RNA (1)...(19): siRNA sense strand
gcagaagagacaaacucaa

SEQ ID NO: 1041173 - RNA, 19 nt, Homo sapiens
  misc_RNA (1)...(19): siRNA sense strand
ugucaagugcuuacugauu

SEQ ID NO: 1041174 - RNA, 19 nt, Homo sapiens
  misc_RNA (1)...(19): siRNA sense strand
guuauggauucuuacaaag

SEQ ID NO: 1041175 - RNA, 19 nt, Homo sapiens
  misc_RNA (1)...(19): siRNA sense strand
cauagcgccucucugaucu

SEQ ID NO: 1041176 - RNA, 19 nt, Homo sapiens
  misc_RNA (1)...(19): siRNA sense strand
aguuaguucuucauucuug

SEQ ID NO: 1041177 - RNA, 19 nt, Homo sapiens
  misc_RNA (1)...(19): siRNA sense strand
ugaguuagacauauugaag

SEQ ID NO: 1041178 - RNA, 19 nt, Homo sapiens
  misc_RNA (1)...(19): siRNA sense strand
gaaucuccaauguaugguu

SEQ ID NO: 1041179 - RNA, 19 nt, Homo sapiens
  misc_RNA (1)...(19): siRNA sense strand
guauuugcucuuucuaguu

SEQ ID NO: 1041180 - RNA, 19 nt, Homo sapiens
  misc_RNA (1)...(19): siRNA sense strand
cagcuccucccagaucaua

SEQ ID NO: 1041181 - RNA, 19 nt, Homo sapiens
  misc_RNA (1)...(19): siRNA sense strand
uccaauguaugguuugaca

SEQ ID NO: 1041182 - RNA, 19 nt, Homo sapiens
  misc_RNA (1)...(19): siRNA sense strand
accacgaaguuucauaguu

SEQ ID NO: 1041183 - RNA, 19 nt, Homo sapiens
  misc_RNA (1)...(19): siRNA sense strand
gcaucaagaagaacaggau

SEQ ID NO: 1041184 - RNA, 19 nt, Homo sapiens
  misc_RNA (1)...(19): siRNA sense strand
ggaucaagcagguuuuaaa

SEQ ID NO: 1041185 - RNA, 19 nt, Homo sapiens
  misc_RNA (1)...(19): siRNA sense strand
uuaauaggaggauucucua

SEQ ID NO: 1041186 - RNA, 19 nt, Homo sapiens
  misc_RNA (1)...(19): siRNA sense strand
gggcagaagagacaaacuc

SEQ ID NO: 1041187 - RNA, 19 nt, Homo sapiens
  misc_RNA (1)...(19): siRNA sense strand
caagauguggcaggaguau

SEQ ID NO: 1041188 - RNA, 19 nt, Homo sapiens
  misc_RNA (1)...(19): siRNA sense strand
aguauuugcucuuucuagu

SEQ ID NO: 1041189 - RNA, 19 nt, Homo sapiens
  misc_RNA (1)...(19): siRNA sense strand
acaaagcugccaggagaaa

SEQ ID NO: 1041190 - RNA, 19 nt, Homo sapiens
  misc_RNA (1)...(19): siRNA sense strand
gaguuagacauauugaagu

SEQ ID NO: 1041191 - RNA, 19 nt, Homo sapiens
  misc_RNA (1)...(19): siRNA sense strand
gacaaggauuaagaaugug

SEQ ID NO: 1041192 - RNA, 19 nt, Homo sapiens
  misc_RNA (1)...(19): siRNA sense strand
cccagaacaccuugaauca

SEQ ID NO: 1041193 - RNA, 19 nt, Homo sapiens
  misc_RNA (1)...(19): siRNA sense strand
ggcagaagagacaaacuca

SEQ ID NO: 1041194 - RNA, 19 nt, Homo sapiens
  misc_RNA (1)...(19): siRNA sense strand
guacugcagaugaguuagu

SEQ ID NO: 1041195 - RNA, 19 nt, Homo sapiens
  misc_RNA (1)...(19): siRNA sense strand
ggaguauuugcucuuucua

SEQ ID NO: 1041196 - RNA, 19 nt, Homo sapiens
  misc_RNA (1)...(19): siRNA sense strand
agaacaggauauuaauagg

SEQ ID NO: 1041197 - RNA, 19 nt, Homo sapiens
  misc_RNA (1)...(19): siRNA sense strand
gaucaagcagguuuuaaau

SEQ ID NO: 1041198 - RNA, 19 nt, Homo sapiens
  misc_RNA (1)...(19): siRNA sense strand
ccucccagaucauauacuc

SEQ ID NO: 1041199 - RNA, 19 nt, Homo sapiens
  misc_RNA (1)...(19): siRNA sense strand
uaggagugaccacgaaguu

SEQ ID NO: 1041200 - RNA, 19 nt, Homo sapiens
  misc_RNA (1)...(19): siRNA sense strand
gaguauuugcucuuucuag

SEQ ID NO: 1041201 - RNA, 19 nt, Homo sapiens
  misc_RNA (1)...(19): siRNA sense strand
uagcgccucucugaucuuc

SEQ ID NO: 1041202 - RNA, 19 nt, Homo sapiens
  misc_RNA (1)...(19): siRNA sense strand
ugacugcccagaacaccuu

SEQ ID NO: 1041203 - RNA, 19 nt, Homo sapiens
  misc_RNA (1)...(19): siRNA sense strand
aaagcugccaggagaaaug

SEQ ID NO: 1041204 - RNA, 19 nt, Homo sapiens
  misc_RNA (1)...(19): siRNA sense strand
gagugaccacgaaguuuca

SEQ ID NO: 1041205 - RNA, 19 nt, Homo sapiens
  misc_RNA (1)...(19): siRNA sense strand
agaagagacaaacucaaug

SEQ ID NO: 1041206 - RNA, 19 nt, Homo sapiens
  misc_RNA (1)...(19): siRNA sense strand
ccagaucauauacuccuau

SEQ ID NO: 1041207 - RNA, 19 nt, Homo sapiens
  misc_RNA (1)...(19): siRNA sense strand
guacuuccugaauuauuuc

SEQ ID NO: 1041208 - RNA, 19 nt, Homo sapiens
  misc_RNA (1)...(19): siRNA sense strand
agugcuuacugauuugauu

SEQ ID NO: 1041209 - RNA, 19 nt, Homo sapiens
  misc_RNA (1)...(19): siRNA sense strand
caggaguauuugcucuuuc

SEQ ID NO: 1041210 - RNA, 19 nt, Homo sapiens
  misc_RNA (1)...(19): siRNA sense strand
ucaagauguggcaggagua

SEQ ID NO: 1041211 - RNA, 19 nt, Homo sapiens
  misc_RNA (1)...(19): siRNA sense strand
aaaaguggcaucaagaaga

SEQ ID NO: 1041212 - RNA, 19 nt, Homo sapiens
  misc_RNA (1)...(19): siRNA sense strand
uauggauucuuacaaagcu

SEQ ID NO: 1041213 - RNA, 19 nt, Homo sapiens
  misc_RNA (1)...(19): siRNA sense strand
ugauucuggacaaggauua

SEQ ID NO: 1041214 - RNA, 19 nt, Homo sapiens
  misc_RNA (1)...(19): siRNA sense strand
ugaccacgaaguuucauag

SEQ ID NO: 1041215 - RNA, 19 nt, Homo sapiens
  misc_RNA (1)...(19): siRNA sense strand
gaauuauuucagugucaug

SEQ ID NO: 1041216 - RNA, 19 nt, Homo sapiens
  misc_RNA (1)...(19): siRNA sense strand
gcauggcucaggugauucu

SEQ ID NO: 1041217 - RNA, 19 nt, Homo sapiens
  misc_RNA (1)...(19): siRNA sense strand
ucuccaauguaugguuuga

SEQ ID NO: 1041218 - RNA, 19 nt, Homo sapiens
  misc_RNA (1)...(19): siRNA sense strand
acacagcucuucucacuuu

SEQ ID NO: 1041219 - RNA, 19 nt, Homo sapiens
  misc_RNA (1)...(19): siRNA sense strand
gcagaaagauuggauacug

SEQ ID NO: 1041220 - RNA, 19 nt, Homo sapiens
  misc_RNA (1)...(19): siRNA sense strand
caccgaagcuucaggauga

SEQ ID NO: 1041221 - RNA, 19 nt, Homo sapiens
  misc_RNA (1)...(19): siRNA sense strand
gggcagcacuucuuugaau

SEQ ID NO: 1041222 - RNA, 19 nt, Homo sapiens
  misc_RNA (1)...(19): siRNA sense strand
guuaaagacugcagaacaa

SEQ ID NO: 1041223 - RNA, 19 nt, Homo sapiens
  misc_RNA (1)...(19): siRNA sense strand
gaacagaagaaacagaaga

SEQ ID NO: 1041224 - RNA, 19 nt, Homo sapiens
  misc_RNA (1)...(19): siRNA sense strand
gcacugaguucauuucacu

SEQ ID NO: 1041225 - RNA, 19 nt, Homo sapiens
  misc_RNA (1)...(19): siRNA sense strand
caaggccacuuccaagaaa

SEQ ID NO: 1041226 - RNA, 19 nt, Homo sapiens
  misc_RNA (1)...(19): siRNA sense strand
gaugggagcagaaagauug

SEQ ID NO: 1041227 - RNA, 19 nt, Homo sapiens
  misc_RNA (1)...(19): siRNA sense strand
guaaggcucugaccuccaa

SEQ ID NO: 1041228 - RNA, 19 nt, Homo sapiens
  misc_RNA (1)...(19): siRNA sense strand
gcacuucuuugaauaccuu

SEQ ID NO: 1041229 - RNA, 19 nt, Homo sapiens
  misc_RNA (1)...(19): siRNA sense strand
ggaagacugucacucucaa

SEQ ID NO: 1041230 - RNA, 19 nt, Homo sapiens
  misc_RNA (1)...(19): siRNA sense strand
caaaucaacgagcauguuu

SEQ ID NO: 1041231 - RNA, 19 nt, Homo sapiens
  misc_RNA (1)...(19): siRNA sense strand
gcaaggccacuuccaagaa

SEQ ID NO: 1041232 - RNA, 19 nt, Homo sapiens
  misc_RNA (1)...(19): siRNA sense strand
ggcagcacuucuuugaaua

SEQ ID NO: 1041233 - RNA, 19 nt, Homo sapiens
  misc_RNA (1)...(19): siRNA sense strand
gaagaaguuugugaagaca

SEQ ID NO: 1041234 - RNA, 19 nt, Homo sapiens
  misc_RNA (1)...(19): siRNA sense strand
gugaagaaguuugugaaga

SEQ ID NO: 1041235 - RNA, 19 nt, Homo sapiens
  misc_RNA (1)...(19): siRNA sense strand
agacacagcucuucucacu

SEQ ID NO: 1041236 - RNA, 19 nt, Homo sapiens
  misc_RNA (1)...(19): siRNA sense strand
gagaagagacaucagaucu

SEQ ID NO: 1041237 - RNA, 19 nt, Homo sapiens
  misc_RNA (1)...(19): siRNA sense strand
ucaagauugugggccauua

SEQ ID NO: 1041238 - RNA, 19 nt, Homo sapiens
  misc_RNA (1)...(19): siRNA sense strand
ggacagcccuauggaagag

SEQ ID NO: 1041239 - RNA, 19 nt, Homo sapiens
  misc_RNA (1)...(19): siRNA sense strand
gaugauuacgagccuauaa

SEQ ID NO: 1041240 - RNA, 19 nt, Homo sapiens
  misc_RNA (1)...(19): siRNA sense strand
cagaagaaaccaagggaaa

SEQ ID NO: 1041241 - RNA, 19 nt, Homo sapiens
  misc_RNA (1)...(19): siRNA sense strand
gccauuaugcuuccuauau

SEQ ID NO: 1041242 - RNA, 19 nt, Homo sapiens
  misc_RNA (1)...(19): siRNA sense strand
ugaagaaguuugugaagac

SEQ ID NO: 1041243 - RNA, 19 nt, Homo sapiens
  misc_RNA (1)...(19): siRNA sense strand
aaaguguacugcaucauca

SEQ ID NO: 1041244 - RNA, 19 nt, Homo sapiens
  misc_RNA (1)...(19): siRNA sense strand
ugaauaccuucuugugguu

SEQ ID NO: 1041245 - RNA, 19 nt, Homo sapiens
  misc_RNA (1)...(19): siRNA sense strand
uaaugucgguuggugauga

SEQ ID NO: 1041246 - RNA, 19 nt, Homo sapiens
  misc_RNA (1)...(19): siRNA sense strand
caagaccaaccgccgauuu

SEQ ID NO: 1041247 - RNA, 19 nt, Homo sapiens
  misc_RNA (1)...(19): siRNA sense strand
aaagaagcguucagaggau

SEQ ID NO: 1041248 - RNA, 19 nt, Homo sapiens
  misc_RNA (1)...(19): siRNA sense strand
ccauuaugcuuccuauauc

SEQ ID NO: 1041249 - RNA, 19 nt, Homo sapiens
  misc_RNA (1)...(19): siRNA sense strand
ggucaaucuuugugaagga

SEQ ID NO: 1041250 - RNA, 19 nt, Homo sapiens
  misc_RNA (1)...(19): siRNA sense strand
gcuggucaaucuuugugaa

SEQ ID NO: 1041251 - RNA, 19 nt, Homo sapiens
  misc_RNA (1)...(19): siRNA sense strand
auaaucaccuaccaauuuc

SEQ ID NO: 1041252 - RNA, 19 nt, Homo sapiens
  misc_RNA (1)...(19): siRNA sense strand
cauuaugcuuccuauauca

SEQ ID NO: 1041253 - RNA, 19 nt, Homo sapiens
  misc_RNA (1)...(19): siRNA sense strand
caaaguguacugcaucauc

SEQ ID NO: 1041254 - RNA, 19 nt, Homo sapiens
  misc_RNA (1)...(19): siRNA sense strand
gccgauuugugaagaaguu

SEQ ID NO: 1041255 - RNA, 19 nt, Homo sapiens
  misc_RNA (1)...(19): siRNA sense strand
ggagcagaaagauuggaua

SEQ ID NO: 1041256 - RNA, 19 nt, Homo sapiens
  misc_RNA (1)...(19): siRNA sense strand
gaauaugaggaacagaaga

SEQ ID NO: 1041257 - RNA, 19 nt, Homo sapiens
  misc_RNA (1)...(19): siRNA sense strand
guucagaggaugauuacga

SEQ ID NO: 1041258 - RNA, 19 nt, Homo sapiens
  misc_RNA (1)...(19): siRNA sense strand
cuucaugguuggaguacaa

SEQ ID NO: 1041259 - RNA, 19 nt, Homo sapiens
  misc_RNA (1)...(19): siRNA sense strand
ggagaagagacaucagauc

SEQ ID NO: 1041260 - RNA, 19 nt, Homo sapiens
  misc_RNA (1)...(19): siRNA sense strand
gagcagaaagauuggauac

SEQ ID NO: 1041261 - RNA, 19 nt, Homo sapiens
  misc_RNA (1)...(19): siRNA sense strand
gaacauguggauuuuaguu

SEQ ID NO: 1041262 - RNA, 19 nt, Homo sapiens
  misc_RNA (1)...(19): siRNA sense strand
gcugucaucuacccguuca

SEQ ID NO: 1041263 - RNA, 19 nt, Homo sapiens
  misc_RNA (1)...(19): siRNA sense strand
gaauccuccugcaggcuau

SEQ ID NO: 1041264 - RNA, 19 nt, Homo sapiens
  misc_RNA (1)...(19): siRNA sense strand
ggauuuuaguucucuauug

SEQ ID NO: 1041265 - RNA, 19 nt, Homo sapiens
  misc_RNA (1)...(19): siRNA sense strand
caggcuauuuccaacagaa

SEQ ID NO: 1041266 - RNA, 19 nt, Homo sapiens
  misc_RNA (1)...(19): siRNA sense strand
gcaggcuauuuccaacaga

SEQ ID NO: 1041267 - RNA, 19 nt, Homo sapiens
  misc_RNA (1)...(19): siRNA sense strand
uaaagacugcagaacaaau

SEQ ID NO: 1041268 - RNA, 19 nt, Homo sapiens
  misc_RNA (1)...(19): siRNA sense strand
acaccuacaucccuguugu

SEQ ID NO: 1041269 - RNA, 19 nt, Homo sapiens
  misc_RNA (1)...(19): siRNA sense strand
cuccauggcugucaucuac

SEQ ID NO: 1041270 - RNA, 19 nt, Homo sapiens
  misc_RNA (1)...(19): siRNA sense strand
caucuuagacucucuuggu

SEQ ID NO: 1041271 - RNA, 19 nt, Homo sapiens
  misc_RNA (1)...(19): siRNA sense strand
gcccucgccuucccaaagu

SEQ ID NO: 1041272 - RNA, 19 nt, Homo sapiens
  misc_RNA (1)...(19): siRNA sense strand
gggaagacugucacucuca

SEQ ID NO: 1041273 - RNA, 19 nt, Homo sapiens
  misc_RNA (1)...(19): siRNA sense strand
uggaugaaguggagaagag

SEQ ID NO: 1041274 - RNA, 19 nt, Homo sapiens
  misc_RNA (1)...(19): siRNA sense strand
ggaugggagcagaaagauu

SEQ ID NO: 1041275 - RNA, 19 nt, Homo sapiens
  misc_RNA (1)...(19): siRNA sense strand
aauaugaggaacagaagaa

SEQ ID NO: 1041276 - RNA, 19 nt, Homo sapiens
  misc_RNA (1)...(19): siRNA sense strand
caagauugugggccauuau

SEQ ID NO: 1041277 - RNA, 19 nt, Homo sapiens
  misc_RNA (1)...(19): siRNA sense strand
gcacaccuacaucccuguu

SEQ ID NO: 1041278 - RNA, 19 nt, Homo sapiens
  misc_RNA (1)...(19): siRNA sense strand
ugaguucauuucacugaca

SEQ ID NO: 1041279 - RNA, 19 nt, Homo sapiens
  misc_RNA (1)...(19): siRNA sense strand
gaauaccuucuugugguuu

SEQ ID NO: 1041280 - RNA, 19 nt, Homo sapiens
  misc_RNA (1)...(19): siRNA sense strand
ucaaagcuauccccuuguu

SEQ ID NO: 1041281 - RNA, 19 nt, Homo sapiens
  misc_RNA (1)...(19): siRNA sense strand
gaagaaacagaagaaacca

SEQ ID NO: 1041282 - RNA, 19 nt, Homo sapiens
  misc_RNA (1)...(19): siRNA sense strand
ggcaaggccacuuccaaga

SEQ ID NO: 1041283 - RNA, 19 nt, Homo sapiens
  misc_RNA (1)...(19): siRNA sense strand
gaucaaugaguuaaagacu

SEQ ID NO: 1041284 - RNA, 19 nt, Homo sapiens
  misc_RNA (1)...(19): siRNA sense strand
ggacucccaccuagaacau

SEQ ID NO: 1041285 - RNA, 19 nt, Homo sapiens
  misc_RNA (1)...(19): siRNA sense strand
gggccauuaugcuuccuau

SEQ ID NO: 1041286 - RNA, 19 nt, Homo sapiens
  misc_RNA (1)...(19): siRNA sense strand
gggcccaggagcacucuuu

SEQ ID NO: 1041287 - RNA, 19 nt, Homo sapiens
  misc_RNA (1)...(19): siRNA sense strand
ggucauggacagcccuaug

SEQ ID NO: 1041288 - RNA, 19 nt, Homo sapiens
  misc_RNA (1)...(19): siRNA sense strand
gcacugcucuaccccuuca

SEQ ID NO: 1041289 - RNA, 19 nt, Homo sapiens
  misc_RNA (1)...(19): siRNA sense strand
ccuauaaucaccuaccaau

SEQ ID NO: 1041290 - RNA, 19 nt, Homo sapiens
  misc_RNA (1)...(19): siRNA sense strand
gaggaacagaagaaacaga

SEQ ID NO: 1041291 - RNA, 19 nt, Homo sapiens
  misc_RNA (1)...(19): siRNA sense strand
gaccaaccgccgauuugug

SEQ ID NO: 1041292 - RNA, 19 nt, Homo sapiens
  misc_RNA (1)...(19): siRNA sense strand
aaucaacgagcauguuuca

SEQ ID NO: 1041293 - RNA, 19 nt, Homo sapiens
  misc_RNA (1)...(19): siRNA sense strand
guggaugggagcagaaaga

SEQ ID NO: 1041294 - RNA, 19 nt, Homo sapiens
  misc_RNA (1)...(19): siRNA sense strand
gaccuucuccuucguucug

SEQ ID NO: 1041295 - RNA, 19 nt, Homo sapiens
  misc_RNA (1)...(19): siRNA sense strand
gcacucuuugcccaacuuu

SEQ ID NO: 1041296 - RNA, 19 nt, Homo sapiens
  misc_RNA (1)...(19): siRNA sense strand
aaagacugcagaacaaauc

SEQ ID NO: 1041297 - RNA, 19 nt, Homo sapiens
  misc_RNA (1)...(19): siRNA sense strand
cugccgugcuggagagaaa

SEQ ID NO: 1041298 - RNA, 19 nt, Homo sapiens
  misc_RNA (1)...(19): siRNA sense strand
gaaguggagaagagacauc

SEQ ID NO: 1041299 - RNA, 19 nt, Homo sapiens
  misc_RNA (1)...(19): siRNA sense strand
ucuugugguuucucucaaa

SEQ ID NO: 1041300 - RNA, 19 nt, Homo sapiens
  misc_RNA (1)...(19): siRNA sense strand
cccaaaguguacugcauca

SEQ ID NO: 1041301 - RNA, 19 nt, Homo sapiens
  misc_RNA (1)...(19): siRNA sense strand
guggagaagagacaucaga

SEQ ID NO: 1041302 - RNA, 19 nt, Homo sapiens
  misc_RNA (1)...(19): siRNA sense strand
gcagcacuucuuugaauac

SEQ ID NO: 1041303 - RNA, 19 nt, Homo sapiens
  misc_RNA (1)...(19): siRNA sense strand
cagaagaaacagaagaaac

SEQ ID NO: 1041304 - RNA, 19 nt, Homo sapiens
  misc_RNA (1)...(19): siRNA sense strand
gucaaucuuugugaaggaa

SEQ ID NO: 1041305 - RNA, 19 nt, Homo sapiens
  misc_RNA (1)...(19): siRNA sense strand
ggaugaaguggagaagaga

SEQ ID NO: 1041306 - RNA, 19 nt, Homo sapiens
  misc_RNA (1)...(19): siRNA sense strand
acaaaucaacgagcauguu

SEQ ID NO: 1041307 - RNA, 19 nt, Homo sapiens
  misc_RNA (1)...(19): siRNA sense strand
ccuggacucccaccuagaa

SEQ ID NO: 1041308 - RNA, 19 nt, Homo sapiens
  misc_RNA (1)...(19): siRNA sense strand
ccuagaacauguggauuuu

SEQ ID NO: 1041309 - RNA, 19 nt, Homo sapiens
  misc_RNA (1)...(19): siRNA sense strand
caaaugggcaaggccacuu

SEQ ID NO: 1041310 - RNA, 19 nt, Homo sapiens
  misc_RNA (1)...(19): siRNA sense strand
uuaaagacugcagaacaaa

SEQ ID NO: 1041311 - RNA, 19 nt, Homo sapiens
  misc_RNA (1)...(19): siRNA sense strand
uagaacauguggauuuuag

SEQ ID NO: 1041312 - RNA, 19 nt, Homo sapiens
  misc_RNA (1)...(19): siRNA sense strand
aggggaagcuuuaaaggaa

SEQ ID NO: 1041313 - RNA, 19 nt, Homo sapiens
  misc_RNA (1)...(19): siRNA sense strand
aggaacagaagaaacagaa

SEQ ID NO: 1041314 - RNA, 19 nt, Homo sapiens
  misc_RNA (1)...(19): siRNA sense strand
ggaugauuacgagccuaua

SEQ ID NO: 1041315 - RNA, 19 nt, Homo sapiens
  misc_RNA (1)...(19): siRNA sense strand
caacgccgacugcuucaac

SEQ ID NO: 1041316 - RNA, 19 nt, Homo sapiens
  misc_RNA (1)...(19): siRNA sense strand
ugaguuaaagacugcagaa

SEQ ID NO: 1041317 - RNA, 19 nt, Homo sapiens
  misc_RNA (1)...(19): siRNA sense strand
gcuuuaaaggaaccagaaa

SEQ ID NO: 1041318 - RNA, 19 nt, Homo sapiens
  misc_RNA (1)...(19): siRNA sense strand
caaaggagauggucauuau

SEQ ID NO: 1041319 - RNA, 19 nt, Homo sapiens
  misc_RNA (1)...(19): siRNA sense strand
gaagaagcuuuacauauuc

SEQ ID NO: 1041320 - RNA, 19 nt, Homo sapiens
  misc_RNA (1)...(19): siRNA sense strand
gggcagauauuguuacuga

SEQ ID NO: 1041321 - RNA, 19 nt, Homo sapiens
  misc_RNA (1)...(19): siRNA sense strand
gcacaaaucugagagaaag

SEQ ID NO: 1041322 - RNA, 19 nt, Homo sapiens
  misc_RNA (1)...(19): siRNA sense strand
gaagauaucagaaggaaug

SEQ ID NO: 1041323 - RNA, 19 nt, Homo sapiens
  misc_RNA (1)...(19): siRNA sense strand
acagaaaggucaaaugauu

SEQ ID NO: 1041324 - RNA, 19 nt, Homo sapiens
  misc_RNA (1)...(19): siRNA sense strand
gaucuuaauuggagaauca

SEQ ID NO: 1041325 - RNA, 19 nt, Homo sapiens
  misc_RNA (1)...(19): siRNA sense strand
gaaagucaccugaagagaa

SEQ ID NO: 1041326 - RNA, 19 nt, Homo sapiens
  misc_RNA (1)...(19): siRNA sense strand
uggcaucucuucauuaauu

SEQ ID NO: 1041327 - RNA, 19 nt, Homo sapiens
  misc_RNA (1)...(19): siRNA sense strand
gaaaauagcuuggaaaacu

SEQ ID NO: 1041328 - RNA, 19 nt, Homo sapiens
  misc_RNA (1)...(19): siRNA sense strand
agacuuaacuggcaaagau

SEQ ID NO: 1041329 - RNA, 19 nt, Homo sapiens
  misc_RNA (1)...(19): siRNA sense strand
caucggaaauuaucuacaa

SEQ ID NO: 1041330 - RNA, 19 nt, Homo sapiens
  misc_RNA (1)...(19): siRNA sense strand
cacaggaaguugaauauug

SEQ ID NO: 1041331 - RNA, 19 nt, Homo sapiens
  misc_RNA (1)...(19): siRNA sense strand
gauauuagguuugguccuu

SEQ ID NO: 1041332 - RNA, 19 nt, Homo sapiens
  misc_RNA (1)...(19): siRNA sense strand
aaacagaaaggucaaauga

SEQ ID NO: 1041333 - RNA, 19 nt, Homo sapiens
  misc_RNA (1)...(19): siRNA sense strand
caagaagaagcuuuacaua

SEQ ID NO: 1041334 - RNA, 19 nt, Homo sapiens
  misc_RNA (1)...(19): siRNA sense strand
gggaauacaacacuuauga

SEQ ID NO: 1041335 - RNA, 19 nt, Homo sapiens
  misc_RNA (1)...(19): siRNA sense strand
caaccuccauuugaagaua

SEQ ID NO: 1041336 - RNA, 19 nt, Homo sapiens
  misc_RNA (1)...(19): siRNA sense strand
gagagaaagucaccugaag

SEQ ID NO: 1041337 - RNA, 19 nt, Homo sapiens
  misc_RNA (1)...(19): siRNA sense strand
gggaagauaucagaaggaa

SEQ ID NO: 1041338 - RNA, 19 nt, Homo sapiens
  misc_RNA (1)...(19): siRNA sense strand
acuaguacaucggaaauua

SEQ ID NO: 1041339 - RNA, 19 nt, Homo sapiens
  misc_RNA (1)...(19): siRNA sense strand
caucauagcauuccagaga

SEQ ID NO: 1041340 - RNA, 19 nt, Homo sapiens
  misc_RNA (1)...(19): siRNA sense strand
gagcacaaaucugagagaa

SEQ ID NO: 1041341 - RNA, 19 nt, Homo sapiens
  misc_RNA (1)...(19): siRNA sense strand
gaaaguauuagaccucaga

SEQ ID NO: 1041342 - RNA, 19 nt, Homo sapiens
  misc_RNA (1)...(19): siRNA sense strand
caggcgaccucaaucuaua

SEQ ID NO: 1041343 - RNA, 19 nt, Homo sapiens
  misc_RNA (1)...(19): siRNA sense strand
gaaguugaauauuggaucu

SEQ ID NO: 1041344 - RNA, 19 nt, Homo sapiens
  misc_RNA (1)...(19): siRNA sense strand
cggaaauuaucuacaauga

SEQ ID NO: 1041345 - RNA, 19 nt, Homo sapiens
  misc_RNA (1)...(19): siRNA sense strand
uuacugaucuaaacacuca

SEQ ID NO: 1041346 - RNA, 19 nt, Homo sapiens
  misc_RNA (1)...(19): siRNA sense strand
uggcuuauaucuaucauug

SEQ ID NO: 1041347 - RNA, 19 nt, Homo sapiens
  misc_RNA (1)...(19): siRNA sense strand
augaaucgcuggcuuauau

SEQ ID NO: 1041348 - RNA, 19 nt, Homo sapiens
  misc_RNA (1)...(19): siRNA sense strand
aaaggaugcucuuauguuc

SEQ ID NO: 1041349 - RNA, 19 nt, Homo sapiens
  misc_RNA (1)...(19): siRNA sense strand
aaagucaccugaagagaau

SEQ ID NO: 1041350 - RNA, 19 nt, Homo sapiens
  misc_RNA (1)...(19): siRNA sense strand
caugggaaauugauaaauc

SEQ ID NO: 1041351 - RNA, 19 nt, Homo sapiens
  misc_RNA (1)...(19): siRNA sense strand
aaaguuaacccguggauug

SEQ ID NO: 1041352 - RNA, 19 nt, Homo sapiens
  misc_RNA (1)...(19): siRNA sense strand
aaugaccacuuccauguaa

SEQ ID NO: 1041353 - RNA, 19 nt, Homo sapiens
  misc_RNA (1)...(19): siRNA sense strand
uguggcaucucuucauuaa

SEQ ID NO: 1041354 - RNA, 19 nt, Homo sapiens
  misc_RNA (1)...(19): siRNA sense strand
gaaauggugagcacaaauc

SEQ ID NO: 1041355 - RNA, 19 nt, Homo sapiens
  misc_RNA (1)...(19): siRNA sense strand
gaaacagaaaggucaaaug

SEQ ID NO: 1041356 - RNA, 19 nt, Homo sapiens
  misc_RNA (1)...(19): siRNA sense strand
gaggugguuuagacaaauu

SEQ ID NO: 1041357 - RNA, 19 nt, Homo sapiens
  misc_RNA (1)...(19): siRNA sense strand
gaagacaauauuuccaaga

SEQ ID NO: 1041358 - RNA, 19 nt, Homo sapiens
  misc_RNA (1)...(19): siRNA sense strand
gagagugaagacaauauuu

SEQ ID NO: 1041359 - RNA, 19 nt, Homo sapiens
  misc_RNA (1)...(19): siRNA sense strand
guaaaaggaugcucuuaug

SEQ ID NO: 1041360 - RNA, 19 nt, Homo sapiens
  misc_RNA (1)...(19): siRNA sense strand
guacaucggaaauuaucua

SEQ ID NO: 1041361 - RNA, 19 nt, Homo sapiens
  misc_RNA (1)...(19): siRNA sense strand
aaacacaaaucaggcaaug

SEQ ID NO: 1041362 - RNA, 19 nt, Homo sapiens
  misc_RNA (1)...(19): siRNA sense strand
ucaucaagauacauuggua

SEQ ID NO: 1041363 - RNA, 19 nt, Homo sapiens
  misc_RNA (1)...(19): siRNA sense strand
gaaaacauccugccauuca

SEQ ID NO: 1041364 - RNA, 19 nt, Homo sapiens
  misc_RNA (1)...(19): siRNA sense strand
guuaacccguggauugaaa

SEQ ID NO: 1041365 - RNA, 19 nt, Homo sapiens
  misc_RNA (1)...(19): siRNA sense strand
ggucaaaugauucuggaaa

SEQ ID NO: 1041366 - RNA, 19 nt, Homo sapiens
  misc_RNA (1)...(19): siRNA sense strand
ccaaaggagauggucauua

SEQ ID NO: 1041367 - RNA, 19 nt, Homo sapiens
  misc_RNA (1)...(19): siRNA sense strand
ucaaaugauucuggaaaug

SEQ ID NO: 1041368 - RNA, 19 nt, Homo sapiens
  misc_RNA (1)...(19): siRNA sense strand
uaaacagcggaaaguauua

SEQ ID NO: 1041369 - RNA, 19 nt, Homo sapiens
  misc_RNA (1)...(19): siRNA sense strand
aaugggagcuggaaaccuu

SEQ ID NO: 1041370 - RNA, 19 nt, Homo sapiens
  misc_RNA (1)...(19): siRNA sense strand
ggaauugccaaaucugaga

SEQ ID NO: 1041371 - RNA, 19 nt, Homo sapiens
  misc_RNA (1)...(19): siRNA sense strand
acaaauuaaugaccacuuc

SEQ ID NO: 1041372 - RNA, 19 nt, Homo sapiens
  misc_RNA (1)...(19): siRNA sense strand
acacuuaugaggugguuua

SEQ ID NO: 1041373 - RNA, 19 nt, Homo sapiens
  misc_RNA (1)...(19): siRNA sense strand
uuaaacagcggaaaguauu

SEQ ID NO: 1041374 - RNA, 19 nt, Homo sapiens
  misc_RNA (1)...(19): siRNA sense strand
agacgaugguacugcauaa

SEQ ID NO: 1041375 - RNA, 19 nt, Homo sapiens
  misc_RNA (1)...(19): siRNA sense strand
ccacaaauucgaaacacaa

SEQ ID NO: 1041376 - RNA, 19 nt, Homo sapiens
  misc_RNA (1)...(19): siRNA sense strand
ugaagagaaucuacaaggu

SEQ ID NO: 1041377 - RNA, 19 nt, Homo sapiens
  misc_RNA (1)...(19): siRNA sense strand
aggaugcucuuauguucua

SEQ ID NO: 1041378 - RNA, 19 nt, Homo sapiens
  misc_RNA (1)...(19): siRNA sense strand
uaacguugcagaaacagaa

SEQ ID NO: 1041379 - RNA, 19 nt, Homo sapiens
  misc_RNA (1)...(19): siRNA sense strand
aaagaugucuaguauccau

SEQ ID NO: 1041380 - RNA, 19 nt, Homo sapiens
  misc_RNA (1)...(19): siRNA sense strand
gcagauauuguuacugauc

SEQ ID NO: 1041381 - RNA, 19 nt, Homo sapiens
  misc_RNA (1)...(19): siRNA sense strand
ggacuaugccuuucucaac

SEQ ID NO: 1041382 - RNA, 19 nt, Homo sapiens
  misc_RNA (1)...(19): siRNA sense strand
ccagggaauugccaaaucu

SEQ ID NO: 1041383 - RNA, 19 nt, Homo sapiens
  misc_RNA (1)...(19): siRNA sense strand
gcauaagccgaccacagua

SEQ ID NO: 1041384 - RNA, 19 nt, Homo sapiens
  misc_RNA (1)...(19): siRNA sense strand
caaauucgaaacacaaauc

SEQ ID NO: 1041385 - RNA, 19 nt, Homo sapiens
  misc_RNA (1)...(19): siRNA sense strand
ccaagaagaagcuuuacau

SEQ ID NO: 1041386 - RNA, 19 nt, Homo sapiens
  misc_RNA (1)...(19): siRNA sense strand
gagagaaggaacagugguu

SEQ ID NO: 1041387 - RNA, 19 nt, Homo sapiens
  misc_RNA (1)...(19): siRNA sense strand
gucaaaugauucuggaaau

SEQ ID NO: 1041388 - RNA, 19 nt, Homo sapiens
  misc_RNA (1)...(19): siRNA sense strand
gauuuggccuuuggaacuu

SEQ ID NO: 1041389 - RNA, 19 nt, Homo sapiens
  misc_RNA (1)...(19): siRNA sense strand
gagaaagucaccugaagag

SEQ ID NO: 1041390 - RNA, 19 nt, Homo sapiens
  misc_RNA (1)...(19): siRNA sense strand
ccucagcauucuccucuug

SEQ ID NO: 1041391 - RNA, 19 nt, Homo sapiens
  misc_RNA (1)...(19): siRNA sense strand
ggaaauggugagcacaaau

SEQ ID NO: 1041392 - RNA, 19 nt, Homo sapiens
  misc_RNA (1)...(19): siRNA sense strand
acaggaaguugaauauugg

SEQ ID NO: 1041393 - RNA, 19 nt, Homo sapiens
  misc_RNA (1)...(19): siRNA sense strand
ggcaucucuucauuaauuu

SEQ ID NO: 1041394 - RNA, 19 nt, Homo sapiens
  misc_RNA (1)...(19): siRNA sense strand
caacacaugcccagggaau

SEQ ID NO: 1041395 - RNA, 19 nt, Homo sapiens
  misc_RNA (1)...(19): siRNA sense strand
gcaaugcaaagaaacaagu

SEQ ID NO: 1041396 - RNA, 19 nt, Homo sapiens
  misc_RNA (1)...(19): siRNA sense strand
caucaggacucggcaugga

SEQ ID NO: 1041397 - RNA, 19 nt, Homo sapiens
  misc_RNA (1)...(19): siRNA sense strand
gaauaaaacagcaggagaa

SEQ ID NO: 1041398 - RNA, 19 nt, Homo sapiens
  misc_RNA (1)...(19): siRNA sense strand
caacacuuaugaggugguu

SEQ ID NO: 1041399 - RNA, 19 nt, Homo sapiens
  misc_RNA (1)...(19): siRNA sense strand
gggaaauugauaaaucuga

SEQ ID NO: 1041400 - RNA, 19 nt, Homo sapiens
  misc_RNA (1)...(19): siRNA sense strand
gauauuaaacagcggaaag

SEQ ID NO: 1041401 - RNA, 19 nt, Homo sapiens
  misc_RNA (1)...(19): siRNA sense strand
gaaacacaaaucaggcaau

SEQ ID NO: 1041402 - RNA, 19 nt, Homo sapiens
  misc_RNA (1)...(19): siRNA sense strand
gcacaaugggagcuggaaa

SEQ ID NO: 1041403 - RNA, 19 nt, Homo sapiens
  misc_RNA (1)...(19): siRNA sense strand
caaaucaggcaaugcaaag

SEQ ID NO: 1041404 - RNA, 19 nt, Homo sapiens
  misc_RNA (1)...(19): siRNA sense strand
uaaugaccacuuccaugua

SEQ ID NO: 1041405 - RNA, 19 nt, Homo sapiens
  misc_RNA (1)...(19): siRNA sense strand
uaccaggguuacagugauu

SEQ ID NO: 1041406 - RNA, 19 nt, Homo sapiens
  misc_RNA (1)...(19): siRNA sense strand
aagaugaaucgcuggcuua

SEQ ID NO: 1041407 - RNA, 19 nt, Homo sapiens
  misc_RNA (1)...(19): siRNA sense strand
caaaugauucuggaaaugg

SEQ ID NO: 1041408 - RNA, 19 nt, Homo sapiens
  misc_RNA (1)...(19): siRNA sense strand
gugaagacaauauuuccaa

SEQ ID NO: 1041409 - RNA, 19 nt, Homo sapiens
  misc_RNA (1)...(19): siRNA sense strand
caccacaggaaguugaaua

SEQ ID NO: 1041410 - RNA, 19 nt, Homo sapiens
  misc_RNA (1)...(19): siRNA sense strand
gaugaaucgcuggcuuaua

SEQ ID NO: 1041411 - RNA, 19 nt, Homo sapiens
  misc_RNA (1)...(19): siRNA sense strand
caacagccugggcaagcua

SEQ ID NO: 1041412 - RNA, 19 nt, Homo sapiens
  misc_RNA (1)...(19): siRNA sense strand
ccacaggaaguugaauauu

SEQ ID NO: 1041413 - RNA, 19 nt, Homo sapiens
  misc_RNA (1)...(19): siRNA sense strand
uuaaugaccacuuccaugu

SEQ ID NO: 1041414 - RNA, 19 nt, Homo sapiens
  misc_RNA (1)...(19): siRNA sense strand
gcagaaacagaaaggucaa

SEQ ID NO: 1041415 - RNA, 19 nt, Homo sapiens
  misc_RNA (1)...(19): siRNA sense strand
gaccacaguauaagacuuc

SEQ ID NO: 1041416 - RNA, 19 nt, Homo sapiens
  misc_RNA (1)...(19): siRNA sense strand
uaagccgaccacaguauaa

SEQ ID NO: 1041417 - RNA, 19 nt, Homo sapiens
  misc_RNA (1)...(19): siRNA sense strand
ugccaaaucugagagugaa

SEQ ID NO: 1041418 - RNA, 19 nt, Homo sapiens
  misc_RNA (1)...(19): siRNA sense strand
gcaaugagccaucaacuaa

SEQ ID NO: 1041419 - RNA, 19 nt, Homo sapiens
  misc_RNA (1)...(19): siRNA sense strand
guacuuuacugcucuuaua

SEQ ID NO: 1041420 - RNA, 19 nt, Homo sapiens
  misc_RNA (1)...(19): siRNA sense strand
aaucaaagccucuucauaa

SEQ ID NO: 1041421 - RNA, 19 nt, Homo sapiens
  misc_RNA (1)...(19): siRNA sense strand
aguagaagaugaagacaua

SEQ ID NO: 1041422 - RNA, 19 nt, Homo sapiens
  misc_RNA (1)...(19): siRNA sense strand
gcaucuuucuuguacuuua

SEQ ID NO: 1041423 - RNA, 19 nt, Homo sapiens
  misc_RNA (1)...(19): siRNA sense strand
caaaagaagucaucuaguu

SEQ ID NO: 1041424 - RNA, 19 nt, Homo sapiens
  misc_RNA (1)...(19): siRNA sense strand
gaagucaucuaguucaucu

SEQ ID NO: 1041425 - RNA, 19 nt, Homo sapiens
  misc_RNA (1)...(19): siRNA sense strand
uggauuaucuuggcuauuu

SEQ ID NO: 1041426 - RNA, 19 nt, Homo sapiens
  misc_RNA (1)...(19): siRNA sense strand
caaaccuucugcaacaaua

SEQ ID NO: 1041427 - RNA, 19 nt, Homo sapiens
  misc_RNA (1)...(19): siRNA sense strand
caagaugauauuccacuua

SEQ ID NO: 1041428 - RNA, 19 nt, Homo sapiens
  misc_RNA (1)...(19): siRNA sense strand
gcucuuauacuaucucuga

SEQ ID NO: 1041429 - RNA, 19 nt, Homo sapiens
  misc_RNA (1)...(19): siRNA sense strand
ugaguacaauuucagcuuu

SEQ ID NO: 1041430 - RNA, 19 nt, Homo sapiens
  misc_RNA (1)...(19): siRNA sense strand
ccaaugagcuaggaguaga

SEQ ID NO: 1041431 - RNA, 19 nt, Homo sapiens
  misc_RNA (1)...(19): siRNA sense strand
uuacacaccuucuucuguu

SEQ ID NO: 1041432 - RNA, 19 nt, Homo sapiens
  misc_RNA (1)...(19): siRNA sense strand
gcaaaugacaagugacaga

SEQ ID NO: 1041433 - RNA, 19 nt, Homo sapiens
  misc_RNA (1)...(19): siRNA sense strand
gaagaugaagacauaauca

SEQ ID NO: 1041434 - RNA, 19 nt, Homo sapiens
  misc_RNA (1)...(19): siRNA sense strand
ucucaaaccuucugcaaca

SEQ ID NO: 1041435 - RNA, 19 nt, Homo sapiens
  misc_RNA (1)...(19): siRNA sense strand
caggaugauuggucucuuu

SEQ ID NO: 1041436 - RNA, 19 nt, Homo sapiens
  misc_RNA (1)...(19): siRNA sense strand
cuacagcuuuagcaucuuu

SEQ ID NO: 1041437 - RNA, 19 nt, Homo sapiens
  misc_RNA (1)...(19): siRNA sense strand
caacuaaagaacucaaaga

SEQ ID NO: 1041438 - RNA, 19 nt, Homo sapiens
  misc_RNA (1)...(19): siRNA sense strand
gugacagaauccaccuuua

SEQ ID NO: 1041439 - RNA, 19 nt, Homo sapiens
  misc_RNA (1)...(19): siRNA sense strand
aaggcuaccucuugaauug

SEQ ID NO: 1041440 - RNA, 19 nt, Homo sapiens
  misc_RNA (1)...(19): siRNA sense strand
guucagaguugauaaagac

SEQ ID NO: 1041441 - RNA, 19 nt, Homo sapiens
  misc_RNA (1)...(19): siRNA sense strand
gagacuuccuccacccaaa

SEQ ID NO: 1041442 - RNA, 19 nt, Homo sapiens
  misc_RNA (1)...(19): siRNA sense strand
guggaauauuguugugaua

SEQ ID NO: 1041443 - RNA, 19 nt, Homo sapiens
  misc_RNA (1)...(19): siRNA sense strand
caguagcaauccgaaauuu

SEQ ID NO: 1041444 - RNA, 19 nt, Homo sapiens
  misc_RNA (1)...(19): siRNA sense strand
ugagcaaacuacuguggaa

SEQ ID NO: 1041445 - RNA, 19 nt, Homo sapiens
  misc_RNA (1)...(19): siRNA sense strand
uagcaucuuucuuguacuu

SEQ ID NO: 1041446 - RNA, 19 nt, Homo sapiens
  misc_RNA (1)...(19): siRNA sense strand
ccagagauguggcacuuac

SEQ ID NO: 1041447 - RNA, 19 nt, Homo sapiens
  misc_RNA (1)...(19): siRNA sense strand
gagaucagcuauccaaccu

SEQ ID NO: 1041448 - RNA, 19 nt, Homo sapiens
  misc_RNA (1)...(19): siRNA sense strand
gaggaggcaguuauucaaa

SEQ ID NO: 1041449 - RNA, 19 nt, Homo sapiens
  misc_RNA (1)...(19): siRNA sense strand
cgugguggcucuucugguu

SEQ ID NO: 1041450 - RNA, 19 nt, Homo sapiens
  misc_RNA (1)...(19): siRNA sense strand
uuacugcucuuauacuauc

SEQ ID NO: 1041451 - RNA, 19 nt, Homo sapiens
  misc_RNA (1)...(19): siRNA sense strand
gaauuacaguaugccaaug

SEQ ID NO: 1041452 - RNA, 19 nt, Homo sapiens
  misc_RNA (1)...(19): siRNA sense strand
ggaagcaggaauugaggaa

SEQ ID NO: 1041453 - RNA, 19 nt, Homo sapiens
  misc_RNA (1)...(19): siRNA sense strand
ggcaaugagccaucaacua

SEQ ID NO: 1041454 - RNA, 19 nt, Homo sapiens
  misc_RNA (1)...(19): siRNA sense strand
gaugauauuccacuuaguc

SEQ ID NO: 1041455 - RNA, 19 nt, Homo sapiens
  misc_RNA (1)...(19): siRNA sense strand
aagaugauauuccacuuag

SEQ ID NO: 1041456 - RNA, 19 nt, Homo sapiens
  misc_RNA (1)...(19): siRNA sense strand
ugugauauauguucuagca

SEQ ID NO: 1041457 - RNA, 19 nt, Homo sapiens
  misc_RNA (1)...(19): siRNA sense strand
gacccuagcguauccauuc

SEQ ID NO: 1041458 - RNA, 19 nt, Homo sapiens
  misc_RNA (1)...(19): siRNA sense strand
gcugugcuguguggaauau

SEQ ID NO: 1041459 - RNA, 19 nt, Homo sapiens
  misc_RNA (1)...(19): siRNA sense strand
aaaucaaagccucuucaua

SEQ ID NO: 1041460 - RNA, 19 nt, Homo sapiens
  misc_RNA (1)...(19): siRNA sense strand
gaaaucaaagccucuucau

SEQ ID NO: 1041461 - RNA, 19 nt, Homo sapiens
  misc_RNA (1)...(19): siRNA sense strand
uacacaccuucuucuguua

SEQ ID NO: 1041462 - RNA, 19 nt, Homo sapiens
  misc_RNA (1)...(19): siRNA sense strand
augaagacauaaucacuga

SEQ ID NO: 1041463 - RNA, 19 nt, Homo sapiens
  misc_RNA (1)...(19): siRNA sense strand
aggcauggaucuuagugaa

SEQ ID NO: 1041464 - RNA, 19 nt, Homo sapiens
  misc_RNA (1)...(19): siRNA sense strand
caaaugacaagugacagaa

SEQ ID NO: 1041465 - RNA, 19 nt, Homo sapiens
  misc_RNA (1)...(19): siRNA sense strand
caccagagauguggcacuu

SEQ ID NO: 1041466 - RNA, 19 nt, Homo sapiens
  misc_RNA (1)...(19): siRNA sense strand
aaacccagccagcagaauu

SEQ ID NO: 1041467 - RNA, 19 nt, Homo sapiens
  misc_RNA (1)...(19): siRNA sense strand
ucaagaugauauuccacuu

SEQ ID NO: 1041468 - RNA, 19 nt, Homo sapiens
  misc_RNA (1)...(19): siRNA sense strand
gcuaggaguagaagaugaa

SEQ ID NO: 1041469 - RNA, 19 nt, Homo sapiens
  misc_RNA (1)...(19): siRNA sense strand
cagcagaauuacaguaugc

SEQ ID NO: 1041470 - RNA, 19 nt, Homo sapiens
  misc_RNA (1)...(19): siRNA sense strand
ggaaggccuugcucagacu

SEQ ID NO: 1041471 - RNA, 19 nt, Homo sapiens
  misc_RNA (1)...(19): siRNA sense strand
gacagaauccaccuuuaca

SEQ ID NO: 1041472 - RNA, 19 nt, Homo sapiens
  misc_RNA (1)...(19): siRNA sense strand
gucaucuaguucaucuuua

SEQ ID NO: 1041473 - RNA, 19 nt, Homo sapiens
  misc_RNA (1)...(19): siRNA sense strand
aagcaggaauugaggaaca

SEQ ID NO: 1041474 - RNA, 19 nt, Homo sapiens
  misc_RNA (1)...(19): siRNA sense strand
ccuggauccuacagcuuua

SEQ ID NO: 1041475 - RNA, 19 nt, Homo sapiens
  misc_RNA (1)...(19): siRNA sense strand
aaagaagucaucuaguuca

SEQ ID NO: 1041476 - RNA, 19 nt, Homo sapiens
  misc_RNA (1)...(19): siRNA sense strand
gugaagaguuaauguucuc

SEQ ID NO: 1041477 - RNA, 19 nt, Homo sapiens
  misc_RNA (1)...(19): siRNA sense strand
ggccaggcauggaucuuag

SEQ ID NO: 1041478 - RNA, 19 nt, Homo sapiens
  misc_RNA (1)...(19): siRNA sense strand
ggauugacuuugcuaaaau

SEQ ID NO: 1041479 - RNA, 19 nt, Homo sapiens
  misc_RNA (1)...(19): siRNA sense strand
caaugagccaucaacuaaa

SEQ ID NO: 1041480 - RNA, 19 nt, Homo sapiens
  misc_RNA (1)...(19): siRNA sense strand
ggcauuagccagccuguag

SEQ ID NO: 1041481 - RNA, 19 nt, Homo sapiens
  misc_RNA (1)...(19): siRNA sense strand
cccagaggcuccuguucaa

SEQ ID NO: 1041482 - RNA, 19 nt, Homo sapiens
  misc_RNA (1)...(19): siRNA sense strand
aaugagccaucaacuaaag

SEQ ID NO: 1041483 - RNA, 19 nt, Homo sapiens
  misc_RNA (1)...(19): siRNA sense strand
ccagcagaauuacaguaug

SEQ ID NO: 1041484 - RNA, 19 nt, Homo sapiens
  misc_RNA (1)...(19): siRNA sense strand
cuuuacugcucuuauacua

SEQ ID NO: 1041485 - RNA, 19 nt, Homo sapiens
  misc_RNA (1)...(19): siRNA sense strand
caggagaucagcuauccaa

SEQ ID NO: 1041486 - RNA, 19 nt, Homo sapiens
  misc_RNA (1)...(19): siRNA sense strand
gccaucaacuaaagaacuc

SEQ ID NO: 1041487 - RNA, 19 nt, Homo sapiens
  misc_RNA (1)...(19): siRNA sense strand
ccaggcugcugaucguuca

SEQ ID NO: 1041488 - RNA, 19 nt, Homo sapiens
  misc_RNA (1)...(19): siRNA sense strand
aaugacaagugacagaauc

SEQ ID NO: 1041489 - RNA, 19 nt, Homo sapiens
  misc_RNA (1)...(19): siRNA sense strand
gaucguucagaguugauaa

SEQ ID NO: 1041490 - RNA, 19 nt, Homo sapiens
  misc_RNA (1)...(19): siRNA sense strand
agaggcuccuguucaaaga

SEQ ID NO: 1041491 - RNA, 19 nt, Homo sapiens
  misc_RNA (1)...(19): siRNA sense strand
aaaagaagcccagaacaaa

SEQ ID NO: 1041492 - RNA, 19 nt, Homo sapiens
  misc_RNA (1)...(19): siRNA sense strand
ugacagaauccaccuuuac

SEQ ID NO: 1041493 - RNA, 19 nt, Homo sapiens
  misc_RNA (1)...(19): siRNA sense strand
cagcaaaugacaagugaca

SEQ ID NO: 1041494 - RNA, 19 nt, Homo sapiens
  misc_RNA (1)...(19): siRNA sense strand
gcuuuagcaucuuucuugu

SEQ ID NO: 1041495 - RNA, 19 nt, Homo sapiens
  misc_RNA (1)...(19): siRNA sense strand
ucaguagcaauccgaaauu

SEQ ID NO: 1041496 - RNA, 19 nt, Homo sapiens
  misc_RNA (1)...(19): siRNA sense strand
cagcugaggaggcaguuau

SEQ ID NO: 1041497 - RNA, 19 nt, Homo sapiens
  misc_RNA (1)...(19): siRNA sense strand
cagaauccaccuuuacaca

SEQ ID NO: 1041498 - RNA, 19 nt, Homo sapiens
  misc_RNA (1)...(19): siRNA sense strand
uuuagcaucuuucuuguac

SEQ ID NO: 1041499 - RNA, 19 nt, Homo sapiens
  misc_RNA (1)...(19): siRNA sense strand
caggauugacuuugcuaaa

SEQ ID NO: 1041500 - RNA, 19 nt, Homo sapiens
  misc_RNA (1)...(19): siRNA sense strand
gccagcagaauuacaguau

SEQ ID NO: 1041501 - RNA, 19 nt, Homo sapiens
  misc_RNA (1)...(19): siRNA sense strand
ugaggaggcaguuauucaa

SEQ ID NO: 1041502 - RNA, 19 nt, Homo sapiens
  misc_RNA (1)...(19): siRNA sense strand
ugugcuguguggaauauug

SEQ ID NO: 1041503 - RNA, 19 nt, Homo sapiens
  misc_RNA (1)...(19): siRNA sense strand
caccgggcuuucaggauga

SEQ ID NO: 1041504 - RNA, 19 nt, Homo sapiens
  misc_RNA (1)...(19): siRNA sense strand
gagcuaggaguagaagaug

SEQ ID NO: 1041505 - RNA, 19 nt, Homo sapiens
  misc_RNA (1)...(19): siRNA sense strand
agucaucuaguucaucuuu

SEQ ID NO: 1041506 - RNA, 19 nt, Homo sapiens
  misc_RNA (1)...(19): siRNA sense strand
ggcuaccucuugaauugga

SEQ ID NO: 1041507 - RNA, 19 nt, Homo sapiens
  misc_RNA (1)...(19): siRNA sense strand
agucuucuguacuugcuuu

SEQ ID NO: 1041508 - RNA, 19 nt, Homo sapiens
  misc_RNA (1)...(19): siRNA sense strand
guucaaagaagacagaaaa

SEQ ID NO: 1041509 - RNA, 19 nt, Homo sapiens
  misc_RNA (1)...(19): siRNA sense strand
ccugauaaagagaaagaaa

SEQ ID NO: 1041510 - RNA, 19 nt, Homo sapiens
  misc_RNA (1)...(19): siRNA sense strand
gcacccagaggcuccuguu

SEQ ID NO: 1041511 - RNA, 19 nt, Homo sapiens
  misc_RNA (1)...(19): siRNA sense strand
gaguacaauuucagcuuuu

SEQ ID NO: 1041512 - RNA, 19 nt, Homo sapiens
  misc_RNA (1)...(19): siRNA sense strand
uauccaaccucucaaaccu

SEQ ID NO: 1041513 - RNA, 19 nt, Homo sapiens
  misc_RNA (1)...(19): siRNA sense strand
aacccagccagcagaauua

SEQ ID NO: 1041514 - RNA, 19 nt, Homo sapiens
  misc_RNA (1)...(19): siRNA sense strand
agccauggauuguggugaa

SEQ ID NO: 1041515 - RNA, 19 nt, Homo sapiens
  misc_RNA (1)...(19): siRNA sense strand
acacaccuucuucuguuaa

SEQ ID NO: 1041516 - RNA, 19 nt, Homo sapiens
  misc_RNA (1)...(19): siRNA sense strand
guugugauauauguucuag

SEQ ID NO: 1041517 - RNA, 19 nt, Homo sapiens
  misc_RNA (1)...(19): siRNA sense strand
guuggauuaucuuggcuau

SEQ ID NO: 1041518 - RNA, 19 nt, Homo sapiens
  misc_RNA (1)...(19): siRNA sense strand
ccgcacagcucuacacuuu

SEQ ID NO: 1041519 - RNA, 19 nt, Homo sapiens
  misc_RNA (1)...(19): siRNA sense strand
ccaaagagcagguggauga

SEQ ID NO: 1041520 - RNA, 19 nt, Homo sapiens
  misc_RNA (1)...(19): siRNA sense strand
ugaagcagaucauccauau

SEQ ID NO: 1041521 - RNA, 19 nt, Homo sapiens
  misc_RNA (1)...(19): siRNA sense strand
gagcugcgcugcaagauac

SEQ ID NO: 1041522 - RNA, 19 nt, Homo sapiens
  misc_RNA (1)...(19): siRNA sense strand
gcacagcucuacacuuugc

SEQ ID NO: 1041523 - RNA, 19 nt, Homo sapiens
  misc_RNA (1)...(19): siRNA sense strand
ccaaugauguggaaacagu

SEQ ID NO: 1041524 - RNA, 19 nt, Homo sapiens
  misc_RNA (1)...(19): siRNA sense strand
caauggcaaugaccagauu

SEQ ID NO: 1041525 - RNA, 19 nt, Homo sapiens
  misc_RNA (1)...(19): siRNA sense strand
gcagaugaccaguaccaaa

SEQ ID NO: 1041526 - RNA, 19 nt, Homo sapiens
  misc_RNA (1)...(19): siRNA sense strand
gcagguggaugaagugacu

SEQ ID NO: 1041527 - RNA, 19 nt, Homo sapiens
  misc_RNA (1)...(19): siRNA sense strand
caaccacguuccugucauc

SEQ ID NO: 1041528 - RNA, 19 nt, Homo sapiens
  misc_RNA (1)...(19): siRNA sense strand
ccaagucaaagcugaauau

SEQ ID NO: 1041529 - RNA, 19 nt, Homo sapiens
  misc_RNA (1)...(19): siRNA sense strand
caaugccaaugauguggaa

SEQ ID NO: 1041530 - RNA, 19 nt, Homo sapiens
  misc_RNA (1)...(19): siRNA sense strand
gauccuaaccagcgagaug

SEQ ID NO: 1041531 - RNA, 19 nt, Homo sapiens
  misc_RNA (1)...(19): siRNA sense strand
ggacucggccaaugccaau

SEQ ID NO: 1041532 - RNA, 19 nt, Homo sapiens
  misc_RNA (1)...(19): siRNA sense strand
gugaagcagaucauccaua

SEQ ID NO: 1041533 - RNA, 19 nt, Homo sapiens
  misc_RNA (1)...(19): siRNA sense strand
agucaaagcugaauauccu

SEQ ID NO: 1041534 - RNA, 19 nt, Homo sapiens
  misc_RNA (1)...(19): siRNA sense strand
gcaauggcaaugaccagau

SEQ ID NO: 1041535 - RNA, 19 nt, Homo sapiens
  misc_RNA (1)...(19): siRNA sense strand
gaggugcacgcucugaaga

SEQ ID NO: 1041536 - RNA, 19 nt, Homo sapiens
  misc_RNA (1)...(19): siRNA sense strand
aagagcagguggaugaagu

SEQ ID NO: 1041537 - RNA, 19 nt, Homo sapiens
  misc_RNA (1)...(19): siRNA sense strand
gaugaccaguaccaaagag

SEQ ID NO: 1041538 - RNA, 19 nt, Homo sapiens
  misc_RNA (1)...(19): siRNA sense strand
cgagcugcgcugcaagaua

SEQ ID NO: 1041539 - RNA, 19 nt, Homo sapiens
  misc_RNA (1)...(19): siRNA sense strand
cagaugaccaguaccaaag

SEQ ID NO: 1041540 - RNA, 19 nt, Homo sapiens
  misc_RNA (1)...(19): siRNA sense strand
aagcagaucauccauaugc

SEQ ID NO: 1041541 - RNA, 19 nt, Homo sapiens
  misc_RNA (1)...(19): siRNA sense strand
gcucuacacuuugccucau

SEQ ID NO: 1041542 - RNA, 19 nt, Homo sapiens
  misc_RNA (1)...(19): siRNA sense strand
uccauaugcugagggagua

SEQ ID NO: 1041543 - RNA, 19 nt, Homo sapiens
  misc_RNA (1)...(19): siRNA sense strand
ggaggugcacgcucugaag

SEQ ID NO: 1041544 - RNA, 19 nt, Homo sapiens
  misc_RNA (1)...(19): siRNA sense strand
gcagcgagaacgccuggau

SEQ ID NO: 1041545 - RNA, 19 nt, Homo sapiens
  misc_RNA (1)...(19): siRNA sense strand
gaagcagaucauccauaug

SEQ ID NO: 1041546 - RNA, 19 nt, Homo sapiens
  misc_RNA (1)...(19): siRNA sense strand
ugucaucaccacacugcua

SEQ ID NO: 1041547 - RNA, 19 nt, Homo sapiens
  misc_RNA (1)...(19): siRNA sense strand
gacgagcugcgcugcaaga

SEQ ID NO: 1041548 - RNA, 19 nt, Homo sapiens
  misc_RNA (1)...(19): siRNA sense strand
caacaugagcagcgagaac

SEQ ID NO: 1041549 - RNA, 19 nt, Homo sapiens
  misc_RNA (1)...(19): siRNA sense strand
gagcagguggaugaaguga

SEQ ID NO: 1041550 - RNA, 19 nt, Homo sapiens
  misc_RNA (1)...(19): siRNA sense strand
caaagagcagguggaugaa

SEQ ID NO: 1041551 - RNA, 19 nt, Homo sapiens
  misc_RNA (1)...(19): siRNA sense strand
gcaccuggccaagucaaag

SEQ ID NO: 1041552 - RNA, 19 nt, Homo sapiens
  misc_RNA (1)...(19): siRNA sense strand
cagcuucaccucccucagu

SEQ ID NO: 1041553 - RNA, 19 nt, Homo sapiens
  misc_RNA (1)...(19): siRNA sense strand
gccaagucaaagcugaaua

SEQ ID NO: 1041554 - RNA, 19 nt, Homo sapiens
  misc_RNA (1)...(19): siRNA sense strand
ggccaaugccaaugaugug

SEQ ID NO: 1041555 - RNA, 19 nt, Homo sapiens
  misc_RNA (1)...(19): siRNA sense strand
gaaauuagguucaacaaug

SEQ ID NO: 1041556 - RNA, 19 nt, Homo sapiens
  misc_RNA (1)...(19): siRNA sense strand
gaaggggacuugauuauuu

SEQ ID NO: 1041557 - RNA, 19 nt, Homo sapiens
  misc_RNA (1)...(19): siRNA sense strand
uaagagaccauguaaagua

SEQ ID NO: 1041558 - RNA, 19 nt, Homo sapiens
  misc_RNA (1)...(19): siRNA sense strand
aacaauggauggaugauua

SEQ ID NO: 1041559 - RNA, 19 nt, Homo sapiens
  misc_RNA (1)...(19): siRNA sense strand
ggacagagcggaaaacaua

SEQ ID NO: 1041560 - RNA, 19 nt, Homo sapiens
  misc_RNA (1)...(19): siRNA sense strand
caacagguuucaguuauga

SEQ ID NO: 1041561 - RNA, 19 nt, Homo sapiens
  misc_RNA (1)...(19): siRNA sense strand
guagaggccugcaagaaau

SEQ ID NO: 1041562 - RNA, 19 nt, Homo sapiens
  misc_RNA (1)...(19): siRNA sense strand
gcaacagguuucaguuaug

SEQ ID NO: 1041563 - RNA, 19 nt, Homo sapiens
  misc_RNA (1)...(19): siRNA sense strand
ugaaagguaccaaagauaa

SEQ ID NO: 1041564 - RNA, 19 nt, Homo sapiens
  misc_RNA (1)...(19): siRNA sense strand
gaaacaacaguagacauuu

SEQ ID NO: 1041565 - RNA, 19 nt, Homo sapiens
  misc_RNA (1)...(19): siRNA sense strand
cgcaggcucugguguguua

SEQ ID NO: 1041566 - RNA, 19 nt, Homo sapiens
  misc_RNA (1)...(19): siRNA sense strand
auacaugaccgagaaauua

SEQ ID NO: 1041567 - RNA, 19 nt, Homo sapiens
  misc_RNA (1)...(19): siRNA sense strand
gagcaagugcagcaaagua

SEQ ID NO: 1041568 - RNA, 19 nt, Homo sapiens
  misc_RNA (1)...(19): siRNA sense strand
gaagagaaugcaacagguu

SEQ ID NO: 1041569 - RNA, 19 nt, Homo sapiens
  misc_RNA (1)...(19): siRNA sense strand
aagagaccauguaaaguaa

SEQ ID NO: 1041570 - RNA, 19 nt, Homo sapiens
  misc_RNA (1)...(19): siRNA sense strand
ugaaacaacaguagacauu

SEQ ID NO: 1041571 - RNA, 19 nt, Homo sapiens
  misc_RNA (1)...(19): siRNA sense strand
gaaagguaccaaagauaau

SEQ ID NO: 1041572 - RNA, 19 nt, Homo sapiens
  misc_RNA (1)...(19): siRNA sense strand
gaagauccuuauauuagac

SEQ ID NO: 1041573 - RNA, 19 nt, Homo sapiens
  misc_RNA (1)...(19): siRNA sense strand
ugagacaguuacagaaguu

SEQ ID NO: 1041574 - RNA, 19 nt, Homo sapiens
  misc_RNA (1)...(19): siRNA sense strand
guucaauacucuucuucaa

SEQ ID NO: 1041575 - RNA, 19 nt, Homo sapiens
  misc_RNA (1)...(19): siRNA sense strand
uuacagaaguuuggauaga

SEQ ID NO: 1041576 - RNA, 19 nt, Homo sapiens
  misc_RNA (1)...(19): siRNA sense strand
gcaagaaauagaagaguca

SEQ ID NO: 1041577 - RNA, 19 nt, Homo sapiens
  misc_RNA (1)...(19): siRNA sense strand
ggauggaugauuaagauug

SEQ ID NO: 1041578 - RNA, 19 nt, Homo sapiens
  misc_RNA (1)...(19): siRNA sense strand
ggagugcuguuggaaguuc

SEQ ID NO: 1041579 - RNA, 19 nt, Homo sapiens
  misc_RNA (1)...(19): siRNA sense strand
gauggaugauuaagauugg

SEQ ID NO: 1041580 - RNA, 19 nt, Homo sapiens
  misc_RNA (1)...(19): siRNA sense strand
ccaaagauaauacuaagag

SEQ ID NO: 1041581 - RNA, 19 nt, Homo sapiens
  misc_RNA (1)...(19): siRNA sense strand
caucagcuguauaacuuuc

SEQ ID NO: 1041582 - RNA, 19 nt, Homo sapiens
  misc_RNA (1)...(19): siRNA sense strand
ucugaaagguaccaaagau

SEQ ID NO: 1041583 - RNA, 19 nt, Homo sapiens
  misc_RNA (1)...(19): siRNA sense strand
cucaucagcuguauaacuu

SEQ ID NO: 1041584 - RNA, 19 nt, Homo sapiens
  misc_RNA (1)...(19): siRNA sense strand
cggaaaacauaaagaagua

SEQ ID NO: 1041585 - RNA, 19 nt, Homo sapiens
  misc_RNA (1)...(19): siRNA sense strand
uacagaaguuuggauagaa

SEQ ID NO: 1041586 - RNA, 19 nt, Homo sapiens
  misc_RNA (1)...(19): siRNA sense strand
gacauacucaucagcugua

SEQ ID NO: 1041587 - RNA, 19 nt, Homo sapiens
  misc_RNA (1)...(19): siRNA sense strand
ugcaacagguuucaguuau

SEQ ID NO: 1041588 - RNA, 19 nt, Homo sapiens
  misc_RNA (1)...(19): siRNA sense strand
gagaaauuagguucaacaa

SEQ ID NO: 1041589 - RNA, 19 nt, Homo sapiens
  misc_RNA (1)...(19): siRNA sense strand
caacaauggauggaugauu

SEQ ID NO: 1041590 - RNA, 19 nt, Homo sapiens
  misc_RNA (1)...(19): siRNA sense strand
aaauuagguucaacaaugg

SEQ ID NO: 1041591 - RNA, 19 nt, Homo sapiens
  misc_RNA (1)...(19): siRNA sense strand
gcuaaagcgggcaguagaa

SEQ ID NO: 1041592 - RNA, 19 nt, Homo sapiens
  misc_RNA (1)...(19): siRNA sense strand
guuggaaguucaauacucu

SEQ ID NO: 1041593 - RNA, 19 nt, Homo sapiens
  misc_RNA (1)...(19): siRNA sense strand
gcaagugcagcaaaguaga

SEQ ID NO: 1041594 - RNA, 19 nt, Homo sapiens
  misc_RNA (1)...(19): siRNA sense strand
uuaaugagacaguuacaga

SEQ ID NO: 1041595 - RNA, 19 nt, Homo sapiens
  misc_RNA (1)...(19): siRNA sense strand
gaaugcaacagguuucagu

SEQ ID NO: 1041596 - RNA, 19 nt, Homo sapiens
  misc_RNA (1)...(19): siRNA sense strand
ggaugaaggcauugagcaa

SEQ ID NO: 1041597 - RNA, 19 nt, Homo sapiens
  misc_RNA (1)...(19): siRNA sense strand
cuguauaacuuucuucgau

SEQ ID NO: 1041598 - RNA, 19 nt, Homo sapiens
  misc_RNA (1)...(19): siRNA sense strand
cgaauaccuuaaugagaca

SEQ ID NO: 1041599 - RNA, 19 nt, Homo sapiens
  misc_RNA (1)...(19): siRNA sense strand
uucaauacaugaccgagaa

SEQ ID NO: 1041600 - RNA, 19 nt, Homo sapiens
  misc_RNA (1)...(19): siRNA sense strand
aaagcgggcaguagaacua

SEQ ID NO: 1041601 - RNA, 19 nt, Homo sapiens
  misc_RNA (1)...(19): siRNA sense strand
gagaccauguaaaguaaaa

SEQ ID NO: 1041602 - RNA, 19 nt, Homo sapiens
  misc_RNA (1)...(19): siRNA sense strand
aguagaggccugcaagaaa

SEQ ID NO: 1041603 - RNA, 19 nt, Homo sapiens
  misc_RNA (1)...(19): siRNA sense strand
uaaugagacaguuacagaa

SEQ ID NO: 1041604 - RNA, 19 nt, Homo sapiens
  misc_RNA (1)...(19): siRNA sense strand
ucccuuggauauugugauu

SEQ ID NO: 1041605 - RNA, 19 nt, Homo sapiens
  misc_RNA (1)...(19): siRNA sense strand
cugaaagguaccaaagaua

SEQ ID NO: 1041606 - RNA, 19 nt, Homo sapiens
  misc_RNA (1)...(19): siRNA sense strand
gcaaaguagaggccugcaa

SEQ ID NO: 1041607 - RNA, 19 nt, Homo sapiens
  misc_RNA (1)...(19): siRNA sense strand
acagaaguuuggauagaag

SEQ ID NO: 1041608 - RNA, 19 nt, Homo sapiens
  misc_RNA (1)...(19): siRNA sense strand
uagaggccugcaagaaaua

SEQ ID NO: 1041609 - RNA, 19 nt, Homo sapiens
  misc_RNA (1)...(19): siRNA sense strand
acaauggauggaugauuaa

SEQ ID NO: 1041610 - RNA, 19 nt, Homo sapiens
  misc_RNA (1)...(19): siRNA sense strand
gagaaugcaacagguuuca

SEQ ID NO: 1041611 - RNA, 19 nt, Homo sapiens
  misc_RNA (1)...(19): siRNA sense strand
auggauggaugauuaagau

SEQ ID NO: 1041612 - RNA, 19 nt, Homo sapiens
  misc_RNA (1)...(19): siRNA sense strand
caauacucuucuucaauac

SEQ ID NO: 1041613 - RNA, 19 nt, Homo sapiens
  misc_RNA (1)...(19): siRNA sense strand
acauaaagaaguacuugga

SEQ ID NO: 1041614 - RNA, 19 nt, Homo sapiens
  misc_RNA (1)...(19): siRNA sense strand
cgagaaauuagguucaaca

SEQ ID NO: 1041615 - RNA, 19 nt, Homo sapiens
  misc_RNA (1)...(19): siRNA sense strand
auuaagagaccauguaaag

SEQ ID NO: 1041616 - RNA, 19 nt, Homo sapiens
  misc_RNA (1)...(19): siRNA sense strand
aagagaaugcaacagguuu

SEQ ID NO: 1041617 - RNA, 19 nt, Homo sapiens
  misc_RNA (1)...(19): siRNA sense strand
uaccuuaaugagacaguua

SEQ ID NO: 1041618 - RNA, 19 nt, Homo sapiens
  misc_RNA (1)...(19): siRNA sense strand
ugaaggcauugagcaagug

SEQ ID NO: 1041619 - RNA, 19 nt, Homo sapiens
  misc_RNA (1)...(19): siRNA sense strand
gagcggaaaacauaaagaa

SEQ ID NO: 1041620 - RNA, 19 nt, Homo sapiens
  misc_RNA (1)...(19): siRNA sense strand
ucucaccucucuggaugaa

SEQ ID NO: 1041621 - RNA, 19 nt, Homo sapiens
  misc_RNA (1)...(19): siRNA sense strand
augcaacagguuucaguua

SEQ ID NO: 1041622 - RNA, 19 nt, Homo sapiens
  misc_RNA (1)...(19): siRNA sense strand
ggaaggggacuugauuauu

SEQ ID NO: 1041623 - RNA, 19 nt, Homo sapiens
  misc_RNA (1)...(19): siRNA sense strand
gcuguuggaaguucaauac

SEQ ID NO: 1041624 - RNA, 19 nt, Homo sapiens
  misc_RNA (1)...(19): siRNA sense strand
gguaccaaagauaauacua

SEQ ID NO: 1041625 - RNA, 19 nt, Homo sapiens
  misc_RNA (1)...(19): siRNA sense strand
gaaguuuggauagaagauc

SEQ ID NO: 1041626 - RNA, 19 nt, Homo sapiens
  misc_RNA (1)...(19): siRNA sense strand
uggaaaauaucacaagcaa

SEQ ID NO: 1041627 - RNA, 19 nt, Homo sapiens
  misc_RNA (1)...(19): siRNA sense strand
aauacaugaccgagaaauu

SEQ ID NO: 1041628 - RNA, 19 nt, Homo sapiens
  misc_RNA (1)...(19): siRNA sense strand
ucagcuguauaacuuucuu

SEQ ID NO: 1041629 - RNA, 19 nt, Homo sapiens
  misc_RNA (1)...(19): siRNA sense strand
gaagauggaaaauaucaca

SEQ ID NO: 1041630 - RNA, 19 nt, Homo sapiens
  misc_RNA (1)...(19): siRNA sense strand
ccuuggauauugugauuuu

SEQ ID NO: 1041631 - RNA, 19 nt, Homo sapiens
  misc_RNA (1)...(19): siRNA sense strand
acggagugcuguuggaagu

SEQ ID NO: 1041632 - RNA, 19 nt, Homo sapiens
  misc_RNA (1)...(19): siRNA sense strand
gcuccugcagguucugaaa

SEQ ID NO: 1041633 - RNA, 19 nt, Homo sapiens
  misc_RNA (1)...(19): siRNA sense strand
gaaacaaccuagugaaaug

SEQ ID NO: 1041634 - RNA, 19 nt, Homo sapiens
  misc_RNA (1)...(19): siRNA sense strand
gaaaagagcugcuacagaa

SEQ ID NO: 1041635 - RNA, 19 nt, Homo sapiens
  misc_RNA (1)...(19): siRNA sense strand
gcggacaucucuagacuua

SEQ ID NO: 1041636 - RNA, 19 nt, Homo sapiens
  misc_RNA (1)...(19): siRNA sense strand
gggagaagauugccuacuu

SEQ ID NO: 1041637 - RNA, 19 nt, Homo sapiens
  misc_RNA (1)...(19): siRNA sense strand
ggauaaagaccuuaaugaa

SEQ ID NO: 1041638 - RNA, 19 nt, Homo sapiens
  misc_RNA (1)...(19): siRNA sense strand
ccaaagaccucagaaguca

SEQ ID NO: 1041639 - RNA, 19 nt, Homo sapiens
  misc_RNA (1)...(19): siRNA sense strand
caaacagccuuacaacaga

SEQ ID NO: 1041640 - RNA, 19 nt, Homo sapiens
  misc_RNA (1)...(19): siRNA sense strand
gaacaagaauuagcacaag

SEQ ID NO: 1041641 - RNA, 19 nt, Homo sapiens
  misc_RNA (1)...(19): siRNA sense strand
ggacucagauacaaugcaa

SEQ ID NO: 1041642 - RNA, 19 nt, Homo sapiens
  misc_RNA (1)...(19): siRNA sense strand
gauaucagccucaucgaaa

SEQ ID NO: 1041643 - RNA, 19 nt, Homo sapiens
  misc_RNA (1)...(19): siRNA sense strand
gaaagcaacugugccaaag

SEQ ID NO: 1041644 - RNA, 19 nt, Homo sapiens
  misc_RNA (1)...(19): siRNA sense strand
gauuuaaguucaugcacua

SEQ ID NO: 1041645 - RNA, 19 nt, Homo sapiens
  misc_RNA (1)...(19): siRNA sense strand
gaugucagcugucuguuuc

SEQ ID NO: 1041646 - RNA, 19 nt, Homo sapiens
  misc_RNA (1)...(19): siRNA sense strand
ucagauagauguggauuau

SEQ ID NO: 1041647 - RNA, 19 nt, Homo sapiens
  misc_RNA (1)...(19): siRNA sense strand
gaaggcacguuucccaugu

SEQ ID NO: 1041648 - RNA, 19 nt, Homo sapiens
  misc_RNA (1)...(19): siRNA sense strand
gauggagacuggcuaacaa

SEQ ID NO: 1041649 - RNA, 19 nt, Homo sapiens
  misc_RNA (1)...(19): siRNA sense strand
ugaaggaacugcagaugug

SEQ ID NO: 1041650 - RNA, 19 nt, Homo sapiens
  misc_RNA (1)...(19): siRNA sense strand
ugaagaggauguagccauu

SEQ ID NO: 1041651 - RNA, 19 nt, Homo sapiens
  misc_RNA (1)...(19): siRNA sense strand
agaauuagcacaagaagaa

SEQ ID NO: 1041652 - RNA, 19 nt, Homo sapiens
  misc_RNA (1)...(19): siRNA sense strand
guacagaagauuuaaguuc

SEQ ID NO: 1041653 - RNA, 19 nt, Homo sapiens
  misc_RNA (1)...(19): siRNA sense strand
gaagaagaaucaggacaag

SEQ ID NO: 1041654 - RNA, 19 nt, Homo sapiens
  misc_RNA (1)...(19): siRNA sense strand
aaacugaugcugauuaaug

SEQ ID NO: 1041655 - RNA, 19 nt, Homo sapiens
  misc_RNA (1)...(19): siRNA sense strand
caguacaucugcagguuaa

SEQ ID NO: 1041656 - RNA, 19 nt, Homo sapiens
  misc_RNA (1)...(19): siRNA sense strand
gcaagaacaucagcugagu

SEQ ID NO: 1041657 - RNA, 19 nt, Homo sapiens
  misc_RNA (1)...(19): siRNA sense strand
gaagaguugcugucuguga

SEQ ID NO: 1041658 - RNA, 19 nt, Homo sapiens
  misc_RNA (1)...(19): siRNA sense strand
gaagucagccaccuacuag

SEQ ID NO: 1041659 - RNA, 19 nt, Homo sapiens
  misc_RNA (1)...(19): siRNA sense strand
aaaagaggcugaaguuaaa

SEQ ID NO: 1041660 - RNA, 19 nt, Homo sapiens
  misc_RNA (1)...(19): siRNA sense strand
gaucagccuggcagauuua

SEQ ID NO: 1041661 - RNA, 19 nt, Homo sapiens
  misc_RNA (1)...(19): siRNA sense strand
gaccuuugcucugucagua

SEQ ID NO: 1041662 - RNA, 19 nt, Homo sapiens
  misc_RNA (1)...(19): siRNA sense strand
cuagggagccauuauauga

SEQ ID NO: 1041663 - RNA, 19 nt, Homo sapiens
  misc_RNA (1)...(19): siRNA sense strand
acaaagagacaaacacuga

SEQ ID NO: 1041664 - RNA, 19 nt, Homo sapiens
  misc_RNA (1)...(19): siRNA sense strand
ccuggcagauuuaccauuu

SEQ ID NO: 1041665 - RNA, 19 nt, Homo sapiens
  misc_RNA (1)...(19): siRNA sense strand
ucaaugauguguucagagu

SEQ ID NO: 1041666 - RNA, 19 nt, Homo sapiens
  misc_RNA (1)...(19): siRNA sense strand
caaguuucauggugauuau

SEQ ID NO: 1041667 - RNA, 19 nt, Homo sapiens
  misc_RNA (1)...(19): siRNA sense strand
uacccaagaugaauuagaa

SEQ ID NO: 1041668 - RNA, 19 nt, Homo sapiens
  misc_RNA (1)...(19): siRNA sense strand
caggagagcggaaccagua

SEQ ID NO: 1041669 - RNA, 19 nt, Homo sapiens
  misc_RNA (1)...(19): siRNA sense strand
ugaauuagaacgccuagaa

SEQ ID NO: 1041670 - RNA, 19 nt, Homo sapiens
  misc_RNA (1)...(19): siRNA sense strand
gaagaacaacacaggaaug

SEQ ID NO: 1041671 - RNA, 19 nt, Homo sapiens
  misc_RNA (1)...(19): siRNA sense strand
gauguggauuaucaguaua

SEQ ID NO: 1041672 - RNA, 19 nt, Homo sapiens
  misc_RNA (1)...(19): siRNA sense strand
gaaacguacccaagaugaa

SEQ ID NO: 1041673 - RNA, 19 nt, Homo sapiens
  misc_RNA (1)...(19): siRNA sense strand
ucagccaccuacuagaaua

SEQ ID NO: 1041674 - RNA, 19 nt, Homo sapiens
  misc_RNA (1)...(19): siRNA sense strand
ggaacaagaauuagcacaa

SEQ ID NO: 1041675 - RNA, 19 nt, Homo sapiens
  misc_RNA (1)...(19): siRNA sense strand
gaagaaugccuggcuggaa

SEQ ID NO: 1041676 - RNA, 19 nt, Homo sapiens
  misc_RNA (1)...(19): siRNA sense strand
aagaagaguugcugucugu

SEQ ID NO: 1041677 - RNA, 19 nt, Homo sapiens
  misc_RNA (1)...(19): siRNA sense strand
gaagcaaggucugaaugca

SEQ ID NO: 1041678 - RNA, 19 nt, Homo sapiens
  misc_RNA (1)...(19): siRNA sense strand
agacuuggaugcaguguca

SEQ ID NO: 1041679 - RNA, 19 nt, Homo sapiens
  misc_RNA (1)...(19): siRNA sense strand
ugaggacucuguauuucaa

SEQ ID NO: 1041680 - RNA, 19 nt, Homo sapiens
  misc_RNA (1)...(19): siRNA sense strand
cagucaaagugaucagaua

SEQ ID NO: 1041681 - RNA, 19 nt, Homo sapiens
  misc_RNA (1)...(19): siRNA sense strand
ccaccgaacucuauuacag

SEQ ID NO: 1041682 - RNA, 19 nt, Homo sapiens
  misc_RNA (1)...(19): siRNA sense strand
gaagcuggaggaacugaaa

SEQ ID NO: 1041683 - RNA, 19 nt, Homo sapiens
  misc_RNA (1)...(19): siRNA sense strand
acaagaagaagaagaagaa

SEQ ID NO: 1041684 - RNA, 19 nt, Homo sapiens
  misc_RNA (1)...(19): siRNA sense strand
cuagugaaauggaagaugu

SEQ ID NO: 1041685 - RNA, 19 nt, Homo sapiens
  misc_RNA (1)...(19): siRNA sense strand
gccgagagauugagauugg

SEQ ID NO: 1041686 - RNA, 19 nt, Homo sapiens
  misc_RNA (1)...(19): siRNA sense strand
agaagaaucaggacaagaa

SEQ ID NO: 1041687 - RNA, 19 nt, Homo sapiens
  misc_RNA (1)...(19): siRNA sense strand
caaaccagccguuaguaga

SEQ ID NO: 1041688 - RNA, 19 nt, Homo sapiens
  misc_RNA (1)...(19): siRNA sense strand
gcacguuucccaugucuuc

SEQ ID NO: 1041689 - RNA, 19 nt, Homo sapiens
  misc_RNA (1)...(19): siRNA sense strand
ggcagaagcuggaggaacu

SEQ ID NO: 1041690 - RNA, 19 nt, Homo sapiens
  misc_RNA (1)...(19): siRNA sense strand
ugaagccgcuaaugacaau

SEQ ID NO: 1041691 - RNA, 19 nt, Homo sapiens
  misc_RNA (1)...(19): siRNA sense strand
agaagaagaagaagaauca

SEQ ID NO: 1041692 - RNA, 19 nt, Homo sapiens
  misc_RNA (1)...(19): siRNA sense strand
ccaaacagccuuacaacag

SEQ ID NO: 1041693 - RNA, 19 nt, Homo sapiens
  misc_RNA (1)...(19): siRNA sense strand
cuacuuauuugcauucaca

SEQ ID NO: 1041694 - RNA, 19 nt, Homo sapiens
  misc_RNA (1)...(19): siRNA sense strand
aaacagccuuacaacagaa

SEQ ID NO: 1041695 - RNA, 19 nt, Homo sapiens
  misc_RNA (1)...(19): siRNA sense strand
cuacagaaacuugaagaaa

SEQ ID NO: 1041696 - RNA, 19 nt, Homo sapiens
  misc_RNA (1)...(19): siRNA sense strand
cuugauaccucauacuuca

SEQ ID NO: 1041697 - RNA, 19 nt, Homo sapiens
  misc_RNA (1)...(19): siRNA sense strand
gaggauaaagaccuuaaug

SEQ ID NO: 1041698 - RNA, 19 nt, Homo sapiens
  misc_RNA (1)...(19): siRNA sense strand
agauguggauuaucaguau

SEQ ID NO: 1041699 - RNA, 19 nt, Homo sapiens
  misc_RNA (1)...(19): siRNA sense strand
ucaaagugaucagauagau

SEQ ID NO: 1041700 - RNA, 19 nt, Homo sapiens
  misc_RNA (1)...(19): siRNA sense strand
gagaaaagcgguuacauuc

SEQ ID NO: 1041701 - RNA, 19 nt, Homo sapiens
  misc_RNA (1)...(19): siRNA sense strand
gugaaacaaccuagugaaa

SEQ ID NO: 1041702 - RNA, 19 nt, Homo sapiens
  misc_RNA (1)...(19): siRNA sense strand
gaggagcagugugauagug

SEQ ID NO: 1041703 - RNA, 19 nt, Homo sapiens
  misc_RNA (1)...(19): siRNA sense strand
ugccugagaugaaugaaga

SEQ ID NO: 1041704 - RNA, 19 nt, Homo sapiens
  misc_RNA (1)...(19): siRNA sense strand
ggguagaccuuugcucugu

SEQ ID NO: 1041705 - RNA, 19 nt, Homo sapiens
  misc_RNA (1)...(19): siRNA sense strand
ggauguagccauuguagag

SEQ ID NO: 1041706 - RNA, 19 nt, Homo sapiens
  misc_RNA (1)...(19): siRNA sense strand
gacgggaacaggaaagaaa

SEQ ID NO: 1041707 - RNA, 19 nt, Homo sapiens
  misc_RNA (1)...(19): siRNA sense strand
gcugaacaguccaaagaag

SEQ ID NO: 1041708 - RNA, 19 nt, Homo sapiens
  misc_RNA (1)...(19): siRNA sense strand
ggagugacagugacaguuc

SEQ ID NO: 1041709 - RNA, 19 nt, Homo sapiens
  misc_RNA (1)...(19): siRNA sense strand
uacagaaacuugaagaaac

SEQ ID NO: 1041710 - RNA, 19 nt, Homo sapiens
  misc_RNA (1)...(19): siRNA sense strand
uagcuguacagaagauuua

SEQ ID NO: 1041711 - RNA, 19 nt, Homo sapiens
  misc_RNA (1)...(19): siRNA sense strand
acagaaacguacccaagau

SEQ ID NO: 1041712 - RNA, 19 nt, Homo sapiens
  misc_RNA (1)...(19): siRNA sense strand
aaagugaucagauagaugu

SEQ ID NO: 1041713 - RNA, 19 nt, Homo sapiens
  misc_RNA (1)...(19): siRNA sense strand
gguccucccuuuccuccuu

SEQ ID NO: 1041714 - RNA, 19 nt, Homo sapiens
  misc_RNA (1)...(19): siRNA sense strand
ggaugcagugucagccuua

SEQ ID NO: 1041715 - RNA, 19 nt, Homo sapiens
  misc_RNA (1)...(19): siRNA sense strand
ugguauaacuugcuuccuu

SEQ ID NO: 1041716 - RNA, 19 nt, Homo sapiens
  misc_RNA (1)...(19): siRNA sense strand
acagaaacuugaagaaacu

SEQ ID NO: 1041717 - RNA, 19 nt, Homo sapiens
  misc_RNA (1)...(19): siRNA sense strand
uaaaucggagugacaguga

SEQ ID NO: 1041718 - RNA, 19 nt, Homo sapiens
  misc_RNA (1)...(19): siRNA sense strand
cagaagauuuaaguucaug

SEQ ID NO: 1041719 - RNA, 19 nt, Homo sapiens
  misc_RNA (1)...(19): siRNA sense strand
guagaccuuugcucuguca

SEQ ID NO: 1041720 - RNA, 19 nt, Homo sapiens
  misc_RNA (1)...(19): siRNA sense strand
ugaaacaaccuagugaaau

SEQ ID NO: 1041721 - RNA, 19 nt, Homo sapiens
  misc_RNA (1)...(19): siRNA sense strand
cggcugcugugucugauga

SEQ ID NO: 1041722 - RNA, 19 nt, Homo sapiens
  misc_RNA (1)...(19): siRNA sense strand
gccauuauaugaaggaacu

SEQ ID NO: 1041723 - RNA, 19 nt, Homo sapiens
  misc_RNA (1)...(19): siRNA sense strand
gugcuagggagccauuaua

SEQ ID NO: 1041724 - RNA, 19 nt, Homo sapiens
  misc_RNA (1)...(19): siRNA sense strand
ugaggcaagucuccaagga

SEQ ID NO: 1041725 - RNA, 19 nt, Homo sapiens
  misc_RNA (1)...(19): siRNA sense strand
caaagaagagcagaagcaa

SEQ ID NO: 1041726 - RNA, 19 nt, Homo sapiens
  misc_RNA (1)...(19): siRNA sense strand
gagcugcuacagaaacuug

SEQ ID NO: 1041727 - RNA, 19 nt, Homo sapiens
  misc_RNA (1)...(19): siRNA sense strand
agaucagccuggcagauuu

SEQ ID NO: 1041728 - RNA, 19 nt, Homo sapiens
  misc_RNA (1)...(19): siRNA sense strand
cuucaugccuucuugauac

SEQ ID NO: 1041729 - RNA, 19 nt, Homo sapiens
  misc_RNA (1)...(19): siRNA sense strand
aaaccuucaugccuucuug

SEQ ID NO: 1041730 - RNA, 19 nt, Homo sapiens
  misc_RNA (1)...(19): siRNA sense strand
ucaaguuucauggugauua

SEQ ID NO: 1041731 - RNA, 19 nt, Homo sapiens
  misc_RNA (1)...(19): siRNA sense strand
ccaguacaucugcagguua

SEQ ID NO: 1041732 - RNA, 19 nt, Homo sapiens
  misc_RNA (1)...(19): siRNA sense strand
ccaaagaagagcagaagca

SEQ ID NO: 1041733 - RNA, 19 nt, Homo sapiens
  misc_RNA (1)...(19): siRNA sense strand
gaugaaacccugauuccua

SEQ ID NO: 1041734 - RNA, 19 nt, Homo sapiens
  misc_RNA (1)...(19): siRNA sense strand
gcggagagcucauagucaa

SEQ ID NO: 1041735 - RNA, 19 nt, Homo sapiens
  misc_RNA (1)...(19): siRNA sense strand
ccauagaagcggauacuua

SEQ ID NO: 1041736 - RNA, 19 nt, Homo sapiens
  misc_RNA (1)...(19): siRNA sense strand
ggagucagaggguuugaua

SEQ ID NO: 1041737 - RNA, 19 nt, Homo sapiens
  misc_RNA (1)...(19): siRNA sense strand
gaccaaccauucuuacuuc

SEQ ID NO: 1041738 - RNA, 19 nt, Homo sapiens
  misc_RNA (1)...(19): siRNA sense strand
gaaaacaccugcaggacuu

SEQ ID NO: 1041739 - RNA, 19 nt, Homo sapiens
  misc_RNA (1)...(19): siRNA sense strand
gaccacaauuucugucuga

SEQ ID NO: 1041740 - RNA, 19 nt, Homo sapiens
  misc_RNA (1)...(19): siRNA sense strand
cugaagggaucuaaagaaa

SEQ ID NO: 1041741 - RNA, 19 nt, Homo sapiens
  misc_RNA (1)...(19): siRNA sense strand
uagaagcggauacuuauuu

SEQ ID NO: 1041742 - RNA, 19 nt, Homo sapiens
  misc_RNA (1)...(19): siRNA sense strand
gagggacaguggagaaguu

SEQ ID NO: 1041743 - RNA, 19 nt, Homo sapiens
  misc_RNA (1)...(19): siRNA sense strand
gaagggaucuaaagaaaag

SEQ ID NO: 1041744 - RNA, 19 nt, Homo sapiens
  misc_RNA (1)...(19): siRNA sense strand
gaguaucaccuggccauua

SEQ ID NO: 1041745 - RNA, 19 nt, Homo sapiens
  misc_RNA (1)...(19): siRNA sense strand
aguaucaccuggccauuaa

SEQ ID NO: 1041746 - RNA, 19 nt, Homo sapiens
  misc_RNA (1)...(19): siRNA sense strand
gcagucagaccucuugaga

SEQ ID NO: 1041747 - RNA, 19 nt, Homo sapiens
  misc_RNA (1)...(19): siRNA sense strand
cauagaagcggauacuuau

SEQ ID NO: 1041748 - RNA, 19 nt, Homo sapiens
  misc_RNA (1)...(19): siRNA sense strand
ucagaggguuugauaaagu

SEQ ID NO: 1041749 - RNA, 19 nt, Homo sapiens
  misc_RNA (1)...(19): siRNA sense strand
cuuccuggauggcacauua

SEQ ID NO: 1041750 - RNA, 19 nt, Homo sapiens
  misc_RNA (1)...(19): siRNA sense strand
agaagcggauacuuauuug

SEQ ID NO: 1041751 - RNA, 19 nt, Homo sapiens
  misc_RNA (1)...(19): siRNA sense strand
ucacagcccuagaggucaa

SEQ ID NO: 1041752 - RNA, 19 nt, Homo sapiens
  misc_RNA (1)...(19): siRNA sense strand
cugcaggacuuccaucuca

SEQ ID NO: 1041753 - RNA, 19 nt, Homo sapiens
  misc_RNA (1)...(19): siRNA sense strand
caaccauucuuacuucaac

SEQ ID NO: 1041754 - RNA, 19 nt, Homo sapiens
  misc_RNA (1)...(19): siRNA sense strand
gcaagaauggagcugucua

SEQ ID NO: 1041755 - RNA, 19 nt, Homo sapiens
  misc_RNA (1)...(19): siRNA sense strand
cagaggguuugauaaagug

SEQ ID NO: 1041756 - RNA, 19 nt, Homo sapiens
  misc_RNA (1)...(19): siRNA sense strand
caaauggcguccaguucuc

SEQ ID NO: 1041757 - RNA, 19 nt, Homo sapiens
  misc_RNA (1)...(19): siRNA sense strand
ucgccgaguuggaaggaua

SEQ ID NO: 1041758 - RNA, 19 nt, Homo sapiens
  misc_RNA (1)...(19): siRNA sense strand
caagaauggagcugucuau

SEQ ID NO: 1041759 - RNA, 19 nt, Homo sapiens
  misc_RNA (1)...(19): siRNA sense strand
uaacaaggaacccaacagu

SEQ ID NO: 1041760 - RNA, 19 nt, Homo sapiens
  misc_RNA (1)...(19): siRNA sense strand
agucagaggguuugauaaa

SEQ ID NO: 1041761 - RNA, 19 nt, Homo sapiens
  misc_RNA (1)...(19): siRNA sense strand
ugaccaaccauucuuacuu

SEQ ID NO: 1041762 - RNA, 19 nt, Homo sapiens
  misc_RNA (1)...(19): siRNA sense strand
gaggagggacaguggagaa

SEQ ID NO: 1041763 - RNA, 19 nt, Homo sapiens
  misc_RNA (1)...(19): siRNA sense strand
gcacauuaaagggcaagaa

SEQ ID NO: 1041764 - RNA, 19 nt, Homo sapiens
  misc_RNA (1)...(19): siRNA sense strand
gccauacuuuggagcaguu

SEQ ID NO: 1041765 - RNA, 19 nt, Homo sapiens
  misc_RNA (1)...(19): siRNA sense strand
caguccagauggugaagaa

SEQ ID NO: 1041766 - RNA, 19 nt, Homo sapiens
  misc_RNA (1)...(19): siRNA sense strand
caaccgaaucgccaaagga

SEQ ID NO: 1041767 - RNA, 19 nt, Homo sapiens
  misc_RNA (1)...(19): siRNA sense strand
acaaggaacccaacagucu

SEQ ID NO: 1041768 - RNA, 19 nt, Homo sapiens
  misc_RNA (1)...(19): siRNA sense strand
guccaguucucgcgcauca

SEQ ID NO: 1041769 - RNA, 19 nt, Homo sapiens
  misc_RNA (1)...(19): siRNA sense strand
ucaaauggcguccaguucu

SEQ ID NO: 1041770 - RNA, 19 nt, Homo sapiens
  misc_RNA (1)...(19): siRNA sense strand
gcaggacuuccaucucaau

SEQ ID NO: 1041771 - RNA, 19 nt, Homo sapiens
  misc_RNA (1)...(19): siRNA sense strand
gaccagggccguguuugga

SEQ ID NO: 1041772 - RNA, 19 nt, Homo sapiens
  misc_RNA (1)...(19): siRNA sense strand
ggauggcggagagcucaua

SEQ ID NO: 1041773 - RNA, 19 nt, Homo sapiens
  misc_RNA (1)...(19): siRNA sense strand
ggccaggcuuccccaaaua

SEQ ID NO: 1041774 - RNA, 19 nt, Homo sapiens
  misc_RNA (1)...(19): siRNA sense strand
ccaugaagucaccauagaa

SEQ ID NO: 1041775 - RNA, 19 nt, Homo sapiens
  misc_RNA (1)...(19): siRNA sense strand
gaccaugaagucaccauag

SEQ ID NO: 1041776 - RNA, 19 nt, Homo sapiens
  misc_RNA (1)...(19): siRNA sense strand
gaggguggccaaccgaauc

SEQ ID NO: 1041777 - RNA, 19 nt, Homo sapiens
  misc_RNA (1)...(19): siRNA sense strand
ggaaggauaccuccaaaag

SEQ ID NO: 1041778 - RNA, 19 nt, Homo sapiens
  misc_RNA (1)...(19): siRNA sense strand
accaugaagucaccauaga

SEQ ID NO: 1041779 - RNA, 19 nt, Homo sapiens
  misc_RNA (1)...(19): siRNA sense strand
uauaaaugaccaugaaguc

SEQ ID NO: 1041780 - RNA, 19 nt, Homo sapiens
  misc_RNA (1)...(19): siRNA sense strand
cuuauuugccuguggauga

SEQ ID NO: 1041781 - RNA, 19 nt, Homo sapiens
  misc_RNA (1)...(19): siRNA sense strand
ggaggagucagaggguuug

SEQ ID NO: 1041782 - RNA, 19 nt, Homo sapiens
  misc_RNA (1)...(19): siRNA sense strand
gaaguuccagcugcaguca

SEQ ID NO: 1041783 - RNA, 19 nt, Homo sapiens
  misc_RNA (1)...(19): siRNA sense strand
gucagaggguuugauaaag

SEQ ID NO: 1041784 - RNA, 19 nt, Homo sapiens
  misc_RNA (1)...(19): siRNA sense strand
ucugaagggaucuaaagaa

SEQ ID NO: 1041785 - RNA, 19 nt, Homo sapiens
  misc_RNA (1)...(19): siRNA sense strand
caaguuuucuguggcuuaa

SEQ ID NO: 1041786 - RNA, 19 nt, Homo sapiens
  misc_RNA (1)...(19): siRNA sense strand
gagucagaggguuugauaa

SEQ ID NO: 1041787 - RNA, 19 nt, Homo sapiens
  misc_RNA (1)...(19): siRNA sense strand
ggccuggugaggaguauga

SEQ ID NO: 1041788 - RNA, 19 nt, Homo sapiens
  misc_RNA (1)...(19): siRNA sense strand
uuauuugccuguggaugaa

SEQ ID NO: 1041789 - RNA, 19 nt, Homo sapiens
  misc_RNA (1)...(19): siRNA sense strand
caaccugaccaaccauucu

SEQ ID NO: 1041790 - RNA, 19 nt, Homo sapiens
  misc_RNA (1)...(19): siRNA sense strand
ugucaaauggcguccaguu

SEQ ID NO: 1041791 - RNA, 19 nt, Homo sapiens
  misc_RNA (1)...(19): siRNA sense strand
ggaggguggccaaccgaau

SEQ ID NO: 1041792 - RNA, 19 nt, Homo sapiens
  misc_RNA (1)...(19): siRNA sense strand
caugaagucaccauagaag

SEQ ID NO: 1041793 - RNA, 19 nt, Homo sapiens
  misc_RNA (1)...(19): siRNA sense strand
ggagagcucauagucaacu

SEQ ID NO: 1041794 - RNA, 19 nt, Homo sapiens
  misc_RNA (1)...(19): siRNA sense strand
guuucugccuggagacuca

SEQ ID NO: 1041795 - RNA, 19 nt, Homo sapiens
  misc_RNA (1)...(19): siRNA sense strand
cacauuaaagggcaagaau

SEQ ID NO: 1041796 - RNA, 19 nt, Homo sapiens
  misc_RNA (1)...(19): siRNA sense strand
ucaccuggccauuaacaag

SEQ ID NO: 1041797 - RNA, 19 nt, Homo sapiens
  misc_RNA (1)...(19): siRNA sense strand
ggugaccagggccguguuu

SEQ ID NO: 1041798 - RNA, 19 nt, Homo sapiens
  misc_RNA (1)...(19): siRNA sense strand
ccaaccgaaucgccaaagg

SEQ ID NO: 1041799 - RNA, 19 nt, Homo sapiens
  misc_RNA (1)...(19): siRNA sense strand
ggaagaagaccuagcuuua

SEQ ID NO: 1041800 - RNA, 19 nt, Homo sapiens
  misc_RNA (1)...(19): siRNA sense strand
cguaagaucuucaccaaua

SEQ ID NO: 1041801 - RNA, 19 nt, Homo sapiens
  misc_RNA (1)...(19): siRNA sense strand
guaagaucuucaccaauaa

SEQ ID NO: 1041802 - RNA, 19 nt, Homo sapiens
  misc_RNA (1)...(19): siRNA sense strand
ugaugaaacugaccuguga

SEQ ID NO: 1041803 - RNA, 19 nt, Homo sapiens
  misc_RNA (1)...(19): siRNA sense strand
gagagcacauugacagaga

SEQ ID NO: 1041804 - RNA, 19 nt, Homo sapiens
  misc_RNA (1)...(19): siRNA sense strand
agaccuagcuuuagcacaa

SEQ ID NO: 1041805 - RNA, 19 nt, Homo sapiens
  misc_RNA (1)...(19): siRNA sense strand
gaagaagaccuagcuuuag

SEQ ID NO: 1041806 - RNA, 19 nt, Homo sapiens
  misc_RNA (1)...(19): siRNA sense strand
ggaaaugucccuggcagaa

SEQ ID NO: 1041807 - RNA, 19 nt, Homo sapiens
  misc_RNA (1)...(19): siRNA sense strand
cgagaaaugaugaaacuga

SEQ ID NO: 1041808 - RNA, 19 nt, Homo sapiens
  misc_RNA (1)...(19): siRNA sense strand
gaaaugucccuggcagaaa

SEQ ID NO: 1041809 - RNA, 19 nt, Homo sapiens
  misc_RNA (1)...(19): siRNA sense strand
gcucgaagccguccaacug

SEQ ID NO: 1041810 - RNA, 19 nt, Homo sapiens
  misc_RNA (1)...(19): siRNA sense strand
ccaaaaggauauccaggua

SEQ ID NO: 1041811 - RNA, 19 nt, Homo sapiens
  misc_RNA (1)...(19): siRNA sense strand
gaucuucaccaauaagugu

SEQ ID NO: 1041812 - RNA, 19 nt, Homo sapiens
  misc_RNA (1)...(19): siRNA sense strand
caaguugucaggaggaaga

SEQ ID NO: 1041813 - RNA, 19 nt, Homo sapiens
  misc_RNA (1)...(19): siRNA sense strand
caaaccaugccuuccugua

SEQ ID NO: 1041814 - RNA, 19 nt, Homo sapiens
  misc_RNA (1)...(19): siRNA sense strand
gugauugcuuugcagaaug

SEQ ID NO: 1041815 - RNA, 19 nt, Homo sapiens
  misc_RNA (1)...(19): siRNA sense strand
agccgaaacuucugcauca

SEQ ID NO: 1041816 - RNA, 19 nt, Homo sapiens
  misc_RNA (1)...(19): siRNA sense strand
cagcaucacuguggaucug

SEQ ID NO: 1041817 - RNA, 19 nt, Homo sapiens
  misc_RNA (1)...(19): siRNA sense strand
aacguaagaucuucaccaa

SEQ ID NO: 1041818 - RNA, 19 nt, Homo sapiens
  misc_RNA (1)...(19): siRNA sense strand
guaccugugugcccucucu

SEQ ID NO: 1041819 - RNA, 19 nt, Homo sapiens
  misc_RNA (1)...(19): siRNA sense strand
ggaggaagaagaccuagcu

SEQ ID NO: 1041820 - RNA, 19 nt, Homo sapiens
  misc_RNA (1)...(19): siRNA sense strand
aagaagaccuagcuuuagc

SEQ ID NO: 1041821 - RNA, 19 nt, Homo sapiens
  misc_RNA (1)...(19): siRNA sense strand
gcagcgagaaaugaugaaa

SEQ ID NO: 1041822 - RNA, 19 nt, Homo sapiens
  misc_RNA (1)...(19): siRNA sense strand
aaaugucccuggcagaaac

SEQ ID NO: 1041823 - RNA, 19 nt, Homo sapiens
  misc_RNA (1)...(19): siRNA sense strand
ucaggaggaagaagaccua

SEQ ID NO: 1041824 - RNA, 19 nt, Homo sapiens
  misc_RNA (1)...(19): siRNA sense strand
aggaagaagaccuagcuuu

SEQ ID NO: 1041825 - RNA, 19 nt, Homo sapiens
  misc_RNA (1)...(19): siRNA sense strand
cuguggaucugcuuaccaa

SEQ ID NO: 1041826 - RNA, 19 nt, Homo sapiens
  misc_RNA (1)...(19): siRNA sense strand
ugugugcccucucuguaau

SEQ ID NO: 1041827 - RNA, 19 nt, Homo sapiens
  misc_RNA (1)...(19): siRNA sense strand
gccgaaacuucugcaucaa

SEQ ID NO: 1041828 - RNA, 19 nt, Homo sapiens
  misc_RNA (1)...(19): siRNA sense strand
cggcagcgagaaaugauga

SEQ ID NO: 1041829 - RNA, 19 nt, Homo sapiens
  misc_RNA (1)...(19): siRNA sense strand
gggagagcacauugacaga

SEQ ID NO: 1041830 - RNA, 19 nt, Homo sapiens
  misc_RNA (1)...(19): siRNA sense strand
cagccagugaggcagaaua

SEQ ID NO: 1041831 - RNA, 19 nt, Homo sapiens
  misc_RNA (1)...(19): siRNA sense strand
ugauugcuuugcagaaugg

SEQ ID NO: 1041832 - RNA, 19 nt, Homo sapiens
  misc_RNA (1)...(19): siRNA sense strand
gacagccccuccagugauu

SEQ ID NO: 1041833 - RNA, 19 nt, Homo sapiens
  misc_RNA (1)...(19): siRNA sense strand
gaugaaacugaccugugaa

SEQ ID NO: 1041834 - RNA, 19 nt, Homo sapiens
  misc_RNA (1)...(19): siRNA sense strand
agugauugcuuugcagaau

SEQ ID NO: 1041835 - RNA, 19 nt, Homo sapiens
  misc_RNA (1)...(19): siRNA sense strand
aaaccaugccuuccuguac

SEQ ID NO: 1041836 - RNA, 19 nt, Homo sapiens
  misc_RNA (1)...(19): siRNA sense strand
ccagugaggcagaauacca

SEQ ID NO: 1041837 - RNA, 19 nt, Homo sapiens
  misc_RNA (1)...(19): siRNA sense strand
gagaggacauauccaauga

SEQ ID NO: 1041838 - RNA, 19 nt, Homo sapiens
  misc_RNA (1)...(19): siRNA sense strand
ggacauauccaaugaugau

SEQ ID NO: 1041839 - RNA, 19 nt, Homo sapiens
  misc_RNA (1)...(19): siRNA sense strand
gcuccgggcuggucaauau

SEQ ID NO: 1041840 - RNA, 19 nt, Homo sapiens
  misc_RNA (1)...(19): siRNA sense strand
gaggacauauccaaugaug

SEQ ID NO: 1041841 - RNA, 19 nt, Homo sapiens
  misc_RNA (1)...(19): siRNA sense strand
ugaggcagcuggugaagga

SEQ ID NO: 1041842 - RNA, 19 nt, Homo sapiens
  misc_RNA (1)...(19): siRNA sense strand
caacaacccguucuacuuc

SEQ ID NO: 1041843 - RNA, 19 nt, Homo sapiens
  misc_RNA (1)...(19): siRNA sense strand
gaugagauccuccuucaca

SEQ ID NO: 1041844 - RNA, 19 nt, Homo sapiens
  misc_RNA (1)...(19): siRNA sense strand
gaacaccucgagcugauug

SEQ ID NO: 1041845 - RNA, 19 nt, Homo sapiens
  misc_RNA (1)...(19): siRNA sense strand
ggagaggacauauccaaug

SEQ ID NO: 1041846 - RNA, 19 nt, Homo sapiens
  misc_RNA (1)...(19): siRNA sense strand
caaugaugaugaugacaug

SEQ ID NO: 1041847 - RNA, 19 nt, Homo sapiens
  misc_RNA (1)...(19): siRNA sense strand
ucucagacauguugaagca

SEQ ID NO: 1041848 - RNA, 19 nt, Homo sapiens
  misc_RNA (1)...(19): siRNA sense strand
ucaacaacccguucuacuu

SEQ ID NO: 1041849 - RNA, 19 nt, Homo sapiens
  misc_RNA (1)...(19): siRNA sense strand
gaaccugcgggucuucuau

SEQ ID NO: 1041850 - RNA, 19 nt, Homo sapiens
  misc_RNA (1)...(19): siRNA sense strand
ucuggucucugcugaagaa

SEQ ID NO: 1041851 - RNA, 19 nt, Homo sapiens
  misc_RNA (1)...(19): siRNA sense strand
agaagcugcugcucuacuu

SEQ ID NO: 1041852 - RNA, 19 nt, Homo sapiens
  misc_RNA (1)...(19): siRNA sense strand
cugaugagauccuccuuca

SEQ ID NO: 1041853 - RNA, 19 nt, Homo sapiens
  misc_RNA (1)...(19): siRNA sense strand
gcaccagccuagagaagcu

SEQ ID NO: 1041854 - RNA, 19 nt, Homo sapiens
  misc_RNA (1)...(19): siRNA sense strand
cauauccaaugaugaugau

SEQ ID NO: 1041855 - RNA, 19 nt, Homo sapiens
  misc_RNA (1)...(19): siRNA sense strand
cgaccgcacuccucagaac

SEQ ID NO: 1041856 - RNA, 19 nt, Homo sapiens
  misc_RNA (1)...(19): siRNA sense strand
uggaacaccucgagcugau

SEQ ID NO: 1041857 - RNA, 19 nt, Homo sapiens
  misc_RNA (1)...(19): siRNA sense strand
gcagccuggugaaggugaa

SEQ ID NO: 1041858 - RNA, 19 nt, Homo sapiens
  misc_RNA (1)...(19): siRNA sense strand
uauccaaugaugaugauga

SEQ ID NO: 1041859 - RNA, 19 nt, Homo sapiens
  misc_RNA (1)...(19): siRNA sense strand
ccaaugaugaugaugacau

SEQ ID NO: 1041860 - RNA, 19 nt, Homo sapiens
  misc_RNA (1)...(19): siRNA sense strand
gcagcccugugccuugaca

SEQ ID NO: 1041861 - RNA, 19 nt, Homo sapiens
  misc_RNA (1)...(19): siRNA sense strand
guucuggucucugcugaag

SEQ ID NO: 1041862 - RNA, 19 nt, Homo sapiens
  misc_RNA (1)...(19): siRNA sense strand
gcaaggcggaggacgacau

SEQ ID NO: 1041863 - RNA, 19 nt, Homo sapiens
  misc_RNA (1)...(19): siRNA sense strand
cuccuaggguucucugaug

SEQ ID NO: 1041864 - RNA, 19 nt, Homo sapiens
  misc_RNA (1)...(19): siRNA sense strand
acauauccaaugaugauga

SEQ ID NO: 1041865 - RNA, 19 nt, Homo sapiens
  misc_RNA (1)...(19): siRNA sense strand
ggaacaccucgagcugauu

SEQ ID NO: 1041866 - RNA, 19 nt, Homo sapiens
  misc_RNA (1)...(19): siRNA sense strand
ggucucugcugaagaaccu

SEQ ID NO: 1041867 - RNA, 19 nt, Homo sapiens
  misc_RNA (1)...(19): siRNA sense strand
gcugcucuacuucgagauu

SEQ ID NO: 1041868 - RNA, 19 nt, Homo sapiens
  misc_RNA (1)...(19): siRNA sense strand
ucaggcgagugaggacaaa

SEQ ID NO: 1041869 - RNA, 19 nt, Homo sapiens
  misc_RNA (1)...(19): siRNA sense strand
gccugcagguugucaugug

SEQ ID NO: 1041870 - RNA, 19 nt, Homo sapiens
  misc_RNA (1)...(19): siRNA sense strand
gagaagcugcugcucuacu

SEQ ID NO: 1041871 - RNA, 19 nt, Homo sapiens
  misc_RNA (1)...(19): siRNA sense strand
gcgagugaggacaaaguga

SEQ ID NO: 1041872 - RNA, 19 nt, Homo sapiens
  misc_RNA (1)...(19): siRNA sense strand
uugcagcccugugccuuga

SEQ ID NO: 1041873 - RNA, 19 nt, Homo sapiens
  misc_RNA (1)...(19): siRNA sense strand
ccggagaggacauauccaa

SEQ ID NO: 1041874 - RNA, 19 nt, Homo sapiens
  misc_RNA (1)...(19): siRNA sense strand
gaucauuucugcaacuuug

SEQ ID NO: 1041875 - RNA, 19 nt, Homo sapiens
  misc_RNA (1)...(19): siRNA sense strand
gggaggagcuggaggauca

SEQ ID NO: 1041876 - RNA, 19 nt, Homo sapiens
  misc_RNA (1)...(19): siRNA sense strand
ggauggaccugaaaggaau

SEQ ID NO: 1041877 - RNA, 19 nt, Homo sapiens
  misc_RNA (1)...(19): siRNA sense strand
caacaaagugucaaugaug

SEQ ID NO: 1041878 - RNA, 19 nt, Homo sapiens
  misc_RNA (1)...(19): siRNA sense strand
caacucagaugugguggaa

SEQ ID NO: 1041879 - RNA, 19 nt, Homo sapiens
  misc_RNA (1)...(19): siRNA sense strand
agugugaucugcagguuua

SEQ ID NO: 1041880 - RNA, 19 nt, Homo sapiens
  misc_RNA (1)...(19): siRNA sense strand
gcaccaacuucacauucaa

SEQ ID NO: 1041881 - RNA, 19 nt, Homo sapiens
  misc_RNA (1)...(19): siRNA sense strand
ggacuacggcugugacaug

SEQ ID NO: 1041882 - RNA, 19 nt, Homo sapiens
  misc_RNA (1)...(19): siRNA sense strand
ugucaccucugcucuauga

SEQ ID NO: 1041883 - RNA, 19 nt, Homo sapiens
  misc_RNA (1)...(19): siRNA sense strand
ggacagggucuccaucaug

SEQ ID NO: 1041884 - RNA, 19 nt, Homo sapiens
  misc_RNA (1)...(19): siRNA sense strand
ggacuucugccuggagaua

SEQ ID NO: 1041885 - RNA, 19 nt, Homo sapiens
  misc_RNA (1)...(19): siRNA sense strand
ccaacaaagugucaaugau

SEQ ID NO: 1041886 - RNA, 19 nt, Homo sapiens
  misc_RNA (1)...(19): siRNA sense strand
caaaguggucguaccugua

SEQ ID NO: 1041887 - RNA, 19 nt, Homo sapiens
  misc_RNA (1)...(19): siRNA sense strand
gcaagugcacuguguguca

SEQ ID NO: 1041888 - RNA, 19 nt, Homo sapiens
  misc_RNA (1)...(19): siRNA sense strand
ucacaggaguggacugcaa

SEQ ID NO: 1041889 - RNA, 19 nt, Homo sapiens
  misc_RNA (1)...(19): siRNA sense strand
acaagaggcagccaaacua

SEQ ID NO: 1041890 - RNA, 19 nt, Homo sapiens
  misc_RNA (1)...(19): siRNA sense strand
ggagauauugcccuacuca

SEQ ID NO: 1041891 - RNA, 19 nt, Homo sapiens
  misc_RNA (1)...(19): siRNA sense strand
ggcaccaacuucacauuca

SEQ ID NO: 1041892 - RNA, 19 nt, Homo sapiens
  misc_RNA (1)...(19): siRNA sense strand
aggaucagcugcccaacuu

SEQ ID NO: 1041893 - RNA, 19 nt, Homo sapiens
  misc_RNA (1)...(19): siRNA sense strand
caagaggcagccaaacuau

SEQ ID NO: 1041894 - RNA, 19 nt, Homo sapiens
  misc_RNA (1)...(19): siRNA sense strand
gcuguugggcaucaucuuu

SEQ ID NO: 1041895 - RNA, 19 nt, Homo sapiens
  misc_RNA (1)...(19): siRNA sense strand
ggacugcaaaguggucgua

SEQ ID NO: 1041896 - RNA, 19 nt, Homo sapiens
  misc_RNA (1)...(19): siRNA sense strand
cgguugcgcucgucuaugu

SEQ ID NO: 1041897 - RNA, 19 nt, Homo sapiens
  misc_RNA (1)...(19): siRNA sense strand
ccaucuacuuccacuguga

SEQ ID NO: 1041898 - RNA, 19 nt, Homo sapiens
  misc_RNA (1)...(19): siRNA sense strand
cuucggagacccacacuuu

SEQ ID NO: 1041899 - RNA, 19 nt, Homo sapiens
  misc_RNA (1)...(19): siRNA sense strand
gcaccugagcgaugacuuc

SEQ ID NO: 1041900 - RNA, 19 nt, Homo sapiens
  misc_RNA (1)...(19): siRNA sense strand
guccucagcuucuauuacu

SEQ ID NO: 1041901 - RNA, 19 nt, Homo sapiens
  misc_RNA (1)...(19): siRNA sense strand
caacuggaccgugcacaau

SEQ ID NO: 1041902 - RNA, 19 nt, Homo sapiens
  misc_RNA (1)...(19): siRNA sense strand
gcaccugcugcuuggauuu

SEQ ID NO: 1041903 - RNA, 19 nt, Homo sapiens
  misc_RNA (1)...(19): siRNA sense strand
agacaggaaugcccuacuc

SEQ ID NO: 1041904 - RNA, 19 nt, Homo sapiens
  misc_RNA (1)...(19): siRNA sense strand
cguccucccugcucaccua

SEQ ID NO: 1041905 - RNA, 19 nt, Homo sapiens
  misc_RNA (1)...(19): siRNA sense strand
acucagaugugguggaagu

SEQ ID NO: 1041906 - RNA, 19 nt, Homo sapiens
  misc_RNA (1)...(19): siRNA sense strand
ggaccugaaaggaauguuc

SEQ ID NO: 1041907 - RNA, 19 nt, Homo sapiens
  misc_RNA (1)...(19): siRNA sense strand
gaagucaggcuggccaaca

SEQ ID NO: 1041908 - RNA, 19 nt, Homo sapiens
  misc_RNA (1)...(19): siRNA sense strand
gaccaucaccaucgaacug

SEQ ID NO: 1041909 - RNA, 19 nt, Homo sapiens
  misc_RNA (1)...(19): siRNA sense strand
ccacagcagaugcccaaga

SEQ ID NO: 1041910 - RNA, 19 nt, Homo sapiens
  misc_RNA (1)...(19): siRNA sense strand
ggagggcaacucagaugug

SEQ ID NO: 1041911 - RNA, 19 nt, Homo sapiens
  misc_RNA (1)...(19): siRNA sense strand
gggacgaucauuucugcaa

SEQ ID NO: 1041912 - RNA, 19 nt, Homo sapiens
  misc_RNA (1)...(19): siRNA sense strand
ugucaaugauggagaagag

SEQ ID NO: 1041913 - RNA, 19 nt, Homo sapiens
  misc_RNA (1)...(19): siRNA sense strand
agaggcagccaaacuaugu

SEQ ID NO: 1041914 - RNA, 19 nt, Homo sapiens
  misc_RNA (1)...(19): siRNA sense strand
gagcuggauggaccugaaa

SEQ ID NO: 1041915 - RNA, 19 nt, Homo sapiens
  misc_RNA (1)...(19): siRNA sense strand
cccacuggcucuacgaugu

SEQ ID NO: 1041916 - RNA, 19 nt, Homo sapiens
  misc_RNA (1)...(19): siRNA sense strand
cacagcagaugcccaagag

SEQ ID NO: 1041917 - RNA, 19 nt, Homo sapiens
  misc_RNA (1)...(19): siRNA sense strand
gagacgcguuggcaauacu

SEQ ID NO: 1041918 - RNA, 19 nt, Homo sapiens
  misc_RNA (1)...(19): siRNA sense strand
gggacagggucuccaucau

SEQ ID NO: 1041919 - RNA, 19 nt, Homo sapiens
  misc_RNA (1)...(19): siRNA sense strand
ccagugugaucugcagguu

SEQ ID NO: 1041920 - RNA, 19 nt, Homo sapiens
  misc_RNA (1)...(19): siRNA sense strand
gauguccucagcuucuauu

SEQ ID NO: 1041921 - RNA, 19 nt, Homo sapiens
  misc_RNA (1)...(19): siRNA sense strand
gaagagcgaguuggugaac

SEQ ID NO: 1041922 - RNA, 19 nt, Homo sapiens
  misc_RNA (1)...(19): siRNA sense strand
cccaacaaagugucaauga

SEQ ID NO: 1041923 - RNA, 19 nt, Homo sapiens
  misc_RNA (1)...(19): siRNA sense strand
gacgaucauuucugcaacu

SEQ ID NO: 1041924 - RNA, 19 nt, Homo sapiens
  misc_RNA (1)...(19): siRNA sense strand
cuacucaggauccaugaug

SEQ ID NO: 1041925 - RNA, 19 nt, Homo sapiens
  misc_RNA (1)...(19): siRNA sense strand
ccuggcaccugagcgauga

SEQ ID NO: 1041926 - RNA, 19 nt, Homo sapiens
  misc_RNA (1)...(19): siRNA sense strand
agagcgaguuggugaacga

SEQ ID NO: 1041927 - RNA, 19 nt, Homo sapiens
  misc_RNA (1)...(19): siRNA sense strand
ggcaccugcugcuuggauu

SEQ ID NO: 1041928 - RNA, 19 nt, Homo sapiens
  misc_RNA (1)...(19): siRNA sense strand
ucgggacacucaacaacga

SEQ ID NO: 1041929 - RNA, 19 nt, Homo sapiens
  misc_RNA (1)...(19): siRNA sense strand
agagcuggauggaccugaa

SEQ ID NO: 1041930 - RNA, 19 nt, Homo sapiens
  misc_RNA (1)...(19): siRNA sense strand
caggaaugcccuacucaca

SEQ ID NO: 1041931 - RNA, 19 nt, Homo sapiens
  misc_RNA (1)...(19): siRNA sense strand
aaaaggagggcaacaggua

SEQ ID NO: 1041932 - RNA, 19 nt, Homo sapiens
  misc_RNA (1)...(19): siRNA sense strand
ccaacuggaccgugcacaa

SEQ ID NO: 1041933 - RNA, 19 nt, Homo sapiens
  misc_RNA (1)...(19): siRNA sense strand
uggauggaccugaaaggaa

SEQ ID NO: 1041934 - RNA, 19 nt, Homo sapiens
  misc_RNA (1)...(19): siRNA sense strand
cgacggcaccaacuucaca

SEQ ID NO: 1041935 - RNA, 19 nt, Homo sapiens
  misc_RNA (1)...(19): siRNA sense strand
ucuacgauguccucagcuu

SEQ ID NO: 1041936 - RNA, 19 nt, Homo sapiens
  misc_RNA (1)...(19): siRNA sense strand
gggcaagugcacugugugu

SEQ ID NO: 1041937 - RNA, 19 nt, Homo sapiens
  misc_RNA (1)...(19): siRNA sense strand
ugugucaccucugcucuau

SEQ ID NO: 1041938 - RNA, 19 nt, Homo sapiens
  misc_RNA (1)...(19): siRNA sense strand
ccaaugacugccgcaacua

SEQ ID NO: 1041939 - RNA, 19 nt, Homo sapiens
  misc_RNA (1)...(19): siRNA sense strand
ccacgcagaccaucaccau

SEQ ID NO: 1041940 - RNA, 19 nt, Homo sapiens
  misc_RNA (1)...(19): siRNA sense strand
aagugucaaugauggagaa

SEQ ID NO: 1041941 - RNA, 19 nt, Homo sapiens
  misc_RNA (1)...(19): siRNA sense strand
caccaucuacuuccacugu

SEQ ID NO: 1041942 - RNA, 19 nt, Homo sapiens
  misc_RNA (1)...(19): siRNA sense strand
caggagggcaacucagaug

SEQ ID NO: 1041943 - RNA, 19 nt, Homo sapiens
  misc_RNA (1)...(19): siRNA sense strand
ccucccagcuaccagagau

SEQ ID NO: 1041944 - RNA, 19 nt, Homo sapiens
  misc_RNA (1)...(19): siRNA sense strand
caacuccggcucuuucacu

SEQ ID NO: 1041945 - RNA, 19 nt, Homo sapiens
  misc_RNA (1)...(19): siRNA sense strand
cgagacgcguuggcaauac

SEQ ID NO: 1041946 - RNA, 19 nt, Homo sapiens
  misc_RNA (1)...(19): siRNA sense strand
gcagaccaucaccaucgaa

SEQ ID NO: 1041947 - RNA, 19 nt, Homo sapiens
  misc_RNA (1)...(19): siRNA sense strand
gcggugcuguugggcauca

SEQ ID NO: 1041948 - RNA, 19 nt, Homo sapiens
  misc_RNA (1)...(19): siRNA sense strand
ucaccuacgauuccugguu

SEQ ID NO: 1041949 - RNA, 19 nt, Homo sapiens
  misc_RNA (1)...(19): siRNA sense strand
ucaccucugcucuaugaga

SEQ ID NO: 1041950 - RNA, 19 nt, Homo sapiens
  misc_RNA (1)...(19): siRNA sense strand
accaggaggugcugagcuu

SEQ ID NO: 1041951 - RNA, 19 nt, Homo sapiens
  misc_RNA (1)...(19): siRNA sense strand
gucuggaggugcugcugaa

SEQ ID NO: 1041952 - RNA, 19 nt, Homo sapiens
  misc_RNA (1)...(19): siRNA sense strand
gacaggaaugcccuacuca

SEQ ID NO: 1041953 - RNA, 19 nt, Homo sapiens
  misc_RNA (1)...(19): siRNA sense strand
gcuacgaggagacaggaau

SEQ ID NO: 1041954 - RNA, 19 nt, Homo sapiens
  misc_RNA (1)...(19): siRNA sense strand
gauggagaagagcgaguug

SEQ ID NO: 1041955 - RNA, 19 nt, Homo sapiens
  misc_RNA (1)...(19): siRNA sense strand
ggcacaagaggcagccaaa

SEQ ID NO: 1041956 - RNA, 19 nt, Homo sapiens
  misc_RNA (1)...(19): siRNA sense strand
gaaaguggaugaaguuauu

SEQ ID NO: 1041957 - RNA, 19 nt, Homo sapiens
  misc_RNA (1)...(19): siRNA sense strand
gaaggcagcucaagcagaa

SEQ ID NO: 1041958 - RNA, 19 nt, Homo sapiens
  misc_RNA (1)...(19): siRNA sense strand
ggaagguucuuucuuuaaa

SEQ ID NO: 1041959 - RNA, 19 nt, Homo sapiens
  misc_RNA (1)...(19): siRNA sense strand
caacaaggauccagcuaga

SEQ ID NO: 1041960 - RNA, 19 nt, Homo sapiens
  misc_RNA (1)...(19): siRNA sense strand
gaugaaggguguuuagaga

SEQ ID NO: 1041961 - RNA, 19 nt, Homo sapiens
  misc_RNA (1)...(19): siRNA sense strand
gaagucaggcuuaucauga

SEQ ID NO: 1041962 - RNA, 19 nt, Homo sapiens
  misc_RNA (1)...(19): siRNA sense strand
gagaagaucaugcaguauu

SEQ ID NO: 1041963 - RNA, 19 nt, Homo sapiens
  misc_RNA (1)...(19): siRNA sense strand
aaagauaacccucgauuga

SEQ ID NO: 1041964 - RNA, 19 nt, Homo sapiens
  misc_RNA (1)...(19): siRNA sense strand
uaucaaaccuccaucaaca

SEQ ID NO: 1041965 - RNA, 19 nt, Homo sapiens
  misc_RNA (1)...(19): siRNA sense strand
gaaaagauccucaccagaa

SEQ ID NO: 1041966 - RNA, 19 nt, Homo sapiens
  misc_RNA (1)...(19): siRNA sense strand
gauauagaagucaggcuua

SEQ ID NO: 1041967 - RNA, 19 nt, Homo sapiens
  misc_RNA (1)...(19): siRNA sense strand
ucaaugagaucagggcaaa

SEQ ID NO: 1041968 - RNA, 19 nt, Homo sapiens
  misc_RNA (1)...(19): siRNA sense strand
ccaaacaggcaaucuuaaa

SEQ ID NO: 1041969 - RNA, 19 nt, Homo sapiens
  misc_RNA (1)...(19): siRNA sense strand
uaaaugggaguaucguuaa

SEQ ID NO: 1041970 - RNA, 19 nt, Homo sapiens
  misc_RNA (1)...(19): siRNA sense strand
ggauccagcuagaagaaga

SEQ ID NO: 1041971 - RNA, 19 nt, Homo sapiens
  misc_RNA (1)...(19): siRNA sense strand
ugggaagguucuuucuuua

SEQ ID NO: 1041972 - RNA, 19 nt, Homo sapiens
  misc_RNA (1)...(19): siRNA sense strand
gcucauggcacuauucaga

SEQ ID NO: 1041973 - RNA, 19 nt, Homo sapiens
  misc_RNA (1)...(19): siRNA sense strand
gaucagggcaaacuaugaa

SEQ ID NO: 1041974 - RNA, 19 nt, Homo sapiens
  misc_RNA (1)...(19): siRNA sense strand
uuaaaugggaguaucguua

SEQ ID NO: 1041975 - RNA, 19 nt, Homo sapiens
  misc_RNA (1)...(19): siRNA sense strand
gaacaagaaauagcaacuu

SEQ ID NO: 1041976 - RNA, 19 nt, Homo sapiens
  misc_RNA (1)...(19): siRNA sense strand
gggaagguucuuucuuuaa

SEQ ID NO: 1041977 - RNA, 19 nt, Homo sapiens
  misc_RNA (1)...(19): siRNA sense strand
gaaggguguuuagagacua

SEQ ID NO: 1041978 - RNA, 19 nt, Homo sapiens
  misc_RNA (1)...(19): siRNA sense strand
gaggcuggaacaagaaaua

SEQ ID NO: 1041979 - RNA, 19 nt, Homo sapiens
  misc_RNA (1)...(19): siRNA sense strand
ccagcuagaagaagacaua

SEQ ID NO: 1041980 - RNA, 19 nt, Homo sapiens
  misc_RNA (1)...(19): siRNA sense strand
gauuugaucuucauuuagc

SEQ ID NO: 1041981 - RNA, 19 nt, Homo sapiens
  misc_RNA (1)...(19): siRNA sense strand
cagagaaaguggaugaagu

SEQ ID NO: 1041982 - RNA, 19 nt, Homo sapiens
  misc_RNA (1)...(19): siRNA sense strand
gaagaagacauaagcaaaa

SEQ ID NO: 1041983 - RNA, 19 nt, Homo sapiens
  misc_RNA (1)...(19): siRNA sense strand
aaaccuccaucaacagcua

SEQ ID NO: 1041984 - RNA, 19 nt, Homo sapiens
  misc_RNA (1)...(19): siRNA sense strand
gagaaaguggaugaaguua

SEQ ID NO: 1041985 - RNA, 19 nt, Homo sapiens
  misc_RNA (1)...(19): siRNA sense strand
caagaaauagcaacuuauc

SEQ ID NO: 1041986 - RNA, 19 nt, Homo sapiens
  misc_RNA (1)...(19): siRNA sense strand
caaacaggcaaucuuaaau

SEQ ID NO: 1041987 - RNA, 19 nt, Homo sapiens
  misc_RNA (1)...(19): siRNA sense strand
agaugaggcuggaacaaga

SEQ ID NO: 1041988 - RNA, 19 nt, Homo sapiens
  misc_RNA (1)...(19): siRNA sense strand
gcacuauucagacagagaa

SEQ ID NO: 1041989 - RNA, 19 nt, Homo sapiens
  misc_RNA (1)...(19): siRNA sense strand
aaacaggcaaucuuaaaug

SEQ ID NO: 1041990 - RNA, 19 nt, Homo sapiens
  misc_RNA (1)...(19): siRNA sense strand
cuacaaaagucccacaaaa

SEQ ID NO: 1041991 - RNA, 19 nt, Homo sapiens
  misc_RNA (1)...(19): siRNA sense strand
gaacugucccagcuacuca

SEQ ID NO: 1041992 - RNA, 19 nt, Homo sapiens
  misc_RNA (1)...(19): siRNA sense strand
ugucccagcuacucaauga

SEQ ID NO: 1041993 - RNA, 19 nt, Homo sapiens
  misc_RNA (1)...(19): siRNA sense strand
agacuaagcaggauaaucu

SEQ ID NO: 1041994 - RNA, 19 nt, Homo sapiens
  misc_RNA (1)...(19): siRNA sense strand
uagaaacaguaaccaaaca

SEQ ID NO: 1041995 - RNA, 19 nt, Homo sapiens
  misc_RNA (1)...(19): siRNA sense strand
augggaagguucuuucuuu

SEQ ID NO: 1041996 - RNA, 19 nt, Homo sapiens
  misc_RNA (1)...(19): siRNA sense strand
aaccaaacaggcaaucuua

SEQ ID NO: 1041997 - RNA, 19 nt, Homo sapiens
  misc_RNA (1)...(19): siRNA sense strand
agaagaagacauaagcaaa

SEQ ID NO: 1041998 - RNA, 19 nt, Homo sapiens
  misc_RNA (1)...(19): siRNA sense strand
agaagaucaugcaguauuc

SEQ ID NO: 1041999 - RNA, 19 nt, Homo sapiens
  misc_RNA (1)...(19): siRNA sense strand
agacagagaaaguggauga

SEQ ID NO: 1042000 - RNA, 19 nt, Homo sapiens
  misc_RNA (1)...(19): siRNA sense strand
gcaaguggaaauugaaucu

SEQ ID NO: 1042001 - RNA, 19 nt, Homo sapiens
  misc_RNA (1)...(19): siRNA sense strand
uaaagauaacccucgauug

SEQ ID NO: 1042002 - RNA, 19 nt, Homo sapiens
  misc_RNA (1)...(19): siRNA sense strand
gcaguauucccucuaucaa

SEQ ID NO: 1042003 - RNA, 19 nt, Homo sapiens
  misc_RNA (1)...(19): siRNA sense strand
ccuagagacugugauugaa

SEQ ID NO: 1042004 - RNA, 19 nt, Homo sapiens
  misc_RNA (1)...(19): siRNA sense strand
agagaaaguggaugaaguu

SEQ ID NO: 1042005 - RNA, 19 nt, Homo sapiens
  misc_RNA (1)...(19): siRNA sense strand
uaaccaaacaggcaaucuu

SEQ ID NO: 1042006 - RNA, 19 nt, Homo sapiens
  misc_RNA (1)...(19): siRNA sense strand
agacggugcucucaacaag

SEQ ID NO: 1042007 - RNA, 19 nt, Homo sapiens
  misc_RNA (1)...(19): siRNA sense strand
gaagaugaggcuggaacaa

SEQ ID NO: 1042008 - RNA, 19 nt, Homo sapiens
  misc_RNA (1)...(19): siRNA sense strand
ggaaauugaaucucuccau

SEQ ID NO: 1042009 - RNA, 19 nt, Homo sapiens
  misc_RNA (1)...(19): siRNA sense strand
uuaaagauaacccucgauu

SEQ ID NO: 1042010 - RNA, 19 nt, Homo sapiens
  misc_RNA (1)...(19): siRNA sense strand
ccacaaguagaguugguuu

SEQ ID NO: 1042011 - RNA, 19 nt, Homo sapiens
  misc_RNA (1)...(19): siRNA sense strand
ugcaagaccuagagacugu

SEQ ID NO: 1042012 - RNA, 19 nt, Homo sapiens
  misc_RNA (1)...(19): siRNA sense strand
gagaucagggcaaacuaug

SEQ ID NO: 1042013 - RNA, 19 nt, Homo sapiens
  misc_RNA (1)...(19): siRNA sense strand
cgagcagcauuaccagaug

SEQ ID NO: 1042014 - RNA, 19 nt, Homo sapiens
  misc_RNA (1)...(19): siRNA sense strand
caaaagucccacaaaagua

SEQ ID NO: 1042015 - RNA, 19 nt, Homo sapiens
  misc_RNA (1)...(19): siRNA sense strand
uguagaaacaguaaccaaa

SEQ ID NO: 1042016 - RNA, 19 nt, Homo sapiens
  misc_RNA (1)...(19): siRNA sense strand
caugcaguauucccucuau

SEQ ID NO: 1042017 - RNA, 19 nt, Homo sapiens
  misc_RNA (1)...(19): siRNA sense strand
aaaagauccucaccagaaa

SEQ ID NO: 1042018 - RNA, 19 nt, Homo sapiens
  misc_RNA (1)...(19): siRNA sense strand
ugaaggguguuuagagacu

SEQ ID NO: 1042019 - RNA, 19 nt, Homo sapiens
  misc_RNA (1)...(19): siRNA sense strand
caccagaaaucagauagag

SEQ ID NO: 1042020 - RNA, 19 nt, Homo sapiens
  misc_RNA (1)...(19): siRNA sense strand
uaccaucagccauuauaaa

SEQ ID NO: 1042021 - RNA, 19 nt, Homo sapiens
  misc_RNA (1)...(19): siRNA sense strand
gcgagcagcauuaccagau

SEQ ID NO: 1042022 - RNA, 19 nt, Homo sapiens
  misc_RNA (1)...(19): siRNA sense strand
cuccaucaacagcuaauua

SEQ ID NO: 1042023 - RNA, 19 nt, Homo sapiens
  misc_RNA (1)...(19): siRNA sense strand
ucucuucgauuugaucuuc

SEQ ID NO: 1042024 - RNA, 19 nt, Homo sapiens
  misc_RNA (1)...(19): siRNA sense strand
gucuguuucucuucgauuu

SEQ ID NO: 1042025 - RNA, 19 nt, Homo sapiens
  misc_RNA (1)...(19): siRNA sense strand
guagaaacaguaaccaaac

SEQ ID NO: 1042026 - RNA, 19 nt, Homo sapiens
  misc_RNA (1)...(19): siRNA sense strand
gaugaggcuggaacaagaa

SEQ ID NO: 1042027 - RNA, 19 nt, Homo sapiens
  misc_RNA (1)...(19): siRNA sense strand
uagaagaagacauaagcaa

SEQ ID NO: 1042028 - RNA, 19 nt, Homo sapiens
  misc_RNA (1)...(19): siRNA sense strand
gacugugauugaaggacua

SEQ ID NO: 1042029 - RNA, 19 nt, Homo sapiens
  misc_RNA (1)...(19): siRNA sense strand
uagagacuaagcaggauaa

SEQ ID NO: 1042030 - RNA, 19 nt, Homo sapiens
  misc_RNA (1)...(19): siRNA sense strand
gaagcucauggcacuauuc

SEQ ID NO: 1042031 - RNA, 19 nt, Homo sapiens
  misc_RNA (1)...(19): siRNA sense strand
gcuagaagaagacauaagc

SEQ ID NO: 1042032 - RNA, 19 nt, Homo sapiens
  misc_RNA (1)...(19): siRNA sense strand
ggaacaagaaauagcaacu

SEQ ID NO: 1042033 - RNA, 19 nt, Homo sapiens
  misc_RNA (1)...(19): siRNA sense strand
caguauucccucuaucaaa

SEQ ID NO: 1042034 - RNA, 19 nt, Homo sapiens
  misc_RNA (1)...(19): siRNA sense strand
uaagcaggauaaucuacca

SEQ ID NO: 1042035 - RNA, 19 nt, Homo sapiens
  misc_RNA (1)...(19): siRNA sense strand
ugaagcucauggcacuauu

SEQ ID NO: 1042036 - RNA, 19 nt, Homo sapiens
  misc_RNA (1)...(19): siRNA sense strand
gugauugaaggacuagaaa

SEQ ID NO: 1042037 - RNA, 19 nt, Homo sapiens
  misc_RNA (1)...(19): siRNA sense strand
ugagaucagggcaaacuau

SEQ ID NO: 1042038 - RNA, 19 nt, Homo sapiens
  misc_RNA (1)...(19): siRNA sense strand
caaggauccagcuagaaga

SEQ ID NO: 1042039 - RNA, 19 nt, Homo sapiens
  misc_RNA (1)...(19): siRNA sense strand
uaucgccaccuccuagaaa

SEQ ID NO: 1042040 - RNA, 19 nt, Homo sapiens
  misc_RNA (1)...(19): siRNA sense strand
aaagagcuacaggaaguaa

SEQ ID NO: 1042041 - RNA, 19 nt, Homo sapiens
  misc_RNA (1)...(19): siRNA sense strand
ucauggcacuauucagaca

SEQ ID NO: 1042042 - RNA, 19 nt, Homo sapiens
  misc_RNA (1)...(19): siRNA sense strand
ccacugaugaaggguguuu

SEQ ID NO: 1042043 - RNA, 19 nt, Homo sapiens
  misc_RNA (1)...(19): siRNA sense strand
ccacaaaaguaugagaaug

SEQ ID NO: 1042044 - RNA, 19 nt, Homo sapiens
  misc_RNA (1)...(19): siRNA sense strand
uccaucaacagcuaauuaa

SEQ ID NO: 1042045 - RNA, 19 nt, Homo sapiens
  misc_RNA (1)...(19): siRNA sense strand
acggugcucucaacaagga

SEQ ID NO: 1042046 - RNA, 19 nt, Homo sapiens
  misc_RNA (1)...(19): siRNA sense strand
auagaagucaggcuuauca

SEQ ID NO: 1042047 - RNA, 19 nt, Homo sapiens
  misc_RNA (1)...(19): siRNA sense strand
aacaggcaaucuuaaaugg

SEQ ID NO: 1042048 - RNA, 19 nt, Homo sapiens
  misc_RNA (1)...(19): siRNA sense strand
agaaaguggaugaaguuau

SEQ ID NO: 1042049 - RNA, 19 nt, Homo sapiens
  misc_RNA (1)...(19): siRNA sense strand
aguauucccucuaucaaac

SEQ ID NO: 1042050 - RNA, 19 nt, Homo sapiens
  misc_RNA (1)...(19): siRNA sense strand
caagaccuagagacuguga

SEQ ID NO: 1042051 - RNA, 19 nt, Homo sapiens
  misc_RNA (1)...(19): siRNA sense strand
acaaggauccagcuagaag

SEQ ID NO: 1042052 - RNA, 19 nt, Homo sapiens
  misc_RNA (1)...(19): siRNA sense strand
aaucuuaaaugggaguauc

SEQ ID NO: 1042053 - RNA, 19 nt, Homo sapiens
  misc_RNA (1)...(19): siRNA sense strand
agaccuagagacugugauu

SEQ ID NO: 1042054 - RNA, 19 nt, Homo sapiens
  misc_RNA (1)...(19): siRNA sense strand
gaaugggaagguucuuucu

SEQ ID NO: 1042055 - RNA, 19 nt, Homo sapiens
  misc_RNA (1)...(19): siRNA sense strand
auauagaagucaggcuuau

SEQ ID NO: 1042056 - RNA, 19 nt, Homo sapiens
  misc_RNA (1)...(19): siRNA sense strand
ccagaacccuuuaagauug

SEQ ID NO: 1042057 - RNA, 19 nt, Homo sapiens
  misc_RNA (1)...(19): siRNA sense strand
uaaagaagcccuccuguca

SEQ ID NO: 1042058 - RNA, 19 nt, Homo sapiens
  misc_RNA (1)...(19): siRNA sense strand
gaaccaugaggaaguauaa

SEQ ID NO: 1042059 - RNA, 19 nt, Homo sapiens
  misc_RNA (1)...(19): siRNA sense strand
ucaaagacaugcugagcuu

SEQ ID NO: 1042060 - RNA, 19 nt, Homo sapiens
  misc_RNA (1)...(19): siRNA sense strand
gaaaacauccuucgaaaau

SEQ ID NO: 1042061 - RNA, 19 nt, Homo sapiens
  misc_RNA (1)...(19): siRNA sense strand
cagaggauauccaagagaa

SEQ ID NO: 1042062 - RNA, 19 nt, Homo sapiens
  misc_RNA (1)...(19): siRNA sense strand
uaggaaagcuucaaaugca

SEQ ID NO: 1042063 - RNA, 19 nt, Homo sapiens
  misc_RNA (1)...(19): siRNA sense strand
aagaagcccuccugucaaa

SEQ ID NO: 1042064 - RNA, 19 nt, Homo sapiens
  misc_RNA (1)...(19): siRNA sense strand
gggcuccacugaccauaaa

SEQ ID NO: 1042065 - RNA, 19 nt, Homo sapiens
  misc_RNA (1)...(19): siRNA sense strand
gaaugcgacuauacaacuu

SEQ ID NO: 1042066 - RNA, 19 nt, Homo sapiens
  misc_RNA (1)...(19): siRNA sense strand
gaaauucuucagucuucua

SEQ ID NO: 1042067 - RNA, 19 nt, Homo sapiens
  misc_RNA (1)...(19): siRNA sense strand
aaagaagcguggcauggaa

SEQ ID NO: 1042068 - RNA, 19 nt, Homo sapiens
  misc_RNA (1)...(19): siRNA sense strand
agagaaccaugaggaagua

SEQ ID NO: 1042069 - RNA, 19 nt, Homo sapiens
  misc_RNA (1)...(19): siRNA sense strand
auagaaagauggcauagag

SEQ ID NO: 1042070 - RNA, 19 nt, Homo sapiens
  misc_RNA (1)...(19): siRNA sense strand
gcuacuggcucaaagacau

SEQ ID NO: 1042071 - RNA, 19 nt, Homo sapiens
  misc_RNA (1)...(19): siRNA sense strand
cuaaacaguuccagaggau

SEQ ID NO: 1042072 - RNA, 19 nt, Homo sapiens
  misc_RNA (1)...(19): siRNA sense strand
ccaaguuauuuacagcaaa

SEQ ID NO: 1042073 - RNA, 19 nt, Homo sapiens
  misc_RNA (1)...(19): siRNA sense strand
gcagagacagaggagauaa

SEQ ID NO: 1042074 - RNA, 19 nt, Homo sapiens
  misc_RNA (1)...(19): siRNA sense strand
ccaccaagcgguuaucugu

SEQ ID NO: 1042075 - RNA, 19 nt, Homo sapiens
  misc_RNA (1)...(19): siRNA sense strand
uccagcaacucaagaagaa

SEQ ID NO: 1042076 - RNA, 19 nt, Homo sapiens
  misc_RNA (1)...(19): siRNA sense strand
gaagcuacuggcucaaaga

SEQ ID NO: 1042077 - RNA, 19 nt, Homo sapiens
  misc_RNA (1)...(19): siRNA sense strand
gccaagagggcuccacuga

SEQ ID NO: 1042078 - RNA, 19 nt, Homo sapiens
  misc_RNA (1)...(19): siRNA sense strand
uaccagaacccuuuaagau

SEQ ID NO: 1042079 - RNA, 19 nt, Homo sapiens
  misc_RNA (1)...(19): siRNA sense strand
gaugcuguccuacaaguau

SEQ ID NO: 1042080 - RNA, 19 nt, Homo sapiens
  misc_RNA (1)...(19): siRNA sense strand
gaagauuccagcaacucaa

SEQ ID NO: 1042081 - RNA, 19 nt, Homo sapiens
  misc_RNA (1)...(19): siRNA sense strand
ccaugaggaaguauaaauu

SEQ ID NO: 1042082 - RNA, 19 nt, Homo sapiens
  misc_RNA (1)...(19): siRNA sense strand
gcgguuaucugugacaucu

SEQ ID NO: 1042083 - RNA, 19 nt, Homo sapiens
  misc_RNA (1)...(19): siRNA sense strand
accaagcgguuaucuguga

SEQ ID NO: 1042084 - RNA, 19 nt, Homo sapiens
  misc_RNA (1)...(19): siRNA sense strand
ggaaggggauagaaagaug

SEQ ID NO: 1042085 - RNA, 19 nt, Homo sapiens
  misc_RNA (1)...(19): siRNA sense strand
gggauagaaagauggcaua

SEQ ID NO: 1042086 - RNA, 19 nt, Homo sapiens
  misc_RNA (1)...(19): siRNA sense strand
ggagauaacccagggaaac

SEQ ID NO: 1042087 - RNA, 19 nt, Homo sapiens
  misc_RNA (1)...(19): siRNA sense strand
gaagcccuccugucaaaca

SEQ ID NO: 1042088 - RNA, 19 nt, Homo sapiens
  misc_RNA (1)...(19): siRNA sense strand
ccaagagaaccaugaggaa

SEQ ID NO: 1042089 - RNA, 19 nt, Homo sapiens
  misc_RNA (1)...(19): siRNA sense strand
aaacaguuccagaggauau

SEQ ID NO: 1042090 - RNA, 19 nt, Homo sapiens
  misc_RNA (1)...(19): siRNA sense strand
gagauaacccagggaaaca

SEQ ID NO: 1042091 - RNA, 19 nt, Homo sapiens
  misc_RNA (1)...(19): siRNA sense strand
ggcccaaccucagcuguau

SEQ ID NO: 1042092 - RNA, 19 nt, Homo sapiens
  misc_RNA (1)...(19): siRNA sense strand
ugugacaucucuuccuuca

SEQ ID NO: 1042093 - RNA, 19 nt, Homo sapiens
  misc_RNA (1)...(19): siRNA sense strand
ggacagugccgaagauucc

SEQ ID NO: 1042094 - RNA, 19 nt, Homo sapiens
  misc_RNA (1)...(19): siRNA sense strand
guaggaaagcuucaaaugc

SEQ ID NO: 1042095 - RNA, 19 nt, Homo sapiens
  misc_RNA (1)...(19): siRNA sense strand
gauagaaagauggcauaga

SEQ ID NO: 1042096 - RNA, 19 nt, Homo sapiens
  misc_RNA (1)...(19): siRNA sense strand
ucagcuguaucuaccagaa

SEQ ID NO: 1042097 - RNA, 19 nt, Homo sapiens
  misc_RNA (1)...(19): siRNA sense strand
guaucuaccagaacccuuu

SEQ ID NO: 1042098 - RNA, 19 nt, Homo sapiens
  misc_RNA (1)...(19): siRNA sense strand
guuuucaucucccaaguua

SEQ ID NO: 1042099 - RNA, 19 nt, Homo sapiens
  misc_RNA (1)...(19): siRNA sense strand
guaauuugaagacgaaagu

SEQ ID NO: 1042100 - RNA, 19 nt, Homo sapiens
  misc_RNA (1)...(19): siRNA sense strand
aaacauccuucgaaaauca

SEQ ID NO: 1042101 - RNA, 19 nt, Homo sapiens
  misc_RNA (1)...(19): siRNA sense strand
ggaaaacauccuucgaaaa

SEQ ID NO: 1042102 - RNA, 19 nt, Homo sapiens
  misc_RNA (1)...(19): siRNA sense strand
gguuaucugugacaucucu

SEQ ID NO: 1042103 - RNA, 19 nt, Homo sapiens
  misc_RNA (1)...(19): siRNA sense strand
uuucaucucccaaguuauu

SEQ ID NO: 1042104 - RNA, 19 nt, Homo sapiens
  misc_RNA (1)...(19): siRNA sense strand
gauagugacaugggauuuc

SEQ ID NO: 1042105 - RNA, 19 nt, Homo sapiens
  misc_RNA (1)...(19): siRNA sense strand
uaagauugccuacagaaaa

SEQ ID NO: 1042106 - RNA, 19 nt, Homo sapiens
  misc_RNA (1)...(19): siRNA sense strand
ucccuaggauugucaagga

SEQ ID NO: 1042107 - RNA, 19 nt, Homo sapiens
  misc_RNA (1)...(19): siRNA sense strand
gacuauacaacuugauguu

SEQ ID NO: 1042108 - RNA, 19 nt, Homo sapiens
  misc_RNA (1)...(19): siRNA sense strand
cagagaaugcgacuauaca

SEQ ID NO: 1042109 - RNA, 19 nt, Homo sapiens
  misc_RNA (1)...(19): siRNA sense strand
aaagaagcccuccugucaa

SEQ ID NO: 1042110 - RNA, 19 nt, Homo sapiens
  misc_RNA (1)...(19): siRNA sense strand
ugauaaauccaugaagcua

SEQ ID NO: 1042111 - RNA, 19 nt, Homo sapiens
  misc_RNA (1)...(19): siRNA sense strand
ugacugauaaauccaugaa

SEQ ID NO: 1042112 - RNA, 19 nt, Homo sapiens
  misc_RNA (1)...(19): siRNA sense strand
gagcugugucuaccaacuu

SEQ ID NO: 1042113 - RNA, 19 nt, Homo sapiens
  misc_RNA (1)...(19): siRNA sense strand
accagaacccuuuaagauu

SEQ ID NO: 1042114 - RNA, 19 nt, Homo sapiens
  misc_RNA (1)...(19): siRNA sense strand
gcaaaaggggccauauuca

SEQ ID NO: 1042115 - RNA, 19 nt, Homo sapiens
  misc_RNA (1)...(19): siRNA sense strand
ucugugacaucucuuccuu

SEQ ID NO: 1042116 - RNA, 19 nt, Homo sapiens
  misc_RNA (1)...(19): siRNA sense strand
ggaugcuguccuacaagua

SEQ ID NO: 1042117 - RNA, 19 nt, Homo sapiens
  misc_RNA (1)...(19): siRNA sense strand
cuaggauugucaaggaguu

SEQ ID NO: 1042118 - RNA, 19 nt, Homo sapiens
  misc_RNA (1)...(19): siRNA sense strand
ugaagcuacuggcucaaag

SEQ ID NO: 1042119 - RNA, 19 nt, Homo sapiens
  misc_RNA (1)...(19): siRNA sense strand
gagaaugcgacuauacaac

SEQ ID NO: 1042120 - RNA, 19 nt, Homo sapiens
  misc_RNA (1)...(19): siRNA sense strand
aaagacaugcugagcuuca

SEQ ID NO: 1042121 - RNA, 19 nt, Homo sapiens
  misc_RNA (1)...(19): siRNA sense strand
guuggacagugccgaagau

SEQ ID NO: 1042122 - RNA, 19 nt, Homo sapiens
  misc_RNA (1)...(19): siRNA sense strand
gcgacuauacaacuugaug

SEQ ID NO: 1042123 - RNA, 19 nt, Homo sapiens
  misc_RNA (1)...(19): siRNA sense strand
ucaucucccaaguuauuua

SEQ ID NO: 1042124 - RNA, 19 nt, Homo sapiens
  misc_RNA (1)...(19): siRNA sense strand
cuaccagaacccuuuaaga

SEQ ID NO: 1042125 - RNA, 19 nt, Homo sapiens
  misc_RNA (1)...(19): siRNA sense strand
ucagucuucuaaacaguuc

SEQ ID NO: 1042126 - RNA, 19 nt, Homo sapiens
  misc_RNA (1)...(19): siRNA sense strand
uggaaaacauccuucgaaa

SEQ ID NO: 1042127 - RNA, 19 nt, Homo sapiens
  misc_RNA (1)...(19): siRNA sense strand
acacuuuccagcacuuaaa

SEQ ID NO: 1042128 - RNA, 19 nt, Homo sapiens
  misc_RNA (1)...(19): siRNA sense strand
ggcagagacagaggagaua

SEQ ID NO: 1042129 - RNA, 19 nt, Homo sapiens
  misc_RNA (1)...(19): siRNA sense strand
uaucuaccagaacccuuua

SEQ ID NO: 1042130 - RNA, 19 nt, Homo sapiens
  misc_RNA (1)...(19): siRNA sense strand
caaccucagcuguaucuac

SEQ ID NO: 1042131 - RNA, 19 nt, Homo sapiens
  misc_RNA (1)...(19): siRNA sense strand
gaccucauagaaacaguga

SEQ ID NO: 1042132 - RNA, 19 nt, Homo sapiens
  misc_RNA (1)...(19): siRNA sense strand
ccuuuaagauugccuacag

SEQ ID NO: 1042133 - RNA, 19 nt, Homo sapiens
  misc_RNA (1)...(19): siRNA sense strand
gauuccagcaacucaagaa

SEQ ID NO: 1042134 - RNA, 19 nt, Homo sapiens
  misc_RNA (1)...(19): siRNA sense strand
agcugugucuaccaacuua

SEQ ID NO: 1042135 - RNA, 19 nt, Homo sapiens
  misc_RNA (1)...(19): siRNA sense strand
cgaagauuccagcaacuca

SEQ ID NO: 1042136 - RNA, 19 nt, Homo sapiens
  misc_RNA (1)...(19): siRNA sense strand
auagugacaugggauuuca

SEQ ID NO: 1042137 - RNA, 19 nt, Homo sapiens
  misc_RNA (1)...(19): siRNA sense strand
gcuucaacagugugaguuu

SEQ ID NO: 1042138 - RNA, 19 nt, Homo sapiens
  misc_RNA (1)...(19): siRNA sense strand
ccacacuuuccagcacuua

SEQ ID NO: 1042139 - RNA, 19 nt, Homo sapiens
  misc_RNA (1)...(19): siRNA sense strand
gauaacccagggaaacaca

SEQ ID NO: 1042140 - RNA, 19 nt, Homo sapiens
  misc_RNA (1)...(19): siRNA sense strand
cccaaguuauuuacagcaa

SEQ ID NO: 1042141 - RNA, 19 nt, Homo sapiens
  misc_RNA (1)...(19): siRNA sense strand
uuaagauugccuacagaaa

SEQ ID NO: 1042142 - RNA, 19 nt, Homo sapiens
  misc_RNA (1)...(19): siRNA sense strand
auaaauccaugaagcuacu

SEQ ID NO: 1042143 - RNA, 19 nt, Homo sapiens
  misc_RNA (1)...(19): siRNA sense strand
cagcaaaaucagaaaagua

SEQ ID NO: 1042144 - RNA, 19 nt, Homo sapiens
  misc_RNA (1)...(19): siRNA sense strand
uaaacaguuccagaggaua

SEQ ID NO: 1042145 - RNA, 19 nt, Homo sapiens
  misc_RNA (1)...(19): siRNA sense strand
gagcuucaacagugugagu

SEQ ID NO: 1042146 - RNA, 19 nt, Homo sapiens
  misc_RNA (1)...(19): siRNA sense strand
ucagagaaugcgacuauac

SEQ ID NO: 1042147 - RNA, 19 nt, Homo sapiens
  misc_RNA (1)...(19): siRNA sense strand
gcuccacugaccauaaaga

SEQ ID NO: 1042148 - RNA, 19 nt, Homo sapiens
  misc_RNA (1)...(19): siRNA sense strand
cagaacccuuuaagauugc

SEQ ID NO: 1042149 - RNA, 19 nt, Homo sapiens
  misc_RNA (1)...(19): siRNA sense strand
agaaccaugaggaaguaua

SEQ ID NO: 1042150 - RNA, 19 nt, Homo sapiens
  misc_RNA (1)...(19): siRNA sense strand
cagauuugacaguaggaaa

SEQ ID NO: 1042151 - RNA, 19 nt, Homo sapiens
  misc_RNA (1)...(19): siRNA sense strand
agagaaugcgacuauacaa

SEQ ID NO: 1042152 - RNA, 19 nt, Homo sapiens
  misc_RNA (1)...(19): siRNA sense strand
ccagaggauauccaagaga

SEQ ID NO: 1042153 - RNA, 19 nt, Homo sapiens
  misc_RNA (1)...(19): siRNA sense strand
aguaggaaagcuucaaaug

SEQ ID NO: 1042154 - RNA, 19 nt, Homo sapiens
  misc_RNA (1)...(19): siRNA sense strand
cgacuauacaacuugaugu

SEQ ID NO: 1042155 - RNA, 19 nt, Homo sapiens
  misc_RNA (1)...(19): siRNA sense strand
agaaugcgacuauacaacu

SEQ ID NO: 1042156 - RNA, 19 nt, Homo sapiens
  misc_RNA (1)...(19): siRNA sense strand
gcaaggagaugagaaugaa

SEQ ID NO: 1042157 - RNA, 19 nt, Homo sapiens
  misc_RNA (1)...(19): siRNA sense strand
acagagagcucaagaacaa

SEQ ID NO: 1042158 - RNA, 19 nt, Homo sapiens
  misc_RNA (1)...(19): siRNA sense strand
gaaccaauguuuucugaua

SEQ ID NO: 1042159 - RNA, 19 nt, Homo sapiens
  misc_RNA (1)...(19): siRNA sense strand
gaaaucagcgaucguuaug

SEQ ID NO: 1042160 - RNA, 19 nt, Homo sapiens
  misc_RNA (1)...(19): siRNA sense strand
gcagagaauacaagaacua

SEQ ID NO: 1042161 - RNA, 19 nt, Homo sapiens
  misc_RNA (1)...(19): siRNA sense strand
ggaagaacuugaugaacca

SEQ ID NO: 1042162 - RNA, 19 nt, Homo sapiens
  misc_RNA (1)...(19): siRNA sense strand
gagaugagaaugaauaugg

SEQ ID NO: 1042163 - RNA, 19 nt, Homo sapiens
  misc_RNA (1)...(19): siRNA sense strand
ggaagcaacacuagacuca

SEQ ID NO: 1042164 - RNA, 19 nt, Homo sapiens
  misc_RNA (1)...(19): siRNA sense strand
gcaaaacacuagcugaaau

SEQ ID NO: 1042165 - RNA, 19 nt, Homo sapiens
  misc_RNA (1)...(19): siRNA sense strand
gagcagaguggaagaacuu

SEQ ID NO: 1042166 - RNA, 19 nt, Homo sapiens
  misc_RNA (1)...(19): siRNA sense strand
caguggauccgauagaaua

SEQ ID NO: 1042167 - RNA, 19 nt, Homo sapiens
  misc_RNA (1)...(19): siRNA sense strand
uggauccgauagaauauuu

SEQ ID NO: 1042168 - RNA, 19 nt, Homo sapiens
  misc_RNA (1)...(19): siRNA sense strand
gagagcucaagaacaauua

SEQ ID NO: 1042169 - RNA, 19 nt, Homo sapiens
  misc_RNA (1)...(19): siRNA sense strand
aaucagcgaucguuaugga

SEQ ID NO: 1042170 - RNA, 19 nt, Homo sapiens
  misc_RNA (1)...(19): siRNA sense strand
gaagauauucuacauucag

SEQ ID NO: 1042171 - RNA, 19 nt, Homo sapiens
  misc_RNA (1)...(19): siRNA sense strand
ggauuuacaaguauaagga

SEQ ID NO: 1042172 - RNA, 19 nt, Homo sapiens
  misc_RNA (1)...(19): siRNA sense strand
ggagcgugaaagagaauua

SEQ ID NO: 1042173 - RNA, 19 nt, Homo sapiens
  misc_RNA (1)...(19): siRNA sense strand
gcuggagcgugaaagagaa

SEQ ID NO: 1042174 - RNA, 19 nt, Homo sapiens
  misc_RNA (1)...(19): siRNA sense strand
gaacuugaugaaccaaugu

SEQ ID NO: 1042175 - RNA, 19 nt, Homo sapiens
  misc_RNA (1)...(19): siRNA sense strand
gaccauggaacaacugaga

SEQ ID NO: 1042176 - RNA, 19 nt, Homo sapiens
  misc_RNA (1)...(19): siRNA sense strand
aaggagaugagaaugaaua

SEQ ID NO: 1042177 - RNA, 19 nt, Homo sapiens
  misc_RNA (1)...(19): siRNA sense strand
gcagaaguggcaagaguuc

SEQ ID NO: 1042178 - RNA, 19 nt, Homo sapiens
  misc_RNA (1)...(19): siRNA sense strand
gagaauacaagaacuacag

SEQ ID NO: 1042179 - RNA, 19 nt, Homo sapiens
  misc_RNA (1)...(19): siRNA sense strand
ugaaaucagcgaucguuau

SEQ ID NO: 1042180 - RNA, 19 nt, Homo sapiens
  misc_RNA (1)...(19): siRNA sense strand
gaaaaucuaguuaggaaug

SEQ ID NO: 1042181 - RNA, 19 nt, Homo sapiens
  misc_RNA (1)...(19): siRNA sense strand
gcagcuagaguuggaaaug

SEQ ID NO: 1042182 - RNA, 19 nt, Homo sapiens
  misc_RNA (1)...(19): siRNA sense strand
ggcaaggagaugagaauga

SEQ ID NO: 1042183 - RNA, 19 nt, Homo sapiens
  misc_RNA (1)...(19): siRNA sense strand
agaacuugaugaaccaaug

SEQ ID NO: 1042184 - RNA, 19 nt, Homo sapiens
  misc_RNA (1)...(19): siRNA sense strand
gagaauuagcucugaugga

SEQ ID NO: 1042185 - RNA, 19 nt, Homo sapiens
  misc_RNA (1)...(19): siRNA sense strand
gaugagaaugaauauggaa

SEQ ID NO: 1042186 - RNA, 19 nt, Homo sapiens
  misc_RNA (1)...(19): siRNA sense strand
gcucuuacuucagcagcaa

SEQ ID NO: 1042187 - RNA, 19 nt, Homo sapiens
  misc_RNA (1)...(19): siRNA sense strand
ggagaggcagagaauacaa

SEQ ID NO: 1042188 - RNA, 19 nt, Homo sapiens
  misc_RNA (1)...(19): siRNA sense strand
caagcuggagcgugaaaga

SEQ ID NO: 1042189 - RNA, 19 nt, Homo sapiens
  misc_RNA (1)...(19): siRNA sense strand
uaacuugagcagaguggaa

SEQ ID NO: 1042190 - RNA, 19 nt, Homo sapiens
  misc_RNA (1)...(19): siRNA sense strand
uuauggagcaccuaacuug

SEQ ID NO: 1042191 - RNA, 19 nt, Homo sapiens
  misc_RNA (1)...(19): siRNA sense strand
cauugcagcuagaguugga

SEQ ID NO: 1042192 - RNA, 19 nt, Homo sapiens
  misc_RNA (1)...(19): siRNA sense strand
caacugagacaaaaggaaa

SEQ ID NO: 1042193 - RNA, 19 nt, Homo sapiens
  misc_RNA (1)...(19): siRNA sense strand
gcauuaaacauugaucaag

SEQ ID NO: 1042194 - RNA, 19 nt, Homo sapiens
  misc_RNA (1)...(19): siRNA sense strand
gcagaguggaagaacuuga

SEQ ID NO: 1042195 - RNA, 19 nt, Homo sapiens
  misc_RNA (1)...(19): siRNA sense strand
uauucuacauucagaggaa

SEQ ID NO: 1042196 - RNA, 19 nt, Homo sapiens
  misc_RNA (1)...(19): siRNA sense strand
gaaaaggagaggcagagaa

SEQ ID NO: 1042197 - RNA, 19 nt, Homo sapiens
  misc_RNA (1)...(19): siRNA sense strand
cuaguuaggaaugaagaua

SEQ ID NO: 1042198 - RNA, 19 nt, Homo sapiens
  misc_RNA (1)...(19): siRNA sense strand
uggaaaaucuaguuaggaa

SEQ ID NO: 1042199 - RNA, 19 nt, Homo sapiens
  misc_RNA (1)...(19): siRNA sense strand
gauccgauagaauauuuag

SEQ ID NO: 1042200 - RNA, 19 nt, Homo sapiens
  misc_RNA (1)...(19): siRNA sense strand
ggauccgauagaauauuua

SEQ ID NO: 1042201 - RNA, 19 nt, Homo sapiens
  misc_RNA (1)...(19): siRNA sense strand
agaugagaaugaauaugga

SEQ ID NO: 1042202 - RNA, 19 nt, Homo sapiens
  misc_RNA (1)...(19): siRNA sense strand
ggagucaauauaucuucaa

SEQ ID NO: 1042203 - RNA, 19 nt, Homo sapiens
  misc_RNA (1)...(19): siRNA sense strand
agagagcucaagaacaauu

SEQ ID NO: 1042204 - RNA, 19 nt, Homo sapiens
  misc_RNA (1)...(19): siRNA sense strand
cuacagagagcucaagaac

SEQ ID NO: 1042205 - RNA, 19 nt, Homo sapiens
  misc_RNA (1)...(19): siRNA sense strand
gaguuggaaaugcaagaaa

SEQ ID NO: 1042206 - RNA, 19 nt, Homo sapiens
  misc_RNA (1)...(19): siRNA sense strand
cccaguggauccgauagaa

SEQ ID NO: 1042207 - RNA, 19 nt, Homo sapiens
  misc_RNA (1)...(19): siRNA sense strand
gaacuacagagagcucaag

SEQ ID NO: 1042208 - RNA, 19 nt, Homo sapiens
  misc_RNA (1)...(19): siRNA sense strand
gauggagcaggaaaugaug

SEQ ID NO: 1042209 - RNA, 19 nt, Homo sapiens
  misc_RNA (1)...(19): siRNA sense strand
gaguggaagaacuugauga

SEQ ID NO: 1042210 - RNA, 19 nt, Homo sapiens
  misc_RNA (1)...(19): siRNA sense strand
ugauggagcaggaaaugau

SEQ ID NO: 1042211 - RNA, 19 nt, Homo sapiens
  misc_RNA (1)...(19): siRNA sense strand
caauuaggcaaggagauga

SEQ ID NO: 1042212 - RNA, 19 nt, Homo sapiens
  misc_RNA (1)...(19): siRNA sense strand
aauacaagaacuacagaga

SEQ ID NO: 1042213 - RNA, 19 nt, Homo sapiens
  misc_RNA (1)...(19): siRNA sense strand
ggagaugagaaugaauaug

SEQ ID NO: 1042214 - RNA, 19 nt, Homo sapiens
  misc_RNA (1)...(19): siRNA sense strand
gagaggcagagaauacaag

SEQ ID NO: 1042215 - RNA, 19 nt, Homo sapiens
  misc_RNA (1)...(19): siRNA sense strand
cagcuagaguuggaaaugc

SEQ ID NO: 1042216 - RNA, 19 nt, Homo sapiens
  misc_RNA (1)...(19): siRNA sense strand
gaacaacugagacaaaagg

SEQ ID NO: 1042217 - RNA, 19 nt, Homo sapiens
  misc_RNA (1)...(19): siRNA sense strand
acaauuaggcaaggagaug

SEQ ID NO: 1042218 - RNA, 19 nt, Homo sapiens
  misc_RNA (1)...(19): siRNA sense strand
cuguuuaacucaaggucuu

SEQ ID NO: 1042219 - RNA, 19 nt, Homo sapiens
  misc_RNA (1)...(19): siRNA sense strand
aaaggagaggcagagaaua

SEQ ID NO: 1042220 - RNA, 19 nt, Homo sapiens
  misc_RNA (1)...(19): siRNA sense strand
cagaggaagcaacacuaga

SEQ ID NO: 1042221 - RNA, 19 nt, Homo sapiens
  misc_RNA (1)...(19): siRNA sense strand
ggcauugcagcuagaguug

SEQ ID NO: 1042222 - RNA, 19 nt, Homo sapiens
  misc_RNA (1)...(19): siRNA sense strand
acacuagacucaggcaaaa

SEQ ID NO: 1042223 - RNA, 19 nt, Homo sapiens
  misc_RNA (1)...(19): siRNA sense strand
ccgauagaauauuuagcau

SEQ ID NO: 1042224 - RNA, 19 nt, Homo sapiens
  misc_RNA (1)...(19): siRNA sense strand
ggaaagggcucaucaaagc

SEQ ID NO: 1042225 - RNA, 19 nt, Homo sapiens
  misc_RNA (1)...(19): siRNA sense strand
ugaaggaucaugccucuaa

SEQ ID NO: 1042226 - RNA, 19 nt, Homo sapiens
  misc_RNA (1)...(19): siRNA sense strand
gaagacaacuggaaaagca

SEQ ID NO: 1042227 - RNA, 19 nt, Homo sapiens
  misc_RNA (1)...(19): siRNA sense strand
caucaaagcagcaaugaca

SEQ ID NO: 1042228 - RNA, 19 nt, Homo sapiens
  misc_RNA (1)...(19): siRNA sense strand
ggugaaacuucgaagacaa

SEQ ID NO: 1042229 - RNA, 19 nt, Homo sapiens
  misc_RNA (1)...(19): siRNA sense strand
cagcaugcauucccacuuc

SEQ ID NO: 1042230 - RNA, 19 nt, Homo sapiens
  misc_RNA (1)...(19): siRNA sense strand
gagauguuguccggccaua

SEQ ID NO: 1042231 - RNA, 19 nt, Homo sapiens
  misc_RNA (1)...(19): siRNA sense strand
ccaagcuucucaucucugu

SEQ ID NO: 1042232 - RNA, 19 nt, Homo sapiens
  misc_RNA (1)...(19): siRNA sense strand
ggaccucauuggaagagau

SEQ ID NO: 1042233 - RNA, 19 nt, Homo sapiens
  misc_RNA (1)...(19): siRNA sense strand
gaggaaagauaugcaccau

SEQ ID NO: 1042234 - RNA, 19 nt, Homo sapiens
  misc_RNA (1)...(19): siRNA sense strand
gaaggaucaugccucuaag

SEQ ID NO: 1042235 - RNA, 19 nt, Homo sapiens
  misc_RNA (1)...(19): siRNA sense strand
caagcaagucuuugggaaa

SEQ ID NO: 1042236 - RNA, 19 nt, Homo sapiens
  misc_RNA (1)...(19): siRNA sense strand
caagcucacuguucucaac

SEQ ID NO: 1042237 - RNA, 19 nt, Homo sapiens
  misc_RNA (1)...(19): siRNA sense strand
gggaaagggcucaucaaag

SEQ ID NO: 1042238 - RNA, 19 nt, Homo sapiens
  misc_RNA (1)...(19): siRNA sense strand
aaccugaucuccucuuaca

SEQ ID NO: 1042239 - RNA, 19 nt, Homo sapiens
  misc_RNA (1)...(19): siRNA sense strand
gguguuauucgucauguug

SEQ ID NO: 1042240 - RNA, 19 nt, Homo sapiens
  misc_RNA (1)...(19): siRNA sense strand
caacuggagcguggauauu

SEQ ID NO: 1042241 - RNA, 19 nt, Homo sapiens
  misc_RNA (1)...(19): siRNA sense strand
gcagaggugaaacuucgaa

SEQ ID NO: 1042242 - RNA, 19 nt, Homo sapiens
  misc_RNA (1)...(19): siRNA sense strand
gaaagggcucaucaaagca

SEQ ID NO: 1042243 - RNA, 19 nt, Homo sapiens
  misc_RNA (1)...(19): siRNA sense strand
gcucaucaaagcagcaaug

SEQ ID NO: 1042244 - RNA, 19 nt, Homo sapiens
  misc_RNA (1)...(19): siRNA sense strand
gaccaaggaauggcaguug

SEQ ID NO: 1042245 - RNA, 19 nt, Homo sapiens
  misc_RNA (1)...(19): siRNA sense strand
auauuucacuccagaagau

SEQ ID NO: 1042246 - RNA, 19 nt, Homo sapiens
  misc_RNA (1)...(19): siRNA sense strand
ugggaaagggcucaucaaa

SEQ ID NO: 1042247 - RNA, 19 nt, Homo sapiens
  misc_RNA (1)...(19): siRNA sense strand
ucuuacaccugaugaccaa

SEQ ID NO: 1042248 - RNA, 19 nt, Homo sapiens
  misc_RNA (1)...(19): siRNA sense strand
aaaaccugaucuccucuua

SEQ ID NO: 1042249 - RNA, 19 nt, Homo sapiens
  misc_RNA (1)...(19): siRNA sense strand
guucucaacagcaugcauu

SEQ ID NO: 1042250 - RNA, 19 nt, Homo sapiens
  misc_RNA (1)...(19): siRNA sense strand
gaggugaaacuucgaagac

SEQ ID NO: 1042251 - RNA, 19 nt, Homo sapiens
  misc_RNA (1)...(19): siRNA sense strand
uccagaagauaaacacaag

SEQ ID NO: 1042252 - RNA, 19 nt, Homo sapiens
  misc_RNA (1)...(19): siRNA sense strand
gacaacgggaccacuggaa

SEQ ID NO: 1042253 - RNA, 19 nt, Homo sapiens
  misc_RNA (1)...(19): siRNA sense strand
gcauauuucacuccagaag

SEQ ID NO: 1042254 - RNA, 19 nt, Homo sapiens
  misc_RNA (1)...(19): siRNA sense strand
ggccauaccagaccauguc

SEQ ID NO: 1042255 - RNA, 19 nt, Homo sapiens
  misc_RNA (1)...(19): siRNA sense strand
caacuggaaaagcauauuu

SEQ ID NO: 1042256 - RNA, 19 nt, Homo sapiens
  misc_RNA (1)...(19): siRNA sense strand
uaccagaccauguccaauc

SEQ ID NO: 1042257 - RNA, 19 nt, Homo sapiens
  misc_RNA (1)...(19): siRNA sense strand
ggagcagaggugaaacuuc

SEQ ID NO: 1042258 - RNA, 19 nt, Homo sapiens
  misc_RNA (1)...(19): siRNA sense strand
uaagucucgaggaaagaua

SEQ ID NO: 1042259 - RNA, 19 nt, Homo sapiens
  misc_RNA (1)...(19): siRNA sense strand
cauauuucacuccagaaga

SEQ ID NO: 1042260 - RNA, 19 nt, Homo sapiens
  misc_RNA (1)...(19): siRNA sense strand
acaacgggaccacuggaaa

SEQ ID NO: 1042261 - RNA, 19 nt, Homo sapiens
  misc_RNA (1)...(19): siRNA sense strand
cuucgaagacaacuggaaa

SEQ ID NO: 1042262 - RNA, 19 nt, Homo sapiens
  misc_RNA (1)...(19): siRNA sense strand
ggaauggcaguuggagcuu

SEQ ID NO: 1042263 - RNA, 19 nt, Homo sapiens
  misc_RNA (1)...(19): siRNA sense strand
caacgggaccacuggaaaa

SEQ ID NO: 1042264 - RNA, 19 nt, Homo sapiens
  misc_RNA (1)...(19): siRNA sense strand
cauaccagaccauguccaa

SEQ ID NO: 1042265 - RNA, 19 nt, Homo sapiens
  misc_RNA (1)...(19): siRNA sense strand
ggaucaugccucuaagucu

SEQ ID NO: 1042266 - RNA, 19 nt, Homo sapiens
  misc_RNA (1)...(19): siRNA sense strand
ggaaagggcucaucaaagc

SEQ ID NO: 1042267 - RNA, 19 nt, Homo sapiens
  misc_RNA (1)...(19): siRNA sense strand
ugaaggaucaugccucuaa

SEQ ID NO: 1042268 - RNA, 19 nt, Homo sapiens
  misc_RNA (1)...(19): siRNA sense strand
gaagacaacuggaaaagca

SEQ ID NO: 1042269 - RNA, 19 nt, Homo sapiens
  misc_RNA (1)...(19): siRNA sense strand
caucaaagcagcaaugaca

SEQ ID NO: 1042270 - RNA, 19 nt, Homo sapiens
  misc_RNA (1)...(19): siRNA sense strand
ggugaaacuucgaagacaa

SEQ ID NO: 1042271 - RNA, 19 nt, Homo sapiens
  misc_RNA (1)...(19): siRNA sense strand
cagcaugcauucccacuuc

SEQ ID NO: 1042272 - RNA, 19 nt, Homo sapiens
  misc_RNA (1)...(19): siRNA sense strand
gagauguuguccggccaua

SEQ ID NO: 1042273 - RNA, 19 nt, Homo sapiens
  misc_RNA (1)...(19): siRNA sense strand
ccaagcuucucaucucugu

SEQ ID NO: 1042274 - RNA, 19 nt, Homo sapiens
  misc_RNA (1)...(19): siRNA sense strand
ggaccucauuggaagagau

SEQ ID NO: 1042275 - RNA, 19 nt, Homo sapiens
  misc_RNA (1)...(19): siRNA sense strand
gaggaaagauaugcaccau

SEQ ID NO: 1042276 - RNA, 19 nt, Homo sapiens
  misc_RNA (1)...(19): siRNA sense strand
gaaggaucaugccucuaag

SEQ ID NO: 1042277 - RNA, 19 nt, Homo sapiens
  misc_RNA (1)...(19): siRNA sense strand
caagcaagucuuugggaaa

SEQ ID NO: 1042278 - RNA, 19 nt, Homo sapiens
  misc_RNA (1)...(19): siRNA sense strand
caagcucacuguucucaac

SEQ ID NO: 1042279 - RNA, 19 nt, Homo sapiens
  misc_RNA (1)...(19): siRNA sense strand
aaccugaucuccucuuaca

SEQ ID NO: 1042280 - RNA, 19 nt, Homo sapiens
  misc_RNA (1)...(19): siRNA sense strand
gggaaagggcucaucaaag

SEQ ID NO: 1042281 - RNA, 19 nt, Homo sapiens
  misc_RNA (1)...(19): siRNA sense strand
gguguuauucgucauguug

SEQ ID NO: 1042282 - RNA, 19 nt, Homo sapiens
  misc_RNA (1)...(19): siRNA sense strand
caacuggagcguggauauu

SEQ ID NO: 1042283 - RNA, 19 nt, Homo sapiens
  misc_RNA (1)...(19): siRNA sense strand
gcagaggugaaacuucgaa

SEQ ID NO: 1042284 - RNA, 19 nt, Homo sapiens
  misc_RNA (1)...(19): siRNA sense strand
gaaagggcucaucaaagca

SEQ ID NO: 1042285 - RNA, 19 nt, Homo sapiens
  misc_RNA (1)...(19): siRNA sense strand
gcucaucaaagcagcaaug

SEQ ID NO: 1042286 - RNA, 19 nt, Homo sapiens
  misc_RNA (1)...(19): siRNA sense strand
gaccaaggaauggcaguug

SEQ ID NO: 1042287 - RNA, 19 nt, Homo sapiens
  misc_RNA (1)...(19): siRNA sense strand
auauuucacuccagaagau

SEQ ID NO: 1042288 - RNA, 19 nt, Homo sapiens
  misc_RNA (1)...(19): siRNA sense strand
ugggaaagggcucaucaaa

SEQ ID NO: 1042289 - RNA, 19 nt, Homo sapiens
  misc_RNA (1)...(19): siRNA sense strand
ucuuacaccugaugaccaa

SEQ ID NO: 1042290 - RNA, 19 nt, Homo sapiens
  misc_RNA (1)...(19): siRNA sense strand
aaaaccugaucuccucuua

SEQ ID NO: 1042291 - RNA, 19 nt, Homo sapiens
  misc_RNA (1)...(19): siRNA sense strand
guucucaacagcaugcauu

SEQ ID NO: 1042292 - RNA, 19 nt, Homo sapiens
  misc_RNA (1)...(19): siRNA sense strand
gaggugaaacuucgaagac

SEQ ID NO: 1042293 - RNA, 19 nt, Homo sapiens
  misc_RNA (1)...(19): siRNA sense strand
uccagaagauaaacacaag

SEQ ID NO: 1042294 - RNA, 19 nt, Homo sapiens
  misc_RNA (1)...(19): siRNA sense strand
gacaacgggaccacuggaa

SEQ ID NO: 1042295 - RNA, 19 nt, Homo sapiens
  misc_RNA (1)...(19): siRNA sense strand
gcauauuucacuccagaag

SEQ ID NO: 1042296 - RNA, 19 nt, Homo sapiens
  misc_RNA (1)...(19): siRNA sense strand
ggccauaccagaccauguc

SEQ ID NO: 1042297 - RNA, 19 nt, Homo sapiens
  misc_RNA (1)...(19): siRNA sense strand
caacuggaaaagcauauuu

SEQ ID NO: 1042298 - RNA, 19 nt, Homo sapiens
  misc_RNA (1)...(19): siRNA sense strand
uaccagaccauguccaauc

SEQ ID NO: 1042299 - RNA, 19 nt, Homo sapiens
  misc_RNA (1)...(19): siRNA sense strand
ggagcagaggugaaacuuc

SEQ ID NO: 1042300 - RNA, 19 nt, Homo sapiens
  misc_RNA (1)...(19): siRNA sense strand
uaagucucgaggaaagaua

SEQ ID NO: 1042301 - RNA, 19 nt, Homo sapiens
  misc_RNA (1)...(19): siRNA sense strand
cauauuucacuccagaaga

SEQ ID NO: 1042302 - RNA, 19 nt, Homo sapiens
  misc_RNA (1)...(19): siRNA sense strand
uguaugugcgaguaucuuu

SEQ ID NO: 1042303 - RNA, 19 nt, Homo sapiens
  misc_RNA (1)...(19): siRNA sense strand
cuucgaagacaacuggaaa

SEQ ID NO: 1042304 - RNA, 19 nt, Homo sapiens
  misc_RNA (1)...(19): siRNA sense strand
acaacgggaccacuggaaa

SEQ ID NO: 1042305 - RNA, 19 nt, Homo sapiens
  misc_RNA (1)...(19): siRNA sense strand
ggaauggcaguuggagcuu

SEQ ID NO: 1042306 - RNA, 19 nt, Homo sapiens
  misc_RNA (1)...(19): siRNA sense strand
caacgggaccacuggaaaa

SEQ ID NO: 1042307 - RNA, 19 nt, Homo sapiens
  misc_RNA (1)...(19): siRNA sense strand
cauaccagaccauguccaa

SEQ ID NO: 1042308 - RNA, 19 nt, Homo sapiens
  misc_RNA (1)...(19): siRNA sense strand
ggaucaugccucuaagucu

SEQ ID NO: 1042309 - RNA, 19 nt, Homo sapiens
  misc_RNA (1)...(19): siRNA sense strand
gcaaagaccucaagcuugu

SEQ ID NO: 1042310 - RNA, 19 nt, Homo sapiens
  misc_RNA (1)...(19): siRNA sense strand
gauaucagcuuccagugua

SEQ ID NO: 1042311 - RNA, 19 nt, Homo sapiens
  misc_RNA (1)...(19): siRNA sense strand
gaacagauaucagcuucca

SEQ ID NO: 1042312 - RNA, 19 nt, Homo sapiens
  misc_RNA (1)...(19): siRNA sense strand
gcagaccucucacugacaa

SEQ ID NO: 1042313 - RNA, 19 nt, Homo sapiens
  misc_RNA (1)...(19): siRNA sense strand
gagcaaugaucaugaacug

SEQ ID NO: 1042314 - RNA, 19 nt, Homo sapiens
  misc_RNA (1)...(19): siRNA sense strand
ggacuauguuguacagguu

SEQ ID NO: 1042315 - RNA, 19 nt, Homo sapiens
  misc_RNA (1)...(19): siRNA sense strand
ggacaacuacgcagcaaga

SEQ ID NO: 1042316 - RNA, 19 nt, Homo sapiens
  misc_RNA (1)...(19): siRNA sense strand
ugagagcaaugaucaugaa

SEQ ID NO: 1042317 - RNA, 19 nt, Homo sapiens
  misc_RNA (1)...(19): siRNA sense strand
gaaaagagcgacauagaga

SEQ ID NO: 1042318 - RNA, 19 nt, Homo sapiens
  misc_RNA (1)...(19): siRNA sense strand
gacacaguauuccacauga

SEQ ID NO: 1042319 - RNA, 19 nt, Homo sapiens
  misc_RNA (1)...(19): siRNA sense strand
gcagcaagagggaugaauu

SEQ ID NO: 1042320 - RNA, 19 nt, Homo sapiens
  misc_RNA (1)...(19): siRNA sense strand
cagcuucguuugcgccuuu

SEQ ID NO: 1042321 - RNA, 19 nt, Homo sapiens
  misc_RNA (1)...(19): siRNA sense strand
cagcaagagggaugaauuu

SEQ ID NO: 1042322 - RNA, 19 nt, Homo sapiens
  misc_RNA (1)...(19): siRNA sense strand
cauugauggugcaaacaua

SEQ ID NO: 1042323 - RNA, 19 nt, Homo sapiens
  misc_RNA (1)...(19): siRNA sense strand
gaagaucccaaaggacuau

SEQ ID NO: 1042324 - RNA, 19 nt, Homo sapiens
  misc_RNA (1)...(19): siRNA sense strand
ccaaaggacuauguuguac

SEQ ID NO: 1042325 - RNA, 19 nt, Homo sapiens
  misc_RNA (1)...(19): siRNA sense strand
gauuugggaugccuugaag

SEQ ID NO: 1042326 - RNA, 19 nt, Homo sapiens
  misc_RNA (1)...(19): siRNA sense strand
aacauaacauuaccacaug

SEQ ID NO: 1042327 - RNA, 19 nt, Homo sapiens
  misc_RNA (1)...(19): siRNA sense strand
uuacagagugcuacgauga

SEQ ID NO: 1042328 - RNA, 19 nt, Homo sapiens
  misc_RNA (1)...(19): siRNA sense strand
cagcacagacacaguauuc

SEQ ID NO: 1042329 - RNA, 19 nt, Homo sapiens
  misc_RNA (1)...(19): siRNA sense strand
cccaaaggacuauguugua

SEQ ID NO: 1042330 - RNA, 19 nt, Homo sapiens
  misc_RNA (1)...(19): siRNA sense strand
gcaccgccaaucaacauga

SEQ ID NO: 1042331 - RNA, 19 nt, Homo sapiens
  misc_RNA (1)...(19): siRNA sense strand
gcacagacacaguauucca

SEQ ID NO: 1042332 - RNA, 19 nt, Homo sapiens
  misc_RNA (1)...(19): siRNA sense strand
gaaggcugcugcacaugcu

SEQ ID NO: 1042333 - RNA, 19 nt, Homo sapiens
  misc_RNA (1)...(19): siRNA sense strand
caagagggaugaauuuugg

SEQ ID NO: 1042334 - RNA, 19 nt, Homo sapiens
  misc_RNA (1)...(19): siRNA sense strand
acacaguauuccacaugaa

SEQ ID NO: 1042335 - RNA, 19 nt, Homo sapiens
  misc_RNA (1)...(19): siRNA sense strand
gagccaaccugugcagaac

SEQ ID NO: 1042336 - RNA, 19 nt, Homo sapiens
  misc_RNA (1)...(19): siRNA sense strand
aaaggacuauguuguacag

SEQ ID NO: 1042337 - RNA, 19 nt, Homo sapiens
  misc_RNA (1)...(19): siRNA sense strand
gcaagagggaugaauuuug

SEQ ID NO: 1042338 - RNA, 19 nt, Homo sapiens
  misc_RNA (1)...(19): siRNA sense strand
gaaggccggaaagagauuu

SEQ ID NO: 1042339 - RNA, 19 nt, Homo sapiens
  misc_RNA (1)...(19): siRNA sense strand
ucgcagcacagacacagua

SEQ ID NO: 1042340 - RNA, 19 nt, Homo sapiens
  misc_RNA (1)...(19): siRNA sense strand
gagcugaagaucccaaagg

SEQ ID NO: 1042341 - RNA, 19 nt, Homo sapiens
  misc_RNA (1)...(19): siRNA sense strand
gaagagacgguugcaugca

SEQ ID NO: 1042342 - RNA, 19 nt, Homo sapiens
  misc_RNA (1)...(19): siRNA sense strand
ggauacagcaccagcuuuu

SEQ ID NO: 1042343 - RNA, 19 nt, Homo sapiens
  misc_RNA (1)...(19): siRNA sense strand
gacuauguuguacagguua

SEQ ID NO: 1042344 - RNA, 19 nt, Homo sapiens
  misc_RNA (1)...(19): siRNA sense strand
gggauacagcaccagcuuu

SEQ ID NO: 1042345 - RNA, 19 nt, Homo sapiens
  misc_RNA (1)...(19): siRNA sense strand
caaaggacuauguuguaca

SEQ ID NO: 1042346 - RNA, 19 nt, Homo sapiens
  misc_RNA (1)...(19): siRNA sense strand
gaaguucgaagagcugaag

SEQ ID NO: 1042347 - RNA, 19 nt, Homo sapiens
  misc_RNA (1)...(19): siRNA sense strand
acccaauucuggauaugaa

SEQ ID NO: 1042348 - RNA, 19 nt, Homo sapiens
  misc_RNA (1)...(19): siRNA sense strand
cuugaaggcugcugcacau

SEQ ID NO: 1042349 - RNA, 19 nt, Homo sapiens
  misc_RNA (1)...(19): siRNA sense strand
aggcaaagaccucaagcuu

SEQ ID NO: 1042350 - RNA, 19 nt, Homo sapiens
  misc_RNA (1)...(19): siRNA sense strand
gaucccaaaggacuauguu

SEQ ID NO: 1042351 - RNA, 19 nt, Homo sapiens
  misc_RNA (1)...(19): siRNA sense strand
ugaagaucccaaaggacua

SEQ ID NO: 1042352 - RNA, 19 nt, Homo sapiens
  misc_RNA (1)...(19): siRNA sense strand
agacacaguauuccacaug

SEQ ID NO: 1042353 - RNA, 19 nt, Homo sapiens
  misc_RNA (1)...(19): siRNA sense strand
gaaugucagcuucguuugc

SEQ ID NO: 1042354 - RNA, 19 nt, Homo sapiens
  misc_RNA (1)...(19): siRNA sense strand
gcagcacagacacaguauu

SEQ ID NO: 1042355 - RNA, 19 nt, Homo sapiens
  misc_RNA (1)...(19): siRNA sense strand
ggugcaaacauaacauuac

SEQ ID NO: 1042356 - RNA, 19 nt, Homo sapiens
  misc_RNA (1)...(19): siRNA sense strand
gugcaaacauaacauuacc

SEQ ID NO: 1042357 - RNA, 19 nt, Homo sapiens
  misc_RNA (1)...(19): siRNA sense strand
ccacccaauucuggauaug

SEQ ID NO: 1042358 - RNA, 19 nt, Homo sapiens
  misc_RNA (1)...(19): siRNA sense strand
uuugaaggccggaaagaga

SEQ ID NO: 1042359 - RNA, 19 nt, Homo sapiens
  misc_RNA (1)...(19): siRNA sense strand
gagggaguggaaccaggua

SEQ ID NO: 1042360 - RNA, 19 nt, Homo sapiens
  misc_RNA (1)...(19): siRNA sense strand
ugagccaaccugugcagaa

SEQ ID NO: 1042361 - RNA, 19 nt, Homo sapiens
  misc_RNA (1)...(19): siRNA sense strand
guuguacagguuauaguga

SEQ ID NO: 1042362 - RNA, 19 nt, Homo sapiens
  misc_RNA (1)...(19): siRNA sense strand
ggaaaagagcgacauagag

SEQ ID NO: 1042363 - RNA, 19 nt, Homo sapiens
  misc_RNA (1)...(19): siRNA sense strand
gaacugaauucaacuacuu

SEQ ID NO: 1042364 - RNA, 19 nt, Homo sapiens
  misc_RNA (1)...(19): siRNA sense strand
gcugucagauggagaaaua

SEQ ID NO: 1042365 - RNA, 19 nt, Homo sapiens
  misc_RNA (1)...(19): siRNA sense strand
gcucaggguuuaaguauug

SEQ ID NO: 1042366 - RNA, 19 nt, Homo sapiens
  misc_RNA (1)...(19): siRNA sense strand
gcagagcgaugccaacguu

SEQ ID NO: 1042367 - RNA, 19 nt, Homo sapiens
  misc_RNA (1)...(19): siRNA sense strand
ugacuuggauucucucauu

SEQ ID NO: 1042368 - RNA, 19 nt, Homo sapiens
  misc_RNA (1)...(19): siRNA sense strand
gcagugugcuggcgaguga

SEQ ID NO: 1042369 - RNA, 19 nt, Homo sapiens
  misc_RNA (1)...(19): siRNA sense strand
gaacauaccaagaacugaa

SEQ ID NO: 1042370 - RNA, 19 nt, Homo sapiens
  misc_RNA (1)...(19): siRNA sense strand
gaagguccaugugguuauu

SEQ ID NO: 1042371 - RNA, 19 nt, Homo sapiens
  misc_RNA (1)...(19): siRNA sense strand
guucagugcucaggguuua

SEQ ID NO: 1042372 - RNA, 19 nt, Homo sapiens
  misc_RNA (1)...(19): siRNA sense strand
uaaacugaaucgaagcaaa

SEQ ID NO: 1042373 - RNA, 19 nt, Homo sapiens
  misc_RNA (1)...(19): siRNA sense strand
cuucacauaugcuuacuuu

SEQ ID NO: 1042374 - RNA, 19 nt, Homo sapiens
  misc_RNA (1)...(19): siRNA sense strand
cacauaugcuuacuuucua

SEQ ID NO: 1042375 - RNA, 19 nt, Homo sapiens
  misc_RNA (1)...(19): siRNA sense strand
gagaagguccaugugguua

SEQ ID NO: 1042376 - RNA, 19 nt, Homo sapiens
  misc_RNA (1)...(19): siRNA sense strand
gcuaaauauuuccgaauca

SEQ ID NO: 1042377 - RNA, 19 nt, Homo sapiens
  misc_RNA (1)...(19): siRNA sense strand
gagaggacaucaucaacgu

SEQ ID NO: 1042378 - RNA, 19 nt, Homo sapiens
  misc_RNA (1)...(19): siRNA sense strand
ggaugaccauggaaucaga

SEQ ID NO: 1042379 - RNA, 19 nt, Homo sapiens
  misc_RNA (1)...(19): siRNA sense strand
gcaguugucaaagucauua

SEQ ID NO: 1042380 - RNA, 19 nt, Homo sapiens
  misc_RNA (1)...(19): siRNA sense strand
gcaacgcgccaaaucuaaa

SEQ ID NO: 1042381 - RNA, 19 nt, Homo sapiens
  misc_RNA (1)...(19): siRNA sense strand
ucaaguggaugaccaugga

SEQ ID NO: 1042382 - RNA, 19 nt, Homo sapiens
  misc_RNA (1)...(19): siRNA sense strand
caagagaggacaucaucaa

SEQ ID NO: 1042383 - RNA, 19 nt, Homo sapiens
  misc_RNA (1)...(19): siRNA sense strand
gaaauaaaaguggccauua

SEQ ID NO: 1042384 - RNA, 19 nt, Homo sapiens
  misc_RNA (1)...(19): siRNA sense strand
ggagaagguccaugugguu

SEQ ID NO: 1042385 - RNA, 19 nt, Homo sapiens
  misc_RNA (1)...(19): siRNA sense strand
cgccaaaucuaaacugaau

SEQ ID NO: 1042386 - RNA, 19 nt, Homo sapiens
  misc_RNA (1)...(19): siRNA sense strand
ccucuucucucgugcuaaa

SEQ ID NO: 1042387 - RNA, 19 nt, Homo sapiens
  misc_RNA (1)...(19): siRNA sense strand
agaaucagcaguugucaaa

SEQ ID NO: 1042388 - RNA, 19 nt, Homo sapiens
  misc_RNA (1)...(19): siRNA sense strand
gcaaacgcuuggagaaggu

SEQ ID NO: 1042389 - RNA, 19 nt, Homo sapiens
  misc_RNA (1)...(19): siRNA sense strand
gugcugaacauaccaagaa

SEQ ID NO: 1042390 - RNA, 19 nt, Homo sapiens
  misc_RNA (1)...(19): siRNA sense strand
cagacaauguugaaagauc

SEQ ID NO: 1042391 - RNA, 19 nt, Homo sapiens
  misc_RNA (1)...(19): siRNA sense strand
caagaacugaauucaacua

SEQ ID NO: 1042392 - RNA, 19 nt, Homo sapiens
  misc_RNA (1)...(19): siRNA sense strand
ucacauaugcuuacuuucu

SEQ ID NO: 1042393 - RNA, 19 nt, Homo sapiens
  misc_RNA (1)...(19): siRNA sense strand
cagagaagcaggaggaaau

SEQ ID NO: 1042394 - RNA, 19 nt, Homo sapiens
  misc_RNA (1)...(19): siRNA sense strand
uaaaucgugugacuuggau

SEQ ID NO: 1042395 - RNA, 19 nt, Homo sapiens
  misc_RNA (1)...(19): siRNA sense strand
aaucagcaguugucaaagu

SEQ ID NO: 1042396 - RNA, 19 nt, Homo sapiens
  misc_RNA (1)...(19): siRNA sense strand
gacuuggauucucucauuu

SEQ ID NO: 1042397 - RNA, 19 nt, Homo sapiens
  misc_RNA (1)...(19): siRNA sense strand
gagacgagguuuauuuuag

SEQ ID NO: 1042398 - RNA, 19 nt, Homo sapiens
  misc_RNA (1)...(19): siRNA sense strand
uaaccugcaucagcuaaau

SEQ ID NO: 1042399 - RNA, 19 nt, Homo sapiens
  misc_RNA (1)...(19): siRNA sense strand
guaagggugggaaugcuuu

SEQ ID NO: 1042400 - RNA, 19 nt, Homo sapiens
  misc_RNA (1)...(19): siRNA sense strand
ugaagggaaguuaucgaua

SEQ ID NO: 1042401 - RNA, 19 nt, Homo sapiens
  misc_RNA (1)...(19): siRNA sense strand
gcuggcgagugaagacaaa

SEQ ID NO: 1042402 - RNA, 19 nt, Homo sapiens
  misc_RNA (1)...(19): siRNA sense strand
uggauucucucauuucuac

SEQ ID NO: 1042403 - RNA, 19 nt, Homo sapiens
  misc_RNA (1)...(19): siRNA sense strand
gaagcaggaggaaauucuu

SEQ ID NO: 1042404 - RNA, 19 nt, Homo sapiens
  misc_RNA (1)...(19): siRNA sense strand
ucauuucuaccuucacaua

SEQ ID NO: 1042405 - RNA, 19 nt, Homo sapiens
  misc_RNA (1)...(19): siRNA sense strand
cauauuccgggaugaaauu

SEQ ID NO: 1042406 - RNA, 19 nt, Homo sapiens
  misc_RNA (1)...(19): siRNA sense strand
agacaauguugaaagaucu

SEQ ID NO: 1042407 - RNA, 19 nt, Homo sapiens
  misc_RNA (1)...(19): siRNA sense strand
gccuaaaucgugugacuug

SEQ ID NO: 1042408 - RNA, 19 nt, Homo sapiens
  misc_RNA (1)...(19): siRNA sense strand
ggagcugucagauggagaa

SEQ ID NO: 1042409 - RNA, 19 nt, Homo sapiens
  misc_RNA (1)...(19): siRNA sense strand
cuaaaggagcugucagaug

SEQ ID NO: 1042410 - RNA, 19 nt, Homo sapiens
  misc_RNA (1)...(19): siRNA sense strand
caccagggguucuguguuu

SEQ ID NO: 1042411 - RNA, 19 nt, Homo sapiens
  misc_RNA (1)...(19): siRNA sense strand
ggaugaaauuaaccugcau

SEQ ID NO: 1042412 - RNA, 19 nt, Homo sapiens
  misc_RNA (1)...(19): siRNA sense strand
gagcuaaauauuuccgaau

SEQ ID NO: 1042413 - RNA, 19 nt, Homo sapiens
  misc_RNA (1)...(19): siRNA sense strand
accaagaacugaauucaac

SEQ ID NO: 1042414 - RNA, 19 nt, Homo sapiens
  misc_RNA (1)...(19): siRNA sense strand
ccacauauuccgggaugaa

SEQ ID NO: 1042415 - RNA, 19 nt, Homo sapiens
  misc_RNA (1)...(19): siRNA sense strand
gggccuaaaucgugugacu

SEQ ID NO: 1042416 - RNA, 19 nt, Homo sapiens
  misc_RNA (1)...(19): siRNA sense strand
uaaaugaugaagggaaguu

SEQ ID NO: 1042417 - RNA, 19 nt, Homo sapiens
  misc_RNA (1)...(19): siRNA sense strand
gugcucaggguuuaaguau

SEQ ID NO: 1042418 - RNA, 19 nt, Homo sapiens
  misc_RNA (1)...(19): siRNA sense strand
gaccauggaaucagagaag

SEQ ID NO: 1042419 - RNA, 19 nt, Homo sapiens
  misc_RNA (1)...(19): siRNA sense strand
gagugaagacaaaacuuua

SEQ ID NO: 1042420 - RNA, 19 nt, Homo sapiens
  misc_RNA (1)...(19): siRNA sense strand
uuuccuaacuugccuccaa

SEQ ID NO: 1042421 - RNA, 19 nt, Homo sapiens
  misc_RNA (1)...(19): siRNA sense strand
ucaccgagacgagguuuau

SEQ ID NO: 1042422 - RNA, 19 nt, Homo sapiens
  misc_RNA (1)...(19): siRNA sense strand
ugucagauggagaaauaaa

SEQ ID NO: 1042423 - RNA, 19 nt, Homo sapiens
  misc_RNA (1)...(19): siRNA sense strand
ucucauuucuaccuucaca

SEQ ID NO: 1042424 - RNA, 19 nt, Homo sapiens
  misc_RNA (1)...(19): siRNA sense strand
aaauaaaaguggccauuag

SEQ ID NO: 1042425 - RNA, 19 nt, Homo sapiens
  misc_RNA (1)...(19): siRNA sense strand
gacaauguugaaagaucua

SEQ ID NO: 1042426 - RNA, 19 nt, Homo sapiens
  misc_RNA (1)...(19): siRNA sense strand
uugcaacgcgccaaaucua

SEQ ID NO: 1042427 - RNA, 19 nt, Homo sapiens
  misc_RNA (1)...(19): siRNA sense strand
gguaagggugggaaugcuu

SEQ ID NO: 1042428 - RNA, 19 nt, Homo sapiens
  misc_RNA (1)...(19): siRNA sense strand
ggguuuaaguauugaacag

SEQ ID NO: 1042429 - RNA, 19 nt, Homo sapiens
  misc_RNA (1)...(19): siRNA sense strand
gagaagcaggaggaaauuc

SEQ ID NO: 1042430 - RNA, 19 nt, Homo sapiens
  misc_RNA (1)...(19): siRNA sense strand
cuaaaucgugugacuugga

SEQ ID NO: 1042431 - RNA, 19 nt, Homo sapiens
  misc_RNA (1)...(19): siRNA sense strand
aagcaggaggaaauucuuu

SEQ ID NO: 1042432 - RNA, 19 nt, Homo sapiens
  misc_RNA (1)...(19): siRNA sense strand
agacgagguuuauuuuaga

SEQ ID NO: 1042433 - RNA, 19 nt, Homo sapiens
  misc_RNA (1)...(19): siRNA sense strand
uuaguacugugagcaugaa

SEQ ID NO: 1042434 - RNA, 19 nt, Homo sapiens
  misc_RNA (1)...(19): siRNA sense strand
aaaguggccauuaguacug

SEQ ID NO: 1042435 - RNA, 19 nt, Homo sapiens
  misc_RNA (1)...(19): siRNA sense strand
gcgccaaaucuaaacugaa

SEQ ID NO: 1042436 - RNA, 19 nt, Homo sapiens
  misc_RNA (1)...(19): siRNA sense strand
gagguagcauucuuuucaa

SEQ ID NO: 1042437 - RNA, 19 nt, Homo sapiens
  misc_RNA (1)...(19): siRNA sense strand
gcgaugccaacguugaguu

SEQ ID NO: 1042438 - RNA, 19 nt, Homo sapiens
  misc_RNA (1)...(19): siRNA sense strand
gaugaagggaaguuaucga

SEQ ID NO: 1042439 - RNA, 19 nt, Homo sapiens
  misc_RNA (1)...(19): siRNA sense strand
aaacugaaucgaagcaaac

SEQ ID NO: 1042440 - RNA, 19 nt, Homo sapiens
  misc_RNA (1)...(19): siRNA sense strand
aaaugaugaagggaaguua

SEQ ID NO: 1042441 - RNA, 19 nt, Homo sapiens
  misc_RNA (1)...(19): siRNA sense strand
uaugcuuacuuucuagaca

SEQ ID NO: 1042442 - RNA, 19 nt, Homo sapiens
  misc_RNA (1)...(19): siRNA sense strand
cagcaguugucaaagucau

SEQ ID NO: 1042443 - RNA, 19 nt, Homo sapiens
  misc_RNA (1)...(19): siRNA sense strand
uaccaagaacugaauucaa

SEQ ID NO: 1042444 - RNA, 19 nt, Homo sapiens
  misc_RNA (1)...(19): siRNA sense strand
acauaugcuuacuuucuag

SEQ ID NO: 1042445 - RNA, 19 nt, Homo sapiens
  misc_RNA (1)...(19): siRNA sense strand
ccaaaucuaaacugaaucg

SEQ ID NO: 1042446 - RNA, 19 nt, Homo sapiens
  misc_RNA (1)...(19): siRNA sense strand
ucucucauuucuaccuuca

SEQ ID NO: 1042447 - RNA, 19 nt, Homo sapiens
  misc_RNA (1)...(19): siRNA sense strand
gaagaaggcuugaaacuga

SEQ ID NO: 1042448 - RNA, 19 nt, Homo sapiens
  misc_RNA (1)...(19): siRNA sense strand
gcugacauguuaagaauua

SEQ ID NO: 1042449 - RNA, 19 nt, Homo sapiens
  misc_RNA (1)...(19): siRNA sense strand
ggaagaagccauggauuua

SEQ ID NO: 1042450 - RNA, 19 nt, Homo sapiens
  misc_RNA (1)...(19): siRNA sense strand
guugcaagcugacauguua

SEQ ID NO: 1042451 - RNA, 19 nt, Homo sapiens
  misc_RNA (1)...(19): siRNA sense strand
gacaauggcuuacagaaau

SEQ ID NO: 1042452 - RNA, 19 nt, Homo sapiens
  misc_RNA (1)...(19): siRNA sense strand
gagaaacaaugucugaaug

SEQ ID NO: 1042453 - RNA, 19 nt, Homo sapiens
  misc_RNA (1)...(19): siRNA sense strand
gaaaucauccucucuaaag

SEQ ID NO: 1042454 - RNA, 19 nt, Homo sapiens
  misc_RNA (1)...(19): siRNA sense strand
gaagaagccauggauuuaa

SEQ ID NO: 1042455 - RNA, 19 nt, Homo sapiens
  misc_RNA (1)...(19): siRNA sense strand
gaaacaaugucugaaugga

SEQ ID NO: 1042456 - RNA, 19 nt, Homo sapiens
  misc_RNA (1)...(19): siRNA sense strand
ggacaaacagaacaacauu

SEQ ID NO: 1042457 - RNA, 19 nt, Homo sapiens
  misc_RNA (1)...(19): siRNA sense strand
ucaagucgcugccgaguuc

SEQ ID NO: 1042458 - RNA, 19 nt, Homo sapiens
  misc_RNA (1)...(19): siRNA sense strand
cagaaaucauccucucuaa

SEQ ID NO: 1042459 - RNA, 19 nt, Homo sapiens
  misc_RNA (1)...(19): siRNA sense strand
aauggaagcuacaaaguga

SEQ ID NO: 1042460 - RNA, 19 nt, Homo sapiens
  misc_RNA (1)...(19): siRNA sense strand
caaagugagauacagauaa

SEQ ID NO: 1042461 - RNA, 19 nt, Homo sapiens
  misc_RNA (1)...(19): siRNA sense strand
gaacaacauuuaggaaucg

SEQ ID NO: 1042462 - RNA, 19 nt, Homo sapiens
  misc_RNA (1)...(19): siRNA sense strand
gaagcuacaaagugagaua

SEQ ID NO: 1042463 - RNA, 19 nt, Homo sapiens
  misc_RNA (1)...(19): siRNA sense strand
ucucuaaagugcauugauu

SEQ ID NO: 1042464 - RNA, 19 nt, Homo sapiens
  misc_RNA (1)...(19): siRNA sense strand
gcuugaaacugaaugacaa

SEQ ID NO: 1042465 - RNA, 19 nt, Homo sapiens
  misc_RNA (1)...(19): siRNA sense strand
gaauggaagcuacaaagug

SEQ ID NO: 1042466 - RNA, 19 nt, Homo sapiens
  misc_RNA (1)...(19): siRNA sense strand
gaagccauggauuuaauaa

SEQ ID NO: 1042467 - RNA, 19 nt, Homo sapiens
  misc_RNA (1)...(19): siRNA sense strand
aaagugagauacagauaag

SEQ ID NO: 1042468 - RNA, 19 nt, Homo sapiens
  misc_RNA (1)...(19): siRNA sense strand
ggaagaaggcuugaaacug

SEQ ID NO: 1042469 - RNA, 19 nt, Homo sapiens
  misc_RNA (1)...(19): siRNA sense strand
aagcugacauguuaagaau

SEQ ID NO: 1042470 - RNA, 19 nt, Homo sapiens
  misc_RNA (1)...(19): siRNA sense strand
ugacaauggcuuacagaaa

SEQ ID NO: 1042471 - RNA, 19 nt, Homo sapiens
  misc_RNA (1)...(19): siRNA sense strand
gaaugacaauggcuuacag

SEQ ID NO: 1042472 - RNA, 19 nt, Homo sapiens
  misc_RNA (1)...(19): siRNA sense strand
gaaucgacgcucucuguug

SEQ ID NO: 1042473 - RNA, 19 nt, Homo sapiens
  misc_RNA (1)...(19): siRNA sense strand
agaacaacauuuaggaauc

SEQ ID NO: 1042474 - RNA, 19 nt, Homo sapiens
  misc_RNA (1)...(19): siRNA sense strand
aagaagccauggauuuaau

SEQ ID NO: 1042475 - RNA, 19 nt, Homo sapiens
  misc_RNA (1)...(19): siRNA sense strand
agaauuaggacaaacagaa

SEQ ID NO: 1042476 - RNA, 19 nt, Homo sapiens
  misc_RNA (1)...(19): siRNA sense strand
gacaaacagaacaacauuu

SEQ ID NO: 1042477 - RNA, 19 nt, Homo sapiens
  misc_RNA (1)...(19): siRNA sense strand
aaucgacgcucucuguugu

SEQ ID NO: 1042478 - RNA, 19 nt, Homo sapiens
  misc_RNA (1)...(19): siRNA sense strand
caagcugacauguuaagaa

SEQ ID NO: 1042479 - RNA, 19 nt, Homo sapiens
  misc_RNA (1)...(19): siRNA sense strand
aggaagaagccauggauuu

SEQ ID NO: 1042480 - RNA, 19 nt, Homo sapiens
  misc_RNA (1)...(19): siRNA sense strand
acagaaaucauccucucua

SEQ ID NO: 1042481 - RNA, 19 nt, Homo sapiens
  misc_RNA (1)...(19): siRNA sense strand
uaacuccaguauccucaau

SEQ ID NO: 1042482 - RNA, 19 nt, Homo sapiens
  misc_RNA (1)...(19): siRNA sense strand
ugauuuaacuccaguaucc

SEQ ID NO: 1042483 - RNA, 19 nt, Homo sapiens
  misc_RNA (1)...(19): siRNA sense strand
aaacaaugucugaauggaa

SEQ ID NO: 1042484 - RNA, 19 nt, Homo sapiens
  misc_RNA (1)...(19): siRNA sense strand
ucaauggacuugguuuuaa

SEQ ID NO: 1042485 - RNA, 19 nt, Homo sapiens
  misc_RNA (1)...(19): siRNA sense strand
acaaagugagauacagaua

SEQ ID NO: 1042486 - RNA, 19 nt, Homo sapiens
  misc_RNA (1)...(19): siRNA sense strand
cagaacaacauuuaggaau

SEQ ID NO: 1042487 - RNA, 19 nt, Homo sapiens
  misc_RNA (1)...(19): siRNA sense strand
ccuccucccuuucaugguu

SEQ ID NO: 1042488 - RNA, 19 nt, Homo sapiens
  misc_RNA (1)...(19): siRNA sense strand
guugccaccuccucccuuu

SEQ ID NO: 1042489 - RNA, 19 nt, Homo sapiens
  misc_RNA (1)...(19): siRNA sense strand
ggaaucgacgcucucuguu

SEQ ID NO: 1042490 - RNA, 19 nt, Homo sapiens
  misc_RNA (1)...(19): siRNA sense strand
aaacagaacaacauuuagg

SEQ ID NO: 1042491 - RNA, 19 nt, Homo sapiens
  misc_RNA (1)...(19): siRNA sense strand
cuacaaagugagauacaga

SEQ ID NO: 1042492 - RNA, 19 nt, Homo sapiens
  misc_RNA (1)...(19): siRNA sense strand
aagaaggcuugaaacugaa

SEQ ID NO: 1042493 - RNA, 19 nt, Homo sapiens
  misc_RNA (1)...(19): siRNA sense strand
uauccucaauggcuucuuc

SEQ ID NO: 1042494 - RNA, 19 nt, Homo sapiens
  misc_RNA (1)...(19): siRNA sense strand
agaaaucauccucucuaaa

SEQ ID NO: 1042495 - RNA, 19 nt, Homo sapiens
  misc_RNA (1)...(19): siRNA sense strand
ucaaaucaaacaggaagaa

SEQ ID NO: 1042496 - RNA, 19 nt, Homo sapiens
  misc_RNA (1)...(19): siRNA sense strand
gggaagaaggcuugaaacu

SEQ ID NO: 1042497 - RNA, 19 nt, Homo sapiens
  misc_RNA (1)...(19): siRNA sense strand
gaauuaggacaaacagaac

SEQ ID NO: 1042498 - RNA, 19 nt, Homo sapiens
  misc_RNA (1)...(19): siRNA sense strand
agagaaacaaugucugaau

SEQ ID NO: 1042499 - RNA, 19 nt, Homo sapiens
  misc_RNA (1)...(19): siRNA sense strand
auagagaaacaaugucuga

SEQ ID NO: 1042500 - RNA, 19 nt, Homo sapiens
  misc_RNA (1)...(19): siRNA sense strand
caaacagaacaacauuuag

SEQ ID NO: 1042501 - RNA, 19 nt, Homo sapiens
  misc_RNA (1)...(19): siRNA sense strand
agaagccauggauuuaaua

SEQ ID NO: 1042502 - RNA, 19 nt, Homo sapiens
  misc_RNA (1)...(19): siRNA sense strand
acaauggcuuacagaaauc

SEQ ID NO: 1042503 - RNA, 19 nt, Homo sapiens
  misc_RNA (1)...(19): siRNA sense strand
ucagccgccuucaucaaau

SEQ ID NO: 1042504 - RNA, 19 nt, Homo sapiens
  misc_RNA (1)...(19): siRNA sense strand
aaaucauccucucuaaagu

SEQ ID NO: 1042505 - RNA, 19 nt, Homo sapiens
  misc_RNA (1)...(19): siRNA sense strand
ccgccuucaucaaaucaaa

SEQ ID NO: 1042506 - RNA, 19 nt, Homo sapiens
  misc_RNA (1)...(19): siRNA sense strand
caucagccgccuucaucaa

SEQ ID NO: 1042507 - RNA, 19 nt, Homo sapiens
  misc_RNA (1)...(19): siRNA sense strand
gcaagcugacauguuaaga

SEQ ID NO: 1042508 - RNA, 19 nt, Homo sapiens
  misc_RNA (1)...(19): siRNA sense strand
gcuacaaagugagauacag

SEQ ID NO: 1042509 - RNA, 19 nt, Homo sapiens
  misc_RNA (1)...(19): siRNA sense strand
acagaacaacauuuaggaa

SEQ ID NO: 1042510 - RNA, 19 nt, Homo sapiens
  misc_RNA (1)...(19): siRNA sense strand
ugaauggaagcuacaaagu

SEQ ID NO: 1042511 - RNA, 19 nt, Homo sapiens
  misc_RNA (1)...(19): siRNA sense strand
cagccgccuucaucaaauc

SEQ ID NO: 1042512 - RNA, 19 nt, Homo sapiens
  misc_RNA (1)...(19): siRNA sense strand
cauccucucuaaagugcau

SEQ ID NO: 1042513 - RNA, 19 nt, Homo sapiens
  misc_RNA (1)...(19): siRNA sense strand
uaccgcagacggcaacauu

SEQ ID NO: 1042514 - RNA, 19 nt, Homo sapiens
  misc_RNA (1)...(19): siRNA sense strand
ucgacgcucucuguuguug

SEQ ID NO: 1042515 - RNA, 19 nt, Homo sapiens
  misc_RNA (1)...(19): siRNA sense strand
gacauguuaagaauuagga

SEQ ID NO: 1042516 - RNA, 19 nt, Homo sapiens
  misc_RNA (1)...(19): siRNA sense strand
caauggacuugguuuuaau

SEQ ID NO: 1042517 - RNA, 19 nt, Homo sapiens
  misc_RNA (1)...(19): siRNA sense strand
caacagugccccuuugauc

SEQ ID NO: 1042518 - RNA, 19 nt, Homo sapiens
  misc_RNA (1)...(19): siRNA sense strand
gagauacagauaagucacu

SEQ ID NO: 1042519 - RNA, 19 nt, Homo sapiens
  misc_RNA (1)...(19): siRNA sense strand
gaucaauggacuugguuuu

SEQ ID NO: 1042520 - RNA, 19 nt, Homo sapiens
  misc_RNA (1)...(19): siRNA sense strand
gagaaaaugaaacuagguu

SEQ ID NO: 1042521 - RNA, 19 nt, Homo sapiens
  misc_RNA (1)...(19): siRNA sense strand
ggacaugcaguucaucaaa

SEQ ID NO: 1042522 - RNA, 19 nt, Homo sapiens
  misc_RNA (1)...(19): siRNA sense strand
ccacugacgucaagaaacu

SEQ ID NO: 1042523 - RNA, 19 nt, Homo sapiens
  misc_RNA (1)...(19): siRNA sense strand
gcauggagcgcaagagaga

SEQ ID NO: 1042524 - RNA, 19 nt, Homo sapiens
  misc_RNA (1)...(19): siRNA sense strand
acaccaagcuggacaugca

SEQ ID NO: 1042525 - RNA, 19 nt, Homo sapiens
  misc_RNA (1)...(19): siRNA sense strand
gacaugcaguucaucaaag

SEQ ID NO: 1042526 - RNA, 19 nt, Homo sapiens
  misc_RNA (1)...(19): siRNA sense strand
gagaugaaggagaguguga

SEQ ID NO: 1042527 - RNA, 19 nt, Homo sapiens
  misc_RNA (1)...(19): siRNA sense strand
gguccaccauggccaucua

SEQ ID NO: 1042528 - RNA, 19 nt, Homo sapiens
  misc_RNA (1)...(19): siRNA sense strand
cggcugaauuggaagagaa

SEQ ID NO: 1042529 - RNA, 19 nt, Homo sapiens
  misc_RNA (1)...(19): siRNA sense strand
cggccaaccuggagaagug

SEQ ID NO: 1042530 - RNA, 19 nt, Homo sapiens
  misc_RNA (1)...(19): siRNA sense strand
acaugcaguucaucaaaga

SEQ ID NO: 1042531 - RNA, 19 nt, Homo sapiens
  misc_RNA (1)...(19): siRNA sense strand
ucagugccauccagaagau

SEQ ID NO: 1042532 - RNA, 19 nt, Homo sapiens
  misc_RNA (1)...(19): siRNA sense strand
ccaacaccuuccugcaguu

SEQ ID NO: 1042533 - RNA, 19 nt, Homo sapiens
  misc_RNA (1)...(19): siRNA sense strand
gaacaccaagcuggacaug

SEQ ID NO: 1042534 - RNA, 19 nt, Homo sapiens
  misc_RNA (1)...(19): siRNA sense strand
gucccaccaucaccaauga

SEQ ID NO: 1042535 - RNA, 19 nt, Homo sapiens
  misc_RNA (1)...(19): siRNA sense strand
gagcaucauggagcaguuu

SEQ ID NO: 1042536 - RNA, 19 nt, Homo sapiens
  misc_RNA (1)...(19): siRNA sense strand
gcaucauggagcaguuuaa

SEQ ID NO: 1042537 - RNA, 19 nt, Homo sapiens
  misc_RNA (1)...(19): siRNA sense strand
ggacgugguggagguguug

SEQ ID NO: 1042538 - RNA, 19 nt, Homo sapiens
  misc_RNA (1)...(19): siRNA sense strand
gcacuaugagcucgaguac

SEQ ID NO: 1042539 - RNA, 19 nt, Homo sapiens
  misc_RNA (1)...(19): siRNA sense strand
gagauggaccaguucuaca

SEQ ID NO: 1042540 - RNA, 19 nt, Homo sapiens
  misc_RNA (1)...(19): siRNA sense strand
ugcagcacauggagaagaa

SEQ ID NO: 1042541 - RNA, 19 nt, Homo sapiens
  misc_RNA (1)...(19): siRNA sense strand
gcaagagagacaagaacgu

SEQ ID NO: 1042542 - RNA, 19 nt, Homo sapiens
  misc_RNA (1)...(19): siRNA sense strand
gaugcaggccuucgugucu

SEQ ID NO: 1042543 - RNA, 19 nt, Homo sapiens
  misc_RNA (1)...(19): siRNA sense strand
acaagaacgugcgggagau

SEQ ID NO: 1042544 - RNA, 19 nt, Homo sapiens
  misc_RNA (1)...(19): siRNA sense strand
gagcggccaaccuggagaa

SEQ ID NO: 1042545 - RNA, 19 nt, Homo sapiens
  misc_RNA (1)...(19): siRNA sense strand
gcagccacagccucgauga

SEQ ID NO: 1042546 - RNA, 19 nt, Homo sapiens
  misc_RNA (1)...(19): siRNA sense strand
ccauggccaucuacaagag

SEQ ID NO: 1042547 - RNA, 19 nt, Homo sapiens
  misc_RNA (1)...(19): siRNA sense strand
acaccuuccugcaguucuu

SEQ ID NO: 1042548 - RNA, 19 nt, Homo sapiens
  misc_RNA (1)...(19): siRNA sense strand
gggacgugguggagguguu

SEQ ID NO: 1042549 - RNA, 19 nt, Homo sapiens
  misc_RNA (1)...(19): siRNA sense strand
uggagaaccugguguaccu

SEQ ID NO: 1042550 - RNA, 19 nt, Homo sapiens
  misc_RNA (1)...(19): siRNA sense strand
uggagaagugcaugucuga

SEQ ID NO: 1042551 - RNA, 19 nt, Homo sapiens
  misc_RNA (1)...(19): siRNA sense strand
caccauggccaucuacaag

SEQ ID NO: 1042552 - RNA, 19 nt, Homo sapiens
  misc_RNA (1)...(19): siRNA sense strand
gaacgugcgggagaugaag

SEQ ID NO: 1042553 - RNA, 19 nt, Homo sapiens
  misc_RNA (1)...(19): siRNA sense strand
ccaccauggccaucuacaa

SEQ ID NO: 1042554 - RNA, 19 nt, Homo sapiens
  misc_RNA (1)...(19): siRNA sense strand
acacccagcggcacuugaa

SEQ ID NO: 1042555 - RNA, 19 nt, Homo sapiens
  misc_RNA (1)...(19): siRNA sense strand
gaaaucaggugaaguagau

SEQ ID NO: 1042556 - RNA, 19 nt, Homo sapiens
  misc_RNA (1)...(19): siRNA sense strand
gagaggaacuauuuaaaug

SEQ ID NO: 1042557 - RNA, 19 nt, Homo sapiens
  misc_RNA (1)...(19): siRNA sense strand
gaaacucucuuaaauuugg

SEQ ID NO: 1042558 - RNA, 19 nt, Homo sapiens
  misc_RNA (1)...(19): siRNA sense strand
gaagagcaauuagaaguug

SEQ ID NO: 1042559 - RNA, 19 nt, Homo sapiens
  misc_RNA (1)...(19): siRNA sense strand
ugaagaccaugcauaauuu

SEQ ID NO: 1042560 - RNA, 19 nt, Homo sapiens
  misc_RNA (1)...(19): siRNA sense strand
guacaugggccaaagcuua

SEQ ID NO: 1042561 - RNA, 19 nt, Homo sapiens
  misc_RNA (1)...(19): siRNA sense strand
gaaaauaaauggucgaaug

SEQ ID NO: 1042562 - RNA, 19 nt, Homo sapiens
  misc_RNA (1)...(19): siRNA sense strand
gaaagauucugcaauagag

SEQ ID NO: 1042563 - RNA, 19 nt, Homo sapiens
  misc_RNA (1)...(19): siRNA sense strand
gaaaaucacugacagauca

SEQ ID NO: 1042564 - RNA, 19 nt, Homo sapiens
  misc_RNA (1)...(19): siRNA sense strand
gagacaagguauugaaaug

SEQ ID NO: 1042565 - RNA, 19 nt, Homo sapiens
  misc_RNA (1)...(19): siRNA sense strand
gaagaaaguuuuaccauuc

SEQ ID NO: 1042566 - RNA, 19 nt, Homo sapiens
  misc_RNA (1)...(19): siRNA sense strand
ggaguaaauugaaagaauc

SEQ ID NO: 1042567 - RNA, 19 nt, Homo sapiens
  misc_RNA (1)...(19): siRNA sense strand
caauagagagagagaauuu

SEQ ID NO: 1042568 - RNA, 19 nt, Homo sapiens
  misc_RNA (1)...(19): siRNA sense strand
ugucaaagguuucaugaug

SEQ ID NO: 1042569 - RNA, 19 nt, Homo sapiens
  misc_RNA (1)...(19): siRNA sense strand
gaacagagaaaguuagaag

SEQ ID NO: 1042570 - RNA, 19 nt, Homo sapiens
  misc_RNA (1)...(19): siRNA sense strand
gcaauuagaaguuguccaa

SEQ ID NO: 1042571 - RNA, 19 nt, Homo sapiens
  misc_RNA (1)...(19): siRNA sense strand
ucaagugugucaaagguuu

SEQ ID NO: 1042572 - RNA, 19 nt, Homo sapiens
  misc_RNA (1)...(19): siRNA sense strand
gcgcaggaguaaauugaaa

SEQ ID NO: 1042573 - RNA, 19 nt, Homo sapiens
  misc_RNA (1)...(19): siRNA sense strand
ccacucaaauuuccuguuc

SEQ ID NO: 1042574 - RNA, 19 nt, Homo sapiens
  misc_RNA (1)...(19): siRNA sense strand
ggacuucuguaagcauaaa

SEQ ID NO: 1042575 - RNA, 19 nt, Homo sapiens
  misc_RNA (1)...(19): siRNA sense strand
gacaagguauugaaaugga

SEQ ID NO: 1042576 - RNA, 19 nt, Homo sapiens
  misc_RNA (1)...(19): siRNA sense strand
ugacucaguuuauagaaga

SEQ ID NO: 1042577 - RNA, 19 nt, Homo sapiens
  misc_RNA (1)...(19): siRNA sense strand
caaauuuccuguucaagag

SEQ ID NO: 1042578 - RNA, 19 nt, Homo sapiens
  misc_RNA (1)...(19): siRNA sense strand
ccucagcgauuaugauaga

SEQ ID NO: 1042579 - RNA, 19 nt, Homo sapiens
  misc_RNA (1)...(19): siRNA sense strand
caugacaucacaacaauaa

SEQ ID NO: 1042580 - RNA, 19 nt, Homo sapiens
  misc_RNA (1)...(19): siRNA sense strand
uccaacaggugguacuuua

SEQ ID NO: 1042581 - RNA, 19 nt, Homo sapiens
  misc_RNA (1)...(19): siRNA sense strand
cagagaaaguuagaagaaa

SEQ ID NO: 1042582 - RNA, 19 nt, Homo sapiens
  misc_RNA (1)...(19): siRNA sense strand
aaagagauguggagcugaa

SEQ ID NO: 1042583 - RNA, 19 nt, Homo sapiens
  misc_RNA (1)...(19): siRNA sense strand
gcaauuggaaggauuuaug

SEQ ID NO: 1042584 - RNA, 19 nt, Homo sapiens
  misc_RNA (1)...(19): siRNA sense strand
gaccaugcauaauuugaga

SEQ ID NO: 1042585 - RNA, 19 nt, Homo sapiens
  misc_RNA (1)...(19): siRNA sense strand
gaacccagcgcaggaguaa

SEQ ID NO: 1042586 - RNA, 19 nt, Homo sapiens
  misc_RNA (1)...(19): siRNA sense strand
ccaagucaguucagagaau

SEQ ID NO: 1042587 - RNA, 19 nt, Homo sapiens
  misc_RNA (1)...(19): siRNA sense strand
gagaaucuguagaagcaau

SEQ ID NO: 1042588 - RNA, 19 nt, Homo sapiens
  misc_RNA (1)...(19): siRNA sense strand
ggaagucagugcuuagaac

SEQ ID NO: 1042589 - RNA, 19 nt, Homo sapiens
  misc_RNA (1)...(19): siRNA sense strand
gaagcaauuggaaggauuu

SEQ ID NO: 1042590 - RNA, 19 nt, Homo sapiens
  misc_RNA (1)...(19): siRNA sense strand
ugaaguagauuuacaucag

SEQ ID NO: 1042591 - RNA, 19 nt, Homo sapiens
  misc_RNA (1)...(19): siRNA sense strand
gcugagaggaacuauuuaa

SEQ ID NO: 1042592 - RNA, 19 nt, Homo sapiens
  misc_RNA (1)...(19): siRNA sense strand
gugaggaaauuaaaguuca

SEQ ID NO: 1042593 - RNA, 19 nt, Homo sapiens
  misc_RNA (1)...(19): siRNA sense strand
uuaccgugcuuuauagaaa

SEQ ID NO: 1042594 - RNA, 19 nt, Homo sapiens
  misc_RNA (1)...(19): siRNA sense strand
gaugauaagacuaagaaug

SEQ ID NO: 1042595 - RNA, 19 nt, Homo sapiens
  misc_RNA (1)...(19): siRNA sense strand
acaaucaacugccauccaa

SEQ ID NO: 1042596 - RNA, 19 nt, Homo sapiens
  misc_RNA (1)...(19): siRNA sense strand
aacaacagcucccuuagug

SEQ ID NO: 1042597 - RNA, 19 nt, Homo sapiens
  misc_RNA (1)...(19): siRNA sense strand
acugacagaucaagaugua

SEQ ID NO: 1042598 - RNA, 19 nt, Homo sapiens
  misc_RNA (1)...(19): siRNA sense strand
uugcagauguguaccauga

SEQ ID NO: 1042599 - RNA, 19 nt, Homo sapiens
  misc_RNA (1)...(19): siRNA sense strand
caugauaugucagaggaaa

SEQ ID NO: 1042600 - RNA, 19 nt, Homo sapiens
  misc_RNA (1)...(19): siRNA sense strand
ugacagaucaagauguaaa

SEQ ID NO: 1042601 - RNA, 19 nt, Homo sapiens
  misc_RNA (1)...(19): siRNA sense strand
ucaaagguuucaugaugga

SEQ ID NO: 1042602 - RNA, 19 nt, Homo sapiens
  misc_RNA (1)...(19): siRNA sense strand
ugugaaaucaggugaagua

SEQ ID NO: 1042603 - RNA, 19 nt, Homo sapiens
  misc_RNA (1)...(19): siRNA sense strand
gacuauacccuggugcuua

SEQ ID NO: 1042604 - RNA, 19 nt, Homo sapiens
  misc_RNA (1)...(19): siRNA sense strand
caacaggugguacuuuaug

SEQ ID NO: 1042605 - RNA, 19 nt, Homo sapiens
  misc_RNA (1)...(19): siRNA sense strand
ucaaauuuccuguucaaga

SEQ ID NO: 1042606 - RNA, 19 nt, Homo sapiens
  misc_RNA (1)...(19): siRNA sense strand
gagagacaagguauugaaa

SEQ ID NO: 1042607 - RNA, 19 nt, Homo sapiens
  misc_RNA (1)...(19): siRNA sense strand
acaagaguaucaagaaugg

SEQ ID NO: 1042608 - RNA, 19 nt, Homo sapiens
  misc_RNA (1)...(19): siRNA sense strand
gacagugcaauuucuagua

SEQ ID NO: 1042609 - RNA, 19 nt, Homo sapiens
  misc_RNA (1)...(19): siRNA sense strand
acuauacccuggugcuuaa

SEQ ID NO: 1042610 - RNA, 19 nt, Homo sapiens
  misc_RNA (1)...(19): siRNA sense strand
caauaagcauuccucucuu

SEQ ID NO: 1042611 - RNA, 19 nt, Homo sapiens
  misc_RNA (1)...(19): siRNA sense strand
ggaaaugaugauaagacua

SEQ ID NO: 1042612 - RNA, 19 nt, Homo sapiens
  misc_RNA (1)...(19): siRNA sense strand
cgagagagacaagguauug

SEQ ID NO: 1042613 - RNA, 19 nt, Homo sapiens
  misc_RNA (1)...(19): siRNA sense strand
aauaagcauuccucucuug

SEQ ID NO: 1042614 - RNA, 19 nt, Homo sapiens
  misc_RNA (1)...(19): siRNA sense strand
gaagaccaugcauaauuug

SEQ ID NO: 1042615 - RNA, 19 nt, Homo sapiens
  misc_RNA (1)...(19): siRNA sense strand
uguguaccaugacuuaauu

SEQ ID NO: 1042616 - RNA, 19 nt, Homo sapiens
  misc_RNA (1)...(19): siRNA sense strand
ugauggaaauggcuucaug

SEQ ID NO: 1042617 - RNA, 19 nt, Homo sapiens
  misc_RNA (1)...(19): siRNA sense strand
ucacuuaggagcccaguug

SEQ ID NO: 1042618 - RNA, 19 nt, Homo sapiens
  misc_RNA (1)...(19): siRNA sense strand
ugaggaacagagaaaguua

SEQ ID NO: 1042619 - RNA, 19 nt, Homo sapiens
  misc_RNA (1)...(19): siRNA sense strand
caguuuaccgugcuuuaua

SEQ ID NO: 1042620 - RNA, 19 nt, Homo sapiens
  misc_RNA (1)...(19): siRNA sense strand
ggugguacuuuaugcuaga

SEQ ID NO: 1042621 - RNA, 19 nt, Homo sapiens
  misc_RNA (1)...(19): siRNA sense strand
guucaagugugucaaaggu

SEQ ID NO: 1042622 - RNA, 19 nt, Homo sapiens
  misc_RNA (1)...(19): siRNA sense strand
gcagauguguaccaugacu

SEQ ID NO: 1042623 - RNA, 19 nt, Homo sapiens
  misc_RNA (1)...(19): siRNA sense strand
ugaugcugcugcacaguuu

SEQ ID NO: 1042624 - RNA, 19 nt, Homo sapiens
  misc_RNA (1)...(19): siRNA sense strand
uauauuacacggcauucua

SEQ ID NO: 1042625 - RNA, 19 nt, Homo sapiens
  misc_RNA (1)...(19): siRNA sense strand
aguaggaagucagugcuua

SEQ ID NO: 1042626 - RNA, 19 nt, Homo sapiens
  misc_RNA (1)...(19): siRNA sense strand
uugaagaccaugcauaauu

SEQ ID NO: 1042627 - RNA, 19 nt, Homo sapiens
  misc_RNA (1)...(19): siRNA sense strand
agagaaaguuagaagaaag

SEQ ID NO: 1042628 - RNA, 19 nt, Homo sapiens
  misc_RNA (1)...(19): siRNA sense strand
acagagaaaguuagaagaa

SEQ ID NO: 1042629 - RNA, 19 nt, Homo sapiens
  misc_RNA (1)...(19): siRNA sense strand
gagagagagaauuuguaua

SEQ ID NO: 1042630 - RNA, 19 nt, Homo sapiens
  misc_RNA (1)...(19): siRNA sense strand
caauuggaaggauuuauga

SEQ ID NO: 1042631 - RNA, 19 nt, Homo sapiens
  misc_RNA (1)...(19): siRNA sense strand
caacaacagcucccuuagu

SEQ ID NO: 1042632 - RNA, 19 nt, Homo sapiens
  misc_RNA (1)...(19): siRNA sense strand
gcaauagagagagagaauu

SEQ ID NO: 1042633 - RNA, 19 nt, Homo sapiens
  misc_RNA (1)...(19): siRNA sense strand
ucaucgaaguggugugaaa

SEQ ID NO: 1042634 - RNA, 19 nt, Homo sapiens
  misc_RNA (1)...(19): siRNA sense strand
guaucaagaauggguaaua

SEQ ID NO: 1042635 - RNA, 19 nt, Homo sapiens
  misc_RNA (1)...(19): siRNA sense strand
ccucugaaacucucuuaaa

SEQ ID NO: 1042636 - RNA, 19 nt, Homo sapiens
  misc_RNA (1)...(19): siRNA sense strand
cagcugggaugaagauuuu

SEQ ID NO: 1042637 - RNA, 19 nt, Homo sapiens
  misc_RNA (1)...(19): siRNA sense strand
cuaagaaugcugagaggaa

SEQ ID NO: 1042638 - RNA, 19 nt, Homo sapiens
  misc_RNA (1)...(19): siRNA sense strand
agaaugcacugacuuccau

SEQ ID NO: 1042639 - RNA, 19 nt, Homo sapiens
  misc_RNA (1)...(19): siRNA sense strand
agaagcaauuggaaggauu

SEQ ID NO: 1042640 - RNA, 19 nt, Homo sapiens
  misc_RNA (1)...(19): siRNA sense strand
ccuggggaauuuuauauua

SEQ ID NO: 1042641 - RNA, 19 nt, Homo sapiens
  misc_RNA (1)...(19): siRNA sense strand
acaauaagcauuccucucu

SEQ ID NO: 1042642 - RNA, 19 nt, Homo sapiens
  misc_RNA (1)...(19): siRNA sense strand
ggaugaagauuuugcagau

SEQ ID NO: 1042643 - RNA, 19 nt, Homo sapiens
  misc_RNA (1)...(19): siRNA sense strand
gauggaggaauuucuagga

SEQ ID NO: 1042644 - RNA, 19 nt, Homo sapiens
  misc_RNA (1)...(19): siRNA sense strand
cagaaauccauguugcuuu

SEQ ID NO: 1042645 - RNA, 19 nt, Homo sapiens
  misc_RNA (1)...(19): siRNA sense strand
gcaggaguaaauugaaaga

SEQ ID NO: 1042646 - RNA, 19 nt, Homo sapiens
  misc_RNA (1)...(19): siRNA sense strand
caagucaguucagagaauc

SEQ ID NO: 1042647 - RNA, 19 nt, Homo sapiens
  misc_RNA (1)...(19): siRNA sense strand
ccuggcagcugugaaauca

SEQ ID NO: 1042648 - RNA, 19 nt, Homo sapiens
  misc_RNA (1)...(19): siRNA sense strand
agaacugauuggugaaaga

SEQ ID NO: 1042649 - RNA, 19 nt, Homo sapiens
  misc_RNA (1)...(19): siRNA sense strand
agagagagagaauuuguau

SEQ ID NO: 1042650 - RNA, 19 nt, Homo sapiens
  misc_RNA (1)...(19): siRNA sense strand
cccaugacaucacaacaau

SEQ ID NO: 1042651 - RNA, 19 nt, Homo sapiens
  misc_RNA (1)...(19): siRNA sense strand
ccaagaaugcacugacuuc

SEQ ID NO: 1042652 - RNA, 19 nt, Homo sapiens
  misc_RNA (1)...(19): siRNA sense strand
gaaacuucaucggcuccaa

SEQ ID NO: 1042653 - RNA, 19 nt, Homo sapiens
  misc_RNA (1)...(19): siRNA sense strand
gagaaaguuagaagaaagu

SEQ ID NO: 1042654 - RNA, 19 nt, Homo sapiens
  misc_RNA (1)...(19): siRNA sense strand
uggaaggauuuaugaggaa

SEQ ID NO: 1042655 - RNA, 19 nt, Homo sapiens
  misc_RNA (1)...(19): siRNA sense strand
gaacaagacuuauaugcuu

SEQ ID NO: 1042656 - RNA, 19 nt, Homo sapiens
  misc_RNA (1)...(19): siRNA sense strand
ccuaauagcuugaacacaa

SEQ ID NO: 1042657 - RNA, 19 nt, Homo sapiens
  misc_RNA (1)...(19): siRNA sense strand
caucagagaacaagacuua

SEQ ID NO: 1042658 - RNA, 19 nt, Homo sapiens
  misc_RNA (1)...(19): siRNA sense strand
ggagauaccaggcagaauu

SEQ ID NO: 1042659 - RNA, 19 nt, Homo sapiens
  misc_RNA (1)...(19): siRNA sense strand
caacugaugggcuucuuua

SEQ ID NO: 1042660 - RNA, 19 nt, Homo sapiens
  misc_RNA (1)...(19): siRNA sense strand
gauuaacaauggcaaaguu

SEQ ID NO: 1042661 - RNA, 19 nt, Homo sapiens
  misc_RNA (1)...(19): siRNA sense strand
ggauuucuaugcauucaga

SEQ ID NO: 1042662 - RNA, 19 nt, Homo sapiens
  misc_RNA (1)...(19): siRNA sense strand
gcagauaucaagaaaguca

SEQ ID NO: 1042663 - RNA, 19 nt, Homo sapiens
  misc_RNA (1)...(19): siRNA sense strand
ucagagaacaagacuuaua

SEQ ID NO: 1042664 - RNA, 19 nt, Homo sapiens
  misc_RNA (1)...(19): siRNA sense strand
gagauaccaggcagaauuu

SEQ ID NO: 1042665 - RNA, 19 nt, Homo sapiens
  misc_RNA (1)...(19): siRNA sense strand
ggauugaccaggauauuga

SEQ ID NO: 1042666 - RNA, 19 nt, Homo sapiens
  misc_RNA (1)...(19): siRNA sense strand
gcaaggagcgccacaagag

SEQ ID NO: 1042667 - RNA, 19 nt, Homo sapiens
  misc_RNA (1)...(19): siRNA sense strand
gauggagacccacaaagaa

SEQ ID NO: 1042668 - RNA, 19 nt, Homo sapiens
  misc_RNA (1)...(19): siRNA sense strand
gguauugucuugccugucu

SEQ ID NO: 1042669 - RNA, 19 nt, Homo sapiens
  misc_RNA (1)...(19): siRNA sense strand
gauaccaggcagaauuuaa

SEQ ID NO: 1042670 - RNA, 19 nt, Homo sapiens
  misc_RNA (1)...(19): siRNA sense strand
gcugauugguauugucuug

SEQ ID NO: 1042671 - RNA, 19 nt, Homo sapiens
  misc_RNA (1)...(19): siRNA sense strand
ucagagugauuaacaaugg

SEQ ID NO: 1042672 - RNA, 19 nt, Homo sapiens
  misc_RNA (1)...(19): siRNA sense strand
gaacugaaaccccuucuga

SEQ ID NO: 1042673 - RNA, 19 nt, Homo sapiens
  misc_RNA (1)...(19): siRNA sense strand
caguauggcugcaaacaca

SEQ ID NO: 1042674 - RNA, 19 nt, Homo sapiens
  misc_RNA (1)...(19): siRNA sense strand
ucaacaacuucaucagaga

SEQ ID NO: 1042675 - RNA, 19 nt, Homo sapiens
  misc_RNA (1)...(19): siRNA sense strand
gcuuugaaaucuguuaaga

SEQ ID NO: 1042676 - RNA, 19 nt, Homo sapiens
  misc_RNA (1)...(19): siRNA sense strand
cagagaacaagacuuauau

SEQ ID NO: 1042677 - RNA, 19 nt, Homo sapiens
  misc_RNA (1)...(19): siRNA sense strand
uugcagauaucaagaaagu

SEQ ID NO: 1042678 - RNA, 19 nt, Homo sapiens
  misc_RNA (1)...(19): siRNA sense strand
gcagugcagucagaaaucu

SEQ ID NO: 1042679 - RNA, 19 nt, Homo sapiens
  misc_RNA (1)...(19): siRNA sense strand
caacaacuucaucagagaa

SEQ ID NO: 1042680 - RNA, 19 nt, Homo sapiens
  misc_RNA (1)...(19): siRNA sense strand
caaaguugcagauaucaag

SEQ ID NO: 1042681 - RNA, 19 nt, Homo sapiens
  misc_RNA (1)...(19): siRNA sense strand
gcauucagagugauuaaca

SEQ ID NO: 1042682 - RNA, 19 nt, Homo sapiens
  misc_RNA (1)...(19): siRNA sense strand
gacagccaguucagucaga

SEQ ID NO: 1042683 - RNA, 19 nt, Homo sapiens
  misc_RNA (1)...(19): siRNA sense strand
ugauggagacccacaaaga

SEQ ID NO: 1042684 - RNA, 19 nt, Homo sapiens
  misc_RNA (1)...(19): siRNA sense strand
gagaacaagacuuauaugc

SEQ ID NO: 1042685 - RNA, 19 nt, Homo sapiens
  misc_RNA (1)...(19): siRNA sense strand
cugaugggcuucuuuaagg

SEQ ID NO: 1042686 - RNA, 19 nt, Homo sapiens
  misc_RNA (1)...(19): siRNA sense strand
gaagacgccuauggauggu

SEQ ID NO: 1042687 - RNA, 19 nt, Homo sapiens
  misc_RNA (1)...(19): siRNA sense strand
caagacuuauaugcuuuga

SEQ ID NO: 1042688 - RNA, 19 nt, Homo sapiens
  misc_RNA (1)...(19): siRNA sense strand
gggauugaccaggauauug

SEQ ID NO: 1042689 - RNA, 19 nt, Homo sapiens
  misc_RNA (1)...(19): siRNA sense strand
caacuucaucagagaacaa

SEQ ID NO: 1042690 - RNA, 19 nt, Homo sapiens
  misc_RNA (1)...(19): siRNA sense strand
gccuauggauggugcagau

SEQ ID NO: 1042691 - RNA, 19 nt, Homo sapiens
  misc_RNA (1)...(19): siRNA sense strand
ucaugcugcugauugguau

SEQ ID NO: 1042692 - RNA, 19 nt, Homo sapiens
  misc_RNA (1)...(19): siRNA sense strand
ggaaugcuguuuucaucau

SEQ ID NO: 1042693 - RNA, 19 nt, Homo sapiens
  misc_RNA (1)...(19): siRNA sense strand
cauucagagugauuaacaa

SEQ ID NO: 1042694 - RNA, 19 nt, Homo sapiens
  misc_RNA (1)...(19): siRNA sense strand
uauggauggugcagauugu

SEQ ID NO: 1042695 - RNA, 19 nt, Homo sapiens
  misc_RNA (1)...(19): siRNA sense strand
guuaagauuccagugagaa

SEQ ID NO: 1042696 - RNA, 19 nt, Homo sapiens
  misc_RNA (1)...(19): siRNA sense strand
ggcaauggguacaguucca

SEQ ID NO: 1042697 - RNA, 19 nt, Homo sapiens
  misc_RNA (1)...(19): siRNA sense strand
cuaauagcuugaacacaac

SEQ ID NO: 1042698 - RNA, 19 nt, Homo sapiens
  misc_RNA (1)...(19): siRNA sense strand
gaaaccaugggauccugau

SEQ ID NO: 1042699 - RNA, 19 nt, Homo sapiens
  misc_RNA (1)...(19): siRNA sense strand
ggcaaggagcgccacaaga

SEQ ID NO: 1042700 - RNA, 19 nt, Homo sapiens
  misc_RNA (1)...(19): siRNA sense strand
uuaagauuccagugagaaa

SEQ ID NO: 1042701 - RNA, 19 nt, Homo sapiens
  misc_RNA (1)...(19): siRNA sense strand
gacccacaaagaacugaaa

SEQ ID NO: 1042702 - RNA, 19 nt, Homo sapiens
  misc_RNA (1)...(19): siRNA sense strand
ccaacugaugggcuucuuu

SEQ ID NO: 1042703 - RNA, 19 nt, Homo sapiens
  misc_RNA (1)...(19): siRNA sense strand
aguugcagauaucaagaaa

SEQ ID NO: 1042704 - RNA, 19 nt, Homo sapiens
  misc_RNA (1)...(19): siRNA sense strand
guauggcugcaaacacauu

SEQ ID NO: 1042705 - RNA, 19 nt, Homo sapiens
  misc_RNA (1)...(19): siRNA sense strand
gcagauuguggcauucagu

SEQ ID NO: 1042706 - RNA, 19 nt, Homo sapiens
  misc_RNA (1)...(19): siRNA sense strand
uggugcagauuguggcauu

SEQ ID NO: 1042707 - RNA, 19 nt, Homo sapiens
  misc_RNA (1)...(19): siRNA sense strand
caagcuggcgcugcaguau

SEQ ID NO: 1042708 - RNA, 19 nt, Homo sapiens
  misc_RNA (1)...(19): siRNA sense strand
ggagacccacaaagaacug

SEQ ID NO: 1042709 - RNA, 19 nt, Homo sapiens
  misc_RNA (1)...(19): siRNA sense strand
agucaacaacuucaucaga

SEQ ID NO: 1042710 - RNA, 19 nt, Homo sapiens
  misc_RNA (1)...(19): siRNA sense strand
ugucuugccugucuuuuau

SEQ ID NO: 1042711 - RNA, 19 nt, Homo sapiens
  misc_RNA (1)...(19): siRNA sense strand
ggagacagcauucuauuua

SEQ ID NO: 1042712 - RNA, 19 nt, Homo sapiens
  misc_RNA (1)...(19): siRNA sense strand
gagcgacccuauacauuua

SEQ ID NO: 1042713 - RNA, 19 nt, Homo sapiens
  misc_RNA (1)...(19): siRNA sense strand
gcagaaauaugacuacuuc

SEQ ID NO: 1042714 - RNA, 19 nt, Homo sapiens
  misc_RNA (1)...(19): siRNA sense strand
gaauaucgcuggagacucu

SEQ ID NO: 1042715 - RNA, 19 nt, Homo sapiens
  misc_RNA (1)...(19): siRNA sense strand
gaaauaauggucacaaaug

SEQ ID NO: 1042716 - RNA, 19 nt, Homo sapiens
  misc_RNA (1)...(19): siRNA sense strand
ugacuuaccuccauaugaa

SEQ ID NO: 1042717 - RNA, 19 nt, Homo sapiens
  misc_RNA (1)...(19): siRNA sense strand
gaucauaacacaaagacua

SEQ ID NO: 1042718 - RNA, 19 nt, Homo sapiens
  misc_RNA (1)...(19): siRNA sense strand
gaaagcagauaacccugaa

SEQ ID NO: 1042719 - RNA, 19 nt, Homo sapiens
  misc_RNA (1)...(19): siRNA sense strand
gcucuuagaugguuucuuc

SEQ ID NO: 1042720 - RNA, 19 nt, Homo sapiens
  misc_RNA (1)...(19): siRNA sense strand
agucauaagucucgaguua

SEQ ID NO: 1042721 - RNA, 19 nt, Homo sapiens
  misc_RNA (1)...(19): siRNA sense strand
uaaagaaaccugcugauau

SEQ ID NO: 1042722 - RNA, 19 nt, Homo sapiens
  misc_RNA (1)...(19): siRNA sense strand
ucacagaacuacuuccuau

SEQ ID NO: 1042723 - RNA, 19 nt, Homo sapiens
  misc_RNA (1)...(19): siRNA sense strand
agagaaaggucuugacuau

SEQ ID NO: 1042724 - RNA, 19 nt, Homo sapiens
  misc_RNA (1)...(19): siRNA sense strand
aaagaaaccugcugauauc

SEQ ID NO: 1042725 - RNA, 19 nt, Homo sapiens
  misc_RNA (1)...(19): siRNA sense strand
ugaaauggauccuggagaa

SEQ ID NO: 1042726 - RNA, 19 nt, Homo sapiens
  misc_RNA (1)...(19): siRNA sense strand
guacauaugcggucaaaga

SEQ ID NO: 1042727 - RNA, 19 nt, Homo sapiens
  misc_RNA (1)...(19): siRNA sense strand
gaagaguccuaucggagaa

SEQ ID NO: 1042728 - RNA, 19 nt, Homo sapiens
  misc_RNA (1)...(19): siRNA sense strand
ggagcgacccuauacauuu

SEQ ID NO: 1042729 - RNA, 19 nt, Homo sapiens
  misc_RNA (1)...(19): siRNA sense strand
gagcauggaugggaaguug

SEQ ID NO: 1042730 - RNA, 19 nt, Homo sapiens
  misc_RNA (1)...(19): siRNA sense strand
gaauagagaacuugcuuug

SEQ ID NO: 1042731 - RNA, 19 nt, Homo sapiens
  misc_RNA (1)...(19): siRNA sense strand
gaacuacuuccuauugauu

SEQ ID NO: 1042732 - RNA, 19 nt, Homo sapiens
  misc_RNA (1)...(19): siRNA sense strand
gggaauauaucgacuuagu

SEQ ID NO: 1042733 - RNA, 19 nt, Homo sapiens
  misc_RNA (1)...(19): siRNA sense strand
ccaauagguuugaaaugaa

SEQ ID NO: 1042734 - RNA, 19 nt, Homo sapiens
  misc_RNA (1)...(19): siRNA sense strand
gcacaucagcgaagacuug

SEQ ID NO: 1042735 - RNA, 19 nt, Homo sapiens
  misc_RNA (1)...(19): siRNA sense strand
gaauggauuugccgaacuu

SEQ ID NO: 1042736 - RNA, 19 nt, Homo sapiens
  misc_RNA (1)...(19): siRNA sense strand
ccagagaauuuaagcagaa

SEQ ID NO: 1042737 - RNA, 19 nt, Homo sapiens
  misc_RNA (1)...(19): siRNA sense strand
gaaugguucuucuuacugu

SEQ ID NO: 1042738 - RNA, 19 nt, Homo sapiens
  misc_RNA (1)...(19): siRNA sense strand
gcucacacaugcuuuaauc

SEQ ID NO: 1042739 - RNA, 19 nt, Homo sapiens
  misc_RNA (1)...(19): siRNA sense strand
gaagaaaacuuuggacaga

SEQ ID NO: 1042740 - RNA, 19 nt, Homo sapiens
  misc_RNA (1)...(19): siRNA sense strand
gaagauccacguuugaaau

SEQ ID NO: 1042741 - RNA, 19 nt, Homo sapiens
  misc_RNA (1)...(19): siRNA sense strand
ugaaugacauggaaucugu

SEQ ID NO: 1042742 - RNA, 19 nt, Homo sapiens
  misc_RNA (1)...(19): siRNA sense strand
agaaaggucuugacuaugg

SEQ ID NO: 1042743 - RNA, 19 nt, Homo sapiens
  misc_RNA (1)...(19): siRNA sense strand
cccaauagguuugaaauga

SEQ ID NO: 1042744 - RNA, 19 nt, Homo sapiens
  misc_RNA (1)...(19): siRNA sense strand
guacguagcggaugagaau

SEQ ID NO: 1042745 - RNA, 19 nt, Homo sapiens
  misc_RNA (1)...(19): siRNA sense strand
gacaauaacaucagacaga

SEQ ID NO: 1042746 - RNA, 19 nt, Homo sapiens
  misc_RNA (1)...(19): siRNA sense strand
aaauggaggucaagaugaa

SEQ ID NO: 1042747 - RNA, 19 nt, Homo sapiens
  misc_RNA (1)...(19): siRNA sense strand
aagggaauauaucgacuua

SEQ ID NO: 1042748 - RNA, 19 nt, Homo sapiens
  misc_RNA (1)...(19): siRNA sense strand
cagaaauaauggucacaaa

SEQ ID NO: 1042749 - RNA, 19 nt, Homo sapiens
  misc_RNA (1)...(19): siRNA sense strand
gggaagcucuuagaugguu

SEQ ID NO: 1042750 - RNA, 19 nt, Homo sapiens
  misc_RNA (1)...(19): siRNA sense strand
gaaauuuccaguacauaug

SEQ ID NO: 1042751 - RNA, 19 nt, Homo sapiens
  misc_RNA (1)...(19): siRNA sense strand
gaucagccacaaacaguaa

SEQ ID NO: 1042752 - RNA, 19 nt, Homo sapiens
  misc_RNA (1)...(19): siRNA sense strand
gaaaagaccagauguccua

SEQ ID NO: 1042753 - RNA, 19 nt, Homo sapiens
  misc_RNA (1)...(19): siRNA sense strand
guaaacccaucuaaucaca

SEQ ID NO: 1042754 - RNA, 19 nt, Homo sapiens
  misc_RNA (1)...(19): siRNA sense strand
ggacaucgcgaguaccuau

SEQ ID NO: 1042755 - RNA, 19 nt, Homo sapiens
  misc_RNA (1)...(19): siRNA sense strand
cagaacuacuuccuauuga

SEQ ID NO: 1042756 - RNA, 19 nt, Homo sapiens
  misc_RNA (1)...(19): siRNA sense strand
gcagaugaacgccuucuug

SEQ ID NO: 1042757 - RNA, 19 nt, Homo sapiens
  misc_RNA (1)...(19): siRNA sense strand
agacauaucaaguggauuu

SEQ ID NO: 1042758 - RNA, 19 nt, Homo sapiens
  misc_RNA (1)...(19): siRNA sense strand
ggagaauuauguccgugaa

SEQ ID NO: 1042759 - RNA, 19 nt, Homo sapiens
  misc_RNA (1)...(19): siRNA sense strand
ggaagaaagaauucacuug

SEQ ID NO: 1042760 - RNA, 19 nt, Homo sapiens
  misc_RNA (1)...(19): siRNA sense strand
gauccacguuugaaauuuc

SEQ ID NO: 1042761 - RNA, 19 nt, Homo sapiens
  misc_RNA (1)...(19): siRNA sense strand
gcacagaccaagccugaug

SEQ ID NO: 1042762 - RNA, 19 nt, Homo sapiens
  misc_RNA (1)...(19): siRNA sense strand
gaucauuuguccuacuuca

SEQ ID NO: 1042763 - RNA, 19 nt, Homo sapiens
  misc_RNA (1)...(19): siRNA sense strand
ggagaccauuucagaggaa

SEQ ID NO: 1042764 - RNA, 19 nt, Homo sapiens
  misc_RNA (1)...(19): siRNA sense strand
cugcagaacccagcuauua

SEQ ID NO: 1042765 - RNA, 19 nt, Homo sapiens
  misc_RNA (1)...(19): siRNA sense strand
ccacagccaucaccuuaca

SEQ ID NO: 1042766 - RNA, 19 nt, Homo sapiens
  misc_RNA (1)...(19): siRNA sense strand
ccucagcuguuuacaauag

SEQ ID NO: 1042767 - RNA, 19 nt, Homo sapiens
  misc_RNA (1)...(19): siRNA sense strand
gacuguggauugaguuuga

SEQ ID NO: 1042768 - RNA, 19 nt, Homo sapiens
  misc_RNA (1)...(19): siRNA sense strand
ggaagauccacguuugaaa

SEQ ID NO: 1042769 - RNA, 19 nt, Homo sapiens
  misc_RNA (1)...(19): siRNA sense strand
caguucagcucuuugauuc

SEQ ID NO: 1042770 - RNA, 19 nt, Homo sapiens
  misc_RNA (1)...(19): siRNA sense strand
guccucagcuguuuacaau

SEQ ID NO: 1042771 - RNA, 19 nt, Homo sapiens
  misc_RNA (1)...(19): siRNA sense strand
gacauggaaucuguggaua

SEQ ID NO: 1042772 - RNA, 19 nt, Homo sapiens
  misc_RNA (1)...(19): siRNA sense strand
agaaagaauucacuuggau

SEQ ID NO: 1042773 - RNA, 19 nt, Homo sapiens
  misc_RNA (1)...(19): siRNA sense strand
gagaauagagaacuugcuu

SEQ ID NO: 1042774 - RNA, 19 nt, Homo sapiens
  misc_RNA (1)...(19): siRNA sense strand
uggaaucuguggauaguga

SEQ ID NO: 1042775 - RNA, 19 nt, Homo sapiens
  misc_RNA (1)...(19): siRNA sense strand
aaacccaucuaaucacaga

SEQ ID NO: 1042776 - RNA, 19 nt, Homo sapiens
  misc_RNA (1)...(19): siRNA sense strand
uuacaacucuuugaaaugg

SEQ ID NO: 1042777 - RNA, 19 nt, Homo sapiens
  misc_RNA (1)...(19): siRNA sense strand
caacuacacccuucagauc

SEQ ID NO: 1042778 - RNA, 19 nt, Homo sapiens
  misc_RNA (1)...(19): siRNA sense strand
uuaaagaaaccugcugaua

SEQ ID NO: 1042779 - RNA, 19 nt, Homo sapiens
  misc_RNA (1)...(19): siRNA sense strand
caacacaaagucacacaga

SEQ ID NO: 1042780 - RNA, 19 nt, Homo sapiens
  misc_RNA (1)...(19): siRNA sense strand
gagccggucuauggacuuu

SEQ ID NO: 1042781 - RNA, 19 nt, Homo sapiens
  misc_RNA (1)...(19): siRNA sense strand
ggaugagaauagagaacuu

SEQ ID NO: 1042782 - RNA, 19 nt, Homo sapiens
  misc_RNA (1)...(19): siRNA sense strand
gaccucauguucugcauag

SEQ ID NO: 1042783 - RNA, 19 nt, Homo sapiens
  misc_RNA (1)...(19): siRNA sense strand
ccacccggcugggaaauga

SEQ ID NO: 1042784 - RNA, 19 nt, Homo sapiens
  misc_RNA (1)...(19): siRNA sense strand
cauaugaaaccuuugaaga

SEQ ID NO: 1042785 - RNA, 19 nt, Homo sapiens
  misc_RNA (1)...(19): siRNA sense strand
gaguaccuaugaauggauu

SEQ ID NO: 1042786 - RNA, 19 nt, Homo sapiens
  misc_RNA (1)...(19): siRNA sense strand
ggucacaaaugaaaacaaa

SEQ ID NO: 1042787 - RNA, 19 nt, Homo sapiens
  misc_RNA (1)...(19): siRNA sense strand
acaagaugauguugggaaa

SEQ ID NO: 1042788 - RNA, 19 nt, Homo sapiens
  misc_RNA (1)...(19): siRNA sense strand
ccucggagucggacaauaa

SEQ ID NO: 1042789 - RNA, 19 nt, Homo sapiens
  misc_RNA (1)...(19): siRNA sense strand
gagacagcauucuauuuac

SEQ ID NO: 1042790 - RNA, 19 nt, Homo sapiens
  misc_RNA (1)...(19): siRNA sense strand
ucuauggacuuuccgaaga

SEQ ID NO: 1042791 - RNA, 19 nt, Homo sapiens
  misc_RNA (1)...(19): siRNA sense strand
ucacagacuccuauuugaa

SEQ ID NO: 1042792 - RNA, 19 nt, Homo sapiens
  misc_RNA (1)...(19): siRNA sense strand
ggagggauucacagaacua

SEQ ID NO: 1042793 - RNA, 19 nt, Homo sapiens
  misc_RNA (1)...(19): siRNA sense strand
ggaagaaauuaaagaaacc

SEQ ID NO: 1042794 - RNA, 19 nt, Homo sapiens
  misc_RNA (1)...(19): siRNA sense strand
caaaugacucggcuucuca

SEQ ID NO: 1042795 - RNA, 19 nt, Homo sapiens
  misc_RNA (1)...(19): siRNA sense strand
ucauaagucucgaguuaag

SEQ ID NO: 1042796 - RNA, 19 nt, Homo sapiens
  misc_RNA (1)...(19): siRNA sense strand
ccagugauccguaugugaa

SEQ ID NO: 1042797 - RNA, 19 nt, Homo sapiens
  misc_RNA (1)...(19): siRNA sense strand
caaugguccucagcuguuu

SEQ ID NO: 1042798 - RNA, 19 nt, Homo sapiens
  misc_RNA (1)...(19): siRNA sense strand
gcgaguaccuaugaaugga

SEQ ID NO: 1042799 - RNA, 19 nt, Homo sapiens
  misc_RNA (1)...(19): siRNA sense strand
ggaaggcugugcuacucau

SEQ ID NO: 1042800 - RNA, 19 nt, Homo sapiens
  misc_RNA (1)...(19): siRNA sense strand
aagaaagaauucacuugga

SEQ ID NO: 1042801 - RNA, 19 nt, Homo sapiens
  misc_RNA (1)...(19): siRNA sense strand
gcaggcacaucagcgaaga

SEQ ID NO: 1042802 - RNA, 19 nt, Homo sapiens
  misc_RNA (1)...(19): siRNA sense strand
gaacuuacuaugucaacca

SEQ ID NO: 1042803 - RNA, 19 nt, Homo sapiens
  misc_RNA (1)...(19): siRNA sense strand
acagaacuacuuccuauug

SEQ ID NO: 1042804 - RNA, 19 nt, Homo sapiens
  misc_RNA (1)...(19): siRNA sense strand
aaucacagacuccuauuug

SEQ ID NO: 1042805 - RNA, 19 nt, Homo sapiens
  misc_RNA (1)...(19): siRNA sense strand
cagauaacccugaaugaca

SEQ ID NO: 1042806 - RNA, 19 nt, Homo sapiens
  misc_RNA (1)...(19): siRNA sense strand
gcuagacuguggauugagu

SEQ ID NO: 1042807 - RNA, 19 nt, Homo sapiens
  misc_RNA (1)...(19): siRNA sense strand
aaagcuagacuguggauug

SEQ ID NO: 1042808 - RNA, 19 nt, Homo sapiens
  misc_RNA (1)...(19): siRNA sense strand
aaagagaacccuccucaag

SEQ ID NO: 1042809 - RNA, 19 nt, Homo sapiens
  misc_RNA (1)...(19): siRNA sense strand
cgaaaagcguauccgguua

SEQ ID NO: 1042810 - RNA, 19 nt, Homo sapiens
  misc_RNA (1)...(19): siRNA sense strand
aaaguuguuucuggaauug

SEQ ID NO: 1042811 - RNA, 19 nt, Homo sapiens
  misc_RNA (1)...(19): siRNA sense strand
ccaaggagcugcggaguuu

SEQ ID NO: 1042812 - RNA, 19 nt, Homo sapiens
  misc_RNA (1)...(19): siRNA sense strand
ggaccaauuucuuccauau

SEQ ID NO: 1042813 - RNA, 19 nt, Homo sapiens
  misc_RNA (1)...(19): siRNA sense strand
gaggagaauuucauacaga

SEQ ID NO: 1042814 - RNA, 19 nt, Homo sapiens
  misc_RNA (1)...(19): siRNA sense strand
ugaacucgguggagcguua

SEQ ID NO: 1042815 - RNA, 19 nt, Homo sapiens
  misc_RNA (1)...(19): siRNA sense strand
ggagagccuucugcagaua

SEQ ID NO: 1042816 - RNA, 19 nt, Homo sapiens
  misc_RNA (1)...(19): siRNA sense strand
ucugcagucucuucaauua

SEQ ID NO: 1042817 - RNA, 19 nt, Homo sapiens
  misc_RNA (1)...(19): siRNA sense strand
ggacagcagcccugacuga

SEQ ID NO: 1042818 - RNA, 19 nt, Homo sapiens
  misc_RNA (1)...(19): siRNA sense strand
ccacguaccggacgccuua

SEQ ID NO: 1042819 - RNA, 19 nt, Homo sapiens
  misc_RNA (1)...(19): siRNA sense strand
gaaccuggaggcccugaaa

SEQ ID NO: 1042820 - RNA, 19 nt, Homo sapiens
  misc_RNA (1)...(19): siRNA sense strand
ggaggagaauuucauacag

SEQ ID NO: 1042821 - RNA, 19 nt, Homo sapiens
  misc_RNA (1)...(19): siRNA sense strand
gggaccaauuucuuccaua

SEQ ID NO: 1042822 - RNA, 19 nt, Homo sapiens
  misc_RNA (1)...(19): siRNA sense strand
guacgacuacuauguggaa

SEQ ID NO: 1042823 - RNA, 19 nt, Homo sapiens
  misc_RNA (1)...(19): siRNA sense strand
caucugcagucucuucaau

SEQ ID NO: 1042824 - RNA, 19 nt, Homo sapiens
  misc_RNA (1)...(19): siRNA sense strand
caagguguacgacuacuau

SEQ ID NO: 1042825 - RNA, 19 nt, Homo sapiens
  misc_RNA (1)...(19): siRNA sense strand
gcaagguguacgacuacua

SEQ ID NO: 1042826 - RNA, 19 nt, Homo sapiens
  misc_RNA (1)...(19): siRNA sense strand
gaauggaggagaauuucau

SEQ ID NO: 1042827 - RNA, 19 nt, Homo sapiens
  misc_RNA (1)...(19): siRNA sense strand
ucucuucaauuaucucuuc

SEQ ID NO: 1042828 - RNA, 19 nt, Homo sapiens
  misc_RNA (1)...(19): siRNA sense strand
cgacuacuauguggaaucu

SEQ ID NO: 1042829 - RNA, 19 nt, Homo sapiens
  misc_RNA (1)...(19): siRNA sense strand
gccuggaucugggcaauug

SEQ ID NO: 1042830 - RNA, 19 nt, Homo sapiens
  misc_RNA (1)...(19): siRNA sense strand
ccaagccggugacacaaag

SEQ ID NO: 1042831 - RNA, 19 nt, Homo sapiens
  misc_RNA (1)...(19): siRNA sense strand
ggucaacggcuuucucuac

SEQ ID NO: 1042832 - RNA, 19 nt, Homo sapiens
  misc_RNA (1)...(19): siRNA sense strand
aggagaauuucauacagaa

SEQ ID NO: 1042833 - RNA, 19 nt, Homo sapiens
  misc_RNA (1)...(19): siRNA sense strand
gaucugggcaauugcuaug

SEQ ID NO: 1042834 - RNA, 19 nt, Homo sapiens
  misc_RNA (1)...(19): siRNA sense strand
uggacaaccucaucuacug

SEQ ID NO: 1042835 - RNA, 19 nt, Homo sapiens
  misc_RNA (1)...(19): siRNA sense strand
gcagucucuucaauuaucu

SEQ ID NO: 1042836 - RNA, 19 nt, Homo sapiens
  misc_RNA (1)...(19): siRNA sense strand
ccagguuugugcccaagga

SEQ ID NO: 1042837 - RNA, 19 nt, Homo sapiens
  misc_RNA (1)...(19): siRNA sense strand
ugcagucucuucaauuauc

SEQ ID NO: 1042838 - RNA, 19 nt, Homo sapiens
  misc_RNA (1)...(19): siRNA sense strand
gguguacgacuacuaugug

SEQ ID NO: 1042839 - RNA, 19 nt, Homo sapiens
  misc_RNA (1)...(19): siRNA sense strand
agggcaagguguacgacua

SEQ ID NO: 1042840 - RNA, 19 nt, Homo sapiens
  misc_RNA (1)...(19): siRNA sense strand
aaagggugcagccgaaaga

SEQ ID NO: 1042841 - RNA, 19 nt, Homo sapiens
  misc_RNA (1)...(19): siRNA sense strand
gccaagccggugacacaaa

SEQ ID NO: 1042842 - RNA, 19 nt, Homo sapiens
  misc_RNA (1)...(19): siRNA sense strand
aauggaggagaauuucaua

SEQ ID NO: 1042843 - RNA, 19 nt, Homo sapiens
  misc_RNA (1)...(19): siRNA sense strand
ggcuuucucuaccgcuuug

SEQ ID NO: 1042844 - RNA, 19 nt, Homo sapiens
  misc_RNA (1)...(19): siRNA sense strand
ccagccgcgucuucugcua

SEQ ID NO: 1042845 - RNA, 19 nt, Homo sapiens
  misc_RNA (1)...(19): siRNA sense strand
aggagagccuucugcagau

SEQ ID NO: 1042846 - RNA, 19 nt, Homo sapiens
  misc_RNA (1)...(19): siRNA sense strand
uauaccuucucauccauag

SEQ ID NO: 1042847 - RNA, 19 nt, Homo sapiens
  misc_RNA (1)...(19): siRNA sense strand
acuacuauguggaaucuac

SEQ ID NO: 1042848 - RNA, 19 nt, Homo sapiens
  misc_RNA (1)...(19): siRNA sense strand
ggaucugggcaauugcuau

SEQ ID NO: 1042849 - RNA, 19 nt, Homo sapiens
  misc_RNA (1)...(19): siRNA sense strand
cgaauggaggagaauuuca

SEQ ID NO: 1042850 - RNA, 19 nt, Homo sapiens
  misc_RNA (1)...(19): siRNA sense strand
gagaguugguucacagcua

SEQ ID NO: 1042851 - RNA, 19 nt, Homo sapiens
  misc_RNA (1)...(19): siRNA sense strand
gagcucaucuucggacuug

SEQ ID NO: 1042852 - RNA, 19 nt, Homo sapiens
  misc_RNA (1)...(19): siRNA sense strand
gugcacagccacacccuua

SEQ ID NO: 1042853 - RNA, 19 nt, Homo sapiens
  misc_RNA (1)...(19): siRNA sense strand
gcacagccacacccuuauu

SEQ ID NO: 1042854 - RNA, 19 nt, Homo sapiens
  misc_RNA (1)...(19): siRNA sense strand
gcacagccacacccuuauu

SEQ ID NO: 1042855 - RNA, 19 nt, Homo sapiens
  misc_RNA (1)...(19): siRNA sense strand
uuauucagcuggagaguug

SEQ ID NO: 1042856 - RNA, 19 nt, Homo sapiens
  misc_RNA (1)...(19): siRNA sense strand
aaacuuucaugcaccaaug

SEQ ID NO: 1042857 - RNA, 19 nt, Homo sapiens
  misc_RNA (1)...(19): siRNA sense strand
ccagacacgugugacugua

SEQ ID NO: 1042858 - RNA, 19 nt, Homo sapiens
  misc_RNA (1)...(19): siRNA sense strand
acacauaccuucgcugcau

SEQ ID NO: 1042859 - RNA, 19 nt, Homo sapiens
  misc_RNA (1)...(19): siRNA sense strand
cugcacagccacacccuua

SEQ ID NO: 1042860 - RNA, 19 nt, Homo sapiens
  misc_RNA (1)...(19): siRNA sense strand
gaccaccaauggcaaagca

SEQ ID NO: 1042861 - RNA, 19 nt, Homo sapiens
  misc_RNA (1)...(19): siRNA sense strand
uuauucagcuggagguguu

SEQ ID NO: 1042862 - RNA, 19 nt, Homo sapiens
  misc_RNA (1)...(19): siRNA sense strand
ggacuccuaucaucaugcu

SEQ ID NO: 1042863 - RNA, 19 nt, Homo sapiens
  misc_RNA (1)...(19): siRNA sense strand
gacccugccucaaaacuuu

SEQ ID NO: 1042864 - RNA, 19 nt, Homo sapiens
  misc_RNA (1)...(19): siRNA sense strand
gagccaggacuccaagugu

SEQ ID NO: 1042865 - RNA, 19 nt, Homo sapiens
  misc_RNA (1)...(19): siRNA sense strand
caaugguguuucacaugga

SEQ ID NO: 1042866 - RNA, 19 nt, Homo sapiens
  misc_RNA (1)...(19): siRNA sense strand
acacguaccuucgcugcau

SEQ ID NO: 1042867 - RNA, 19 nt, Homo sapiens
  misc_RNA (1)...(19): siRNA sense strand
cacauaccuucgcugcauu

SEQ ID NO: 1042868 - RNA, 19 nt, Homo sapiens
  misc_RNA (1)...(19): siRNA sense strand
gguggacccugccucaaaa

SEQ ID NO: 1042869 - RNA, 19 nt, Homo sapiens
  misc_RNA (1)...(19): siRNA sense strand
ccaggaggagcucaucuuc

SEQ ID NO: 1042870 - RNA, 19 nt, Homo sapiens
  misc_RNA (1)...(19): siRNA sense strand
agacacgugugacuguagu

SEQ ID NO: 1042871 - RNA, 19 nt, Homo sapiens
  misc_RNA (1)...(19): siRNA sense strand
ccaggaggagcucaucuuc

SEQ ID NO: 1042872 - RNA, 19 nt, Homo sapiens
  misc_RNA (1)...(19): siRNA sense strand
gguggacccugcccgaaaa

SEQ ID NO: 1042873 - RNA, 19 nt, Homo sapiens
  misc_RNA (1)...(19): siRNA sense strand
aaugguguuucacauggaa

SEQ ID NO: 1042874 - RNA, 19 nt, Homo sapiens
  misc_RNA (1)...(19): siRNA sense strand
guagucggaccaccaaugg

SEQ ID NO: 1042875 - RNA, 19 nt, Homo sapiens
  misc_RNA (1)...(19): siRNA sense strand
uggagguguuucacagcua

SEQ ID NO: 1042876 - RNA, 19 nt, Homo sapiens
  misc_RNA (1)...(19): siRNA sense strand
gcucaucuucggacuugau

SEQ ID NO: 1042877 - RNA, 19 nt, Homo sapiens
  misc_RNA (1)...(19): siRNA sense strand
ccagacucgugugacugua

SEQ ID NO: 1042878 - RNA, 19 nt, Homo sapiens
  misc_RNA (1)...(19): siRNA sense strand
gcuggagaguugguucaca

SEQ ID NO: 1042879 - RNA, 19 nt, Homo sapiens
  misc_RNA (1)...(19): siRNA sense strand
ggacaaauaugggcuaaua

SEQ ID NO: 1042880 - RNA, 19 nt, Homo sapiens
  misc_RNA (1)...(19): siRNA sense strand
gacaaaggcugaugaaugu

SEQ ID NO: 1042881 - RNA, 19 nt, Homo sapiens
  misc_RNA (1)...(19): siRNA sense strand
ggaaugggcucuccagcuu

SEQ ID NO: 1042882 - RNA, 19 nt, Homo sapiens
  misc_RNA (1)...(19): siRNA sense strand
gaaaggugcugcgcagaaa

SEQ ID NO: 1042883 - RNA, 19 nt, Homo sapiens
  misc_RNA (1)...(19): siRNA sense strand
caaggaaucuucauuugau

SEQ ID NO: 1042884 - RNA, 19 nt, Homo sapiens
  misc_RNA (1)...(19): siRNA sense strand
uaauauggauccagaagaa

SEQ ID NO: 1042885 - RNA, 19 nt, Homo sapiens
  misc_RNA (1)...(19): siRNA sense strand
gacaaggaaucuucauuug

SEQ ID NO: 1042886 - RNA, 19 nt, Homo sapiens
  misc_RNA (1)...(19): siRNA sense strand
ggagagaagcccaaucuau

SEQ ID NO: 1042887 - RNA, 19 nt, Homo sapiens
  misc_RNA (1)...(19): siRNA sense strand
cccaaacaauuaucuagua

SEQ ID NO: 1042888 - RNA, 19 nt, Homo sapiens
  misc_RNA (1)...(19): siRNA sense strand
aaaguaaugucccuucaga

SEQ ID NO: 1042889 - RNA, 19 nt, Homo sapiens
  misc_RNA (1)...(19): siRNA sense strand
gaaagccagugaugaagag

SEQ ID NO: 1042890 - RNA, 19 nt, Homo sapiens
  misc_RNA (1)...(19): siRNA sense strand
ccaaaccucagcauauaua

SEQ ID NO: 1042891 - RNA, 19 nt, Homo sapiens
  misc_RNA (1)...(19): siRNA sense strand
ccaaggaauuucucaagau

SEQ ID NO: 1042892 - RNA, 19 nt, Homo sapiens
  misc_RNA (1)...(19): siRNA sense strand
gagagaagcccaaucuauc

SEQ ID NO: 1042893 - RNA, 19 nt, Homo sapiens
  misc_RNA (1)...(19): siRNA sense strand
ccacaugaauaccaaggaa

SEQ ID NO: 1042894 - RNA, 19 nt, Homo sapiens
  misc_RNA (1)...(19): siRNA sense strand
uaacagaugagucgauuau

SEQ ID NO: 1042895 - RNA, 19 nt, Homo sapiens
  misc_RNA (1)...(19): siRNA sense strand
aauaugaucccuacaguaa

SEQ ID NO: 1042896 - RNA, 19 nt, Homo sapiens
  misc_RNA (1)...(19): siRNA sense strand
aagcuucccuucccucuuu

SEQ ID NO: 1042897 - RNA, 19 nt, Homo sapiens
  misc_RNA (1)...(19): siRNA sense strand
cccaaucuauccaauauga

SEQ ID NO: 1042898 - RNA, 19 nt, Homo sapiens
  misc_RNA (1)...(19): siRNA sense strand
caaggaauuucucaagauc

SEQ ID NO: 1042899 - RNA, 19 nt, Homo sapiens
  misc_RNA (1)...(19): siRNA sense strand
gcugaugaauguacaguuc

SEQ ID NO: 1042900 - RNA, 19 nt, Homo sapiens
  misc_RNA (1)...(19): siRNA sense strand
caacuacaguacccacaug

SEQ ID NO: 1042901 - RNA, 19 nt, Homo sapiens
  misc_RNA (1)...(19): siRNA sense strand
agacaaggaaucuucauuu

SEQ ID NO: 1042902 - RNA, 19 nt, Homo sapiens
  misc_RNA (1)...(19): siRNA sense strand
agacaaaggcugaugaaug

SEQ ID NO: 1042903 - RNA, 19 nt, Homo sapiens
  misc_RNA (1)...(19): siRNA sense strand
acagaugagucgauuauca

SEQ ID NO: 1042904 - RNA, 19 nt, Homo sapiens
  misc_RNA (1)...(19): siRNA sense strand
uaaugucccuucagaaaca

SEQ ID NO: 1042905 - RNA, 19 nt, Homo sapiens
  misc_RNA (1)...(19): siRNA sense strand
guugugaccuugcaaaugg

SEQ ID NO: 1042906 - RNA, 19 nt, Homo sapiens
  misc_RNA (1)...(19): siRNA sense strand
caggaucucugggacuuaa

SEQ ID NO: 1042907 - RNA, 19 nt, Homo sapiens
  misc_RNA (1)...(19): siRNA sense strand
guacccacauguagaaagu

SEQ ID NO: 1042908 - RNA, 19 nt, Homo sapiens
  misc_RNA (1)...(19): siRNA sense strand
gaaugggcucuccagcuua

SEQ ID NO: 1042909 - RNA, 19 nt, Homo sapiens
  misc_RNA (1)...(19): siRNA sense strand
ccaauaugaucccuacagu

SEQ ID NO: 1042910 - RNA, 19 nt, Homo sapiens
  misc_RNA (1)...(19): siRNA sense strand
gaagcccaaucuauccaau

SEQ ID NO: 1042911 - RNA, 19 nt, Homo sapiens
  misc_RNA (1)...(19): siRNA sense strand
ccaaacaauuaucuaguac

SEQ ID NO: 1042912 - RNA, 19 nt, Homo sapiens
  misc_RNA (1)...(19): siRNA sense strand
gacugggacucaauacguu

SEQ ID NO: 1042913 - RNA, 19 nt, Homo sapiens
  misc_RNA (1)...(19): siRNA sense strand
aaauuuaaccuaccacaug

SEQ ID NO: 1042914 - RNA, 19 nt, Homo sapiens
  misc_RNA (1)...(19): siRNA sense strand
caauaugaucccuacagua

SEQ ID NO: 1042915 - RNA, 19 nt, Homo sapiens
  misc_RNA (1)...(19): siRNA sense strand
aauuuaaccuaccacauga

SEQ ID NO: 1042916 - RNA, 19 nt, Homo sapiens
  misc_RNA (1)...(19): siRNA sense strand
ggaaguauuaguaacagau

SEQ ID NO: 1042917 - RNA, 19 nt, Homo sapiens
  misc_RNA (1)...(19): siRNA sense strand
uaugaucccuacaguaaag

SEQ ID NO: 1042918 - RNA, 19 nt, Homo sapiens
  misc_RNA (1)...(19): siRNA sense strand
agacccaaguccuuuauuc

SEQ ID NO: 1042919 - RNA, 19 nt, Homo sapiens
  misc_RNA (1)...(19): siRNA sense strand
uaaccuaccacaugaauac

SEQ ID NO: 1042920 - RNA, 19 nt, Homo sapiens
  misc_RNA (1)...(19): siRNA sense strand
ggagaugucaggagagaag

SEQ ID NO: 1042921 - RNA, 19 nt, Homo sapiens
  misc_RNA (1)...(19): siRNA sense strand
auccaaaccucagcauaua

SEQ ID NO: 1042922 - RNA, 19 nt, Homo sapiens
  misc_RNA (1)...(19): siRNA sense strand
gaagaucauagaaaggaau

SEQ ID NO: 1042923 - RNA, 19 nt, Homo sapiens
  misc_RNA (1)...(19): siRNA sense strand
ggacugggacucaauacgu

SEQ ID NO: 1042924 - RNA, 19 nt, Homo sapiens
  misc_RNA (1)...(19): siRNA sense strand
acaaggaaucuucauuuga

SEQ ID NO: 1042925 - RNA, 19 nt, Homo sapiens
  misc_RNA (1)...(19): siRNA sense strand
gaaguauuaguaacagaug

SEQ ID NO: 1042926 - RNA, 19 nt, Homo sapiens
  misc_RNA (1)...(19): siRNA sense strand
ggaaucuucauuugauguu

SEQ ID NO: 1042927 - RNA, 19 nt, Homo sapiens
  misc_RNA (1)...(19): siRNA sense strand
ccuugcaaauggugucaua

SEQ ID NO: 1042928 - RNA, 19 nt, Homo sapiens
  misc_RNA (1)...(19): siRNA sense strand
ccacauguagaaaguaaug

SEQ ID NO: 1042929 - RNA, 19 nt, Homo sapiens
  misc_RNA (1)...(19): siRNA sense strand
aguaaugucccuucagaaa

SEQ ID NO: 1042930 - RNA, 19 nt, Homo sapiens
  misc_RNA (1)...(19): siRNA sense strand
cgaaagccagugaugaaga

SEQ ID NO: 1042931 - RNA, 19 nt, Homo sapiens
  misc_RNA (1)...(19): siRNA sense strand
agaaaguaaugucccuuca

SEQ ID NO: 1042932 - RNA, 19 nt, Homo sapiens
  misc_RNA (1)...(19): siRNA sense strand
ugaagaucauagaaaggaa

SEQ ID NO: 1042933 - RNA, 19 nt, Homo sapiens
  misc_RNA (1)...(19): siRNA sense strand
augagucgauuaucaguga

SEQ ID NO: 1042934 - RNA, 19 nt, Homo sapiens
  misc_RNA (1)...(19): siRNA sense strand
gggaaguauuaguaacaga

SEQ ID NO: 1042935 - RNA, 19 nt, Homo sapiens
  misc_RNA (1)...(19): siRNA sense strand
ucuaccugauggacaaaua

SEQ ID NO: 1042936 - RNA, 19 nt, Homo sapiens
  misc_RNA (1)...(19): siRNA sense strand
uaagacaaaggcugaugaa

SEQ ID NO: 1042937 - RNA, 19 nt, Homo sapiens
  misc_RNA (1)...(19): siRNA sense strand
gugaagaucauagaaagga

SEQ ID NO: 1042938 - RNA, 19 nt, Homo sapiens
  misc_RNA (1)...(19): siRNA sense strand
cagcagacccaaguccuuu

SEQ ID NO: 1042939 - RNA, 19 nt, Homo sapiens
  misc_RNA (1)...(19): siRNA sense strand
gcagacccaaguccuuuau

SEQ ID NO: 1042940 - RNA, 19 nt, Homo sapiens
  misc_RNA (1)...(19): siRNA sense strand
aguaacagaugagucgauu

SEQ ID NO: 1042941 - RNA, 19 nt, Homo sapiens
  misc_RNA (1)...(19): siRNA sense strand
aauccaaaccucagcauau

SEQ ID NO: 1042942 - RNA, 19 nt, Homo sapiens
  misc_RNA (1)...(19): siRNA sense strand
gaucauagaaaggaauuac

SEQ ID NO: 1042943 - RNA, 19 nt, Homo sapiens
  misc_RNA (1)...(19): siRNA sense strand
guaacagaugagucgauua

SEQ ID NO: 1042944 - RNA, 19 nt, Homo sapiens
  misc_RNA (1)...(19): siRNA sense strand
acccacauguagaaaguaa

SEQ ID NO: 1042945 - RNA, 19 nt, Homo sapiens
  misc_RNA (1)...(19): siRNA sense strand
gcucauuugcucucuacaa

SEQ ID NO: 1042946 - RNA, 19 nt, Homo sapiens
  misc_RNA (1)...(19): siRNA sense strand
gaaaguaaugucccuucag

SEQ ID NO: 1042947 - RNA, 19 nt, Homo sapiens
  misc_RNA (1)...(19): siRNA sense strand
gagcagaaccccaauccaa

SEQ ID NO: 1042948 - RNA, 19 nt, Homo sapiens
  misc_RNA (1)...(19): siRNA sense strand
aaacgggacugggacucaa

SEQ ID NO: 1042949 - RNA, 19 nt, Homo sapiens
  misc_RNA (1)...(19): siRNA sense strand
uuacgaacaagaccugauu

SEQ ID NO: 1042950 - RNA, 19 nt, Homo sapiens
  misc_RNA (1)...(19): siRNA sense strand
agcccaaucuauccaauau

SEQ ID NO: 1042951 - RNA, 19 nt, Homo sapiens
  misc_RNA (1)...(19): siRNA sense strand
caauccaaaccucagcaua

SEQ ID NO: 1042952 - RNA, 19 nt, Homo sapiens
  misc_RNA (1)...(19): siRNA sense strand
acaugaauaccaaggaauu

SEQ ID NO: 1042953 - RNA, 19 nt, Homo sapiens
  misc_RNA (1)...(19): siRNA sense strand
cuacaguaaagcuucagua

SEQ ID NO: 1042954 - RNA, 19 nt, Homo sapiens
  misc_RNA (1)...(19): siRNA sense strand
caaucuauccaauaugauc

SEQ ID NO: 1042955 - RNA, 19 nt, Homo sapiens
  misc_RNA (1)...(19): siRNA sense strand
accaaggaauuucucaaga

SEQ ID NO: 1042956 - RNA, 19 nt, Homo sapiens
  misc_RNA (1)...(19): siRNA sense strand
caugaauaccaaggaauuu

SEQ ID NO: 1042957 - RNA, 19 nt, Homo sapiens
  misc_RNA (1)...(19): siRNA sense strand
aaggagaugucaggagaga

SEQ ID NO: 1042958 - RNA, 19 nt, Homo sapiens
  misc_RNA (1)...(19): siRNA sense strand
agaaaggugcugcgcagaa

SEQ ID NO: 1042959 - RNA, 19 nt, Homo sapiens
  misc_RNA (1)...(19): siRNA sense strand
agccagugaugaagagaaa

SEQ ID NO: 1042960 - RNA, 19 nt, Homo sapiens
  misc_RNA (1)...(19): siRNA sense strand
caaaggcugaugaauguac

SEQ ID NO: 1042961 - RNA, 19 nt, Homo sapiens
  misc_RNA (1)...(19): siRNA sense strand
acaguacccacauguagaa

SEQ ID NO: 1042962 - RNA, 19 nt, Homo sapiens
  misc_RNA (1)...(19): siRNA sense strand
uggugaagaucauagaaag

SEQ ID NO: 1042963 - RNA, 19 nt, Homo sapiens
  misc_RNA (1)...(19): siRNA sense strand
caggagagaagcccaaucu

SEQ ID NO: 1042964 - RNA, 19 nt, Homo sapiens
  misc_RNA (1)...(19): siRNA sense strand
gcuaauauggauccagaag

SEQ ID NO: 1042965 - RNA, 19 nt, Homo sapiens
  misc_RNA (1)...(19): siRNA sense strand
uaucuaguaccaacagaga

SEQ ID NO: 1042966 - RNA, 19 nt, Homo sapiens
  misc_RNA (1)...(19): siRNA sense strand
gcaacuacaguacccacau

SEQ ID NO: 1042967 - RNA, 19 nt, Homo sapiens
  misc_RNA (1)...(19): siRNA sense strand
acguuuaccuggugaagau

SEQ ID NO: 1042968 - RNA, 19 nt, Homo sapiens
  misc_RNA (1)...(19): siRNA sense strand
cagcucauuugcucucuac

SEQ ID NO: 1042969 - RNA, 19 nt, Homo sapiens
  misc_RNA (1)...(19): siRNA sense strand
cucaagaucagcucauuug

SEQ ID NO: 1042970 - RNA, 19 nt, Homo sapiens
  misc_RNA (1)...(19): siRNA sense strand
guaaugucccuucagaaac

SEQ ID NO: 1042971 - RNA, 19 nt, Homo sapiens
  misc_RNA (1)...(19): siRNA sense strand
ccuaccacaugaauaccaa

SEQ ID NO: 1042972 - RNA, 19 nt, Homo sapiens
  misc_RNA (1)...(19): siRNA sense strand
uuaagacaaaggcugauga

SEQ ID NO: 1042973 - RNA, 19 nt, Homo sapiens
  misc_RNA (1)...(19): siRNA sense strand
ggauccagaagaacgaaug

SEQ ID NO: 1042974 - RNA, 19 nt, Homo sapiens
  misc_RNA (1)...(19): siRNA sense strand
ggaucucugggacuuaaga

SEQ ID NO: 1042975 - RNA, 19 nt, Homo sapiens
  misc_RNA (1)...(19): siRNA sense strand
caaaccucagcauauauau

SEQ ID NO: 1042976 - RNA, 19 nt, Homo sapiens
  misc_RNA (1)...(19): siRNA sense strand
caaacgggacugggacuca

SEQ ID NO: 1042977 - RNA, 19 nt, Homo sapiens
  misc_RNA (1)...(19): siRNA sense strand
ucagcucauuugcucucua

SEQ ID NO: 1042978 - RNA, 19 nt, Homo sapiens
  misc_RNA (1)...(19): siRNA sense strand
gacccaaguccuuuauucu

SEQ ID NO: 1042979 - RNA, 19 nt, Homo sapiens
  misc_RNA (1)...(19): siRNA sense strand
gaaauccgcugauggugaa

SEQ ID NO: 1042980 - RNA, 19 nt, Homo sapiens
  misc_RNA (1)...(19): siRNA sense strand
gaacagcaacuauuacaug

SEQ ID NO: 1042981 - RNA, 19 nt, Homo sapiens
  misc_RNA (1)...(19): siRNA sense strand
gagcagcaguuucagagaa

SEQ ID NO: 1042982 - RNA, 19 nt, Homo sapiens
  misc_RNA (1)...(19): siRNA sense strand
gacaaauccuucacccuaa

SEQ ID NO: 1042983 - RNA, 19 nt, Homo sapiens
  misc_RNA (1)...(19): siRNA sense strand
ggccaugacucgcuuauuc

SEQ ID NO: 1042984 - RNA, 19 nt, Homo sapiens
  misc_RNA (1)...(19): siRNA sense strand
aaaggcaucucucacguuu

SEQ ID NO: 1042985 - RNA, 19 nt, Homo sapiens
  misc_RNA (1)...(19): siRNA sense strand
ccagcuggauccuuccuua

SEQ ID NO: 1042986 - RNA, 19 nt, Homo sapiens
  misc_RNA (1)...(19): siRNA sense strand
gagggaggccugcaacuuu

SEQ ID NO: 1042987 - RNA, 19 nt, Homo sapiens
  misc_RNA (1)...(19): siRNA sense strand
cagcaacuauuacaugaug

SEQ ID NO: 1042988 - RNA, 19 nt, Homo sapiens
  misc_RNA (1)...(19): siRNA sense strand
uguuugacguccacaauua

SEQ ID NO: 1042989 - RNA, 19 nt, Homo sapiens
  misc_RNA (1)...(19): siRNA sense strand
caugaucgcugguuugaca

SEQ ID NO: 1042990 - RNA, 19 nt, Homo sapiens
  misc_RNA (1)...(19): siRNA sense strand
ccagaucccuguucagcaa

SEQ ID NO: 1042991 - RNA, 19 nt, Homo sapiens
  misc_RNA (1)...(19): siRNA sense strand
uggagaagaucaaagaguu

SEQ ID NO: 1042992 - RNA, 19 nt, Homo sapiens
  misc_RNA (1)...(19): siRNA sense strand
cgacuuugcugaugggaau

SEQ ID NO: 1042993 - RNA, 19 nt, Homo sapiens
  misc_RNA (1)...(19): siRNA sense strand
ggacacaugugggaguuca

SEQ ID NO: 1042994 - RNA, 19 nt, Homo sapiens
  misc_RNA (1)...(19): siRNA sense strand
ggacggggcugaaguggaa

SEQ ID NO: 1042995 - RNA, 19 nt, Homo sapiens
  misc_RNA (1)...(19): siRNA sense strand
gaacaucuggcagcucuga

SEQ ID NO: 1042996 - RNA, 19 nt, Homo sapiens
  misc_RNA (1)...(19): siRNA sense strand
acaauuacccggacuaugu

SEQ ID NO: 1042997 - RNA, 19 nt, Homo sapiens
  misc_RNA (1)...(19): siRNA sense strand
uaccacggcuggcuucuug

SEQ ID NO: 1042998 - RNA, 19 nt, Homo sapiens
  misc_RNA (1)...(19): siRNA sense strand
gcaccaggcucugcugaag

SEQ ID NO: 1042999 - RNA, 19 nt, Homo sapiens
  misc_RNA (1)...(19): siRNA sense strand
acccgaugcuguucaguua

SEQ ID NO: 1043000 - RNA, 19 nt, Homo sapiens
  misc_RNA (1)...(19): siRNA sense strand
gugcggacaucccugaaga

SEQ ID NO: 1043001 - RNA, 19 nt, Homo sapiens
  misc_RNA (1)...(19): siRNA sense strand
ggauguggccucccuguuc

SEQ ID NO: 1043002 - RNA, 19 nt, Homo sapiens
  misc_RNA (1)...(19): siRNA sense strand
ccuggugggcguccaauua

SEQ ID NO: 1043003 - RNA, 19 nt, Homo sapiens
  misc_RNA (1)...(19): siRNA sense strand
ggagaagaucaaagaguug

SEQ ID NO: 1043004 - RNA, 19 nt, Homo sapiens
  misc_RNA (1)...(19): siRNA sense strand
gggauggcaugaucaccuu

SEQ ID NO: 1043005 - RNA, 19 nt, Homo sapiens
  misc_RNA (1)...(19): siRNA sense strand
caacagacggccacugcaa

SEQ ID NO: 1043006 - RNA, 19 nt, Homo sapiens
  misc_RNA (1)...(19): siRNA sense strand
uaccugcgcucccgaaauc

SEQ ID NO: 1043007 - RNA, 19 nt, Homo sapiens
  misc_RNA (1)...(19): siRNA sense strand
caugauggacuuccuguau

SEQ ID NO: 1043008 - RNA, 19 nt, Homo sapiens
  misc_RNA (1)...(19): siRNA sense strand
aacagcaacuauuacauga

SEQ ID NO: 1043009 - RNA, 19 nt, Homo sapiens
  misc_RNA (1)...(19): siRNA sense strand
gguuaugguguuucuuaua

SEQ ID NO: 1043010 - RNA, 19 nt, Homo sapiens
  misc_RNA (1)...(19): siRNA sense strand
gcugccaccucucuucaga

SEQ ID NO: 1043011 - RNA, 19 nt, Homo sapiens
  misc_RNA (1)...(19): siRNA sense strand
gggccaugaucgcugguuu

SEQ ID NO: 1043012 - RNA, 19 nt, Homo sapiens
  misc_RNA (1)...(19): siRNA sense strand
ccuuaggacugauggagaa

SEQ ID NO: 1043013 - RNA, 19 nt, Homo sapiens
  misc_RNA (1)...(19): siRNA sense strand
guuccauucucccuauuug

SEQ ID NO: 1043014 - RNA, 19 nt, Homo sapiens
  misc_RNA (1)...(19): siRNA sense strand
ugaggcugcuucuguccua

SEQ ID NO: 1043015 - RNA, 19 nt, Homo sapiens
  misc_RNA (1)...(19): siRNA sense strand
ugauggacuuccuguaugu

SEQ ID NO: 1043016 - RNA, 19 nt, Homo sapiens
  misc_RNA (1)...(19): siRNA sense strand
gacauccaccgacuucuga

SEQ ID NO: 1043017 - RNA, 19 nt, Homo sapiens
  misc_RNA (1)...(19): siRNA sense strand
acuauuacaugauggacuu

SEQ ID NO: 1043018 - RNA, 19 nt, Homo sapiens
  misc_RNA (1)...(19): siRNA sense strand
acaaauccuucacccuaau

SEQ ID NO: 1043019 - RNA, 19 nt, Homo sapiens
  misc_RNA (1)...(19): siRNA sense strand
aauucugccugacuuauga

SEQ ID NO: 1043020 - RNA, 19 nt, Homo sapiens
  misc_RNA (1)...(19): siRNA sense strand
gauucgggccugcugauga

SEQ ID NO: 1043021 - RNA, 19 nt, Homo sapiens
  misc_RNA (1)...(19): siRNA sense strand
gcaacuauuacaugaugga

SEQ ID NO: 1043022 - RNA, 19 nt, Homo sapiens
  misc_RNA (1)...(19): siRNA sense strand
gaucuugucugaaaauguc

SEQ ID NO: 1043023 - RNA, 19 nt, Homo sapiens
  misc_RNA (1)...(19): siRNA sense strand
cagcugggcuacucaacag

SEQ ID NO: 1043024 - RNA, 19 nt, Homo sapiens
  misc_RNA (1)...(19): siRNA sense strand
ccagccagaucccuguuca

SEQ ID NO: 1043025 - RNA, 19 nt, Homo sapiens
  misc_RNA (1)...(19): siRNA sense strand
uggugaacagcaacuauua

SEQ ID NO: 1043026 - RNA, 19 nt, Homo sapiens
  misc_RNA (1)...(19): siRNA sense strand
caauuacccggacuauguu

SEQ ID NO: 1043027 - RNA, 19 nt, Homo sapiens
  misc_RNA (1)...(19): siRNA sense strand
ucacguuucuggaaugacu

SEQ ID NO: 1043028 - RNA, 19 nt, Homo sapiens
  misc_RNA (1)...(19): siRNA sense strand
gcccugaggcugcuucugu

SEQ ID NO: 1043029 - RNA, 19 nt, Homo sapiens
  misc_RNA (1)...(19): siRNA sense strand
caugaucaccuuccacauc

SEQ ID NO: 1043030 - RNA, 19 nt, Homo sapiens
  misc_RNA (1)...(19): siRNA sense strand
aggcaucucucacguuucu

SEQ ID NO: 1043031 - RNA, 19 nt, Homo sapiens
  misc_RNA (1)...(19): siRNA sense strand
gcucugcccaguacgagaa

SEQ ID NO: 1043032 - RNA, 19 nt, Homo sapiens
  misc_RNA (1)...(19): siRNA sense strand
ggccugcgcuccuggaaaa

SEQ ID NO: 1043033 - RNA, 19 nt, Homo sapiens
  misc_RNA (1)...(19): siRNA sense strand
ggugggaggaauuugugua

SEQ ID NO: 1043034 - RNA, 19 nt, Homo sapiens
  misc_RNA (1)...(19): siRNA sense strand
ccauggaggacaaagagaa

SEQ ID NO: 1043035 - RNA, 19 nt, Homo sapiens
  misc_RNA (1)...(19): siRNA sense strand
agggaggccugcaacuuug

SEQ ID NO: 1043036 - RNA, 19 nt, Homo sapiens
  misc_RNA (1)...(19): siRNA sense strand
ccagaucgccuugcaacug

SEQ ID NO: 1043037 - RNA, 19 nt, Homo sapiens
  misc_RNA (1)...(19): siRNA sense strand
cuaaucgucuucucuaacg

SEQ ID NO: 1043038 - RNA, 19 nt, Homo sapiens
  misc_RNA (1)...(19): siRNA sense strand
uccaugcccuccuccugua

SEQ ID NO: 1043039 - RNA, 19 nt, Homo sapiens
  misc_RNA (1)...(19): siRNA sense strand
gauggugaacagcaacuau

SEQ ID NO: 1043040 - RNA, 19 nt, Homo sapiens
  misc_RNA (1)...(19): siRNA sense strand
gugaacagcaacuauuaca

SEQ ID NO: 1043041 - RNA, 19 nt, Homo sapiens
  misc_RNA (1)...(19): siRNA sense strand
ucagggccauggaggacaa

SEQ ID NO: 1043042 - RNA, 19 nt, Homo sapiens
  misc_RNA (1)...(19): siRNA sense strand
caggacacaugugggaguu

SEQ ID NO: 1043043 - RNA, 19 nt, Homo sapiens
  misc_RNA (1)...(19): siRNA sense strand
gggaggaauuuguguaccu

SEQ ID NO: 1043044 - RNA, 19 nt, Homo sapiens
  misc_RNA (1)...(19): siRNA sense strand
gauccacuccuccaucucu

SEQ ID NO: 1043045 - RNA, 19 nt, Homo sapiens
  misc_RNA (1)...(19): siRNA sense strand
ugacuggugggaggaauuu

SEQ ID NO: 1043046 - RNA, 19 nt, Homo sapiens
  misc_RNA (1)...(19): siRNA sense strand
cugcugaugaccaugguua

SEQ ID NO: 1043047 - RNA, 19 nt, Homo sapiens
  misc_RNA (1)...(19): siRNA sense strand
caauucugccugacuuaug

SEQ ID NO: 1043048 - RNA, 19 nt, Homo sapiens
  misc_RNA (1)...(19): siRNA sense strand
gccaugaucgcugguuuga

SEQ ID NO: 1043049 - RNA, 19 nt, Homo sapiens
  misc_RNA (1)...(19): siRNA sense strand
ggacuuccuguaugucaca

SEQ ID NO: 1043050 - RNA, 19 nt, Homo sapiens
  misc_RNA (1)...(19): siRNA sense strand
ggugggcguccaauuaugu

SEQ ID NO: 1043051 - RNA, 19 nt, Homo sapiens
  misc_RNA (1)...(19): siRNA sense strand
gagaagacggacccacagu

SEQ ID NO: 1043052 - RNA, 19 nt, Homo sapiens
  misc_RNA (1)...(19): siRNA sense strand
uaggacugauggagaagau

SEQ ID NO: 1043053 - RNA, 19 nt, Homo sapiens
  misc_RNA (1)...(19): siRNA sense strand
cuuaugcucugcccaguac

SEQ ID NO: 1043054 - RNA, 19 nt, Homo sapiens
  misc_RNA (1)...(19): siRNA sense strand
ucucucacguuucuggaau

SEQ ID NO: 1043055 - RNA, 19 nt, Homo sapiens
  misc_RNA (1)...(19): siRNA sense strand
ucagcaaaugcaucuguuu

SEQ ID NO: 1043056 - RNA, 19 nt, Homo sapiens
  misc_RNA (1)...(19): siRNA sense strand
gaguugaccgccaccuguu

SEQ ID NO: 1043057 - RNA, 19 nt, Homo sapiens
  misc_RNA (1)...(19): siRNA sense strand
cgagggaggccugcaacuu

SEQ ID NO: 1043058 - RNA, 19 nt, Homo sapiens
  misc_RNA (1)...(19): siRNA sense strand
ggagcagcaguuucagaga

SEQ ID NO: 1043059 - RNA, 19 nt, Homo sapiens
  misc_RNA (1)...(19): siRNA sense strand
ggacaccgugcgcaaguac

SEQ ID NO: 1043060 - RNA, 19 nt, Homo sapiens
  misc_RNA (1)...(19): siRNA sense strand
uccaaggccucaaugacau

SEQ ID NO: 1043061 - RNA, 19 nt, Homo sapiens
  misc_RNA (1)...(19): siRNA sense strand
cccuaaucgucuucucuaa

SEQ ID NO: 1043062 - RNA, 19 nt, Homo sapiens
  misc_RNA (1)...(19): siRNA sense strand
gcagcaguuucagagaauc

SEQ ID NO: 1043063 - RNA, 19 nt, Homo sapiens
  misc_RNA (1)...(19): siRNA sense strand
ucucacguuucuggaauga

SEQ ID NO: 1043064 - RNA, 19 nt, Homo sapiens
  misc_RNA (1)...(19): siRNA sense strand
ccacuccuccaucucucua

SEQ ID NO: 1043065 - RNA, 19 nt, Homo sapiens
  misc_RNA (1)...(19): siRNA sense strand
ggucagggaaggagaacuc

SEQ ID NO: 1043066 - RNA, 19 nt, Homo sapiens
  misc_RNA (1)...(19): siRNA sense strand
augguuaugguguuucuua

SEQ ID NO: 1043067 - RNA, 19 nt, Homo sapiens
  misc_RNA (1)...(19): siRNA sense strand
ccacaauuacccggacuau

SEQ ID NO: 1043068 - RNA, 19 nt, Homo sapiens
  misc_RNA (1)...(19): siRNA sense strand
guucagcaaaugcaucugu

SEQ ID NO: 1043069 - RNA, 19 nt, Homo sapiens
  misc_RNA (1)...(19): siRNA sense strand
guaccugcgcucccgaaau

SEQ ID NO: 1043070 - RNA, 19 nt, Homo sapiens
  misc_RNA (1)...(19): siRNA sense strand
ugacauccaccgacuucug

SEQ ID NO: 1043071 - RNA, 19 nt, Homo sapiens
  misc_RNA (1)...(19): siRNA sense strand
ugguguuucuuauaucuuc

SEQ ID NO: 1043072 - RNA, 19 nt, Homo sapiens
  misc_RNA (1)...(19): siRNA sense strand
gaucccuguucagcaaaug

SEQ ID NO: 1043073 - RNA, 19 nt, Homo sapiens
  misc_RNA (1)...(19): siRNA sense strand
gucguuccauucucccuau

SEQ ID NO: 1043074 - RNA, 19 nt, Homo sapiens
  misc_RNA (1)...(19): siRNA sense strand
gcuuucagcugggcuacuc

SEQ ID NO: 1043075 - RNA, 19 nt, Homo sapiens
  misc_RNA (1)...(19): siRNA sense strand
augauggacuuccuguaug

SEQ ID NO: 1043076 - RNA, 19 nt, Homo sapiens
  misc_RNA (1)...(19): siRNA sense strand
ucaguuggcuuuuccucuu

SEQ ID NO: 1043077 - RNA, 19 nt, Homo sapiens
  misc_RNA (1)...(19): siRNA sense strand
gcugaugaccaugguuaug

SEQ ID NO: 1043078 - RNA, 19 nt, Homo sapiens
  misc_RNA (1)...(19): siRNA sense strand
ggagaugccucauaaauuu

SEQ ID NO: 1043079 - RNA, 19 nt, Homo sapiens
  misc_RNA (1)...(19): siRNA sense strand
gaagugaagugcauuaagu

SEQ ID NO: 1043080 - RNA, 19 nt, Homo sapiens
  misc_RNA (1)...(19): siRNA sense strand
gaaauugucuucauaacag

SEQ ID NO: 1043081 - RNA, 19 nt, Homo sapiens
  misc_RNA (1)...(19): siRNA sense strand
agaaggagaugccucauaa

SEQ ID NO: 1043082 - RNA, 19 nt, Homo sapiens
  misc_RNA (1)...(19): siRNA sense strand
cauguaaacucuauucuuc

SEQ ID NO: 1043083 - RNA, 19 nt, Homo sapiens
  misc_RNA (1)...(19): siRNA sense strand
ugucgaagcugcccaaguu

SEQ ID NO: 1043084 - RNA, 19 nt, Homo sapiens
  misc_RNA (1)...(19): siRNA sense strand
uagaauggaugacaaagga

SEQ ID NO: 1043085 - RNA, 19 nt, Homo sapiens
  misc_RNA (1)...(19): siRNA sense strand
gagcaucgcugcccgugau

SEQ ID NO: 1043086 - RNA, 19 nt, Homo sapiens
  misc_RNA (1)...(19): siRNA sense strand
ccucaaagacuguggauuu

SEQ ID NO: 1043087 - RNA, 19 nt, Homo sapiens
  misc_RNA (1)...(19): siRNA sense strand
cauaacagaucaaggaauc

SEQ ID NO: 1043088 - RNA, 19 nt, Homo sapiens
  misc_RNA (1)...(19): siRNA sense strand
ggaaucccaucucauuuag

SEQ ID NO: 1043089 - RNA, 19 nt, Homo sapiens
  misc_RNA (1)...(19): siRNA sense strand
ggagaagugaagugcauua

SEQ ID NO: 1043090 - RNA, 19 nt, Homo sapiens
  misc_RNA (1)...(19): siRNA sense strand
caucuuggauugucuuuca

SEQ ID NO: 1043091 - RNA, 19 nt, Homo sapiens
  misc_RNA (1)...(19): siRNA sense strand
gaaacuugagcccauagua

SEQ ID NO: 1043092 - RNA, 19 nt, Homo sapiens
  misc_RNA (1)...(19): siRNA sense strand
guuaaaggcccagaugaua

SEQ ID NO: 1043093 - RNA, 19 nt, Homo sapiens
  misc_RNA (1)...(19): siRNA sense strand
ggauucugcuggacuaguu

SEQ ID NO: 1043094 - RNA, 19 nt, Homo sapiens
  misc_RNA (1)...(19): siRNA sense strand
gugaagaacauguugcuuu

SEQ ID NO: 1043095 - RNA, 19 nt, Homo sapiens
  misc_RNA (1)...(19): siRNA sense strand
acacaggagugcaagacua

SEQ ID NO: 1043096 - RNA, 19 nt, Homo sapiens
  misc_RNA (1)...(19): siRNA sense strand
cgaaagagacaucgcaaug

SEQ ID NO: 1043097 - RNA, 19 nt, Homo sapiens
  misc_RNA (1)...(19): siRNA sense strand
uuagcugccuuaagguuua

SEQ ID NO: 1043098 - RNA, 19 nt, Homo sapiens
  misc_RNA (1)...(19): siRNA sense strand
uagccgugcugauggaaua

SEQ ID NO: 1043099 - RNA, 19 nt, Homo sapiens
  misc_RNA (1)...(19): siRNA sense strand
guacacccauguccuguca

SEQ ID NO: 1043100 - RNA, 19 nt, Homo sapiens
  misc_RNA (1)...(19): siRNA sense strand
acagagacaucgguaauau

SEQ ID NO: 1043101 - RNA, 19 nt, Homo sapiens
  misc_RNA (1)...(19): siRNA sense strand
gcagcuguauguucucuuc

SEQ ID NO: 1043102 - RNA, 19 nt, Homo sapiens
  misc_RNA (1)...(19): siRNA sense strand
ggaacacugugaagaacau

SEQ ID NO: 1043103 - RNA, 19 nt, Homo sapiens
  misc_RNA (1)...(19): siRNA sense strand
gagaaaggaaugcaagaug

SEQ ID NO: 1043104 - RNA, 19 nt, Homo sapiens
  misc_RNA (1)...(19): siRNA sense strand
gcccauaguaaaucucuua

SEQ ID NO: 1043105 - RNA, 19 nt, Homo sapiens
  misc_RNA (1)...(19): siRNA sense strand
ccacgguccuggagaaugu

SEQ ID NO: 1043106 - RNA, 19 nt, Homo sapiens
  misc_RNA (1)...(19): siRNA sense strand
guacagcauuaccuacaug

SEQ ID NO: 1043107 - RNA, 19 nt, Homo sapiens
  misc_RNA (1)...(19): siRNA sense strand
aaacuugagcccauaguaa

SEQ ID NO: 1043108 - RNA, 19 nt, Homo sapiens
  misc_RNA (1)...(19): siRNA sense strand
caaagcagacugaagacaa

SEQ ID NO: 1043109 - RNA, 19 nt, Homo sapiens
  misc_RNA (1)...(19): siRNA sense strand
aaucccaucucauuuagaa

SEQ ID NO: 1043110 - RNA, 19 nt, Homo sapiens
  misc_RNA (1)...(19): siRNA sense strand
gccgugaucuugcugucua

SEQ ID NO: 1043111 - RNA, 19 nt, Homo sapiens
  misc_RNA (1)...(19): siRNA sense strand
gaagagccacaaucucaau

SEQ ID NO: 1043112 - RNA, 19 nt, Homo sapiens
  misc_RNA (1)...(19): siRNA sense strand
gaaguucuccuuuccaaac

SEQ ID NO: 1043113 - RNA, 19 nt, Homo sapiens
  misc_RNA (1)...(19): siRNA sense strand
caacagcaaaugaugaaau

SEQ ID NO: 1043114 - RNA, 19 nt, Homo sapiens
  misc_RNA (1)...(19): siRNA sense strand
agaauguccugcagccuuu

SEQ ID NO: 1043115 - RNA, 19 nt, Homo sapiens
  misc_RNA (1)...(19): siRNA sense strand
caaccugacaucauuauca

SEQ ID NO: 1043116 - RNA, 19 nt, Homo sapiens
  misc_RNA (1)...(19): siRNA sense strand
ggagaccaagcucuaauga

SEQ ID NO: 1043117 - RNA, 19 nt, Homo sapiens
  misc_RNA (1)...(19): siRNA sense strand
ccucauaaauuugugauag

SEQ ID NO: 1043118 - RNA, 19 nt, Homo sapiens
  misc_RNA (1)...(19): siRNA sense strand
gaagacucauggacuuucu

SEQ ID NO: 1043119 - RNA, 19 nt, Homo sapiens
  misc_RNA (1)...(19): siRNA sense strand
uuaccuacaugaacuuguu

SEQ ID NO: 1043120 - RNA, 19 nt, Homo sapiens
  misc_RNA (1)...(19): siRNA sense strand
aggaaucccaucucauuua

SEQ ID NO: 1043121 - RNA, 19 nt, Homo sapiens
  misc_RNA (1)...(19): siRNA sense strand
agauugcaguacagcauua

SEQ ID NO: 1043122 - RNA, 19 nt, Homo sapiens
  misc_RNA (1)...(19): siRNA sense strand
uaaauaggacgggaaaguu

SEQ ID NO: 1043123 - RNA, 19 nt, Homo sapiens
  misc_RNA (1)...(19): siRNA sense strand
gaaagagacaucgcaaugg

SEQ ID NO: 1043124 - RNA, 19 nt, Homo sapiens
  misc_RNA (1)...(19): siRNA sense strand
caacuaaacccagccuuuc

SEQ ID NO: 1043125 - RNA, 19 nt, Homo sapiens
  misc_RNA (1)...(19): siRNA sense strand
acgagaaggugccuguaaa

SEQ ID NO: 1043126 - RNA, 19 nt, Homo sapiens
  misc_RNA (1)...(19): siRNA sense strand
ugaagaacauguugcuuuu

SEQ ID NO: 1043127 - RNA, 19 nt, Homo sapiens
  misc_RNA (1)...(19): siRNA sense strand
gaaggagaugccucauaaa

SEQ ID NO: 1043128 - RNA, 19 nt, Homo sapiens
  misc_RNA (1)...(19): siRNA sense strand
aaauaggacgggaaaguuu

SEQ ID NO: 1043129 - RNA, 19 nt, Homo sapiens
  misc_RNA (1)...(19): siRNA sense strand
gagaagugaagugcauuaa

SEQ ID NO: 1043130 - RNA, 19 nt, Homo sapiens
  misc_RNA (1)...(19): siRNA sense strand
agacaucgguaauauucga

SEQ ID NO: 1043131 - RNA, 19 nt, Homo sapiens
  misc_RNA (1)...(19): siRNA sense strand
gcuguauguucucuucuug

SEQ ID NO: 1043132 - RNA, 19 nt, Homo sapiens
  misc_RNA (1)...(19): siRNA sense strand
gcgccuaagucaacuaaac

SEQ ID NO: 1043133 - RNA, 19 nt, Homo sapiens
  misc_RNA (1)...(19): siRNA sense strand
ugacaaaggagaagugaag

SEQ ID NO: 1043134 - RNA, 19 nt, Homo sapiens
  misc_RNA (1)...(19): siRNA sense strand
ugauaggaaucccaucuca

SEQ ID NO: 1043135 - RNA, 19 nt, Homo sapiens
  misc_RNA (1)...(19): siRNA sense strand
uguuaucccuagagaguuu

SEQ ID NO: 1043136 - RNA, 19 nt, Homo sapiens
  misc_RNA (1)...(19): siRNA sense strand
cuaggauucugcuggacua

SEQ ID NO: 1043137 - RNA, 19 nt, Homo sapiens
  misc_RNA (1)...(19): siRNA sense strand
gacaacauuucugcacgaa

SEQ ID NO: 1043138 - RNA, 19 nt, Homo sapiens
  misc_RNA (1)...(19): siRNA sense strand
aaggaagacucauggacuu

SEQ ID NO: 1043139 - RNA, 19 nt, Homo sapiens
  misc_RNA (1)...(19): siRNA sense strand
ucaacuaaacccagccuuu

SEQ ID NO: 1043140 - RNA, 19 nt, Homo sapiens
  misc_RNA (1)...(19): siRNA sense strand
cuaccacgguccuggagaa

SEQ ID NO: 1043141 - RNA, 19 nt, Homo sapiens
  misc_RNA (1)...(19): siRNA sense strand
gaugaaauaguagaaguuc

SEQ ID NO: 1043142 - RNA, 19 nt, Homo sapiens
  misc_RNA (1)...(19): siRNA sense strand
gcaaaugaugaaauaguag

SEQ ID NO: 1043143 - RNA, 19 nt, Homo sapiens
  misc_RNA (1)...(19): siRNA sense strand
cauccugucugucuguuca

SEQ ID NO: 1043144 - RNA, 19 nt, Homo sapiens
  misc_RNA (1)...(19): siRNA sense strand
gaaaggaaugcaagauggu

SEQ ID NO: 1043145 - RNA, 19 nt, Homo sapiens
  misc_RNA (1)...(19): siRNA sense strand
agagacaucgguaauauuc

SEQ ID NO: 1043146 - RNA, 19 nt, Homo sapiens
  misc_RNA (1)...(19): siRNA sense strand
cgggaaaguuugcccugaa

SEQ ID NO: 1043147 - RNA, 19 nt, Homo sapiens
  misc_RNA (1)...(19): siRNA sense strand
cgaagcugcccaaguuuga

SEQ ID NO: 1043148 - RNA, 19 nt, Homo sapiens
  misc_RNA (1)...(19): siRNA sense strand
auaggaaucccaucucauu

SEQ ID NO: 1043149 - RNA, 19 nt, Homo sapiens
  misc_RNA (1)...(19): siRNA sense strand
ucagcuaucucuggacaug

SEQ ID NO: 1043150 - RNA, 19 nt, Homo sapiens
  misc_RNA (1)...(19): siRNA sense strand
cagcacaaccucuuuuaua

SEQ ID NO: 1043151 - RNA, 19 nt, Homo sapiens
  misc_RNA (1)...(19): siRNA sense strand
cuuaaccaguuucagauug

SEQ ID NO: 1043152 - RNA, 19 nt, Homo sapiens
  misc_RNA (1)...(19): siRNA sense strand
gcuguuaucccuagagagu

SEQ ID NO: 1043153 - RNA, 19 nt, Homo sapiens
  misc_RNA (1)...(19): siRNA sense strand
cuaaugaggccuacaacau

SEQ ID NO: 1043154 - RNA, 19 nt, Homo sapiens
  misc_RNA (1)...(19): siRNA sense strand
aguguuagcugccuuaagg

SEQ ID NO: 1043155 - RNA, 19 nt, Homo sapiens
  misc_RNA (1)...(19): siRNA sense strand
ccaaguguuagcugccuua

SEQ ID NO: 1043156 - RNA, 19 nt, Homo sapiens
  misc_RNA (1)...(19): siRNA sense strand
caacugcgucuucuucgau

SEQ ID NO: 1043157 - RNA, 19 nt, Homo sapiens
  misc_RNA (1)...(19): siRNA sense strand
gcucuaaugaggccuacaa

SEQ ID NO: 1043158 - RNA, 19 nt, Homo sapiens
  misc_RNA (1)...(19): siRNA sense strand
gagaugccucauaaauuug

SEQ ID NO: 1043159 - RNA, 19 nt, Homo sapiens
  misc_RNA (1)...(19): siRNA sense strand
agacaaaggaagacucaug

SEQ ID NO: 1043160 - RNA, 19 nt, Homo sapiens
  misc_RNA (1)...(19): siRNA sense strand
guaguuaaaggcccagaug

SEQ ID NO: 1043161 - RNA, 19 nt, Homo sapiens
  misc_RNA (1)...(19): siRNA sense strand
cuucauaacagaucaagga

SEQ ID NO: 1043162 - RNA, 19 nt, Homo sapiens
  misc_RNA (1)...(19): siRNA sense strand
gcgaggaggacuacuaucu

SEQ ID NO: 1043163 - RNA, 19 nt, Homo sapiens
  misc_RNA (1)...(19): siRNA sense strand
gauacagagacaucgguaa

SEQ ID NO: 1043164 - RNA, 19 nt, Homo sapiens
  misc_RNA (1)...(19): siRNA sense strand
cagcaaaugaugaaauagu

SEQ ID NO: 1043165 - RNA, 19 nt, Homo sapiens
  misc_RNA (1)...(19): siRNA sense strand
uggcuugucugcuguuauc

SEQ ID NO: 1043166 - RNA, 19 nt, Homo sapiens
  misc_RNA (1)...(19): siRNA sense strand
cuacaugaacuuguuauca

SEQ ID NO: 1043167 - RNA, 19 nt, Homo sapiens
  misc_RNA (1)...(19): siRNA sense strand
gaucgauccagcccuauca

SEQ ID NO: 1043168 - RNA, 19 nt, Homo sapiens
  misc_RNA (1)...(19): siRNA sense strand
cacaggagugcaagacuaa

SEQ ID NO: 1043169 - RNA, 19 nt, Homo sapiens
  misc_RNA (1)...(19): siRNA sense strand
caacaugcuuuucuauaca

SEQ ID NO: 1043170 - RNA, 19 nt, Homo sapiens
  misc_RNA (1)...(19): siRNA sense strand
aagaaggagaugccucaua

SEQ ID NO: 1043171 - RNA, 19 nt, Homo sapiens
  misc_RNA (1)...(19): siRNA sense strand
ggaagacucauggacuuuc

SEQ ID NO: 1043172 - RNA, 19 nt, Homo sapiens
  misc_RNA (1)...(19): siRNA sense strand
gagaaacggagucugaaac

SEQ ID NO: 1043173 - RNA, 19 nt, Homo sapiens
  misc_RNA (1)...(19): siRNA sense strand
agucuccuguuccauguaa

SEQ ID NO: 1043174 - RNA, 19 nt, Homo sapiens
  misc_RNA (1)...(19): siRNA sense strand
gggcgaggaggacuacuau

SEQ ID NO: 1043175 - RNA, 19 nt, Homo sapiens
  misc_RNA (1)...(19): siRNA sense strand
aggagaugccucauaaauu

SEQ ID NO: 1043176 - RNA, 19 nt, Homo sapiens
  misc_RNA (1)...(19): siRNA sense strand
aaggagaugccucauaaau

SEQ ID NO: 1043177 - RNA, 19 nt, Homo sapiens
  misc_RNA (1)...(19): siRNA sense strand
cuuucaaccugacaucauu

SEQ ID NO: 1043178 - RNA, 19 nt, Homo sapiens
  misc_RNA (1)...(19): siRNA sense strand
gggcauaucuggaaucuga

SEQ ID NO: 1043179 - RNA, 19 nt, Homo sapiens
  misc_RNA (1)...(19): siRNA sense strand
gauccaagcuauccagaaa

SEQ ID NO: 1043180 - RNA, 19 nt, Homo sapiens
  misc_RNA (1)...(19): siRNA sense strand
caugugaacugcacgauaa

SEQ ID NO: 1043181 - RNA, 19 nt, Homo sapiens
  misc_RNA (1)...(19): siRNA sense strand
guucagaaguacaguaauu

SEQ ID NO: 1043182 - RNA, 19 nt, Homo sapiens
  misc_RNA (1)...(19): siRNA sense strand
ggagagacauuaagaagac

SEQ ID NO: 1043183 - RNA, 19 nt, Homo sapiens
  misc_RNA (1)...(19): siRNA sense strand
aggcacagauagaucauua

SEQ ID NO: 1043184 - RNA, 19 nt, Homo sapiens
  misc_RNA (1)...(19): siRNA sense strand
gagcguaacagccuacauu

SEQ ID NO: 1043185 - RNA, 19 nt, Homo sapiens
  misc_RNA (1)...(19): siRNA sense strand
ggucugacacuacugauuu

SEQ ID NO: 1043186 - RNA, 19 nt, Homo sapiens
  misc_RNA (1)...(19): siRNA sense strand
gaacugcacgauaaaggaa

SEQ ID NO: 1043187 - RNA, 19 nt, Homo sapiens
  misc_RNA (1)...(19): siRNA sense strand
gaccaucagcuuuaggaua

SEQ ID NO: 1043188 - RNA, 19 nt, Homo sapiens
  misc_RNA (1)...(19): siRNA sense strand
uuaaagaugcuauggcuaa

SEQ ID NO: 1043189 - RNA, 19 nt, Homo sapiens
  misc_RNA (1)...(19): siRNA sense strand
guuggugccuuguuuaaug

SEQ ID NO: 1043190 - RNA, 19 nt, Homo sapiens
  misc_RNA (1)...(19): siRNA sense strand
ucaguguuccuguuauuua

SEQ ID NO: 1043191 - RNA, 19 nt, Homo sapiens
  misc_RNA (1)...(19): siRNA sense strand
uaaagaugcuauggcuaaa

SEQ ID NO: 1043192 - RNA, 19 nt, Homo sapiens
  misc_RNA (1)...(19): siRNA sense strand
guguugauguggguauuua

SEQ ID NO: 1043193 - RNA, 19 nt, Homo sapiens
  misc_RNA (1)...(19): siRNA sense strand
guacaguaauucugcucuu

SEQ ID NO: 1043194 - RNA, 19 nt, Homo sapiens
  misc_RNA (1)...(19): siRNA sense strand
uaucuaggacuugcaaaua

SEQ ID NO: 1043195 - RNA, 19 nt, Homo sapiens
  misc_RNA (1)...(19): siRNA sense strand
gaagcgcaaagcugaauga

SEQ ID NO: 1043196 - RNA, 19 nt, Homo sapiens
  misc_RNA (1)...(19): siRNA sense strand
ggaaucugaaguugcuaua

SEQ ID NO: 1043197 - RNA, 19 nt, Homo sapiens
  misc_RNA (1)...(19): siRNA sense strand
accaucagcuuuaggauau

SEQ ID NO: 1043198 - RNA, 19 nt, Homo sapiens
  misc_RNA (1)...(19): siRNA sense strand
gaacucaggcgccucuucu

SEQ ID NO: 1043199 - RNA, 19 nt, Homo sapiens
  misc_RNA (1)...(19): siRNA sense strand
aaucugaaguugcuauauc

SEQ ID NO: 1043200 - RNA, 19 nt, Homo sapiens
  misc_RNA (1)...(19): siRNA sense strand
aggaguugguucagaagua

SEQ ID NO: 1043201 - RNA, 19 nt, Homo sapiens
  misc_RNA (1)...(19): siRNA sense strand
gaaguuugcaguguugaug

SEQ ID NO: 1043202 - RNA, 19 nt, Homo sapiens
  misc_RNA (1)...(19): siRNA sense strand
cuauguuggugccuuguuu

SEQ ID NO: 1043203 - RNA, 19 nt, Homo sapiens
  misc_RNA (1)...(19): siRNA sense strand
ggaguugguucagaaguac

SEQ ID NO: 1043204 - RNA, 19 nt, Homo sapiens
  misc_RNA (1)...(19): siRNA sense strand
ggacuugcaaauaagaaug

SEQ ID NO: 1043205 - RNA, 19 nt, Homo sapiens
  misc_RNA (1)...(19): siRNA sense strand
gcucucauuucacucuuca

SEQ ID NO: 1043206 - RNA, 19 nt, Homo sapiens
  misc_RNA (1)...(19): siRNA sense strand
uaucuggaaucugaaguug

SEQ ID NO: 1043207 - RNA, 19 nt, Homo sapiens
  misc_RNA (1)...(19): siRNA sense strand
caguguuccuguuauuuau

SEQ ID NO: 1043208 - RNA, 19 nt, Homo sapiens
  misc_RNA (1)...(19): siRNA sense strand
gaagacuggagugguguuu

SEQ ID NO: 1043209 - RNA, 19 nt, Homo sapiens
  misc_RNA (1)...(19): siRNA sense strand
guguuccuguuauuuauga

SEQ ID NO: 1043210 - RNA, 19 nt, Homo sapiens
  misc_RNA (1)...(19): siRNA sense strand
gauuuuggcucucauuuca

SEQ ID NO: 1043211 - RNA, 19 nt, Homo sapiens
  misc_RNA (1)...(19): siRNA sense strand
ucugugaccaucagcuuua

SEQ ID NO: 1043212 - RNA, 19 nt, Homo sapiens
  misc_RNA (1)...(19): siRNA sense strand
acucaggcgccucuucuua

SEQ ID NO: 1043213 - RNA, 19 nt, Homo sapiens
  misc_RNA (1)...(19): siRNA sense strand
cuucaguguuccuguuauu

SEQ ID NO: 1043214 - RNA, 19 nt, Homo sapiens
  misc_RNA (1)...(19): siRNA sense strand
aucuaggacuugcaaauaa

SEQ ID NO: 1043215 - RNA, 19 nt, Homo sapiens
  misc_RNA (1)...(19): siRNA sense strand
auacaagggugugauccaa

SEQ ID NO: 1043216 - RNA, 19 nt, Homo sapiens
  misc_RNA (1)...(19): siRNA sense strand
ucugaaguuugcaguguug

SEQ ID NO: 1043217 - RNA, 19 nt, Homo sapiens
  misc_RNA (1)...(19): siRNA sense strand
uccaagcuauccagaaauc

SEQ ID NO: 1043218 - RNA, 19 nt, Homo sapiens
  misc_RNA (1)...(19): siRNA sense strand
gauauacaagggugugauc

SEQ ID NO: 1043219 - RNA, 19 nt, Homo sapiens
  misc_RNA (1)...(19): siRNA sense strand
agacuggagugguguuugg

SEQ ID NO: 1043220 - RNA, 19 nt, Homo sapiens
  misc_RNA (1)...(19): siRNA sense strand
aggcgccucuucuuaguug

SEQ ID NO: 1043221 - RNA, 19 nt, Homo sapiens
  misc_RNA (1)...(19): siRNA sense strand
uacaguaauucugcucuug

SEQ ID NO: 1043222 - RNA, 19 nt, Homo sapiens
  misc_RNA (1)...(19): siRNA sense strand
uuaauggucugacacuacu

SEQ ID NO: 1043223 - RNA, 19 nt, Homo sapiens
  misc_RNA (1)...(19): siRNA sense strand
gaaucugaaguugcuauau

SEQ ID NO: 1043224 - RNA, 19 nt, Homo sapiens
  misc_RNA (1)...(19): siRNA sense strand
gaucauuaucuaggacuug

SEQ ID NO: 1043225 - RNA, 19 nt, Homo sapiens
  misc_RNA (1)...(19): siRNA sense strand
ucaggcgccucuucuuagu

SEQ ID NO: 1043226 - RNA, 19 nt, Homo sapiens
  misc_RNA (1)...(19): siRNA sense strand
ugcuauaucugaggaguug

SEQ ID NO: 1043227 - RNA, 19 nt, Homo sapiens
  misc_RNA (1)...(19): siRNA sense strand
ccaucagcuuuaggauaua

SEQ ID NO: 1043228 - RNA, 19 nt, Homo sapiens
  misc_RNA (1)...(19): siRNA sense strand
ucuaggacuugcaaauaag

SEQ ID NO: 1043229 - RNA, 19 nt, Homo sapiens
  misc_RNA (1)...(19): siRNA sense strand
uauguuggugccuuguuua

SEQ ID NO: 1043230 - RNA, 19 nt, Homo sapiens
  misc_RNA (1)...(19): siRNA sense strand
ucucugaaguuugcagugu

SEQ ID NO: 1043231 - RNA, 19 nt, Homo sapiens
  misc_RNA (1)...(19): siRNA sense strand
cagaugaaggccacccauu

SEQ ID NO: 1043232 - RNA, 19 nt, Homo sapiens
  misc_RNA (1)...(19): siRNA sense strand
ucaugugaacugcacgaua

SEQ ID NO: 1043233 - RNA, 19 nt, Homo sapiens
  misc_RNA (1)...(19): siRNA sense strand
uaucugaggaguugguuca

SEQ ID NO: 1043234 - RNA, 19 nt, Homo sapiens
  misc_RNA (1)...(19): siRNA sense strand
guuuaauggucugacacua

SEQ ID NO: 1043235 - RNA, 19 nt, Homo sapiens
  misc_RNA (1)...(19): siRNA sense strand
ggaacucaggcgccucuuc

SEQ ID NO: 1043236 - RNA, 19 nt, Homo sapiens
  misc_RNA (1)...(19): siRNA sense strand
ugacaguauucagcauugu

SEQ ID NO: 1043237 - RNA, 19 nt, Homo sapiens
  misc_RNA (1)...(19): siRNA sense strand
guacuggagagacauuaag

SEQ ID NO: 1043238 - RNA, 19 nt, Homo sapiens
  misc_RNA (1)...(19): siRNA sense strand
cugcuuucauugacaguau

SEQ ID NO: 1043239 - RNA, 19 nt, Homo sapiens
  misc_RNA (1)...(19): siRNA sense strand
ugaacugcacgauaaagga

SEQ ID NO: 1043240 - RNA, 19 nt, Homo sapiens
  misc_RNA (1)...(19): siRNA sense strand
caucagcuuuaggauauac

SEQ ID NO: 1043241 - RNA, 19 nt, Homo sapiens
  misc_RNA (1)...(19): siRNA sense strand
gaauguuaaagaugcuaug

SEQ ID NO: 1043242 - RNA, 19 nt, Homo sapiens
  misc_RNA (1)...(19): siRNA sense strand
uugacaguauucagcauug

SEQ ID NO: 1043243 - RNA, 19 nt, Homo sapiens
  misc_RNA (1)...(19): siRNA sense strand
agaugaaggccacccauuc

SEQ ID NO: 1043244 - RNA, 19 nt, Homo sapiens
  misc_RNA (1)...(19): siRNA sense strand
gaacggcaucaggcacaga

SEQ ID NO: 1043245 - RNA, 19 nt, Homo sapiens
  misc_RNA (1)...(19): siRNA sense strand
gccuauuccugcugcuuuc

SEQ ID NO: 1043246 - RNA, 19 nt, Homo sapiens
  misc_RNA (1)...(19): siRNA sense strand
ucuggaaucugaaguugcu

SEQ ID NO: 1043247 - RNA, 19 nt, Homo sapiens
  misc_RNA (1)...(19): siRNA sense strand
acucuucaguguuccuguu

SEQ ID NO: 1043248 - RNA, 19 nt, Homo sapiens
  misc_RNA (1)...(19): siRNA sense strand
uggagagacauuaagaaga

SEQ ID NO: 1043249 - RNA, 19 nt, Homo sapiens
  misc_RNA (1)...(19): siRNA sense strand
caguaauucugcucuuggu

SEQ ID NO: 1043250 - RNA, 19 nt, Homo sapiens
  misc_RNA (1)...(19): siRNA sense strand
uauuccugcugcuuucauu

SEQ ID NO: 1043251 - RNA, 19 nt, Homo sapiens
  misc_RNA (1)...(19): siRNA sense strand
acaguauucagcauuguga

SEQ ID NO: 1043252 - RNA, 19 nt, Homo sapiens
  misc_RNA (1)...(19): siRNA sense strand
ggcaucaggcacagauaga

SEQ ID NO: 1043253 - RNA, 19 nt, Homo sapiens
  misc_RNA (1)...(19): siRNA sense strand
gcaguguugauguggguau

SEQ ID NO: 1043254 - RNA, 19 nt, Homo sapiens
  misc_RNA (1)...(19): siRNA sense strand
uugauucucugaaguuugc

SEQ ID NO: 1043255 - RNA, 19 nt, Homo sapiens
  misc_RNA (1)...(19): siRNA sense strand
uuaguugauucucugaagu

SEQ ID NO: 1043256 - RNA, 19 nt, Homo sapiens
  misc_RNA (1)...(19): siRNA sense strand
gggcauaucuggaaucuga

SEQ ID NO: 1043257 - RNA, 19 nt, Homo sapiens
  misc_RNA (1)...(19): siRNA sense strand
gauccaagcuauccagaaa

SEQ ID NO: 1043258 - RNA, 19 nt, Homo sapiens
  misc_RNA (1)...(19): siRNA sense strand
caugugaacugcacgauaa

SEQ ID NO: 1043259 - RNA, 19 nt, Homo sapiens
  misc_RNA (1)...(19): siRNA sense strand
guucagaaguacaguaauu

SEQ ID NO: 1043260 - RNA, 19 nt, Homo sapiens
  misc_RNA (1)...(19): siRNA sense strand
ggagagacauuaagaagac

SEQ ID NO: 1043261 - RNA, 19 nt, Homo sapiens
  misc_RNA (1)...(19): siRNA sense strand
aggcacagauagaucauua

SEQ ID NO: 1043262 - RNA, 19 nt, Homo sapiens
  misc_RNA (1)...(19): siRNA sense strand
gagcguaacagccuacauu

SEQ ID NO: 1043263 - RNA, 19 nt, Homo sapiens
  misc_RNA (1)...(19): siRNA sense strand
ggucugacacuacugauuu

SEQ ID NO: 1043264 - RNA, 19 nt, Homo sapiens
  misc_RNA (1)...(19): siRNA sense strand
gaacugcacgauaaaggaa

SEQ ID NO: 1043265 - RNA, 19 nt, Homo sapiens
  misc_RNA (1)...(19): siRNA sense strand
gaccaucagcuuuaggaua

SEQ ID NO: 1043266 - RNA, 19 nt, Homo sapiens
  misc_RNA (1)...(19): siRNA sense strand
uuaaagaugcuauggcuaa

SEQ ID NO: 1043267 - RNA, 19 nt, Homo sapiens
  misc_RNA (1)...(19): siRNA sense strand
guuggugccuuguuuaaug

SEQ ID NO: 1043268 - RNA, 19 nt, Homo sapiens
  misc_RNA (1)...(19): siRNA sense strand
ucaguguuccuguuauuua

SEQ ID NO: 1043269 - RNA, 19 nt, Homo sapiens
  misc_RNA (1)...(19): siRNA sense strand
uaaagaugcuauggcuaaa

SEQ ID NO: 1043270 - RNA, 19 nt, Homo sapiens
  misc_RNA (1)...(19): siRNA sense strand
guguugauguggguauuua

SEQ ID NO: 1043271 - RNA, 19 nt, Homo sapiens
  misc_RNA (1)...(19): siRNA sense strand
guacaguaauucugcucuu

SEQ ID NO: 1043272 - RNA, 19 nt, Homo sapiens
  misc_RNA (1)...(19): siRNA sense strand
uaucuaggacuugcaaaua

SEQ ID NO: 1043273 - RNA, 19 nt, Homo sapiens
  misc_RNA (1)...(19): siRNA sense strand
gaagcgcaaagcugaauga

SEQ ID NO: 1043274 - RNA, 19 nt, Homo sapiens
  misc_RNA (1)...(19): siRNA sense strand
ggaaucugaaguugcuaua

SEQ ID NO: 1043275 - RNA, 19 nt, Homo sapiens
  misc_RNA (1)...(19): siRNA sense strand
accaucagcuuuaggauau

SEQ ID NO: 1043276 - RNA, 19 nt, Homo sapiens
  misc_RNA (1)...(19): siRNA sense strand
gaacucaggcgccucuucu

SEQ ID NO: 1043277 - RNA, 19 nt, Homo sapiens
  misc_RNA (1)...(19): siRNA sense strand
aaucugaaguugcuauauc

SEQ ID NO: 1043278 - RNA, 19 nt, Homo sapiens
  misc_RNA (1)...(19): siRNA sense strand
aggaguugguucagaagua

SEQ ID NO: 1043279 - RNA, 19 nt, Homo sapiens
  misc_RNA (1)...(19): siRNA sense strand
gaaguuugcaguguugaug

SEQ ID NO: 1043280 - RNA, 19 nt, Homo sapiens
  misc_RNA (1)...(19): siRNA sense strand
cuauguuggugccuuguuu

SEQ ID NO: 1043281 - RNA, 19 nt, Homo sapiens
  misc_RNA (1)...(19): siRNA sense strand
ggaguugguucagaaguac

SEQ ID NO: 1043282 - RNA, 19 nt, Homo sapiens
  misc_RNA (1)...(19): siRNA sense strand
ggacuugcaaauaagaaug

SEQ ID NO: 1043283 - RNA, 19 nt, Homo sapiens
  misc_RNA (1)...(19): siRNA sense strand
gcucucauuucacucuuca

SEQ ID NO: 1043284 - RNA, 19 nt, Homo sapiens
  misc_RNA (1)...(19): siRNA sense strand
uaucuggaaucugaaguug

SEQ ID NO: 1043285 - RNA, 19 nt, Homo sapiens
  misc_RNA (1)...(19): siRNA sense strand
caguguuccuguuauuuau

SEQ ID NO: 1043286 - RNA, 19 nt, Homo sapiens
  misc_RNA (1)...(19): siRNA sense strand
gaagacuggagugguguuu

SEQ ID NO: 1043287 - RNA, 19 nt, Homo sapiens
  misc_RNA (1)...(19): siRNA sense strand
guguuccuguuauuuauga

SEQ ID NO: 1043288 - RNA, 19 nt, Homo sapiens
  misc_RNA (1)...(19): siRNA sense strand
gauuuuggcucucauuuca

SEQ ID NO: 1043289 - RNA, 19 nt, Homo sapiens
  misc_RNA (1)...(19): siRNA sense strand
ucugugaccaucagcuuua

SEQ ID NO: 1043290 - RNA, 19 nt, Homo sapiens
  misc_RNA (1)...(19): siRNA sense strand
acucaggcgccucuucuua

SEQ ID NO: 1043291 - RNA, 19 nt, Homo sapiens
  misc_RNA (1)...(19): siRNA sense strand
cuucaguguuccuguuauu

SEQ ID NO: 1043292 - RNA, 19 nt, Homo sapiens
  misc_RNA (1)...(19): siRNA sense strand
aucuaggacuugcaaauaa

SEQ ID NO: 1043293 - RNA, 19 nt, Homo sapiens
  misc_RNA (1)...(19): siRNA sense strand
auacaagggugugauccaa

SEQ ID NO: 1043294 - RNA, 19 nt, Homo sapiens
  misc_RNA (1)...(19): siRNA sense strand
ucugaaguuugcaguguug

SEQ ID NO: 1043295 - RNA, 19 nt, Homo sapiens
  misc_RNA (1)...(19): siRNA sense strand
uccaagcuauccagaaauc

SEQ ID NO: 1043296 - RNA, 19 nt, Homo sapiens
  misc_RNA (1)...(19): siRNA sense strand
gauauacaagggugugauc

SEQ ID NO: 1043297 - RNA, 19 nt, Homo sapiens
  misc_RNA (1)...(19): siRNA sense strand
agacuggagugguguuugg

SEQ ID NO: 1043298 - RNA, 19 nt, Homo sapiens
  misc_RNA (1)...(19): siRNA sense strand
aggcgccucuucuuaguug

SEQ ID NO: 1043299 - RNA, 19 nt, Homo sapiens
  misc_RNA (1)...(19): siRNA sense strand
uacaguaauucugcucuug

SEQ ID NO: 1043300 - RNA, 19 nt, Homo sapiens
  misc_RNA (1)...(19): siRNA sense strand
uuaauggucugacacuacu

SEQ ID NO: 1043301 - RNA, 19 nt, Homo sapiens
  misc_RNA (1)...(19): siRNA sense strand
gaaucugaaguugcuauau

SEQ ID NO: 1043302 - RNA, 19 nt, Homo sapiens
  misc_RNA (1)...(19): siRNA sense strand
gaucauuaucuaggacuug

SEQ ID NO: 1043303 - RNA, 19 nt, Homo sapiens
  misc_RNA (1)...(19): siRNA sense strand
ucaggcgccucuucuuagu

SEQ ID NO: 1043304 - RNA, 19 nt, Homo sapiens
  misc_RNA (1)...(19): siRNA sense strand
ugcuauaucugaggaguug

SEQ ID NO: 1043305 - RNA, 19 nt, Homo sapiens
  misc_RNA (1)...(19): siRNA sense strand
ccaucagcuuuaggauaua

SEQ ID NO: 1043306 - RNA, 19 nt, Homo sapiens
  misc_RNA (1)...(19): siRNA sense strand
ucuaggacuugcaaauaag

SEQ ID NO: 1043307 - RNA, 19 nt, Homo sapiens
  misc_RNA (1)...(19): siRNA sense strand
uauguuggugccuuguuua

SEQ ID NO: 1043308 - RNA, 19 nt, Homo sapiens
  misc_RNA (1)...(19): siRNA sense strand
ucucugaaguuugcagugu

SEQ ID NO: 1043309 - RNA, 19 nt, Homo sapiens
  misc_RNA (1)...(19): siRNA sense strand
cagaugaaggccacccauu

SEQ ID NO: 1043310 - RNA, 19 nt, Homo sapiens
  misc_RNA (1)...(19): siRNA sense strand
ucaugugaacugcacgaua

SEQ ID NO: 1043311 - RNA, 19 nt, Homo sapiens
  misc_RNA (1)...(19): siRNA sense strand
uaucugaggaguugguuca

SEQ ID NO: 1043312 - RNA, 19 nt, Homo sapiens
  misc_RNA (1)...(19): siRNA sense strand
guuuaauggucugacacua

SEQ ID NO: 1043313 - RNA, 19 nt, Homo sapiens
  misc_RNA (1)...(19): siRNA sense strand
ggaacucaggcgccucuuc

SEQ ID NO: 1043314 - RNA, 19 nt, Homo sapiens
  misc_RNA (1)...(19): siRNA sense strand
ugacaguauucagcauugu

SEQ ID NO: 1043315 - RNA, 19 nt, Homo sapiens
  misc_RNA (1)...(19): siRNA sense strand
guacuggagagacauuaag

SEQ ID NO: 1043316 - RNA, 19 nt, Homo sapiens
  misc_RNA (1)...(19): siRNA sense strand
cugcuuucauugacaguau

SEQ ID NO: 1043317 - RNA, 19 nt, Homo sapiens
  misc_RNA (1)...(19): siRNA sense strand
ugaacugcacgauaaagga

SEQ ID NO: 1043318 - RNA, 19 nt, Homo sapiens
  misc_RNA (1)...(19): siRNA sense strand
caucagcuuuaggauauac

SEQ ID NO: 1043319 - RNA, 19 nt, Homo sapiens
  misc_RNA (1)...(19): siRNA sense strand
gaauguuaaagaugcuaug

SEQ ID NO: 1043320 - RNA, 19 nt, Homo sapiens
  misc_RNA (1)...(19): siRNA sense strand
uugacaguauucagcauug

SEQ ID NO: 1043321 - RNA, 19 nt, Homo sapiens
  misc_RNA (1)...(19): siRNA sense strand
agaugaaggccacccauuc

SEQ ID NO: 1043322 - RNA, 19 nt, Homo sapiens
  misc_RNA (1)...(19): siRNA sense strand
gaacggcaucaggcacaga

SEQ ID NO: 1043323 - RNA, 19 nt, Homo sapiens
  misc_RNA (1)...(19): siRNA sense strand
gccuauuccugcugcuuuc

SEQ ID NO: 1043324 - RNA, 19 nt, Homo sapiens
  misc_RNA (1)...(19): siRNA sense strand
ucuggaaucugaaguugcu

SEQ ID NO: 1043325 - RNA, 19 nt, Homo sapiens
  misc_RNA (1)...(19): siRNA sense strand
acucuucaguguuccuguu

SEQ ID NO: 1043326 - RNA, 19 nt, Homo sapiens
  misc_RNA (1)...(19): siRNA sense strand
uggagagacauuaagaaga

SEQ ID NO: 1043327 - RNA, 19 nt, Homo sapiens
  misc_RNA (1)...(19): siRNA sense strand
caguaauucugcucuuggu

SEQ ID NO: 1043328 - RNA, 19 nt, Homo sapiens
  misc_RNA (1)...(19): siRNA sense strand
uauuccugcugcuuucauu

SEQ ID NO: 1043329 - RNA, 19 nt, Homo sapiens
  misc_RNA (1)...(19): siRNA sense strand
acaguauucagcauuguga

SEQ ID NO: 1043330 - RNA, 19 nt, Homo sapiens
  misc_RNA (1)...(19): siRNA sense strand
ggcaucaggcacagauaga

SEQ ID NO: 1043331 - RNA, 19 nt, Homo sapiens
  misc_RNA (1)...(19): siRNA sense strand
gcaguguugauguggguau

SEQ ID NO: 1043332 - RNA, 19 nt, Homo sapiens
  misc_RNA (1)...(19): siRNA sense strand
uugauucucugaaguuugc

SEQ ID NO: 1043333 - RNA, 19 nt, Homo sapiens
  misc_RNA (1)...(19): siRNA sense strand
uuaguugauucucugaagu

SEQ ID NO: 1043334 - RNA, 19 nt, Homo sapiens
  misc_RNA (1)...(19): siRNA sense strand
gggcauaucuggaaucuga

SEQ ID NO: 1043335 - RNA, 19 nt, Homo sapiens
  misc_RNA (1)...(19): siRNA sense strand
gauccaagcuauccagaaa

SEQ ID NO: 1043336 - RNA, 19 nt, Homo sapiens
  misc_RNA (1)...(19): siRNA sense strand
caugugaacugcacgauaa

SEQ ID NO: 1043337 - RNA, 19 nt, Homo sapiens
  misc_RNA (1)...(19): siRNA sense strand
guucagaaguacaguaauu

SEQ ID NO: 1043338 - RNA, 19 nt, Homo sapiens
  misc_RNA (1)...(19): siRNA sense strand
ggagagacauuaagaagac

SEQ ID NO: 1043339 - RNA, 19 nt, Homo sapiens
  misc_RNA (1)...(19): siRNA sense strand
aggcacagauagaucauua

SEQ ID NO: 1043340 - RNA, 19 nt, Homo sapiens
  misc_RNA (1)...(19): siRNA sense strand
gagcguaacagccuacauu

SEQ ID NO: 1043341 - RNA, 19 nt, Homo sapiens
  misc_RNA (1)...(19): siRNA sense strand
ggucugacacuacugauuu

SEQ ID NO: 1043342 - RNA, 19 nt, Homo sapiens
  misc_RNA (1)...(19): siRNA sense strand
gaacugcacgauaaaggaa

SEQ ID NO: 1043343 - RNA, 19 nt, Homo sapiens
  misc_RNA (1)...(19): siRNA sense strand
gaccaucagcuuuaggaua

SEQ ID NO: 1043344 - RNA, 19 nt, Homo sapiens
  misc_RNA (1)...(19): siRNA sense strand
uuaaagaugcuauggcuaa

SEQ ID NO: 1043345 - RNA, 19 nt, Homo sapiens
  misc_RNA (1)...(19): siRNA sense strand
guuggugccuuguuuaaug

SEQ ID NO: 1043346 - RNA, 19 nt, Homo sapiens
  misc_RNA (1)...(19): siRNA sense strand
ucaguguuccuguuauuua

SEQ ID NO: 1043347 - RNA, 19 nt, Homo sapiens
  misc_RNA (1)...(19): siRNA sense strand
uaaagaugcuauggcuaaa

SEQ ID NO: 1043348 - RNA, 19 nt, Homo sapiens
  misc_RNA (1)...(19): siRNA sense strand
guguugauguggguauuua

SEQ ID NO: 1043349 - RNA, 19 nt, Homo sapiens
  misc_RNA (1)...(19): siRNA sense strand
guacaguaauucugcucuu

SEQ ID NO: 1043350 - RNA, 19 nt, Homo sapiens
  misc_RNA (1)...(19): siRNA sense strand
uaucuaggacuugcaaaua

SEQ ID NO: 1043351 - RNA, 19 nt, Homo sapiens
  misc_RNA (1)...(19): siRNA sense strand
gaagcgcaaagcugaauga

SEQ ID NO: 1043352 - RNA, 19 nt, Homo sapiens
  misc_RNA (1)...(19): siRNA sense strand
ggaaucugaaguugcuaua

SEQ ID NO: 1043353 - RNA, 19 nt, Homo sapiens
  misc_RNA (1)...(19): siRNA sense strand
accaucagcuuuaggauau

SEQ ID NO: 1043354 - RNA, 19 nt, Homo sapiens
  misc_RNA (1)...(19): siRNA sense strand
gaacucaggcgccucuucu

SEQ ID NO: 1043355 - RNA, 19 nt, Homo sapiens
  misc_RNA (1)...(19): siRNA sense strand
aaucugaaguugcuauauc

SEQ ID NO: 1043356 - RNA, 19 nt, Homo sapiens
  misc_RNA (1)...(19): siRNA sense strand
aggaguugguucagaagua

SEQ ID NO: 1043357 - RNA, 19 nt, Homo sapiens
  misc_RNA (1)...(19): siRNA sense strand
gaaguuugcaguguugaug

SEQ ID NO: 1043358 - RNA, 19 nt, Homo sapiens
  misc_RNA (1)...(19): siRNA sense strand
cuauguuggugccuuguuu

SEQ ID NO: 1043359 - RNA, 19 nt, Homo sapiens
  misc_RNA (1)...(19): siRNA sense strand
ggaguugguucagaaguac

SEQ ID NO: 1043360 - RNA, 19 nt, Homo sapiens
  misc_RNA (1)...(19): siRNA sense strand
ggacuugcaaauaagaaug

SEQ ID NO: 1043361 - RNA, 19 nt, Homo sapiens
  misc_RNA (1)...(19): siRNA sense strand
gcucucauuucacucuuca

SEQ ID NO: 1043362 - RNA, 19 nt, Homo sapiens
  misc_RNA (1)...(19): siRNA sense strand
uaucuggaaucugaaguug

SEQ ID NO: 1043363 - RNA, 19 nt, Homo sapiens
  misc_RNA (1)...(19): siRNA sense strand
caguguuccuguuauuuau

SEQ ID NO: 1043364 - RNA, 19 nt, Homo sapiens
  misc_RNA (1)...(19): siRNA sense strand
gaagacuggagugguguuu

SEQ ID NO: 1043365 - RNA, 19 nt, Homo sapiens
  misc_RNA (1)...(19): siRNA sense strand
guguuccuguuauuuauga

SEQ ID NO: 1043366 - RNA, 19 nt, Homo sapiens
  misc_RNA (1)...(19): siRNA sense strand
gauuuuggcucucauuuca

SEQ ID NO: 1043367 - RNA, 19 nt, Homo sapiens
  misc_RNA (1)...(19): siRNA sense strand
ucugugaccaucagcuuua

SEQ ID NO: 1043368 - RNA, 19 nt, Homo sapiens
  misc_RNA (1)...(19): siRNA sense strand
acucaggcgccucuucuua

SEQ ID NO: 1043369 - RNA, 19 nt, Homo sapiens
  misc_RNA (1)...(19): siRNA sense strand
cuucaguguuccuguuauu

SEQ ID NO: 1043370 - RNA, 19 nt, Homo sapiens
  misc_RNA (1)...(19): siRNA sense strand
aucuaggacuugcaaauaa

SEQ ID NO: 1043371 - RNA, 19 nt, Homo sapiens
  misc_RNA (1)...(19): siRNA sense strand
auacaagggugugauccaa

SEQ ID NO: 1043372 - RNA, 19 nt, Homo sapiens
  misc_RNA (1)...(19): siRNA sense strand
ucugaaguuugcaguguug

SEQ ID NO: 1043373 - RNA, 19 nt, Homo sapiens
  misc_RNA (1)...(19): siRNA sense strand
uccaagcuauccagaaauc

SEQ ID NO: 1043374 - RNA, 19 nt, Homo sapiens
  misc_RNA (1)...(19): siRNA sense strand
gauauacaagggugugauc

SEQ ID NO: 1043375 - RNA, 19 nt, Homo sapiens
  misc_RNA (1)...(19): siRNA sense strand
agacuggagugguguuugg

SEQ ID NO: 1043376 - RNA, 19 nt, Homo sapiens
  misc_RNA (1)...(19): siRNA sense strand
aggcgccucuucuuaguug

SEQ ID NO: 1043377 - RNA, 19 nt, Homo sapiens
  misc_RNA (1)...(19): siRNA sense strand
uacaguaauucugcucuug

SEQ ID NO: 1043378 - RNA, 19 nt, Homo sapiens
  misc_RNA (1)...(19): siRNA sense strand
uuaauggucugacacuacu

SEQ ID NO: 1043379 - RNA, 19 nt, Homo sapiens
  misc_RNA (1)...(19): siRNA sense strand
gaaucugaaguugcuauau

SEQ ID NO: 1043380 - RNA, 19 nt, Homo sapiens
  misc_RNA (1)...(19): siRNA sense strand
gaucauuaucuaggacuug

SEQ ID NO: 1043381 - RNA, 19 nt, Homo sapiens
  misc_RNA (1)...(19): siRNA sense strand
ucaggcgccucuucuuagu

SEQ ID NO: 1043382 - RNA, 19 nt, Homo sapiens
  misc_RNA (1)...(19): siRNA sense strand
ugcuauaucugaggaguug

SEQ ID NO: 1043383 - RNA, 19 nt, Homo sapiens
  misc_RNA (1)...(19): siRNA sense strand
ccaucagcuuuaggauaua

SEQ ID NO: 1043384 - RNA, 19 nt, Homo sapiens
  misc_RNA (1)...(19): siRNA sense strand
ucuaggacuugcaaauaag

SEQ ID NO: 1043385 - RNA, 19 nt, Homo sapiens
  misc_RNA (1)...(19): siRNA sense strand
uauguuggugccuuguuua

SEQ ID NO: 1043386 - RNA, 19 nt, Homo sapiens
  misc_RNA (1)...(19): siRNA sense strand
ucucugaaguuugcagugu

SEQ ID NO: 1043387 - RNA, 19 nt, Homo sapiens
  misc_RNA (1)...(19): siRNA sense strand
cagaugaaggccacccauu

SEQ ID NO: 1043388 - RNA, 19 nt, Homo sapiens
  misc_RNA (1)...(19): siRNA sense strand
ucaugugaacugcacgaua

SEQ ID NO: 1043389 - RNA, 19 nt, Homo sapiens
  misc_RNA (1)...(19): siRNA sense strand
uaucugaggaguugguuca

SEQ ID NO: 1043390 - RNA, 19 nt, Homo sapiens
  misc_RNA (1)...(19): siRNA sense strand
guuuaauggucugacacua

SEQ ID NO: 1043391 - RNA, 19 nt, Homo sapiens
  misc_RNA (1)...(19): siRNA sense strand
ggaacucaggcgccucuuc

SEQ ID NO: 1043392 - RNA, 19 nt, Homo sapiens
  misc_RNA (1)...(19): siRNA sense strand
ugacaguauucagcauugu

SEQ ID NO: 1043393 - RNA, 19 nt, Homo sapiens
  misc_RNA (1)...(19): siRNA sense strand
guacuggagagacauuaag

SEQ ID NO: 1043394 - RNA, 19 nt, Homo sapiens
  misc_RNA (1)...(19): siRNA sense strand
cugcuuucauugacaguau

SEQ ID NO: 1043395 - RNA, 19 nt, Homo sapiens
  misc_RNA (1)...(19): siRNA sense strand
ugaacugcacgauaaagga

SEQ ID NO: 1043396 - RNA, 19 nt, Homo sapiens
  misc_RNA (1)...(19): siRNA sense strand
caucagcuuuaggauauac

SEQ ID NO: 1043397 - RNA, 19 nt, Homo sapiens
  misc_RNA (1)...(19): siRNA sense strand
gaauguuaaagaugcuaug

SEQ ID NO: 1043398 - RNA, 19 nt, Homo sapiens
  misc_RNA (1)...(19): siRNA sense strand
uugacaguauucagcauug

SEQ ID NO: 1043399 - RNA, 19 nt, Homo sapiens
  misc_RNA (1)...(19): siRNA sense strand
agaugaaggccacccauuc

SEQ ID NO: 1043400 - RNA, 19 nt, Homo sapiens
  misc_RNA (1)...(19): siRNA sense strand
gaacggcaucaggcacaga

SEQ ID NO: 1043401 - RNA, 19 nt, Homo sapiens
  misc_RNA (1)...(19): siRNA sense strand
gccuauuccugcugcuuuc

SEQ ID NO: 1043402 - RNA, 19 nt, Homo sapiens
  misc_RNA (1)...(19): siRNA sense strand
ucuggaaucugaaguugcu

SEQ ID NO: 1043403 - RNA, 19 nt, Homo sapiens
  misc_RNA (1)...(19): siRNA sense strand
acucuucaguguuccuguu

SEQ ID NO: 1043404 - RNA, 19 nt, Homo sapiens
  misc_RNA (1)...(19): siRNA sense strand
uggagagacauuaagaaga

SEQ ID NO: 1043405 - RNA, 19 nt, Homo sapiens
  misc_RNA (1)...(19): siRNA sense strand
caguaauucugcucuuggu

SEQ ID NO: 1043406 - RNA, 19 nt, Homo sapiens
  misc_RNA (1)...(19): siRNA sense strand
uauuccugcugcuuucauu

SEQ ID NO: 1043407 - RNA, 19 nt, Homo sapiens
  misc_RNA (1)...(19): siRNA sense strand
acaguauucagcauuguga

SEQ ID NO: 1043408 - RNA, 19 nt, Homo sapiens
  misc_RNA (1)...(19): siRNA sense strand
ggcaucaggcacagauaga

SEQ ID NO: 1043409 - RNA, 19 nt, Homo sapiens
  misc_RNA (1)...(19): siRNA sense strand
gcaguguugauguggguau

SEQ ID NO: 1043410 - RNA, 19 nt, Homo sapiens
  misc_RNA (1)...(19): siRNA sense strand
uugauucucugaaguuugc

SEQ ID NO: 1043411 - RNA, 19 nt, Homo sapiens
  misc_RNA (1)...(19): siRNA sense strand
uuaguugauucucugaagu

SEQ ID NO: 1043412 - RNA, 19 nt, Homo sapiens
  misc_RNA (1)...(19): siRNA sense strand
gggaguauauuaccaaauu

SEQ ID NO: 1043413 - RNA, 19 nt, Homo sapiens
  misc_RNA (1)...(19): siRNA sense strand
caucaaagcuccugaguca

SEQ ID NO: 1043414 - RNA, 19 nt, Homo sapiens
  misc_RNA (1)...(19): siRNA sense strand
caaggaagauggaauacuu

SEQ ID NO: 1043415 - RNA, 19 nt, Homo sapiens
  misc_RNA (1)...(19): siRNA sense strand
gggagaagacauauauuua

SEQ ID NO: 1043416 - RNA, 19 nt, Homo sapiens
  misc_RNA (1)...(19): siRNA sense strand
gcacugacguggcucauuc

SEQ ID NO: 1043417 - RNA, 19 nt, Homo sapiens
  misc_RNA (1)...(19): siRNA sense strand
gagaagggcuacauaugga

SEQ ID NO: 1043418 - RNA, 19 nt, Homo sapiens
  misc_RNA (1)...(19): siRNA sense strand
uauaaucacugcagaauca

SEQ ID NO: 1043419 - RNA, 19 nt, Homo sapiens
  misc_RNA (1)...(19): siRNA sense strand
gagauccucugccaucauu

SEQ ID NO: 1043420 - RNA, 19 nt, Homo sapiens
  misc_RNA (1)...(19): siRNA sense strand
gaagauggaauacuuggaa

SEQ ID NO: 1043421 - RNA, 19 nt, Homo sapiens
  misc_RNA (1)...(19): siRNA sense strand
gaaagucuccaccaaagga

SEQ ID NO: 1043422 - RNA, 19 nt, Homo sapiens
  misc_RNA (1)...(19): siRNA sense strand
cuacuaugcucaaaucaga

SEQ ID NO: 1043423 - RNA, 19 nt, Homo sapiens
  misc_RNA (1)...(19): siRNA sense strand
gauggaauacuuggaauuu

SEQ ID NO: 1043424 - RNA, 19 nt, Homo sapiens
  misc_RNA (1)...(19): siRNA sense strand
ugagucaguuuccacuaua

SEQ ID NO: 1043425 - RNA, 19 nt, Homo sapiens
  misc_RNA (1)...(19): siRNA sense strand
ggaguauauuaccaaauug

SEQ ID NO: 1043426 - RNA, 19 nt, Homo sapiens
  misc_RNA (1)...(19): siRNA sense strand
gaucccgccuccuauauca

SEQ ID NO: 1043427 - RNA, 19 nt, Homo sapiens
  misc_RNA (1)...(19): siRNA sense strand
aaagggagaagacauauau

SEQ ID NO: 1043428 - RNA, 19 nt, Homo sapiens
  misc_RNA (1)...(19): siRNA sense strand
ggaaaagggagaagacaua

SEQ ID NO: 1043429 - RNA, 19 nt, Homo sapiens
  misc_RNA (1)...(19): siRNA sense strand
ggaauuuguuugucaugca

SEQ ID NO: 1043430 - RNA, 19 nt, Homo sapiens
  misc_RNA (1)...(19): siRNA sense strand
gagucaguuuccacuauaa

SEQ ID NO: 1043431 - RNA, 19 nt, Homo sapiens
  misc_RNA (1)...(19): siRNA sense strand
aaagaaagucuccaccaaa

SEQ ID NO: 1043432 - RNA, 19 nt, Homo sapiens
  misc_RNA (1)...(19): siRNA sense strand
ggaccaguauugcgagaag

SEQ ID NO: 1043433 - RNA, 19 nt, Homo sapiens
  misc_RNA (1)...(19): siRNA sense strand
ucaugcaccuucugaguau

SEQ ID NO: 1043434 - RNA, 19 nt, Homo sapiens
  misc_RNA (1)...(19): siRNA sense strand
aagaaagucuccaccaaag

SEQ ID NO: 1043435 - RNA, 19 nt, Homo sapiens
  misc_RNA (1)...(19): siRNA sense strand
uggaauacuuggaauuugu

SEQ ID NO: 1043436 - RNA, 19 nt, Homo sapiens
  misc_RNA (1)...(19): siRNA sense strand
gcucagaaacacuaaauac

SEQ ID NO: 1043437 - RNA, 19 nt, Homo sapiens
  misc_RNA (1)...(19): siRNA sense strand
gauguuguuucugugauug

SEQ ID NO: 1043438 - RNA, 19 nt, Homo sapiens
  misc_RNA (1)...(19): siRNA sense strand
ggaauacuuggaauuuguu

SEQ ID NO: 1043439 - RNA, 19 nt, Homo sapiens
  misc_RNA (1)...(19): siRNA sense strand
ucuacaagggaguauauua

SEQ ID NO: 1043440 - RNA, 19 nt, Homo sapiens
  misc_RNA (1)...(19): siRNA sense strand
ccagagaagggcuacauau

SEQ ID NO: 1043441 - RNA, 19 nt, Homo sapiens
  misc_RNA (1)...(19): siRNA sense strand
gcccuacuaugcucaaauc

SEQ ID NO: 1043442 - RNA, 19 nt, Homo sapiens
  misc_RNA (1)...(19): siRNA sense strand
agaguaagcaggaaauuca

SEQ ID NO: 1043443 - RNA, 19 nt, Homo sapiens
  misc_RNA (1)...(19): siRNA sense strand
uaucauagggccagaggaa

SEQ ID NO: 1043444 - RNA, 19 nt, Homo sapiens
  misc_RNA (1)...(19): siRNA sense strand
gcucaaaucagagguuuua

SEQ ID NO: 1043445 - RNA, 19 nt, Homo sapiens
  misc_RNA (1)...(19): siRNA sense strand
caagggaguauauuaccaa

SEQ ID NO: 1043446 - RNA, 19 nt, Homo sapiens
  misc_RNA (1)...(19): siRNA sense strand
gcucggcucagaaacacua

SEQ ID NO: 1043447 - RNA, 19 nt, Homo sapiens
  misc_RNA (1)...(19): siRNA sense strand
cagagaagggcuacauaug

SEQ ID NO: 1043448 - RNA, 19 nt, Homo sapiens
  misc_RNA (1)...(19): siRNA sense strand
gauggaaagcccuacuaug

SEQ ID NO: 1043449 - RNA, 19 nt, Homo sapiens
  misc_RNA (1)...(19): siRNA sense strand
ucacggucaucaccauuuc

SEQ ID NO: 1043450 - RNA, 19 nt, Homo sapiens
  misc_RNA (1)...(19): siRNA sense strand
agggagaagacauauauuu

SEQ ID NO: 1043451 - RNA, 19 nt, Homo sapiens
  misc_RNA (1)...(19): siRNA sense strand
gucaugcaccuucugagua

SEQ ID NO: 1043452 - RNA, 19 nt, Homo sapiens
  misc_RNA (1)...(19): siRNA sense strand
gcucauuccuacccucucu

SEQ ID NO: 1043453 - RNA, 19 nt, Homo sapiens
  misc_RNA (1)...(19): siRNA sense strand
caaauuggugauguuguuu

SEQ ID NO: 1043454 - RNA, 19 nt, Homo sapiens
  misc_RNA (1)...(19): siRNA sense strand
ugauguuguuucugugauu

SEQ ID NO: 1043455 - RNA, 19 nt, Homo sapiens
  misc_RNA (1)...(19): siRNA sense strand
ugugauugaugaacaagau

SEQ ID NO: 1043456 - RNA, 19 nt, Homo sapiens
  misc_RNA (1)...(19): siRNA sense strand
ggcuacauauggacucaug

SEQ ID NO: 1043457 - RNA, 19 nt, Homo sapiens
  misc_RNA (1)...(19): siRNA sense strand
gcagaguaagcaggaaauu

SEQ ID NO: 1043458 - RNA, 19 nt, Homo sapiens
  misc_RNA (1)...(19): siRNA sense strand
acaauuaaggaaucaguug

SEQ ID NO: 1043459 - RNA, 19 nt, Homo sapiens
  misc_RNA (1)...(19): siRNA sense strand
aaaagaaagucuccaccaa

SEQ ID NO: 1043460 - RNA, 19 nt, Homo sapiens
  misc_RNA (1)...(19): siRNA sense strand
gggagauccucugccauca

SEQ ID NO: 1043461 - RNA, 19 nt, Homo sapiens
  misc_RNA (1)...(19): siRNA sense strand
agagaagggcuacauaugg

SEQ ID NO: 1043462 - RNA, 19 nt, Homo sapiens
  misc_RNA (1)...(19): siRNA sense strand
cuacaagggaguauauuac

SEQ ID NO: 1043463 - RNA, 19 nt, Homo sapiens
  misc_RNA (1)...(19): siRNA sense strand
cuccugcaauaacaauuaa

SEQ ID NO: 1043464 - RNA, 19 nt, Homo sapiens
  misc_RNA (1)...(19): siRNA sense strand
ggugauguuguuucuguga

SEQ ID NO: 1043465 - RNA, 19 nt, Homo sapiens
  misc_RNA (1)...(19): siRNA sense strand
ucauagggccagaggaaga

SEQ ID NO: 1043466 - RNA, 19 nt, Homo sapiens
  misc_RNA (1)...(19): siRNA sense strand
ggaagauggaauacuugga

SEQ ID NO: 1043467 - RNA, 19 nt, Homo sapiens
  misc_RNA (1)...(19): siRNA sense strand
ucaguuuccacuauaauca

SEQ ID NO: 1043468 - RNA, 19 nt, Homo sapiens
  misc_RNA (1)...(19): siRNA sense strand
acuccugcaauaacaauua

SEQ ID NO: 1043469 - RNA, 19 nt, Homo sapiens
  misc_RNA (1)...(19): siRNA sense strand
aagggaguauauuaccaaa

SEQ ID NO: 1043470 - RNA, 19 nt, Homo sapiens
  misc_RNA (1)...(19): siRNA sense strand
caucaccauuucccacagu

SEQ ID NO: 1043471 - RNA, 19 nt, Homo sapiens
  misc_RNA (1)...(19): siRNA sense strand
gaccaguauugcgagaaga

SEQ ID NO: 1043472 - RNA, 19 nt, Homo sapiens
  misc_RNA (1)...(19): siRNA sense strand
uuggugauguuguuucugu

SEQ ID NO: 1043473 - RNA, 19 nt, Homo sapiens
  misc_RNA (1)...(19): siRNA sense strand
aagcccaccugcagcguau

SEQ ID NO: 1043474 - RNA, 19 nt, Homo sapiens
  misc_RNA (1)...(19): siRNA sense strand
acaagggaguauauuacca

SEQ ID NO: 1043475 - RNA, 19 nt, Homo sapiens
  misc_RNA (1)...(19): siRNA sense strand
gaaaagggagaagacauau

SEQ ID NO: 1043476 - RNA, 19 nt, Homo sapiens
  misc_RNA (1)...(19): siRNA sense strand
caagcagaguaagcaggaa

SEQ ID NO: 1043477 - RNA, 19 nt, Homo sapiens
  misc_RNA (1)...(19): siRNA sense strand
cagaguaagcaggaaauuc

SEQ ID NO: 1043478 - RNA, 19 nt, Homo sapiens
  misc_RNA (1)...(19): siRNA sense strand
gaccagagaagggcuacau

SEQ ID NO: 1043479 - RNA, 19 nt, Homo sapiens
  misc_RNA (1)...(19): siRNA sense strand
aagauggaauacuuggaau

SEQ ID NO: 1043480 - RNA, 19 nt, Homo sapiens
  misc_RNA (1)...(19): siRNA sense strand
ggagauccucugccaucau

SEQ ID NO: 1043481 - RNA, 19 nt, Homo sapiens
  misc_RNA (1)...(19): siRNA sense strand
ccacgucguccuccaugug

SEQ ID NO: 1043482 - RNA, 19 nt, Homo sapiens
  misc_RNA (1)...(19): siRNA sense strand
aauuugaucccgccuccua

SEQ ID NO: 1043483 - RNA, 19 nt, Homo sapiens
  misc_RNA (1)...(19): siRNA sense strand
ucccgccuccuauaucaua

SEQ ID NO: 1043484 - RNA, 19 nt, Homo sapiens
  misc_RNA (1)...(19): siRNA sense strand
ggauaauaaugccuuguuu

SEQ ID NO: 1043485 - RNA, 19 nt, Homo sapiens
  misc_RNA (1)...(19): siRNA sense strand
gaagagagagugguucaaa

SEQ ID NO: 1043486 - RNA, 19 nt, Homo sapiens
  misc_RNA (1)...(19): siRNA sense strand
ugaggaggcuggagucaaa

SEQ ID NO: 1043487 - RNA, 19 nt, Homo sapiens
  misc_RNA (1)...(19): siRNA sense strand
gggaagauucuguuaauau

SEQ ID NO: 1043488 - RNA, 19 nt, Homo sapiens
  misc_RNA (1)...(19): siRNA sense strand
aguagaagaugcuaucaaa

SEQ ID NO: 1043489 - RNA, 19 nt, Homo sapiens
  misc_RNA (1)...(19): siRNA sense strand
uaucaaaguucuccagugu

SEQ ID NO: 1043490 - RNA, 19 nt, Homo sapiens
  misc_RNA (1)...(19): siRNA sense strand
gagagugguucaaaguaga

SEQ ID NO: 1043491 - RNA, 19 nt, Homo sapiens
  misc_RNA (1)...(19): siRNA sense strand
ucaaaguucuccaguguca

SEQ ID NO: 1043492 - RNA, 19 nt, Homo sapiens
  misc_RNA (1)...(19): siRNA sense strand
agaagaugcuaucaaaguu

SEQ ID NO: 1043493 - RNA, 19 nt, Homo sapiens
  misc_RNA (1)...(19): siRNA sense strand
gagagagugguucaaagua

SEQ ID NO: 1043494 - RNA, 19 nt, Homo sapiens
  misc_RNA (1)...(19): siRNA sense strand
gaaggaagagagagugguu

SEQ ID NO: 1043495 - RNA, 19 nt, Homo sapiens
  misc_RNA (1)...(19): siRNA sense strand
gauaauaaugccuuguuug

SEQ ID NO: 1043496 - RNA, 19 nt, Homo sapiens
  misc_RNA (1)...(19): siRNA sense strand
gaaagcacagaacauaugu

SEQ ID NO: 1043497 - RNA, 19 nt, Homo sapiens
  misc_RNA (1)...(19): siRNA sense strand
ucauaaaccuguacaugca

SEQ ID NO: 1043498 - RNA, 19 nt, Homo sapiens
  misc_RNA (1)...(19): siRNA sense strand
cgaaagcacagaacauaug

SEQ ID NO: 1043499 - RNA, 19 nt, Homo sapiens
  misc_RNA (1)...(19): siRNA sense strand
ggguugccaucuaguguaa

SEQ ID NO: 1043500 - RNA, 19 nt, Homo sapiens
  misc_RNA (1)...(19): siRNA sense strand
gaagaugcuaucaaaguuc

SEQ ID NO: 1043501 - RNA, 19 nt, Homo sapiens
  misc_RNA (1)...(19): siRNA sense strand
aaaguucuccagugucaua

SEQ ID NO: 1043502 - RNA, 19 nt, Homo sapiens
  misc_RNA (1)...(19): siRNA sense strand
caaaguagaagaugcuauc

SEQ ID NO: 1043503 - RNA, 19 nt, Homo sapiens
  misc_RNA (1)...(19): siRNA sense strand
gggcauauuugagaaccaa

SEQ ID NO: 1043504 - RNA, 19 nt, Homo sapiens
  misc_RNA (1)...(19): siRNA sense strand
uagaagaugcuaucaaagu

SEQ ID NO: 1043505 - RNA, 19 nt, Homo sapiens
  misc_RNA (1)...(19): siRNA sense strand
ucccuucccuuccggauaa

SEQ ID NO: 1043506 - RNA, 19 nt, Homo sapiens
  misc_RNA (1)...(19): siRNA sense strand
ugggaagauucuguuaaua

SEQ ID NO: 1043507 - RNA, 19 nt, Homo sapiens
  misc_RNA (1)...(19): siRNA sense strand
agagagugguucaaaguag

SEQ ID NO: 1043508 - RNA, 19 nt, Homo sapiens
  misc_RNA (1)...(19): siRNA sense strand
gauugggaagauucuguua

SEQ ID NO: 1043509 - RNA, 19 nt, Homo sapiens
  misc_RNA (1)...(19): siRNA sense strand
uugggaagauucuguuaau

SEQ ID NO: 1043510 - RNA, 19 nt, Homo sapiens
  misc_RNA (1)...(19): siRNA sense strand
guugccaucuaguguaaga

SEQ ID NO: 1043511 - RNA, 19 nt, Homo sapiens
  misc_RNA (1)...(19): siRNA sense strand
guuaauauuggaaggaaga

SEQ ID NO: 1043512 - RNA, 19 nt, Homo sapiens
  misc_RNA (1)...(19): siRNA sense strand
ccagugucauaaaccugua

SEQ ID NO: 1043513 - RNA, 19 nt, Homo sapiens
  misc_RNA (1)...(19): siRNA sense strand
uuagaagauugggaagauu

SEQ ID NO: 1043514 - RNA, 19 nt, Homo sapiens
  misc_RNA (1)...(19): siRNA sense strand
ccucuggguugccaucuag

SEQ ID NO: 1043515 - RNA, 19 nt, Homo sapiens
  misc_RNA (1)...(19): siRNA sense strand
gcauauuugagaaccaaga

SEQ ID NO: 1043516 - RNA, 19 nt, Homo sapiens
  misc_RNA (1)...(19): siRNA sense strand
uagaagauugggaagauuc

SEQ ID NO: 1043517 - RNA, 19 nt, Homo sapiens
  misc_RNA (1)...(19): siRNA sense strand
aggcuggagucaaaggaaa

SEQ ID NO: 1043518 - RNA, 19 nt, Homo sapiens
  misc_RNA (1)...(19): siRNA sense strand
aagagagagugguucaaag

SEQ ID NO: 1043519 - RNA, 19 nt, Homo sapiens
  misc_RNA (1)...(19): siRNA sense strand
caagaccgaaagcacagaa

SEQ ID NO: 1043520 - RNA, 19 nt, Homo sapiens
  misc_RNA (1)...(19): siRNA sense strand
agacuucugggcauauuug

SEQ ID NO: 1043521 - RNA, 19 nt, Homo sapiens
  misc_RNA (1)...(19): siRNA sense strand
cggauaauaaugccuuguu

SEQ ID NO: 1043522 - RNA, 19 nt, Homo sapiens
  misc_RNA (1)...(19): siRNA sense strand
gaggugcugcuggugagua

SEQ ID NO: 1043523 - RNA, 19 nt, Homo sapiens
  misc_RNA (1)...(19): siRNA sense strand
agagagagugguucaaagu

SEQ ID NO: 1043524 - RNA, 19 nt, Homo sapiens
  misc_RNA (1)...(19): siRNA sense strand
auuagaagauugggaagau

SEQ ID NO: 1043525 - RNA, 19 nt, Homo sapiens
  misc_RNA (1)...(19): siRNA sense strand
ccaauggaaauucuacagu

SEQ ID NO: 1043526 - RNA, 19 nt, Homo sapiens
  misc_RNA (1)...(19): siRNA sense strand
guucuccagugucauaaac

SEQ ID NO: 1043527 - RNA, 19 nt, Homo sapiens
  misc_RNA (1)...(19): siRNA sense strand
cuucugggcauauuugaga

SEQ ID NO: 1043528 - RNA, 19 nt, Homo sapiens
  misc_RNA (1)...(19): siRNA sense strand
gaggcuggagucaaaggaa

SEQ ID NO: 1043529 - RNA, 19 nt, Homo sapiens
  misc_RNA (1)...(19): siRNA sense strand
aagaugcuaucaaaguucu

SEQ ID NO: 1043530 - RNA, 19 nt, Homo sapiens
  misc_RNA (1)...(19): siRNA sense strand
guacccagaccaguggauu

SEQ ID NO: 1043531 - RNA, 19 nt, Homo sapiens
  misc_RNA (1)...(19): siRNA sense strand
ccgaaagcacagaacauau

SEQ ID NO: 1043532 - RNA, 19 nt, Homo sapiens
  misc_RNA (1)...(19): siRNA sense strand
accgaaagcacagaacaua

SEQ ID NO: 1043533 - RNA, 19 nt, Homo sapiens
  misc_RNA (1)...(19): siRNA sense strand
ggaaaacuaggcagacuuc

SEQ ID NO: 1043534 - RNA, 19 nt, Homo sapiens
  misc_RNA (1)...(19): siRNA sense strand
ugucauaaaccuguacaug

SEQ ID NO: 1043535 - RNA, 19 nt, Homo sapiens
  misc_RNA (1)...(19): siRNA sense strand
ggaagagagagugguucaa

SEQ ID NO: 1043536 - RNA, 19 nt, Homo sapiens
  misc_RNA (1)...(19): siRNA sense strand
gaccgaaagcacagaacau

SEQ ID NO: 1043537 - RNA, 19 nt, Homo sapiens
  misc_RNA (1)...(19): siRNA sense strand
guagaagaugcuaucaaag

SEQ ID NO: 1043538 - RNA, 19 nt, Homo sapiens
  misc_RNA (1)...(19): siRNA sense strand
ccacagagcucaccaacaa

SEQ ID NO: 1043539 - RNA, 19 nt, Homo sapiens
  misc_RNA (1)...(19): siRNA sense strand
gaagauggaucgaguaaag

SEQ ID NO: 1043540 - RNA, 19 nt, Homo sapiens
  misc_RNA (1)...(19): siRNA sense strand
aaacauagaugacuggauu

SEQ ID NO: 1043541 - RNA, 19 nt, Homo sapiens
  misc_RNA (1)...(19): siRNA sense strand
gaaagcagauaaggaauug

SEQ ID NO: 1043542 - RNA, 19 nt, Homo sapiens
  misc_RNA (1)...(19): siRNA sense strand
gcccagcaauggcaaauua

SEQ ID NO: 1043543 - RNA, 19 nt, Homo sapiens
  misc_RNA (1)...(19): siRNA sense strand
ucaaauggcuguacucaug

SEQ ID NO: 1043544 - RNA, 19 nt, Homo sapiens
  misc_RNA (1)...(19): siRNA sense strand
ggcaaugaauuucugaaua

SEQ ID NO: 1043545 - RNA, 19 nt, Homo sapiens
  misc_RNA (1)...(19): siRNA sense strand
gcaaugaauuucugaauac

SEQ ID NO: 1043546 - RNA, 19 nt, Homo sapiens
  misc_RNA (1)...(19): siRNA sense strand
ggaauugucugaacacagu

SEQ ID NO: 1043547 - RNA, 19 nt, Homo sapiens
  misc_RNA (1)...(19): siRNA sense strand
uggaagagcugauggaaga

SEQ ID NO: 1043548 - RNA, 19 nt, Homo sapiens
  misc_RNA (1)...(19): siRNA sense strand
ggaagaugaugggaaauau

SEQ ID NO: 1043549 - RNA, 19 nt, Homo sapiens
  misc_RNA (1)...(19): siRNA sense strand
guugaagucuuguugaauu

SEQ ID NO: 1043550 - RNA, 19 nt, Homo sapiens
  misc_RNA (1)...(19): siRNA sense strand
agaaaugaauggaagauga

SEQ ID NO: 1043551 - RNA, 19 nt, Homo sapiens
  misc_RNA (1)...(19): siRNA sense strand
gcaacaagaugagcuaauc

SEQ ID NO: 1043552 - RNA, 19 nt, Homo sapiens
  misc_RNA (1)...(19): siRNA sense strand
gaugguauauucuguguca

SEQ ID NO: 1043553 - RNA, 19 nt, Homo sapiens
  misc_RNA (1)...(19): siRNA sense strand
gcagauaaguagcaguuca

SEQ ID NO: 1043554 - RNA, 19 nt, Homo sapiens
  misc_RNA (1)...(19): siRNA sense strand
ggaaauguaugauccaacu

SEQ ID NO: 1043555 - RNA, 19 nt, Homo sapiens
  misc_RNA (1)...(19): siRNA sense strand
gguuuguggugauuauuua

SEQ ID NO: 1043556 - RNA, 19 nt, Homo sapiens
  misc_RNA (1)...(19): siRNA sense strand
guggagagauguaugauuc

SEQ ID NO: 1043557 - RNA, 19 nt, Homo sapiens
  misc_RNA (1)...(19): siRNA sense strand
gaaaaucguugcuucagaa

SEQ ID NO: 1043558 - RNA, 19 nt, Homo sapiens
  misc_RNA (1)...(19): siRNA sense strand
cauggaauuucucacguua

SEQ ID NO: 1043559 - RNA, 19 nt, Homo sapiens
  misc_RNA (1)...(19): siRNA sense strand
gaucacugguccuuucuug

SEQ ID NO: 1043560 - RNA, 19 nt, Homo sapiens
  misc_RNA (1)...(19): siRNA sense strand
ggaaauaugacuucaccaa

SEQ ID NO: 1043561 - RNA, 19 nt, Homo sapiens
  misc_RNA (1)...(19): siRNA sense strand
gguauauucugugucauuu

SEQ ID NO: 1043562 - RNA, 19 nt, Homo sapiens
  misc_RNA (1)...(19): siRNA sense strand
gcagauaaggaauugguaa

SEQ ID NO: 1043563 - RNA, 19 nt, Homo sapiens
  misc_RNA (1)...(19): siRNA sense strand
ugaauacgguggaagucua

SEQ ID NO: 1043564 - RNA, 19 nt, Homo sapiens
  misc_RNA (1)...(19): siRNA sense strand
gcuuugagaugcaacaaga

SEQ ID NO: 1043565 - RNA, 19 nt, Homo sapiens
  misc_RNA (1)...(19): siRNA sense strand
ggaugucucucuucuccaa

SEQ ID NO: 1043566 - RNA, 19 nt, Homo sapiens
  misc_RNA (1)...(19): siRNA sense strand
gaagucuuguugaauuaug

SEQ ID NO: 1043567 - RNA, 19 nt, Homo sapiens
  misc_RNA (1)...(19): siRNA sense strand
ucaguuguguggaaaugua

SEQ ID NO: 1043568 - RNA, 19 nt, Homo sapiens
  misc_RNA (1)...(19): siRNA sense strand
ucugugagcuuggugguua

SEQ ID NO: 1043569 - RNA, 19 nt, Homo sapiens
  misc_RNA (1)...(19): siRNA sense strand
caaauaacacuuacuugug

SEQ ID NO: 1043570 - RNA, 19 nt, Homo sapiens
  misc_RNA (1)...(19): siRNA sense strand
gaauggccauaagcagaua

SEQ ID NO: 1043571 - RNA, 19 nt, Homo sapiens
  misc_RNA (1)...(19): siRNA sense strand
gcagguuuguggugauuau

SEQ ID NO: 1043572 - RNA, 19 nt, Homo sapiens
  misc_RNA (1)...(19): siRNA sense strand
ggagagauguaugauucaa

SEQ ID NO: 1043573 - RNA, 19 nt, Homo sapiens
  misc_RNA (1)...(19): siRNA sense strand
gaacagcagagaugaaugg

SEQ ID NO: 1043574 - RNA, 19 nt, Homo sapiens
  misc_RNA (1)...(19): siRNA sense strand
gguaaugcuugaagauaau

SEQ ID NO: 1043575 - RNA, 19 nt, Homo sapiens
  misc_RNA (1)...(19): siRNA sense strand
cuacucagcugaucacaag

SEQ ID NO: 1043576 - RNA, 19 nt, Homo sapiens
  misc_RNA (1)...(19): siRNA sense strand
caaauggccacucagauga

SEQ ID NO: 1043577 - RNA, 19 nt, Homo sapiens
  misc_RNA (1)...(19): siRNA sense strand
ccaagagcccgauuucaaa

SEQ ID NO: 1043578 - RNA, 19 nt, Homo sapiens
  misc_RNA (1)...(19): siRNA sense strand
gaugggaaccuacuagaug

SEQ ID NO: 1043579 - RNA, 19 nt, Homo sapiens
  misc_RNA (1)...(19): siRNA sense strand
uggaauuucucacguuaaa

SEQ ID NO: 1043580 - RNA, 19 nt, Homo sapiens
  misc_RNA (1)...(19): siRNA sense strand
gaacgauacaauccugaaa

SEQ ID NO: 1043581 - RNA, 19 nt, Homo sapiens
  misc_RNA (1)...(19): siRNA sense strand
gaucaaauggccacucaga

SEQ ID NO: 1043582 - RNA, 19 nt, Homo sapiens
  misc_RNA (1)...(19): siRNA sense strand
gagguaaugcuugaagaua

SEQ ID NO: 1043583 - RNA, 19 nt, Homo sapiens
  misc_RNA (1)...(19): siRNA sense strand
ggccauaagcagauaagua

SEQ ID NO: 1043584 - RNA, 19 nt, Homo sapiens
  misc_RNA (1)...(19): siRNA sense strand
gaacacaguagaacgauac

SEQ ID NO: 1043585 - RNA, 19 nt, Homo sapiens
  misc_RNA (1)...(19): siRNA sense strand
gaacuaaccguuguaaugc

SEQ ID NO: 1043586 - RNA, 19 nt, Homo sapiens
  misc_RNA (1)...(19): siRNA sense strand
gcuauaauccacauacaga

SEQ ID NO: 1043587 - RNA, 19 nt, Homo sapiens
  misc_RNA (1)...(19): siRNA sense strand
caagaugagcuaaucgaaa

SEQ ID NO: 1043588 - RNA, 19 nt, Homo sapiens
  misc_RNA (1)...(19): siRNA sense strand
aguaagaguuuaagcuuug

SEQ ID NO: 1043589 - RNA, 19 nt, Homo sapiens
  misc_RNA (1)...(19): siRNA sense strand
guugaaagcagauaaggaa

SEQ ID NO: 1043590 - RNA, 19 nt, Homo sapiens
  misc_RNA (1)...(19): siRNA sense strand
aauggaagaugaugggaaa

SEQ ID NO: 1043591 - RNA, 19 nt, Homo sapiens
  misc_RNA (1)...(19): siRNA sense strand
gaaaugaauggaagaugau

SEQ ID NO: 1043592 - RNA, 19 nt, Homo sapiens
  misc_RNA (1)...(19): siRNA sense strand
gcaggagugugugcucuga

SEQ ID NO: 1043593 - RNA, 19 nt, Homo sapiens
  misc_RNA (1)...(19): siRNA sense strand
guucaaaccuuguacuacu

SEQ ID NO: 1043594 - RNA, 19 nt, Homo sapiens
  misc_RNA (1)...(19): siRNA sense strand
auacaaagguaaucaacug

SEQ ID NO: 1043595 - RNA, 19 nt, Homo sapiens
  misc_RNA (1)...(19): siRNA sense strand
ggaggaguuucuuaagcuu

SEQ ID NO: 1043596 - RNA, 19 nt, Homo sapiens
  misc_RNA (1)...(19): siRNA sense strand
uaacagagaggaaugucuu

SEQ ID NO: 1043597 - RNA, 19 nt, Homo sapiens
  misc_RNA (1)...(19): siRNA sense strand
uggaguggcuguucuuaau

SEQ ID NO: 1043598 - RNA, 19 nt, Homo sapiens
  misc_RNA (1)...(19): siRNA sense strand
gaacagucgaaugcuauaa

SEQ ID NO: 1043599 - RNA, 19 nt, Homo sapiens
  misc_RNA (1)...(19): siRNA sense strand
ucaaauggccacucagaug

SEQ ID NO: 1043600 - RNA, 19 nt, Homo sapiens
  misc_RNA (1)...(19): siRNA sense strand
gaagaugaugggaaauaug

SEQ ID NO: 1043601 - RNA, 19 nt, Homo sapiens
  misc_RNA (1)...(19): siRNA sense strand
agagaggaaugucuucgaa

SEQ ID NO: 1043602 - RNA, 19 nt, Homo sapiens
  misc_RNA (1)...(19): siRNA sense strand
ggaagucuauaaccuugag

SEQ ID NO: 1043603 - RNA, 19 nt, Homo sapiens
  misc_RNA (1)...(19): siRNA sense strand
guagggaacaccauuuaug

SEQ ID NO: 1043604 - RNA, 19 nt, Homo sapiens
  misc_RNA (1)...(19): siRNA sense strand
agaacuaaccguuguaaug

SEQ ID NO: 1043605 - RNA, 19 nt, Homo sapiens
  misc_RNA (1)...(19): siRNA sense strand
acagaucacugguccuuuc

SEQ ID NO: 1043606 - RNA, 19 nt, Homo sapiens
  misc_RNA (1)...(19): siRNA sense strand
agguaaugcuugaagauaa

SEQ ID NO: 1043607 - RNA, 19 nt, Homo sapiens
  misc_RNA (1)...(19): siRNA sense strand
caacuagaaaugaauggaa

SEQ ID NO: 1043608 - RNA, 19 nt, Homo sapiens
  misc_RNA (1)...(19): siRNA sense strand
ugaacacaguagaacgaua

SEQ ID NO: 1043609 - RNA, 19 nt, Homo sapiens
  misc_RNA (1)...(19): siRNA sense strand
aaucggaggugcagaaucu

SEQ ID NO: 1043610 - RNA, 19 nt, Homo sapiens
  misc_RNA (1)...(19): siRNA sense strand
gaauggaaaguuauacauc

SEQ ID NO: 1043611 - RNA, 19 nt, Homo sapiens
  misc_RNA (1)...(19): siRNA sense strand
uugcugcagucccuauuua

SEQ ID NO: 1043612 - RNA, 19 nt, Homo sapiens
  misc_RNA (1)...(19): siRNA sense strand
cugcaucucuuaccgaaau

SEQ ID NO: 1043613 - RNA, 19 nt, Homo sapiens
  misc_RNA (1)...(19): siRNA sense strand
ugauguauuugauccugua

SEQ ID NO: 1043614 - RNA, 19 nt, Homo sapiens
  misc_RNA (1)...(19): siRNA sense strand
gaccugaguuguggagaga

SEQ ID NO: 1043615 - RNA, 19 nt, Homo sapiens
  misc_RNA (1)...(19): siRNA sense strand
gccauaagcagauaaguag

SEQ ID NO: 1043616 - RNA, 19 nt, Homo sapiens
  misc_RNA (1)...(19): siRNA sense strand
uccagaagcuguugaaguc

SEQ ID NO: 1043617 - RNA, 19 nt, Homo sapiens
  misc_RNA (1)...(19): siRNA sense strand
guuuguaugugguggcuuu

SEQ ID NO: 1043618 - RNA, 19 nt, Homo sapiens
  misc_RNA (1)...(19): siRNA sense strand
ggugcagaaucuuggaauu

SEQ ID NO: 1043619 - RNA, 19 nt, Homo sapiens
  misc_RNA (1)...(19): siRNA sense strand
gaaaagcccaugucuccua

SEQ ID NO: 1043620 - RNA, 19 nt, Homo sapiens
  misc_RNA (1)...(19): siRNA sense strand
gaggaggaguuucuuaagc

SEQ ID NO: 1043621 - RNA, 19 nt, Homo sapiens
  misc_RNA (1)...(19): siRNA sense strand
ugaaagcagauaaggaauu

SEQ ID NO: 1043622 - RNA, 19 nt, Homo sapiens
  misc_RNA (1)...(19): siRNA sense strand
cagaagcuguugaagucuu

SEQ ID NO: 1043623 - RNA, 19 nt, Homo sapiens
  misc_RNA (1)...(19): siRNA sense strand
agucuucuguugccaaauu

SEQ ID NO: 1043624 - RNA, 19 nt, Homo sapiens
  misc_RNA (1)...(19): siRNA sense strand
guaagaguuuaagcuuuga

SEQ ID NO: 1043625 - RNA, 19 nt, Homo sapiens
  misc_RNA (1)...(19): siRNA sense strand
gcccuaagcaugaguggaa

SEQ ID NO: 1043626 - RNA, 19 nt, Homo sapiens
  misc_RNA (1)...(19): siRNA sense strand
ccagcaauggcaaauuaua

SEQ ID NO: 1043627 - RNA, 19 nt, Homo sapiens
  misc_RNA (1)...(19): siRNA sense strand
gaauggagccccuauacaa

SEQ ID NO: 1043628 - RNA, 19 nt, Homo sapiens
  misc_RNA (1)...(19): siRNA sense strand
ggaaaaucguugcuucaga

SEQ ID NO: 1043629 - RNA, 19 nt, Homo sapiens
  misc_RNA (1)...(19): siRNA sense strand
aauaugacuucaccaagga

SEQ ID NO: 1043630 - RNA, 19 nt, Homo sapiens
  misc_RNA (1)...(19): siRNA sense strand
ugugguagguggaucaaau

SEQ ID NO: 1043631 - RNA, 19 nt, Homo sapiens
  misc_RNA (1)...(19): siRNA sense strand
ccaugucuccuaugcagua

SEQ ID NO: 1043632 - RNA, 19 nt, Homo sapiens
  misc_RNA (1)...(19): siRNA sense strand
gggagaaacagcccacaga

SEQ ID NO: 1043633 - RNA, 19 nt, Homo sapiens
  misc_RNA (1)...(19): siRNA sense strand
agaggaaugucuucgaaca

SEQ ID NO: 1043634 - RNA, 19 nt, Homo sapiens
  misc_RNA (1)...(19): siRNA sense strand
cugcagucccuauuuauuu

SEQ ID NO: 1043635 - RNA, 19 nt, Homo sapiens
  misc_RNA (1)...(19): siRNA sense strand
gaaauguaugauccaacua

SEQ ID NO: 1043636 - RNA, 19 nt, Homo sapiens
  misc_RNA (1)...(19): siRNA sense strand
gaguggcuguucuuaaugg

SEQ ID NO: 1043637 - RNA, 19 nt, Homo sapiens
  misc_RNA (1)...(19): siRNA sense strand
uaauugcacccaugaaugu

SEQ ID NO: 1043638 - RNA, 19 nt, Homo sapiens
  misc_RNA (1)...(19): siRNA sense strand
gaucugagccguaagaaua

SEQ ID NO: 1043639 - RNA, 19 nt, Homo sapiens
  misc_RNA (1)...(19): siRNA sense strand
ggacuacuauuaccacuaa

SEQ ID NO: 1043640 - RNA, 19 nt, Homo sapiens
  misc_RNA (1)...(19): siRNA sense strand
caaauacacuuguccauga

SEQ ID NO: 1043641 - RNA, 19 nt, Homo sapiens
  misc_RNA (1)...(19): siRNA sense strand
gaaaugaacugugccauag

SEQ ID NO: 1043642 - RNA, 19 nt, Homo sapiens
  misc_RNA (1)...(19): siRNA sense strand
agacugaggucccaauuaa

SEQ ID NO: 1043643 - RNA, 19 nt, Homo sapiens
  misc_RNA (1)...(19): siRNA sense strand
ggaucuauaucacugcuua

SEQ ID NO: 1043644 - RNA, 19 nt, Homo sapiens
  misc_RNA (1)...(19): siRNA sense strand
gagaaggauucccucauaa

SEQ ID NO: 1043645 - RNA, 19 nt, Homo sapiens
  misc_RNA (1)...(19): siRNA sense strand
ggagaaagauagagagauc

SEQ ID NO: 1043646 - RNA, 19 nt, Homo sapiens
  misc_RNA (1)...(19): siRNA sense strand
cagugaaacuuacuacaua

SEQ ID NO: 1043647 - RNA, 19 nt, Homo sapiens
  misc_RNA (1)...(19): siRNA sense strand
guagugacuuccaauuuaa

SEQ ID NO: 1043648 - RNA, 19 nt, Homo sapiens
  misc_RNA (1)...(19): siRNA sense strand
ggaaaugaacugugccaua

SEQ ID NO: 1043649 - RNA, 19 nt, Homo sapiens
  misc_RNA (1)...(19): siRNA sense strand
uguagugacuuccaauuua

SEQ ID NO: 1043650 - RNA, 19 nt, Homo sapiens
  misc_RNA (1)...(19): siRNA sense strand
agagagaucugcagacuga

SEQ ID NO: 1043651 - RNA, 19 nt, Homo sapiens
  misc_RNA (1)...(19): siRNA sense strand
agagaaggauucccucaua

SEQ ID NO: 1043652 - RNA, 19 nt, Homo sapiens
  misc_RNA (1)...(19): siRNA sense strand
gcaaggacuucaagacuca

SEQ ID NO: 1043653 - RNA, 19 nt, Homo sapiens
  misc_RNA (1)...(19): siRNA sense strand
guaagaauacggaucuaua

SEQ ID NO: 1043654 - RNA, 19 nt, Homo sapiens
  misc_RNA (1)...(19): siRNA sense strand
gguggaaggacuacuauua

SEQ ID NO: 1043655 - RNA, 19 nt, Homo sapiens
  misc_RNA (1)...(19): siRNA sense strand
ccaaguacucuacauauaa

SEQ ID NO: 1043656 - RNA, 19 nt, Homo sapiens
  misc_RNA (1)...(19): siRNA sense strand
gaacuggaauauuguaaac

SEQ ID NO: 1043657 - RNA, 19 nt, Homo sapiens
  misc_RNA (1)...(19): siRNA sense strand
uggagaagcuaaauacuga

SEQ ID NO: 1043658 - RNA, 19 nt, Homo sapiens
  misc_RNA (1)...(19): siRNA sense strand
gaaggaaguuguagugacu

SEQ ID NO: 1043659 - RNA, 19 nt, Homo sapiens
  misc_RNA (1)...(19): siRNA sense strand
gaacauuugcagagaauug

SEQ ID NO: 1043660 - RNA, 19 nt, Homo sapiens
  misc_RNA (1)...(19): siRNA sense strand
ccauaaagauguuucaaag

SEQ ID NO: 1043661 - RNA, 19 nt, Homo sapiens
  misc_RNA (1)...(19): siRNA sense strand
gaucaagccagauuuguga

SEQ ID NO: 1043662 - RNA, 19 nt, Homo sapiens
  misc_RNA (1)...(19): siRNA sense strand
cuagugcuguccacauuua

SEQ ID NO: 1043663 - RNA, 19 nt, Homo sapiens
  misc_RNA (1)...(19): siRNA sense strand
gaacuccauucuccaacuu

SEQ ID NO: 1043664 - RNA, 19 nt, Homo sapiens
  misc_RNA (1)...(19): siRNA sense strand
cuacacauauuggaaauga

SEQ ID NO: 1043665 - RNA, 19 nt, Homo sapiens
  misc_RNA (1)...(19): siRNA sense strand
gacauggaauacagacuaa

SEQ ID NO: 1043666 - RNA, 19 nt, Homo sapiens
  misc_RNA (1)...(19): siRNA sense strand
gacacaauauccaauccua

SEQ ID NO: 1043667 - RNA, 19 nt, Homo sapiens
  misc_RNA (1)...(19): siRNA sense strand
gagcgaccauucucaggaa

SEQ ID NO: 1043668 - RNA, 19 nt, Homo sapiens
  misc_RNA (1)...(19): siRNA sense strand
ccacagaccacuauuagga

SEQ ID NO: 1043669 - RNA, 19 nt, Homo sapiens
  misc_RNA (1)...(19): siRNA sense strand
caauuaaaccaguaccaua

SEQ ID NO: 1043670 - RNA, 19 nt, Homo sapiens
  misc_RNA (1)...(19): siRNA sense strand
ugacaucacuggaaaauga

SEQ ID NO: 1043671 - RNA, 19 nt, Homo sapiens
  misc_RNA (1)...(19): siRNA sense strand
cccaaguacucuacauaua

SEQ ID NO: 1043672 - RNA, 19 nt, Homo sapiens
  misc_RNA (1)...(19): siRNA sense strand
gagaguugcuugcugaucu

SEQ ID NO: 1043673 - RNA, 19 nt, Homo sapiens
  misc_RNA (1)...(19): siRNA sense strand
gaacuucauucuccaacag

SEQ ID NO: 1043674 - RNA, 19 nt, Homo sapiens
  misc_RNA (1)...(19): siRNA sense strand
gacuagugcuguccacauu

SEQ ID NO: 1043675 - RNA, 19 nt, Homo sapiens
  misc_RNA (1)...(19): siRNA sense strand
caagcuugcuggaagagaa

SEQ ID NO: 1043676 - RNA, 19 nt, Homo sapiens
  misc_RNA (1)...(19): siRNA sense strand
gugagcaggugauaauuca

SEQ ID NO: 1043677 - RNA, 19 nt, Homo sapiens
  misc_RNA (1)...(19): siRNA sense strand
cacaggaaauaauccaauu

SEQ ID NO: 1043678 - RNA, 19 nt, Homo sapiens
  misc_RNA (1)...(19): siRNA sense strand
gagcuuggacaucuucaaa

SEQ ID NO: 1043679 - RNA, 19 nt, Homo sapiens
  misc_RNA (1)...(19): siRNA sense strand
gggaggagcuuggacaucu

SEQ ID NO: 1043680 - RNA, 19 nt, Homo sapiens
  misc_RNA (1)...(19): siRNA sense strand
ccuaaaggauuaucagagu

SEQ ID NO: 1043681 - RNA, 19 nt, Homo sapiens
  misc_RNA (1)...(19): siRNA sense strand
cuauaucacugcuuauuag

SEQ ID NO: 1043682 - RNA, 19 nt, Homo sapiens
  misc_RNA (1)...(19): siRNA sense strand
gaacaggaacuucauucuc

SEQ ID NO: 1043683 - RNA, 19 nt, Homo sapiens
  misc_RNA (1)...(19): siRNA sense strand
gaaggauucccucauaaag

SEQ ID NO: 1043684 - RNA, 19 nt, Homo sapiens
  misc_RNA (1)...(19): siRNA sense strand
cgacauacacuaucagaca

SEQ ID NO: 1043685 - RNA, 19 nt, Homo sapiens
  misc_RNA (1)...(19): siRNA sense strand
gaugagacuugagaaagau

SEQ ID NO: 1043686 - RNA, 19 nt, Homo sapiens
  misc_RNA (1)...(19): siRNA sense strand
gaagcuaaauacugaugag

SEQ ID NO: 1043687 - RNA, 19 nt, Homo sapiens
  misc_RNA (1)...(19): siRNA sense strand
agaugagacuugagaaaga

SEQ ID NO: 1043688 - RNA, 19 nt, Homo sapiens
  misc_RNA (1)...(19): siRNA sense strand
ugacaagcuugcuggaaga

SEQ ID NO: 1043689 - RNA, 19 nt, Homo sapiens
  misc_RNA (1)...(19): siRNA sense strand
gaauggagaaagauagaga

SEQ ID NO: 1043690 - RNA, 19 nt, Homo sapiens
  misc_RNA (1)...(19): siRNA sense strand
caaguacucuacauauaac

SEQ ID NO: 1043691 - RNA, 19 nt, Homo sapiens
  misc_RNA (1)...(19): siRNA sense strand
gaacugugccauaguggau

SEQ ID NO: 1043692 - RNA, 19 nt, Homo sapiens
  misc_RNA (1)...(19): siRNA sense strand
gagaauggagaaagauaga

SEQ ID NO: 1043693 - RNA, 19 nt, Homo sapiens
  misc_RNA (1)...(19): siRNA sense strand
uaucagacauggaauacag

SEQ ID NO: 1043694 - RNA, 19 nt, Homo sapiens
  misc_RNA (1)...(19): siRNA sense strand
ucauaaagcgucagucaga

SEQ ID NO: 1043695 - RNA, 19 nt, Homo sapiens
  misc_RNA (1)...(19): siRNA sense strand
gaaacuuacuacauaucca

SEQ ID NO: 1043696 - RNA, 19 nt, Homo sapiens
  misc_RNA (1)...(19): siRNA sense strand
cuucaagacucaaguucaa

SEQ ID NO: 1043697 - RNA, 19 nt, Homo sapiens
  misc_RNA (1)...(19): siRNA sense strand
gaagugcucuccccucuca

SEQ ID NO: 1043698 - RNA, 19 nt, Homo sapiens
  misc_RNA (1)...(19): siRNA sense strand
ggaacuucauucuccaaca

SEQ ID NO: 1043699 - RNA, 19 nt, Homo sapiens
  misc_RNA (1)...(19): siRNA sense strand
gcccaauguugcaggcuaa

SEQ ID NO: 1043700 - RNA, 19 nt, Homo sapiens
  misc_RNA (1)...(19): siRNA sense strand
guccacauuuagcaacaua

SEQ ID NO: 1043701 - RNA, 19 nt, Homo sapiens
  misc_RNA (1)...(19): siRNA sense strand
aggaaccacugucucaauu

SEQ ID NO: 1043702 - RNA, 19 nt, Homo sapiens
  misc_RNA (1)...(19): siRNA sense strand
gaaaacagaagacaaauac

SEQ ID NO: 1043703 - RNA, 19 nt, Homo sapiens
  misc_RNA (1)...(19): siRNA sense strand
ccaguaccauaaagauguu

SEQ ID NO: 1043704 - RNA, 19 nt, Homo sapiens
  misc_RNA (1)...(19): siRNA sense strand
gagacuugagaaagauuua

SEQ ID NO: 1043705 - RNA, 19 nt, Homo sapiens
  misc_RNA (1)...(19): siRNA sense strand
ggaggagcuuggacaucuu

SEQ ID NO: 1043706 - RNA, 19 nt, Homo sapiens
  misc_RNA (1)...(19): siRNA sense strand
cuaaaggauuaucagaguu

SEQ ID NO: 1043707 - RNA, 19 nt, Homo sapiens
  misc_RNA (1)...(19): siRNA sense strand
uagaacauuugcagagaau

SEQ ID NO: 1043708 - RNA, 19 nt, Homo sapiens
  misc_RNA (1)...(19): siRNA sense strand
gaauacggaucuauaucac

SEQ ID NO: 1043709 - RNA, 19 nt, Homo sapiens
  misc_RNA (1)...(19): siRNA sense strand
gcaaauccaagccaucaca

SEQ ID NO: 1043710 - RNA, 19 nt, Homo sapiens
  misc_RNA (1)...(19): siRNA sense strand
gaaccacugucucaauucc

SEQ ID NO: 1043711 - RNA, 19 nt, Homo sapiens
  misc_RNA (1)...(19): siRNA sense strand
ggaacuccauucuccaacu

SEQ ID NO: 1043712 - RNA, 19 nt, Homo sapiens
  misc_RNA (1)...(19): siRNA sense strand
ccuauaugaugacuacgaa

SEQ ID NO: 1043713 - RNA, 19 nt, Homo sapiens
  misc_RNA (1)...(19): siRNA sense strand
agacauggaauacagacua

SEQ ID NO: 1043714 - RNA, 19 nt, Homo sapiens
  misc_RNA (1)...(19): siRNA sense strand
gagaauuggaggaagcaaa

SEQ ID NO: 1043715 - RNA, 19 nt, Homo sapiens
  misc_RNA (1)...(19): siRNA sense strand
acagaccacuauuaggaaa

SEQ ID NO: 1043716 - RNA, 19 nt, Homo sapiens
  misc_RNA (1)...(19): siRNA sense strand
agacuauugugauugagaa

SEQ ID NO: 1043717 - RNA, 19 nt, Homo sapiens
  misc_RNA (1)...(19): siRNA sense strand
gacauacacuaucagacau

SEQ ID NO: 1043718 - RNA, 19 nt, Homo sapiens
  misc_RNA (1)...(19): siRNA sense strand
caagccaucacaggaaaua

SEQ ID NO: 1043719 - RNA, 19 nt, Homo sapiens
  misc_RNA (1)...(19): siRNA sense strand
ccaaaauacugaacaggaa

SEQ ID NO: 1043720 - RNA, 19 nt, Homo sapiens
  misc_RNA (1)...(19): siRNA sense strand
gcacaggcccaauguugca

SEQ ID NO: 1043721 - RNA, 19 nt, Homo sapiens
  misc_RNA (1)...(19): siRNA sense strand
gcaagagaaucaaaaccuu

SEQ ID NO: 1043722 - RNA, 19 nt, Homo sapiens
  misc_RNA (1)...(19): siRNA sense strand
caucagugagagcaaauaa

SEQ ID NO: 1043723 - RNA, 19 nt, Homo sapiens
  misc_RNA (1)...(19): siRNA sense strand
uuagaacauuugcagagaa

SEQ ID NO: 1043724 - RNA, 19 nt, Homo sapiens
  misc_RNA (1)...(19): siRNA sense strand
cagaagacaaauacacuug

SEQ ID NO: 1043725 - RNA, 19 nt, Homo sapiens
  misc_RNA (1)...(19): siRNA sense strand
gagaaggaaguuguaguga

SEQ ID NO: 1043726 - RNA, 19 nt, Homo sapiens
  misc_RNA (1)...(19): siRNA sense strand
cagacugaggucccaauua

SEQ ID NO: 1043727 - RNA, 19 nt, Homo sapiens
  misc_RNA (1)...(19): siRNA sense strand
agaauacggaucuauauca

SEQ ID NO: 1043728 - RNA, 19 nt, Homo sapiens
  misc_RNA (1)...(19): siRNA sense strand
aaagagagaaggaaguugu

SEQ ID NO: 1043729 - RNA, 19 nt, Homo sapiens
  misc_RNA (1)...(19): siRNA sense strand
ggucccaauuaaaccagua

SEQ ID NO: 1043730 - RNA, 19 nt, Homo sapiens
  misc_RNA (1)...(19): siRNA sense strand
ucagugagagcaaauaauc

SEQ ID NO: 1043731 - RNA, 19 nt, Homo sapiens
  misc_RNA (1)...(19): siRNA sense strand
gaacucuuggcaucaguga

SEQ ID NO: 1043732 - RNA, 19 nt, Homo sapiens
  misc_RNA (1)...(19): siRNA sense strand
gagaagcuaaauacugaug

SEQ ID NO: 1043733 - RNA, 19 nt, Homo sapiens
  misc_RNA (1)...(19): siRNA sense strand
agaaggauucccucauaaa

SEQ ID NO: 1043734 - RNA, 19 nt, Homo sapiens
  misc_RNA (1)...(19): siRNA sense strand
acuccauucuccaacuuua

SEQ ID NO: 1043735 - RNA, 19 nt, Homo sapiens
  misc_RNA (1)...(19): siRNA sense strand
ucaaagagagaaggaaguu

SEQ ID NO: 1043736 - RNA, 19 nt, Homo sapiens
  misc_RNA (1)...(19): siRNA sense strand
uaucacugcuuauuagaac

SEQ ID NO: 1043737 - RNA, 19 nt, Homo sapiens
  misc_RNA (1)...(19): siRNA sense strand
ggaucaagccagauuugug

SEQ ID NO: 1043738 - RNA, 19 nt, Homo sapiens
  misc_RNA (1)...(19): siRNA sense strand
ccaaaugucucucaaauau

SEQ ID NO: 1043739 - RNA, 19 nt, Homo sapiens
  misc_RNA (1)...(19): siRNA sense strand
ggaaauagauaacgaaagu

SEQ ID NO: 1043740 - RNA, 19 nt, Homo sapiens
  misc_RNA (1)...(19): siRNA sense strand
ggacgaaaguguacagaaa

SEQ ID NO: 1043741 - RNA, 19 nt, Homo sapiens
  misc_RNA (1)...(19): siRNA sense strand
gaggaauggucuaauaaua

SEQ ID NO: 1043742 - RNA, 19 nt, Homo sapiens
  misc_RNA (1)...(19): siRNA sense strand
gaaauaaggcacacaauga

SEQ ID NO: 1043743 - RNA, 19 nt, Homo sapiens
  misc_RNA (1)...(19): siRNA sense strand
guugaaagcugucaguuaa

SEQ ID NO: 1043744 - RNA, 19 nt, Homo sapiens
  misc_RNA (1)...(19): siRNA sense strand
gaagaaauguggacuuuac

SEQ ID NO: 1043745 - RNA, 19 nt, Homo sapiens
  misc_RNA (1)...(19): siRNA sense strand
ggacagaguaguaucaaua

SEQ ID NO: 1043746 - RNA, 19 nt, Homo sapiens
  misc_RNA (1)...(19): siRNA sense strand
gcauguaucucuuaaggaa

SEQ ID NO: 1043747 - RNA, 19 nt, Homo sapiens
  misc_RNA (1)...(19): siRNA sense strand
gauaauagcuguguucaag

SEQ ID NO: 1043748 - RNA, 19 nt, Homo sapiens
  misc_RNA (1)...(19): siRNA sense strand
caagauagauaccacauca

SEQ ID NO: 1043749 - RNA, 19 nt, Homo sapiens
  misc_RNA (1)...(19): siRNA sense strand
caucuaauguuccauguuu

SEQ ID NO: 1043750 - RNA, 19 nt, Homo sapiens
  misc_RNA (1)...(19): siRNA sense strand
ucacacaacugccuuagaa

SEQ ID NO: 1043751 - RNA, 19 nt, Homo sapiens
  misc_RNA (1)...(19): siRNA sense strand
ucacacaacugccuuagaa

SEQ ID NO: 1043752 - RNA, 19 nt, Homo sapiens
  misc_RNA (1)...(19): siRNA sense strand
gaaacgugauugucauuug

SEQ ID NO: 1043753 - RNA, 19 nt, Homo sapiens
  misc_RNA (1)...(19): siRNA sense strand
cauaaacucugcagacaaa

SEQ ID NO: 1043754 - RNA, 19 nt, Homo sapiens
  misc_RNA (1)...(19): siRNA sense strand
gaacuaaagcuucaggaaa

SEQ ID NO: 1043755 - RNA, 19 nt, Homo sapiens
  misc_RNA (1)...(19): siRNA sense strand
gaacauacccgugaaagga

SEQ ID NO: 1043756 - RNA, 19 nt, Homo sapiens
  misc_RNA (1)...(19): siRNA sense strand
ggagaugacuaaacuuaau

SEQ ID NO: 1043757 - RNA, 19 nt, Homo sapiens
  misc_RNA (1)...(19): siRNA sense strand
caacaacucuuugcugcua

SEQ ID NO: 1043758 - RNA, 19 nt, Homo sapiens
  misc_RNA (1)...(19): siRNA sense strand
uaauacagcucuagauuuc

SEQ ID NO: 1043759 - RNA, 19 nt, Homo sapiens
  misc_RNA (1)...(19): siRNA sense strand
gccaugcucuuaugugaua

SEQ ID NO: 1043760 - RNA, 19 nt, Homo sapiens
  misc_RNA (1)...(19): siRNA sense strand
gaacaaagacaaagauugg

SEQ ID NO: 1043761 - RNA, 19 nt, Homo sapiens
  misc_RNA (1)...(19): siRNA sense strand
gaaauaaaccauagaccuu

SEQ ID NO: 1043762 - RNA, 19 nt, Homo sapiens
  misc_RNA (1)...(19): siRNA sense strand
guaaggagauguucuuugg

SEQ ID NO: 1043763 - RNA, 19 nt, Homo sapiens
  misc_RNA (1)...(19): siRNA sense strand
uagcaaagauucaggcauu

SEQ ID NO: 1043764 - RNA, 19 nt, Homo sapiens
  misc_RNA (1)...(19): siRNA sense strand
cgagucagcuuugcagaua

SEQ ID NO: 1043765 - RNA, 19 nt, Homo sapiens
  misc_RNA (1)...(19): siRNA sense strand
gauuauauguucagaggaa

SEQ ID NO: 1043766 - RNA, 19 nt, Homo sapiens
  misc_RNA (1)...(19): siRNA sense strand
gcaacaagccauaauauag

SEQ ID NO: 1043767 - RNA, 19 nt, Homo sapiens
  misc_RNA (1)...(19): siRNA sense strand
gaccaaaugucucucaaau

SEQ ID NO: 1043768 - RNA, 19 nt, Homo sapiens
  misc_RNA (1)...(19): siRNA sense strand
gcaaugacuuuauggacuu

SEQ ID NO: 1043769 - RNA, 19 nt, Homo sapiens
  misc_RNA (1)...(19): siRNA sense strand
guggagugcuuaaaucuaa

SEQ ID NO: 1043770 - RNA, 19 nt, Homo sapiens
  misc_RNA (1)...(19): siRNA sense strand
gcaaaugacagccagcuaa

SEQ ID NO: 1043771 - RNA, 19 nt, Homo sapiens
  misc_RNA (1)...(19): siRNA sense strand
ccacaucauuucuagcuaa

SEQ ID NO: 1043772 - RNA, 19 nt, Homo sapiens
  misc_RNA (1)...(19): siRNA sense strand
gaaccuaaguccuucucaa

SEQ ID NO: 1043773 - RNA, 19 nt, Homo sapiens
  misc_RNA (1)...(19): siRNA sense strand
gauauuacccagaguugua

SEQ ID NO: 1043774 - RNA, 19 nt, Homo sapiens
  misc_RNA (1)...(19): siRNA sense strand
gauaaucccauaagugaaa

SEQ ID NO: 1043775 - RNA, 19 nt, Homo sapiens
  misc_RNA (1)...(19): siRNA sense strand
agagagaccuguuagaaga

SEQ ID NO: 1043776 - RNA, 19 nt, Homo sapiens
  misc_RNA (1)...(19): siRNA sense strand
aaagugcccuggaggauaa

SEQ ID NO: 1043777 - RNA, 19 nt, Homo sapiens
  misc_RNA (1)...(19): siRNA sense strand
agagguagcugauaacaug

SEQ ID NO: 1043778 - RNA, 19 nt, Homo sapiens
  misc_RNA (1)...(19): siRNA sense strand
gaaagugaccgucuaguag

SEQ ID NO: 1043779 - RNA, 19 nt, Homo sapiens
  misc_RNA (1)...(19): siRNA sense strand
agacagaccuaacuuugaa

SEQ ID NO: 1043780 - RNA, 19 nt, Homo sapiens
  misc_RNA (1)...(19): siRNA sense strand
gaggagaacauggacauua

SEQ ID NO: 1043781 - RNA, 19 nt, Homo sapiens
  misc_RNA (1)...(19): siRNA sense strand
guuauuuccuguacugaua

SEQ ID NO: 1043782 - RNA, 19 nt, Homo sapiens
  misc_RNA (1)...(19): siRNA sense strand
uaacaacaaugaacagaca

SEQ ID NO: 1043783 - RNA, 19 nt, Homo sapiens
  misc_RNA (1)...(19): siRNA sense strand
gaagaaaacccuaaauuug

SEQ ID NO: 1043784 - RNA, 19 nt, Homo sapiens
  misc_RNA (1)...(19): siRNA sense strand
gaaaugacagagucccaua

SEQ ID NO: 1043785 - RNA, 19 nt, Homo sapiens
  misc_RNA (1)...(19): siRNA sense strand
cauauuaccagaagucaua

SEQ ID NO: 1043786 - RNA, 19 nt, Homo sapiens
  misc_RNA (1)...(19): siRNA sense strand
ggaaauaaggcacacaaug

SEQ ID NO: 1043787 - RNA, 19 nt, Homo sapiens
  misc_RNA (1)...(19): siRNA sense strand
uagaagaaauguggacuuu

SEQ ID NO: 1043788 - RNA, 19 nt, Homo sapiens
  misc_RNA (1)...(19): siRNA sense strand
caacugccuuagaauguaa

SEQ ID NO: 1043789 - RNA, 19 nt, Homo sapiens
  misc_RNA (1)...(19): siRNA sense strand
gaaagugcccuggaggaua

SEQ ID NO: 1043790 - RNA, 19 nt, Homo sapiens
  misc_RNA (1)...(19): siRNA sense strand
ggaauccaaugcuuugaga

SEQ ID NO: 1043791 - RNA, 19 nt, Homo sapiens
  misc_RNA (1)...(19): siRNA sense strand
caacugccuuagaauguaa

SEQ ID NO: 1043792 - RNA, 19 nt, Homo sapiens
  misc_RNA (1)...(19): siRNA sense strand
gugcuuaaaucuaacugua

SEQ ID NO: 1043793 - RNA, 19 nt, Homo sapiens
  misc_RNA (1)...(19): siRNA sense strand
gacggagucucauaugaaa

SEQ ID NO: 1043794 - RNA, 19 nt, Homo sapiens
  misc_RNA (1)...(19): siRNA sense strand
gaaggaagaaguuauucaa

SEQ ID NO: 1043795 - RNA, 19 nt, Homo sapiens
  misc_RNA (1)...(19): siRNA sense strand
cagaaggaguuuucaauua

SEQ ID NO: 1043796 - RNA, 19 nt, Homo sapiens
  misc_RNA (1)...(19): siRNA sense strand
caaaugaaagucuauguug

SEQ ID NO: 1043797 - RNA, 19 nt, Homo sapiens
  misc_RNA (1)...(19): siRNA sense strand
gaaguuauucaaaccagua

SEQ ID NO: 1043798 - RNA, 19 nt, Homo sapiens
  misc_RNA (1)...(19): siRNA sense strand
uaauagcuguguucaagaa

SEQ ID NO: 1043799 - RNA, 19 nt, Homo sapiens
  misc_RNA (1)...(19): siRNA sense strand
gcaggaacuucugaaacua

SEQ ID NO: 1043800 - RNA, 19 nt, Homo sapiens
  misc_RNA (1)...(19): siRNA sense strand
ccauagaccuuuauuagag

SEQ ID NO: 1043801 - RNA, 19 nt, Homo sapiens
  misc_RNA (1)...(19): siRNA sense strand
ucacgggaaucuaaaggua

SEQ ID NO: 1043802 - RNA, 19 nt, Homo sapiens
  misc_RNA (1)...(19): siRNA sense strand
ccaaugcuuugagaaauaa

SEQ ID NO: 1043803 - RNA, 19 nt, Homo sapiens
  misc_RNA (1)...(19): siRNA sense strand
gaucaauucuucagacucu

SEQ ID NO: 1043804 - RNA, 19 nt, Homo sapiens
  misc_RNA (1)...(19): siRNA sense strand
gaaaucuauuggcuaauca

SEQ ID NO: 1043805 - RNA, 19 nt, Homo sapiens
  misc_RNA (1)...(19): siRNA sense strand
gauuaaggauccacgaaau

SEQ ID NO: 1043806 - RNA, 19 nt, Homo sapiens
  misc_RNA (1)...(19): siRNA sense strand
gaacagacagaccuaacuu

SEQ ID NO: 1043807 - RNA, 19 nt, Homo sapiens
  misc_RNA (1)...(19): siRNA sense strand
gaacagugccucuucuaca

SEQ ID NO: 1043808 - RNA, 19 nt, Homo sapiens
  misc_RNA (1)...(19): siRNA sense strand
cuaaguccuucucaauaua

SEQ ID NO: 1043809 - RNA, 19 nt, Homo sapiens
  misc_RNA (1)...(19): siRNA sense strand
gaaagucuauguugaugac

SEQ ID NO: 1043810 - RNA, 19 nt, Homo sapiens
  misc_RNA (1)...(19): siRNA sense strand
cacgaaaucuauuggcuaa

SEQ ID NO: 1043811 - RNA, 19 nt, Homo sapiens
  misc_RNA (1)...(19): siRNA sense strand
ggaauggucuaauaauagg

SEQ ID NO: 1043812 - RNA, 19 nt, Homo sapiens
  misc_RNA (1)...(19): siRNA sense strand
ggacaguucucuaugaaaa

SEQ ID NO: 1043813 - RNA, 19 nt, Homo sapiens
  misc_RNA (1)...(19): siRNA sense strand
uaaagauucuccucaguca

SEQ ID NO: 1043814 - RNA, 19 nt, Homo sapiens
  misc_RNA (1)...(19): siRNA sense strand
cagcagagccugucaaauc

SEQ ID NO: 1043815 - RNA, 19 nt, Homo sapiens
  misc_RNA (1)...(19): siRNA sense strand
uaaucaggaugccagaaua

SEQ ID NO: 1043816 - RNA, 19 nt, Homo sapiens
  misc_RNA (1)...(19): siRNA sense strand
caaaugcauguaucucuua

SEQ ID NO: 1043817 - RNA, 19 nt, Homo sapiens
  misc_RNA (1)...(19): siRNA sense strand
gaaaguguacagaaaccua

SEQ ID NO: 1043818 - RNA, 19 nt, Homo sapiens
  misc_RNA (1)...(19): siRNA sense strand
ccuaaguccuucucaauau

SEQ ID NO: 1043819 - RNA, 19 nt, Homo sapiens
  misc_RNA (1)...(19): siRNA sense strand
gaaagcugucaguuaaaua

SEQ ID NO: 1043820 - RNA, 19 nt, Homo sapiens
  misc_RNA (1)...(19): siRNA sense strand
aaaggaaacaugcaaauga

SEQ ID NO: 1043821 - RNA, 19 nt, Homo sapiens
  misc_RNA (1)...(19): siRNA sense strand
gagaaagucagaaauggaa

SEQ ID NO: 1043822 - RNA, 19 nt, Homo sapiens
  misc_RNA (1)...(19): siRNA sense strand
uaaagaggacuuccauuug

SEQ ID NO: 1043823 - RNA, 19 nt, Homo sapiens
  misc_RNA (1)...(19): siRNA sense strand
gaaagaacagacagaccua

SEQ ID NO: 1043824 - RNA, 19 nt, Homo sapiens
  misc_RNA (1)...(19): siRNA sense strand
uuacugggaugaacacauu

SEQ ID NO: 1043825 - RNA, 19 nt, Homo sapiens
  misc_RNA (1)...(19): siRNA sense strand
gaaaggaaacaugcaaaug

SEQ ID NO: 1043826 - RNA, 19 nt, Homo sapiens
  misc_RNA (1)...(19): siRNA sense strand
ccagagcaauuacuugaau

SEQ ID NO: 1043827 - RNA, 19 nt, Homo sapiens
  misc_RNA (1)...(19): siRNA sense strand
gcucuagauuuccacagua

SEQ ID NO: 1043828 - RNA, 19 nt, Homo sapiens
  misc_RNA (1)...(19): siRNA sense strand
ucaggacaguucucuauga

SEQ ID NO: 1043829 - RNA, 19 nt, Homo sapiens
  misc_RNA (1)...(19): siRNA sense strand
cagccaauauucagacauu

SEQ ID NO: 1043830 - RNA, 19 nt, Homo sapiens
  misc_RNA (1)...(19): siRNA sense strand
gacaucaagucacacugua

SEQ ID NO: 1043831 - RNA, 19 nt, Homo sapiens
  misc_RNA (1)...(19): siRNA sense strand
ggcagaaacucacauaguc

SEQ ID NO: 1043832 - RNA, 19 nt, Homo sapiens
  misc_RNA (1)...(19): siRNA sense strand
uaacaaagagccacacugu

SEQ ID NO: 1043833 - RNA, 19 nt, Homo sapiens
  misc_RNA (1)...(19): siRNA sense strand
guacuaggccagaauucua

SEQ ID NO: 1043834 - RNA, 19 nt, Homo sapiens
  misc_RNA (1)...(19): siRNA sense strand
gacauuaccaagagucaua

SEQ ID NO: 1043835 - RNA, 19 nt, Homo sapiens
  misc_RNA (1)...(19): siRNA sense strand
ccauggaaaugaccaaaug

SEQ ID NO: 1043836 - RNA, 19 nt, Homo sapiens
  misc_RNA (1)...(19): siRNA sense strand
uaacuaagcaagucauuca

SEQ ID NO: 1043837 - RNA, 19 nt, Homo sapiens
  misc_RNA (1)...(19): siRNA sense strand
agugcaagcuacagaaaua

SEQ ID NO: 1043838 - RNA, 19 nt, Homo sapiens
  misc_RNA (1)...(19): siRNA sense strand
ccaaaugucucucaaauau

SEQ ID NO: 1043839 - RNA, 19 nt, Homo sapiens
  misc_RNA (1)...(19): siRNA sense strand
ggaaauagauaacgaaagu

SEQ ID NO: 1043840 - RNA, 19 nt, Homo sapiens
  misc_RNA (1)...(19): siRNA sense strand
ggacgaaaguguacagaaa

SEQ ID NO: 1043841 - RNA, 19 nt, Homo sapiens
  misc_RNA (1)...(19): siRNA sense strand
gaggaauggucuaauaaua

SEQ ID NO: 1043842 - RNA, 19 nt, Homo sapiens
  misc_RNA (1)...(19): siRNA sense strand
gaaauaaggcacacaauga

SEQ ID NO: 1043843 - RNA, 19 nt, Homo sapiens
  misc_RNA (1)...(19): siRNA sense strand
guugaaagcugucaguuaa

SEQ ID NO: 1043844 - RNA, 19 nt, Homo sapiens
  misc_RNA (1)...(19): siRNA sense strand
gaagaaauguggacuuuac

SEQ ID NO: 1043845 - RNA, 19 nt, Homo sapiens
  misc_RNA (1)...(19): siRNA sense strand
ggacagaguaguaucaaua

SEQ ID NO: 1043846 - RNA, 19 nt, Homo sapiens
  misc_RNA (1)...(19): siRNA sense strand
gcauguaucucuuaaggaa

SEQ ID NO: 1043847 - RNA, 19 nt, Homo sapiens
  misc_RNA (1)...(19): siRNA sense strand
gauaauagcuguguucaag

SEQ ID NO: 1043848 - RNA, 19 nt, Homo sapiens
  misc_RNA (1)...(19): siRNA sense strand
caagauagauaccacauca

SEQ ID NO: 1043849 - RNA, 19 nt, Homo sapiens
  misc_RNA (1)...(19): siRNA sense strand
caucuaauguuccauguuu

SEQ ID NO: 1043850 - RNA, 19 nt, Homo sapiens
  misc_RNA (1)...(19): siRNA sense strand
ucacacaacugccuuagaa

SEQ ID NO: 1043851 - RNA, 19 nt, Homo sapiens
  misc_RNA (1)...(19): siRNA sense strand
ucacacaacugccuuagaa

SEQ ID NO: 1043852 - RNA, 19 nt, Homo sapiens
  misc_RNA (1)...(19): siRNA sense strand
gaaacgugauugucauuug

SEQ ID NO: 1043853 - RNA, 19 nt, Homo sapiens
  misc_RNA (1)...(19): siRNA sense strand
cauaaacucugcagacaaa

SEQ ID NO: 1043854 - RNA, 19 nt, Homo sapiens
  misc_RNA (1)...(19): siRNA sense strand
gaacuaaagcuucaggaaa

SEQ ID NO: 1043855 - RNA, 19 nt, Homo sapiens
  misc_RNA (1)...(19): siRNA sense strand
gaacauacccgugaaagga

SEQ ID NO: 1043856 - RNA, 19 nt, Homo sapiens
  misc_RNA (1)...(19): siRNA sense strand
ggagaugacuaaacuuaau

SEQ ID NO: 1043857 - RNA, 19 nt, Homo sapiens
  misc_RNA (1)...(19): siRNA sense strand
caacaacucuuugcugcua

SEQ ID NO: 1043858 - RNA, 19 nt, Homo sapiens
  misc_RNA (1)...(19): siRNA sense strand
uaauacagcucuagauuuc

SEQ ID NO: 1043859 - RNA, 19 nt, Homo sapiens
  misc_RNA (1)...(19): siRNA sense strand
gccaugcucuuaugugaua

SEQ ID NO: 1043860 - RNA, 19 nt, Homo sapiens
  misc_RNA (1)...(19): siRNA sense strand
gaacaaagacaaagauugg

SEQ ID NO: 1043861 - RNA, 19 nt, Homo sapiens
  misc_RNA (1)...(19): siRNA sense strand
gaaauaaaccauagaccuu

SEQ ID NO: 1043862 - RNA, 19 nt, Homo sapiens
  misc_RNA (1)...(19): siRNA sense strand
guaaggagauguucuuugg

SEQ ID NO: 1043863 - RNA, 19 nt, Homo sapiens
  misc_RNA (1)...(19): siRNA sense strand
uagcaaagauucaggcauu

SEQ ID NO: 1043864 - RNA, 19 nt, Homo sapiens
  misc_RNA (1)...(19): siRNA sense strand
cgagucagcuuugcagaua

SEQ ID NO: 1043865 - RNA, 19 nt, Homo sapiens
  misc_RNA (1)...(19): siRNA sense strand
gauuauauguucagaggaa

SEQ ID NO: 1043866 - RNA, 19 nt, Homo sapiens
  misc_RNA (1)...(19): siRNA sense strand
gcaacaagccauaauauag

SEQ ID NO: 1043867 - RNA, 19 nt, Homo sapiens
  misc_RNA (1)...(19): siRNA sense strand
gaccaaaugucucucaaau

SEQ ID NO: 1043868 - RNA, 19 nt, Homo sapiens
  misc_RNA (1)...(19): siRNA sense strand
gcaaugacuuuauggacuu

SEQ ID NO: 1043869 - RNA, 19 nt, Homo sapiens
  misc_RNA (1)...(19): siRNA sense strand
guggagugcuuaaaucuaa

SEQ ID NO: 1043870 - RNA, 19 nt, Homo sapiens
  misc_RNA (1)...(19): siRNA sense strand
gcaaaugacagccagcuaa

SEQ ID NO: 1043871 - RNA, 19 nt, Homo sapiens
  misc_RNA (1)...(19): siRNA sense strand
ccacaucauuucuagcuaa

SEQ ID NO: 1043872 - RNA, 19 nt, Homo sapiens
  misc_RNA (1)...(19): siRNA sense strand
gaaccuaaguccuucucaa

SEQ ID NO: 1043873 - RNA, 19 nt, Homo sapiens
  misc_RNA (1)...(19): siRNA sense strand
gauauuacccagaguugua

SEQ ID NO: 1043874 - RNA, 19 nt, Homo sapiens
  misc_RNA (1)...(19): siRNA sense strand
gauaaucccauaagugaaa

SEQ ID NO: 1043875 - RNA, 19 nt, Homo sapiens
  misc_RNA (1)...(19): siRNA sense strand
agagagaccuguuagaaga

SEQ ID NO: 1043876 - RNA, 19 nt, Homo sapiens
  misc_RNA (1)...(19): siRNA sense strand
aaagugcccuggaggauaa

SEQ ID NO: 1043877 - RNA, 19 nt, Homo sapiens
  misc_RNA (1)...(19): siRNA sense strand
agagguagcugauaacaug

SEQ ID NO: 1043878 - RNA, 19 nt, Homo sapiens
  misc_RNA (1)...(19): siRNA sense strand
gaaagugaccgucuaguag

SEQ ID NO: 1043879 - RNA, 19 nt, Homo sapiens
  misc_RNA (1)...(19): siRNA sense strand
agacagaccuaacuuugaa

SEQ ID NO: 1043880 - RNA, 19 nt, Homo sapiens
  misc_RNA (1)...(19): siRNA sense strand
gaggagaacauggacauua

SEQ ID NO: 1043881 - RNA, 19 nt, Homo sapiens
  misc_RNA (1)...(19): siRNA sense strand
guuauuuccuguacugaua

SEQ ID NO: 1043882 - RNA, 19 nt, Homo sapiens
  misc_RNA (1)...(19): siRNA sense strand
uaacaacaaugaacagaca

SEQ ID NO: 1043883 - RNA, 19 nt, Homo sapiens
  misc_RNA (1)...(19): siRNA sense strand
gaagaaaacccuaaauuug

SEQ ID NO: 1043884 - RNA, 19 nt, Homo sapiens
  misc_RNA (1)...(19): siRNA sense strand
gaaaugacagagucccaua

SEQ ID NO: 1043885 - RNA, 19 nt, Homo sapiens
  misc_RNA (1)...(19): siRNA sense strand
cauauuaccagaagucaua

SEQ ID NO: 1043886 - RNA, 19 nt, Homo sapiens
  misc_RNA (1)...(19): siRNA sense strand
ggaaauaaggcacacaaug

SEQ ID NO: 1043887 - RNA, 19 nt, Homo sapiens
  misc_RNA (1)...(19): siRNA sense strand
uagaagaaauguggacuuu

SEQ ID NO: 1043888 - RNA, 19 nt, Homo sapiens
  misc_RNA (1)...(19): siRNA sense strand
caacugccuuagaauguaa

SEQ ID NO: 1043889 - RNA, 19 nt, Homo sapiens
  misc_RNA (1)...(19): siRNA sense strand
gaaagugcccuggaggaua

SEQ ID NO: 1043890 - RNA, 19 nt, Homo sapiens
  misc_RNA (1)...(19): siRNA sense strand
ggaauccaaugcuuugaga

SEQ ID NO: 1043891 - RNA, 19 nt, Homo sapiens
  misc_RNA (1)...(19): siRNA sense strand
caacugccuuagaauguaa

SEQ ID NO: 1043892 - RNA, 19 nt, Homo sapiens
  misc_RNA (1)...(19): siRNA sense strand
gugcuuaaaucuaacugua

SEQ ID NO: 1043893 - RNA, 19 nt, Homo sapiens
  misc_RNA (1)...(19): siRNA sense strand
gacggagucucauaugaaa

SEQ ID NO: 1043894 - RNA, 19 nt, Homo sapiens
  misc_RNA (1)...(19): siRNA sense strand
gaaggaagaaguuauucaa

SEQ ID NO: 1043895 - RNA, 19 nt, Homo sapiens
  misc_RNA (1)...(19): siRNA sense strand
cagaaggaguuuucaauua

SEQ ID NO: 1043896 - RNA, 19 nt, Homo sapiens
  misc_RNA (1)...(19): siRNA sense strand
caaaugaaagucuauguug

SEQ ID NO: 1043897 - RNA, 19 nt, Homo sapiens
  misc_RNA (1)...(19): siRNA sense strand
gaaguuauucaaaccagua

SEQ ID NO: 1043898 - RNA, 19 nt, Homo sapiens
  misc_RNA (1)...(19): siRNA sense strand
uaauagcuguguucaagaa

SEQ ID NO: 1043899 - RNA, 19 nt, Homo sapiens
  misc_RNA (1)...(19): siRNA sense strand
gcaggaacuucugaaacua

SEQ ID NO: 1043900 - RNA, 19 nt, Homo sapiens
  misc_RNA (1)...(19): siRNA sense strand
ccauagaccuuuauuagag

SEQ ID NO: 1043901 - RNA, 19 nt, Homo sapiens
  misc_RNA (1)...(19): siRNA sense strand
ucacgggaaucuaaaggua

SEQ ID NO: 1043902 - RNA, 19 nt, Homo sapiens
  misc_RNA (1)...(19): siRNA sense strand
ccaaugcuuugagaaauaa

SEQ ID NO: 1043903 - RNA, 19 nt, Homo sapiens
  misc_RNA (1)...(19): siRNA sense strand
gaucaauucuucagacucu

SEQ ID NO: 1043904 - RNA, 19 nt, Homo sapiens
  misc_RNA (1)...(19): siRNA sense strand
gaaaucuauuggcuaauca

SEQ ID NO: 1043905 - RNA, 19 nt, Homo sapiens
  misc_RNA (1)...(19): siRNA sense strand
gauuaaggauccacgaaau

SEQ ID NO: 1043906 - RNA, 19 nt, Homo sapiens
  misc_RNA (1)...(19): siRNA sense strand
gaacagacagaccuaacuu

SEQ ID NO: 1043907 - RNA, 19 nt, Homo sapiens
  misc_RNA (1)...(19): siRNA sense strand
gaacagugccucuucuaca

SEQ ID NO: 1043908 - RNA, 19 nt, Homo sapiens
  misc_RNA (1)...(19): siRNA sense strand
cuaaguccuucucaauaua

SEQ ID NO: 1043909 - RNA, 19 nt, Homo sapiens
  misc_RNA (1)...(19): siRNA sense strand
gaaagucuauguugaugac

SEQ ID NO: 1043910 - RNA, 19 nt, Homo sapiens
  misc_RNA (1)...(19): siRNA sense strand
cacgaaaucuauuggcuaa

SEQ ID NO: 1043911 - RNA, 19 nt, Homo sapiens
  misc_RNA (1)...(19): siRNA sense strand
ggaauggucuaauaauagg

SEQ ID NO: 1043912 - RNA, 19 nt, Homo sapiens
  misc_RNA (1)...(19): siRNA sense strand
ggacaguucucuaugaaaa

SEQ ID NO: 1043913 - RNA, 19 nt, Homo sapiens
  misc_RNA (1)...(19): siRNA sense strand
uaaagauucuccucaguca

SEQ ID NO: 1043914 - RNA, 19 nt, Homo sapiens
  misc_RNA (1)...(19): siRNA sense strand
cagcagagccugucaaauc

SEQ ID NO: 1043915 - RNA, 19 nt, Homo sapiens
  misc_RNA (1)...(19): siRNA sense strand
uaaucaggaugccagaaua

SEQ ID NO: 1043916 - RNA, 19 nt, Homo sapiens
  misc_RNA (1)...(19): siRNA sense strand
caaaugcauguaucucuua

SEQ ID NO: 1043917 - RNA, 19 nt, Homo sapiens
  misc_RNA (1)...(19): siRNA sense strand
gaaaguguacagaaaccua

SEQ ID NO: 1043918 - RNA, 19 nt, Homo sapiens
  misc_RNA (1)...(19): siRNA sense strand
ccuaaguccuucucaauau

SEQ ID NO: 1043919 - RNA, 19 nt, Homo sapiens
  misc_RNA (1)...(19): siRNA sense strand
gaaagcugucaguuaaaua

SEQ ID NO: 1043920 - RNA, 19 nt, Homo sapiens
  misc_RNA (1)...(19): siRNA sense strand
aaaggaaacaugcaaauga

SEQ ID NO: 1043921 - RNA, 19 nt, Homo sapiens
  misc_RNA (1)...(19): siRNA sense strand
gagaaagucagaaauggaa

SEQ ID NO: 1043922 - RNA, 19 nt, Homo sapiens
  misc_RNA (1)...(19): siRNA sense strand
uaaagaggacuuccauuug

SEQ ID NO: 1043923 - RNA, 19 nt, Homo sapiens
  misc_RNA (1)...(19): siRNA sense strand
gaaagaacagacagaccua

SEQ ID NO: 1043924 - RNA, 19 nt, Homo sapiens
  misc_RNA (1)...(19): siRNA sense strand
uuacugggaugaacacauu

SEQ ID NO: 1043925 - RNA, 19 nt, Homo sapiens
  misc_RNA (1)...(19): siRNA sense strand
gaaaggaaacaugcaaaug

SEQ ID NO: 1043926 - RNA, 19 nt, Homo sapiens
  misc_RNA (1)...(19): siRNA sense strand
ccagagcaauuacuugaau

SEQ ID NO: 1043927 - RNA, 19 nt, Homo sapiens
  misc_RNA (1)...(19): siRNA sense strand
gcucuagauuuccacagua

SEQ ID NO: 1043928 - RNA, 19 nt, Homo sapiens
  misc_RNA (1)...(19): siRNA sense strand
ucaggacaguucucuauga

SEQ ID NO: 1043929 - RNA, 19 nt, Homo sapiens
  misc_RNA (1)...(19): siRNA sense strand
cagccaauauucagacauu

SEQ ID NO: 1043930 - RNA, 19 nt, Homo sapiens
  misc_RNA (1)...(19): siRNA sense strand
gacaucaagucacacugua

SEQ ID NO: 1043931 - RNA, 19 nt, Homo sapiens
  misc_RNA (1)...(19): siRNA sense strand
ggcagaaacucacauaguc

SEQ ID NO: 1043932 - RNA, 19 nt, Homo sapiens
  misc_RNA (1)...(19): siRNA sense strand
uaacaaagagccacacugu

SEQ ID NO: 1043933 - RNA, 19 nt, Homo sapiens
  misc_RNA (1)...(19): siRNA sense strand
guacuaggccagaauucua

SEQ ID NO: 1043934 - RNA, 19 nt, Homo sapiens
  misc_RNA (1)...(19): siRNA sense strand
gacauuaccaagagucaua

SEQ ID NO: 1043935 - RNA, 19 nt, Homo sapiens
  misc_RNA (1)...(19): siRNA sense strand
ccauggaaaugaccaaaug

SEQ ID NO: 1043936 - RNA, 19 nt, Homo sapiens
  misc_RNA (1)...(19): siRNA sense strand
uaacuaagcaagucauuca

SEQ ID NO: 1043937 - RNA, 19 nt, Homo sapiens
  misc_RNA (1)...(19): siRNA sense strand
agugcaagcuacagaaaua

SEQ ID NO: 1043938 - RNA, 19 nt, Homo sapiens
  misc_RNA (1)...(19): siRNA sense strand
ccaaaugucucucaaauau

SEQ ID NO: 1043939 - RNA, 19 nt, Homo sapiens
  misc_RNA (1)...(19): siRNA sense strand
ggaaauagauaacgaaagu

SEQ ID NO: 1043940 - RNA, 19 nt, Homo sapiens
  misc_RNA (1)...(19): siRNA sense strand
ggacgaaaguguacagaaa

SEQ ID NO: 1043941 - RNA, 19 nt, Homo sapiens
  misc_RNA (1)...(19): siRNA sense strand
gaggaauggucuaauaaua

SEQ ID NO: 1043942 - RNA, 19 nt, Homo sapiens
  misc_RNA (1)...(19): siRNA sense strand
gaaauaaggcacacaauga

SEQ ID NO: 1043943 - RNA, 19 nt, Homo sapiens
  misc_RNA (1)...(19): siRNA sense strand
guugaaagcugucaguuaa

SEQ ID NO: 1043944 - RNA, 19 nt, Homo sapiens
  misc_RNA (1)...(19): siRNA sense strand
gaagaaauguggacuuuac

SEQ ID NO: 1043945 - RNA, 19 nt, Homo sapiens
  misc_RNA (1)...(19): siRNA sense strand
ggacagaguaguaucaaua

SEQ ID NO: 1043946 - RNA, 19 nt, Homo sapiens
  misc_RNA (1)...(19): siRNA sense strand
gcauguaucucuuaaggaa

SEQ ID NO: 1043947 - RNA, 19 nt, Homo sapiens
  misc_RNA (1)...(19): siRNA sense strand
gauaauagcuguguucaag

SEQ ID NO: 1043948 - RNA, 19 nt, Homo sapiens
  misc_RNA (1)...(19): siRNA sense strand
caagauagauaccacauca

SEQ ID NO: 1043949 - RNA, 19 nt, Homo sapiens
  misc_RNA (1)...(19): siRNA sense strand
caucuaauguuccauguuu

SEQ ID NO: 1043950 - RNA, 19 nt, Homo sapiens
  misc_RNA (1)...(19): siRNA sense strand
ucacacaacugccuuagaa

SEQ ID NO: 1043951 - RNA, 19 nt, Homo sapiens
  misc_RNA (1)...(19): siRNA sense strand
ucacacaacugccuuagaa

SEQ ID NO: 1043952 - RNA, 19 nt, Homo sapiens
  misc_RNA (1)...(19): siRNA sense strand
gaaacgugauugucauuug

SEQ ID NO: 1043953 - RNA, 19 nt, Homo sapiens
  misc_RNA (1)...(19): siRNA sense strand
cauaaacucugcagacaaa

SEQ ID NO: 1043954 - RNA, 19 nt, Homo sapiens
  misc_RNA (1)...(19): siRNA sense strand
gaacuaaagcuucaggaaa

SEQ ID NO: 1043955 - RNA, 19 nt, Homo sapiens
  misc_RNA (1)...(19): siRNA sense strand
gaacauacccgugaaagga

SEQ ID NO: 1043956 - RNA, 19 nt, Homo sapiens
  misc_RNA (1)...(19): siRNA sense strand
ggagaugacuaaacuuaau

SEQ ID NO: 1043957 - RNA, 19 nt, Homo sapiens
  misc_RNA (1)...(19): siRNA sense strand
caacaacucuuugcugcua

SEQ ID NO: 1043958 - RNA, 19 nt, Homo sapiens
  misc_RNA (1)...(19): siRNA sense strand
uaauacagcucuagauuuc

SEQ ID NO: 1043959 - RNA, 19 nt, Homo sapiens
  misc_RNA (1)...(19): siRNA sense strand
gccaugcucuuaugugaua

SEQ ID NO: 1043960 - RNA, 19 nt, Homo sapiens
  misc_RNA (1)...(19): siRNA sense strand
gaacaaagacaaagauugg

SEQ ID NO: 1043961 - RNA, 19 nt, Homo sapiens
  misc_RNA (1)...(19): siRNA sense strand
gaaauaaaccauagaccuu

SEQ ID NO: 1043962 - RNA, 19 nt, Homo sapiens
  misc_RNA (1)...(19): siRNA sense strand
guaaggagauguucuuugg

SEQ ID NO: 1043963 - RNA, 19 nt, Homo sapiens
  misc_RNA (1)...(19): siRNA sense strand
uagcaaagauucaggcauu

SEQ ID NO: 1043964 - RNA, 19 nt, Homo sapiens
  misc_RNA (1)...(19): siRNA sense strand
cgagucagcuuugcagaua

SEQ ID NO: 1043965 - RNA, 19 nt, Homo sapiens
  misc_RNA (1)...(19): siRNA sense strand
gauuauauguucagaggaa

SEQ ID NO: 1043966 - RNA, 19 nt, Homo sapiens
  misc_RNA (1)...(19): siRNA sense strand
gcaacaagccauaauauag

SEQ ID NO: 1043967 - RNA, 19 nt, Homo sapiens
  misc_RNA (1)...(19): siRNA sense strand
gaccaaaugucucucaaau

SEQ ID NO: 1043968 - RNA, 19 nt, Homo sapiens
  misc_RNA (1)...(19): siRNA sense strand
gcaaugacuuuauggacuu

SEQ ID NO: 1043969 - RNA, 19 nt, Homo sapiens
  misc_RNA (1)...(19): siRNA sense strand
guggagugcuuaaaucuaa

SEQ ID NO: 1043970 - RNA, 19 nt, Homo sapiens
  misc_RNA (1)...(19): siRNA sense strand
gcaaaugacagccagcuaa

SEQ ID NO: 1043971 - RNA, 19 nt, Homo sapiens
  misc_RNA (1)...(19): siRNA sense strand
ccacaucauuucuagcuaa

SEQ ID NO: 1043972 - RNA, 19 nt, Homo sapiens
  misc_RNA (1)...(19): siRNA sense strand
gaaccuaaguccuucucaa

SEQ ID NO: 1043973 - RNA, 19 nt, Homo sapiens
  misc_RNA (1)...(19): siRNA sense strand
gauauuacccagaguugua

SEQ ID NO: 1043974 - RNA, 19 nt, Homo sapiens
  misc_RNA (1)...(19): siRNA sense strand
gauaaucccauaagugaaa

SEQ ID NO: 1043975 - RNA, 19 nt, Homo sapiens
  misc_RNA (1)...(19): siRNA sense strand
agagagaccuguuagaaga

SEQ ID NO: 1043976 - RNA, 19 nt, Homo sapiens
  misc_RNA (1)...(19): siRNA sense strand
aaagugcccuggaggauaa

SEQ ID NO: 1043977 - RNA, 19 nt, Homo sapiens
  misc_RNA (1)...(19): siRNA sense strand
agagguagcugauaacaug

SEQ ID NO: 1043978 - RNA, 19 nt, Homo sapiens
  misc_RNA (1)...(19): siRNA sense strand
gaaagugaccgucuaguag

SEQ ID NO: 1043979 - RNA, 19 nt, Homo sapiens
  misc_RNA (1)...(19): siRNA sense strand
agacagaccuaacuuugaa

SEQ ID NO: 1043980 - RNA, 19 nt, Homo sapiens
  misc_RNA (1)...(19): siRNA sense strand
gaggagaacauggacauua

SEQ ID NO: 1043981 - RNA, 19 nt, Homo sapiens
  misc_RNA (1)...(19): siRNA sense strand
guuauuuccuguacugaua

SEQ ID NO: 1043982 - RNA, 19 nt, Homo sapiens
  misc_RNA (1)...(19): siRNA sense strand
uaacaacaaugaacagaca

SEQ ID NO: 1043983 - RNA, 19 nt, Homo sapiens
  misc_RNA (1)...(19): siRNA sense strand
gaagaaaacccuaaauuug

SEQ ID NO: 1043984 - RNA, 19 nt, Homo sapiens
  misc_RNA (1)...(19): siRNA sense strand
gaaaugacagagucccaua

SEQ ID NO: 1043985 - RNA, 19 nt, Homo sapiens
  misc_RNA (1)...(19): siRNA sense strand
cauauuaccagaagucaua

SEQ ID NO: 1043986 - RNA, 19 nt, Homo sapiens
  misc_RNA (1)...(19): siRNA sense strand
ggaaauaaggcacacaaug

SEQ ID NO: 1043987 - RNA, 19 nt, Homo sapiens
  misc_RNA (1)...(19): siRNA sense strand
uagaagaaauguggacuuu

SEQ ID NO: 1043988 - RNA, 19 nt, Homo sapiens
  misc_RNA (1)...(19): siRNA sense strand
caacugccuuagaauguaa

SEQ ID NO: 1043989 - RNA, 19 nt, Homo sapiens
  misc_RNA (1)...(19): siRNA sense strand
gaaagugcccuggaggaua

SEQ ID NO: 1043990 - RNA, 19 nt, Homo sapiens
  misc_RNA (1)...(19): siRNA sense strand
ggaauccaaugcuuugaga

SEQ ID NO: 1043991 - RNA, 19 nt, Homo sapiens
  misc_RNA (1)...(19): siRNA sense strand
caacugccuuagaauguaa

SEQ ID NO: 1043992 - RNA, 19 nt, Homo sapiens
  misc_RNA (1)...(19): siRNA sense strand
gugcuuaaaucuaacugua

SEQ ID NO: 1043993 - RNA, 19 nt, Homo sapiens
  misc_RNA (1)...(19): siRNA sense strand
gacggagucucauaugaaa

SEQ ID NO: 1043994 - RNA, 19 nt, Homo sapiens
  misc_RNA (1)...(19): siRNA sense strand
gaaggaagaaguuauucaa

SEQ ID NO: 1043995 - RNA, 19 nt, Homo sapiens
  misc_RNA (1)...(19): siRNA sense strand
cagaaggaguuuucaauua

SEQ ID NO: 1043996 - RNA, 19 nt, Homo sapiens
  misc_RNA (1)...(19): siRNA sense strand
caaaugaaagucuauguug

SEQ ID NO: 1043997 - RNA, 19 nt, Homo sapiens
  misc_RNA (1)...(19): siRNA sense strand
gaaguuauucaaaccagua

SEQ ID NO: 1043998 - RNA, 19 nt, Homo sapiens
  misc_RNA (1)...(19): siRNA sense strand
uaauagcuguguucaagaa

SEQ ID NO: 1043999 - RNA, 19 nt, Homo sapiens
  misc_RNA (1)...(19): siRNA sense strand
gcaggaacuucugaaacua

SEQ ID NO: 1044000 - RNA, 19 nt, Homo sapiens
  misc_RNA (1)...(19): siRNA sense strand
ccauagaccuuuauuagag

SEQ ID NO: 1044001 - RNA, 19 nt, Homo sapiens
  misc_RNA (1)...(19): siRNA sense strand
ucacgggaaucuaaaggua

SEQ ID NO: 1044002 - RNA, 19 nt, Homo sapiens
  misc_RNA (1)...(19): siRNA sense strand
ccaaugcuuugagaaauaa

SEQ ID NO: 1044003 - RNA, 19 nt, Homo sapiens
  misc_RNA (1)...(19): siRNA sense strand
gaucaauucuucagacucu

SEQ ID NO: 1044004 - RNA, 19 nt, Homo sapiens
  misc_RNA (1)...(19): siRNA sense strand
gaaaucuauuggcuaauca

SEQ ID NO: 1044005 - RNA, 19 nt, Homo sapiens
  misc_RNA (1)...(19): siRNA sense strand
gauuaaggauccacgaaau

SEQ ID NO: 1044006 - RNA, 19 nt, Homo sapiens
  misc_RNA (1)...(19): siRNA sense strand
gaacagacagaccuaacuu

SEQ ID NO: 1044007 - RNA, 19 nt, Homo sapiens
  misc_RNA (1)...(19): siRNA sense strand
gaacagugccucuucuaca

SEQ ID NO: 1044008 - RNA, 19 nt, Homo sapiens
  misc_RNA (1)...(19): siRNA sense strand
cuaaguccuucucaauaua

SEQ ID NO: 1044009 - RNA, 19 nt, Homo sapiens
  misc_RNA (1)...(19): siRNA sense strand
gaaagucuauguugaugac

SEQ ID NO: 1044010 - RNA, 19 nt, Homo sapiens
  misc_RNA (1)...(19): siRNA sense strand
cacgaaaucuauuggcuaa

SEQ ID NO: 1044011 - RNA, 19 nt, Homo sapiens
  misc_RNA (1)...(19): siRNA sense strand
ggaauggucuaauaauagg

SEQ ID NO: 1044012 - RNA, 19 nt, Homo sapiens
  misc_RNA (1)...(19): siRNA sense strand
ggacaguucucuaugaaaa

SEQ ID NO: 1044013 - RNA, 19 nt, Homo sapiens
  misc_RNA (1)...(19): siRNA sense strand
uaaagauucuccucaguca

SEQ ID NO: 1044014 - RNA, 19 nt, Homo sapiens
  misc_RNA (1)...(19): siRNA sense strand
cagcagagccugucaaauc

SEQ ID NO: 1044015 - RNA, 19 nt, Homo sapiens
  misc_RNA (1)...(19): siRNA sense strand
uaaucaggaugccagaaua

SEQ ID NO: 1044016 - RNA, 19 nt, Homo sapiens
  misc_RNA (1)...(19): siRNA sense strand
caaaugcauguaucucuua

SEQ ID NO: 1044017 - RNA, 19 nt, Homo sapiens
  misc_RNA (1)...(19): siRNA sense strand
gaaaguguacagaaaccua

SEQ ID NO: 1044018 - RNA, 19 nt, Homo sapiens
  misc_RNA (1)...(19): siRNA sense strand
ccuaaguccuucucaauau

SEQ ID NO: 1044019 - RNA, 19 nt, Homo sapiens
  misc_RNA (1)...(19): siRNA sense strand
gaaagcugucaguuaaaua

SEQ ID NO: 1044020 - RNA, 19 nt, Homo sapiens
  misc_RNA (1)...(19): siRNA sense strand
aaaggaaacaugcaaauga

SEQ ID NO: 1044021 - RNA, 19 nt, Homo sapiens
  misc_RNA (1)...(19): siRNA sense strand
gagaaagucagaaauggaa

SEQ ID NO: 1044022 - RNA, 19 nt, Homo sapiens
  misc_RNA (1)...(19): siRNA sense strand
uaaagaggacuuccauuug

SEQ ID NO: 1044023 - RNA, 19 nt, Homo sapiens
  misc_RNA (1)...(19): siRNA sense strand
gaaagaacagacagaccua

SEQ ID NO: 1044024 - RNA, 19 nt, Homo sapiens
  misc_RNA (1)...(19): siRNA sense strand
uuacugggaugaacacauu

SEQ ID NO: 1044025 - RNA, 19 nt, Homo sapiens
  misc_RNA (1)...(19): siRNA sense strand
gaaaggaaacaugcaaaug

SEQ ID NO: 1044026 - RNA, 19 nt, Homo sapiens
  misc_RNA (1)...(19): siRNA sense strand
ccagagcaauuacuugaau

SEQ ID NO: 1044027 - RNA, 19 nt, Homo sapiens
  misc_RNA (1)...(19): siRNA sense strand
gcucuagauuuccacagua

SEQ ID NO: 1044028 - RNA, 19 nt, Homo sapiens
  misc_RNA (1)...(19): siRNA sense strand
ucaggacaguucucuauga

SEQ ID NO: 1044029 - RNA, 19 nt, Homo sapiens
  misc_RNA (1)...(19): siRNA sense strand
cagccaauauucagacauu

SEQ ID NO: 1044030 - RNA, 19 nt, Homo sapiens
  misc_RNA (1)...(19): siRNA sense strand
gacaucaagucacacugua

SEQ ID NO: 1044031 - RNA, 19 nt, Homo sapiens
  misc_RNA (1)...(19): siRNA sense strand
ggcagaaacucacauaguc

SEQ ID NO: 1044032 - RNA, 19 nt, Homo sapiens
  misc_RNA (1)...(19): siRNA sense strand
uaacaaagagccacacugu

SEQ ID NO: 1044033 - RNA, 19 nt, Homo sapiens
  misc_RNA (1)...(19): siRNA sense strand
guacuaggccagaauucua

SEQ ID NO: 1044034 - RNA, 19 nt, Homo sapiens
  misc_RNA (1)...(19): siRNA sense strand
gacauuaccaagagucaua

SEQ ID NO: 1044035 - RNA, 19 nt, Homo sapiens
  misc_RNA (1)...(19): siRNA sense strand
ccauggaaaugaccaaaug

SEQ ID NO: 1044036 - RNA, 19 nt, Homo sapiens
  misc_RNA (1)...(19): siRNA sense strand
uaacuaagcaagucauuca

SEQ ID NO: 1044037 - RNA, 19 nt, Homo sapiens
  misc_RNA (1)...(19): siRNA sense strand
agugcaagcuacagaaaua

SEQ ID NO: 1044038 - RNA, 19 nt, Homo sapiens
  misc_RNA (1)...(19): siRNA sense strand
ggaaggagcugaguaaucu

SEQ ID NO: 1044039 - RNA, 19 nt, Homo sapiens
  misc_RNA (1)...(19): siRNA sense strand
caagacaguucgcaaagaa

SEQ ID NO: 1044040 - RNA, 19 nt, Homo sapiens
  misc_RNA (1)...(19): siRNA sense strand
gcaaagcccucaucaccau

SEQ ID NO: 1044041 - RNA, 19 nt, Homo sapiens
  misc_RNA (1)...(19): siRNA sense strand
gaauggaucuuugguguag

SEQ ID NO: 1044042 - RNA, 19 nt, Homo sapiens
  misc_RNA (1)...(19): siRNA sense strand
gcaggaaggagcugaguaa

SEQ ID NO: 1044043 - RNA, 19 nt, Homo sapiens
  misc_RNA (1)...(19): siRNA sense strand
ggucauccguggaguuuga

SEQ ID NO: 1044044 - RNA, 19 nt, Homo sapiens
  misc_RNA (1)...(19): siRNA sense strand
ccacauggcuguccuuugc

SEQ ID NO: 1044045 - RNA, 19 nt, Homo sapiens
  misc_RNA (1)...(19): siRNA sense strand
gaucuggugugcccucuuc

SEQ ID NO: 1044046 - RNA, 19 nt, Homo sapiens
  misc_RNA (1)...(19): siRNA sense strand
ggaauggaucuuuggugua

SEQ ID NO: 1044047 - RNA, 19 nt, Homo sapiens
  misc_RNA (1)...(19): siRNA sense strand
gguauuaucgggaaccauu

SEQ ID NO: 1044048 - RNA, 19 nt, Homo sapiens
  misc_RNA (1)...(19): siRNA sense strand
gcaacaaguucgucuucag

SEQ ID NO: 1044049 - RNA, 19 nt, Homo sapiens
  misc_RNA (1)...(19): siRNA sense strand
uauggacucuggaacaaga

SEQ ID NO: 1044050 - RNA, 19 nt, Homo sapiens
  misc_RNA (1)...(19): siRNA sense strand
uccaggcucuucagcauuu

SEQ ID NO: 1044051 - RNA, 19 nt, Homo sapiens
  misc_RNA (1)...(19): siRNA sense strand
cuacuaugcuguccuguac

SEQ ID NO: 1044052 - RNA, 19 nt, Homo sapiens
  misc_RNA (1)...(19): siRNA sense strand
gguccucggugccuucaug

SEQ ID NO: 1044053 - RNA, 19 nt, Homo sapiens
  misc_RNA (1)...(19): siRNA sense strand
gcaggaggaaugccuuuca

SEQ ID NO: 1044054 - RNA, 19 nt, Homo sapiens
  misc_RNA (1)...(19): siRNA sense strand
acaagacaguucgcaaaga

SEQ ID NO: 1044055 - RNA, 19 nt, Homo sapiens
  misc_RNA (1)...(19): siRNA sense strand
gcuacuaugcuguccugua

SEQ ID NO: 1044056 - RNA, 19 nt, Homo sapiens
  misc_RNA (1)...(19): siRNA sense strand
ggugugcuauggcuucauc

SEQ ID NO: 1044057 - RNA, 19 nt, Homo sapiens
  misc_RNA (1)...(19): siRNA sense strand
gggcugugauggcacuugu

SEQ ID NO: 1044058 - RNA, 19 nt, Homo sapiens
  misc_RNA (1)...(19): siRNA sense strand
cuacugggcaugugcuuug

SEQ ID NO: 1044059 - RNA, 19 nt, Homo sapiens
  misc_RNA (1)...(19): siRNA sense strand
ugauggcacuugucuacau

SEQ ID NO: 1044060 - RNA, 19 nt, Homo sapiens
  misc_RNA (1)...(19): siRNA sense strand
gcaccuccaccuccucuuc

SEQ ID NO: 1044061 - RNA, 19 nt, Homo sapiens
  misc_RNA (1)...(19): siRNA sense strand
gccugacucuguccaacuu

SEQ ID NO: 1044062 - RNA, 19 nt, Homo sapiens
  misc_RNA (1)...(19): siRNA sense strand
ggaaccauuugugcaacga

SEQ ID NO: 1044063 - RNA, 19 nt, Homo sapiens
  misc_RNA (1)...(19): siRNA sense strand
cagaggaccgggaggaaga

SEQ ID NO: 1044064 - RNA, 19 nt, Homo sapiens
  misc_RNA (1)...(19): siRNA sense strand
ucuauggacucuggaacaa

SEQ ID NO: 1044065 - RNA, 19 nt, Homo sapiens
  misc_RNA (1)...(19): siRNA sense strand
guaguguggugcaacuucu

SEQ ID NO: 1044066 - RNA, 19 nt, Homo sapiens
  misc_RNA (1)...(19): siRNA sense strand
ucaucguggucaccuugua

SEQ ID NO: 1044067 - RNA, 19 nt, Homo sapiens
  misc_RNA (1)...(19): siRNA sense strand
cagcaacaaguucgucuuc

SEQ ID NO: 1044068 - RNA, 19 nt, Homo sapiens
  misc_RNA (1)...(19): siRNA sense strand
guucaucgccaucauuguc

SEQ ID NO: 1044069 - RNA, 19 nt, Homo sapiens
  misc_RNA (1)...(19): siRNA sense strand
ucaggcagcaggaggaaug

SEQ ID NO: 1044070 - RNA, 19 nt, Homo sapiens
  misc_RNA (1)...(19): siRNA sense strand
ccguggaguuugacgaguu

SEQ ID NO: 1044071 - RNA, 19 nt, Homo sapiens
  misc_RNA (1)...(19): siRNA sense strand
ccaguucaucgccaucauu

SEQ ID NO: 1044072 - RNA, 19 nt, Homo sapiens
  misc_RNA (1)...(19): siRNA sense strand
cgcagggaauggaucuuug

SEQ ID NO: 1044073 - RNA, 19 nt, Homo sapiens
  misc_RNA (1)...(19): siRNA sense strand
caucaucacccaguucauc

SEQ ID NO: 1044074 - RNA, 19 nt, Homo sapiens
  misc_RNA (1)...(19): siRNA sense strand
ugggaaaccuggucaucgu

SEQ ID NO: 1044075 - RNA, 19 nt, Homo sapiens
  misc_RNA (1)...(19): siRNA sense strand
gcagggaauggaucuuugg

SEQ ID NO: 1044076 - RNA, 19 nt, Homo sapiens
  misc_RNA (1)...(19): siRNA sense strand
acaccucacugcgcucaug

SEQ ID NO: 1044077 - RNA, 19 nt, Homo sapiens
  misc_RNA (1)...(19): siRNA sense strand
ccgcagggaauggaucuuu

SEQ ID NO: 1044078 - RNA, 19 nt, Homo sapiens
  misc_RNA (1)...(19): siRNA sense strand
gguguaguguggugcaacu

SEQ ID NO: 1044079 - RNA, 19 nt, Homo sapiens
  misc_RNA (1)...(19): siRNA sense strand
guauuaucgggaaccauuu

SEQ ID NO: 1044080 - RNA, 19 nt, Homo sapiens
  misc_RNA (1)...(19): siRNA sense strand
cagcaggaggaaugccuuu

SEQ ID NO: 1044081 - RNA, 19 nt, Homo sapiens
  misc_RNA (1)...(19): siRNA sense strand
gugcuauggcuucaucuuc

SEQ ID NO: 1044082 - RNA, 19 nt, Homo sapiens
  misc_RNA (1)...(19): siRNA sense strand
gugcaacgacagaggacuu

SEQ ID NO: 1044083 - RNA, 19 nt, Homo sapiens
  misc_RNA (1)...(19): siRNA sense strand
ggaccgggaggaagaacuc

SEQ ID NO: 1044084 - RNA, 19 nt, Homo sapiens
  misc_RNA (1)...(19): siRNA sense strand
ggaaggagcugaguaaucu

SEQ ID NO: 1044085 - RNA, 19 nt, Homo sapiens
  misc_RNA (1)...(19): siRNA sense strand
caagacaguucgcaaagaa

SEQ ID NO: 1044086 - RNA, 19 nt, Homo sapiens
  misc_RNA (1)...(19): siRNA sense strand
gcaaagcccucaucaccau

SEQ ID NO: 1044087 - RNA, 19 nt, Homo sapiens
  misc_RNA (1)...(19): siRNA sense strand
gaauggaucuuugguguag

SEQ ID NO: 1044088 - RNA, 19 nt, Homo sapiens
  misc_RNA (1)...(19): siRNA sense strand
gcaggaaggagcugaguaa

SEQ ID NO: 1044089 - RNA, 19 nt, Homo sapiens
  misc_RNA (1)...(19): siRNA sense strand
ggucauccguggaguuuga

SEQ ID NO: 1044090 - RNA, 19 nt, Homo sapiens
  misc_RNA (1)...(19): siRNA sense strand
ccacauggcuguccuuugc

SEQ ID NO: 1044091 - RNA, 19 nt, Homo sapiens
  misc_RNA (1)...(19): siRNA sense strand
gaucuggugugcccucuuc

SEQ ID NO: 1044092 - RNA, 19 nt, Homo sapiens
  misc_RNA (1)...(19): siRNA sense strand
ggaauggaucuuuggugua

SEQ ID NO: 1044093 - RNA, 19 nt, Homo sapiens
  misc_RNA (1)...(19): siRNA sense strand
gguauuaucgggaaccauu

SEQ ID NO: 1044094 - RNA, 19 nt, Homo sapiens
  misc_RNA (1)...(19): siRNA sense strand
gcaacaaguucgucuucag

SEQ ID NO: 1044095 - RNA, 19 nt, Homo sapiens
  misc_RNA (1)...(19): siRNA sense strand
uauggacucuggaacaaga

SEQ ID NO: 1044096 - RNA, 19 nt, Homo sapiens
  misc_RNA (1)...(19): siRNA sense strand
uccaggcucuucagcauuu

SEQ ID NO: 1044097 - RNA, 19 nt, Homo sapiens
  misc_RNA (1)...(19): siRNA sense strand
cuacuaugcuguccuguac

SEQ ID NO: 1044098 - RNA, 19 nt, Homo sapiens
  misc_RNA (1)...(19): siRNA sense strand
gguccucggugccuucaug

SEQ ID NO: 1044099 - RNA, 19 nt, Homo sapiens
  misc_RNA (1)...(19): siRNA sense strand
gcaggaggaaugccuuuca

SEQ ID NO: 1044100 - RNA, 19 nt, Homo sapiens
  misc_RNA (1)...(19): siRNA sense strand
acaagacaguucgcaaaga

SEQ ID NO: 1044101 - RNA, 19 nt, Homo sapiens
  misc_RNA (1)...(19): siRNA sense strand
gcuacuaugcuguccugua

SEQ ID NO: 1044102 - RNA, 19 nt, Homo sapiens
  misc_RNA (1)...(19): siRNA sense strand
ggugugcuauggcuucauc

SEQ ID NO: 1044103 - RNA, 19 nt, Homo sapiens
  misc_RNA (1)...(19): siRNA sense strand
gggcugugauggcacuugu

SEQ ID NO: 1044104 - RNA, 19 nt, Homo sapiens
  misc_RNA (1)...(19): siRNA sense strand
cuacugggcaugugcuuug

SEQ ID NO: 1044105 - RNA, 19 nt, Homo sapiens
  misc_RNA (1)...(19): siRNA sense strand
ugauggcacuugucuacau

SEQ ID NO: 1044106 - RNA, 19 nt, Homo sapiens
  misc_RNA (1)...(19): siRNA sense strand
gcaccuccaccuccucuuc

SEQ ID NO: 1044107 - RNA, 19 nt, Homo sapiens
  misc_RNA (1)...(19): siRNA sense strand
gccugacucuguccaacuu

SEQ ID NO: 1044108 - RNA, 19 nt, Homo sapiens
  misc_RNA (1)...(19): siRNA sense strand
ggaaccauuugugcaacga

SEQ ID NO: 1044109 - RNA, 19 nt, Homo sapiens
  misc_RNA (1)...(19): siRNA sense strand
cagaggaccgggaggaaga

SEQ ID NO: 1044110 - RNA, 19 nt, Homo sapiens
  misc_RNA (1)...(19): siRNA sense strand
ucuauggacucuggaacaa

SEQ ID NO: 1044111 - RNA, 19 nt, Homo sapiens
  misc_RNA (1)...(19): siRNA sense strand
guaguguggugcaacuucu

SEQ ID NO: 1044112 - RNA, 19 nt, Homo sapiens
  misc_RNA (1)...(19): siRNA sense strand
ucaucguggucaccuugua

SEQ ID NO: 1044113 - RNA, 19 nt, Homo sapiens
  misc_RNA (1)...(19): siRNA sense strand
cagcaacaaguucgucuuc

SEQ ID NO: 1044114 - RNA, 19 nt, Homo sapiens
  misc_RNA (1)...(19): siRNA sense strand
guucaucgccaucauuguc

SEQ ID NO: 1044115 - RNA, 19 nt, Homo sapiens
  misc_RNA (1)...(19): siRNA sense strand
ucaggcagcaggaggaaug

SEQ ID NO: 1044116 - RNA, 19 nt, Homo sapiens
  misc_RNA (1)...(19): siRNA sense strand
ccguggaguuugacgaguu

SEQ ID NO: 1044117 - RNA, 19 nt, Homo sapiens
  misc_RNA (1)...(19): siRNA sense strand
ccaguucaucgccaucauu

SEQ ID NO: 1044118 - RNA, 19 nt, Homo sapiens
  misc_RNA (1)...(19): siRNA sense strand
cgcagggaauggaucuuug

SEQ ID NO: 1044119 - RNA, 19 nt, Homo sapiens
  misc_RNA (1)...(19): siRNA sense strand
caucaucacccaguucauc

SEQ ID NO: 1044120 - RNA, 19 nt, Homo sapiens
  misc_RNA (1)...(19): siRNA sense strand
ugggaaaccuggucaucgu

SEQ ID NO: 1044121 - RNA, 19 nt, Homo sapiens
  misc_RNA (1)...(19): siRNA sense strand
gcagggaauggaucuuugg

SEQ ID NO: 1044122 - RNA, 19 nt, Homo sapiens
  misc_RNA (1)...(19): siRNA sense strand
acaccucacugcgcucaug

SEQ ID NO: 1044123 - RNA, 19 nt, Homo sapiens
  misc_RNA (1)...(19): siRNA sense strand
ccgcagggaauggaucuuu

SEQ ID NO: 1044124 - RNA, 19 nt, Homo sapiens
  misc_RNA (1)...(19): siRNA sense strand
gguguaguguggugcaacu

SEQ ID NO: 1044125 - RNA, 19 nt, Homo sapiens
  misc_RNA (1)...(19): siRNA sense strand
guauuaucgggaaccauuu

SEQ ID NO: 1044126 - RNA, 19 nt, Homo sapiens
  misc_RNA (1)...(19): siRNA sense strand
cagcaggaggaaugccuuu

SEQ ID NO: 1044127 - RNA, 19 nt, Homo sapiens
  misc_RNA (1)...(19): siRNA sense strand
gugcuauggcuucaucuuc

SEQ ID NO: 1044128 - RNA, 19 nt, Homo sapiens
  misc_RNA (1)...(19): siRNA sense strand
gugcaacgacagaggacuu

SEQ ID NO: 1044129 - RNA, 19 nt, Homo sapiens
  misc_RNA (1)...(19): siRNA sense strand
ggaccgggaggaagaacuc

SEQ ID NO: 1044130 - RNA, 19 nt, Homo sapiens
  misc_RNA (1)...(19): siRNA sense strand
gagcuggaguucugugaaa

SEQ ID NO: 1044131 - RNA, 19 nt, Homo sapiens
  misc_RNA (1)...(19): siRNA sense strand
ggacaaugccgcagacuuc

SEQ ID NO: 1044132 - RNA, 19 nt, Homo sapiens
  misc_RNA (1)...(19): siRNA sense strand
gggccacccugaacacaaa

SEQ ID NO: 1044133 - RNA, 19 nt, Homo sapiens
  misc_RNA (1)...(19): siRNA sense strand
gggaggagguggagcagau

SEQ ID NO: 1044134 - RNA, 19 nt, Homo sapiens
  misc_RNA (1)...(19): siRNA sense strand
gccagacccuccuccagaa

SEQ ID NO: 1044135 - RNA, 19 nt, Homo sapiens
  misc_RNA (1)...(19): siRNA sense strand
ggacggcuucucuguguug

SEQ ID NO: 1044136 - RNA, 19 nt, Homo sapiens
  misc_RNA (1)...(19): siRNA sense strand
gugagaacauggacaaugc

SEQ ID NO: 1044137 - RNA, 19 nt, Homo sapiens
  misc_RNA (1)...(19): siRNA sense strand
gaagcucaaggucaaauca

SEQ ID NO: 1044138 - RNA, 19 nt, Homo sapiens
  misc_RNA (1)...(19): siRNA sense strand
ugcagaagcucaaggucaa

SEQ ID NO: 1044139 - RNA, 19 nt, Homo sapiens
  misc_RNA (1)...(19): siRNA sense strand
aggaggagcuggaguucug

SEQ ID NO: 1044140 - RNA, 19 nt, Homo sapiens
  misc_RNA (1)...(19): siRNA sense strand
cggcuucucuguguugaug

SEQ ID NO: 1044141 - RNA, 19 nt, Homo sapiens
  misc_RNA (1)...(19): siRNA sense strand
cuccagaaccgaugaguga

SEQ ID NO: 1044142 - RNA, 19 nt, Homo sapiens
  misc_RNA (1)...(19): siRNA sense strand
caaggucaaaucagcauuc

SEQ ID NO: 1044143 - RNA, 19 nt, Homo sapiens
  misc_RNA (1)...(19): siRNA sense strand
cgaccugugugagaacaug

SEQ ID NO: 1044144 - RNA, 19 nt, Homo sapiens
  misc_RNA (1)...(19): siRNA sense strand
cuggacggcuucucugugu

SEQ ID NO: 1044145 - RNA, 19 nt, Homo sapiens
  misc_RNA (1)...(19): siRNA sense strand
gcagccuggugacagacuu

SEQ ID NO: 1044146 - RNA, 19 nt, Homo sapiens
  misc_RNA (1)...(19): siRNA sense strand
gaggagguggagcagauga

SEQ ID NO: 1044147 - RNA, 19 nt, Homo sapiens
  misc_RNA (1)...(19): siRNA sense strand
ggagcuggaguucugugaa

SEQ ID NO: 1044148 - RNA, 19 nt, Homo sapiens
  misc_RNA (1)...(19): siRNA sense strand
gcagaagcucaaggucaaa

SEQ ID NO: 1044149 - RNA, 19 nt, Homo sapiens
  misc_RNA (1)...(19): siRNA sense strand
uggccgaccugugugagaa

SEQ ID NO: 1044150 - RNA, 19 nt, Homo sapiens
  misc_RNA (1)...(19): siRNA sense strand
gcagcagcaugaggaguac

SEQ ID NO: 1044151 - RNA, 19 nt, Homo sapiens
  misc_RNA (1)...(19): siRNA sense strand
gagguggagcagaugaaga

SEQ ID NO: 1044152 - RNA, 19 nt, Homo sapiens
  misc_RNA (1)...(19): siRNA sense strand
ugcagcagcaugaggagua

SEQ ID NO: 1044153 - RNA, 19 nt, Homo sapiens
  misc_RNA (1)...(19): siRNA sense strand
gaauauagguugucaaaug

SEQ ID NO: 1044154 - RNA, 19 nt, Homo sapiens
  misc_RNA (1)...(19): siRNA sense strand
gauauucggugcaguuaua

SEQ ID NO: 1044155 - RNA, 19 nt, Homo sapiens
  misc_RNA (1)...(19): siRNA sense strand
caaguaaucuggcucaauu

SEQ ID NO: 1044156 - RNA, 19 nt, Homo sapiens
  misc_RNA (1)...(19): siRNA sense strand
caaaggugauucauuagua

SEQ ID NO: 1044157 - RNA, 19 nt, Homo sapiens
  misc_RNA (1)...(19): siRNA sense strand
gcacagagaagaaauuauu

SEQ ID NO: 1044158 - RNA, 19 nt, Homo sapiens
  misc_RNA (1)...(19): siRNA sense strand
gaaguucauuaccagaaua

SEQ ID NO: 1044159 - RNA, 19 nt, Homo sapiens
  misc_RNA (1)...(19): siRNA sense strand
gagcagacucuucuaauuu

SEQ ID NO: 1044160 - RNA, 19 nt, Homo sapiens
  misc_RNA (1)...(19): siRNA sense strand
gcagcagacucguguaauu

SEQ ID NO: 1044161 - RNA, 19 nt, Homo sapiens
  misc_RNA (1)...(19): siRNA sense strand
gugaaugucuacuguuuaa

SEQ ID NO: 1044162 - RNA, 19 nt, Homo sapiens
  misc_RNA (1)...(19): siRNA sense strand
ugucaaagauucaggauga

SEQ ID NO: 1044163 - RNA, 19 nt, Homo sapiens
  misc_RNA (1)...(19): siRNA sense strand
gaaaggaugccguuguuug

SEQ ID NO: 1044164 - RNA, 19 nt, Homo sapiens
  misc_RNA (1)...(19): siRNA sense strand
ccacauuucuuaagagaga

SEQ ID NO: 1044165 - RNA, 19 nt, Homo sapiens
  misc_RNA (1)...(19): siRNA sense strand
acacauauuugguaucuga

SEQ ID NO: 1044166 - RNA, 19 nt, Homo sapiens
  misc_RNA (1)...(19): siRNA sense strand
gguauccaguugccucuua

SEQ ID NO: 1044167 - RNA, 19 nt, Homo sapiens
  misc_RNA (1)...(19): siRNA sense strand
gaauuggcauugauacguu

SEQ ID NO: 1044168 - RNA, 19 nt, Homo sapiens
  misc_RNA (1)...(19): siRNA sense strand
gaaauacgagccuaucgaa

SEQ ID NO: 1044169 - RNA, 19 nt, Homo sapiens
  misc_RNA (1)...(19): siRNA sense strand
acucagagguuacuugaaa

SEQ ID NO: 1044170 - RNA, 19 nt, Homo sapiens
  misc_RNA (1)...(19): siRNA sense strand
gaaagcacaccaaauguca

SEQ ID NO: 1044171 - RNA, 19 nt, Homo sapiens
  misc_RNA (1)...(19): siRNA sense strand
cagaauauaucccaaagca

SEQ ID NO: 1044172 - RNA, 19 nt, Homo sapiens
  misc_RNA (1)...(19): siRNA sense strand
ggaaguucauuaccagaau

SEQ ID NO: 1044173 - RNA, 19 nt, Homo sapiens
  misc_RNA (1)...(19): siRNA sense strand
cugcuucacuguuuguuua

SEQ ID NO: 1044174 - RNA, 19 nt, Homo sapiens
  misc_RNA (1)...(19): siRNA sense strand
caauauacuuugccacuuc

SEQ ID NO: 1044175 - RNA, 19 nt, Homo sapiens
  misc_RNA (1)...(19): siRNA sense strand
gcagacucguguaauuaaa

SEQ ID NO: 1044176 - RNA, 19 nt, Homo sapiens
  misc_RNA (1)...(19): siRNA sense strand
gagaguccuugcuuucuga

SEQ ID NO: 1044177 - RNA, 19 nt, Homo sapiens
  misc_RNA (1)...(19): siRNA sense strand
uaucauggcuacacacuca

SEQ ID NO: 1044178 - RNA, 19 nt, Homo sapiens
  misc_RNA (1)...(19): siRNA sense strand
aaagaggguaugccaauua

SEQ ID NO: 1044179 - RNA, 19 nt, Homo sapiens
  misc_RNA (1)...(19): siRNA sense strand
gugaaaggaugccguuguu

SEQ ID NO: 1044180 - RNA, 19 nt, Homo sapiens
  misc_RNA (1)...(19): siRNA sense strand
caaaugguggcuuuaaauu

SEQ ID NO: 1044181 - RNA, 19 nt, Homo sapiens
  misc_RNA (1)...(19): siRNA sense strand
aaaggaaacccaugaaaga

SEQ ID NO: 1044182 - RNA, 19 nt, Homo sapiens
  misc_RNA (1)...(19): siRNA sense strand
ggaagaaucaccauagaag

SEQ ID NO: 1044183 - RNA, 19 nt, Homo sapiens
  misc_RNA (1)...(19): siRNA sense strand
caaagguuaucgucguauu

SEQ ID NO: 1044184 - RNA, 19 nt, Homo sapiens
  misc_RNA (1)...(19): siRNA sense strand
uacgaaagcugagaaauuc

SEQ ID NO: 1044185 - RNA, 19 nt, Homo sapiens
  misc_RNA (1)...(19): siRNA sense strand
cugauaugcuugaugauuu

SEQ ID NO: 1044186 - RNA, 19 nt, Homo sapiens
  misc_RNA (1)...(19): siRNA sense strand
acacaaguaugcauucaug

SEQ ID NO: 1044187 - RNA, 19 nt, Homo sapiens
  misc_RNA (1)...(19): siRNA sense strand
gaaucaccauagaagaauu

SEQ ID NO: 1044188 - RNA, 19 nt, Homo sapiens
  misc_RNA (1)...(19): siRNA sense strand
gaagaaucaccauagaaga

SEQ ID NO: 1044189 - RNA, 19 nt, Homo sapiens
  misc_RNA (1)...(19): siRNA sense strand
cagcagacucguguaauua

SEQ ID NO: 1044190 - RNA, 19 nt, Homo sapiens
  misc_RNA (1)...(19): siRNA sense strand
gguaugccaauuacacuua

SEQ ID NO: 1044191 - RNA, 19 nt, Homo sapiens
  misc_RNA (1)...(19): siRNA sense strand
guggugcucucuuuagaaa

SEQ ID NO: 1044192 - RNA, 19 nt, Homo sapiens
  misc_RNA (1)...(19): siRNA sense strand
caucuucacauaacacaua

SEQ ID NO: 1044193 - RNA, 19 nt, Homo sapiens
  misc_RNA (1)...(19): siRNA sense strand
gcucuggccuuaucugauc

SEQ ID NO: 1044194 - RNA, 19 nt, Homo sapiens
  misc_RNA (1)...(19): siRNA sense strand
ggagaguccuugcuuucug

SEQ ID NO: 1044195 - RNA, 19 nt, Homo sapiens
  misc_RNA (1)...(19): siRNA sense strand
gaaggucaagguuuaauag

SEQ ID NO: 1044196 - RNA, 19 nt, Homo sapiens
  misc_RNA (1)...(19): siRNA sense strand
aaugguggcuuuaaauuuc

SEQ ID NO: 1044197 - RNA, 19 nt, Homo sapiens
  misc_RNA (1)...(19): siRNA sense strand
gaaguaauggcagacaauu

SEQ ID NO: 1044198 - RNA, 19 nt, Homo sapiens
  misc_RNA (1)...(19): siRNA sense strand
ggaaacccaugaaagaaaa

SEQ ID NO: 1044199 - RNA, 19 nt, Homo sapiens
  misc_RNA (1)...(19): siRNA sense strand
ccacuucuaugcaugaaca

SEQ ID NO: 1044200 - RNA, 19 nt, Homo sapiens
  misc_RNA (1)...(19): siRNA sense strand
uaggaaagcacaccaaaug

SEQ ID NO: 1044201 - RNA, 19 nt, Homo sapiens
  misc_RNA (1)...(19): siRNA sense strand
gaauuucuugggcaauaua

SEQ ID NO: 1044202 - RNA, 19 nt, Homo sapiens
  misc_RNA (1)...(19): siRNA sense strand
ggccuuaucugaucuuguc

SEQ ID NO: 1044203 - RNA, 19 nt, Homo sapiens
  misc_RNA (1)...(19): siRNA sense strand
ucacgugaaugucuacugu

SEQ ID NO: 1044204 - RNA, 19 nt, Homo sapiens
  misc_RNA (1)...(19): siRNA sense strand
gucaaaugguggcuuuaaa

SEQ ID NO: 1044205 - RNA, 19 nt, Homo sapiens
  misc_RNA (1)...(19): siRNA sense strand
ucacauaacacauauuugg

SEQ ID NO: 1044206 - RNA, 19 nt, Homo sapiens
  misc_RNA (1)...(19): siRNA sense strand
gagccuaucgaagaaguua

SEQ ID NO: 1044207 - RNA, 19 nt, Homo sapiens
  misc_RNA (1)...(19): siRNA sense strand
caaaugaucaaaugaagca

SEQ ID NO: 1044208 - RNA, 19 nt, Homo sapiens
  misc_RNA (1)...(19): siRNA sense strand
caucagugguauccaguug

SEQ ID NO: 1044209 - RNA, 19 nt, Homo sapiens
  misc_RNA (1)...(19): siRNA sense strand
gccaauuacacuuacaaua

SEQ ID NO: 1044210 - RNA, 19 nt, Homo sapiens
  misc_RNA (1)...(19): siRNA sense strand
gcuacacacucacaagcaa

SEQ ID NO: 1044211 - RNA, 19 nt, Homo sapiens
  misc_RNA (1)...(19): siRNA sense strand
ggaaagcacaccaaauguc

SEQ ID NO: 1044212 - RNA, 19 nt, Homo sapiens
  misc_RNA (1)...(19): siRNA sense strand
ugagaugaguaaagcuauu

SEQ ID NO: 1044213 - RNA, 19 nt, Homo sapiens
  misc_RNA (1)...(19): siRNA sense strand
gcgaguccaugaguuuauu

SEQ ID NO: 1044214 - RNA, 19 nt, Homo sapiens
  misc_RNA (1)...(19): siRNA sense strand
gaucuugucauuuauacga

SEQ ID NO: 1044215 - RNA, 19 nt, Homo sapiens
  misc_RNA (1)...(19): siRNA sense strand
uuucugauaugcuugauga

SEQ ID NO: 1044216 - RNA, 19 nt, Homo sapiens
  misc_RNA (1)...(19): siRNA sense strand
caaggaagaaucaccauag

SEQ ID NO: 1044217 - RNA, 19 nt, Homo sapiens
  misc_RNA (1)...(19): siRNA sense strand
gauucaggaugacuucaga

SEQ ID NO: 1044218 - RNA, 19 nt, Homo sapiens
  misc_RNA (1)...(19): siRNA sense strand
aaacuguuauccaagcuau

SEQ ID NO: 1044219 - RNA, 19 nt, Homo sapiens
  misc_RNA (1)...(19): siRNA sense strand
uaauggugguucuggauau

SEQ ID NO: 1044220 - RNA, 19 nt, Homo sapiens
  misc_RNA (1)...(19): siRNA sense strand
gaaagcugagaaauucaaa

SEQ ID NO: 1044221 - RNA, 19 nt, Homo sapiens
  misc_RNA (1)...(19): siRNA sense strand
aagaagaccaggaagcuaa

SEQ ID NO: 1044222 - RNA, 19 nt, Homo sapiens
  misc_RNA (1)...(19): siRNA sense strand
gaguaaugcuuuucaagaa

SEQ ID NO: 1044223 - RNA, 19 nt, Homo sapiens
  misc_RNA (1)...(19): siRNA sense strand
uauccaagcuauacacaag

SEQ ID NO: 1044224 - RNA, 19 nt, Homo sapiens
  misc_RNA (1)...(19): siRNA sense strand
caccauagaagaauuuaga

SEQ ID NO: 1044225 - RNA, 19 nt, Homo sapiens
  misc_RNA (1)...(19): siRNA sense strand
guugucaaaugguggcuuu

SEQ ID NO: 1044226 - RNA, 19 nt, Homo sapiens
  misc_RNA (1)...(19): siRNA sense strand
auacgaaagcugagaaauu

SEQ ID NO: 1044227 - RNA, 19 nt, Homo sapiens
  misc_RNA (1)...(19): siRNA sense strand
uaaaggaaacccaugaaag

SEQ ID NO: 1044228 - RNA, 19 nt, Homo sapiens
  misc_RNA (1)...(19): siRNA sense strand
caagugaccuuuggggaua

SEQ ID NO: 1044229 - RNA, 19 nt, Homo sapiens
  misc_RNA (1)...(19): siRNA sense strand
auacgagccuaucgaagaa

SEQ ID NO: 1044230 - RNA, 19 nt, Homo sapiens
  misc_RNA (1)...(19): siRNA sense strand
gaaaauaggaaccuuaaag

SEQ ID NO: 1044231 - RNA, 19 nt, Homo sapiens
  misc_RNA (1)...(19): siRNA sense strand
gcugagaugaguaaagcua

SEQ ID NO: 1044232 - RNA, 19 nt, Homo sapiens
  misc_RNA (1)...(19): siRNA sense strand
ugagccugcuucacuguuu

SEQ ID NO: 1044233 - RNA, 19 nt, Homo sapiens
  misc_RNA (1)...(19): siRNA sense strand
gcagacucuucuaauuuua

SEQ ID NO: 1044234 - RNA, 19 nt, Homo sapiens
  misc_RNA (1)...(19): siRNA sense strand
acaauuugcaggcuacuuu

SEQ ID NO: 1044235 - RNA, 19 nt, Homo sapiens
  misc_RNA (1)...(19): siRNA sense strand
uccaagcuauacacaagua

SEQ ID NO: 1044236 - RNA, 19 nt, Homo sapiens
  misc_RNA (1)...(19): siRNA sense strand
uaaucuggcucaauuucug

SEQ ID NO: 1044237 - RNA, 19 nt, Homo sapiens
  misc_RNA (1)...(19): siRNA sense strand
ugaaggucaagguuuaaua

SEQ ID NO: 1044238 - RNA, 19 nt, Homo sapiens
  misc_RNA (1)...(19): siRNA sense strand
ucaaaugguggcuuuaaau

SEQ ID NO: 1044239 - RNA, 19 nt, Homo sapiens
  misc_RNA (1)...(19): siRNA sense strand
cauauuugguaucugauca

SEQ ID NO: 1044240 - RNA, 19 nt, Homo sapiens
  misc_RNA (1)...(19): siRNA sense strand
gaaaaccggaaaauucuuu

SEQ ID NO: 1044241 - RNA, 19 nt, Homo sapiens
  misc_RNA (1)...(19): siRNA sense strand
caaaagcuuucaacauuca

SEQ ID NO: 1044242 - RNA, 19 nt, Homo sapiens
  misc_RNA (1)...(19): siRNA sense strand
caacacauauucugaaaac

SEQ ID NO: 1044243 - RNA, 19 nt, Homo sapiens
  misc_RNA (1)...(19): siRNA sense strand
aaacucagagguuacuuga

SEQ ID NO: 1044244 - RNA, 19 nt, Homo sapiens
  misc_RNA (1)...(19): siRNA sense strand
ggacaaugacaggcugaaa

SEQ ID NO: 1044245 - RNA, 19 nt, Homo sapiens
  misc_RNA (1)...(19): siRNA sense strand
uaucgaagaaguuaggaaa

SEQ ID NO: 1044246 - RNA, 19 nt, Homo sapiens
  misc_RNA (1)...(19): siRNA sense strand
gaaccuguuguauaucaug

SEQ ID NO: 1044247 - RNA, 19 nt, Homo sapiens
  misc_RNA (1)...(19): siRNA sense strand
gagccugcuucacuguuug

SEQ ID NO: 1044248 - RNA, 19 nt, Homo sapiens
  misc_RNA (1)...(19): siRNA sense strand
aauauagguugucaaaugg

SEQ ID NO: 1044249 - RNA, 19 nt, Homo sapiens
  misc_RNA (1)...(19): siRNA sense strand
aagaaucaccauagaagaa

SEQ ID NO: 1044250 - RNA, 19 nt, Homo sapiens
  misc_RNA (1)...(19): siRNA sense strand
aaauugcucuggccuuauc

SEQ ID NO: 1044251 - RNA, 19 nt, Homo sapiens
  misc_RNA (1)...(19): siRNA sense strand
aaggaagaaucaccauaga

SEQ ID NO: 1044252 - RNA, 19 nt, Homo sapiens
  misc_RNA (1)...(19): siRNA sense strand
aacaaagguuaucgucgua

SEQ ID NO: 1044253 - RNA, 19 nt, Homo sapiens
  misc_RNA (1)...(19): siRNA sense strand
gaacuccagaugaauuaua

SEQ ID NO: 1044254 - RNA, 19 nt, Homo sapiens
  misc_RNA (1)...(19): siRNA sense strand
ccagaugaauuauacuuug

SEQ ID NO: 1044255 - RNA, 19 nt, Homo sapiens
  misc_RNA (1)...(19): siRNA sense strand
gaacugaaccagcagaaca

SEQ ID NO: 1044256 - RNA, 19 nt, Homo sapiens
  misc_RNA (1)...(19): siRNA sense strand
gaacagacuuaagaaacau

SEQ ID NO: 1044257 - RNA, 19 nt, Homo sapiens
  misc_RNA (1)...(19): siRNA sense strand
ucagagcccuguauacguu

SEQ ID NO: 1044258 - RNA, 19 nt, Homo sapiens
  misc_RNA (1)...(19): siRNA sense strand
cagaacaaguugggagaua

SEQ ID NO: 1044259 - RNA, 19 nt, Homo sapiens
  misc_RNA (1)...(19): siRNA sense strand
aggcaggacuggacuaauu

SEQ ID NO: 1044260 - RNA, 19 nt, Homo sapiens
  misc_RNA (1)...(19): siRNA sense strand
agaugcaguucgaacauua

SEQ ID NO: 1044261 - RNA, 19 nt, Homo sapiens
  misc_RNA (1)...(19): siRNA sense strand
gaaggguuaugcagauauc

SEQ ID NO: 1044262 - RNA, 19 nt, Homo sapiens
  misc_RNA (1)...(19): siRNA sense strand
gacaugagcgauaccaauu

SEQ ID NO: 1044263 - RNA, 19 nt, Homo sapiens
  misc_RNA (1)...(19): siRNA sense strand
ugaugaagacucagauuaa

SEQ ID NO: 1044264 - RNA, 19 nt, Homo sapiens
  misc_RNA (1)...(19): siRNA sense strand
guuaauggcuuagacaaag

SEQ ID NO: 1044265 - RNA, 19 nt, Homo sapiens
  misc_RNA (1)...(19): siRNA sense strand
cagaacuccagaugaauua

SEQ ID NO: 1044266 - RNA, 19 nt, Homo sapiens
  misc_RNA (1)...(19): siRNA sense strand
agaacagacuuaagaaaca

SEQ ID NO: 1044267 - RNA, 19 nt, Homo sapiens
  misc_RNA (1)...(19): siRNA sense strand
gaacccagaacuccagaug

SEQ ID NO: 1044268 - RNA, 19 nt, Homo sapiens
  misc_RNA (1)...(19): siRNA sense strand
aggacuaucucgaugauga

SEQ ID NO: 1044269 - RNA, 19 nt, Homo sapiens
  misc_RNA (1)...(19): siRNA sense strand
ccagaacuccagaugaauu

SEQ ID NO: 1044270 - RNA, 19 nt, Homo sapiens
  misc_RNA (1)...(19): siRNA sense strand
uggaagcacugccuuauac

SEQ ID NO: 1044271 - RNA, 19 nt, Homo sapiens
  misc_RNA (1)...(19): siRNA sense strand
caaaccagggcaaguuaaa

SEQ ID NO: 1044272 - RNA, 19 nt, Homo sapiens
  misc_RNA (1)...(19): siRNA sense strand
cgacauggcuaccaaugcu

SEQ ID NO: 1044273 - RNA, 19 nt, Homo sapiens
  misc_RNA (1)...(19): siRNA sense strand
gaacaaguugggagauaca

SEQ ID NO: 1044274 - RNA, 19 nt, Homo sapiens
  misc_RNA (1)...(19): siRNA sense strand
acccagaacuccagaugaa

SEQ ID NO: 1044275 - RNA, 19 nt, Homo sapiens
  misc_RNA (1)...(19): siRNA sense strand
ggaaaggcaccuccaaagg

SEQ ID NO: 1044276 - RNA, 19 nt, Homo sapiens
  misc_RNA (1)...(19): siRNA sense strand
cagaugcaguucgaacauu

SEQ ID NO: 1044277 - RNA, 19 nt, Homo sapiens
  misc_RNA (1)...(19): siRNA sense strand
ugaaccagcagaacaaguu

SEQ ID NO: 1044278 - RNA, 19 nt, Homo sapiens
  misc_RNA (1)...(19): siRNA sense strand
ggaaggguuaugcagauau

SEQ ID NO: 1044279 - RNA, 19 nt, Homo sapiens
  misc_RNA (1)...(19): siRNA sense strand
gaaccagcagaacaaguug

SEQ ID NO: 1044280 - RNA, 19 nt, Homo sapiens
  misc_RNA (1)...(19): siRNA sense strand
gcaguucgaacauuaagca

SEQ ID NO: 1044281 - RNA, 19 nt, Homo sapiens
  misc_RNA (1)...(19): siRNA sense strand
gcuagaacagacuuaagaa

SEQ ID NO: 1044282 - RNA, 19 nt, Homo sapiens
  misc_RNA (1)...(19): siRNA sense strand
gcaaguuaaagucuucaga

SEQ ID NO: 1044283 - RNA, 19 nt, Homo sapiens
  misc_RNA (1)...(19): siRNA sense strand
ggacuaauuccaagcaacu

SEQ ID NO: 1044284 - RNA, 19 nt, Homo sapiens
  misc_RNA (1)...(19): siRNA sense strand
gucaaaccagggcaaguua

SEQ ID NO: 1044285 - RNA, 19 nt, Homo sapiens
  misc_RNA (1)...(19): siRNA sense strand
gagcaggcagaauccauug

SEQ ID NO: 1044286 - RNA, 19 nt, Homo sapiens
  misc_RNA (1)...(19): siRNA sense strand
gaugaugaagacucagauu

SEQ ID NO: 1044287 - RNA, 19 nt, Homo sapiens
  misc_RNA (1)...(19): siRNA sense strand
guugggagauacagcuuuc

SEQ ID NO: 1044288 - RNA, 19 nt, Homo sapiens
  misc_RNA (1)...(19): siRNA sense strand
caugagcgauaccaauugg

SEQ ID NO: 1044289 - RNA, 19 nt, Homo sapiens
  misc_RNA (1)...(19): siRNA sense strand
augcagauaucguccaguu

SEQ ID NO: 1044290 - RNA, 19 nt, Homo sapiens
  misc_RNA (1)...(19): siRNA sense strand
uggaaggguuaugcagaua

SEQ ID NO: 1044291 - RNA, 19 nt, Homo sapiens
  misc_RNA (1)...(19): siRNA sense strand
gaagcacugccuuauacug

SEQ ID NO: 1044292 - RNA, 19 nt, Homo sapiens
  misc_RNA (1)...(19): siRNA sense strand
gaugcaguucgaacauuaa

SEQ ID NO: 1044293 - RNA, 19 nt, Homo sapiens
  misc_RNA (1)...(19): siRNA sense strand
ggacuaucucgaugaugaa

SEQ ID NO: 1044294 - RNA, 19 nt, Homo sapiens
  misc_RNA (1)...(19): siRNA sense strand
gcaaugccgaggacuaucu

SEQ ID NO: 1044295 - RNA, 19 nt, Homo sapiens
  misc_RNA (1)...(19): siRNA sense strand
uaagcaaugccgaggacua

SEQ ID NO: 1044296 - RNA, 19 nt, Homo sapiens
  misc_RNA (1)...(19): siRNA sense strand
cuagaacagacuuaagaaa

SEQ ID NO: 1044297 - RNA, 19 nt, Homo sapiens
  misc_RNA (1)...(19): siRNA sense strand
ggcaaaaggugcuagaaca

SEQ ID NO: 1044298 - RNA, 19 nt, Homo sapiens
  misc_RNA (1)...(19): siRNA sense strand
ugacaugagcgauaccaau

SEQ ID NO: 1044299 - RNA, 19 nt, Homo sapiens
  misc_RNA (1)...(19): siRNA sense strand
gagagaguguuuggacaac

SEQ ID NO: 1044300 - RNA, 19 nt, Homo sapiens
  misc_RNA (1)...(19): siRNA sense strand
ucucgaugaugaagacuca

SEQ ID NO: 1044301 - RNA, 19 nt, Homo sapiens
  misc_RNA (1)...(19): siRNA sense strand
aaagaaacagggaacagau

SEQ ID NO: 1044302 - RNA, 19 nt, Homo sapiens
  misc_RNA (1)...(19): siRNA sense strand
ucaaaccagggcaaguuaa

SEQ ID NO: 1044303 - RNA, 19 nt, Homo sapiens
  misc_RNA (1)...(19): siRNA sense strand
agauacagcuuucgaugcu

SEQ ID NO: 1044304 - RNA, 19 nt, Homo sapiens
  misc_RNA (1)...(19): siRNA sense strand
caaccaaauauugaacuga

SEQ ID NO: 1044305 - RNA, 19 nt, Homo sapiens
  misc_RNA (1)...(19): siRNA sense strand
uaucuacauuacugacaug

SEQ ID NO: 1044306 - RNA, 19 nt, Homo sapiens
  misc_RNA (1)...(19): siRNA sense strand
augaugaagacucagauua

SEQ ID NO: 1044307 - RNA, 19 nt, Homo sapiens
  misc_RNA (1)...(19): siRNA sense strand
uagaacagacuuaagaaac

SEQ ID NO: 1044308 - RNA, 19 nt, Homo sapiens
  misc_RNA (1)...(19): siRNA sense strand
agauauaguggaaaugcua

SEQ ID NO: 1044309 - RNA, 19 nt, Homo sapiens
  misc_RNA (1)...(19): siRNA sense strand
ugagagaguguuuggacaa

SEQ ID NO: 1044310 - RNA, 19 nt, Homo sapiens
  misc_RNA (1)...(19): siRNA sense strand
caaaggcaggacuggacua

SEQ ID NO: 1044311 - RNA, 19 nt, Homo sapiens
  misc_RNA (1)...(19): siRNA sense strand
acagggaacagaugcaguu

SEQ ID NO: 1044312 - RNA, 19 nt, Homo sapiens
  misc_RNA (1)...(19): siRNA sense strand
uuacugacaugagcgauac

SEQ ID NO: 1044313 - RNA, 19 nt, Homo sapiens
  misc_RNA (1)...(19): siRNA sense strand
cugugcaucucuccugaaa

SEQ ID NO: 1044314 - RNA, 19 nt, Homo sapiens
  misc_RNA (1)...(19): siRNA sense strand
cagggcaaguuaaagucuu

SEQ ID NO: 1044315 - RNA, 19 nt, Homo sapiens
  misc_RNA (1)...(19): siRNA sense strand
gaggcaacuugagcugguu

SEQ ID NO: 1044316 - RNA, 19 nt, Homo sapiens
  misc_RNA (1)...(19): siRNA sense strand
gcuggaagcacugccuuau

SEQ ID NO: 1044317 - RNA, 19 nt, Homo sapiens
  misc_RNA (1)...(19): siRNA sense strand
cuggaaggguuaugcagau

SEQ ID NO: 1044318 - RNA, 19 nt, Homo sapiens
  misc_RNA (1)...(19): siRNA sense strand
gaaacagggaacagaugca

SEQ ID NO: 1044319 - RNA, 19 nt, Homo sapiens
  misc_RNA (1)...(19): siRNA sense strand
aaaggcaggacuggacuaa

SEQ ID NO: 1044320 - RNA, 19 nt, Homo sapiens
  misc_RNA (1)...(19): siRNA sense strand
gacuuaagaaacauugaga

SEQ ID NO: 1044321 - RNA, 19 nt, Homo sapiens
  misc_RNA (1)...(19): siRNA sense strand
cuggaagcacugccuuaua

SEQ ID NO: 1044322 - RNA, 19 nt, Homo sapiens
  misc_RNA (1)...(19): siRNA sense strand
ugagcaggcagaauccauu

SEQ ID NO: 1044323 - RNA, 19 nt, Homo sapiens
  misc_RNA (1)...(19): siRNA sense strand
agaacaaguugggagauac

SEQ ID NO: 1044324 - RNA, 19 nt, Homo sapiens
  misc_RNA (1)...(19): siRNA sense strand
ggugcuagaacagacuuaa

SEQ ID NO: 1044325 - RNA, 19 nt, Homo sapiens
  misc_RNA (1)...(19): siRNA sense strand
ggcaggacuggacuaauuc

SEQ ID NO: 1044326 - RNA, 19 nt, Homo sapiens
  misc_RNA (1)...(19): siRNA sense strand
gcagaacaaguugggagau

SEQ ID NO: 1044327 - RNA, 19 nt, Homo sapiens
  misc_RNA (1)...(19): siRNA sense strand
caggcagaauccauugaca

SEQ ID NO: 1044328 - RNA, 19 nt, Homo sapiens
  misc_RNA (1)...(19): siRNA sense strand
uggcugagcaggcagaauc

SEQ ID NO: 1044329 - RNA, 19 nt, Homo sapiens
  misc_RNA (1)...(19): siRNA sense strand
gagaggugaucaauagaaa

SEQ ID NO: 1044330 - RNA, 19 nt, Homo sapiens
  misc_RNA (1)...(19): siRNA sense strand
uuagagaggugaucaauag

SEQ ID NO: 1044331 - RNA, 19 nt, Homo sapiens
  misc_RNA (1)...(19): siRNA sense strand
guaugaagaugcccaacuu

SEQ ID NO: 1044332 - RNA, 19 nt, Homo sapiens
  misc_RNA (1)...(19): siRNA sense strand
ggaagacccacacacacua

SEQ ID NO: 1044333 - RNA, 19 nt, Homo sapiens
  misc_RNA (1)...(19): siRNA sense strand
gcucuucuucugaaucuua

SEQ ID NO: 1044334 - RNA, 19 nt, Homo sapiens
  misc_RNA (1)...(19): siRNA sense strand
uaaagaaggagcagaacaa

SEQ ID NO: 1044335 - RNA, 19 nt, Homo sapiens
  misc_RNA (1)...(19): siRNA sense strand
aggcuaggaugauauauga

SEQ ID NO: 1044336 - RNA, 19 nt, Homo sapiens
  misc_RNA (1)...(19): siRNA sense strand
gaacagaauacagugaaga

SEQ ID NO: 1044337 - RNA, 19 nt, Homo sapiens
  misc_RNA (1)...(19): siRNA sense strand
caauagaaaucuguuggau

SEQ ID NO: 1044338 - RNA, 19 nt, Homo sapiens
  misc_RNA (1)...(19): siRNA sense strand
gcacagagauucuuuucca

SEQ ID NO: 1044339 - RNA, 19 nt, Homo sapiens
  misc_RNA (1)...(19): siRNA sense strand
gaaaccagaggcccaacaa

SEQ ID NO: 1044340 - RNA, 19 nt, Homo sapiens
  misc_RNA (1)...(19): siRNA sense strand
gugaagacuuaaagaagga

SEQ ID NO: 1044341 - RNA, 19 nt, Homo sapiens
  misc_RNA (1)...(19): siRNA sense strand
agucuugauucucgaguua

SEQ ID NO: 1044342 - RNA, 19 nt, Homo sapiens
  misc_RNA (1)...(19): siRNA sense strand
ccaauccucacauguauga

SEQ ID NO: 1044343 - RNA, 19 nt, Homo sapiens
  misc_RNA (1)...(19): siRNA sense strand
ugugaggaaugaagaaaga

SEQ ID NO: 1044344 - RNA, 19 nt, Homo sapiens
  misc_RNA (1)...(19): siRNA sense strand
cagaauacagugaagagaa

SEQ ID NO: 1044345 - RNA, 19 nt, Homo sapiens
  misc_RNA (1)...(19): siRNA sense strand
gaagaaaaggcuaggauga

SEQ ID NO: 1044346 - RNA, 19 nt, Homo sapiens
  misc_RNA (1)...(19): siRNA sense strand
gaggugaucaauagaaauc

SEQ ID NO: 1044347 - RNA, 19 nt, Homo sapiens
  misc_RNA (1)...(19): siRNA sense strand
gcuugcuugugaagacuua

SEQ ID NO: 1044348 - RNA, 19 nt, Homo sapiens
  misc_RNA (1)...(19): siRNA sense strand
agaaaaggcuaggaugaua

SEQ ID NO: 1044349 - RNA, 19 nt, Homo sapiens
  misc_RNA (1)...(19): siRNA sense strand
guuagagaggugaucaaua

SEQ ID NO: 1044350 - RNA, 19 nt, Homo sapiens
  misc_RNA (1)...(19): siRNA sense strand
augcccaacuucagauaua

SEQ ID NO: 1044351 - RNA, 19 nt, Homo sapiens
  misc_RNA (1)...(19): siRNA sense strand
gaagaaagaggggaaaaug

SEQ ID NO: 1044352 - RNA, 19 nt, Homo sapiens
  misc_RNA (1)...(19): siRNA sense strand
ggugaucaauagaaaucug

SEQ ID NO: 1044353 - RNA, 19 nt, Homo sapiens
  misc_RNA (1)...(19): siRNA sense strand
gcccaacuucagauauaua

SEQ ID NO: 1044354 - RNA, 19 nt, Homo sapiens
  misc_RNA (1)...(19): siRNA sense strand
gaucaauagaaaucuguug

SEQ ID NO: 1044355 - RNA, 19 nt, Homo sapiens
  misc_RNA (1)...(19): siRNA sense strand
cuaggaugauauaugaaga

SEQ ID NO: 1044356 - RNA, 19 nt, Homo sapiens
  misc_RNA (1)...(19): siRNA sense strand
ucccaauccucacauguau

SEQ ID NO: 1044357 - RNA, 19 nt, Homo sapiens
  misc_RNA (1)...(19): siRNA sense strand
agaauacagugaagagaac

SEQ ID NO: 1044358 - RNA, 19 nt, Homo sapiens
  misc_RNA (1)...(19): siRNA sense strand
aaagaaggagcagaacaaa

SEQ ID NO: 1044359 - RNA, 19 nt, Homo sapiens
  misc_RNA (1)...(19): siRNA sense strand
gacccacacacacuacaaa

SEQ ID NO: 1044360 - RNA, 19 nt, Homo sapiens
  misc_RNA (1)...(19): siRNA sense strand
gcuaggaugauauaugaag

SEQ ID NO: 1044361 - RNA, 19 nt, Homo sapiens
  misc_RNA (1)...(19): siRNA sense strand
guccuggucucaaaauuuu

SEQ ID NO: 1044362 - RNA, 19 nt, Homo sapiens
  misc_RNA (1)...(19): siRNA sense strand
auacuuuaaugcacagaga

SEQ ID NO: 1044363 - RNA, 19 nt, Homo sapiens
  misc_RNA (1)...(19): siRNA sense strand
guacugcuggcucuucuuc

SEQ ID NO: 1044364 - RNA, 19 nt, Homo sapiens
  misc_RNA (1)...(19): siRNA sense strand
cgaacagaauacagugaag

SEQ ID NO: 1044365 - RNA, 19 nt, Homo sapiens
  misc_RNA (1)...(19): siRNA sense strand
gaaaaggcuaggaugauau

SEQ ID NO: 1044366 - RNA, 19 nt, Homo sapiens
  misc_RNA (1)...(19): siRNA sense strand
gcgggaagacccacacaca

SEQ ID NO: 1044367 - RNA, 19 nt, Homo sapiens
  misc_RNA (1)...(19): siRNA sense strand
gagauucuuuuccaagguu

SEQ ID NO: 1044368 - RNA, 19 nt, Homo sapiens
  misc_RNA (1)...(19): siRNA sense strand
agagaggugaucaauagaa

SEQ ID NO: 1044369 - RNA, 19 nt, Homo sapiens
  misc_RNA (1)...(19): siRNA sense strand
gggaagacccacacacacu

SEQ ID NO: 1044370 - RNA, 19 nt, Homo sapiens
  misc_RNA (1)...(19): siRNA sense strand
gaagacccacacacacuac

SEQ ID NO: 1044371 - RNA, 19 nt, Homo sapiens
  misc_RNA (1)...(19): siRNA sense strand
ggaaaccagaggcccaaca

SEQ ID NO: 1044372 - RNA, 19 nt, Homo sapiens
  misc_RNA (1)...(19): siRNA sense strand
ccagcaggaagaaaccuuu

SEQ ID NO: 1044373 - RNA, 19 nt, Homo sapiens
  misc_RNA (1)...(19): siRNA sense strand
agaggucagucuugauucu

SEQ ID NO: 1044374 - RNA, 19 nt, Homo sapiens
  misc_RNA (1)...(19): siRNA sense strand
gaaaguacugcuggcucuu

SEQ ID NO: 1044375 - RNA, 19 nt, Homo sapiens
  misc_RNA (1)...(19): siRNA sense strand
ccucacauguaugaagaug

SEQ ID NO: 1044376 - RNA, 19 nt, Homo sapiens
  misc_RNA (1)...(19): siRNA sense strand
ccgaacagaauacagugaa

SEQ ID NO: 1044377 - RNA, 19 nt, Homo sapiens
  misc_RNA (1)...(19): siRNA sense strand
uaaugcacagagauucuuu

SEQ ID NO: 1044378 - RNA, 19 nt, Homo sapiens
  misc_RNA (1)...(19): siRNA sense strand
ucaauagaaaucuguugga

SEQ ID NO: 1044379 - RNA, 19 nt, Homo sapiens
  misc_RNA (1)...(19): siRNA sense strand
gugaagagaaccuacuuuu

SEQ ID NO: 1044380 - RNA, 19 nt, Homo sapiens
  misc_RNA (1)...(19): siRNA sense strand
gucuuguccuggucucaaa

SEQ ID NO: 1044381 - RNA, 19 nt, Homo sapiens
  misc_RNA (1)...(19): siRNA sense strand
agucauuuguugaaaguac

SEQ ID NO: 1044382 - RNA, 19 nt, Homo sapiens
  misc_RNA (1)...(19): siRNA sense strand
gaugcccaacuucagauau

SEQ ID NO: 1044383 - RNA, 19 nt, Homo sapiens
  misc_RNA (1)...(19): siRNA sense strand
gaucccaauccucacaugu

SEQ ID NO: 1044384 - RNA, 19 nt, Homo sapiens
  misc_RNA (1)...(19): siRNA sense strand
aaccagaggcccaacaaca

SEQ ID NO: 1044385 - RNA, 19 nt, Homo sapiens
  misc_RNA (1)...(19): siRNA sense strand
gaaauugcaggcugaacuu

SEQ ID NO: 1044386 - RNA, 19 nt, Homo sapiens
  misc_RNA (1)...(19): siRNA sense strand
ggaaggagugcuuggagaa

SEQ ID NO: 1044387 - RNA, 19 nt, Homo sapiens
  misc_RNA (1)...(19): siRNA sense strand
gagaagcccgauggaaauu

SEQ ID NO: 1044388 - RNA, 19 nt, Homo sapiens
  misc_RNA (1)...(19): siRNA sense strand
gaagcccgauggaaauugc

SEQ ID NO: 1044389 - RNA, 19 nt, Homo sapiens
  misc_RNA (1)...(19): siRNA sense strand
ggaaauugcaggcugaacu

SEQ ID NO: 1044390 - RNA, 19 nt, Homo sapiens
  misc_RNA (1)...(19): siRNA sense strand
ugagaagcccgauggaaau

SEQ ID NO: 1044391 - RNA, 19 nt, Homo sapiens
  misc_RNA (1)...(19): siRNA sense strand
gaaggagugcuuggagaau

SEQ ID NO: 1044392 - RNA, 19 nt, Homo sapiens
  misc_RNA (1)...(19): siRNA sense strand
aggagugcuuggagaauga

SEQ ID NO: 1044393 - RNA, 19 nt, Homo sapiens
  misc_RNA (1)...(19): siRNA sense strand
gcaggaaggagugcuugga

SEQ ID NO: 1044394 - RNA, 19 nt, Homo sapiens
  misc_RNA (1)...(19): siRNA sense strand
aaggagugcuuggagaaug

SEQ ID NO: 1044395 - RNA, 19 nt, Homo sapiens
  misc_RNA (1)...(19): siRNA sense strand
augagaagcccgauggaaa

SEQ ID NO: 1044396 - RNA, 19 nt, Homo sapiens
  misc_RNA (1)...(19): siRNA sense strand
gaaugagaagcccgaugga

SEQ ID NO: 1044397 - RNA, 19 nt, Homo sapiens
  misc_RNA (1)...(19): siRNA sense strand
ucuauuugcuauguucuuc

SEQ ID NO: 1044398 - RNA, 19 nt, Homo sapiens
  misc_RNA (1)...(19): siRNA sense strand
caagaacacuccuagauuu

SEQ ID NO: 1044399 - RNA, 19 nt, Homo sapiens
  misc_RNA (1)...(19): siRNA sense strand
gaagugcucuggauguuaa

SEQ ID NO: 1044400 - RNA, 19 nt, Homo sapiens
  misc_RNA (1)...(19): siRNA sense strand
uaacagagccuuuauggaa

SEQ ID NO: 1044401 - RNA, 19 nt, Homo sapiens
  misc_RNA (1)...(19): siRNA sense strand
gagagaugcucauguguga

SEQ ID NO: 1044402 - RNA, 19 nt, Homo sapiens
  misc_RNA (1)...(19): siRNA sense strand
caaauuaucucugaagugu

SEQ ID NO: 1044403 - RNA, 19 nt, Homo sapiens
  misc_RNA (1)...(19): siRNA sense strand
uaaaugagauugagcaaag

SEQ ID NO: 1044404 - RNA, 19 nt, Homo sapiens
  misc_RNA (1)...(19): siRNA sense strand
cagcagaaaucacagauga

SEQ ID NO: 1044405 - RNA, 19 nt, Homo sapiens
  misc_RNA (1)...(19): siRNA sense strand
uaaaagagcugaaagagaa

SEQ ID NO: 1044406 - RNA, 19 nt, Homo sapiens
  misc_RNA (1)...(19): siRNA sense strand
gauaucagcuuugacaaga

SEQ ID NO: 1044407 - RNA, 19 nt, Homo sapiens
  misc_RNA (1)...(19): siRNA sense strand
ccacagacaccagauauua

SEQ ID NO: 1044408 - RNA, 19 nt, Homo sapiens
  misc_RNA (1)...(19): siRNA sense strand
gaagcuguguccacuauug

SEQ ID NO: 1044409 - RNA, 19 nt, Homo sapiens
  misc_RNA (1)...(19): siRNA sense strand
cgaaggacuuugaggauuu

SEQ ID NO: 1044410 - RNA, 19 nt, Homo sapiens
  misc_RNA (1)...(19): siRNA sense strand
gaacaucagcuucucaaga

SEQ ID NO: 1044411 - RNA, 19 nt, Homo sapiens
  misc_RNA (1)...(19): siRNA sense strand
gggaaugaauccauaguug

SEQ ID NO: 1044412 - RNA, 19 nt, Homo sapiens
  misc_RNA (1)...(19): siRNA sense strand
cacauuagcuuuccucaug

SEQ ID NO: 1044413 - RNA, 19 nt, Homo sapiens
  misc_RNA (1)...(19): siRNA sense strand
ugacacaucuggcagcauu

SEQ ID NO: 1044414 - RNA, 19 nt, Homo sapiens
  misc_RNA (1)...(19): siRNA sense strand
gaacaccugucaagauugg

SEQ ID NO: 1044415 - RNA, 19 nt, Homo sapiens
  misc_RNA (1)...(19): siRNA sense strand
guaaucagguggauguaga

SEQ ID NO: 1044416 - RNA, 19 nt, Homo sapiens
  misc_RNA (1)...(19): siRNA sense strand
cuucugaccuuucgccuua

SEQ ID NO: 1044417 - RNA, 19 nt, Homo sapiens
  misc_RNA (1)...(19): siRNA sense strand
gaaaacagguacuuuacaa

SEQ ID NO: 1044418 - RNA, 19 nt, Homo sapiens
  misc_RNA (1)...(19): siRNA sense strand
gcucagaguccacauacua

SEQ ID NO: 1044419 - RNA, 19 nt, Homo sapiens
  misc_RNA (1)...(19): siRNA sense strand
gagaaauuccucagaguga

SEQ ID NO: 1044420 - RNA, 19 nt, Homo sapiens
  misc_RNA (1)...(19): siRNA sense strand
ugaaggaaaugaaguccaa

SEQ ID NO: 1044421 - RNA, 19 nt, Homo sapiens
  misc_RNA (1)...(19): siRNA sense strand
gcagaggacugaccaugag

SEQ ID NO: 1044422 - RNA, 19 nt, Homo sapiens
  misc_RNA (1)...(19): siRNA sense strand
gcgaaggacuuugaggauu

SEQ ID NO: 1044423 - RNA, 19 nt, Homo sapiens
  misc_RNA (1)...(19): siRNA sense strand
gaaagagaaauuccucaga

SEQ ID NO: 1044424 - RNA, 19 nt, Homo sapiens
  misc_RNA (1)...(19): siRNA sense strand
ugaugaaucugguuccauu

SEQ ID NO: 1044425 - RNA, 19 nt, Homo sapiens
  misc_RNA (1)...(19): siRNA sense strand
ccaagaacacuccuagauu

SEQ ID NO: 1044426 - RNA, 19 nt, Homo sapiens
  misc_RNA (1)...(19): siRNA sense strand
ggaagcagcagaaaucaca

SEQ ID NO: 1044427 - RNA, 19 nt, Homo sapiens
  misc_RNA (1)...(19): siRNA sense strand
gaaauuccucagagugaaa

SEQ ID NO: 1044428 - RNA, 19 nt, Homo sapiens
  misc_RNA (1)...(19): siRNA sense strand
aggaacaccugucaagauu

SEQ ID NO: 1044429 - RNA, 19 nt, Homo sapiens
  misc_RNA (1)...(19): siRNA sense strand
gcgaagugcucuggauguu

SEQ ID NO: 1044430 - RNA, 19 nt, Homo sapiens
  misc_RNA (1)...(19): siRNA sense strand
aaagaaaacucguuccauu

SEQ ID NO: 1044431 - RNA, 19 nt, Homo sapiens
  misc_RNA (1)...(19): siRNA sense strand
gaaggacuuugaggauuuc

SEQ ID NO: 1044432 - RNA, 19 nt, Homo sapiens
  misc_RNA (1)...(19): siRNA sense strand
ucagcaaaguggaugauau

SEQ ID NO: 1044433 - RNA, 19 nt, Homo sapiens
  misc_RNA (1)...(19): siRNA sense strand
guuccacccucaccaagaa

SEQ ID NO: 1044434 - RNA, 19 nt, Homo sapiens
  misc_RNA (1)...(19): siRNA sense strand
ggaaauacaaggaucuuuu

SEQ ID NO: 1044435 - RNA, 19 nt, Homo sapiens
  misc_RNA (1)...(19): siRNA sense strand
gacaccagauauuaaagug

SEQ ID NO: 1044436 - RNA, 19 nt, Homo sapiens
  misc_RNA (1)...(19): siRNA sense strand
ggagucaguucaugauggu

SEQ ID NO: 1044437 - RNA, 19 nt, Homo sapiens
  misc_RNA (1)...(19): siRNA sense strand
caaagaggucugacugaga

SEQ ID NO: 1044438 - RNA, 19 nt, Homo sapiens
  misc_RNA (1)...(19): siRNA sense strand
ugcaugacuuuguuucuaa

SEQ ID NO: 1044439 - RNA, 19 nt, Homo sapiens
  misc_RNA (1)...(19): siRNA sense strand
ggccaacagggacacauua

SEQ ID NO: 1044440 - RNA, 19 nt, Homo sapiens
  misc_RNA (1)...(19): siRNA sense strand
gcaaauuaucucugaagug

SEQ ID NO: 1044441 - RNA, 19 nt, Homo sapiens
  misc_RNA (1)...(19): siRNA sense strand
caacuaagcgaggagcaaa

SEQ ID NO: 1044442 - RNA, 19 nt, Homo sapiens
  misc_RNA (1)...(19): siRNA sense strand
ucccagacuucuccaauga

SEQ ID NO: 1044443 - RNA, 19 nt, Homo sapiens
  misc_RNA (1)...(19): siRNA sense strand
gauaggaacaccugucaag

SEQ ID NO: 1044444 - RNA, 19 nt, Homo sapiens
  misc_RNA (1)...(19): siRNA sense strand
aaaccugaauccuguguuc

SEQ ID NO: 1044445 - RNA, 19 nt, Homo sapiens
  misc_RNA (1)...(19): siRNA sense strand
gaaugaauccauaguugca

SEQ ID NO: 1044446 - RNA, 19 nt, Homo sapiens
  misc_RNA (1)...(19): siRNA sense strand
gauugggacucuucuuugg

SEQ ID NO: 1044447 - RNA, 19 nt, Homo sapiens
  misc_RNA (1)...(19): siRNA sense strand
acaaggaucuuuugaugaa

SEQ ID NO: 1044448 - RNA, 19 nt, Homo sapiens
  misc_RNA (1)...(19): siRNA sense strand
aaauggauguugccaaucu

SEQ ID NO: 1044449 - RNA, 19 nt, Homo sapiens
  misc_RNA (1)...(19): siRNA sense strand
uaaaauggauguugccaau

SEQ ID NO: 1044450 - RNA, 19 nt, Homo sapiens
  misc_RNA (1)...(19): siRNA sense strand
gcagaaaucacagaugaag

SEQ ID NO: 1044451 - RNA, 19 nt, Homo sapiens
  misc_RNA (1)...(19): siRNA sense strand
ggauugggacucuucuuug

SEQ ID NO: 1044452 - RNA, 19 nt, Homo sapiens
  misc_RNA (1)...(19): siRNA sense strand
gaucaaacggagacagaga

SEQ ID NO: 1044453 - RNA, 19 nt, Homo sapiens
  misc_RNA (1)...(19): siRNA sense strand
gagaucaaacggagacaga

SEQ ID NO: 1044454 - RNA, 19 nt, Homo sapiens
  misc_RNA (1)...(19): siRNA sense strand
ucagguggauguagagauc

SEQ ID NO: 1044455 - RNA, 19 nt, Homo sapiens
  misc_RNA (1)...(19): siRNA sense strand
gcugaagcaugcacguaau

SEQ ID NO: 1044456 - RNA, 19 nt, Homo sapiens
  misc_RNA (1)...(19): siRNA sense strand
uagcuuuccucaugauuca

SEQ ID NO: 1044457 - RNA, 19 nt, Homo sapiens
  misc_RNA (1)...(19): siRNA sense strand
ggaaagcggauaaaauuug

SEQ ID NO: 1044458 - RNA, 19 nt, Homo sapiens
  misc_RNA (1)...(19): siRNA sense strand
ucgaagcuguguccacuau

SEQ ID NO: 1044459 - RNA, 19 nt, Homo sapiens
  misc_RNA (1)...(19): siRNA sense strand
cuauugagacugugccaua

SEQ ID NO: 1044460 - RNA, 19 nt, Homo sapiens
  misc_RNA (1)...(19): siRNA sense strand
aaagcaagucugccacuaa

SEQ ID NO: 1044461 - RNA, 19 nt, Homo sapiens
  misc_RNA (1)...(19): siRNA sense strand
ucaagacuccuucaucuag

SEQ ID NO: 1044462 - RNA, 19 nt, Homo sapiens
  misc_RNA (1)...(19): siRNA sense strand
ucucaagacuccuucaucu

SEQ ID NO: 1044463 - RNA, 19 nt, Homo sapiens
  misc_RNA (1)...(19): siRNA sense strand
acagacaccagauauuaaa

SEQ ID NO: 1044464 - RNA, 19 nt, Homo sapiens
  misc_RNA (1)...(19): siRNA sense strand
auacuaugaugcugaaugu

SEQ ID NO: 1044465 - RNA, 19 nt, Homo sapiens
  misc_RNA (1)...(19): siRNA sense strand
cugcauuccuacccugaua

SEQ ID NO: 1044466 - RNA, 19 nt, Homo sapiens
  misc_RNA (1)...(19): siRNA sense strand
cugcaugacuuuguuucua

SEQ ID NO: 1044467 - RNA, 19 nt, Homo sapiens
  misc_RNA (1)...(19): siRNA sense strand
ucagauaucagcuuugaca

SEQ ID NO: 1044468 - RNA, 19 nt, Homo sapiens
  misc_RNA (1)...(19): siRNA sense strand
gaaugugcggaaucuguuu

SEQ ID NO: 1044469 - RNA, 19 nt, Homo sapiens
  misc_RNA (1)...(19): siRNA sense strand
gauacuaugaugcugaaug

SEQ ID NO: 1044470 - RNA, 19 nt, Homo sapiens
  misc_RNA (1)...(19): siRNA sense strand
caagacuccuucaucuagu

SEQ ID NO: 1044471 - RNA, 19 nt, Homo sapiens
  misc_RNA (1)...(19): siRNA sense strand
aaucacagaugaagacaac

SEQ ID NO: 1044472 - RNA, 19 nt, Homo sapiens
  misc_RNA (1)...(19): siRNA sense strand
ugaauccuguguuccaugu

SEQ ID NO: 1044473 - RNA, 19 nt, Homo sapiens
  misc_RNA (1)...(19): siRNA sense strand
gcgccugcaugacuuuguu

SEQ ID NO: 1044474 - RNA, 19 nt, Homo sapiens
  misc_RNA (1)...(19): siRNA sense strand
aaacugaagaagagagaaa

SEQ ID NO: 1044475 - RNA, 19 nt, Homo sapiens
  misc_RNA (1)...(19): siRNA sense strand
ugaaucugguuccauuuua

SEQ ID NO: 1044476 - RNA, 19 nt, Homo sapiens
  misc_RNA (1)...(19): siRNA sense strand
gcagagaguggcucagagu

SEQ ID NO: 1044477 - RNA, 19 nt, Homo sapiens
  misc_RNA (1)...(19): siRNA sense strand
ccagacuucuccaaugauc

SEQ ID NO: 1044478 - RNA, 19 nt, Homo sapiens
  misc_RNA (1)...(19): siRNA sense strand
cgaagugcucuggauguua

SEQ ID NO: 1044479 - RNA, 19 nt, Homo sapiens
  misc_RNA (1)...(19): siRNA sense strand
cccuggaccuguaaagaaa

SEQ ID NO: 1044480 - RNA, 19 nt, Homo sapiens
  misc_RNA (1)...(19): siRNA sense strand
aaaagacuaucaaccauug

SEQ ID NO: 1044481 - RNA, 19 nt, Homo sapiens
  misc_RNA (1)...(19): siRNA sense strand
gaaauacaaggaucuuuug

SEQ ID NO: 1044482 - RNA, 19 nt, Homo sapiens
  misc_RNA (1)...(19): siRNA sense strand
cacagacaccagauauuaa

SEQ ID NO: 1044483 - RNA, 19 nt, Homo sapiens
  misc_RNA (1)...(19): siRNA sense strand
cgacagauucagcugauuc

SEQ ID NO: 1044484 - RNA, 19 nt, Homo sapiens
  misc_RNA (1)...(19): siRNA sense strand
agaaauuccucagagugaa

SEQ ID NO: 1044485 - RNA, 19 nt, Homo sapiens
  misc_RNA (1)...(19): siRNA sense strand
guaaaugagauugagcaaa

SEQ ID NO: 1044486 - RNA, 19 nt, Homo sapiens
  misc_RNA (1)...(19): siRNA sense strand
uugagacugugccauauug

SEQ ID NO: 1044487 - RNA, 19 nt, Homo sapiens
  misc_RNA (1)...(19): siRNA sense strand
gagaugcucaugugugaca

SEQ ID NO: 1044488 - RNA, 19 nt, Homo sapiens
  misc_RNA (1)...(19): siRNA sense strand
ggcagaggacugaccauga

SEQ ID NO: 1044489 - RNA, 19 nt, Homo sapiens
  misc_RNA (1)...(19): siRNA sense strand
uauggaagcagcagaaauc

SEQ ID NO: 1044490 - RNA, 19 nt, Homo sapiens
  misc_RNA (1)...(19): siRNA sense strand
gggaaugcuggcagacuuu

SEQ ID NO: 1044491 - RNA, 19 nt, Homo sapiens
  misc_RNA (1)...(19): siRNA sense strand
uguggucucucauccagaa

SEQ ID NO: 1044492 - RNA, 19 nt, Homo sapiens
  misc_RNA (1)...(19): siRNA sense strand
ggcaaauuaucucugaagu

SEQ ID NO: 1044493 - RNA, 19 nt, Homo sapiens
  misc_RNA (1)...(19): siRNA sense strand
gaccaggagccgaaggaaa

SEQ ID NO: 1044494 - RNA, 19 nt, Homo sapiens
  misc_RNA (1)...(19): siRNA sense strand
gauucucagugaaggaaau

SEQ ID NO: 1044495 - RNA, 19 nt, Homo sapiens
  misc_RNA (1)...(19): siRNA sense strand
ggucucucauccagaaugu

SEQ ID NO: 1044496 - RNA, 19 nt, Homo sapiens
  misc_RNA (1)...(19): siRNA sense strand
gaugaagacaacagcauag

SEQ ID NO: 1044497 - RNA, 19 nt, Homo sapiens
  misc_RNA (1)...(19): siRNA sense strand
gaaccucuucugaccuuuc

SEQ ID NO: 1044498 - RNA, 19 nt, Homo sapiens
  misc_RNA (1)...(19): siRNA sense strand
gaacagaacuggccucauu

SEQ ID NO: 1044499 - RNA, 19 nt, Homo sapiens
  misc_RNA (1)...(19): siRNA sense strand
ccaggugacugaaagcaaa

SEQ ID NO: 1044500 - RNA, 19 nt, Homo sapiens
  misc_RNA (1)...(19): siRNA sense strand
gagcuguccugcagagaga

SEQ ID NO: 1044501 - RNA, 19 nt, Homo sapiens
  misc_RNA (1)...(19): siRNA sense strand
ccugauggguuuccugaug

SEQ ID NO: 1044502 - RNA, 19 nt, Homo sapiens
  misc_RNA (1)...(19): siRNA sense strand
gaaagcaaaggaguguuga

SEQ ID NO: 1044503 - RNA, 19 nt, Homo sapiens
  misc_RNA (1)...(19): siRNA sense strand
ugaaagcaaaggaguguug

SEQ ID NO: 1044504 - RNA, 19 nt, Homo sapiens
  misc_RNA (1)...(19): siRNA sense strand
cgacaacaccuugcucaug

SEQ ID NO: 1044505 - RNA, 19 nt, Homo sapiens
  misc_RNA (1)...(19): siRNA sense strand
gcauuccuccaccucuaua

SEQ ID NO: 1044506 - RNA, 19 nt, Homo sapiens
  misc_RNA (1)...(19): siRNA sense strand
uggcauuccuccaccucua

SEQ ID NO: 1044507 - RNA, 19 nt, Homo sapiens
  misc_RNA (1)...(19): siRNA sense strand
cagagacgggccuggaauu

SEQ ID NO: 1044508 - RNA, 19 nt, Homo sapiens
  misc_RNA (1)...(19): siRNA sense strand
gauugcggccuauuugcuu

SEQ ID NO: 1044509 - RNA, 19 nt, Homo sapiens
  misc_RNA (1)...(19): siRNA sense strand
ggaauuuucuggagcaacu

SEQ ID NO: 1044510 - RNA, 19 nt, Homo sapiens
  misc_RNA (1)...(19): siRNA sense strand
gguggugacagcaaucuca

SEQ ID NO: 1044511 - RNA, 19 nt, Homo sapiens
  misc_RNA (1)...(19): siRNA sense strand
ccugauugcggccuauuug

SEQ ID NO: 1044512 - RNA, 19 nt, Homo sapiens
  misc_RNA (1)...(19): siRNA sense strand
gcuccauauucgacuguca

SEQ ID NO: 1044513 - RNA, 19 nt, Homo sapiens
  misc_RNA (1)...(19): siRNA sense strand
cucauucucugugcucuug

SEQ ID NO: 1044514 - RNA, 19 nt, Homo sapiens
  misc_RNA (1)...(19): siRNA sense strand
gcacaugcuccgacaacac

SEQ ID NO: 1044515 - RNA, 19 nt, Homo sapiens
  misc_RNA (1)...(19): siRNA sense strand
cuccaccucuauauacaga

SEQ ID NO: 1044516 - RNA, 19 nt, Homo sapiens
  misc_RNA (1)...(19): siRNA sense strand
ggacuggcagagacugaaa

SEQ ID NO: 1044517 - RNA, 19 nt, Homo sapiens
  misc_RNA (1)...(19): siRNA sense strand
gcacacgcaccuuguucug

SEQ ID NO: 1044518 - RNA, 19 nt, Homo sapiens
  misc_RNA (1)...(19): siRNA sense strand
uguccucgcugcguccuaa

SEQ ID NO: 1044519 - RNA, 19 nt, Homo sapiens
  misc_RNA (1)...(19): siRNA sense strand
gcugcguccuaaccaaaug

SEQ ID NO: 1044520 - RNA, 19 nt, Homo sapiens
  misc_RNA (1)...(19): siRNA sense strand
agccaugccucugccauug

SEQ ID NO: 1044521 - RNA, 19 nt, Homo sapiens
  misc_RNA (1)...(19): siRNA sense strand
cuucuccgcugcccuugug

SEQ ID NO: 1044522 - RNA, 19 nt, Homo sapiens
  misc_RNA (1)...(19): siRNA sense strand
gaaggcaucucaaauuauu

SEQ ID NO: 1044523 - RNA, 19 nt, Homo sapiens
  misc_RNA (1)...(19): siRNA sense strand
uagaaggcaucucaaauua

SEQ ID NO: 1044524 - RNA, 19 nt, Homo sapiens
  misc_RNA (1)...(19): siRNA sense strand
caacgucucucaccacauu

SEQ ID NO: 1044525 - RNA, 19 nt, Homo sapiens
  misc_RNA (1)...(19): siRNA sense strand
cuuaagaacuucagaauug

SEQ ID NO: 1044526 - RNA, 19 nt, Homo sapiens
  misc_RNA (1)...(19): siRNA sense strand
ggaauaagcacaugaugga

SEQ ID NO: 1044527 - RNA, 19 nt, Homo sapiens
  misc_RNA (1)...(19): siRNA sense strand
gagcacaacuggacuuucu

SEQ ID NO: 1044528 - RNA, 19 nt, Homo sapiens
  misc_RNA (1)...(19): siRNA sense strand
ucaaugauccuaagccuuu

SEQ ID NO: 1044529 - RNA, 19 nt, Homo sapiens
  misc_RNA (1)...(19): siRNA sense strand
caacuaaccaucaccacua

SEQ ID NO: 1044530 - RNA, 19 nt, Homo sapiens
  misc_RNA (1)...(19): siRNA sense strand
aaauguagguggacacuug

SEQ ID NO: 1044531 - RNA, 19 nt, Homo sapiens
  misc_RNA (1)...(19): siRNA sense strand
cccaguggcugucaucaua

SEQ ID NO: 1044532 - RNA, 19 nt, Homo sapiens
  misc_RNA (1)...(19): siRNA sense strand
cucggaagcuuucuaagua

SEQ ID NO: 1044533 - RNA, 19 nt, Homo sapiens
  misc_RNA (1)...(19): siRNA sense strand
gauauguccucaacuucuu

SEQ ID NO: 1044534 - RNA, 19 nt, Homo sapiens
  misc_RNA (1)...(19): siRNA sense strand
cuagaaggcaucucaaauu

SEQ ID NO: 1044535 - RNA, 19 nt, Homo sapiens
  misc_RNA (1)...(19): siRNA sense strand
uaaggaauuugaucugcuu

SEQ ID NO: 1044536 - RNA, 19 nt, Homo sapiens
  misc_RNA (1)...(19): siRNA sense strand
ccucaaggcaauuacuuua

SEQ ID NO: 1044537 - RNA, 19 nt, Homo sapiens
  misc_RNA (1)...(19): siRNA sense strand
ucaccacauugacgcguua

SEQ ID NO: 1044538 - RNA, 19 nt, Homo sapiens
  misc_RNA (1)...(19): siRNA sense strand
guacucggaagcuuucuaa

SEQ ID NO: 1044539 - RNA, 19 nt, Homo sapiens
  misc_RNA (1)...(19): siRNA sense strand
guagguggacacuuguaua

SEQ ID NO: 1044540 - RNA, 19 nt, Homo sapiens
  misc_RNA (1)...(19): siRNA sense strand
caccaggaaguuucucuua

SEQ ID NO: 1044541 - RNA, 19 nt, Homo sapiens
  misc_RNA (1)...(19): siRNA sense strand
ccaggaaguuucucuuagg

SEQ ID NO: 1044542 - RNA, 19 nt, Homo sapiens
  misc_RNA (1)...(19): siRNA sense strand
gaacuucagaauugaccuu

SEQ ID NO: 1044543 - RNA, 19 nt, Homo sapiens
  misc_RNA (1)...(19): siRNA sense strand
caccugauggaauacauua

SEQ ID NO: 1044544 - RNA, 19 nt, Homo sapiens
  misc_RNA (1)...(19): siRNA sense strand
gcacaacuggacuuucugu

SEQ ID NO: 1044545 - RNA, 19 nt, Homo sapiens
  misc_RNA (1)...(19): siRNA sense strand
caccagagacugccagguu

SEQ ID NO: 1044546 - RNA, 19 nt, Homo sapiens
  misc_RNA (1)...(19): siRNA sense strand
gauuaucaccaggaaguuu

SEQ ID NO: 1044547 - RNA, 19 nt, Homo sapiens
  misc_RNA (1)...(19): siRNA sense strand
uaaucgagauggaccucuu

SEQ ID NO: 1044548 - RNA, 19 nt, Homo sapiens
  misc_RNA (1)...(19): siRNA sense strand
agauugagcccuugauuca

SEQ ID NO: 1044549 - RNA, 19 nt, Homo sapiens
  misc_RNA (1)...(19): siRNA sense strand
ugaccuuaccguuggauuu

SEQ ID NO: 1044550 - RNA, 19 nt, Homo sapiens
  misc_RNA (1)...(19): siRNA sense strand
caaguggaauaagcacaug

SEQ ID NO: 1044551 - RNA, 19 nt, Homo sapiens
  misc_RNA (1)...(19): siRNA sense strand
uccgauauguccucaacuu

SEQ ID NO: 1044552 - RNA, 19 nt, Homo sapiens
  misc_RNA (1)...(19): siRNA sense strand
gguccauuccuuacuagaa

SEQ ID NO: 1044553 - RNA, 19 nt, Homo sapiens
  misc_RNA (1)...(19): siRNA sense strand
aacuaaccaucaccacuaa

SEQ ID NO: 1044554 - RNA, 19 nt, Homo sapiens
  misc_RNA (1)...(19): siRNA sense strand
ccagauugagcccuugauu

SEQ ID NO: 1044555 - RNA, 19 nt, Homo sapiens
  misc_RNA (1)...(19): siRNA sense strand
guccauuccuuacuagaag

SEQ ID NO: 1044556 - RNA, 19 nt, Homo sapiens
  misc_RNA (1)...(19): siRNA sense strand
guuguggagcugucuagua

SEQ ID NO: 1044557 - RNA, 19 nt, Homo sapiens
  misc_RNA (1)...(19): siRNA sense strand
gauccuaagccuuuguauc

SEQ ID NO: 1044558 - RNA, 19 nt, Homo sapiens
  misc_RNA (1)...(19): siRNA sense strand
gaaguuguggagcugucua

SEQ ID NO: 1044559 - RNA, 19 nt, Homo sapiens
  misc_RNA (1)...(19): siRNA sense strand
gagacccucaaggcaauua

SEQ ID NO: 1044560 - RNA, 19 nt, Homo sapiens
  misc_RNA (1)...(19): siRNA sense strand
accagagacugccagguuu

SEQ ID NO: 1044561 - RNA, 19 nt, Homo sapiens
  misc_RNA (1)...(19): siRNA sense strand
uaacgcaacuaaccaucac

SEQ ID NO: 1044562 - RNA, 19 nt, Homo sapiens
  misc_RNA (1)...(19): siRNA sense strand
ucgagacccucaaggcaau

SEQ ID NO: 1044563 - RNA, 19 nt, Homo sapiens
  misc_RNA (1)...(19): siRNA sense strand
gauucagugucucaaugau

SEQ ID NO: 1044564 - RNA, 19 nt, Homo sapiens
  misc_RNA (1)...(19): siRNA sense strand
cagauugagcccuugauuc

SEQ ID NO: 1044565 - RNA, 19 nt, Homo sapiens
  misc_RNA (1)...(19): siRNA sense strand
ccaguggcugucaucauaa

SEQ ID NO: 1044566 - RNA, 19 nt, Homo sapiens
  misc_RNA (1)...(19): siRNA sense strand
cugauggaauacauuacaa

SEQ ID NO: 1044567 - RNA, 19 nt, Homo sapiens
  misc_RNA (1)...(19): siRNA sense strand
agaaggcaucucaaauuau

SEQ ID NO: 1044568 - RNA, 19 nt, Homo sapiens
  misc_RNA (1)...(19): siRNA sense strand
guggagcugucuaguacuc

SEQ ID NO: 1044569 - RNA, 19 nt, Homo sapiens
  misc_RNA (1)...(19): siRNA sense strand
caucauaacgcaacuaacc

SEQ ID NO: 1044570 - RNA, 19 nt, Homo sapiens
  misc_RNA (1)...(19): siRNA sense strand
ugauucagugucucaauga

SEQ ID NO: 1044571 - RNA, 19 nt, Homo sapiens
  misc_RNA (1)...(19): siRNA sense strand
gagacugccagguuuccuu

SEQ ID NO: 1044572 - RNA, 19 nt, Homo sapiens
  misc_RNA (1)...(19): siRNA sense strand
gucaucauaacgcaacuaa

SEQ ID NO: 1044573 - RNA, 19 nt, Homo sapiens
  misc_RNA (1)...(19): siRNA sense strand
caaugauccuaagccuuug

SEQ ID NO: 1044574 - RNA, 19 nt, Homo sapiens
  misc_RNA (1)...(19): siRNA sense strand
cauggauacuuuugaagaa

SEQ ID NO: 1044575 - RNA, 19 nt, Homo sapiens
  misc_RNA (1)...(19): siRNA sense strand
ccggaagacagacgacuga

SEQ ID NO: 1044576 - RNA, 19 nt, Homo sapiens
  misc_RNA (1)...(19): siRNA sense strand
acaacuggacuuucuguag

SEQ ID NO: 1044577 - RNA, 19 nt, Homo sapiens
  misc_RNA (1)...(19): siRNA sense strand
agacugccagguuuccuuu

SEQ ID NO: 1044578 - RNA, 19 nt, Homo sapiens
  misc_RNA (1)...(19): siRNA sense strand
ccaaguggaauaagcacau

SEQ ID NO: 1044579 - RNA, 19 nt, Homo sapiens
  misc_RNA (1)...(19): siRNA sense strand
ggggcuauaugaugacuga

SEQ ID NO: 1044580 - RNA, 19 nt, Homo sapiens
  misc_RNA (1)...(19): siRNA sense strand
ucuaguacucggaagcuuu

SEQ ID NO: 1044581 - RNA, 19 nt, Homo sapiens
  misc_RNA (1)...(19): siRNA sense strand
cgauauguccucaacuucu

SEQ ID NO: 1044582 - RNA, 19 nt, Homo sapiens
  misc_RNA (1)...(19): siRNA sense strand
ugccagguuuccuuuacuu

SEQ ID NO: 1044583 - RNA, 19 nt, Homo sapiens
  misc_RNA (1)...(19): siRNA sense strand
uuguggagcugucuaguac

SEQ ID NO: 1044584 - RNA, 19 nt, Homo sapiens
  misc_RNA (1)...(19): siRNA sense strand
gacuggggcuauaugauga

SEQ ID NO: 1044585 - RNA, 19 nt, Homo sapiens
  misc_RNA (1)...(19): siRNA sense strand
ggaccucuuuuccgauaug

SEQ ID NO: 1044586 - RNA, 19 nt, Homo sapiens
  misc_RNA (1)...(19): siRNA sense strand
uuacccggauuccaugcuu

SEQ ID NO: 1044587 - RNA, 19 nt, Homo sapiens
  misc_RNA (1)...(19): siRNA sense strand
gaaguacaguguugugaua

SEQ ID NO: 1044588 - RNA, 19 nt, Homo sapiens
  misc_RNA (1)...(19): siRNA sense strand
caccacaccuggcuaauuu

SEQ ID NO: 1044589 - RNA, 19 nt, Homo sapiens
  misc_RNA (1)...(19): siRNA sense strand
ucaaaucacuauucacauc

SEQ ID NO: 1044590 - RNA, 19 nt, Homo sapiens
  misc_RNA (1)...(19): siRNA sense strand
guacaguguugugauauca

SEQ ID NO: 1044591 - RNA, 19 nt, Homo sapiens
  misc_RNA (1)...(19): siRNA sense strand
cuucugagcucaagcaauc

SEQ ID NO: 1044592 - RNA, 19 nt, Homo sapiens
  misc_RNA (1)...(19): siRNA sense strand
aaaaggagauugagaggaa

SEQ ID NO: 1044593 - RNA, 19 nt, Homo sapiens
  misc_RNA (1)...(19): siRNA sense strand
guugugauaucaguucauu

SEQ ID NO: 1044594 - RNA, 19 nt, Homo sapiens
  misc_RNA (1)...(19): siRNA sense strand
ugauaucaguucauugcaa

SEQ ID NO: 1044595 - RNA, 19 nt, Homo sapiens
  misc_RNA (1)...(19): siRNA sense strand
cauugcaacuucugucuuc

SEQ ID NO: 1044596 - RNA, 19 nt, Homo sapiens
  misc_RNA (1)...(19): siRNA sense strand
aaagacaguuucgccaugu

SEQ ID NO: 1044597 - RNA, 19 nt, Homo sapiens
  misc_RNA (1)...(19): siRNA sense strand
ugccucagccucucaagua

SEQ ID NO: 1044598 - RNA, 19 nt, Homo sapiens
  misc_RNA (1)...(19): siRNA sense strand
ccucaaggguaaagucaag

SEQ ID NO: 1044599 - RNA, 19 nt, Homo sapiens
  misc_RNA (1)...(19): siRNA sense strand
ggacugacuacaggcauga

SEQ ID NO: 1044600 - RNA, 19 nt, Homo sapiens
  misc_RNA (1)...(19): siRNA sense strand
gccauguuguacagaacua

SEQ ID NO: 1044601 - RNA, 19 nt, Homo sapiens
  misc_RNA (1)...(19): siRNA sense strand
cuucucaaaucacuauuca

SEQ ID NO: 1044602 - RNA, 19 nt, Homo sapiens
  misc_RNA (1)...(19): siRNA sense strand
ccaccacaccuggcuaauu

SEQ ID NO: 1044603 - RNA, 19 nt, Homo sapiens
  misc_RNA (1)...(19): siRNA sense strand
ucucaaaucacuauucaca

SEQ ID NO: 1044604 - RNA, 19 nt, Homo sapiens
  misc_RNA (1)...(19): siRNA sense strand
aggcugaaguacaguguug

SEQ ID NO: 1044605 - RNA, 19 nt, Homo sapiens
  misc_RNA (1)...(19): siRNA sense strand
cuacuucucaaaucacuau

SEQ ID NO: 1044606 - RNA, 19 nt, Homo sapiens
  misc_RNA (1)...(19): siRNA sense strand
ugcaacuucugucuucuga

SEQ ID NO: 1044607 - RNA, 19 nt, Homo sapiens
  misc_RNA (1)...(19): siRNA sense strand
gaacuacuucucaaaucac

SEQ ID NO: 1044608 - RNA, 19 nt, Homo sapiens
  misc_RNA (1)...(19): siRNA sense strand
ugaaguacaguguugugau

SEQ ID NO: 1044609 - RNA, 19 nt, Homo sapiens
  misc_RNA (1)...(19): siRNA sense strand
gaauugggaugacauagaa

SEQ ID NO: 1044610 - RNA, 19 nt, Homo sapiens
  misc_RNA (1)...(19): siRNA sense strand
gcauggagauuucuucuau

SEQ ID NO: 1044611 - RNA, 19 nt, Homo sapiens
  misc_RNA (1)...(19): siRNA sense strand
cccgaucacuuaacaauua

SEQ ID NO: 1044612 - RNA, 19 nt, Homo sapiens
  misc_RNA (1)...(19): siRNA sense strand
uaagacagcuggaaagauc

SEQ ID NO: 1044613 - RNA, 19 nt, Homo sapiens
  misc_RNA (1)...(19): siRNA sense strand
agaggaagauguuacagua

SEQ ID NO: 1044614 - RNA, 19 nt, Homo sapiens
  misc_RNA (1)...(19): siRNA sense strand
gagaagagauagccaggau

SEQ ID NO: 1044615 - RNA, 19 nt, Homo sapiens
  misc_RNA (1)...(19): siRNA sense strand
gaaagugaagucccuauug

SEQ ID NO: 1044616 - RNA, 19 nt, Homo sapiens
  misc_RNA (1)...(19): siRNA sense strand
aaagauuccuccauuaguu

SEQ ID NO: 1044617 - RNA, 19 nt, Homo sapiens
  misc_RNA (1)...(19): siRNA sense strand
ugaagucccuauugugaaa

SEQ ID NO: 1044618 - RNA, 19 nt, Homo sapiens
  misc_RNA (1)...(19): siRNA sense strand
gaagagauagccaggauca

SEQ ID NO: 1044619 - RNA, 19 nt, Homo sapiens
  misc_RNA (1)...(19): siRNA sense strand
uuaaagagcaggaagacua

SEQ ID NO: 1044620 - RNA, 19 nt, Homo sapiens
  misc_RNA (1)...(19): siRNA sense strand
cgauguagcaggagagaua

SEQ ID NO: 1044621 - RNA, 19 nt, Homo sapiens
  misc_RNA (1)...(19): siRNA sense strand
ggucagacaccaacacuug

SEQ ID NO: 1044622 - RNA, 19 nt, Homo sapiens
  misc_RNA (1)...(19): siRNA sense strand
ggagagauagauucaguga

SEQ ID NO: 1044623 - RNA, 19 nt, Homo sapiens
  misc_RNA (1)...(19): siRNA sense strand
aaagugaagucccuauugu

SEQ ID NO: 1044624 - RNA, 19 nt, Homo sapiens
  misc_RNA (1)...(19): siRNA sense strand
ggaauugggaugacauaga

SEQ ID NO: 1044625 - RNA, 19 nt, Homo sapiens
  misc_RNA (1)...(19): siRNA sense strand
cagcagagccucccgauca

SEQ ID NO: 1044626 - RNA, 19 nt, Homo sapiens
  misc_RNA (1)...(19): siRNA sense strand
ccaaaagauuccuccauua

SEQ ID NO: 1044627 - RNA, 19 nt, Homo sapiens
  misc_RNA (1)...(19): siRNA sense strand
ucaaacaccggauuaaaga

SEQ ID NO: 1044628 - RNA, 19 nt, Homo sapiens
  misc_RNA (1)...(19): siRNA sense strand
gggaugacauagaaagcaa

SEQ ID NO: 1044629 - RNA, 19 nt, Homo sapiens
  misc_RNA (1)...(19): siRNA sense strand
gaagacuacauccgagauu

SEQ ID NO: 1044630 - RNA, 19 nt, Homo sapiens
  misc_RNA (1)...(19): siRNA sense strand
agacaaagaucggaauugg

SEQ ID NO: 1044631 - RNA, 19 nt, Homo sapiens
  misc_RNA (1)...(19): siRNA sense strand
agagauagauucagugacu

SEQ ID NO: 1044632 - RNA, 19 nt, Homo sapiens
  misc_RNA (1)...(19): siRNA sense strand
caggagagauagauucagu

SEQ ID NO: 1044633 - RNA, 19 nt, Homo sapiens
  misc_RNA (1)...(19): siRNA sense strand
caaauuaagagccgaaagu

SEQ ID NO: 1044634 - RNA, 19 nt, Homo sapiens
  misc_RNA (1)...(19): siRNA sense strand
gauaagacagcuggaaaga

SEQ ID NO: 1044635 - RNA, 19 nt, Homo sapiens
  misc_RNA (1)...(19): siRNA sense strand
gaaagccucaacuuccaaa

SEQ ID NO: 1044636 - RNA, 19 nt, Homo sapiens
  misc_RNA (1)...(19): siRNA sense strand
ggaagaggaagauguuaca

SEQ ID NO: 1044637 - RNA, 19 nt, Homo sapiens
  misc_RNA (1)...(19): siRNA sense strand
cuggaaagaucagaauauu

SEQ ID NO: 1044638 - RNA, 19 nt, Homo sapiens
  misc_RNA (1)...(19): siRNA sense strand
ggaaacaacggucgaucug

SEQ ID NO: 1044639 - RNA, 19 nt, Homo sapiens
  misc_RNA (1)...(19): siRNA sense strand
ggagaucaacgauguagca

SEQ ID NO: 1044640 - RNA, 19 nt, Homo sapiens
  misc_RNA (1)...(19): siRNA sense strand
ugucauccgucuuucaguu

SEQ ID NO: 1044641 - RNA, 19 nt, Homo sapiens
  misc_RNA (1)...(19): siRNA sense strand
gcagcugaauuugagaaug

SEQ ID NO: 1044642 - RNA, 19 nt, Homo sapiens
  misc_RNA (1)...(19): siRNA sense strand
gaacuuuggaggcucugaa

SEQ ID NO: 1044643 - RNA, 19 nt, Homo sapiens
  misc_RNA (1)...(19): siRNA sense strand
ccuacuaguucuucauuca

SEQ ID NO: 1044644 - RNA, 19 nt, Homo sapiens
  misc_RNA (1)...(19): siRNA sense strand
gcuggaaagaucagaauau

SEQ ID NO: 1044645 - RNA, 19 nt, Homo sapiens
  misc_RNA (1)...(19): siRNA sense strand
cuaagaagauaagacaauc

SEQ ID NO: 1044646 - RNA, 19 nt, Homo sapiens
  misc_RNA (1)...(19): siRNA sense strand
uccauuaguucauuccaaa

SEQ ID NO: 1044647 - RNA, 19 nt, Homo sapiens
  misc_RNA (1)...(19): siRNA sense strand
gaucggaauugggaugaca

SEQ ID NO: 1044648 - RNA, 19 nt, Homo sapiens
  misc_RNA (1)...(19): siRNA sense strand
cagcugaauuugagaaugc

SEQ ID NO: 1044649 - RNA, 19 nt, Homo sapiens
  misc_RNA (1)...(19): siRNA sense strand
ggauuaaagagcaggaaga

SEQ ID NO: 1044650 - RNA, 19 nt, Homo sapiens
  misc_RNA (1)...(19): siRNA sense strand
uagauucagugacuucauc

SEQ ID NO: 1044651 - RNA, 19 nt, Homo sapiens
  misc_RNA (1)...(19): siRNA sense strand
ggacugcucaucgagaaga

SEQ ID NO: 1044652 - RNA, 19 nt, Homo sapiens
  misc_RNA (1)...(19): siRNA sense strand
uaucuuacaggaacugaaa

SEQ ID NO: 1044653 - RNA, 19 nt, Homo sapiens
  misc_RNA (1)...(19): siRNA sense strand
gagauagauucagugacuu

SEQ ID NO: 1044654 - RNA, 19 nt, Homo sapiens
  misc_RNA (1)...(19): siRNA sense strand
uagauaagacagcuggaaa

SEQ ID NO: 1044655 - RNA, 19 nt, Homo sapiens
  misc_RNA (1)...(19): siRNA sense strand
uaugauugauccugaugga

SEQ ID NO: 1044656 - RNA, 19 nt, Homo sapiens
  misc_RNA (1)...(19): siRNA sense strand
cgaaagugaagucccuauu

SEQ ID NO: 1044657 - RNA, 19 nt, Homo sapiens
  misc_RNA (1)...(19): siRNA sense strand
gaaguccagcccugugaau

SEQ ID NO: 1044658 - RNA, 19 nt, Homo sapiens
  misc_RNA (1)...(19): siRNA sense strand
gaaaagcagcuacaagcaa

SEQ ID NO: 1044659 - RNA, 19 nt, Homo sapiens
  misc_RNA (1)...(19): siRNA sense strand
ccucgagcauggagauuuc

SEQ ID NO: 1044660 - RNA, 19 nt, Homo sapiens
  misc_RNA (1)...(19): siRNA sense strand
aggaagauguuacaguaca

SEQ ID NO: 1044661 - RNA, 19 nt, Homo sapiens
  misc_RNA (1)...(19): siRNA sense strand
gcagcuacaagcaaucaau

SEQ ID NO: 1044662 - RNA, 19 nt, Homo sapiens
  misc_RNA (1)...(19): siRNA sense strand
auuaagagccgaaagugaa

SEQ ID NO: 1044663 - RNA, 19 nt, Homo sapiens
  misc_RNA (1)...(19): siRNA sense strand
guugccaucuccaccgaaa

SEQ ID NO: 1044664 - RNA, 19 nt, Homo sapiens
  misc_RNA (1)...(19): siRNA sense strand
gaacugaaaagaguagaaa

SEQ ID NO: 1044665 - RNA, 19 nt, Homo sapiens
  misc_RNA (1)...(19): siRNA sense strand
cacauugguugaucguguu

SEQ ID NO: 1044666 - RNA, 19 nt, Homo sapiens
  misc_RNA (1)...(19): siRNA sense strand
ggaagacuacauccgagau

SEQ ID NO: 1044667 - RNA, 19 nt, Homo sapiens
  misc_RNA (1)...(19): siRNA sense strand
gaagucaugggagauaauc

SEQ ID NO: 1044668 - RNA, 19 nt, Homo sapiens
  misc_RNA (1)...(19): siRNA sense strand
ucauucaaacaccggauua

SEQ ID NO: 1044669 - RNA, 19 nt, Homo sapiens
  misc_RNA (1)...(19): siRNA sense strand
uggaggcucugaacaacau

SEQ ID NO: 1044670 - RNA, 19 nt, Homo sapiens
  misc_RNA (1)...(19): siRNA sense strand
gaaggaaacaacggucgau

SEQ ID NO: 1044671 - RNA, 19 nt, Homo sapiens
  misc_RNA (1)...(19): siRNA sense strand
gagccucccgaucacuuaa

SEQ ID NO: 1044672 - RNA, 19 nt, Homo sapiens
  misc_RNA (1)...(19): siRNA sense strand
caucuccaccgaaacagaa

SEQ ID NO: 1044673 - RNA, 19 nt, Homo sapiens
  misc_RNA (1)...(19): siRNA sense strand
gaugacauagaaagcaaau

SEQ ID NO: 1044674 - RNA, 19 nt, Homo sapiens
  misc_RNA (1)...(19): siRNA sense strand
aaagacaaagaucggaauu

SEQ ID NO: 1044675 - RNA, 19 nt, Homo sapiens
  misc_RNA (1)...(19): siRNA sense strand
aagacuacauccgagauug

SEQ ID NO: 1044676 - RNA, 19 nt, Homo sapiens
  misc_RNA (1)...(19): siRNA sense strand
gauaaucugcugcugucau

SEQ ID NO: 1044677 - RNA, 19 nt, Homo sapiens
  misc_RNA (1)...(19): siRNA sense strand
acaauuacaaggcggagaa

SEQ ID NO: 1044678 - RNA, 19 nt, Homo sapiens
  misc_RNA (1)...(19): siRNA sense strand
gcugcugucauccgucuuu

SEQ ID NO: 1044679 - RNA, 19 nt, Homo sapiens
  misc_RNA (1)...(19): siRNA sense strand
agugaagucccuauuguga

SEQ ID NO: 1044680 - RNA, 19 nt, Homo sapiens
  misc_RNA (1)...(19): siRNA sense strand
uaaagacaaagaucggaau

SEQ ID NO: 1044681 - RNA, 19 nt, Homo sapiens
  misc_RNA (1)...(19): siRNA sense strand
gugaagucccuauugugaa

SEQ ID NO: 1044682 - RNA, 19 nt, Homo sapiens
  misc_RNA (1)...(19): siRNA sense strand
aguccagcccugugaauaa

SEQ ID NO: 1044683 - RNA, 19 nt, Homo sapiens
  misc_RNA (1)...(19): siRNA sense strand
cagaaguccagcccuguga

SEQ ID NO: 1044684 - RNA, 19 nt, Homo sapiens
  misc_RNA (1)...(19): siRNA sense strand
aaaagcagcuacaagcaau

SEQ ID NO: 1044685 - RNA, 19 nt, Homo sapiens
  misc_RNA (1)...(19): siRNA sense strand
caaaagauuccuccauuag

SEQ ID NO: 1044686 - RNA, 19 nt, Homo sapiens
  misc_RNA (1)...(19): siRNA sense strand
gauugauccugauggaacu

SEQ ID NO: 1044687 - RNA, 19 nt, Homo sapiens
  misc_RNA (1)...(19): siRNA sense strand
auaaucugcugcugucauc

SEQ ID NO: 1044688 - RNA, 19 nt, Homo sapiens
  misc_RNA (1)...(19): siRNA sense strand
ugaugaaagccucaacuuc

SEQ ID NO: 1044689 - RNA, 19 nt, Homo sapiens
  misc_RNA (1)...(19): siRNA sense strand
gggaagaggaagauguuac

SEQ ID NO: 1044690 - RNA, 19 nt, Homo sapiens
  misc_RNA (1)...(19): siRNA sense strand
uugagaaugcugaaucuga

SEQ ID NO: 1044691 - RNA, 19 nt, Homo sapiens
  misc_RNA (1)...(19): siRNA sense strand
ggauuucccagugcuaugu

SEQ ID NO: 1044692 - RNA, 19 nt, Homo sapiens
  misc_RNA (1)...(19): siRNA sense strand
gagcauggagauuucuucu

SEQ ID NO: 1044693 - RNA, 19 nt, Homo sapiens
  misc_RNA (1)...(19): siRNA sense strand
uccaaaagauuccuccauu

SEQ ID NO: 1044694 - RNA, 19 nt, Homo sapiens
  misc_RNA (1)...(19): siRNA sense strand
guagcaggagagauagauu

SEQ ID NO: 1044695 - RNA, 19 nt, Homo sapiens
  misc_RNA (1)...(19): siRNA sense strand
gcaaauuaagagccgaaag

SEQ ID NO: 1044696 - RNA, 19 nt, Homo sapiens
  misc_RNA (1)...(19): siRNA sense strand
agauuggacugcucaucga

SEQ ID NO: 1044697 - RNA, 19 nt, Homo sapiens
  misc_RNA (1)...(19): siRNA sense strand
ggaugacauagaaagcaaa

SEQ ID NO: 1044698 - RNA, 19 nt, Homo sapiens
  misc_RNA (1)...(19): siRNA sense strand
ucucuaagaagauaagaca

SEQ ID NO: 1044699 - RNA, 19 nt, Homo sapiens
  misc_RNA (1)...(19): siRNA sense strand
uaaagagcaggaagacuac

SEQ ID NO: 1044700 - RNA, 19 nt, Homo sapiens
  misc_RNA (1)...(19): siRNA sense strand
uagccaggaucagccaaga

SEQ ID NO: 1044701 - RNA, 19 nt, Homo sapiens
  misc_RNA (1)...(19): siRNA sense strand
uagcaggagagauagauuc

SEQ ID NO: 1044702 - RNA, 19 nt, Homo sapiens
  misc_RNA (1)...(19): siRNA sense strand
cagcuacaagcaaucaaug

SEQ ID NO: 1044703 - RNA, 19 nt, Homo sapiens
  misc_RNA (1)...(19): siRNA sense strand
cucgggagaucaacgaugu

SEQ ID NO: 1044704 - RNA, 19 nt, Homo sapiens
  misc_RNA (1)...(19): siRNA sense strand
cauggagauuucuucuauc

SEQ ID NO: 1044705 - RNA, 19 nt, Homo sapiens
  misc_RNA (1)...(19): siRNA sense strand
acacuuggccaaccagaag

SEQ ID NO: 1044706 - RNA, 19 nt, Homo sapiens
  misc_RNA (1)...(19): siRNA sense strand
ccaaaacaccagaaggaaa

SEQ ID NO: 1044707 - RNA, 19 nt, Homo sapiens
  misc_RNA (1)...(19): siRNA sense strand
gcuaugauugauccugaug

SEQ ID NO: 1044708 - RNA, 19 nt, Homo sapiens
  misc_RNA (1)...(19): siRNA sense strand
uuacguaucugccuccuuu

SEQ ID NO: 1044709 - RNA, 19 nt, Homo sapiens
  misc_RNA (1)...(19): siRNA sense strand
gagaaaggcaguaagaguu

SEQ ID NO: 1044710 - RNA, 19 nt, Homo sapiens
  misc_RNA (1)...(19): siRNA sense strand
ucaggaaucuggaucuguu

SEQ ID NO: 1044711 - RNA, 19 nt, Homo sapiens
  misc_RNA (1)...(19): siRNA sense strand
gaucuacccuuggccagaa

SEQ ID NO: 1044712 - RNA, 19 nt, Homo sapiens
  misc_RNA (1)...(19): siRNA sense strand
caacagcugcacagaauau

SEQ ID NO: 1044713 - RNA, 19 nt, Homo sapiens
  misc_RNA (1)...(19): siRNA sense strand
gacggcagguugcuucuga

SEQ ID NO: 1044714 - RNA, 19 nt, Homo sapiens
  misc_RNA (1)...(19): siRNA sense strand
aaagagaaaggcaguaaga

SEQ ID NO: 1044715 - RNA, 19 nt, Homo sapiens
  misc_RNA (1)...(19): siRNA sense strand
gaaaagagaaaggcaguaa

SEQ ID NO: 1044716 - RNA, 19 nt, Homo sapiens
  misc_RNA (1)...(19): siRNA sense strand
gaaggaguaugggguaaaa

SEQ ID NO: 1044717 - RNA, 19 nt, Homo sapiens
  misc_RNA (1)...(19): siRNA sense strand
gcaguaagaguugccuuga

SEQ ID NO: 1044718 - RNA, 19 nt, Homo sapiens
  misc_RNA (1)...(19): siRNA sense strand
gcaacagcugcacagaaua

SEQ ID NO: 1044719 - RNA, 19 nt, Homo sapiens
  misc_RNA (1)...(19): siRNA sense strand
gggcaauaaugcagggaau

SEQ ID NO: 1044720 - RNA, 19 nt, Homo sapiens
  misc_RNA (1)...(19): siRNA sense strand
agcaacagcugcacagaau

SEQ ID NO: 1044721 - RNA, 19 nt, Homo sapiens
  misc_RNA (1)...(19): siRNA sense strand
aguaagaguugccuugagu

SEQ ID NO: 1044722 - RNA, 19 nt, Homo sapiens
  misc_RNA (1)...(19): siRNA sense strand
gcaauaaugcagggaaucu

SEQ ID NO: 1044723 - RNA, 19 nt, Homo sapiens
  misc_RNA (1)...(19): siRNA sense strand
agaaaggcaguaagaguug

SEQ ID NO: 1044724 - RNA, 19 nt, Homo sapiens
  misc_RNA (1)...(19): siRNA sense strand
aaagggagaaggaguaugg

SEQ ID NO: 1044725 - RNA, 19 nt, Homo sapiens
  misc_RNA (1)...(19): siRNA sense strand
uaaugagccuccuccuucu

SEQ ID NO: 1044726 - RNA, 19 nt, Homo sapiens
  misc_RNA (1)...(19): siRNA sense strand
ccgcgaaaaucaagauaaa

SEQ ID NO: 1044727 - RNA, 19 nt, Homo sapiens
  misc_RNA (1)...(19): siRNA sense strand
gguugcuucugaccuaaug

SEQ ID NO: 1044728 - RNA, 19 nt, Homo sapiens
  misc_RNA (1)...(19): siRNA sense strand
gcucaggaaucuggaucug

SEQ ID NO: 1044729 - RNA, 19 nt, Homo sapiens
  misc_RNA (1)...(19): siRNA sense strand
uaagaguugccuugaguuc

SEQ ID NO: 1044730 - RNA, 19 nt, Homo sapiens
  misc_RNA (1)...(19): siRNA sense strand
aauaaugcagggaaucuug

SEQ ID NO: 1044731 - RNA, 19 nt, Homo sapiens
  misc_RNA (1)...(19): siRNA sense strand
guaagaguugccuugaguu

SEQ ID NO: 1044732 - RNA, 19 nt, Homo sapiens
  misc_RNA (1)...(19): siRNA sense strand
agagaaaggcaguaagagu

SEQ ID NO: 1044733 - RNA, 19 nt, Homo sapiens
  misc_RNA (1)...(19): siRNA sense strand
cucaaucuccucacuguug

SEQ ID NO: 1044734 - RNA, 19 nt, Homo sapiens
  misc_RNA (1)...(19): siRNA sense strand
gagaaggaguaugggguaa

SEQ ID NO: 1044735 - RNA, 19 nt, Homo sapiens
  misc_RNA (1)...(19): siRNA sense strand
ccaucggagucgcugcaaa

SEQ ID NO: 1044736 - RNA, 19 nt, Homo sapiens
  misc_RNA (1)...(19): siRNA sense strand
agaguugccuugaguucag

SEQ ID NO: 1044737 - RNA, 19 nt, Homo sapiens
  misc_RNA (1)...(19): siRNA sense strand
ggaaucuggaucuguugau

SEQ ID NO: 1044738 - RNA, 19 nt, Homo sapiens
  misc_RNA (1)...(19): siRNA sense strand
guaaaacacaugccuaugg

SEQ ID NO: 1044739 - RNA, 19 nt, Homo sapiens
  misc_RNA (1)...(19): siRNA sense strand
caaagucggggacaaguga

SEQ ID NO: 1044740 - RNA, 19 nt, Homo sapiens
  misc_RNA (1)...(19): siRNA sense strand
caucggagucgcugcaaag

SEQ ID NO: 1044741 - RNA, 19 nt, Homo sapiens
  misc_RNA (1)...(19): siRNA sense strand
agaauaucccguccagugu

SEQ ID NO: 1044742 - RNA, 19 nt, Homo sapiens
  misc_RNA (1)...(19): siRNA sense strand
gcaaggagguggacacaau

SEQ ID NO: 1044743 - RNA, 19 nt, Homo sapiens
  misc_RNA (1)...(19): siRNA sense strand
ggacaacacgcucaccauu

SEQ ID NO: 1044744 - RNA, 19 nt, Homo sapiens
  misc_RNA (1)...(19): siRNA sense strand
acaacacgcucaccauuga

SEQ ID NO: 1044745 - RNA, 19 nt, Homo sapiens
  misc_RNA (1)...(19): siRNA sense strand
uaaaggacgaggaauguga

SEQ ID NO: 1044746 - RNA, 19 nt, Homo sapiens
  misc_RNA (1)...(19): siRNA sense strand
gaagcaggcggcaucagaa

SEQ ID NO: 1044747 - RNA, 19 nt, Homo sapiens
  misc_RNA (1)...(19): siRNA sense strand
gagagaagggcuccgaguu

SEQ ID NO: 1044748 - RNA, 19 nt, Homo sapiens
  misc_RNA (1)...(19): siRNA sense strand
gaagcuaaaggacgaggaa

SEQ ID NO: 1044749 - RNA, 19 nt, Homo sapiens
  misc_RNA (1)...(19): siRNA sense strand
gacaacacgcucaccauug

SEQ ID NO: 1044750 - RNA, 19 nt, Homo sapiens
  misc_RNA (1)...(19): siRNA sense strand
ggacgcagagcccauguuc

SEQ ID NO: 1044751 - RNA, 19 nt, Homo sapiens
  misc_RNA (1)...(19): siRNA sense strand
ucugggagaucaugagguu

SEQ ID NO: 1044752 - RNA, 19 nt, Homo sapiens
  misc_RNA (1)...(19): siRNA sense strand
caaaagccauuacuacauc

SEQ ID NO: 1044753 - RNA, 19 nt, Homo sapiens
  misc_RNA (1)...(19): siRNA sense strand
ccauggagauccgagagaa

SEQ ID NO: 1044754 - RNA, 19 nt, Homo sapiens
  misc_RNA (1)...(19): siRNA sense strand
gcuaaaggacgaggaaugu

SEQ ID NO: 1044755 - RNA, 19 nt, Homo sapiens
  misc_RNA (1)...(19): siRNA sense strand
gaaggaggagcugcacaga

SEQ ID NO: 1044756 - RNA, 19 nt, Homo sapiens
  misc_RNA (1)...(19): siRNA sense strand
gaggugacagccuugaaga

SEQ ID NO: 1044757 - RNA, 19 nt, Homo sapiens
  misc_RNA (1)...(19): siRNA sense strand
ugaagcaggcggcaucaga

SEQ ID NO: 1044758 - RNA, 19 nt, Homo sapiens
  misc_RNA (1)...(19): siRNA sense strand
gugagcggcuguccaaggu

SEQ ID NO: 1044759 - RNA, 19 nt, Homo sapiens
  misc_RNA (1)...(19): siRNA sense strand
gagaagccaacaugaagca

SEQ ID NO: 1044760 - RNA, 19 nt, Homo sapiens
  misc_RNA (1)...(19): siRNA sense strand
gcaacuucuucaccuacau

SEQ ID NO: 1044761 - RNA, 19 nt, Homo sapiens
  misc_RNA (1)...(19): siRNA sense strand
gguggacacaauccuguuu

SEQ ID NO: 1044762 - RNA, 19 nt, Homo sapiens
  misc_RNA (1)...(19): siRNA sense strand
uggccgagguugacuguag

SEQ ID NO: 1044763 - RNA, 19 nt, Homo sapiens
  misc_RNA (1)...(19): siRNA sense strand
gagcgcagaaggagcugaa

SEQ ID NO: 1044764 - RNA, 19 nt, Homo sapiens
  misc_RNA (1)...(19): siRNA sense strand
uagaacaggagcuggaaga

SEQ ID NO: 1044765 - RNA, 19 nt, Homo sapiens
  misc_RNA (1)...(19): siRNA sense strand
ugaagacacuggucaucac

SEQ ID NO: 1044766 - RNA, 19 nt, Homo sapiens
  misc_RNA (1)...(19): siRNA sense strand
ugacagccuugaagacacu

SEQ ID NO: 1044767 - RNA, 19 nt, Homo sapiens
  misc_RNA (1)...(19): siRNA sense strand
ggugacagccuugaagaca

SEQ ID NO: 1044768 - RNA, 19 nt, Homo sapiens
  misc_RNA (1)...(19): siRNA sense strand
cagaaaagcagcugaagga

SEQ ID NO: 1044769 - RNA, 19 nt, Homo sapiens
  misc_RNA (1)...(19): siRNA sense strand
agagaagggcuccgaguuc

SEQ ID NO: 1044770 - RNA, 19 nt, Homo sapiens
  misc_RNA (1)...(19): siRNA sense strand
uagcagcaccaacacaugu

SEQ ID NO: 1044771 - RNA, 19 nt, Homo sapiens
  misc_RNA (1)...(19): siRNA sense strand
ucacaagaugguucgagaa

SEQ ID NO: 1044772 - RNA, 19 nt, Homo sapiens
  misc_RNA (1)...(19): siRNA sense strand
gcagugugcaacuucuuca

SEQ ID NO: 1044773 - RNA, 19 nt, Homo sapiens
  misc_RNA (1)...(19): siRNA sense strand
uacuacaucucgccaucuu

SEQ ID NO: 1044774 - RNA, 19 nt, Homo sapiens
  misc_RNA (1)...(19): siRNA sense strand
gaagguggccgagguugac

SEQ ID NO: 1044775 - RNA, 19 nt, Homo sapiens
  misc_RNA (1)...(19): siRNA sense strand
ggagcucucggugcuggua

SEQ ID NO: 1044776 - RNA, 19 nt, Homo sapiens
  misc_RNA (1)...(19): siRNA sense strand
gcagaggugacagccuuga

SEQ ID NO: 1044777 - RNA, 19 nt, Homo sapiens
  misc_RNA (1)...(19): siRNA sense strand
ucaccuacauccgcuacau

SEQ ID NO: 1044778 - RNA, 19 nt, Homo sapiens
  misc_RNA (1)...(19): siRNA sense strand
gacuguagcagcaccaaca

SEQ ID NO: 1044779 - RNA, 19 nt, Homo sapiens
  misc_RNA (1)...(19): siRNA sense strand
guucgagaagccaacauga

SEQ ID NO: 1044780 - RNA, 19 nt, Homo sapiens
  misc_RNA (1)...(19): siRNA sense strand
ugacggccagccuguuuga

SEQ ID NO: 1044781 - RNA, 19 nt, Homo sapiens
  misc_RNA (1)...(19): siRNA sense strand
ucgagaagccaacaugaag

SEQ ID NO: 1044782 - RNA, 19 nt, Homo sapiens
  misc_RNA (1)...(19): siRNA sense strand
caacuucuucaccuacauc

SEQ ID NO: 1044783 - RNA, 19 nt, Homo sapiens
  misc_RNA (1)...(19): siRNA sense strand
ugaagguggccgagguuga

SEQ ID NO: 1044784 - RNA, 19 nt, Homo sapiens
  misc_RNA (1)...(19): siRNA sense strand
ggacacaauccuguuugca

SEQ ID NO: 1044785 - RNA, 19 nt, Homo sapiens
  misc_RNA (1)...(19): siRNA sense strand
ucaccgcagugugcaacuu

SEQ ID NO: 1044786 - RNA, 19 nt, Homo sapiens
  misc_RNA (1)...(19): siRNA sense strand
ugugcaacuucuucaccua

SEQ ID NO: 1044787 - RNA, 19 nt, Homo sapiens
  misc_RNA (1)...(19): siRNA sense strand
guagcagcaccaacacaug

SEQ ID NO: 1044788 - RNA, 19 nt, Homo sapiens
  misc_RNA (1)...(19): siRNA sense strand
gcuagaacaggagcuggaa

SEQ ID NO: 1044789 - RNA, 19 nt, Homo sapiens
  misc_RNA (1)...(19): siRNA sense strand
ggaccacucuuacaaaguu

SEQ ID NO: 1044790 - RNA, 19 nt, Homo sapiens
  misc_RNA (1)...(19): siRNA sense strand
gagaagaccuuaugaacca

SEQ ID NO: 1044791 - RNA, 19 nt, Homo sapiens
  misc_RNA (1)...(19): siRNA sense strand
ggagacuguucuaauuaua

SEQ ID NO: 1044792 - RNA, 19 nt, Homo sapiens
  misc_RNA (1)...(19): siRNA sense strand
gaaguuggcaugcagagaa

SEQ ID NO: 1044793 - RNA, 19 nt, Homo sapiens
  misc_RNA (1)...(19): siRNA sense strand
aauaagcgauugaacacua

SEQ ID NO: 1044794 - RNA, 19 nt, Homo sapiens
  misc_RNA (1)...(19): siRNA sense strand
gacuugggauguagcuuua

SEQ ID NO: 1044795 - RNA, 19 nt, Homo sapiens
  misc_RNA (1)...(19): siRNA sense strand
aaaguugguugugcuguua

SEQ ID NO: 1044796 - RNA, 19 nt, Homo sapiens
  misc_RNA (1)...(19): siRNA sense strand
gaggaacacugacgagaag

SEQ ID NO: 1044797 - RNA, 19 nt, Homo sapiens
  misc_RNA (1)...(19): siRNA sense strand
ggacguagacuuuaucaac

SEQ ID NO: 1044798 - RNA, 19 nt, Homo sapiens
  misc_RNA (1)...(19): siRNA sense strand
caaaguugguugugcuguu

SEQ ID NO: 1044799 - RNA, 19 nt, Homo sapiens
  misc_RNA (1)...(19): siRNA sense strand
cauaauggauuggacaaga

SEQ ID NO: 1044800 - RNA, 19 nt, Homo sapiens
  misc_RNA (1)...(19): siRNA sense strand
cuacuggguucuaguuuga

SEQ ID NO: 1044801 - RNA, 19 nt, Homo sapiens
  misc_RNA (1)...(19): siRNA sense strand
gcuacuggguucuaguuug

SEQ ID NO: 1044802 - RNA, 19 nt, Homo sapiens
  misc_RNA (1)...(19): siRNA sense strand
ggaggaacacugacgagaa

SEQ ID NO: 1044803 - RNA, 19 nt, Homo sapiens
  misc_RNA (1)...(19): siRNA sense strand
ucuggagacuguucuaauu

SEQ ID NO: 1044804 - RNA, 19 nt, Homo sapiens
  misc_RNA (1)...(19): siRNA sense strand
cgaggaggacguagacuuu

SEQ ID NO: 1044805 - RNA, 19 nt, Homo sapiens
  misc_RNA (1)...(19): siRNA sense strand
gaggaggacguagacuuua

SEQ ID NO: 1044806 - RNA, 19 nt, Homo sapiens
  misc_RNA (1)...(19): siRNA sense strand
cgugacaaaugcacagauu

SEQ ID NO: 1044807 - RNA, 19 nt, Homo sapiens
  misc_RNA (1)...(19): siRNA sense strand
cuucaugacuugggaugua

SEQ ID NO: 1044808 - RNA, 19 nt, Homo sapiens
  misc_RNA (1)...(19): siRNA sense strand
acgugaaccuccacaauga

SEQ ID NO: 1044809 - RNA, 19 nt, Homo sapiens
  misc_RNA (1)...(19): siRNA sense strand
uggagacuguucuaauuau

SEQ ID NO: 1044810 - RNA, 19 nt, Homo sapiens
  misc_RNA (1)...(19): siRNA sense strand
guauugcuaucagaaguug

SEQ ID NO: 1044811 - RNA, 19 nt, Homo sapiens
  misc_RNA (1)...(19): siRNA sense strand
ugacuugggauguagcuuu

SEQ ID NO: 1044812 - RNA, 19 nt, Homo sapiens
  misc_RNA (1)...(19): siRNA sense strand
gaaccaggaauauuuugua

SEQ ID NO: 1044813 - RNA, 19 nt, Homo sapiens
  misc_RNA (1)...(19): siRNA sense strand
auaauggauuggacaagaa

SEQ ID NO: 1044814 - RNA, 19 nt, Homo sapiens
  misc_RNA (1)...(19): siRNA sense strand
uagacuuuaucaacgagua

SEQ ID NO: 1044815 - RNA, 19 nt, Homo sapiens
  misc_RNA (1)...(19): siRNA sense strand
cuggagacuguucuaauua

SEQ ID NO: 1044816 - RNA, 19 nt, Homo sapiens
  misc_RNA (1)...(19): siRNA sense strand
guacgugaaccuccacaau

SEQ ID NO: 1044817 - RNA, 19 nt, Homo sapiens
  misc_RNA (1)...(19): siRNA sense strand
gacgagaagaccuuaugaa

SEQ ID NO: 1044818 - RNA, 19 nt, Homo sapiens
  misc_RNA (1)...(19): siRNA sense strand
uggcagacgugacaaaugc

SEQ ID NO: 1044819 - RNA, 19 nt, Homo sapiens
  misc_RNA (1)...(19): siRNA sense strand
gggucuaacuugcgcuuca

SEQ ID NO: 1044820 - RNA, 19 nt, Homo sapiens
  misc_RNA (1)...(19): siRNA sense strand
ggucggcccugaaaaugaa

SEQ ID NO: 1044821 - RNA, 19 nt, Homo sapiens
  misc_RNA (1)...(19): siRNA sense strand
uaucagaaguuggcaugca

SEQ ID NO: 1044822 - RNA, 19 nt, Homo sapiens
  misc_RNA (1)...(19): siRNA sense strand
aggaggacguagacuuuau

SEQ ID NO: 1044823 - RNA, 19 nt, Homo sapiens
  misc_RNA (1)...(19): siRNA sense strand
ugacgagaagaccuuauga

SEQ ID NO: 1044824 - RNA, 19 nt, Homo sapiens
  misc_RNA (1)...(19): siRNA sense strand
uaauggauuggacaagaaa

SEQ ID NO: 1044825 - RNA, 19 nt, Homo sapiens
  misc_RNA (1)...(19): siRNA sense strand
gauuuucuaugcaguaaga

SEQ ID NO: 1044826 - RNA, 19 nt, Homo sapiens
  misc_RNA (1)...(19): siRNA sense strand
gaccacucuuacaaaguug

SEQ ID NO: 1044827 - RNA, 19 nt, Homo sapiens
  misc_RNA (1)...(19): siRNA sense strand
ggaggacguagacuuuauc

SEQ ID NO: 1044828 - RNA, 19 nt, Homo sapiens
  misc_RNA (1)...(19): siRNA sense strand
gcucuggagacuguucuaa

SEQ ID NO: 1044829 - RNA, 19 nt, Homo sapiens
  misc_RNA (1)...(19): siRNA sense strand
gcgccaggaggaacacuga

SEQ ID NO: 1044830 - RNA, 19 nt, Homo sapiens
  misc_RNA (1)...(19): siRNA sense strand
uacgugaaccuccacaaug

SEQ ID NO: 1044831 - RNA, 19 nt, Homo sapiens
  misc_RNA (1)...(19): siRNA sense strand
gcuguuacuccauguucaa

SEQ ID NO: 1044832 - RNA, 19 nt, Homo sapiens
  misc_RNA (1)...(19): siRNA sense strand
gaggacguagacuuuauca

SEQ ID NO: 1044833 - RNA, 19 nt, Homo sapiens
  misc_RNA (1)...(19): siRNA sense strand
ugggaccacucuuacaaag

SEQ ID NO: 1044834 - RNA, 19 nt, Homo sapiens
  misc_RNA (1)...(19): siRNA sense strand
ugaagcugcggcucuguga

SEQ ID NO: 1044835 - RNA, 19 nt, Homo sapiens
  misc_RNA (1)...(19): siRNA sense strand
uaacuugcgcuucaugacu

SEQ ID NO: 1044836 - RNA, 19 nt, Homo sapiens
  misc_RNA (1)...(19): siRNA sense strand
ggucuaacuugcgcuucau

SEQ ID NO: 1044837 - RNA, 19 nt, Homo sapiens
  misc_RNA (1)...(19): siRNA sense strand
aacuugcgcuucaugacuu

SEQ ID NO: 1044838 - RNA, 19 nt, Homo sapiens
  misc_RNA (1)...(19): siRNA sense strand
uaguuugaacgccagauuu

SEQ ID NO: 1044839 - RNA, 19 nt, Homo sapiens
  misc_RNA (1)...(19): siRNA sense strand
caaguauugcuaucagaag

SEQ ID NO: 1044840 - RNA, 19 nt, Homo sapiens
  misc_RNA (1)...(19): siRNA sense strand
aaguauugcuaucagaagu

SEQ ID NO: 1044841 - RNA, 19 nt, Homo sapiens
  misc_RNA (1)...(19): siRNA sense strand
ccaggaauauuuuguacuc

SEQ ID NO: 1044842 - RNA, 19 nt, Homo sapiens
  misc_RNA (1)...(19): siRNA sense strand
ggaggacuacagccguaua

SEQ ID NO: 1044843 - RNA, 19 nt, Homo sapiens
  misc_RNA (1)...(19): siRNA sense strand
caaaccaccguguuacgaa

SEQ ID NO: 1044844 - RNA, 19 nt, Homo sapiens
  misc_RNA (1)...(19): siRNA sense strand
uguccaaaccaccguguua

SEQ ID NO: 1044845 - RNA, 19 nt, Homo sapiens
  misc_RNA (1)...(19): siRNA sense strand
caagcggaaucggacaugu

SEQ ID NO: 1044846 - RNA, 19 nt, Homo sapiens
  misc_RNA (1)...(19): siRNA sense strand
cgaagaggcggugcugaug

SEQ ID NO: 1044847 - RNA, 19 nt, Homo sapiens
  misc_RNA (1)...(19): siRNA sense strand
ccaaaccaccguguuacga

SEQ ID NO: 1044848 - RNA, 19 nt, Homo sapiens
  misc_RNA (1)...(19): siRNA sense strand
gaggacuacagccguauag

SEQ ID NO: 1044849 - RNA, 19 nt, Homo sapiens
  misc_RNA (1)...(19): siRNA sense strand
ccagcuggaccgacucaga

SEQ ID NO: 1044850 - RNA, 19 nt, Homo sapiens
  misc_RNA (1)...(19): siRNA sense strand
ggaguacaauuccaaguau

SEQ ID NO: 1044851 - RNA, 19 nt, Homo sapiens
  misc_RNA (1)...(19): siRNA sense strand
ccacaggguucagccuuaa

SEQ ID NO: 1044852 - RNA, 19 nt, Homo sapiens
  misc_RNA (1)...(19): siRNA sense strand
cgggagaacuuccgacaug

SEQ ID NO: 1044853 - RNA, 19 nt, Homo sapiens
  misc_RNA (1)...(19): siRNA sense strand
gaacaagcccaggaccauu

SEQ ID NO: 1044854 - RNA, 19 nt, Homo sapiens
  misc_RNA (1)...(19): siRNA sense strand
gggaguggcuucaccaaac

SEQ ID NO: 1044855 - RNA, 19 nt, Homo sapiens
  misc_RNA (1)...(19): siRNA sense strand
ggaguggcuucaccaaaca

SEQ ID NO: 1044856 - RNA, 19 nt, Homo sapiens
  misc_RNA (1)...(19): siRNA sense strand
gacaaacguugcccugcuu

SEQ ID NO: 1044857 - RNA, 19 nt, Homo sapiens
  misc_RNA (1)...(19): siRNA sense strand
cgacauggcccacgcuuca

SEQ ID NO: 1044858 - RNA, 19 nt, Homo sapiens
  misc_RNA (1)...(19): siRNA sense strand
agaaaucgaucggcgcaaa

SEQ ID NO: 1044859 - RNA, 19 nt, Homo sapiens
  misc_RNA (1)...(19): siRNA sense strand
ccaaggagguccggaaggu

SEQ ID NO: 1044860 - RNA, 19 nt, Homo sapiens
  misc_RNA (1)...(19): siRNA sense strand
cggaguacaauuccaagua

SEQ ID NO: 1044861 - RNA, 19 nt, Homo sapiens
  misc_RNA (1)...(19): siRNA sense strand
cccacaggguucagccuua

SEQ ID NO: 1044862 - RNA, 19 nt, Homo sapiens
  misc_RNA (1)...(19): siRNA sense strand
ugacagggaucagcgauac

SEQ ID NO: 1044863 - RNA, 19 nt, Homo sapiens
  misc_RNA (1)...(19): siRNA sense strand
gaugaguuccuaccugugu

SEQ ID NO: 1044864 - RNA, 19 nt, Homo sapiens
  misc_RNA (1)...(19): siRNA sense strand
ccgagggaaugaaaggauu

SEQ ID NO: 1044865 - RNA, 19 nt, Homo sapiens
  misc_RNA (1)...(19): siRNA sense strand
acauggagaugaguuccua

SEQ ID NO: 1044866 - RNA, 19 nt, Homo sapiens
  misc_RNA (1)...(19): siRNA sense strand
agcgauaccugaccaccua

SEQ ID NO: 1044867 - RNA, 19 nt, Homo sapiens
  misc_RNA (1)...(19): siRNA sense strand
ugacgucggaguacaauuc

SEQ ID NO: 1044868 - RNA, 19 nt, Homo sapiens
  misc_RNA (1)...(19): siRNA sense strand
caaggguacuuugagaaca

SEQ ID NO: 1044869 - RNA, 19 nt, Homo sapiens
  misc_RNA (1)...(19): siRNA sense strand
ggaacaagcccaggaccau

SEQ ID NO: 1044870 - RNA, 19 nt, Homo sapiens
  misc_RNA (1)...(19): siRNA sense strand
gaguacaauuccaaguauc

SEQ ID NO: 1044871 - RNA, 19 nt, Homo sapiens
  misc_RNA (1)...(19): siRNA sense strand
aaccaaggguacuuugaga

SEQ ID NO: 1044872 - RNA, 19 nt, Homo sapiens
  misc_RNA (1)...(19): siRNA sense strand
ccaggaccauuuccagucu

SEQ ID NO: 1044873 - RNA, 19 nt, Homo sapiens
  misc_RNA (1)...(19): siRNA sense strand
ucaccuacauggagaugag

SEQ ID NO: 1044874 - RNA, 19 nt, Homo sapiens
  misc_RNA (1)...(19): siRNA sense strand
gcaccggcuacaaaucaaa

SEQ ID NO: 1044875 - RNA, 19 nt, Homo sapiens
  misc_RNA (1)...(19): siRNA sense strand
gccagagugucaccaaguc

SEQ ID NO: 1044876 - RNA, 19 nt, Homo sapiens
  misc_RNA (1)...(19): siRNA sense strand
cagaccagcucaggcuaug

SEQ ID NO: 1044877 - RNA, 19 nt, Homo sapiens
  misc_RNA (1)...(19): siRNA sense strand
caaccaaggguacuuugag

SEQ ID NO: 1044878 - RNA, 19 nt, Homo sapiens
  misc_RNA (1)...(19): siRNA sense strand
gaaaucgaucggcgcaaag

SEQ ID NO: 1044879 - RNA, 19 nt, Homo sapiens
  misc_RNA (1)...(19): siRNA sense strand
aacaagcccaggaccauuu

SEQ ID NO: 1044880 - RNA, 19 nt, Homo sapiens
  misc_RNA (1)...(19): siRNA sense strand
cuacaaccaaggguacuuu

SEQ ID NO: 1044881 - RNA, 19 nt, Homo sapiens
  misc_RNA (1)...(19): siRNA sense strand
ccucuagaccagccagauu

SEQ ID NO: 1044882 - RNA, 19 nt, Homo sapiens
  misc_RNA (1)...(19): siRNA sense strand
ggcaccggcuacaaaucaa

SEQ ID NO: 1044883 - RNA, 19 nt, Homo sapiens
  misc_RNA (1)...(19): siRNA sense strand
agaccagccagauuucuug

SEQ ID NO: 1044884 - RNA, 19 nt, Homo sapiens
  misc_RNA (1)...(19): siRNA sense strand
ugagucaccagcaguuuca

SEQ ID NO: 1044885 - RNA, 19 nt, Homo sapiens
  misc_RNA (1)...(19): siRNA sense strand
uaccagaacacaccucaca

SEQ ID NO: 1044886 - RNA, 19 nt, Homo sapiens
  misc_RNA (1)...(19): siRNA sense strand
aaggguacuuugagaacau

SEQ ID NO: 1044887 - RNA, 19 nt, Homo sapiens
  misc_RNA (1)...(19): siRNA sense strand
ccaaggguacuuugagaac

SEQ ID NO: 1044888 - RNA, 19 nt, Homo sapiens
  misc_RNA (1)...(19): siRNA sense strand
gggaagaccuuuagacgua

SEQ ID NO: 1044889 - RNA, 19 nt, Homo sapiens
  misc_RNA (1)...(19): siRNA sense strand
gagaaacccuauaaaugua

SEQ ID NO: 1044890 - RNA, 19 nt, Homo sapiens
  misc_RNA (1)...(19): siRNA sense strand
gaacaugggcaguuucaua

SEQ ID NO: 1044891 - RNA, 19 nt, Homo sapiens
  misc_RNA (1)...(19): siRNA sense strand
gggaagaacuuucguagug

SEQ ID NO: 1044892 - RNA, 19 nt, Homo sapiens
  misc_RNA (1)...(19): siRNA sense strand
gcucaaaccuuauucaaca

SEQ ID NO: 1044893 - RNA, 19 nt, Homo sapiens
  misc_RNA (1)...(19): siRNA sense strand
gagaaacucuaugaaugua

SEQ ID NO: 1044894 - RNA, 19 nt, Homo sapiens
  misc_RNA (1)...(19): siRNA sense strand
caucaaagauuucauacug

SEQ ID NO: 1044895 - RNA, 19 nt, Homo sapiens
  misc_RNA (1)...(19): siRNA sense strand
cguaguggcuaucaacuua

SEQ ID NO: 1044896 - RNA, 19 nt, Homo sapiens
  misc_RNA (1)...(19): siRNA sense strand
gggaaggccuuuauauaug

SEQ ID NO: 1044897 - RNA, 19 nt, Homo sapiens
  misc_RNA (1)...(19): siRNA sense strand
agacguaguucacaccuua

SEQ ID NO: 1044898 - RNA, 19 nt, Homo sapiens
  misc_RNA (1)...(19): siRNA sense strand
cagaagaaauuuaguagug

SEQ ID NO: 1044899 - RNA, 19 nt, Homo sapiens
  misc_RNA (1)...(19): siRNA sense strand
gagaaacccuaugaaugua

SEQ ID NO: 1044900 - RNA, 19 nt, Homo sapiens
  misc_RNA (1)...(19): siRNA sense strand
caucagagauuucauacug

SEQ ID NO: 1044901 - RNA, 19 nt, Homo sapiens
  misc_RNA (1)...(19): siRNA sense strand
gauaaucagcuacauagaa

SEQ ID NO: 1044902 - RNA, 19 nt, Homo sapiens
  misc_RNA (1)...(19): siRNA sense strand
ggauuuggauuuacagugu

SEQ ID NO: 1044903 - RNA, 19 nt, Homo sapiens
  misc_RNA (1)...(19): siRNA sense strand
gcauggauaucuuaaucaa

SEQ ID NO: 1044904 - RNA, 19 nt, Homo sapiens
  misc_RNA (1)...(19): siRNA sense strand
gggaagaccuauacuacug

SEQ ID NO: 1044905 - RNA, 19 nt, Homo sapiens
  misc_RNA (1)...(19): siRNA sense strand
caucacagguuucauguca

SEQ ID NO: 1044906 - RNA, 19 nt, Homo sapiens
  misc_RNA (1)...(19): siRNA sense strand
ugagaaacccuauaaaugu

SEQ ID NO: 1044907 - RNA, 19 nt, Homo sapiens
  misc_RNA (1)...(19): siRNA sense strand
gagaaacccuaugugugua

SEQ ID NO: 1044908 - RNA, 19 nt, Homo sapiens
  misc_RNA (1)...(19): siRNA sense strand
gaauguggcaagaccuuua

SEQ ID NO: 1044909 - RNA, 19 nt, Homo sapiens
  misc_RNA (1)...(19): siRNA sense strand
caacuuacucuacaucaaa

SEQ ID NO: 1044910 - RNA, 19 nt, Homo sapiens
  misc_RNA (1)...(19): siRNA sense strand
gaaacucuaugaauguaag

SEQ ID NO: 1044911 - RNA, 19 nt, Homo sapiens
  misc_RNA (1)...(19): siRNA sense strand
gaugagaagccauacauau

SEQ ID NO: 1044912 - RNA, 19 nt, Homo sapiens
  misc_RNA (1)...(19): siRNA sense strand
ucacagguuucaugucauu

SEQ ID NO: 1044913 - RNA, 19 nt, Homo sapiens
  misc_RNA (1)...(19): siRNA sense strand
gaauguaagguauguagaa

SEQ ID NO: 1044914 - RNA, 19 nt, Homo sapiens
  misc_RNA (1)...(19): siRNA sense strand
ggauuuacagugugagaua

SEQ ID NO: 1044915 - RNA, 19 nt, Homo sapiens
  misc_RNA (1)...(19): siRNA sense strand
uagaagaggucaccagcuu

SEQ ID NO: 1044916 - RNA, 19 nt, Homo sapiens
  misc_RNA (1)...(19): siRNA sense strand
uguaagaaaugucagaaga

SEQ ID NO: 1044917 - RNA, 19 nt, Homo sapiens
  misc_RNA (1)...(19): siRNA sense strand
aaacagauauauccucuac

SEQ ID NO: 1044918 - RNA, 19 nt, Homo sapiens
  misc_RNA (1)...(19): siRNA sense strand
gagauaaucagcuacauag

SEQ ID NO: 1044919 - RNA, 19 nt, Homo sapiens
  misc_RNA (1)...(19): siRNA sense strand
gaacuuucguaguggcuau

SEQ ID NO: 1044920 - RNA, 19 nt, Homo sapiens
  misc_RNA (1)...(19): siRNA sense strand
aguacuggcucaaaccuua

SEQ ID NO: 1044921 - RNA, 19 nt, Homo sapiens
  misc_RNA (1)...(19): siRNA sense strand
gugagaaacccuauaaaug

SEQ ID NO: 1044922 - RNA, 19 nt, Homo sapiens
  misc_RNA (1)...(19): siRNA sense strand
gcaaagagugugggaagaa

SEQ ID NO: 1044923 - RNA, 19 nt, Homo sapiens
  misc_RNA (1)...(19): siRNA sense strand
gcgagaaacccuaugaaug

SEQ ID NO: 1044924 - RNA, 19 nt, Homo sapiens
  misc_RNA (1)...(19): siRNA sense strand
ggaaggccuuuauauaugc

SEQ ID NO: 1044925 - RNA, 19 nt, Homo sapiens
  misc_RNA (1)...(19): siRNA sense strand
gagaaaaccuaugaaugua

SEQ ID NO: 1044926 - RNA, 19 nt, Homo sapiens
  misc_RNA (1)...(19): siRNA sense strand
gaaugugggaagaacuuua

SEQ ID NO: 1044927 - RNA, 19 nt, Homo sapiens
  misc_RNA (1)...(19): siRNA sense strand
gcuaucaacuuacucuaca

SEQ ID NO: 1044928 - RNA, 19 nt, Homo sapiens
  misc_RNA (1)...(19): siRNA sense strand
gggaaaaccuucagauaug

SEQ ID NO: 1044929 - RNA, 19 nt, Homo sapiens
  misc_RNA (1)...(19): siRNA sense strand
gugggaaggccuuuauaua

SEQ ID NO: 1044930 - RNA, 19 nt, Homo sapiens
  misc_RNA (1)...(19): siRNA sense strand
uaugaaacccuaugaaugu

SEQ ID NO: 1044931 - RNA, 19 nt, Homo sapiens
  misc_RNA (1)...(19): siRNA sense strand
gauuuacagugugagauaa

SEQ ID NO: 1044932 - RNA, 19 nt, Homo sapiens
  misc_RNA (1)...(19): siRNA sense strand
caucagagaauucauagga

SEQ ID NO: 1044933 - RNA, 19 nt, Homo sapiens
  misc_RNA (1)...(19): siRNA sense strand
gaaugugggaagaccuuua

SEQ ID NO: 1044934 - RNA, 19 nt, Homo sapiens
  misc_RNA (1)...(19): siRNA sense strand
ugagaaaccuuuugaaugu

SEQ ID NO: 1044935 - RNA, 19 nt, Homo sapiens
  misc_RNA (1)...(19): siRNA sense strand
ggugagaaacccuauaaau

SEQ ID NO: 1044936 - RNA, 19 nt, Homo sapiens
  misc_RNA (1)...(19): siRNA sense strand
gggaaggccuauaguacug

SEQ ID NO: 1044937 - RNA, 19 nt, Homo sapiens
  misc_RNA (1)...(19): siRNA sense strand
gaaacacuuugaauguaag

SEQ ID NO: 1044938 - RNA, 19 nt, Homo sapiens
  misc_RNA (1)...(19): siRNA sense strand
gcaugaaacacuuugaaug

SEQ ID NO: 1044939 - RNA, 19 nt, Homo sapiens
  misc_RNA (1)...(19): siRNA sense strand
ggaaaacccuaugaaugua

SEQ ID NO: 1044940 - RNA, 19 nt, Homo sapiens
  misc_RNA (1)...(19): siRNA sense strand
aguaggcgcucaaaucuug

SEQ ID NO: 1044941 - RNA, 19 nt, Homo sapiens
  misc_RNA (1)...(19): siRNA sense strand
gcuauaccacugccucaua

SEQ ID NO: 1044942 - RNA, 19 nt, Homo sapiens
  misc_RNA (1)...(19): siRNA sense strand
ugagaaacccuaugugugu

SEQ ID NO: 1044943 - RNA, 19 nt, Homo sapiens
  misc_RNA (1)...(19): siRNA sense strand
gcacaucagagcauucaug

SEQ ID NO: 1044944 - RNA, 19 nt, Homo sapiens
  misc_RNA (1)...(19): siRNA sense strand
cuacaucagagaauucaua

SEQ ID NO: 1044945 - RNA, 19 nt, Homo sapiens
  misc_RNA (1)...(19): siRNA sense strand
cuacacaacuucagagcau

SEQ ID NO: 1044946 - RNA, 19 nt, Homo sapiens
  misc_RNA (1)...(19): siRNA sense strand
gagaauucauaggagcaua

SEQ ID NO: 1044947 - RNA, 19 nt, Homo sapiens
  misc_RNA (1)...(19): siRNA sense strand
guaugaaacccuaugaaug

SEQ ID NO: 1044948 - RNA, 19 nt, Homo sapiens
  misc_RNA (1)...(19): siRNA sense strand
caucagagaauucauaaag

SEQ ID NO: 1044949 - RNA, 19 nt, Homo sapiens
  misc_RNA (1)...(19): siRNA sense strand
gaaacccuaugaauguaca

SEQ ID NO: 1044950 - RNA, 19 nt, Homo sapiens
  misc_RNA (1)...(19): siRNA sense strand
guaagaaaugucagaagaa

SEQ ID NO: 1044951 - RNA, 19 nt, Homo sapiens
  misc_RNA (1)...(19): siRNA sense strand
gauauauccucuacacaac

SEQ ID NO: 1044952 - RNA, 19 nt, Homo sapiens
  misc_RNA (1)...(19): siRNA sense strand
caugaaacacuuugaaugu

SEQ ID NO: 1044953 - RNA, 19 nt, Homo sapiens
  misc_RNA (1)...(19): siRNA sense strand
ucagagaauucauaaaggu

SEQ ID NO: 1044954 - RNA, 19 nt, Homo sapiens
  misc_RNA (1)...(19): siRNA sense strand
aguagugguuaucaacuua

SEQ ID NO: 1044955 - RNA, 19 nt, Homo sapiens
  misc_RNA (1)...(19): siRNA sense strand
gaaacccuaugaauguaag

SEQ ID NO: 1044956 - RNA, 19 nt, Homo sapiens
  misc_RNA (1)...(19): siRNA sense strand
cgagaaacccuaugaaugc

SEQ ID NO: 1044957 - RNA, 19 nt, Homo sapiens
  misc_RNA (1)...(19): siRNA sense strand
gggagggccuuuagucaag

SEQ ID NO: 1044958 - RNA, 19 nt, Homo sapiens
  misc_RNA (1)...(19): siRNA sense strand
caacuuauucuacaucaca

SEQ ID NO: 1044959 - RNA, 19 nt, Homo sapiens
  misc_RNA (1)...(19): siRNA sense strand
gaauguaaggaguguaaga

SEQ ID NO: 1044960 - RNA, 19 nt, Homo sapiens
  misc_RNA (1)...(19): siRNA sense strand
caucuuagaauucaucaga

SEQ ID NO: 1044961 - RNA, 19 nt, Homo sapiens
  misc_RNA (1)...(19): siRNA sense strand
ugagauaaucagcuacaua

SEQ ID NO: 1044962 - RNA, 19 nt, Homo sapiens
  misc_RNA (1)...(19): siRNA sense strand
ugggaaggccuuuauauau

SEQ ID NO: 1044963 - RNA, 19 nt, Homo sapiens
  misc_RNA (1)...(19): siRNA sense strand
gaacuauagaaaccuggua

SEQ ID NO: 1044964 - RNA, 19 nt, Homo sapiens
  misc_RNA (1)...(19): siRNA sense strand
gaaaucuuacucuacauca

SEQ ID NO: 1044965 - RNA, 19 nt, Homo sapiens
  misc_RNA (1)...(19): siRNA sense strand
gguaugaaacccuaugaau

SEQ ID NO: 1044966 - RNA, 19 nt, Homo sapiens
  misc_RNA (1)...(19): siRNA sense strand
caagguggacaucuuagaa

SEQ ID NO: 1044967 - RNA, 19 nt, Homo sapiens
  misc_RNA (1)...(19): siRNA sense strand
auauaugccucacacauug

SEQ ID NO: 1044968 - RNA, 19 nt, Homo sapiens
  misc_RNA (1)...(19): siRNA sense strand
gagacccuaugaaugcaaa

SEQ ID NO: 1044969 - RNA, 19 nt, Homo sapiens
  misc_RNA (1)...(19): siRNA sense strand
uaaagcccaucagagaauu

SEQ ID NO: 1044970 - RNA, 19 nt, Homo sapiens
  misc_RNA (1)...(19): siRNA sense strand
gugcaucagagauuucaua

SEQ ID NO: 1044971 - RNA, 19 nt, Homo sapiens
  misc_RNA (1)...(19): siRNA sense strand
cuucagagcauauaugaga

SEQ ID NO: 1044972 - RNA, 19 nt, Homo sapiens
  misc_RNA (1)...(19): siRNA sense strand
gaauguaaagaauguggaa

SEQ ID NO: 1044973 - RNA, 19 nt, Homo sapiens
  misc_RNA (1)...(19): siRNA sense strand
gagaaacccuaugaaugca

SEQ ID NO: 1044974 - RNA, 19 nt, Homo sapiens
  misc_RNA (1)...(19): siRNA sense strand
gaauguaagaaaugucaga

SEQ ID NO: 1044975 - RNA, 19 nt, Homo sapiens
  misc_RNA (1)...(19): siRNA sense strand
gcccaucagagaauucaua

SEQ ID NO: 1044976 - RNA, 19 nt, Homo sapiens
  misc_RNA (1)...(19): siRNA sense strand
cagaauauucacacuggua

SEQ ID NO: 1044977 - RNA, 19 nt, Homo sapiens
  misc_RNA (1)...(19): siRNA sense strand
cauacuuucuucuacauca

SEQ ID NO: 1044978 - RNA, 19 nt, Homo sapiens
  misc_RNA (1)...(19): siRNA sense strand
guggacaucuuagaauuca

SEQ ID NO: 1044979 - RNA, 19 nt, Homo sapiens
  misc_RNA (1)...(19): siRNA sense strand
uauauaugccucacacauu

SEQ ID NO: 1044980 - RNA, 19 nt, Homo sapiens
  misc_RNA (1)...(19): siRNA sense strand
caacaugagagaauucaca

SEQ ID NO: 1044981 - RNA, 19 nt, Homo sapiens
  misc_RNA (1)...(19): siRNA sense strand
uggaaaaccuuaugaaugu

SEQ ID NO: 1044982 - RNA, 19 nt, Homo sapiens
  misc_RNA (1)...(19): siRNA sense strand
guucaaaacucuuucaaca

SEQ ID NO: 1044983 - RNA, 19 nt, Homo sapiens
  misc_RNA (1)...(19): siRNA sense strand
gaagaggucaccagcuuac

SEQ ID NO: 1044984 - RNA, 19 nt, Homo sapiens
  misc_RNA (1)...(19): siRNA sense strand
caucagagaguucauacug

SEQ ID NO: 1044985 - RNA, 19 nt, Homo sapiens
  misc_RNA (1)...(19): siRNA sense strand
gugggaagccguaugaaug

SEQ ID NO: 1044986 - RNA, 19 nt, Homo sapiens
  misc_RNA (1)...(19): siRNA sense strand
gaaacccuauaaauguaag

SEQ ID NO: 1044987 - RNA, 19 nt, Homo sapiens
  misc_RNA (1)...(19): siRNA sense strand
ggugagaaacccuaugugu

SEQ ID NO: 1044988 - RNA, 19 nt, Homo sapiens
  misc_RNA (1)...(19): siRNA sense strand
gaagaagccuuugaaauaa

SEQ ID NO: 1044989 - RNA, 19 nt, Homo sapiens
  misc_RNA (1)...(19): siRNA sense strand
gaaggaacauuuacaaguu

SEQ ID NO: 1044990 - RNA, 19 nt, Homo sapiens
  misc_RNA (1)...(19): siRNA sense strand
guucaaagcuucucaaaug

SEQ ID NO: 1044991 - RNA, 19 nt, Homo sapiens
  misc_RNA (1)...(19): siRNA sense strand
guacgaagcagcagaguua

SEQ ID NO: 1044992 - RNA, 19 nt, Homo sapiens
  misc_RNA (1)...(19): siRNA sense strand
agaagaagccuuugaaaua

SEQ ID NO: 1044993 - RNA, 19 nt, Homo sapiens
  misc_RNA (1)...(19): siRNA sense strand
aaacaaaccugaaggaugu

SEQ ID NO: 1044994 - RNA, 19 nt, Homo sapiens
  misc_RNA (1)...(19): siRNA sense strand
ccaaaggucuccacaaguu

SEQ ID NO: 1044995 - RNA, 19 nt, Homo sapiens
  misc_RNA (1)...(19): siRNA sense strand
gaaguuaugucugugauug

SEQ ID NO: 1044996 - RNA, 19 nt, Homo sapiens
  misc_RNA (1)...(19): siRNA sense strand
gcagagcuaugcauucauu

SEQ ID NO: 1044997 - RNA, 19 nt, Homo sapiens
  misc_RNA (1)...(19): siRNA sense strand
gaugacagaucuuauguuc

SEQ ID NO: 1044998 - RNA, 19 nt, Homo sapiens
  misc_RNA (1)...(19): siRNA sense strand
gggaggaagugaauuauca

SEQ ID NO: 1044999 - RNA, 19 nt, Homo sapiens
  misc_RNA (1)...(19): siRNA sense strand
ucaaagagacacaggaaua

SEQ ID NO: 1045000 - RNA, 19 nt, Homo sapiens
  misc_RNA (1)...(19): siRNA sense strand
gauguucccugcacaaaug

SEQ ID NO: 1045001 - RNA, 19 nt, Homo sapiens
  misc_RNA (1)...(19): siRNA sense strand
ccaggaaacuauugucuau

SEQ ID NO: 1045002 - RNA, 19 nt, Homo sapiens
  misc_RNA (1)...(19): siRNA sense strand
gaauauggcuuggccuaug

SEQ ID NO: 1045003 - RNA, 19 nt, Homo sapiens
  misc_RNA (1)...(19): siRNA sense strand
aaacauagauacugugagu

SEQ ID NO: 1045004 - RNA, 19 nt, Homo sapiens
  misc_RNA (1)...(19): siRNA sense strand
gaaacuggacccauucuga

SEQ ID NO: 1045005 - RNA, 19 nt, Homo sapiens
  misc_RNA (1)...(19): siRNA sense strand
ggagguauguugggaaaga

SEQ ID NO: 1045006 - RNA, 19 nt, Homo sapiens
  misc_RNA (1)...(19): siRNA sense strand
gaaaccaacugcgauguca

SEQ ID NO: 1045007 - RNA, 19 nt, Homo sapiens
  misc_RNA (1)...(19): siRNA sense strand
gagauguuguggucgauuu

SEQ ID NO: 1045008 - RNA, 19 nt, Homo sapiens
  misc_RNA (1)...(19): siRNA sense strand
ggaaagaugaggaaagaga

SEQ ID NO: 1045009 - RNA, 19 nt, Homo sapiens
  misc_RNA (1)...(19): siRNA sense strand
ggaaagagcagggagaaga

SEQ ID NO: 1045010 - RNA, 19 nt, Homo sapiens
  misc_RNA (1)...(19): siRNA sense strand
gagaagaaauuagugaaag

SEQ ID NO: 1045011 - RNA, 19 nt, Homo sapiens
  misc_RNA (1)...(19): siRNA sense strand
gaaaucugccaucgucuuu

SEQ ID NO: 1045012 - RNA, 19 nt, Homo sapiens
  misc_RNA (1)...(19): siRNA sense strand
caagucagcucuguaagga

SEQ ID NO: 1045013 - RNA, 19 nt, Homo sapiens
  misc_RNA (1)...(19): siRNA sense strand
ggaaacuauugucuauuug

SEQ ID NO: 1045014 - RNA, 19 nt, Homo sapiens
  misc_RNA (1)...(19): siRNA sense strand
gcgcaggcccuacauuuaa

SEQ ID NO: 1045015 - RNA, 19 nt, Homo sapiens
  misc_RNA (1)...(19): siRNA sense strand
gaccagcgcugcagagcuu

SEQ ID NO: 1045016 - RNA, 19 nt, Homo sapiens
  misc_RNA (1)...(19): siRNA sense strand
ugacuguccuccagaauug

SEQ ID NO: 1045017 - RNA, 19 nt, Homo sapiens
  misc_RNA (1)...(19): siRNA sense strand
ggagaaaccaugcacauag

SEQ ID NO: 1045018 - RNA, 19 nt, Homo sapiens
  misc_RNA (1)...(19): siRNA sense strand
guucacagcuucaugaucu

SEQ ID NO: 1045019 - RNA, 19 nt, Homo sapiens
  misc_RNA (1)...(19): siRNA sense strand
cugaggagcuagagaauga

SEQ ID NO: 1045020 - RNA, 19 nt, Homo sapiens
  misc_RNA (1)...(19): siRNA sense strand
gaaaagagccuggcaaaga

SEQ ID NO: 1045021 - RNA, 19 nt, Homo sapiens
  misc_RNA (1)...(19): siRNA sense strand
cgaagcagcagaguuaaua

SEQ ID NO: 1045022 - RNA, 19 nt, Homo sapiens
  misc_RNA (1)...(19): siRNA sense strand
gagcagggagaagaaauua

SEQ ID NO: 1045023 - RNA, 19 nt, Homo sapiens
  misc_RNA (1)...(19): siRNA sense strand
agaaggagcuccagaaggu

SEQ ID NO: 1045024 - RNA, 19 nt, Homo sapiens
  misc_RNA (1)...(19): siRNA sense strand
gaaagugauuguggaaaca

SEQ ID NO: 1045025 - RNA, 19 nt, Homo sapiens
  misc_RNA (1)...(19): siRNA sense strand
gcacguguuuauuguccua

SEQ ID NO: 1045026 - RNA, 19 nt, Homo sapiens
  misc_RNA (1)...(19): siRNA sense strand
auacaaagccacagaauau

SEQ ID NO: 1045027 - RNA, 19 nt, Homo sapiens
  misc_RNA (1)...(19): siRNA sense strand
gcagaaagcacugaagaug

SEQ ID NO: 1045028 - RNA, 19 nt, Homo sapiens
  misc_RNA (1)...(19): siRNA sense strand
ggagaagaaauuagugaaa

SEQ ID NO: 1045029 - RNA, 19 nt, Homo sapiens
  misc_RNA (1)...(19): siRNA sense strand
gaaagagcagggagaagaa

SEQ ID NO: 1045030 - RNA, 19 nt, Homo sapiens
  misc_RNA (1)...(19): siRNA sense strand
gaaaugaaagugacaaggu

SEQ ID NO: 1045031 - RNA, 19 nt, Homo sapiens
  misc_RNA (1)...(19): siRNA sense strand
cauagacugugcauucuga

SEQ ID NO: 1045032 - RNA, 19 nt, Homo sapiens
  misc_RNA (1)...(19): siRNA sense strand
ugacagaauuuaacaagag

SEQ ID NO: 1045033 - RNA, 19 nt, Homo sapiens
  misc_RNA (1)...(19): siRNA sense strand
gagcaagaacgauuaugaa

SEQ ID NO: 1045034 - RNA, 19 nt, Homo sapiens
  misc_RNA (1)...(19): siRNA sense strand
cuacaucccauccacaaua

SEQ ID NO: 1045035 - RNA, 19 nt, Homo sapiens
  misc_RNA (1)...(19): siRNA sense strand
caacugcgaugucaaagac

SEQ ID NO: 1045036 - RNA, 19 nt, Homo sapiens
  misc_RNA (1)...(19): siRNA sense strand
gcugggaggaagugaauua

SEQ ID NO: 1045037 - RNA, 19 nt, Homo sapiens
  misc_RNA (1)...(19): siRNA sense strand
gacccauucugaugcauuu

SEQ ID NO: 1045038 - RNA, 19 nt, Homo sapiens
  misc_RNA (1)...(19): siRNA sense strand
caaagcuucucaaauguag

SEQ ID NO: 1045039 - RNA, 19 nt, Homo sapiens
  misc_RNA (1)...(19): siRNA sense strand
cacugaagaugcacccuua

SEQ ID NO: 1045040 - RNA, 19 nt, Homo sapiens
  misc_RNA (1)...(19): siRNA sense strand
cuacuugacugugaagaaa

SEQ ID NO: 1045041 - RNA, 19 nt, Homo sapiens
  misc_RNA (1)...(19): siRNA sense strand
cauguggaauguaaugaaa

SEQ ID NO: 1045042 - RNA, 19 nt, Homo sapiens
  misc_RNA (1)...(19): siRNA sense strand
gaaggcagagcuaugcauu

SEQ ID NO: 1045043 - RNA, 19 nt, Homo sapiens
  misc_RNA (1)...(19): siRNA sense strand
gggaagcuguacaauuuca

SEQ ID NO: 1045044 - RNA, 19 nt, Homo sapiens
  misc_RNA (1)...(19): siRNA sense strand
gacagaauuuaacaagaga

SEQ ID NO: 1045045 - RNA, 19 nt, Homo sapiens
  misc_RNA (1)...(19): siRNA sense strand
gggccuccauuguaggaua

SEQ ID NO: 1045046 - RNA, 19 nt, Homo sapiens
  misc_RNA (1)...(19): siRNA sense strand
ggacggcccaggaaacuau

SEQ ID NO: 1045047 - RNA, 19 nt, Homo sapiens
  misc_RNA (1)...(19): siRNA sense strand
gcaaccugaugacuuugaa

SEQ ID NO: 1045048 - RNA, 19 nt, Homo sapiens
  misc_RNA (1)...(19): siRNA sense strand
gaagcucugucucaagaag

SEQ ID NO: 1045049 - RNA, 19 nt, Homo sapiens
  misc_RNA (1)...(19): siRNA sense strand
cagcaagucagcucuguaa

SEQ ID NO: 1045050 - RNA, 19 nt, Homo sapiens
  misc_RNA (1)...(19): siRNA sense strand
aaacuuacaucugugugaa

SEQ ID NO: 1045051 - RNA, 19 nt, Homo sapiens
  misc_RNA (1)...(19): siRNA sense strand
guaucaguguggagccuua

SEQ ID NO: 1045052 - RNA, 19 nt, Homo sapiens
  misc_RNA (1)...(19): siRNA sense strand
cgggaaagaugaggaaaga

SEQ ID NO: 1045053 - RNA, 19 nt, Homo sapiens
  misc_RNA (1)...(19): siRNA sense strand
agaaagcacugaagaugca

SEQ ID NO: 1045054 - RNA, 19 nt, Homo sapiens
  misc_RNA (1)...(19): siRNA sense strand
ggcccuacauuuaaagcua

SEQ ID NO: 1045055 - RNA, 19 nt, Homo sapiens
  misc_RNA (1)...(19): siRNA sense strand
gcagacaucuuuguuucca

SEQ ID NO: 1045056 - RNA, 19 nt, Homo sapiens
  misc_RNA (1)...(19): siRNA sense strand
ucacuccguugaucagaaa

SEQ ID NO: 1045057 - RNA, 19 nt, Homo sapiens
  misc_RNA (1)...(19): siRNA sense strand
aaacauucccacccagaua

SEQ ID NO: 1045058 - RNA, 19 nt, Homo sapiens
  misc_RNA (1)...(19): siRNA sense strand
caagaacgauuaugaaaag

SEQ ID NO: 1045059 - RNA, 19 nt, Homo sapiens
  misc_RNA (1)...(19): siRNA sense strand
uuacauacugggagaauuu

SEQ ID NO: 1045060 - RNA, 19 nt, Homo sapiens
  misc_RNA (1)...(19): siRNA sense strand
gaagguauccaggaaguca

SEQ ID NO: 1045061 - RNA, 19 nt, Homo sapiens
  misc_RNA (1)...(19): siRNA sense strand
caaagagacacaggaauau

SEQ ID NO: 1045062 - RNA, 19 nt, Homo sapiens
  misc_RNA (1)...(19): siRNA sense strand
ucaaagcuucucaaaugua

SEQ ID NO: 1045063 - RNA, 19 nt, Homo sapiens
  misc_RNA (1)...(19): siRNA sense strand
ggaguuugaccaccauuug

SEQ ID NO: 1045064 - RNA, 19 nt, Homo sapiens
  misc_RNA (1)...(19): siRNA sense strand
caucgucuuucuuugacua

SEQ ID NO: 1045065 - RNA, 19 nt, Homo sapiens
  misc_RNA (1)...(19): siRNA sense strand
gcacuaugugacagaauuu

SEQ ID NO: 1045066 - RNA, 19 nt, Homo sapiens
  misc_RNA (1)...(19): siRNA sense strand
gcacaauucucugggaaac

SEQ ID NO: 1045067 - RNA, 19 nt, Homo sapiens
  misc_RNA (1)...(19): siRNA sense strand
ccaggugaaggaacauuua

SEQ ID NO: 1045068 - RNA, 19 nt, Homo sapiens
  misc_RNA (1)...(19): siRNA sense strand
gugaaguauuugaaaguga

SEQ ID NO: 1045069 - RNA, 19 nt, Homo sapiens
  misc_RNA (1)...(19): siRNA sense strand
caacuccaccgagcacaua

SEQ ID NO: 1045070 - RNA, 19 nt, Homo sapiens
  misc_RNA (1)...(19): siRNA sense strand
cuugcaaccugaugacuuu

SEQ ID NO: 1045071 - RNA, 19 nt, Homo sapiens
  misc_RNA (1)...(19): siRNA sense strand
gcagggagaagaaauuagu

SEQ ID NO: 1045072 - RNA, 19 nt, Homo sapiens
  misc_RNA (1)...(19): siRNA sense strand
aggagaaacuggacccauu

SEQ ID NO: 1045073 - RNA, 19 nt, Homo sapiens
  misc_RNA (1)...(19): siRNA sense strand
aaagccacauugucaaaga

SEQ ID NO: 1045074 - RNA, 19 nt, Homo sapiens
  misc_RNA (1)...(19): siRNA sense strand
auucugagcagucuaauaa

SEQ ID NO: 1045075 - RNA, 19 nt, Homo sapiens
  misc_RNA (1)...(19): siRNA sense strand
gaaaaggacucaucuaccu

SEQ ID NO: 1045076 - RNA, 19 nt, Homo sapiens
  misc_RNA (1)...(19): siRNA sense strand
gaaagaugaggaaagagau

SEQ ID NO: 1045077 - RNA, 19 nt, Homo sapiens
  misc_RNA (1)...(19): siRNA sense strand
uggaucagcucuuguugga

SEQ ID NO: 1045078 - RNA, 19 nt, Homo sapiens
  misc_RNA (1)...(19): siRNA sense strand
agacugagccaucggacua

SEQ ID NO: 1045079 - RNA, 19 nt, Homo sapiens
  misc_RNA (1)...(19): siRNA sense strand
uggggaagcuguacaauuu

SEQ ID NO: 1045080 - RNA, 19 nt, Homo sapiens
  misc_RNA (1)...(19): siRNA sense strand
gaaggaguuugaccaccau

SEQ ID NO: 1045081 - RNA, 19 nt, Homo sapiens
  misc_RNA (1)...(19): siRNA sense strand
uggcagacaucuuuguuuc

SEQ ID NO: 1045082 - RNA, 19 nt, Homo sapiens
  misc_RNA (1)...(19): siRNA sense strand
cagaagguauccaggaagu

SEQ ID NO: 1045083 - RNA, 19 nt, Homo sapiens
  misc_RNA (1)...(19): siRNA sense strand
gaauacaaagccacagaau

SEQ ID NO: 1045084 - RNA, 19 nt, Homo sapiens
  misc_RNA (1)...(19): siRNA sense strand
ccacaauacuacugauuuu

SEQ ID NO: 1045085 - RNA, 19 nt, Homo sapiens
  misc_RNA (1)...(19): siRNA sense strand
acauagugcucuuuuguua

SEQ ID NO: 1045086 - RNA, 19 nt, Homo sapiens
  misc_RNA (1)...(19): siRNA sense strand
ugaaagugauuguggaaac

SEQ ID NO: 1045087 - RNA, 19 nt, Homo sapiens
  misc_RNA (1)...(19): siRNA sense strand
ggcgcaggcccuacauuua

SEQ ID NO: 1045088 - RNA, 19 nt, Homo sapiens
  misc_RNA (1)...(19): siRNA sense strand
gccggaagaugaugaaaua

SEQ ID NO: 1045089 - RNA, 19 nt, Homo sapiens
  misc_RNA (1)...(19): siRNA sense strand
gcucuuagaucaacacaug

SEQ ID NO: 1045090 - RNA, 19 nt, Homo sapiens
  misc_RNA (1)...(19): siRNA sense strand
ggaagaugaugaaauacug

SEQ ID NO: 1045091 - RNA, 19 nt, Homo sapiens
  misc_RNA (1)...(19): siRNA sense strand
cagcuggacuugaacauga

SEQ ID NO: 1045092 - RNA, 19 nt, Homo sapiens
  misc_RNA (1)...(19): siRNA sense strand
gaaauacugggcuaccuuu

SEQ ID NO: 1045093 - RNA, 19 nt, Homo sapiens
  misc_RNA (1)...(19): siRNA sense strand
ggacagagacucaaagaac

SEQ ID NO: 1045094 - RNA, 19 nt, Homo sapiens
  misc_RNA (1)...(19): siRNA sense strand
gcacaucccgccucaguau

SEQ ID NO: 1045095 - RNA, 19 nt, Homo sapiens
  misc_RNA (1)...(19): siRNA sense strand
gcaggugguugcacauuuc

SEQ ID NO: 1045096 - RNA, 19 nt, Homo sapiens
  misc_RNA (1)...(19): siRNA sense strand
uaaugagccucuagaucua

SEQ ID NO: 1045097 - RNA, 19 nt, Homo sapiens
  misc_RNA (1)...(19): siRNA sense strand
gaucacagcucgauaucac

SEQ ID NO: 1045098 - RNA, 19 nt, Homo sapiens
  misc_RNA (1)...(19): siRNA sense strand
caaggugcauuacccgaaa

SEQ ID NO: 1045099 - RNA, 19 nt, Homo sapiens
  misc_RNA (1)...(19): siRNA sense strand
uuacugagccggaagauga

SEQ ID NO: 1045100 - RNA, 19 nt, Homo sapiens
  misc_RNA (1)...(19): siRNA sense strand
uaaagcaauuccuuccauu

SEQ ID NO: 1045101 - RNA, 19 nt, Homo sapiens
  misc_RNA (1)...(19): siRNA sense strand
cagaaagcauuuaaagcaa

SEQ ID NO: 1045102 - RNA, 19 nt, Homo sapiens
  misc_RNA (1)...(19): siRNA sense strand
gcuuggagauguguucuuu

SEQ ID NO: 1045103 - RNA, 19 nt, Homo sapiens
  misc_RNA (1)...(19): siRNA sense strand
gcaauuccuuccauuaucg

SEQ ID NO: 1045104 - RNA, 19 nt, Homo sapiens
  misc_RNA (1)...(19): siRNA sense strand
cuagaucuauugucucaga

SEQ ID NO: 1045105 - RNA, 19 nt, Homo sapiens
  misc_RNA (1)...(19): siRNA sense strand
ggacuugcuuggagaugug

SEQ ID NO: 1045106 - RNA, 19 nt, Homo sapiens
  misc_RNA (1)...(19): siRNA sense strand
ucagaaagcauuuaaagca

SEQ ID NO: 1045107 - RNA, 19 nt, Homo sapiens
  misc_RNA (1)...(19): siRNA sense strand
gauggugcuuucuuuccua

SEQ ID NO: 1045108 - RNA, 19 nt, Homo sapiens
  misc_RNA (1)...(19): siRNA sense strand
gaaauucggagugucagaa

SEQ ID NO: 1045109 - RNA, 19 nt, Homo sapiens
  misc_RNA (1)...(19): siRNA sense strand
ggacaaaacccuccaagga

SEQ ID NO: 1045110 - RNA, 19 nt, Homo sapiens
  misc_RNA (1)...(19): siRNA sense strand
gguugauggugcuuucuuu

SEQ ID NO: 1045111 - RNA, 19 nt, Homo sapiens
  misc_RNA (1)...(19): siRNA sense strand
aaagcaauuccuuccauua

SEQ ID NO: 1045112 - RNA, 19 nt, Homo sapiens
  misc_RNA (1)...(19): siRNA sense strand
ggguggccaucaucccuua

SEQ ID NO: 1045113 - RNA, 19 nt, Homo sapiens
  misc_RNA (1)...(19): siRNA sense strand
ccacggaggaggagaaguu

SEQ ID NO: 1045114 - RNA, 19 nt, Homo sapiens
  misc_RNA (1)...(19): siRNA sense strand
cuaaugagccucuagaucu

SEQ ID NO: 1045115 - RNA, 19 nt, Homo sapiens
  misc_RNA (1)...(19): siRNA sense strand
gaucuauugucucagaaag

SEQ ID NO: 1045116 - RNA, 19 nt, Homo sapiens
  misc_RNA (1)...(19): siRNA sense strand
gcucgaaccgggaauccua

SEQ ID NO: 1045117 - RNA, 19 nt, Homo sapiens
  misc_RNA (1)...(19): siRNA sense strand
gaaccgggaauccuaaugg

SEQ ID NO: 1045118 - RNA, 19 nt, Homo sapiens
  misc_RNA (1)...(19): siRNA sense strand
aggaauauuugguuucuuc

SEQ ID NO: 1045119 - RNA, 19 nt, Homo sapiens
  misc_RNA (1)...(19): siRNA sense strand
caggccagauccuaauuug

SEQ ID NO: 1045120 - RNA, 19 nt, Homo sapiens
  misc_RNA (1)...(19): siRNA sense strand
ggugcuuucuuuccuaaug

SEQ ID NO: 1045121 - RNA, 19 nt, Homo sapiens
  misc_RNA (1)...(19): siRNA sense strand
ugggauaacuugcgagaag

SEQ ID NO: 1045122 - RNA, 19 nt, Homo sapiens
  misc_RNA (1)...(19): siRNA sense strand
cagcuuauaaucugacuga

SEQ ID NO: 1045123 - RNA, 19 nt, Homo sapiens
  misc_RNA (1)...(19): siRNA sense strand
ugaggugccugaggacaaa

SEQ ID NO: 1045124 - RNA, 19 nt, Homo sapiens
  misc_RNA (1)...(19): siRNA sense strand
ccaaaggcuuauuccacaa

SEQ ID NO: 1045125 - RNA, 19 nt, Homo sapiens
  misc_RNA (1)...(19): siRNA sense strand
gugcuuucuuuccuaauga

SEQ ID NO: 1045126 - RNA, 19 nt, Homo sapiens
  misc_RNA (1)...(19): siRNA sense strand
ccauaaguguuucuagucu

SEQ ID NO: 1045127 - RNA, 19 nt, Homo sapiens
  misc_RNA (1)...(19): siRNA sense strand
caaaggcuuauuccacaaa

SEQ ID NO: 1045128 - RNA, 19 nt, Homo sapiens
  misc_RNA (1)...(19): siRNA sense strand
gcugggaucccugcgauuu

SEQ ID NO: 1045129 - RNA, 19 nt, Homo sapiens
  misc_RNA (1)...(19): siRNA sense strand
gccucuaccugaacaucua

SEQ ID NO: 1045130 - RNA, 19 nt, Homo sapiens
  misc_RNA (1)...(19): siRNA sense strand
gaagcccugugccugugaa

SEQ ID NO: 1045131 - RNA, 19 nt, Homo sapiens
  misc_RNA (1)...(19): siRNA sense strand
gcgggagccauaaguguuu

SEQ ID NO: 1045132 - RNA, 19 nt, Homo sapiens
  misc_RNA (1)...(19): siRNA sense strand
uuaaagcaauuccuuccau

SEQ ID NO: 1045133 - RNA, 19 nt, Homo sapiens
  misc_RNA (1)...(19): siRNA sense strand
gcauuuaaagcaauuccuu

SEQ ID NO: 1045134 - RNA, 19 nt, Homo sapiens
  misc_RNA (1)...(19): siRNA sense strand
gcucagccuccaucuuuga

SEQ ID NO: 1045135 - RNA, 19 nt, Homo sapiens
  misc_RNA (1)...(19): siRNA sense strand
gcacugaucacagcucgau

SEQ ID NO: 1045136 - RNA, 19 nt, Homo sapiens
  misc_RNA (1)...(19): siRNA sense strand
uaacaaugcgucagacucu

SEQ ID NO: 1045137 - RNA, 19 nt, Homo sapiens
  misc_RNA (1)...(19): siRNA sense strand
cauaaguguuucuagucuu

SEQ ID NO: 1045138 - RNA, 19 nt, Homo sapiens
  misc_RNA (1)...(19): siRNA sense strand
ggcuaggaauauuugguuu

SEQ ID NO: 1045139 - RNA, 19 nt, Homo sapiens
  misc_RNA (1)...(19): siRNA sense strand
ccaguaccggcuaggaaua

SEQ ID NO: 1045140 - RNA, 19 nt, Homo sapiens
  misc_RNA (1)...(19): siRNA sense strand
cuaaugaauacuuccauga

SEQ ID NO: 1045141 - RNA, 19 nt, Homo sapiens
  misc_RNA (1)...(19): siRNA sense strand
ucccauggccaaaggcuua

SEQ ID NO: 1045142 - RNA, 19 nt, Homo sapiens
  misc_RNA (1)...(19): siRNA sense strand
guaccggcuaggaauauuu

SEQ ID NO: 1045143 - RNA, 19 nt, Homo sapiens
  misc_RNA (1)...(19): siRNA sense strand
gggaacgaccugucucugu

SEQ ID NO: 1045144 - RNA, 19 nt, Homo sapiens
  misc_RNA (1)...(19): siRNA sense strand
ggaggcccaugauuaugag

SEQ ID NO: 1045145 - RNA, 19 nt, Homo sapiens
  misc_RNA (1)...(19): siRNA sense strand
aaugaauacuuccaugaca

SEQ ID NO: 1045146 - RNA, 19 nt, Homo sapiens
  misc_RNA (1)...(19): siRNA sense strand
gcacccaggccagauccua

SEQ ID NO: 1045147 - RNA, 19 nt, Homo sapiens
  misc_RNA (1)...(19): siRNA sense strand
acaguccucuuucuuccuu

SEQ ID NO: 1045148 - RNA, 19 nt, Homo sapiens
  misc_RNA (1)...(19): siRNA sense strand
uuggagauguguucuuugu

SEQ ID NO: 1045149 - RNA, 19 nt, Homo sapiens
  misc_RNA (1)...(19): siRNA sense strand
aagcaauuccuuccauuau

SEQ ID NO: 1045150 - RNA, 19 nt, Homo sapiens
  misc_RNA (1)...(19): siRNA sense strand
gaggaggagaaguuacuga

SEQ ID NO: 1045151 - RNA, 19 nt, Homo sapiens
  misc_RNA (1)...(19): siRNA sense strand
cugcaucgcccugggauaa

SEQ ID NO: 1045152 - RNA, 19 nt, Homo sapiens
  misc_RNA (1)...(19): siRNA sense strand
guggccagcuuauaaucug

SEQ ID NO: 1045153 - RNA, 19 nt, Homo sapiens
  misc_RNA (1)...(19): siRNA sense strand
acauuucugugguaacaau

SEQ ID NO: 1045154 - RNA, 19 nt, Homo sapiens
  misc_RNA (1)...(19): siRNA sense strand
ccuggaggcccaugauuau

SEQ ID NO: 1045155 - RNA, 19 nt, Homo sapiens
  misc_RNA (1)...(19): siRNA sense strand
cuaggaauauuugguuucu

SEQ ID NO: 1045156 - RNA, 19 nt, Homo sapiens
  misc_RNA (1)...(19): siRNA sense strand
ccaggccagauccuaauuu

SEQ ID NO: 1045157 - RNA, 19 nt, Homo sapiens
  misc_RNA (1)...(19): siRNA sense strand
ccuuguggcuaaugaauac

SEQ ID NO: 1045158 - RNA, 19 nt, Homo sapiens
  misc_RNA (1)...(19): siRNA sense strand
aagacugccucuaccugaa

SEQ ID NO: 1045159 - RNA, 19 nt, Homo sapiens
  misc_RNA (1)...(19): siRNA sense strand
gaagggccacagaggaaca

SEQ ID NO: 1045160 - RNA, 19 nt, Homo sapiens
  misc_RNA (1)...(19): siRNA sense strand
uggaggcccaugauuauga

SEQ ID NO: 1045161 - RNA, 19 nt, Homo sapiens
  misc_RNA (1)...(19): siRNA sense strand
ccaccuccuacccuaauuu

SEQ ID NO: 1045162 - RNA, 19 nt, Homo sapiens
  misc_RNA (1)...(19): siRNA sense strand
cccaggaggugccuucaag

SEQ ID NO: 1045163 - RNA, 19 nt, Homo sapiens
  misc_RNA (1)...(19): siRNA sense strand
ccagcucugugaccaucuu

SEQ ID NO: 1045164 - RNA, 19 nt, Homo sapiens
  misc_RNA (1)...(19): siRNA sense strand
gcuccacaguccucuuucu

SEQ ID NO: 1045165 - RNA, 19 nt, Homo sapiens
  misc_RNA (1)...(19): siRNA sense strand
ugaaauacugggcuaccuu

SEQ ID NO: 1045166 - RNA, 19 nt, Homo sapiens
  misc_RNA (1)...(19): siRNA sense strand
gauccuaauuugggcuauc

SEQ ID NO: 1045167 - RNA, 19 nt, Homo sapiens
  misc_RNA (1)...(19): siRNA sense strand
ucucagaaagcauuuaaag

SEQ ID NO: 1045168 - RNA, 19 nt, Homo sapiens
  misc_RNA (1)...(19): siRNA sense strand
ucuauugucucagaaagca

SEQ ID NO: 1045169 - RNA, 19 nt, Homo sapiens
  misc_RNA (1)...(19): siRNA sense strand
augaauacuuccaugacaa

SEQ ID NO: 1045170 - RNA, 19 nt, Homo sapiens
  misc_RNA (1)...(19): siRNA sense strand
caucccgccucaguauuug

SEQ ID NO: 1045171 - RNA, 19 nt, Homo sapiens
  misc_RNA (1)...(19): siRNA sense strand
gcuaggaauauuugguuuc

SEQ ID NO: 1045172 - RNA, 19 nt, Homo sapiens
  misc_RNA (1)...(19): siRNA sense strand
uuccuuaacuuuccucucu

SEQ ID NO: 1045173 - RNA, 19 nt, Homo sapiens
  misc_RNA (1)...(19): siRNA sense strand
acaucccgccucaguauuu

SEQ ID NO: 1045174 - RNA, 19 nt, Homo sapiens
  misc_RNA (1)...(19): siRNA sense strand
gccucuagaucuauugucu

SEQ ID NO: 1045175 - RNA, 19 nt, Homo sapiens
  misc_RNA (1)...(19): siRNA sense strand
ggaauauuugguuucuuca

SEQ ID NO: 1045176 - RNA, 19 nt, Homo sapiens
  misc_RNA (1)...(19): siRNA sense strand
ucucucuccuccagccuuu

SEQ ID NO: 1045177 - RNA, 19 nt, Homo sapiens
  misc_RNA (1)...(19): siRNA sense strand
gagccacggaggaggagaa

SEQ ID NO: 1045178 - RNA, 19 nt, Homo sapiens
  misc_RNA (1)...(19): siRNA sense strand
cucaguggcuccaacaagu

SEQ ID NO: 1045179 - RNA, 19 nt, Homo sapiens
  misc_RNA (1)...(19): siRNA sense strand
uccauuaucggagucaaua

SEQ ID NO: 1045180 - RNA, 19 nt, Homo sapiens
  misc_RNA (1)...(19): siRNA sense strand
ugucucagaaagcauuuaa

SEQ ID NO: 1045181 - RNA, 19 nt, Homo sapiens
  misc_RNA (1)...(19): siRNA sense strand
ggaagcccugugccuguga

SEQ ID NO: 1045182 - RNA, 19 nt, Homo sapiens
  misc_RNA (1)...(19): siRNA sense strand
cucuagaucuauugucuca

SEQ ID NO: 1045183 - RNA, 19 nt, Homo sapiens
  misc_RNA (1)...(19): siRNA sense strand
ccuccuacccuaauuugug

SEQ ID NO: 1045184 - RNA, 19 nt, Homo sapiens
  misc_RNA (1)...(19): siRNA sense strand
ggugguugcacauuucugu

SEQ ID NO: 1045185 - RNA, 19 nt, Homo sapiens
  misc_RNA (1)...(19): siRNA sense strand
ccucuuucuuccuuaacuu

SEQ ID NO: 1045186 - RNA, 19 nt, Homo sapiens
  misc_RNA (1)...(19): siRNA sense strand
ggauucagggcaagcaagu

SEQ ID NO: 1045187 - RNA, 19 nt, Homo sapiens
  misc_RNA (1)...(19): siRNA sense strand
gcaccuuguggcuaaugaa

SEQ ID NO: 1045188 - RNA, 19 nt, Homo sapiens
  misc_RNA (1)...(19): siRNA sense strand
gaaauuaccucuagaagau

SEQ ID NO: 1045189 - RNA, 19 nt, Homo sapiens
  misc_RNA (1)...(19): siRNA sense strand
gcaccuaccuggcuaguua

SEQ ID NO: 1045190 - RNA, 19 nt, Homo sapiens
  misc_RNA (1)...(19): siRNA sense strand
gaggaaggcugaaagauga

SEQ ID NO: 1045191 - RNA, 19 nt, Homo sapiens
  misc_RNA (1)...(19): siRNA sense strand
gugaaauucuggacuauua

SEQ ID NO: 1045192 - RNA, 19 nt, Homo sapiens
  misc_RNA (1)...(19): siRNA sense strand
ggagacaccuugcaaguga

SEQ ID NO: 1045193 - RNA, 19 nt, Homo sapiens
  misc_RNA (1)...(19): siRNA sense strand
ggacuacacuuuacuuuca

SEQ ID NO: 1045194 - RNA, 19 nt, Homo sapiens
  misc_RNA (1)...(19): siRNA sense strand
gauaaaggauguagagaug

SEQ ID NO: 1045195 - RNA, 19 nt, Homo sapiens
  misc_RNA (1)...(19): siRNA sense strand
ucacagagguggccaaaga

SEQ ID NO: 1045196 - RNA, 19 nt, Homo sapiens
  misc_RNA (1)...(19): siRNA sense strand
gcaaggaauauuucuguua

SEQ ID NO: 1045197 - RNA, 19 nt, Homo sapiens
  misc_RNA (1)...(19): siRNA sense strand
ccaaauauauggcuucugu

SEQ ID NO: 1045198 - RNA, 19 nt, Homo sapiens
  misc_RNA (1)...(19): siRNA sense strand
gacaagggaucuguuuaua

SEQ ID NO: 1045199 - RNA, 19 nt, Homo sapiens
  misc_RNA (1)...(19): siRNA sense strand
caagggaucuguuuauauc

SEQ ID NO: 1045200 - RNA, 19 nt, Homo sapiens
  misc_RNA (1)...(19): siRNA sense strand
gagccaaccuuaaauaaag

SEQ ID NO: 1045201 - RNA, 19 nt, Homo sapiens
  misc_RNA (1)...(19): siRNA sense strand
ggaauucgauggcugugaa

SEQ ID NO: 1045202 - RNA, 19 nt, Homo sapiens
  misc_RNA (1)...(19): siRNA sense strand
gaauggaugugaaccaaau

SEQ ID NO: 1045203 - RNA, 19 nt, Homo sapiens
  misc_RNA (1)...(19): siRNA sense strand
uugaagagcugaaagaauu

SEQ ID NO: 1045204 - RNA, 19 nt, Homo sapiens
  misc_RNA (1)...(19): siRNA sense strand
ugaaagaccuguagaacau

SEQ ID NO: 1045205 - RNA, 19 nt, Homo sapiens
  misc_RNA (1)...(19): siRNA sense strand
gaaguaaccaggagcauug

SEQ ID NO: 1045206 - RNA, 19 nt, Homo sapiens
  misc_RNA (1)...(19): siRNA sense strand
ggaagaaaaugacaaacua

SEQ ID NO: 1045207 - RNA, 19 nt, Homo sapiens
  misc_RNA (1)...(19): siRNA sense strand
ggcaagcacugacuuauca

SEQ ID NO: 1045208 - RNA, 19 nt, Homo sapiens
  misc_RNA (1)...(19): siRNA sense strand
gaagaggaaucgccauugg

SEQ ID NO: 1045209 - RNA, 19 nt, Homo sapiens
  misc_RNA (1)...(19): siRNA sense strand
gcacugacuuaucacaaga

SEQ ID NO: 1045210 - RNA, 19 nt, Homo sapiens
  misc_RNA (1)...(19): siRNA sense strand
gaaggcaagcacugacuua

SEQ ID NO: 1045211 - RNA, 19 nt, Homo sapiens
  misc_RNA (1)...(19): siRNA sense strand
guacaaagcagacaguaug

SEQ ID NO: 1045212 - RNA, 19 nt, Homo sapiens
  misc_RNA (1)...(19): siRNA sense strand
caaggaauauuucuguuag

SEQ ID NO: 1045213 - RNA, 19 nt, Homo sapiens
  misc_RNA (1)...(19): siRNA sense strand
uggcugaacuuaucaaaga

SEQ ID NO: 1045214 - RNA, 19 nt, Homo sapiens
  misc_RNA (1)...(19): siRNA sense strand
uggcaaagaugauaaagga

SEQ ID NO: 1045215 - RNA, 19 nt, Homo sapiens
  misc_RNA (1)...(19): siRNA sense strand
gcaacauucuccuggacua

SEQ ID NO: 1045216 - RNA, 19 nt, Homo sapiens
  misc_RNA (1)...(19): siRNA sense strand
gaggacaccuagccaguga

SEQ ID NO: 1045217 - RNA, 19 nt, Homo sapiens
  misc_RNA (1)...(19): siRNA sense strand
guauacagcuuuccaggau

SEQ ID NO: 1045218 - RNA, 19 nt, Homo sapiens
  misc_RNA (1)...(19): siRNA sense strand
gaagaaguggcaaagauga

SEQ ID NO: 1045219 - RNA, 19 nt, Homo sapiens
  misc_RNA (1)...(19): siRNA sense strand
ccacaaccuuugcugauga

SEQ ID NO: 1045220 - RNA, 19 nt, Homo sapiens
  misc_RNA (1)...(19): siRNA sense strand
cagcguauaugauaaggaa

SEQ ID NO: 1045221 - RNA, 19 nt, Homo sapiens
  misc_RNA (1)...(19): siRNA sense strand
gagcaaggucggugaaauu

SEQ ID NO: 1045222 - RNA, 19 nt, Homo sapiens
  misc_RNA (1)...(19): siRNA sense strand
gaaagaauuggaaagaguu

SEQ ID NO: 1045223 - RNA, 19 nt, Homo sapiens
  misc_RNA (1)...(19): siRNA sense strand
auaaguaccuguaugaguu

SEQ ID NO: 1045224 - RNA, 19 nt, Homo sapiens
  misc_RNA (1)...(19): siRNA sense strand
caaggaaucaaaucacuuu

SEQ ID NO: 1045225 - RNA, 19 nt, Homo sapiens
  misc_RNA (1)...(19): siRNA sense strand
ucaagcucauuucagauua

SEQ ID NO: 1045226 - RNA, 19 nt, Homo sapiens
  misc_RNA (1)...(19): siRNA sense strand
gaagcagagugucuuaaag

SEQ ID NO: 1045227 - RNA, 19 nt, Homo sapiens
  misc_RNA (1)...(19): siRNA sense strand
gaagcagguuggagauguu

SEQ ID NO: 1045228 - RNA, 19 nt, Homo sapiens
  misc_RNA (1)...(19): siRNA sense strand
uuacagauauccacagugu

SEQ ID NO: 1045229 - RNA, 19 nt, Homo sapiens
  misc_RNA (1)...(19): siRNA sense strand
ggaaagaguuuuacagcaa

SEQ ID NO: 1045230 - RNA, 19 nt, Homo sapiens
  misc_RNA (1)...(19): siRNA sense strand
gcucuuaaguguuuucaua

SEQ ID NO: 1045231 - RNA, 19 nt, Homo sapiens
  misc_RNA (1)...(19): siRNA sense strand
gucgagcucuuaaguguuu

SEQ ID NO: 1045232 - RNA, 19 nt, Homo sapiens
  misc_RNA (1)...(19): siRNA sense strand
gaaauuccuuggauacaac

SEQ ID NO: 1045233 - RNA, 19 nt, Homo sapiens
  misc_RNA (1)...(19): siRNA sense strand
ggacaaggagaaucauuau

SEQ ID NO: 1045234 - RNA, 19 nt, Homo sapiens
  misc_RNA (1)...(19): siRNA sense strand
ggacugcucuaucugucuu

SEQ ID NO: 1045235 - RNA, 19 nt, Homo sapiens
  misc_RNA (1)...(19): siRNA sense strand
ggagccaaccuuaaauaaa

SEQ ID NO: 1045236 - RNA, 19 nt, Homo sapiens
  misc_RNA (1)...(19): siRNA sense strand
ugaaagaauuggaaagagu

SEQ ID NO: 1045237 - RNA, 19 nt, Homo sapiens
  misc_RNA (1)...(19): siRNA sense strand
caaagaugauaaaggaugu

SEQ ID NO: 1045238 - RNA, 19 nt, Homo sapiens
  misc_RNA (1)...(19): siRNA sense strand
gggauucagucaaugagaa

SEQ ID NO: 1045239 - RNA, 19 nt, Homo sapiens
  misc_RNA (1)...(19): siRNA sense strand
ucaugacacuuacauauuc

SEQ ID NO: 1045240 - RNA, 19 nt, Homo sapiens
  misc_RNA (1)...(19): siRNA sense strand
ucuagaagaugggucauuu

SEQ ID NO: 1045241 - RNA, 19 nt, Homo sapiens
  misc_RNA (1)...(19): siRNA sense strand
aaaggagguuaaucuguuu

SEQ ID NO: 1045242 - RNA, 19 nt, Homo sapiens
  misc_RNA (1)...(19): siRNA sense strand
aaacagacauaguggaagu

SEQ ID NO: 1045243 - RNA, 19 nt, Homo sapiens
  misc_RNA (1)...(19): siRNA sense strand
ggaggauugugcuugugua

SEQ ID NO: 1045244 - RNA, 19 nt, Homo sapiens
  misc_RNA (1)...(19): siRNA sense strand
gagcauuguuucagagcaa

SEQ ID NO: 1045245 - RNA, 19 nt, Homo sapiens
  misc_RNA (1)...(19): siRNA sense strand
caaagaagaauguuggaau

SEQ ID NO: 1045246 - RNA, 19 nt, Homo sapiens
  misc_RNA (1)...(19): siRNA sense strand
ggaagaaguggcaaagaug

SEQ ID NO: 1045247 - RNA, 19 nt, Homo sapiens
  misc_RNA (1)...(19): siRNA sense strand
gaacuagaaaggcuucaug

SEQ ID NO: 1045248 - RNA, 19 nt, Homo sapiens
  misc_RNA (1)...(19): siRNA sense strand
gaauugauggcuuugugua

SEQ ID NO: 1045249 - RNA, 19 nt, Homo sapiens
  misc_RNA (1)...(19): siRNA sense strand
gaccuggacugcucuaucu

SEQ ID NO: 1045250 - RNA, 19 nt, Homo sapiens
  misc_RNA (1)...(19): siRNA sense strand
guugaaaacuucccaauga

SEQ ID NO: 1045251 - RNA, 19 nt, Homo sapiens
  misc_RNA (1)...(19): siRNA sense strand
gaaguggcaaagaugauaa

SEQ ID NO: 1045252 - RNA, 19 nt, Homo sapiens
  misc_RNA (1)...(19): siRNA sense strand
gcucauaacaauagcuaaa

SEQ ID NO: 1045253 - RNA, 19 nt, Homo sapiens
  misc_RNA (1)...(19): siRNA sense strand
gaaaucacagccuggaaug

SEQ ID NO: 1045254 - RNA, 19 nt, Homo sapiens
  misc_RNA (1)...(19): siRNA sense strand
ggaacccaauacuucauga

SEQ ID NO: 1045255 - RNA, 19 nt, Homo sapiens
  misc_RNA (1)...(19): siRNA sense strand
gaaagaccuguagaacaua

SEQ ID NO: 1045256 - RNA, 19 nt, Homo sapiens
  misc_RNA (1)...(19): siRNA sense strand
caacuaacauccccuguga

SEQ ID NO: 1045257 - RNA, 19 nt, Homo sapiens
  misc_RNA (1)...(19): siRNA sense strand
caaauugaaaggcaacauu

SEQ ID NO: 1045258 - RNA, 19 nt, Homo sapiens
  misc_RNA (1)...(19): siRNA sense strand
ugacuuaucacaagaugaa

SEQ ID NO: 1045259 - RNA, 19 nt, Homo sapiens
  misc_RNA (1)...(19): siRNA sense strand
ggagaaucauuauuuaagc

SEQ ID NO: 1045260 - RNA, 19 nt, Homo sapiens
  misc_RNA (1)...(19): siRNA sense strand
ccaguaaccuugguauauc

SEQ ID NO: 1045261 - RNA, 19 nt, Homo sapiens
  misc_RNA (1)...(19): siRNA sense strand
gaaagaguuuuacagcaaa

SEQ ID NO: 1045262 - RNA, 19 nt, Homo sapiens
  misc_RNA (1)...(19): siRNA sense strand
uccgagacguuuauacuuu

SEQ ID NO: 1045263 - RNA, 19 nt, Homo sapiens
  misc_RNA (1)...(19): siRNA sense strand
gaaagaggaaggcugaaag

SEQ ID NO: 1045264 - RNA, 19 nt, Homo sapiens
  misc_RNA (1)...(19): siRNA sense strand
gaacuggcccuuuggaacu

SEQ ID NO: 1045265 - RNA, 19 nt, Homo sapiens
  misc_RNA (1)...(19): siRNA sense strand
ccagaaggaccaaauugaa

SEQ ID NO: 1045266 - RNA, 19 nt, Homo sapiens
  misc_RNA (1)...(19): siRNA sense strand
ggaauuuggucuggaucuu

SEQ ID NO: 1045267 - RNA, 19 nt, Homo sapiens
  misc_RNA (1)...(19): siRNA sense strand
acaccuagccagugaaauu

SEQ ID NO: 1045268 - RNA, 19 nt, Homo sapiens
  misc_RNA (1)...(19): siRNA sense strand
caaugagaauuucaaugga

SEQ ID NO: 1045269 - RNA, 19 nt, Homo sapiens
  misc_RNA (1)...(19): siRNA sense strand
cagaaggaccaaauugaaa

SEQ ID NO: 1045270 - RNA, 19 nt, Homo sapiens
  misc_RNA (1)...(19): siRNA sense strand
ccaggagcauuguuucaga

SEQ ID NO: 1045271 - RNA, 19 nt, Homo sapiens
  misc_RNA (1)...(19): siRNA sense strand
guuacaugaucgaggauuu

SEQ ID NO: 1045272 - RNA, 19 nt, Homo sapiens
  misc_RNA (1)...(19): siRNA sense strand
gaagauugaagcagagugu

SEQ ID NO: 1045273 - RNA, 19 nt, Homo sapiens
  misc_RNA (1)...(19): siRNA sense strand
uaaaggauguagagaugca

SEQ ID NO: 1045274 - RNA, 19 nt, Homo sapiens
  misc_RNA (1)...(19): siRNA sense strand
cuagaaaggcuucaugaug

SEQ ID NO: 1045275 - RNA, 19 nt, Homo sapiens
  misc_RNA (1)...(19): siRNA sense strand
accgguaucuacauucuua

SEQ ID NO: 1045276 - RNA, 19 nt, Homo sapiens
  misc_RNA (1)...(19): siRNA sense strand
caagcucauuucagauuau

SEQ ID NO: 1045277 - RNA, 19 nt, Homo sapiens
  misc_RNA (1)...(19): siRNA sense strand
caauacuucaugacacuua

SEQ ID NO: 1045278 - RNA, 19 nt, Homo sapiens
  misc_RNA (1)...(19): siRNA sense strand
cagcugugcuuaucaaguc

SEQ ID NO: 1045279 - RNA, 19 nt, Homo sapiens
  misc_RNA (1)...(19): siRNA sense strand
caagagcuauuuggcugaa

SEQ ID NO: 1045280 - RNA, 19 nt, Homo sapiens
  misc_RNA (1)...(19): siRNA sense strand
ccugugaaguuguggcuuu

SEQ ID NO: 1045281 - RNA, 19 nt, Homo sapiens
  misc_RNA (1)...(19): siRNA sense strand
ggaauauuucuguuaguug

SEQ ID NO: 1045282 - RNA, 19 nt, Homo sapiens
  misc_RNA (1)...(19): siRNA sense strand
gaucagcaaggaauauuuc

SEQ ID NO: 1045283 - RNA, 19 nt, Homo sapiens
  misc_RNA (1)...(19): siRNA sense strand
gcacgucguuuaugaucag

SEQ ID NO: 1045284 - RNA, 19 nt, Homo sapiens
  misc_RNA (1)...(19): siRNA sense strand
ugaaauuaccucuagaaga

SEQ ID NO: 1045285 - RNA, 19 nt, Homo sapiens
  misc_RNA (1)...(19): siRNA sense strand
guaaccaggagcauuguuu

SEQ ID NO: 1045286 - RNA, 19 nt, Homo sapiens
  misc_RNA (1)...(19): siRNA sense strand
ucaaugagaauuucaaugg

SEQ ID NO: 1045287 - RNA, 19 nt, Homo sapiens
  misc_RNA (1)...(19): siRNA sense strand
ggacaccuagccagugaaa

SEQ ID NO: 1045288 - RNA, 19 nt, Homo sapiens
  misc_RNA (1)...(19): siRNA sense strand
gaagucaccuuaauuauca

SEQ ID NO: 1045289 - RNA, 19 nt, Homo sapiens
  misc_RNA (1)...(19): siRNA sense strand
ccuagaaacugcauacuuu

SEQ ID NO: 1045290 - RNA, 19 nt, Homo sapiens
  misc_RNA (1)...(19): siRNA sense strand
gaaccaaggcucagagaag

SEQ ID NO: 1045291 - RNA, 19 nt, Homo sapiens
  misc_RNA (1)...(19): siRNA sense strand
cacgaagucaccuuaauua

SEQ ID NO: 1045292 - RNA, 19 nt, Homo sapiens
  misc_RNA (1)...(19): siRNA sense strand
caagaugggagugguuaua

SEQ ID NO: 1045293 - RNA, 19 nt, Homo sapiens
  misc_RNA (1)...(19): siRNA sense strand
ucacgaagucaccuuaauu

SEQ ID NO: 1045294 - RNA, 19 nt, Homo sapiens
  misc_RNA (1)...(19): siRNA sense strand
cgaagucaccuuaauuauc

SEQ ID NO: 1045295 - RNA, 19 nt, Homo sapiens
  misc_RNA (1)...(19): siRNA sense strand
uauacuccauuuacaggaa

SEQ ID NO: 1045296 - RNA, 19 nt, Homo sapiens
  misc_RNA (1)...(19): siRNA sense strand
aaccaaggcucagagaaga

SEQ ID NO: 1045297 - RNA, 19 nt, Homo sapiens
  misc_RNA (1)...(19): siRNA sense strand
caccuuaauuaucaccaaa

SEQ ID NO: 1045298 - RNA, 19 nt, Homo sapiens
  misc_RNA (1)...(19): siRNA sense strand
ggaaccaaggcucagagaa

SEQ ID NO: 1045299 - RNA, 19 nt, Homo sapiens
  misc_RNA (1)...(19): siRNA sense strand
ccaaggcucagagaagaaa

SEQ ID NO: 1045300 - RNA, 19 nt, Homo sapiens
  misc_RNA (1)...(19): siRNA sense strand
ucaccuuaauuaucaccaa

SEQ ID NO: 1045301 - RNA, 19 nt, Homo sapiens
  misc_RNA (1)...(19): siRNA sense strand
caaccuagaaacugcauac

SEQ ID NO: 1045302 - RNA, 19 nt, Homo sapiens
  misc_RNA (1)...(19): siRNA sense strand
gcaagaugggagugguuau

SEQ ID NO: 1045303 - RNA, 19 nt, Homo sapiens
  misc_RNA (1)...(19): siRNA sense strand
uguguguggucgaggcuuu

SEQ ID NO: 1045304 - RNA, 19 nt, Homo sapiens
  misc_RNA (1)...(19): siRNA sense strand
aagcguuguucguuucuuc

SEQ ID NO: 1045305 - RNA, 19 nt, Homo sapiens
  misc_RNA (1)...(19): siRNA sense strand
uuugagacccugguacuuu

SEQ ID NO: 1045306 - RNA, 19 nt, Homo sapiens
  misc_RNA (1)...(19): siRNA sense strand
auacuccauuuacaggaaa

SEQ ID NO: 1045307 - RNA, 19 nt, Homo sapiens
  misc_RNA (1)...(19): siRNA sense strand
caaacucuagccucuccaa

SEQ ID NO: 1045308 - RNA, 19 nt, Homo sapiens
  misc_RNA (1)...(19): siRNA sense strand
gugguuauacuccauuuac

SEQ ID NO: 1045309 - RNA, 19 nt, Homo sapiens
  misc_RNA (1)...(19): siRNA sense strand
gaacagacaucucuucuaa

SEQ ID NO: 1045310 - RNA, 19 nt, Homo sapiens
  misc_RNA (1)...(19): siRNA sense strand
gaaaugaacagguaucuaa

SEQ ID NO: 1045311 - RNA, 19 nt, Homo sapiens
  misc_RNA (1)...(19): siRNA sense strand
gaacagguaucuaaagaau

SEQ ID NO: 1045312 - RNA, 19 nt, Homo sapiens
  misc_RNA (1)...(19): siRNA sense strand
guacagcuuugacaauuua

SEQ ID NO: 1045313 - RNA, 19 nt, Homo sapiens
  misc_RNA (1)...(19): siRNA sense strand
acagacaucucuucuaaua

SEQ ID NO: 1045314 - RNA, 19 nt, Homo sapiens
  misc_RNA (1)...(19): siRNA sense strand
gggagaagaucgaggauuu

SEQ ID NO: 1045315 - RNA, 19 nt, Homo sapiens
  misc_RNA (1)...(19): siRNA sense strand
guacaaagcaggaauggua

SEQ ID NO: 1045316 - RNA, 19 nt, Homo sapiens
  misc_RNA (1)...(19): siRNA sense strand
ugaaagaccugauaacaau

SEQ ID NO: 1045317 - RNA, 19 nt, Homo sapiens
  misc_RNA (1)...(19): siRNA sense strand
gaaacauccuucuaucuug

SEQ ID NO: 1045318 - RNA, 19 nt, Homo sapiens
  misc_RNA (1)...(19): siRNA sense strand
gaaaagacauccaguaguu

SEQ ID NO: 1045319 - RNA, 19 nt, Homo sapiens
  misc_RNA (1)...(19): siRNA sense strand
gaagauagcaauuaugugu

SEQ ID NO: 1045320 - RNA, 19 nt, Homo sapiens
  misc_RNA (1)...(19): siRNA sense strand
guggaagacucaauugaua

SEQ ID NO: 1045321 - RNA, 19 nt, Homo sapiens
  misc_RNA (1)...(19): siRNA sense strand
caguauaagugguaguuua

SEQ ID NO: 1045322 - RNA, 19 nt, Homo sapiens
  misc_RNA (1)...(19): siRNA sense strand
guaugcaucucaagaauau

SEQ ID NO: 1045323 - RNA, 19 nt, Homo sapiens
  misc_RNA (1)...(19): siRNA sense strand
ucaauaugcuuccagguuu

SEQ ID NO: 1045324 - RNA, 19 nt, Homo sapiens
  misc_RNA (1)...(19): siRNA sense strand
cuuaaucccucuaugguua

SEQ ID NO: 1045325 - RNA, 19 nt, Homo sapiens
  misc_RNA (1)...(19): siRNA sense strand
cuacagagcugaguccauu

SEQ ID NO: 1045326 - RNA, 19 nt, Homo sapiens
  misc_RNA (1)...(19): siRNA sense strand
gcaggagugucuucuauca

SEQ ID NO: 1045327 - RNA, 19 nt, Homo sapiens
  misc_RNA (1)...(19): siRNA sense strand
ggaccuuauucaccaguua

SEQ ID NO: 1045328 - RNA, 19 nt, Homo sapiens
  misc_RNA (1)...(19): siRNA sense strand
ggacuuggucuuacaacua

SEQ ID NO: 1045329 - RNA, 19 nt, Homo sapiens
  misc_RNA (1)...(19): siRNA sense strand
gaaaucaagaaaccaguaa

SEQ ID NO: 1045330 - RNA, 19 nt, Homo sapiens
  misc_RNA (1)...(19): siRNA sense strand
uuagaaaugugccauaaug

SEQ ID NO: 1045331 - RNA, 19 nt, Homo sapiens
  misc_RNA (1)...(19): siRNA sense strand
caagaaaccaguaauagug

SEQ ID NO: 1045332 - RNA, 19 nt, Homo sapiens
  misc_RNA (1)...(19): siRNA sense strand
gcuggcaacucaacugaaa

SEQ ID NO: 1045333 - RNA, 19 nt, Homo sapiens
  misc_RNA (1)...(19): siRNA sense strand
ucacagggauguuguaucu

SEQ ID NO: 1045334 - RNA, 19 nt, Homo sapiens
  misc_RNA (1)...(19): siRNA sense strand
ucuuggagcuuuauaacua

SEQ ID NO: 1045335 - RNA, 19 nt, Homo sapiens
  misc_RNA (1)...(19): siRNA sense strand
gagcaucuuucaacagaau

SEQ ID NO: 1045336 - RNA, 19 nt, Homo sapiens
  misc_RNA (1)...(19): siRNA sense strand
ggucagccacucccaaaua

SEQ ID NO: 1045337 - RNA, 19 nt, Homo sapiens
  misc_RNA (1)...(19): siRNA sense strand
uaagaaagccauguacaaa

SEQ ID NO: 1045338 - RNA, 19 nt, Homo sapiens
  misc_RNA (1)...(19): siRNA sense strand
agacaucucuucuaauagu

SEQ ID NO: 1045339 - RNA, 19 nt, Homo sapiens
  misc_RNA (1)...(19): siRNA sense strand
gaauggucaugcauaguga

SEQ ID NO: 1045340 - RNA, 19 nt, Homo sapiens
  misc_RNA (1)...(19): siRNA sense strand
caaauuacccaacgagaga

SEQ ID NO: 1045341 - RNA, 19 nt, Homo sapiens
  misc_RNA (1)...(19): siRNA sense strand
ucagauaucuagugaugga

SEQ ID NO: 1045342 - RNA, 19 nt, Homo sapiens
  misc_RNA (1)...(19): siRNA sense strand
guugguugcucacagguua

SEQ ID NO: 1045343 - RNA, 19 nt, Homo sapiens
  misc_RNA (1)...(19): siRNA sense strand
ggaaaucaagaaaccagua

SEQ ID NO: 1045344 - RNA, 19 nt, Homo sapiens
  misc_RNA (1)...(19): siRNA sense strand
gauagagcaucuuucaaca

SEQ ID NO: 1045345 - RNA, 19 nt, Homo sapiens
  misc_RNA (1)...(19): siRNA sense strand
gguacagcuuugacaauuu

SEQ ID NO: 1045346 - RNA, 19 nt, Homo sapiens
  misc_RNA (1)...(19): siRNA sense strand
acagguaucuaaagaauag

SEQ ID NO: 1045347 - RNA, 19 nt, Homo sapiens
  misc_RNA (1)...(19): siRNA sense strand
gagauaauccaacaagaau

SEQ ID NO: 1045348 - RNA, 19 nt, Homo sapiens
  misc_RNA (1)...(19): siRNA sense strand
uaacuacauuucaccagaa

SEQ ID NO: 1045349 - RNA, 19 nt, Homo sapiens
  misc_RNA (1)...(19): siRNA sense strand
uagagcaucuuucaacaga

SEQ ID NO: 1045350 - RNA, 19 nt, Homo sapiens
  misc_RNA (1)...(19): siRNA sense strand
gaaaucugcuugguaaagg

SEQ ID NO: 1045351 - RNA, 19 nt, Homo sapiens
  misc_RNA (1)...(19): siRNA sense strand
uuggaaaucugcuugguaa

SEQ ID NO: 1045352 - RNA, 19 nt, Homo sapiens
  misc_RNA (1)...(19): siRNA sense strand
ccucuaugguuacaaauga

SEQ ID NO: 1045353 - RNA, 19 nt, Homo sapiens
  misc_RNA (1)...(19): siRNA sense strand
gaucgaggauuuuaaaguu

SEQ ID NO: 1045354 - RNA, 19 nt, Homo sapiens
  misc_RNA (1)...(19): siRNA sense strand
guguggagcuuguaaagga

SEQ ID NO: 1045355 - RNA, 19 nt, Homo sapiens
  misc_RNA (1)...(19): siRNA sense strand
cacauggccuugaaucuga

SEQ ID NO: 1045356 - RNA, 19 nt, Homo sapiens
  misc_RNA (1)...(19): siRNA sense strand
gucagccacucccaaauaa

SEQ ID NO: 1045357 - RNA, 19 nt, Homo sapiens
  misc_RNA (1)...(19): siRNA sense strand
cagacuacaucaaacagaa

SEQ ID NO: 1045358 - RNA, 19 nt, Homo sapiens
  misc_RNA (1)...(19): siRNA sense strand
gaguaugcaucucaagaau

SEQ ID NO: 1045359 - RNA, 19 nt, Homo sapiens
  misc_RNA (1)...(19): siRNA sense strand
ggaguaugcaucucaagaa

SEQ ID NO: 1045360 - RNA, 19 nt, Homo sapiens
  misc_RNA (1)...(19): siRNA sense strand
gauaauccaacaagaaugu

SEQ ID NO: 1045361 - RNA, 19 nt, Homo sapiens
  misc_RNA (1)...(19): siRNA sense strand
gaacucugaugcuucugau

SEQ ID NO: 1045362 - RNA, 19 nt, Homo sapiens
  misc_RNA (1)...(19): siRNA sense strand
ccaguuacuucguagaaau

SEQ ID NO: 1045363 - RNA, 19 nt, Homo sapiens
  misc_RNA (1)...(19): siRNA sense strand
ccaaauggucaaacaacua

SEQ ID NO: 1045364 - RNA, 19 nt, Homo sapiens
  misc_RNA (1)...(19): siRNA sense strand
ccaauaaucauaggaagaa

SEQ ID NO: 1045365 - RNA, 19 nt, Homo sapiens
  misc_RNA (1)...(19): siRNA sense strand
cuucagauaucuagugaug

SEQ ID NO: 1045366 - RNA, 19 nt, Homo sapiens
  misc_RNA (1)...(19): siRNA sense strand
ugaaacauccuucuaucuu

SEQ ID NO: 1045367 - RNA, 19 nt, Homo sapiens
  misc_RNA (1)...(19): siRNA sense strand
cuaauccgacuccuaauuu

SEQ ID NO: 1045368 - RNA, 19 nt, Homo sapiens
  misc_RNA (1)...(19): siRNA sense strand
ggaacagacaucucuucua

SEQ ID NO: 1045369 - RNA, 19 nt, Homo sapiens
  misc_RNA (1)...(19): siRNA sense strand
acacaggcaccaauccuua

SEQ ID NO: 1045370 - RNA, 19 nt, Homo sapiens
  misc_RNA (1)...(19): siRNA sense strand
caagcacucuccaaucauc

SEQ ID NO: 1045371 - RNA, 19 nt, Homo sapiens
  misc_RNA (1)...(19): siRNA sense strand
uuaagucugucuucaguau

SEQ ID NO: 1045372 - RNA, 19 nt, Homo sapiens
  misc_RNA (1)...(19): siRNA sense strand
gaaauccagcagaucguuu

SEQ ID NO: 1045373 - RNA, 19 nt, Homo sapiens
  misc_RNA (1)...(19): siRNA sense strand
uaucuucauucucauggua

SEQ ID NO: 1045374 - RNA, 19 nt, Homo sapiens
  misc_RNA (1)...(19): siRNA sense strand
gauguuguaucuucauucu

SEQ ID NO: 1045375 - RNA, 19 nt, Homo sapiens
  misc_RNA (1)...(19): siRNA sense strand
guacagcuucuaagaucua

SEQ ID NO: 1045376 - RNA, 19 nt, Homo sapiens
  misc_RNA (1)...(19): siRNA sense strand
gcagaagaaaggccacauu

SEQ ID NO: 1045377 - RNA, 19 nt, Homo sapiens
  misc_RNA (1)...(19): siRNA sense strand
ggaagaguaauucaagaug

SEQ ID NO: 1045378 - RNA, 19 nt, Homo sapiens
  misc_RNA (1)...(19): siRNA sense strand
ucacagugguuuggaaguu

SEQ ID NO: 1045379 - RNA, 19 nt, Homo sapiens
  misc_RNA (1)...(19): siRNA sense strand
gcacauggccuugaaucug

SEQ ID NO: 1045380 - RNA, 19 nt, Homo sapiens
  misc_RNA (1)...(19): siRNA sense strand
acagggauguuguaucuuc

SEQ ID NO: 1045381 - RNA, 19 nt, Homo sapiens
  misc_RNA (1)...(19): siRNA sense strand
aguuauaccucaccaaaug

SEQ ID NO: 1045382 - RNA, 19 nt, Homo sapiens
  misc_RNA (1)...(19): siRNA sense strand
caauaugcuuccagguuug

SEQ ID NO: 1045383 - RNA, 19 nt, Homo sapiens
  misc_RNA (1)...(19): siRNA sense strand
caguaaaccugagauaauc

SEQ ID NO: 1045384 - RNA, 19 nt, Homo sapiens
  misc_RNA (1)...(19): siRNA sense strand
ccagggccauccagauuug

SEQ ID NO: 1045385 - RNA, 19 nt, Homo sapiens
  misc_RNA (1)...(19): siRNA sense strand
uugggaaucugcaaauaaa

SEQ ID NO: 1045386 - RNA, 19 nt, Homo sapiens
  misc_RNA (1)...(19): siRNA sense strand
caacagugguuugggaauc

SEQ ID NO: 1045387 - RNA, 19 nt, Homo sapiens
  misc_RNA (1)...(19): siRNA sense strand
gaucuggcacuucuaauag

SEQ ID NO: 1045388 - RNA, 19 nt, Homo sapiens
  misc_RNA (1)...(19): siRNA sense strand
cuacugacucguaauauga

SEQ ID NO: 1045389 - RNA, 19 nt, Homo sapiens
  misc_RNA (1)...(19): siRNA sense strand
ugguugggcuacacaguua

SEQ ID NO: 1045390 - RNA, 19 nt, Homo sapiens
  misc_RNA (1)...(19): siRNA sense strand
ugagauaauccaacaagaa

SEQ ID NO: 1045391 - RNA, 19 nt, Homo sapiens
  misc_RNA (1)...(19): siRNA sense strand
gggcaugccacaauuucua

SEQ ID NO: 1045392 - RNA, 19 nt, Homo sapiens
  misc_RNA (1)...(19): siRNA sense strand
gagugaaacccuucucaga

SEQ ID NO: 1045393 - RNA, 19 nt, Homo sapiens
  misc_RNA (1)...(19): siRNA sense strand
gcuacacaguuaacuagug

SEQ ID NO: 1045394 - RNA, 19 nt, Homo sapiens
  misc_RNA (1)...(19): siRNA sense strand
uacaagauaugcuaaaugc

SEQ ID NO: 1045395 - RNA, 19 nt, Homo sapiens
  misc_RNA (1)...(19): siRNA sense strand
gaagaucgaggauuuuaaa

SEQ ID NO: 1045396 - RNA, 19 nt, Homo sapiens
  misc_RNA (1)...(19): siRNA sense strand
gaacuccuaacuacauuuc

SEQ ID NO: 1045397 - RNA, 19 nt, Homo sapiens
  misc_RNA (1)...(19): siRNA sense strand
ggaaaucugcuugguaaag

SEQ ID NO: 1045398 - RNA, 19 nt, Homo sapiens
  misc_RNA (1)...(19): siRNA sense strand
gagugucuucuaucaguua

SEQ ID NO: 1045399 - RNA, 19 nt, Homo sapiens
  misc_RNA (1)...(19): siRNA sense strand
ggagugucuucuaucaguu

SEQ ID NO: 1045400 - RNA, 19 nt, Homo sapiens
  misc_RNA (1)...(19): siRNA sense strand
guggugagcauacuugauu

SEQ ID NO: 1045401 - RNA, 19 nt, Homo sapiens
  misc_RNA (1)...(19): siRNA sense strand
ggccuugaaucugauguuu

SEQ ID NO: 1045402 - RNA, 19 nt, Homo sapiens
  misc_RNA (1)...(19): siRNA sense strand
ugauagaucuggcacuucu

SEQ ID NO: 1045403 - RNA, 19 nt, Homo sapiens
  misc_RNA (1)...(19): siRNA sense strand
ucaaacaacuagguaugga

SEQ ID NO: 1045404 - RNA, 19 nt, Homo sapiens
  misc_RNA (1)...(19): siRNA sense strand
ugaaggacuuggucuuaca

SEQ ID NO: 1045405 - RNA, 19 nt, Homo sapiens
  misc_RNA (1)...(19): siRNA sense strand
gauaucuagugauggaaau

SEQ ID NO: 1045406 - RNA, 19 nt, Homo sapiens
  misc_RNA (1)...(19): siRNA sense strand
uaaaggaguaugcaucuca

SEQ ID NO: 1045407 - RNA, 19 nt, Homo sapiens
  misc_RNA (1)...(19): siRNA sense strand
aaucguacauuaagaagca

SEQ ID NO: 1045408 - RNA, 19 nt, Homo sapiens
  misc_RNA (1)...(19): siRNA sense strand
gggaaucugcaaauaaaug

SEQ ID NO: 1045409 - RNA, 19 nt, Homo sapiens
  misc_RNA (1)...(19): siRNA sense strand
ccagcaagcucacaacauu

SEQ ID NO: 1045410 - RNA, 19 nt, Homo sapiens
  misc_RNA (1)...(19): siRNA sense strand
gggaacacgugcuucauga

SEQ ID NO: 1045411 - RNA, 19 nt, Homo sapiens
  misc_RNA (1)...(19): siRNA sense strand
uaagagaauuugccucaga

SEQ ID NO: 1045412 - RNA, 19 nt, Homo sapiens
  misc_RNA (1)...(19): siRNA sense strand
gagaaaggccgacagaugu

SEQ ID NO: 1045413 - RNA, 19 nt, Homo sapiens
  misc_RNA (1)...(19): siRNA sense strand
gcaugaggcucuucaccaa

SEQ ID NO: 1045414 - RNA, 19 nt, Homo sapiens
  misc_RNA (1)...(19): siRNA sense strand
gaccuggacuuaagagaau

SEQ ID NO: 1045415 - RNA, 19 nt, Homo sapiens
  misc_RNA (1)...(19): siRNA sense strand
agacccagauccagagaua

SEQ ID NO: 1045416 - RNA, 19 nt, Homo sapiens
  misc_RNA (1)...(19): siRNA sense strand
acacagcccucguggaaga

SEQ ID NO: 1045417 - RNA, 19 nt, Homo sapiens
  misc_RNA (1)...(19): siRNA sense strand
gagaauggcacacuuucaa

SEQ ID NO: 1045418 - RNA, 19 nt, Homo sapiens
  misc_RNA (1)...(19): siRNA sense strand
ccaaagaggaugugcuuga

SEQ ID NO: 1045419 - RNA, 19 nt, Homo sapiens
  misc_RNA (1)...(19): siRNA sense strand
gcaggaugcucaggaguuc

SEQ ID NO: 1045420 - RNA, 19 nt, Homo sapiens
  misc_RNA (1)...(19): siRNA sense strand
caaagaggaugugcuugau

SEQ ID NO: 1045421 - RNA, 19 nt, Homo sapiens
  misc_RNA (1)...(19): siRNA sense strand
cgagaaaggccgacagaug

SEQ ID NO: 1045422 - RNA, 19 nt, Homo sapiens
  misc_RNA (1)...(19): siRNA sense strand
cgacagauguggagaaaau

SEQ ID NO: 1045423 - RNA, 19 nt, Homo sapiens
  misc_RNA (1)...(19): siRNA sense strand
caaccaugcuguuuacaac

SEQ ID NO: 1045424 - RNA, 19 nt, Homo sapiens
  misc_RNA (1)...(19): siRNA sense strand
acacacagcccucguggaa

SEQ ID NO: 1045425 - RNA, 19 nt, Homo sapiens
  misc_RNA (1)...(19): siRNA sense strand
ucgcugacguguacagauu

SEQ ID NO: 1045426 - RNA, 19 nt, Homo sapiens
  misc_RNA (1)...(19): siRNA sense strand
ggaguuccuucgcuuucuu

SEQ ID NO: 1045427 - RNA, 19 nt, Homo sapiens
  misc_RNA (1)...(19): siRNA sense strand
acaccaaccaugcuguuua

SEQ ID NO: 1045428 - RNA, 19 nt, Homo sapiens
  misc_RNA (1)...(19): siRNA sense strand
agaaaacgguguauaaaga

SEQ ID NO: 1045429 - RNA, 19 nt, Homo sapiens
  misc_RNA (1)...(19): siRNA sense strand
gaaccucgaucaucuuccu

SEQ ID NO: 1045430 - RNA, 19 nt, Homo sapiens
  misc_RNA (1)...(19): siRNA sense strand
gccgacagauguggagaaa

SEQ ID NO: 1045431 - RNA, 19 nt, Homo sapiens
  misc_RNA (1)...(19): siRNA sense strand
gauugugguuacuguucua

SEQ ID NO: 1045432 - RNA, 19 nt, Homo sapiens
  misc_RNA (1)...(19): siRNA sense strand
gaacacgugcuucaugaac

SEQ ID NO: 1045433 - RNA, 19 nt, Homo sapiens
  misc_RNA (1)...(19): siRNA sense strand
aagagaauuugccucagaa

SEQ ID NO: 1045434 - RNA, 19 nt, Homo sapiens
  misc_RNA (1)...(19): siRNA sense strand
gagauacgcaccgcgcuuu

SEQ ID NO: 1045435 - RNA, 19 nt, Homo sapiens
  misc_RNA (1)...(19): siRNA sense strand
gaacgggaagacaguagga

SEQ ID NO: 1045436 - RNA, 19 nt, Homo sapiens
  misc_RNA (1)...(19): siRNA sense strand
gcgcuuuguuggcuauaau

SEQ ID NO: 1045437 - RNA, 19 nt, Homo sapiens
  misc_RNA (1)...(19): siRNA sense strand
auccagagguucccaaaga

SEQ ID NO: 1045438 - RNA, 19 nt, Homo sapiens
  misc_RNA (1)...(19): siRNA sense strand
ggagaauggcacacuuuca

SEQ ID NO: 1045439 - RNA, 19 nt, Homo sapiens
  misc_RNA (1)...(19): siRNA sense strand
cugagaaccucgaucaucu

SEQ ID NO: 1045440 - RNA, 19 nt, Homo sapiens
  misc_RNA (1)...(19): siRNA sense strand
acgccuaccugcucuucua

SEQ ID NO: 1045441 - RNA, 19 nt, Homo sapiens
  misc_RNA (1)...(19): siRNA sense strand
gaaaacgguguauaaagaa

SEQ ID NO: 1045442 - RNA, 19 nt, Homo sapiens
  misc_RNA (1)...(19): siRNA sense strand
gagcccaucugaguucaag

SEQ ID NO: 1045443 - RNA, 19 nt, Homo sapiens
  misc_RNA (1)...(19): siRNA sense strand
ggaacacgugcuucaugaa

SEQ ID NO: 1045444 - RNA, 19 nt, Homo sapiens
  misc_RNA (1)...(19): siRNA sense strand
ggaugugcuugauggagau

SEQ ID NO: 1045445 - RNA, 19 nt, Homo sapiens
  misc_RNA (1)...(19): siRNA sense strand
ugacauuaauggacugcau

SEQ ID NO: 1045446 - RNA, 19 nt, Homo sapiens
  misc_RNA (1)...(19): siRNA sense strand
gagaaccucgaucaucuuc

SEQ ID NO: 1045447 - RNA, 19 nt, Homo sapiens
  misc_RNA (1)...(19): siRNA sense strand
caggagaauggcacacuuu

SEQ ID NO: 1045448 - RNA, 19 nt, Homo sapiens
  misc_RNA (1)...(19): siRNA sense strand
caccaaccaugcuguuuac

SEQ ID NO: 1045449 - RNA, 19 nt, Homo sapiens
  misc_RNA (1)...(19): siRNA sense strand
gcagaaaacgguguauaaa

SEQ ID NO: 1045450 - RNA, 19 nt, Homo sapiens
  misc_RNA (1)...(19): siRNA sense strand
cggcagcaaugcacacaca

SEQ ID NO: 1045451 - RNA, 19 nt, Homo sapiens
  misc_RNA (1)...(19): siRNA sense strand
gaauuugccucagaaaaca

SEQ ID NO: 1045452 - RNA, 19 nt, Homo sapiens
  misc_RNA (1)...(19): siRNA sense strand
cagcaagcucacaacauuu

SEQ ID NO: 1045453 - RNA, 19 nt, Homo sapiens
  misc_RNA (1)...(19): siRNA sense strand
ggugagcccaucugaguuc

SEQ ID NO: 1045454 - RNA, 19 nt, Homo sapiens
  misc_RNA (1)...(19): siRNA sense strand
ccaaccaugcuguuuacaa

SEQ ID NO: 1045455 - RNA, 19 nt, Homo sapiens
  misc_RNA (1)...(19): siRNA sense strand
guggugagcccaucugagu

SEQ ID NO: 1045456 - RNA, 19 nt, Homo sapiens
  misc_RNA (1)...(19): siRNA sense strand
cucgggaguugagagauua

SEQ ID NO: 1045457 - RNA, 19 nt, Homo sapiens
  misc_RNA (1)...(19): siRNA sense strand
caccaaagaggaugugcuu

SEQ ID NO: 1045458 - RNA, 19 nt, Homo sapiens
  misc_RNA (1)...(19): siRNA sense strand
gcugacguguacagauugu

SEQ ID NO: 1045459 - RNA, 19 nt, Homo sapiens
  misc_RNA (1)...(19): siRNA sense strand
gacgagaaaggccgacaga

SEQ ID NO: 1045460 - RNA, 19 nt, Homo sapiens
  misc_RNA (1)...(19): siRNA sense strand
acaggagaauggcacacuu

SEQ ID NO: 1045461 - RNA, 19 nt, Homo sapiens
  misc_RNA (1)...(19): siRNA sense strand
guguacagauugugguuac

SEQ ID NO: 1045462 - RNA, 19 nt, Homo sapiens
  misc_RNA (1)...(19): siRNA sense strand
agaccuggacuuaagagaa

SEQ ID NO: 1045463 - RNA, 19 nt, Homo sapiens
  misc_RNA (1)...(19): siRNA sense strand
ggcagaaaacgguguauaa

SEQ ID NO: 1045464 - RNA, 19 nt, Homo sapiens
  misc_RNA (1)...(19): siRNA sense strand
ucucacugcccauugcuaa

SEQ ID NO: 1045465 - RNA, 19 nt, Homo sapiens
  misc_RNA (1)...(19): siRNA sense strand
uguacgcuguguccaauca

SEQ ID NO: 1045466 - RNA, 19 nt, Homo sapiens
  misc_RNA (1)...(19): siRNA sense strand
guacagauugugguuacug

SEQ ID NO: 1045467 - RNA, 19 nt, Homo sapiens
  misc_RNA (1)...(19): siRNA sense strand
auccugaggugacauuaau

SEQ ID NO: 1045468 - RNA, 19 nt, Homo sapiens
  misc_RNA (1)...(19): siRNA sense strand
ggaccucucacugcccauu

SEQ ID NO: 1045469 - RNA, 19 nt, Homo sapiens
  misc_RNA (1)...(19): siRNA sense strand
gggucuggcuggucuucga

SEQ ID NO: 1045470 - RNA, 19 nt, Homo sapiens
  misc_RNA (1)...(19): siRNA sense strand
ccuguacgcuguguccaau

SEQ ID NO: 1045471 - RNA, 19 nt, Homo sapiens
  misc_RNA (1)...(19): siRNA sense strand
cagauugugguuacuguuc

SEQ ID NO: 1045472 - RNA, 19 nt, Homo sapiens
  misc_RNA (1)...(19): siRNA sense strand
cagaccauauggacuucau

SEQ ID NO: 1045473 - RNA, 19 nt, Homo sapiens
  misc_RNA (1)...(19): siRNA sense strand
caacgacuccagcgucacu

SEQ ID NO: 1045474 - RNA, 19 nt, Homo sapiens
  misc_RNA (1)...(19): siRNA sense strand
gagaauuugccucagaaaa

SEQ ID NO: 1045475 - RNA, 19 nt, Homo sapiens
  misc_RNA (1)...(19): siRNA sense strand
gaaccagcaagcucacaac

SEQ ID NO: 1045476 - RNA, 19 nt, Homo sapiens
  misc_RNA (1)...(19): siRNA sense strand
uauccugaggugacauuaa

SEQ ID NO: 1045477 - RNA, 19 nt, Homo sapiens
  misc_RNA (1)...(19): siRNA sense strand
acacgugcuucaugaacuc

SEQ ID NO: 1045478 - RNA, 19 nt, Homo sapiens
  misc_RNA (1)...(19): siRNA sense strand
aacgguguauaaagaaguu

SEQ ID NO: 1045479 - RNA, 19 nt, Homo sapiens
  misc_RNA (1)...(19): siRNA sense strand
ccagcaagcucacaacauu

SEQ ID NO: 1045480 - RNA, 19 nt, Homo sapiens
  misc_RNA (1)...(19): siRNA sense strand
gggaacacgugcuucauga

SEQ ID NO: 1045481 - RNA, 19 nt, Homo sapiens
  misc_RNA (1)...(19): siRNA sense strand
uaagagaauuugccucaga

SEQ ID NO: 1045482 - RNA, 19 nt, Homo sapiens
  misc_RNA (1)...(19): siRNA sense strand
gagaaaggccgacagaugu

SEQ ID NO: 1045483 - RNA, 19 nt, Homo sapiens
  misc_RNA (1)...(19): siRNA sense strand
gcaugaggcucuucaccaa

SEQ ID NO: 1045484 - RNA, 19 nt, Homo sapiens
  misc_RNA (1)...(19): siRNA sense strand
gaccuggacuuaagagaau

SEQ ID NO: 1045485 - RNA, 19 nt, Homo sapiens
  misc_RNA (1)...(19): siRNA sense strand
agacccagauccagagaua

SEQ ID NO: 1045486 - RNA, 19 nt, Homo sapiens
  misc_RNA (1)...(19): siRNA sense strand
acacagcccucguggaaga

SEQ ID NO: 1045487 - RNA, 19 nt, Homo sapiens
  misc_RNA (1)...(19): siRNA sense strand
gagaauggcacacuuucaa

SEQ ID NO: 1045488 - RNA, 19 nt, Homo sapiens
  misc_RNA (1)...(19): siRNA sense strand
ccaaagaggaugugcuuga

SEQ ID NO: 1045489 - RNA, 19 nt, Homo sapiens
  misc_RNA (1)...(19): siRNA sense strand
gcaggaugcucaggaguuc

SEQ ID NO: 1045490 - RNA, 19 nt, Homo sapiens
  misc_RNA (1)...(19): siRNA sense strand
caaagaggaugugcuugau

SEQ ID NO: 1045491 - RNA, 19 nt, Homo sapiens
  misc_RNA (1)...(19): siRNA sense strand
cgagaaaggccgacagaug

SEQ ID NO: 1045492 - RNA, 19 nt, Homo sapiens
  misc_RNA (1)...(19): siRNA sense strand
cgacagauguggagaaaau

SEQ ID NO: 1045493 - RNA, 19 nt, Homo sapiens
  misc_RNA (1)...(19): siRNA sense strand
caaccaugcuguuuacaac

SEQ ID NO: 1045494 - RNA, 19 nt, Homo sapiens
  misc_RNA (1)...(19): siRNA sense strand
acacacagcccucguggaa

SEQ ID NO: 1045495 - RNA, 19 nt, Homo sapiens
  misc_RNA (1)...(19): siRNA sense strand
ucgcugacguguacagauu

SEQ ID NO: 1045496 - RNA, 19 nt, Homo sapiens
  misc_RNA (1)...(19): siRNA sense strand
ggaguuccuucgcuuucuu

SEQ ID NO: 1045497 - RNA, 19 nt, Homo sapiens
  misc_RNA (1)...(19): siRNA sense strand
acaccaaccaugcuguuua

SEQ ID NO: 1045498 - RNA, 19 nt, Homo sapiens
  misc_RNA (1)...(19): siRNA sense strand
agaaaacgguguauaaaga

SEQ ID NO: 1045499 - RNA, 19 nt, Homo sapiens
  misc_RNA (1)...(19): siRNA sense strand
gaaccucgaucaucuuccu

SEQ ID NO: 1045500 - RNA, 19 nt, Homo sapiens
  misc_RNA (1)...(19): siRNA sense strand
gccgacagauguggagaaa

SEQ ID NO: 1045501 - RNA, 19 nt, Homo sapiens
  misc_RNA (1)...(19): siRNA sense strand
gauugugguuacuguucua

SEQ ID NO: 1045502 - RNA, 19 nt, Homo sapiens
  misc_RNA (1)...(19): siRNA sense strand
gaacacgugcuucaugaac

SEQ ID NO: 1045503 - RNA, 19 nt, Homo sapiens
  misc_RNA (1)...(19): siRNA sense strand
aagagaauuugccucagaa

SEQ ID NO: 1045504 - RNA, 19 nt, Homo sapiens
  misc_RNA (1)...(19): siRNA sense strand
gagauacgcaccgcgcuuu

SEQ ID NO: 1045505 - RNA, 19 nt, Homo sapiens
  misc_RNA (1)...(19): siRNA sense strand
gaacgggaagacaguagga

SEQ ID NO: 1045506 - RNA, 19 nt, Homo sapiens
  misc_RNA (1)...(19): siRNA sense strand
gcgcuuuguuggcuauaau

SEQ ID NO: 1045507 - RNA, 19 nt, Homo sapiens
  misc_RNA (1)...(19): siRNA sense strand
auccagagguucccaaaga

SEQ ID NO: 1045508 - RNA, 19 nt, Homo sapiens
  misc_RNA (1)...(19): siRNA sense strand
ggagaauggcacacuuuca

SEQ ID NO: 1045509 - RNA, 19 nt, Homo sapiens
  misc_RNA (1)...(19): siRNA sense strand
cugagaaccucgaucaucu

SEQ ID NO: 1045510 - RNA, 19 nt, Homo sapiens
  misc_RNA (1)...(19): siRNA sense strand
acgccuaccugcucuucua

SEQ ID NO: 1045511 - RNA, 19 nt, Homo sapiens
  misc_RNA (1)...(19): siRNA sense strand
gaaaacgguguauaaagaa

SEQ ID NO: 1045512 - RNA, 19 nt, Homo sapiens
  misc_RNA (1)...(19): siRNA sense strand
gagcccaucugaguucaag

SEQ ID NO: 1045513 - RNA, 19 nt, Homo sapiens
  misc_RNA (1)...(19): siRNA sense strand
ggaacacgugcuucaugaa

SEQ ID NO: 1045514 - RNA, 19 nt, Homo sapiens
  misc_RNA (1)...(19): siRNA sense strand
ggaugugcuugauggagau

SEQ ID NO: 1045515 - RNA, 19 nt, Homo sapiens
  misc_RNA (1)...(19): siRNA sense strand
ugacauuaauggacugcau

SEQ ID NO: 1045516 - RNA, 19 nt, Homo sapiens
  misc_RNA (1)...(19): siRNA sense strand
gagaaccucgaucaucuuc

SEQ ID NO: 1045517 - RNA, 19 nt, Homo sapiens
  misc_RNA (1)...(19): siRNA sense strand
caggagaauggcacacuuu

SEQ ID NO: 1045518 - RNA, 19 nt, Homo sapiens
  misc_RNA (1)...(19): siRNA sense strand
caccaaccaugcuguuuac

SEQ ID NO: 1045519 - RNA, 19 nt, Homo sapiens
  misc_RNA (1)...(19): siRNA sense strand
gcagaaaacgguguauaaa

SEQ ID NO: 1045520 - RNA, 19 nt, Homo sapiens
  misc_RNA (1)...(19): siRNA sense strand
cggcagcaaugcacacaca

SEQ ID NO: 1045521 - RNA, 19 nt, Homo sapiens
  misc_RNA (1)...(19): siRNA sense strand
gaauuugccucagaaaaca

SEQ ID NO: 1045522 - RNA, 19 nt, Homo sapiens
  misc_RNA (1)...(19): siRNA sense strand
cagcaagcucacaacauuu

SEQ ID NO: 1045523 - RNA, 19 nt, Homo sapiens
  misc_RNA (1)...(19): siRNA sense strand
ggugagcccaucugaguuc

SEQ ID NO: 1045524 - RNA, 19 nt, Homo sapiens
  misc_RNA (1)...(19): siRNA sense strand
ccaaccaugcuguuuacaa

SEQ ID NO: 1045525 - RNA, 19 nt, Homo sapiens
  misc_RNA (1)...(19): siRNA sense strand
guggugagcccaucugagu

SEQ ID NO: 1045526 - RNA, 19 nt, Homo sapiens
  misc_RNA (1)...(19): siRNA sense strand
cucgggaguugagagauua

SEQ ID NO: 1045527 - RNA, 19 nt, Homo sapiens
  misc_RNA (1)...(19): siRNA sense strand
caccaaagaggaugugcuu

SEQ ID NO: 1045528 - RNA, 19 nt, Homo sapiens
  misc_RNA (1)...(19): siRNA sense strand
gcugacguguacagauugu

SEQ ID NO: 1045529 - RNA, 19 nt, Homo sapiens
  misc_RNA (1)...(19): siRNA sense strand
gacgagaaaggccgacaga

SEQ ID NO: 1045530 - RNA, 19 nt, Homo sapiens
  misc_RNA (1)...(19): siRNA sense strand
acaggagaauggcacacuu

SEQ ID NO: 1045531 - RNA, 19 nt, Homo sapiens
  misc_RNA (1)...(19): siRNA sense strand
guguacagauugugguuac

SEQ ID NO: 1045532 - RNA, 19 nt, Homo sapiens
  misc_RNA (1)...(19): siRNA sense strand
agaccuggacuuaagagaa

SEQ ID NO: 1045533 - RNA, 19 nt, Homo sapiens
  misc_RNA (1)...(19): siRNA sense strand
ggcagaaaacgguguauaa

SEQ ID NO: 1045534 - RNA, 19 nt, Homo sapiens
  misc_RNA (1)...(19): siRNA sense strand
ucucacugcccauugcuaa

SEQ ID NO: 1045535 - RNA, 19 nt, Homo sapiens
  misc_RNA (1)...(19): siRNA sense strand
uguacgcuguguccaauca

SEQ ID NO: 1045536 - RNA, 19 nt, Homo sapiens
  misc_RNA (1)...(19): siRNA sense strand
guacagauugugguuacug

SEQ ID NO: 1045537 - RNA, 19 nt, Homo sapiens
  misc_RNA (1)...(19): siRNA sense strand
auccugaggugacauuaau

SEQ ID NO: 1045538 - RNA, 19 nt, Homo sapiens
  misc_RNA (1)...(19): siRNA sense strand
ggaccucucacugcccauu

SEQ ID NO: 1045539 - RNA, 19 nt, Homo sapiens
  misc_RNA (1)...(19): siRNA sense strand
gggucuggcuggucuucga

SEQ ID NO: 1045540 - RNA, 19 nt, Homo sapiens
  misc_RNA (1)...(19): siRNA sense strand
ccuguacgcuguguccaau

SEQ ID NO: 1045541 - RNA, 19 nt, Homo sapiens
  misc_RNA (1)...(19): siRNA sense strand
cagauugugguuacuguuc

SEQ ID NO: 1045542 - RNA, 19 nt, Homo sapiens
  misc_RNA (1)...(19): siRNA sense strand
cagaccauauggacuucau

SEQ ID NO: 1045543 - RNA, 19 nt, Homo sapiens
  misc_RNA (1)...(19): siRNA sense strand
caacgacuccagcgucacu

SEQ ID NO: 1045544 - RNA, 19 nt, Homo sapiens
  misc_RNA (1)...(19): siRNA sense strand
gagaauuugccucagaaaa

SEQ ID NO: 1045545 - RNA, 19 nt, Homo sapiens
  misc_RNA (1)...(19): siRNA sense strand
gaaccagcaagcucacaac

SEQ ID NO: 1045546 - RNA, 19 nt, Homo sapiens
  misc_RNA (1)...(19): siRNA sense strand
uauccugaggugacauuaa

SEQ ID NO: 1045547 - RNA, 19 nt, Homo sapiens
  misc_RNA (1)...(19): siRNA sense strand
acacgugcuucaugaacuc

SEQ ID NO: 1045548 - RNA, 19 nt, Homo sapiens
  misc_RNA (1)...(19): siRNA sense strand
aacgguguauaaagaaguu

SEQ ID NO: 1045549 - RNA, 19 nt, Homo sapiens
  misc_RNA (1)...(19): siRNA sense strand
ucacagaccugacaagaga

SEQ ID NO: 1045550 - RNA, 19 nt, Homo sapiens
  misc_RNA (1)...(19): siRNA sense strand
gaaacuggcugcugcauac

SEQ ID NO: 1045551 - RNA, 19 nt, Homo sapiens
  misc_RNA (1)...(19): siRNA sense strand
cagaagagguugucaaauc

SEQ ID NO: 1045552 - RNA, 19 nt, Homo sapiens
  misc_RNA (1)...(19): siRNA sense strand
gaauguccaugagugguua

SEQ ID NO: 1045553 - RNA, 19 nt, Homo sapiens
  misc_RNA (1)...(19): siRNA sense strand
ggugaagaguggauuugua

SEQ ID NO: 1045554 - RNA, 19 nt, Homo sapiens
  misc_RNA (1)...(19): siRNA sense strand
guucagcccuaccaaauug

SEQ ID NO: 1045555 - RNA, 19 nt, Homo sapiens
  misc_RNA (1)...(19): siRNA sense strand
caaaugugguucacucuuc

SEQ ID NO: 1045556 - RNA, 19 nt, Homo sapiens
  misc_RNA (1)...(19): siRNA sense strand
ggucuucucuuauuugaca

SEQ ID NO: 1045557 - RNA, 19 nt, Homo sapiens
  misc_RNA (1)...(19): siRNA sense strand
caagagagguucagaucca

SEQ ID NO: 1045558 - RNA, 19 nt, Homo sapiens
  misc_RNA (1)...(19): siRNA sense strand
gcaucaagcuccagaucug

SEQ ID NO: 1045559 - RNA, 19 nt, Homo sapiens
  misc_RNA (1)...(19): siRNA sense strand
ggcaugaaguacauugaaa

SEQ ID NO: 1045560 - RNA, 19 nt, Homo sapiens
  misc_RNA (1)...(19): siRNA sense strand
gcagguccuuccagaaugu

SEQ ID NO: 1045561 - RNA, 19 nt, Homo sapiens
  misc_RNA (1)...(19): siRNA sense strand
agaagagguugucaaauca

SEQ ID NO: 1045562 - RNA, 19 nt, Homo sapiens
  misc_RNA (1)...(19): siRNA sense strand
uagguggucuucucuuauu

SEQ ID NO: 1045563 - RNA, 19 nt, Homo sapiens
  misc_RNA (1)...(19): siRNA sense strand
agacauauaugagcugguu

SEQ ID NO: 1045564 - RNA, 19 nt, Homo sapiens
  misc_RNA (1)...(19): siRNA sense strand
ugacaagagacauauauga

SEQ ID NO: 1045565 - RNA, 19 nt, Homo sapiens
  misc_RNA (1)...(19): siRNA sense strand
aguagguggucuucucuua

SEQ ID NO: 1045566 - RNA, 19 nt, Homo sapiens
  misc_RNA (1)...(19): siRNA sense strand
guuagaagagaccaaagua

SEQ ID NO: 1045567 - RNA, 19 nt, Homo sapiens
  misc_RNA (1)...(19): siRNA sense strand
uauaugagcugguuaaaag

SEQ ID NO: 1045568 - RNA, 19 nt, Homo sapiens
  misc_RNA (1)...(19): siRNA sense strand
ucagagaggagauguuugu

SEQ ID NO: 1045569 - RNA, 19 nt, Homo sapiens
  misc_RNA (1)...(19): siRNA sense strand
uagaagagaccaaaguaca

SEQ ID NO: 1045570 - RNA, 19 nt, Homo sapiens
  misc_RNA (1)...(19): siRNA sense strand
aaucagagaggagauguuu

SEQ ID NO: 1045571 - RNA, 19 nt, Homo sapiens
  misc_RNA (1)...(19): siRNA sense strand
gacaagagacauauaugag

SEQ ID NO: 1045572 - RNA, 19 nt, Homo sapiens
  misc_RNA (1)...(19): siRNA sense strand
gaacucaguagguggucuu

SEQ ID NO: 1045573 - RNA, 19 nt, Homo sapiens
  misc_RNA (1)...(19): siRNA sense strand
guggucuucucuuauuuga

SEQ ID NO: 1045574 - RNA, 19 nt, Homo sapiens
  misc_RNA (1)...(19): siRNA sense strand
gaagaguggauuuguacca

SEQ ID NO: 1045575 - RNA, 19 nt, Homo sapiens
  misc_RNA (1)...(19): siRNA sense strand
cugcauacggcaugaagua

SEQ ID NO: 1045576 - RNA, 19 nt, Homo sapiens
  misc_RNA (1)...(19): siRNA sense strand
ccauuaauguggagaaagc

SEQ ID NO: 1045577 - RNA, 19 nt, Homo sapiens
  misc_RNA (1)...(19): siRNA sense strand
caugagugguuagaagaga

SEQ ID NO: 1045578 - RNA, 19 nt, Homo sapiens
  misc_RNA (1)...(19): siRNA sense strand
guagguggucuucucuuau

SEQ ID NO: 1045579 - RNA, 19 nt, Homo sapiens
  misc_RNA (1)...(19): siRNA sense strand
gagagguucagauccauca

SEQ ID NO: 1045580 - RNA, 19 nt, Homo sapiens
  misc_RNA (1)...(19): siRNA sense strand
aaaugugguucacucuuca

SEQ ID NO: 1045581 - RNA, 19 nt, Homo sapiens
  misc_RNA (1)...(19): siRNA sense strand
acauauaugagcugguuaa

SEQ ID NO: 1045582 - RNA, 19 nt, Homo sapiens
  misc_RNA (1)...(19): siRNA sense strand
gauacacagaggcaaguga

SEQ ID NO: 1045583 - RNA, 19 nt, Homo sapiens
  misc_RNA (1)...(19): siRNA sense strand
guccaugagugguuagaag

SEQ ID NO: 1045584 - RNA, 19 nt, Homo sapiens
  misc_RNA (1)...(19): siRNA sense strand
gagguugucaaaucagaga

SEQ ID NO: 1045585 - RNA, 19 nt, Homo sapiens
  misc_RNA (1)...(19): siRNA sense strand
agaaacuggcugcugcaua

SEQ ID NO: 1045586 - RNA, 19 nt, Homo sapiens
  misc_RNA (1)...(19): siRNA sense strand
ccgcagguccuuccagaau

SEQ ID NO: 1045587 - RNA, 19 nt, Homo sapiens
  misc_RNA (1)...(19): siRNA sense strand
aagagguugucaaaucaga

SEQ ID NO: 1045588 - RNA, 19 nt, Homo sapiens
  misc_RNA (1)...(19): siRNA sense strand
aagaguggauuuguaccaa

SEQ ID NO: 1045589 - RNA, 19 nt, Homo sapiens
  misc_RNA (1)...(19): siRNA sense strand
cauacggcaugaaguacau

SEQ ID NO: 1045590 - RNA, 19 nt, Homo sapiens
  misc_RNA (1)...(19): siRNA sense strand
gcauacggcaugaaguaca

SEQ ID NO: 1045591 - RNA, 19 nt, Homo sapiens
  misc_RNA (1)...(19): siRNA sense strand
agaccaaaguacacguuca

SEQ ID NO: 1045592 - RNA, 19 nt, Homo sapiens
  misc_RNA (1)...(19): siRNA sense strand
ggagaucgagccaggaaaa

SEQ ID NO: 1045593 - RNA, 19 nt, Homo sapiens
  misc_RNA (1)...(19): siRNA sense strand
ccacgaggccgagaaacug

SEQ ID NO: 1045594 - RNA, 19 nt, Homo sapiens
  misc_RNA (1)...(19): siRNA sense strand
gguggucuucucuuauuug

SEQ ID NO: 1045595 - RNA, 19 nt, Homo sapiens
  misc_RNA (1)...(19): siRNA sense strand
ccaaaugugguucacucuu

SEQ ID NO: 1045596 - RNA, 19 nt, Homo sapiens
  misc_RNA (1)...(19): siRNA sense strand
gugaagaguggauuuguac

SEQ ID NO: 1045597 - RNA, 19 nt, Homo sapiens
  misc_RNA (1)...(19): siRNA sense strand
agaccugacaagagacaua

SEQ ID NO: 1045598 - RNA, 19 nt, Homo sapiens
  misc_RNA (1)...(19): siRNA sense strand
ucuggugggucacaagugu

SEQ ID NO: 1045599 - RNA, 19 nt, Homo sapiens
  misc_RNA (1)...(19): siRNA sense strand
gucaagagagguucagauc

SEQ ID NO: 1045600 - RNA, 19 nt, Homo sapiens
  misc_RNA (1)...(19): siRNA sense strand
ccugacaagagacauauau

SEQ ID NO: 1045601 - RNA, 19 nt, Homo sapiens
  misc_RNA (1)...(19): siRNA sense strand
gaccugacaagagacauau

SEQ ID NO: 1045602 - RNA, 19 nt, Homo sapiens
  misc_RNA (1)...(19): siRNA sense strand
gguuagaagagaccaaagu

SEQ ID NO: 1045603 - RNA, 19 nt, Homo sapiens
  misc_RNA (1)...(19): siRNA sense strand
gaaacgucagcccgagaug

SEQ ID NO: 1045604 - RNA, 19 nt, Homo sapiens
  misc_RNA (1)...(19): siRNA sense strand
gcaugaaguacauugaaac

SEQ ID NO: 1045605 - RNA, 19 nt, Homo sapiens
  misc_RNA (1)...(19): siRNA sense strand
ggucaagagagguucagau

SEQ ID NO: 1045606 - RNA, 19 nt, Homo sapiens
  misc_RNA (1)...(19): siRNA sense strand
gcuuugcccagguuucuga

SEQ ID NO: 1045607 - RNA, 19 nt, Homo sapiens
  misc_RNA (1)...(19): siRNA sense strand
uggagaaagccuucacaga

SEQ ID NO: 1045608 - RNA, 19 nt, Homo sapiens
  misc_RNA (1)...(19): siRNA sense strand
cggcaugaaguacauugaa

SEQ ID NO: 1045609 - RNA, 19 nt, Homo sapiens
  misc_RNA (1)...(19): siRNA sense strand
caaaucagagaggagaugu

SEQ ID NO: 1045610 - RNA, 19 nt, Homo sapiens
  misc_RNA (1)...(19): siRNA sense strand
gaagagguugucaaaucag

SEQ ID NO: 1045611 - RNA, 19 nt, Homo sapiens
  misc_RNA (1)...(19): siRNA sense strand
cccgagaugccauuaaugu

SEQ ID NO: 1045612 - RNA, 19 nt, Homo sapiens
  misc_RNA (1)...(19): siRNA sense strand
cgcagguccuuccagaaug

SEQ ID NO: 1045613 - RNA, 19 nt, Homo sapiens
  misc_RNA (1)...(19): siRNA sense strand
uaccaguuccggcucauug

SEQ ID NO: 1045614 - RNA, 19 nt, Homo sapiens
  misc_RNA (1)...(19): siRNA sense strand
guggagaucgagccaggaa

SEQ ID NO: 1045615 - RNA, 19 nt, Homo sapiens
  misc_RNA (1)...(19): siRNA sense strand
gaaguucucugaaauguuc

SEQ ID NO: 1045616 - RNA, 19 nt, Homo sapiens
  misc_RNA (1)...(19): siRNA sense strand
ugaaagagcugccuucuca

SEQ ID NO: 1045617 - RNA, 19 nt, Homo sapiens
  misc_RNA (1)...(19): siRNA sense strand
ggacaaagcgagcucagaa

SEQ ID NO: 1045618 - RNA, 19 nt, Homo sapiens
  misc_RNA (1)...(19): siRNA sense strand
agagcugccuucucaguua

SEQ ID NO: 1045619 - RNA, 19 nt, Homo sapiens
  misc_RNA (1)...(19): siRNA sense strand
gcccugaaguucucugaaa

SEQ ID NO: 1045620 - RNA, 19 nt, Homo sapiens
  misc_RNA (1)...(19): siRNA sense strand
ggacgacgcugagcugaag

SEQ ID NO: 1045621 - RNA, 19 nt, Homo sapiens
  misc_RNA (1)...(19): siRNA sense strand
ggagauugguaucaacuag

SEQ ID NO: 1045622 - RNA, 19 nt, Homo sapiens
  misc_RNA (1)...(19): siRNA sense strand
ccaagccacuccuguccua

SEQ ID NO: 1045623 - RNA, 19 nt, Homo sapiens
  misc_RNA (1)...(19): siRNA sense strand
gaaaugcugcgccgaguuc

SEQ ID NO: 1045624 - RNA, 19 nt, Homo sapiens
  misc_RNA (1)...(19): siRNA sense strand
cagcuacgaugacgacaug

SEQ ID NO: 1045625 - RNA, 19 nt, Homo sapiens
  misc_RNA (1)...(19): siRNA sense strand
uggagaacaucgacaagaa

SEQ ID NO: 1045626 - RNA, 19 nt, Homo sapiens
  misc_RNA (1)...(19): siRNA sense strand
gcuccacuauggguaauuu

SEQ ID NO: 1045627 - RNA, 19 nt, Homo sapiens
  misc_RNA (1)...(19): siRNA sense strand
cuaacgggcucgccaugaa

SEQ ID NO: 1045628 - RNA, 19 nt, Homo sapiens
  misc_RNA (1)...(19): siRNA sense strand
gauaacaaggagauuggua

SEQ ID NO: 1045629 - RNA, 19 nt, Homo sapiens
  misc_RNA (1)...(19): siRNA sense strand
gagcugccuucucaguuau

SEQ ID NO: 1045630 - RNA, 19 nt, Homo sapiens
  misc_RNA (1)...(19): siRNA sense strand
gcgccgaguucuucaagug

SEQ ID NO: 1045631 - RNA, 19 nt, Homo sapiens
  misc_RNA (1)...(19): siRNA sense strand
acaaggagauugguaucaa

SEQ ID NO: 1045632 - RNA, 19 nt, Homo sapiens
  misc_RNA (1)...(19): siRNA sense strand
gagaacaucgacaagaaga

SEQ ID NO: 1045633 - RNA, 19 nt, Homo sapiens
  misc_RNA (1)...(19): siRNA sense strand
gcaguucaaggcccaguuu

SEQ ID NO: 1045634 - RNA, 19 nt, Homo sapiens
  misc_RNA (1)...(19): siRNA sense strand
caggaaaucccgcucaaga

SEQ ID NO: 1045635 - RNA, 19 nt, Homo sapiens
  misc_RNA (1)...(19): siRNA sense strand
gcaagagcgcguuggaaau

SEQ ID NO: 1045636 - RNA, 19 nt, Homo sapiens
  misc_RNA (1)...(19): siRNA sense strand
cgagggugcuccacuaugg

SEQ ID NO: 1045637 - RNA, 19 nt, Homo sapiens
  misc_RNA (1)...(19): siRNA sense strand
gagaaccagaugaagauga

SEQ ID NO: 1045638 - RNA, 19 nt, Homo sapiens
  misc_RNA (1)...(19): siRNA sense strand
gaacgucgaccccaguuuu

SEQ ID NO: 1045639 - RNA, 19 nt, Homo sapiens
  misc_RNA (1)...(19): siRNA sense strand
ccacuauggguaauuuaaa

SEQ ID NO: 1045640 - RNA, 19 nt, Homo sapiens
  misc_RNA (1)...(19): siRNA sense strand
gaggauaacaaggagauug

SEQ ID NO: 1045641 - RNA, 19 nt, Homo sapiens
  misc_RNA (1)...(19): siRNA sense strand
gaaccgcuucuccaccaaa

SEQ ID NO: 1045642 - RNA, 19 nt, Homo sapiens
  misc_RNA (1)...(19): siRNA sense strand
caagagcgcguuggaaauc

SEQ ID NO: 1045643 - RNA, 19 nt, Homo sapiens
  misc_RNA (1)...(19): siRNA sense strand
cugcuagacucgaugcaaa

SEQ ID NO: 1045644 - RNA, 19 nt, Homo sapiens
  misc_RNA (1)...(19): siRNA sense strand
ucggucaucuccagcauug

SEQ ID NO: 1045645 - RNA, 19 nt, Homo sapiens
  misc_RNA (1)...(19): siRNA sense strand
gacaaagcgagcucagaaa

SEQ ID NO: 1045646 - RNA, 19 nt, Homo sapiens
  misc_RNA (1)...(19): siRNA sense strand
agaaccagaugaagaugau

SEQ ID NO: 1045647 - RNA, 19 nt, Homo sapiens
  misc_RNA (1)...(19): siRNA sense strand
ccgaguaccuggacaacgu

SEQ ID NO: 1045648 - RNA, 19 nt, Homo sapiens
  misc_RNA (1)...(19): siRNA sense strand
gcacuuacugacacacaga

SEQ ID NO: 1045649 - RNA, 19 nt, Homo sapiens
  misc_RNA (1)...(19): siRNA sense strand
ccagugggauggacaaagc

SEQ ID NO: 1045650 - RNA, 19 nt, Homo sapiens
  misc_RNA (1)...(19): siRNA sense strand
ggagaacaucgacaagaag

SEQ ID NO: 1045651 - RNA, 19 nt, Homo sapiens
  misc_RNA (1)...(19): siRNA sense strand
gaccagcgugugcgagaaa

SEQ ID NO: 1045652 - RNA, 19 nt, Homo sapiens
  misc_RNA (1)...(19): siRNA sense strand
caaggagauugguaucaac

SEQ ID NO: 1045653 - RNA, 19 nt, Homo sapiens
  misc_RNA (1)...(19): siRNA sense strand
caaagcgagcucagaaaca

SEQ ID NO: 1045654 - RNA, 19 nt, Homo sapiens
  misc_RNA (1)...(19): siRNA sense strand
ugacacacagauugaaaga

SEQ ID NO: 1045655 - RNA, 19 nt, Homo sapiens
  misc_RNA (1)...(19): siRNA sense strand
uuacugacacacagauuga

SEQ ID NO: 1045656 - RNA, 19 nt, Homo sapiens
  misc_RNA (1)...(19): siRNA sense strand
aaagcgagcucagaaacag

SEQ ID NO: 1045657 - RNA, 19 nt, Homo sapiens
  misc_RNA (1)...(19): siRNA sense strand
ccacuaagggcaaccucaa

SEQ ID NO: 1045658 - RNA, 19 nt, Homo sapiens
  misc_RNA (1)...(19): siRNA sense strand
gcugccuucucaguuauuu

SEQ ID NO: 1045659 - RNA, 19 nt, Homo sapiens
  misc_RNA (1)...(19): siRNA sense strand
ggaaccgcuucuccaccaa

SEQ ID NO: 1045660 - RNA, 19 nt, Homo sapiens
  misc_RNA (1)...(19): siRNA sense strand
ugcaagagcgcguuggaaa

SEQ ID NO: 1045661 - RNA, 19 nt, Homo sapiens
  misc_RNA (1)...(19): siRNA sense strand
cggagacccugagcagcua

SEQ ID NO: 1045662 - RNA, 19 nt, Homo sapiens
  misc_RNA (1)...(19): siRNA sense strand
acuccgagcuggccuacga

SEQ ID NO: 1045663 - RNA, 19 nt, Homo sapiens
  misc_RNA (1)...(19): siRNA sense strand
aggcgagggugcuccacua

SEQ ID NO: 1045664 - RNA, 19 nt, Homo sapiens
  misc_RNA (1)...(19): siRNA sense strand
uaacaaggagauugguauc

SEQ ID NO: 1045665 - RNA, 19 nt, Homo sapiens
  misc_RNA (1)...(19): siRNA sense strand
cugaaguucucugaaaugu

SEQ ID NO: 1045666 - RNA, 19 nt, Homo sapiens
  misc_RNA (1)...(19): siRNA sense strand
gugaugcccugaaguucuc

SEQ ID NO: 1045667 - RNA, 19 nt, Homo sapiens
  misc_RNA (1)...(19): siRNA sense strand
gcucuaggucccagccaaa

SEQ ID NO: 1045668 - RNA, 19 nt, Homo sapiens
  misc_RNA (1)...(19): siRNA sense strand
gccagaagaaguucaccaa

SEQ ID NO: 1045669 - RNA, 19 nt, Homo sapiens
  misc_RNA (1)...(19): siRNA sense strand
acaacgagaucuccgucau

SEQ ID NO: 1045670 - RNA, 19 nt, Homo sapiens
  misc_RNA (1)...(19): siRNA sense strand
uguccgcgcucaugaagca

SEQ ID NO: 1045671 - RNA, 19 nt, Homo sapiens
  misc_RNA (1)...(19): siRNA sense strand
cugaaauguuccagaagga

SEQ ID NO: 1045672 - RNA, 19 nt, Homo sapiens
  misc_RNA (1)...(19): siRNA sense strand
ccgaggacccguucuucaa

SEQ ID NO: 1045673 - RNA, 19 nt, Homo sapiens
  misc_RNA (1)...(19): siRNA sense strand
ccagagcgcgcugaagaug

SEQ ID NO: 1045674 - RNA, 19 nt, Homo sapiens
  misc_RNA (1)...(19): siRNA sense strand
caacgagaucuccgucauc

SEQ ID NO: 1045675 - RNA, 19 nt, Homo sapiens
  misc_RNA (1)...(19): siRNA sense strand
gcccacccaucgucagcuu

SEQ ID NO: 1045676 - RNA, 19 nt, Homo sapiens
  misc_RNA (1)...(19): siRNA sense strand
agaggcacaaggagaagua

SEQ ID NO: 1045677 - RNA, 19 nt, Homo sapiens
  misc_RNA (1)...(19): siRNA sense strand
agagcgcgcugaagaugca

SEQ ID NO: 1045678 - RNA, 19 nt, Homo sapiens
  misc_RNA (1)...(19): siRNA sense strand
ugccagagcgcgcugaaga

SEQ ID NO: 1045679 - RNA, 19 nt, Homo sapiens
  misc_RNA (1)...(19): siRNA sense strand
aaacgucggaaaccucgaa

SEQ ID NO: 1045680 - RNA, 19 nt, Homo sapiens
  misc_RNA (1)...(19): siRNA sense strand
ggugaugcccugaaguucu

SEQ ID NO: 1045681 - RNA, 19 nt, Homo sapiens
  misc_RNA (1)...(19): siRNA sense strand
uggagaaccagaugaagau

SEQ ID NO: 1045682 - RNA, 19 nt, Homo sapiens
  misc_RNA (1)...(19): siRNA sense strand
guggagaacaucgacaaga

SEQ ID NO: 1045683 - RNA, 19 nt, Homo sapiens
  misc_RNA (1)...(19): siRNA sense strand
ccaugaagaacaacgagau

SEQ ID NO: 1045684 - RNA, 19 nt, Homo sapiens
  misc_RNA (1)...(19): siRNA sense strand
aaagagcugccuucucagu

SEQ ID NO: 1045685 - RNA, 19 nt, Homo sapiens
  misc_RNA (1)...(19): siRNA sense strand
cagcugaccggccucaagu

SEQ ID NO: 1045686 - RNA, 19 nt, Homo sapiens
  misc_RNA (1)...(19): siRNA sense strand
caccaaaggcaaccugaag

SEQ ID NO: 1045687 - RNA, 19 nt, Homo sapiens
  misc_RNA (1)...(19): siRNA sense strand
gcacccaccaugaucaaaa

SEQ ID NO: 1045688 - RNA, 19 nt, Homo sapiens
  misc_RNA (1)...(19): siRNA sense strand
ggugcuccacuauggguaa

SEQ ID NO: 1045689 - RNA, 19 nt, Homo sapiens
  misc_RNA (1)...(19): siRNA sense strand
ggagaaccagaugaagaug

SEQ ID NO: 1045690 - RNA, 19 nt, Homo sapiens
  misc_RNA (1)...(19): siRNA sense strand
caucgucagcuuggacaaa

SEQ ID NO: 1045691 - RNA, 19 nt, Homo sapiens
  misc_RNA (1)...(19): siRNA sense strand
ccaccaaaggcaaccugaa

SEQ ID NO: 1045692 - RNA, 19 nt, Homo sapiens
  misc_RNA (1)...(19): siRNA sense strand
caaagaagcuccauauuau

SEQ ID NO: 1045693 - RNA, 19 nt, Homo sapiens
  misc_RNA (1)...(19): siRNA sense strand
ccaaagaagcuccauauua

SEQ ID NO: 1045694 - RNA, 19 nt, Homo sapiens
  misc_RNA (1)...(19): siRNA sense strand
ggguggagcugcacguuua

SEQ ID NO: 1045695 - RNA, 19 nt, Homo sapiens
  misc_RNA (1)...(19): siRNA sense strand
gaaaguucauuggccauuu

SEQ ID NO: 1045696 - RNA, 19 nt, Homo sapiens
  misc_RNA (1)...(19): siRNA sense strand
gugguacucugucuugaua

SEQ ID NO: 1045697 - RNA, 19 nt, Homo sapiens
  misc_RNA (1)...(19): siRNA sense strand
ggaccaggcucuccuccuu

SEQ ID NO: 1045698 - RNA, 19 nt, Homo sapiens
  misc_RNA (1)...(19): siRNA sense strand
ggauggugcuuaugaggaa

SEQ ID NO: 1045699 - RNA, 19 nt, Homo sapiens
  misc_RNA (1)...(19): siRNA sense strand
ugacaucagugacaucaug

SEQ ID NO: 1045700 - RNA, 19 nt, Homo sapiens
  misc_RNA (1)...(19): siRNA sense strand
caaagguuguguccuguau

SEQ ID NO: 1045701 - RNA, 19 nt, Homo sapiens
  misc_RNA (1)...(19): siRNA sense strand
ggaagcaagugccaucaag

SEQ ID NO: 1045702 - RNA, 19 nt, Homo sapiens
  misc_RNA (1)...(19): siRNA sense strand
gugacuggcucccucuuaa

SEQ ID NO: 1045703 - RNA, 19 nt, Homo sapiens
  misc_RNA (1)...(19): siRNA sense strand
gcaggcaggcuuuauucua

SEQ ID NO: 1045704 - RNA, 19 nt, Homo sapiens
  misc_RNA (1)...(19): siRNA sense strand
gaggauuacugaagauagu

SEQ ID NO: 1045705 - RNA, 19 nt, Homo sapiens
  misc_RNA (1)...(19): siRNA sense strand
cugauggugucacauguua

SEQ ID NO: 1045706 - RNA, 19 nt, Homo sapiens
  misc_RNA (1)...(19): siRNA sense strand
caggcaggcuuuauucuau

SEQ ID NO: 1045707 - RNA, 19 nt, Homo sapiens
  misc_RNA (1)...(19): siRNA sense strand
gauggagaccuuucugauu

SEQ ID NO: 1045708 - RNA, 19 nt, Homo sapiens
  misc_RNA (1)...(19): siRNA sense strand
gaagcugacugggcccaaa

SEQ ID NO: 1045709 - RNA, 19 nt, Homo sapiens
  misc_RNA (1)...(19): siRNA sense strand
ggaauaagcaaagguguuc

SEQ ID NO: 1045710 - RNA, 19 nt, Homo sapiens
  misc_RNA (1)...(19): siRNA sense strand
gggaaucuauggcuucucu

SEQ ID NO: 1045711 - RNA, 19 nt, Homo sapiens
  misc_RNA (1)...(19): siRNA sense strand
caagugccaucaagguuca

SEQ ID NO: 1045712 - RNA, 19 nt, Homo sapiens
  misc_RNA (1)...(19): siRNA sense strand
ugucacauguuaaagauuc

SEQ ID NO: 1045713 - RNA, 19 nt, Homo sapiens
  misc_RNA (1)...(19): siRNA sense strand
gauggugucacauguuaaa

SEQ ID NO: 1045714 - RNA, 19 nt, Homo sapiens
  misc_RNA (1)...(19): siRNA sense strand
uauggaggauuacugaaga

SEQ ID NO: 1045715 - RNA, 19 nt, Homo sapiens
  misc_RNA (1)...(19): siRNA sense strand
ggugucacauguuaaagau

SEQ ID NO: 1045716 - RNA, 19 nt, Homo sapiens
  misc_RNA (1)...(19): siRNA sense strand
ggcagcaccucaccauguu

SEQ ID NO: 1045717 - RNA, 19 nt, Homo sapiens
  misc_RNA (1)...(19): siRNA sense strand
gcccaaagaagcuccauau

SEQ ID NO: 1045718 - RNA, 19 nt, Homo sapiens
  misc_RNA (1)...(19): siRNA sense strand
guuguguccuguauccuuu

SEQ ID NO: 1045719 - RNA, 19 nt, Homo sapiens
  misc_RNA (1)...(19): siRNA sense strand
ccaagggcaugauacucaa

SEQ ID NO: 1045720 - RNA, 19 nt, Homo sapiens
  misc_RNA (1)...(19): siRNA sense strand
ggcucccucuuaacauuua

SEQ ID NO: 1045721 - RNA, 19 nt, Homo sapiens
  misc_RNA (1)...(19): siRNA sense strand
gaugcaggcaggcuuuauu

SEQ ID NO: 1045722 - RNA, 19 nt, Homo sapiens
  misc_RNA (1)...(19): siRNA sense strand
gaaguggagcagucagaga

SEQ ID NO: 1045723 - RNA, 19 nt, Homo sapiens
  misc_RNA (1)...(19): siRNA sense strand
aggcaggcuuuauucuaua

SEQ ID NO: 1045724 - RNA, 19 nt, Homo sapiens
  misc_RNA (1)...(19): siRNA sense strand
ggaaaguucauuggccauu

SEQ ID NO: 1045725 - RNA, 19 nt, Homo sapiens
  misc_RNA (1)...(19): siRNA sense strand
gcucuccuccuuccaaaga

SEQ ID NO: 1045726 - RNA, 19 nt, Homo sapiens
  misc_RNA (1)...(19): siRNA sense strand
auggagaccuuucugauuc

SEQ ID NO: 1045727 - RNA, 19 nt, Homo sapiens
  misc_RNA (1)...(19): siRNA sense strand
ggcaugauacucaaagguu

SEQ ID NO: 1045728 - RNA, 19 nt, Homo sapiens
  misc_RNA (1)...(19): siRNA sense strand
gaaucuauggcuucucuuc

SEQ ID NO: 1045729 - RNA, 19 nt, Homo sapiens
  misc_RNA (1)...(19): siRNA sense strand
ggcuauuucuuuucucuua

SEQ ID NO: 1045730 - RNA, 19 nt, Homo sapiens
  misc_RNA (1)...(19): siRNA sense strand
acaaguugcuacaggaagu

SEQ ID NO: 1045731 - RNA, 19 nt, Homo sapiens
  misc_RNA (1)...(19): siRNA sense strand
gauagcgggauggugcuua

SEQ ID NO: 1045732 - RNA, 19 nt, Homo sapiens
  misc_RNA (1)...(19): siRNA sense strand
ggaggauuacugaagauag

SEQ ID NO: 1045733 - RNA, 19 nt, Homo sapiens
  misc_RNA (1)...(19): siRNA sense strand
uuuauucucugcucaucuu

SEQ ID NO: 1045734 - RNA, 19 nt, Homo sapiens
  misc_RNA (1)...(19): siRNA sense strand
ggucuccaagggcaugaua

SEQ ID NO: 1045735 - RNA, 19 nt, Homo sapiens
  misc_RNA (1)...(19): siRNA sense strand
ggauuacugaagauaguga

SEQ ID NO: 1045736 - RNA, 19 nt, Homo sapiens
  misc_RNA (1)...(19): siRNA sense strand
ucaaagguuguguccugua

SEQ ID NO: 1045737 - RNA, 19 nt, Homo sapiens
  misc_RNA (1)...(19): siRNA sense strand
gcugaugcaggcaggcuuu

SEQ ID NO: 1045738 - RNA, 19 nt, Homo sapiens
  misc_RNA (1)...(19): siRNA sense strand
cuggcucccucuuaacauu

SEQ ID NO: 1045739 - RNA, 19 nt, Homo sapiens
  misc_RNA (1)...(19): siRNA sense strand
uaauggcuguguggacuuc

SEQ ID NO: 1045740 - RNA, 19 nt, Homo sapiens
  misc_RNA (1)...(19): siRNA sense strand
aaaguucauuggccauuuu

SEQ ID NO: 1045741 - RNA, 19 nt, Homo sapiens
  misc_RNA (1)...(19): siRNA sense strand
gcugauggugucacauguu

SEQ ID NO: 1045742 - RNA, 19 nt, Homo sapiens
  misc_RNA (1)...(19): siRNA sense strand
ggacuucaugagcaagaau

SEQ ID NO: 1045743 - RNA, 19 nt, Homo sapiens
  misc_RNA (1)...(19): siRNA sense strand
ggagaccuuucugauucug

SEQ ID NO: 1045744 - RNA, 19 nt, Homo sapiens
  misc_RNA (1)...(19): siRNA sense strand
gagcugcacguuuauucuc

SEQ ID NO: 1045745 - RNA, 19 nt, Homo sapiens
  misc_RNA (1)...(19): siRNA sense strand
aagaaugugcugccucaga

SEQ ID NO: 1045746 - RNA, 19 nt, Homo sapiens
  misc_RNA (1)...(19): siRNA sense strand
ggcaggcuuuauucuauac

SEQ ID NO: 1045747 - RNA, 19 nt, Homo sapiens
  misc_RNA (1)...(19): siRNA sense strand
uggcagcaccucaccaugu

SEQ ID NO: 1045748 - RNA, 19 nt, Homo sapiens
  misc_RNA (1)...(19): siRNA sense strand
gaugggcuccuggcugaug

SEQ ID NO: 1045749 - RNA, 19 nt, Homo sapiens
  misc_RNA (1)...(19): siRNA sense strand
ggagcugcacguuuauucu

SEQ ID NO: 1045750 - RNA, 19 nt, Homo sapiens
  misc_RNA (1)...(19): siRNA sense strand
cuacaaguugcuacaggaa

SEQ ID NO: 1045751 - RNA, 19 nt, Homo sapiens
  misc_RNA (1)...(19): siRNA sense strand
agaccuuucugauucugau

SEQ ID NO: 1045752 - RNA, 19 nt, Homo sapiens
  misc_RNA (1)...(19): siRNA sense strand
gacuggcucccucuuaaca

SEQ ID NO: 1045753 - RNA, 19 nt, Homo sapiens
  misc_RNA (1)...(19): siRNA sense strand
caggaccccucuacaaguu

SEQ ID NO: 1045754 - RNA, 19 nt, Homo sapiens
  misc_RNA (1)...(19): siRNA sense strand
gguuguguccuguauccuu

SEQ ID NO: 1045755 - RNA, 19 nt, Homo sapiens
  misc_RNA (1)...(19): siRNA sense strand
uccaagggcaugauacuca

SEQ ID NO: 1045756 - RNA, 19 nt, Homo sapiens
  misc_RNA (1)...(19): siRNA sense strand
caagggcaugauacucaaa

SEQ ID NO: 1045757 - RNA, 19 nt, Homo sapiens
  misc_RNA (1)...(19): siRNA sense strand
ucauccuccucacucuuaa

SEQ ID NO: 1045758 - RNA, 19 nt, Homo sapiens
  misc_RNA (1)...(19): siRNA sense strand
gaagugcgcuggagaaauc

SEQ ID NO: 1045759 - RNA, 19 nt, Homo sapiens
  misc_RNA (1)...(19): siRNA sense strand
gauagucucucuggaauaa

SEQ ID NO: 1045760 - RNA, 19 nt, Homo sapiens
  misc_RNA (1)...(19): siRNA sense strand
acacaaagaucaagaguug

SEQ ID NO: 1045761 - RNA, 19 nt, Homo sapiens
  misc_RNA (1)...(19): siRNA sense strand
gcagaugccauucucauua

SEQ ID NO: 1045762 - RNA, 19 nt, Homo sapiens
  misc_RNA (1)...(19): siRNA sense strand
ggagugauauuuaccuuga

SEQ ID NO: 1045763 - RNA, 19 nt, Homo sapiens
  misc_RNA (1)...(19): siRNA sense strand
gaacacaaccucaccuuga

SEQ ID NO: 1045764 - RNA, 19 nt, Homo sapiens
  misc_RNA (1)...(19): siRNA sense strand
caacacuucugaacuauau

SEQ ID NO: 1045765 - RNA, 19 nt, Homo sapiens
  misc_RNA (1)...(19): siRNA sense strand
agacaacacuucugaacua

SEQ ID NO: 1045766 - RNA, 19 nt, Homo sapiens
  misc_RNA (1)...(19): siRNA sense strand
ggacaacacauuucaaaga

SEQ ID NO: 1045767 - RNA, 19 nt, Homo sapiens
  misc_RNA (1)...(19): siRNA sense strand
gacaacacauuucaaagaa

SEQ ID NO: 1045768 - RNA, 19 nt, Homo sapiens
  misc_RNA (1)...(19): siRNA sense strand
guggagagcucuaugaaga

SEQ ID NO: 1045769 - RNA, 19 nt, Homo sapiens
  misc_RNA (1)...(19): siRNA sense strand
caacacauuucaaagaaga

SEQ ID NO: 1045770 - RNA, 19 nt, Homo sapiens
  misc_RNA (1)...(19): siRNA sense strand
gaguugaucucucuaaugu

SEQ ID NO: 1045771 - RNA, 19 nt, Homo sapiens
  misc_RNA (1)...(19): siRNA sense strand
gcagaaauuuagauaagga

SEQ ID NO: 1045772 - RNA, 19 nt, Homo sapiens
  misc_RNA (1)...(19): siRNA sense strand
ugacagagcaacauaguaa

SEQ ID NO: 1045773 - RNA, 19 nt, Homo sapiens
  misc_RNA (1)...(19): siRNA sense strand
ggacaaaucuuagaaacac

SEQ ID NO: 1045774 - RNA, 19 nt, Homo sapiens
  misc_RNA (1)...(19): siRNA sense strand
gaagaguggcuggaacuua

SEQ ID NO: 1045775 - RNA, 19 nt, Homo sapiens
  misc_RNA (1)...(19): siRNA sense strand
ggaauaaguuugcagaaaa

SEQ ID NO: 1045776 - RNA, 19 nt, Homo sapiens
  misc_RNA (1)...(19): siRNA sense strand
cagaugccauucucauuaa

SEQ ID NO: 1045777 - RNA, 19 nt, Homo sapiens
  misc_RNA (1)...(19): siRNA sense strand
guugaucucucuaauguau

SEQ ID NO: 1045778 - RNA, 19 nt, Homo sapiens
  misc_RNA (1)...(19): siRNA sense strand
gacaauggccuuagagcua

SEQ ID NO: 1045779 - RNA, 19 nt, Homo sapiens
  misc_RNA (1)...(19): siRNA sense strand
ucauaaggcugaagggauu

SEQ ID NO: 1045780 - RNA, 19 nt, Homo sapiens
  misc_RNA (1)...(19): siRNA sense strand
gaugguaucauaacuauag

SEQ ID NO: 1045781 - RNA, 19 nt, Homo sapiens
  misc_RNA (1)...(19): siRNA sense strand
ugcaguggcuucuauguuu

SEQ ID NO: 1045782 - RNA, 19 nt, Homo sapiens
  misc_RNA (1)...(19): siRNA sense strand
gagaaauccuuagcuguca

SEQ ID NO: 1045783 - RNA, 19 nt, Homo sapiens
  misc_RNA (1)...(19): siRNA sense strand
caagaucccagucacaauu

SEQ ID NO: 1045784 - RNA, 19 nt, Homo sapiens
  misc_RNA (1)...(19): siRNA sense strand
gaauuagggagugauauuu

SEQ ID NO: 1045785 - RNA, 19 nt, Homo sapiens
  misc_RNA (1)...(19): siRNA sense strand
ggauuguccugaauugguu

SEQ ID NO: 1045786 - RNA, 19 nt, Homo sapiens
  misc_RNA (1)...(19): siRNA sense strand
agacuugguuccagaagaa

SEQ ID NO: 1045787 - RNA, 19 nt, Homo sapiens
  misc_RNA (1)...(19): siRNA sense strand
cagaagaagauguaaagaa

SEQ ID NO: 1045788 - RNA, 19 nt, Homo sapiens
  misc_RNA (1)...(19): siRNA sense strand
uggaauaaguuugcagaaa

SEQ ID NO: 1045789 - RNA, 19 nt, Homo sapiens
  misc_RNA (1)...(19): siRNA sense strand
ccuuagagcuauugagaau

SEQ ID NO: 1045790 - RNA, 19 nt, Homo sapiens
  misc_RNA (1)...(19): siRNA sense strand
gaagaucaaguuuguacau

SEQ ID NO: 1045791 - RNA, 19 nt, Homo sapiens
  misc_RNA (1)...(19): siRNA sense strand
guuuauagcuacugugaca

SEQ ID NO: 1045792 - RNA, 19 nt, Homo sapiens
  misc_RNA (1)...(19): siRNA sense strand
agacaaaucacaacaagug

SEQ ID NO: 1045793 - RNA, 19 nt, Homo sapiens
  misc_RNA (1)...(19): siRNA sense strand
aaagacaaaucacaacaag

SEQ ID NO: 1045794 - RNA, 19 nt, Homo sapiens
  misc_RNA (1)...(19): siRNA sense strand
ggggaaauuugauuacaua

SEQ ID NO: 1045795 - RNA, 19 nt, Homo sapiens
  misc_RNA (1)...(19): siRNA sense strand
uaaauggacuaggacaaau

SEQ ID NO: 1045796 - RNA, 19 nt, Homo sapiens
  misc_RNA (1)...(19): siRNA sense strand
gaaaugcaaaggaagaaca

SEQ ID NO: 1045797 - RNA, 19 nt, Homo sapiens
  misc_RNA (1)...(19): siRNA sense strand
gaaaccugauggccuuauc

SEQ ID NO: 1045798 - RNA, 19 nt, Homo sapiens
  misc_RNA (1)...(19): siRNA sense strand
gaucuucaugccuuugaua

SEQ ID NO: 1045799 - RNA, 19 nt, Homo sapiens
  misc_RNA (1)...(19): siRNA sense strand
gaugccauucucauuaaua

SEQ ID NO: 1045800 - RNA, 19 nt, Homo sapiens
  misc_RNA (1)...(19): siRNA sense strand
uggcagaaauuuagauaag

SEQ ID NO: 1045801 - RNA, 19 nt, Homo sapiens
  misc_RNA (1)...(19): siRNA sense strand
cagaaucuccugugggaaa

SEQ ID NO: 1045802 - RNA, 19 nt, Homo sapiens
  misc_RNA (1)...(19): siRNA sense strand
uuggguugaugcugaauua

SEQ ID NO: 1045803 - RNA, 19 nt, Homo sapiens
  misc_RNA (1)...(19): siRNA sense strand
ugagagaacaaaucgauug

SEQ ID NO: 1045804 - RNA, 19 nt, Homo sapiens
  misc_RNA (1)...(19): siRNA sense strand
caaagacaaaucacaacaa

SEQ ID NO: 1045805 - RNA, 19 nt, Homo sapiens
  misc_RNA (1)...(19): siRNA sense strand
ugaauuagggagugauauu

SEQ ID NO: 1045806 - RNA, 19 nt, Homo sapiens
  misc_RNA (1)...(19): siRNA sense strand
gacaacacuucugaacuau

SEQ ID NO: 1045807 - RNA, 19 nt, Homo sapiens
  misc_RNA (1)...(19): siRNA sense strand
ggacuaggacaaaucuuag

SEQ ID NO: 1045808 - RNA, 19 nt, Homo sapiens
  misc_RNA (1)...(19): siRNA sense strand
aagaguggcuggaacuuag

SEQ ID NO: 1045809 - RNA, 19 nt, Homo sapiens
  misc_RNA (1)...(19): siRNA sense strand
acauuuagcagaagagaaa

SEQ ID NO: 1045810 - RNA, 19 nt, Homo sapiens
  misc_RNA (1)...(19): siRNA sense strand
gaguagcggucauuuuaaa

SEQ ID NO: 1045811 - RNA, 19 nt, Homo sapiens
  misc_RNA (1)...(19): siRNA sense strand
ggaugacacugagagaaca

SEQ ID NO: 1045812 - RNA, 19 nt, Homo sapiens
  misc_RNA (1)...(19): siRNA sense strand
uccaugagcucuaugaucu

SEQ ID NO: 1045813 - RNA, 19 nt, Homo sapiens
  misc_RNA (1)...(19): siRNA sense strand
ugagaaacaaggacaauca

SEQ ID NO: 1045814 - RNA, 19 nt, Homo sapiens
  misc_RNA (1)...(19): siRNA sense strand
gcaaagcgaggaggaggaa

SEQ ID NO: 1045815 - RNA, 19 nt, Homo sapiens
  misc_RNA (1)...(19): siRNA sense strand
uggacuaggacaaaucuua

SEQ ID NO: 1045816 - RNA, 19 nt, Homo sapiens
  misc_RNA (1)...(19): siRNA sense strand
gauuacauacuguuagaga

SEQ ID NO: 1045817 - RNA, 19 nt, Homo sapiens
  misc_RNA (1)...(19): siRNA sense strand
gaagcuacuaggcaaguug

SEQ ID NO: 1045818 - RNA, 19 nt, Homo sapiens
  misc_RNA (1)...(19): siRNA sense strand
gcuggaaggaugacacuga

SEQ ID NO: 1045819 - RNA, 19 nt, Homo sapiens
  misc_RNA (1)...(19): siRNA sense strand
gaaguaccaggaaaugcaa

SEQ ID NO: 1045820 - RNA, 19 nt, Homo sapiens
  misc_RNA (1)...(19): siRNA sense strand
acaauggccuuagagcuau

SEQ ID NO: 1045821 - RNA, 19 nt, Homo sapiens
  misc_RNA (1)...(19): siRNA sense strand
gaaggaugacacugagaga

SEQ ID NO: 1045822 - RNA, 19 nt, Homo sapiens
  misc_RNA (1)...(19): siRNA sense strand
caggugcaguggcuucuau

SEQ ID NO: 1045823 - RNA, 19 nt, Homo sapiens
  misc_RNA (1)...(19): siRNA sense strand
guggacaacacauuucaaa

SEQ ID NO: 1045824 - RNA, 19 nt, Homo sapiens
  misc_RNA (1)...(19): siRNA sense strand
gaaaagaaugugagaaaca

SEQ ID NO: 1045825 - RNA, 19 nt, Homo sapiens
  misc_RNA (1)...(19): siRNA sense strand
ucauaacuauaguggauuc

SEQ ID NO: 1045826 - RNA, 19 nt, Homo sapiens
  misc_RNA (1)...(19): siRNA sense strand
gaaacacaaagaucaagag

SEQ ID NO: 1045827 - RNA, 19 nt, Homo sapiens
  misc_RNA (1)...(19): siRNA sense strand
ggccuuagagcuauugaga

SEQ ID NO: 1045828 - RNA, 19 nt, Homo sapiens
  misc_RNA (1)...(19): siRNA sense strand
gcgacaauuagauccauaa

SEQ ID NO: 1045829 - RNA, 19 nt, Homo sapiens
  misc_RNA (1)...(19): siRNA sense strand
uaagagcgacaauuagauc

SEQ ID NO: 1045830 - RNA, 19 nt, Homo sapiens
  misc_RNA (1)...(19): siRNA sense strand
aagaguagcggucauuuua

SEQ ID NO: 1045831 - RNA, 19 nt, Homo sapiens
  misc_RNA (1)...(19): siRNA sense strand
gcaguggacaacacauuuc

SEQ ID NO: 1045832 - RNA, 19 nt, Homo sapiens
  misc_RNA (1)...(19): siRNA sense strand
gggaaaagaaugugagaaa

SEQ ID NO: 1045833 - RNA, 19 nt, Homo sapiens
  misc_RNA (1)...(19): siRNA sense strand
cauuugaaguaccaggaaa

SEQ ID NO: 1045834 - RNA, 19 nt, Homo sapiens
  misc_RNA (1)...(19): siRNA sense strand
gcugaauuagggagugaua

SEQ ID NO: 1045835 - RNA, 19 nt, Homo sapiens
  misc_RNA (1)...(19): siRNA sense strand
cagacuugguuccagaaga

SEQ ID NO: 1045836 - RNA, 19 nt, Homo sapiens
  misc_RNA (1)...(19): siRNA sense strand
gcaaaagaaggggaaauuu

SEQ ID NO: 1045837 - RNA, 19 nt, Homo sapiens
  misc_RNA (1)...(19): siRNA sense strand
aauuaucaccggguauuua

SEQ ID NO: 1045838 - RNA, 19 nt, Homo sapiens
  misc_RNA (1)...(19): siRNA sense strand
gaaaagcaguggacaacac

SEQ ID NO: 1045839 - RNA, 19 nt, Homo sapiens
  misc_RNA (1)...(19): siRNA sense strand
caaccucaccuugaucaga

SEQ ID NO: 1045840 - RNA, 19 nt, Homo sapiens
  misc_RNA (1)...(19): siRNA sense strand
gagcgacaauuagauccau

SEQ ID NO: 1045841 - RNA, 19 nt, Homo sapiens
  misc_RNA (1)...(19): siRNA sense strand
caaguugcuuuggcagaug

SEQ ID NO: 1045842 - RNA, 19 nt, Homo sapiens
  misc_RNA (1)...(19): siRNA sense strand
gcagaagagaaaccugaug

SEQ ID NO: 1045843 - RNA, 19 nt, Homo sapiens
  misc_RNA (1)...(19): siRNA sense strand
gcaguggcuucuauguuuu

SEQ ID NO: 1045844 - RNA, 19 nt, Homo sapiens
  misc_RNA (1)...(19): siRNA sense strand
aagaucccagucacaauua

SEQ ID NO: 1045845 - RNA, 19 nt, Homo sapiens
  misc_RNA (1)...(19): siRNA sense strand
cuugaucagaguauuguua

SEQ ID NO: 1045846 - RNA, 19 nt, Homo sapiens
  misc_RNA (1)...(19): siRNA sense strand
auaaauggacuaggacaaa

SEQ ID NO: 1045847 - RNA, 19 nt, Homo sapiens
  misc_RNA (1)...(19): siRNA sense strand
guuagagaccacuggauug

SEQ ID NO: 1045848 - RNA, 19 nt, Homo sapiens
  misc_RNA (1)...(19): siRNA sense strand
caggaaaugcaaaggaaga

SEQ ID NO: 1045849 - RNA, 19 nt, Homo sapiens
  misc_RNA (1)...(19): siRNA sense strand
uaggacaaaucuuagaaac

SEQ ID NO: 1045850 - RNA, 19 nt, Homo sapiens
  misc_RNA (1)...(19): siRNA sense strand
ggaagugcgcuggagaaau

SEQ ID NO: 1045851 - RNA, 19 nt, Homo sapiens
  misc_RNA (1)...(19): siRNA sense strand
gccaagaucccagucacaa

SEQ ID NO: 1045852 - RNA, 19 nt, Homo sapiens
  misc_RNA (1)...(19): siRNA sense strand
ucaaagacaaaucacaaca

SEQ ID NO: 1045853 - RNA, 19 nt, Homo sapiens
  misc_RNA (1)...(19): siRNA sense strand
ugaaguaccaggaaaugca

SEQ ID NO: 1045854 - RNA, 19 nt, Homo sapiens
  misc_RNA (1)...(19): siRNA sense strand
cgacaauuagauccauaaa

SEQ ID NO: 1045855 - RNA, 19 nt, Homo sapiens
  misc_RNA (1)...(19): siRNA sense strand
gacagagcaacauaguaaa

SEQ ID NO: 1045856 - RNA, 19 nt, Homo sapiens
  misc_RNA (1)...(19): siRNA sense strand
accaggaaaugcaaaggaa

SEQ ID NO: 1045857 - RNA, 19 nt, Homo sapiens
  misc_RNA (1)...(19): siRNA sense strand
gacaaaucuuagaaacaca

SEQ ID NO: 1045858 - RNA, 19 nt, Homo sapiens
  misc_RNA (1)...(19): siRNA sense strand
gcacacuucuggaccacua

SEQ ID NO: 1045859 - RNA, 19 nt, Homo sapiens
  misc_RNA (1)...(19): siRNA sense strand
cuacgaugcuggagauuaa

SEQ ID NO: 1045860 - RNA, 19 nt, Homo sapiens
  misc_RNA (1)...(19): siRNA sense strand
gaagagcauccuaccauuu

SEQ ID NO: 1045861 - RNA, 19 nt, Homo sapiens
  misc_RNA (1)...(19): siRNA sense strand
gaaagcaagccacaaacaa

SEQ ID NO: 1045862 - RNA, 19 nt, Homo sapiens
  misc_RNA (1)...(19): siRNA sense strand
ucucaguccuggucaauaa

SEQ ID NO: 1045863 - RNA, 19 nt, Homo sapiens
  misc_RNA (1)...(19): siRNA sense strand
gcaaggagguuggcgaagu

SEQ ID NO: 1045864 - RNA, 19 nt, Homo sapiens
  misc_RNA (1)...(19): siRNA sense strand
gguuugcccuuaucuugua

SEQ ID NO: 1045865 - RNA, 19 nt, Homo sapiens
  misc_RNA (1)...(19): siRNA sense strand
gaacuaaaggcugcugaaa

SEQ ID NO: 1045866 - RNA, 19 nt, Homo sapiens
  misc_RNA (1)...(19): siRNA sense strand
aaagaaagcaagccacaaa

SEQ ID NO: 1045867 - RNA, 19 nt, Homo sapiens
  misc_RNA (1)...(19): siRNA sense strand
ugaaggccauccucacuga

SEQ ID NO: 1045868 - RNA, 19 nt, Homo sapiens
  misc_RNA (1)...(19): siRNA sense strand
ugaagagcauccuaccauu

SEQ ID NO: 1045869 - RNA, 19 nt, Homo sapiens
  misc_RNA (1)...(19): siRNA sense strand
ggcaucaccuucuggaaug

SEQ ID NO: 1045870 - RNA, 19 nt, Homo sapiens
  misc_RNA (1)...(19): siRNA sense strand
gaauggugaggaagaaauu

SEQ ID NO: 1045871 - RNA, 19 nt, Homo sapiens
  misc_RNA (1)...(19): siRNA sense strand
gcaguugugugcauguauc

SEQ ID NO: 1045872 - RNA, 19 nt, Homo sapiens
  misc_RNA (1)...(19): siRNA sense strand
gccaguaaauuuggaguug

SEQ ID NO: 1045873 - RNA, 19 nt, Homo sapiens
  misc_RNA (1)...(19): siRNA sense strand
cacuguaacuugcagguuu

SEQ ID NO: 1045874 - RNA, 19 nt, Homo sapiens
  misc_RNA (1)...(19): siRNA sense strand
aagcaagccacaaacaaua

SEQ ID NO: 1045875 - RNA, 19 nt, Homo sapiens
  misc_RNA (1)...(19): siRNA sense strand
ggaagagggagaacgucua

SEQ ID NO: 1045876 - RNA, 19 nt, Homo sapiens
  misc_RNA (1)...(19): siRNA sense strand
guucaguacugccggaguu

SEQ ID NO: 1045877 - RNA, 19 nt, Homo sapiens
  misc_RNA (1)...(19): siRNA sense strand
caauugccaugcacacuuc

SEQ ID NO: 1045878 - RNA, 19 nt, Homo sapiens
  misc_RNA (1)...(19): siRNA sense strand
gagauuaaucauggucaua

SEQ ID NO: 1045879 - RNA, 19 nt, Homo sapiens
  misc_RNA (1)...(19): siRNA sense strand
caaggagguuggcgaaguc

SEQ ID NO: 1045880 - RNA, 19 nt, Homo sapiens
  misc_RNA (1)...(19): siRNA sense strand
ggaauggugaggaagaaau

SEQ ID NO: 1045881 - RNA, 19 nt, Homo sapiens
  misc_RNA (1)...(19): siRNA sense strand
ucugaagccugauuacugu

SEQ ID NO: 1045882 - RNA, 19 nt, Homo sapiens
  misc_RNA (1)...(19): siRNA sense strand
uguagacacuggcauguuc

SEQ ID NO: 1045883 - RNA, 19 nt, Homo sapiens
  misc_RNA (1)...(19): siRNA sense strand
ggagauuaaucauggucau

SEQ ID NO: 1045884 - RNA, 19 nt, Homo sapiens
  misc_RNA (1)...(19): siRNA sense strand
ggccaggugugccucauca

SEQ ID NO: 1045885 - RNA, 19 nt, Homo sapiens
  misc_RNA (1)...(19): siRNA sense strand
gggcaucaccuucuggaau

SEQ ID NO: 1045886 - RNA, 19 nt, Homo sapiens
  misc_RNA (1)...(19): siRNA sense strand
gugcauguaucgguuccua

SEQ ID NO: 1045887 - RNA, 19 nt, Homo sapiens
  misc_RNA (1)...(19): siRNA sense strand
gagcggacaaguguaugua

SEQ ID NO: 1045888 - RNA, 19 nt, Homo sapiens
  misc_RNA (1)...(19): siRNA sense strand
gaagagggagaacgucuac

SEQ ID NO: 1045889 - RNA, 19 nt, Homo sapiens
  misc_RNA (1)...(19): siRNA sense strand
gaaucaggaaagaaauuga

SEQ ID NO: 1045890 - RNA, 19 nt, Homo sapiens
  misc_RNA (1)...(19): siRNA sense strand
cugccggaguugaggauua

SEQ ID NO: 1045891 - RNA, 19 nt, Homo sapiens
  misc_RNA (1)...(19): siRNA sense strand
guucagaggcugccgaauc

SEQ ID NO: 1045892 - RNA, 19 nt, Homo sapiens
  misc_RNA (1)...(19): siRNA sense strand
ucauguacaucgugaccuu

SEQ ID NO: 1045893 - RNA, 19 nt, Homo sapiens
  misc_RNA (1)...(19): siRNA sense strand
caguaaauuuggaguugug

SEQ ID NO: 1045894 - RNA, 19 nt, Homo sapiens
  misc_RNA (1)...(19): siRNA sense strand
aaagcaagccacaaacaau

SEQ ID NO: 1045895 - RNA, 19 nt, Homo sapiens
  misc_RNA (1)...(19): siRNA sense strand
gagcauccuaccauuugaa

SEQ ID NO: 1045896 - RNA, 19 nt, Homo sapiens
  misc_RNA (1)...(19): siRNA sense strand
cacaaacaauaaugaagca

SEQ ID NO: 1045897 - RNA, 19 nt, Homo sapiens
  misc_RNA (1)...(19): siRNA sense strand
gcaagccacaaacaauaau

SEQ ID NO: 1045898 - RNA, 19 nt, Homo sapiens
  misc_RNA (1)...(19): siRNA sense strand
gaaauucugccccacugua

SEQ ID NO: 1045899 - RNA, 19 nt, Homo sapiens
  misc_RNA (1)...(19): siRNA sense strand
aagagcauccuaccauuug

SEQ ID NO: 1045900 - RNA, 19 nt, Homo sapiens
  misc_RNA (1)...(19): siRNA sense strand
ccugagccaugaacuaaag

SEQ ID NO: 1045901 - RNA, 19 nt, Homo sapiens
  misc_RNA (1)...(19): siRNA sense strand
ggagguuggcgaagucuca

SEQ ID NO: 1045902 - RNA, 19 nt, Homo sapiens
  misc_RNA (1)...(19): siRNA sense strand
uucagaggcugccgaauca

SEQ ID NO: 1045903 - RNA, 19 nt, Homo sapiens
  misc_RNA (1)...(19): siRNA sense strand
ccuaggagcggacaagugu

SEQ ID NO: 1045904 - RNA, 19 nt, Homo sapiens
  misc_RNA (1)...(19): siRNA sense strand
cgaaucaggaaagaaauug

SEQ ID NO: 1045905 - RNA, 19 nt, Homo sapiens
  misc_RNA (1)...(19): siRNA sense strand
gcauggugcgccacaucua

SEQ ID NO: 1045906 - RNA, 19 nt, Homo sapiens
  misc_RNA (1)...(19): siRNA sense strand
guacaucgugaccuucaug

SEQ ID NO: 1045907 - RNA, 19 nt, Homo sapiens
  misc_RNA (1)...(19): siRNA sense strand
ccaguaaauuuggaguugu

SEQ ID NO: 1045908 - RNA, 19 nt, Homo sapiens
  misc_RNA (1)...(19): siRNA sense strand
ccuacgaugcuggagauua

SEQ ID NO: 1045909 - RNA, 19 nt, Homo sapiens
  misc_RNA (1)...(19): siRNA sense strand
aaucauggucauauuguga

SEQ ID NO: 1045910 - RNA, 19 nt, Homo sapiens
  misc_RNA (1)...(19): siRNA sense strand
ucaauugccaugcacacuu

SEQ ID NO: 1045911 - RNA, 19 nt, Homo sapiens
  misc_RNA (1)...(19): siRNA sense strand
caaagaaagcaagccacaa

SEQ ID NO: 1045912 - RNA, 19 nt, Homo sapiens
  misc_RNA (1)...(19): siRNA sense strand
aagcaguugugugcaugua

SEQ ID NO: 1045913 - RNA, 19 nt, Homo sapiens
  misc_RNA (1)...(19): siRNA sense strand
ucacugaccagcccaugau

SEQ ID NO: 1045914 - RNA, 19 nt, Homo sapiens
  misc_RNA (1)...(19): siRNA sense strand
aauuuggaguuguggguuu

SEQ ID NO: 1045915 - RNA, 19 nt, Homo sapiens
  misc_RNA (1)...(19): siRNA sense strand
gcugcaagcugggaauggu

SEQ ID NO: 1045916 - RNA, 19 nt, Homo sapiens
  misc_RNA (1)...(19): siRNA sense strand
uaaucauggucauauugug

SEQ ID NO: 1045917 - RNA, 19 nt, Homo sapiens
  misc_RNA (1)...(19): siRNA sense strand
cuucuggaauguccugaug

SEQ ID NO: 1045918 - RNA, 19 nt, Homo sapiens
  misc_RNA (1)...(19): siRNA sense strand
ccgaaucaggaaagaaauu

SEQ ID NO: 1045919 - RNA, 19 nt, Homo sapiens
  misc_RNA (1)...(19): siRNA sense strand
augaaucccugagccauga

SEQ ID NO: 1045920 - RNA, 19 nt, Homo sapiens
  misc_RNA (1)...(19): siRNA sense strand
gacaucaacacgcaaagca

SEQ ID NO: 1045921 - RNA, 19 nt, Homo sapiens
  misc_RNA (1)...(19): siRNA sense strand
ggagcggacaaguguaugu

SEQ ID NO: 1045922 - RNA, 19 nt, Homo sapiens
  misc_RNA (1)...(19): siRNA sense strand
uccuugggauuguucagua

SEQ ID NO: 1045923 - RNA, 19 nt, Homo sapiens
  misc_RNA (1)...(19): siRNA sense strand
agaaagcaagccacaaaca

SEQ ID NO: 1045924 - RNA, 19 nt, Homo sapiens
  misc_RNA (1)...(19): siRNA sense strand
ugccgaaucaggaaagaaa

SEQ ID NO: 1045925 - RNA, 19 nt, Homo sapiens
  misc_RNA (1)...(19): siRNA sense strand
cauccuaccauuugaagca

SEQ ID NO: 1045926 - RNA, 19 nt, Homo sapiens
  misc_RNA (1)...(19): siRNA sense strand
agagcauccuaccauuuga

SEQ ID NO: 1045927 - RNA, 19 nt, Homo sapiens
  misc_RNA (1)...(19): siRNA sense strand
gcaucaccuucuggaaugu

SEQ ID NO: 1045928 - RNA, 19 nt, Homo sapiens
  misc_RNA (1)...(19): siRNA sense strand
uaggagcggacaaguguau

SEQ ID NO: 1045929 - RNA, 19 nt, Homo sapiens
  misc_RNA (1)...(19): siRNA sense strand
gugugaagcaggccaugaa

SEQ ID NO: 1045930 - RNA, 19 nt, Homo sapiens
  misc_RNA (1)...(19): siRNA sense strand
cuaccugacggcugaaaga

SEQ ID NO: 1045931 - RNA, 19 nt, Homo sapiens
  misc_RNA (1)...(19): siRNA sense strand
ucccugagccaugaacuaa

SEQ ID NO: 1045932 - RNA, 19 nt, Homo sapiens
  misc_RNA (1)...(19): siRNA sense strand
gaagcaguugugugcaugu

SEQ ID NO: 1045933 - RNA, 19 nt, Homo sapiens
  misc_RNA (1)...(19): siRNA sense strand
ccuaccauuugaagcaguu

SEQ ID NO: 1045934 - RNA, 19 nt, Homo sapiens
  misc_RNA (1)...(19): siRNA sense strand
acuaaaggcugcugaaaag

SEQ ID NO: 1045935 - RNA, 19 nt, Homo sapiens
  misc_RNA (1)...(19): siRNA sense strand
ugggaauggugaggaagaa

SEQ ID NO: 1045936 - RNA, 19 nt, Homo sapiens
  misc_RNA (1)...(19): siRNA sense strand
agcaagccacaaacaauaa

SEQ ID NO: 1045937 - RNA, 19 nt, Homo sapiens
  misc_RNA (1)...(19): siRNA sense strand
caagccacaaacaauaaug

SEQ ID NO: 1045938 - RNA, 19 nt, Homo sapiens
  misc_RNA (1)...(19): siRNA sense strand
gaacucgcguuuccacuuc

SEQ ID NO: 1045939 - RNA, 19 nt, Homo sapiens
  misc_RNA (1)...(19): siRNA sense strand
uaaaucauguccugccaaa

SEQ ID NO: 1045940 - RNA, 19 nt, Homo sapiens
  misc_RNA (1)...(19): siRNA sense strand
ggacaucauuuguggucuu

SEQ ID NO: 1045941 - RNA, 19 nt, Homo sapiens
  misc_RNA (1)...(19): siRNA sense strand
caaaaugacugugccauaa

SEQ ID NO: 1045942 - RNA, 19 nt, Homo sapiens
  misc_RNA (1)...(19): siRNA sense strand
ugcaauggcuggagaugua

SEQ ID NO: 1045943 - RNA, 19 nt, Homo sapiens
  misc_RNA (1)...(19): siRNA sense strand
ucugcuaccuugauuagua

SEQ ID NO: 1045944 - RNA, 19 nt, Homo sapiens
  misc_RNA (1)...(19): siRNA sense strand
uaguaagacugaacacauu

SEQ ID NO: 1045945 - RNA, 19 nt, Homo sapiens
  misc_RNA (1)...(19): siRNA sense strand
agucuacgcugacaucaaa

SEQ ID NO: 1045946 - RNA, 19 nt, Homo sapiens
  misc_RNA (1)...(19): siRNA sense strand
gaaggaaauuugccaucuc

SEQ ID NO: 1045947 - RNA, 19 nt, Homo sapiens
  misc_RNA (1)...(19): siRNA sense strand
ggaaggugcauaagggaaa

SEQ ID NO: 1045948 - RNA, 19 nt, Homo sapiens
  misc_RNA (1)...(19): siRNA sense strand
ggaaauuugccaucucaau

SEQ ID NO: 1045949 - RNA, 19 nt, Homo sapiens
  misc_RNA (1)...(19): siRNA sense strand
uuacugcuauggugagauu

SEQ ID NO: 1045950 - RNA, 19 nt, Homo sapiens
  misc_RNA (1)...(19): siRNA sense strand
agacugaacacauugguuu

SEQ ID NO: 1045951 - RNA, 19 nt, Homo sapiens
  misc_RNA (1)...(19): siRNA sense strand
ggugagauuuaacauuuag

SEQ ID NO: 1045952 - RNA, 19 nt, Homo sapiens
  misc_RNA (1)...(19): siRNA sense strand
gggaaaauguuacuggauu

SEQ ID NO: 1045953 - RNA, 19 nt, Homo sapiens
  misc_RNA (1)...(19): siRNA sense strand
agagaucuguuucuuucaa

SEQ ID NO: 1045954 - RNA, 19 nt, Homo sapiens
  misc_RNA (1)...(19): siRNA sense strand
aaucauguccugccaaaga

SEQ ID NO: 1045955 - RNA, 19 nt, Homo sapiens
  misc_RNA (1)...(19): siRNA sense strand
cauggugauucaagacauu

SEQ ID NO: 1045956 - RNA, 19 nt, Homo sapiens
  misc_RNA (1)...(19): siRNA sense strand
gggagcagaaggaaauuug

SEQ ID NO: 1045957 - RNA, 19 nt, Homo sapiens
  misc_RNA (1)...(19): siRNA sense strand
aguaauuucuuccauguca

SEQ ID NO: 1045958 - RNA, 19 nt, Homo sapiens
  misc_RNA (1)...(19): siRNA sense strand
ggaaaauguuacuggauug

SEQ ID NO: 1045959 - RNA, 19 nt, Homo sapiens
  misc_RNA (1)...(19): siRNA sense strand
aaggaaauuugccaucuca

SEQ ID NO: 1045960 - RNA, 19 nt, Homo sapiens
  misc_RNA (1)...(19): siRNA sense strand
cugcuaccuugauuaguaa

SEQ ID NO: 1045961 - RNA, 19 nt, Homo sapiens
  misc_RNA (1)...(19): siRNA sense strand
ggaacaaaagucaaaauga

SEQ ID NO: 1045962 - RNA, 19 nt, Homo sapiens
  misc_RNA (1)...(19): siRNA sense strand
ugccaucucaauuuacuua

SEQ ID NO: 1045963 - RNA, 19 nt, Homo sapiens
  misc_RNA (1)...(19): siRNA sense strand
auucauaucucauggugau

SEQ ID NO: 1045964 - RNA, 19 nt, Homo sapiens
  misc_RNA (1)...(19): siRNA sense strand
uucaagacauuacugcuau

SEQ ID NO: 1045965 - RNA, 19 nt, Homo sapiens
  misc_RNA (1)...(19): siRNA sense strand
acacauugguuuugucauu

SEQ ID NO: 1045966 - RNA, 19 nt, Homo sapiens
  misc_RNA (1)...(19): siRNA sense strand
aaauaugauugucccuuca

SEQ ID NO: 1045967 - RNA, 19 nt, Homo sapiens
  misc_RNA (1)...(19): siRNA sense strand
agaaggaaauuugccaucu

SEQ ID NO: 1045968 - RNA, 19 nt, Homo sapiens
  misc_RNA (1)...(19): siRNA sense strand
gacaucauuuguggucuuc

SEQ ID NO: 1045969 - RNA, 19 nt, Homo sapiens
  misc_RNA (1)...(19): siRNA sense strand
ugacugugccauaaacaau

SEQ ID NO: 1045970 - RNA, 19 nt, Homo sapiens
  misc_RNA (1)...(19): siRNA sense strand
ccaucucaauuuacuuauc

SEQ ID NO: 1045971 - RNA, 19 nt, Homo sapiens
  misc_RNA (1)...(19): siRNA sense strand
gcuauggugagauuuaaca

SEQ ID NO: 1045972 - RNA, 19 nt, Homo sapiens
  misc_RNA (1)...(19): siRNA sense strand
cugcuauggugagauuuaa

SEQ ID NO: 1045973 - RNA, 19 nt, Homo sapiens
  misc_RNA (1)...(19): siRNA sense strand
ucaagacauuacugcuaug

SEQ ID NO: 1045974 - RNA, 19 nt, Homo sapiens
  misc_RNA (1)...(19): siRNA sense strand
gaucuguuucuuucaacuu

SEQ ID NO: 1045975 - RNA, 19 nt, Homo sapiens
  misc_RNA (1)...(19): siRNA sense strand
uuucuuccaugucauacaa

SEQ ID NO: 1045976 - RNA, 19 nt, Homo sapiens
  misc_RNA (1)...(19): siRNA sense strand
gagaucuguuucuuucaac

SEQ ID NO: 1045977 - RNA, 19 nt, Homo sapiens
  misc_RNA (1)...(19): siRNA sense strand
cauaucucauggugauuca

SEQ ID NO: 1045978 - RNA, 19 nt, Homo sapiens
  misc_RNA (1)...(19): siRNA sense strand
gacugugccauaaacaauu

SEQ ID NO: 1045979 - RNA, 19 nt, Homo sapiens
  misc_RNA (1)...(19): siRNA sense strand
aaaugacugugccauaaac

SEQ ID NO: 1045980 - RNA, 19 nt, Homo sapiens
  misc_RNA (1)...(19): siRNA sense strand
ggauugcugaaacuaagaa

SEQ ID NO: 1045981 - RNA, 19 nt, Homo sapiens
  misc_RNA (1)...(19): siRNA sense strand
uuucuacuguccauaaauc

SEQ ID NO: 1045982 - RNA, 19 nt, Homo sapiens
  misc_RNA (1)...(19): siRNA sense strand
gaaggugcauaagggaaaa

SEQ ID NO: 1045983 - RNA, 19 nt, Homo sapiens
  misc_RNA (1)...(19): siRNA sense strand
agaaaucugcuaccuugau

SEQ ID NO: 1045984 - RNA, 19 nt, Homo sapiens
  misc_RNA (1)...(19): siRNA sense strand
gccauaaacaauucauauc

SEQ ID NO: 1045985 - RNA, 19 nt, Homo sapiens
  misc_RNA (1)...(19): siRNA sense strand
guuacuggauugcugaaac

SEQ ID NO: 1045986 - RNA, 19 nt, Homo sapiens
  misc_RNA (1)...(19): siRNA sense strand
gaacacauugguuuuguca

SEQ ID NO: 1045987 - RNA, 19 nt, Homo sapiens
  misc_RNA (1)...(19): siRNA sense strand
gagaaaucugcuaccuuga

SEQ ID NO: 1045988 - RNA, 19 nt, Homo sapiens
  misc_RNA (1)...(19): siRNA sense strand
caucauuuguggucuucuc

SEQ ID NO: 1045989 - RNA, 19 nt, Homo sapiens
  misc_RNA (1)...(19): siRNA sense strand
uacaaguauucgagaaauc

SEQ ID NO: 1045990 - RNA, 19 nt, Homo sapiens
  misc_RNA (1)...(19): siRNA sense strand
guaauuucuuccaugucau

SEQ ID NO: 1045991 - RNA, 19 nt, Homo sapiens
  misc_RNA (1)...(19): siRNA sense strand
gguuaguaauuucuuccau

SEQ ID NO: 1045992 - RNA, 19 nt, Homo sapiens
  misc_RNA (1)...(19): siRNA sense strand
cuacuguccauaaaucaug

SEQ ID NO: 1045993 - RNA, 19 nt, Homo sapiens
  misc_RNA (1)...(19): siRNA sense strand
uuaguaagacugaacacau

SEQ ID NO: 1045994 - RNA, 19 nt, Homo sapiens
  misc_RNA (1)...(19): siRNA sense strand
ucaaaaugacugugccaua

SEQ ID NO: 1045995 - RNA, 19 nt, Homo sapiens
  misc_RNA (1)...(19): siRNA sense strand
uuacuggauugcugaaacu

SEQ ID NO: 1045996 - RNA, 19 nt, Homo sapiens
  misc_RNA (1)...(19): siRNA sense strand
aagacuggaaggugcauaa

SEQ ID NO: 1045997 - RNA, 19 nt, Homo sapiens
  misc_RNA (1)...(19): siRNA sense strand
cuggauugcugaaacuaag

SEQ ID NO: 1045998 - RNA, 19 nt, Homo sapiens
  misc_RNA (1)...(19): siRNA sense strand
ucagugggacaucauuugu

SEQ ID NO: 1045999 - RNA, 19 nt, Homo sapiens
  misc_RNA (1)...(19): siRNA sense strand
cguuagaacucgcguuucc

SEQ ID NO: 1046000 - RNA, 19 nt, Homo sapiens
  misc_RNA (1)...(19): siRNA sense strand
ggacugaggcuccaaagua

SEQ ID NO: 1046001 - RNA, 19 nt, Homo sapiens
  misc_RNA (1)...(19): siRNA sense strand
ggccauagcuccuaccauu

SEQ ID NO: 1046002 - RNA, 19 nt, Homo sapiens
  misc_RNA (1)...(19): siRNA sense strand
caaaguaugagcccaauuu

SEQ ID NO: 1046003 - RNA, 19 nt, Homo sapiens
  misc_RNA (1)...(19): siRNA sense strand
ccaauuacccugggcauua

SEQ ID NO: 1046004 - RNA, 19 nt, Homo sapiens
  misc_RNA (1)...(19): siRNA sense strand
cacacaaagucuucuauaa

SEQ ID NO: 1046005 - RNA, 19 nt, Homo sapiens
  misc_RNA (1)...(19): siRNA sense strand
caaguuccaucgaagugua

SEQ ID NO: 1046006 - RNA, 19 nt, Homo sapiens
  misc_RNA (1)...(19): siRNA sense strand
cagaagcacugucgcauca

SEQ ID NO: 1046007 - RNA, 19 nt, Homo sapiens
  misc_RNA (1)...(19): siRNA sense strand
gaguggacauccucuuuga

SEQ ID NO: 1046008 - RNA, 19 nt, Homo sapiens
  misc_RNA (1)...(19): siRNA sense strand
aaacaacaccaacccauuu

SEQ ID NO: 1046009 - RNA, 19 nt, Homo sapiens
  misc_RNA (1)...(19): siRNA sense strand
caagaucccacuagccaua

SEQ ID NO: 1046010 - RNA, 19 nt, Homo sapiens
  misc_RNA (1)...(19): siRNA sense strand
ggcaacagccugcaggaua

SEQ ID NO: 1046011 - RNA, 19 nt, Homo sapiens
  misc_RNA (1)...(19): siRNA sense strand
gacugaggcuccaaaguau

SEQ ID NO: 1046012 - RNA, 19 nt, Homo sapiens
  misc_RNA (1)...(19): siRNA sense strand
gcaacagccugcaggauac

SEQ ID NO: 1046013 - RNA, 19 nt, Homo sapiens
  misc_RNA (1)...(19): siRNA sense strand
gaucgaaguaugugauuug

SEQ ID NO: 1046014 - RNA, 19 nt, Homo sapiens
  misc_RNA (1)...(19): siRNA sense strand
uaccaaggcucccaugaug

SEQ ID NO: 1046015 - RNA, 19 nt, Homo sapiens
  misc_RNA (1)...(19): siRNA sense strand
cgaaguaugugauuugacu

SEQ ID NO: 1046016 - RNA, 19 nt, Homo sapiens
  misc_RNA (1)...(19): siRNA sense strand
gcgaauacacacaaaguga

SEQ ID NO: 1046017 - RNA, 19 nt, Homo sapiens
  misc_RNA (1)...(19): siRNA sense strand
ccacacaaagucuucuaua

SEQ ID NO: 1046018 - RNA, 19 nt, Homo sapiens
  misc_RNA (1)...(19): siRNA sense strand
uuguggaccuggccuauua

SEQ ID NO: 1046019 - RNA, 19 nt, Homo sapiens
  misc_RNA (1)...(19): siRNA sense strand
gcucuuccaucucaacuuc

SEQ ID NO: 1046020 - RNA, 19 nt, Homo sapiens
  misc_RNA (1)...(19): siRNA sense strand
gaguguagauguucuucga

SEQ ID NO: 1046021 - RNA, 19 nt, Homo sapiens
  misc_RNA (1)...(19): siRNA sense strand
aaacgcagauggucagaca

SEQ ID NO: 1046022 - RNA, 19 nt, Homo sapiens
  misc_RNA (1)...(19): siRNA sense strand
gaagcacugucgcaucauc

SEQ ID NO: 1046023 - RNA, 19 nt, Homo sapiens
  misc_RNA (1)...(19): siRNA sense strand
gcuuggcucuccacacaaa

SEQ ID NO: 1046024 - RNA, 19 nt, Homo sapiens
  misc_RNA (1)...(19): siRNA sense strand
auaaacaaguuccaucgaa

SEQ ID NO: 1046025 - RNA, 19 nt, Homo sapiens
  misc_RNA (1)...(19): siRNA sense strand
ggugauuccugccaagaug

SEQ ID NO: 1046026 - RNA, 19 nt, Homo sapiens
  misc_RNA (1)...(19): siRNA sense strand
gcagauggucagacagaaa

SEQ ID NO: 1046027 - RNA, 19 nt, Homo sapiens
  misc_RNA (1)...(19): siRNA sense strand
cacacaaagugaagaaguu

SEQ ID NO: 1046028 - RNA, 19 nt, Homo sapiens
  misc_RNA (1)...(19): siRNA sense strand
caaacaacaccaacccauu

SEQ ID NO: 1046029 - RNA, 19 nt, Homo sapiens
  misc_RNA (1)...(19): siRNA sense strand
uaucaucgcugugaguuca

SEQ ID NO: 1046030 - RNA, 19 nt, Homo sapiens
  misc_RNA (1)...(19): siRNA sense strand
caauuacccugggcauuau

SEQ ID NO: 1046031 - RNA, 19 nt, Homo sapiens
  misc_RNA (1)...(19): siRNA sense strand
gcaguagccauucuucaga

SEQ ID NO: 1046032 - RNA, 19 nt, Homo sapiens
  misc_RNA (1)...(19): siRNA sense strand
uaaaucagaagacaagaug

SEQ ID NO: 1046033 - RNA, 19 nt, Homo sapiens
  misc_RNA (1)...(19): siRNA sense strand
ccauagcuccuaccauuga

SEQ ID NO: 1046034 - RNA, 19 nt, Homo sapiens
  misc_RNA (1)...(19): siRNA sense strand
ggaacgagcaaugggaauu

SEQ ID NO: 1046035 - RNA, 19 nt, Homo sapiens
  misc_RNA (1)...(19): siRNA sense strand
ccaagaugcggguauuuga

SEQ ID NO: 1046036 - RNA, 19 nt, Homo sapiens
  misc_RNA (1)...(19): siRNA sense strand
ggaguggacauccucuuug

SEQ ID NO: 1046037 - RNA, 19 nt, Homo sapiens
  misc_RNA (1)...(19): siRNA sense strand
gaacgagcaaugggaauuc

SEQ ID NO: 1046038 - RNA, 19 nt, Homo sapiens
  misc_RNA (1)...(19): siRNA sense strand
agugaacagucuccucuaa

SEQ ID NO: 1046039 - RNA, 19 nt, Homo sapiens
  misc_RNA (1)...(19): siRNA sense strand
gaacagauugaccagucuu

SEQ ID NO: 1046040 - RNA, 19 nt, Homo sapiens
  misc_RNA (1)...(19): siRNA sense strand
caagaugcggguauuugaa

SEQ ID NO: 1046041 - RNA, 19 nt, Homo sapiens
  misc_RNA (1)...(19): siRNA sense strand
ggacgggaucaaacuaaug

SEQ ID NO: 1046042 - RNA, 19 nt, Homo sapiens
  misc_RNA (1)...(19): siRNA sense strand
cgaauacacacaaagugaa

SEQ ID NO: 1046043 - RNA, 19 nt, Homo sapiens
  misc_RNA (1)...(19): siRNA sense strand
caucgaaguguaaugacua

SEQ ID NO: 1046044 - RNA, 19 nt, Homo sapiens
  misc_RNA (1)...(19): siRNA sense strand
caaugucuaugcugagagu

SEQ ID NO: 1046045 - RNA, 19 nt, Homo sapiens
  misc_RNA (1)...(19): siRNA sense strand
ggcaaugucuaugcugaga

SEQ ID NO: 1046046 - RNA, 19 nt, Homo sapiens
  misc_RNA (1)...(19): siRNA sense strand
ucagaggacugucuuucuc

SEQ ID NO: 1046047 - RNA, 19 nt, Homo sapiens
  misc_RNA (1)...(19): siRNA sense strand
guaugugauuugacuaaag

SEQ ID NO: 1046048 - RNA, 19 nt, Homo sapiens
  misc_RNA (1)...(19): siRNA sense strand
gcacugucgcaucaucaaa

SEQ ID NO: 1046049 - RNA, 19 nt, Homo sapiens
  misc_RNA (1)...(19): siRNA sense strand
gaggacugucuuucucuuu

SEQ ID NO: 1046050 - RNA, 19 nt, Homo sapiens
  misc_RNA (1)...(19): siRNA sense strand
ucuuugaggucaugcagaa

SEQ ID NO: 1046051 - RNA, 19 nt, Homo sapiens
  misc_RNA (1)...(19): siRNA sense strand
gcuuuggucuucagcgaau

SEQ ID NO: 1046052 - RNA, 19 nt, Homo sapiens
  misc_RNA (1)...(19): siRNA sense strand
gaauacacacaaagugaag

SEQ ID NO: 1046053 - RNA, 19 nt, Homo sapiens
  misc_RNA (1)...(19): siRNA sense strand
gaagacaagaugaaaauuc

SEQ ID NO: 1046054 - RNA, 19 nt, Homo sapiens
  misc_RNA (1)...(19): siRNA sense strand
gaaguaugugauuugacua

SEQ ID NO: 1046055 - RNA, 19 nt, Homo sapiens
  misc_RNA (1)...(19): siRNA sense strand
guagauguucuucgagaug

SEQ ID NO: 1046056 - RNA, 19 nt, Homo sapiens
  misc_RNA (1)...(19): siRNA sense strand
uuaaggugaucgaaguaug

SEQ ID NO: 1046057 - RNA, 19 nt, Homo sapiens
  misc_RNA (1)...(19): siRNA sense strand
gaaacaugcacgaccuaca

SEQ ID NO: 1046058 - RNA, 19 nt, Homo sapiens
  misc_RNA (1)...(19): siRNA sense strand
caacccauccuggagugua

SEQ ID NO: 1046059 - RNA, 19 nt, Homo sapiens
  misc_RNA (1)...(19): siRNA sense strand
ugaacagucuccucuaagc

SEQ ID NO: 1046060 - RNA, 19 nt, Homo sapiens
  misc_RNA (1)...(19): siRNA sense strand
uuuaacuacuucacucuug

SEQ ID NO: 1046061 - RNA, 19 nt, Homo sapiens
  misc_RNA (1)...(19): siRNA sense strand
ugucuaugcugagagugua

SEQ ID NO: 1046062 - RNA, 19 nt, Homo sapiens
  misc_RNA (1)...(19): siRNA sense strand
gacgggaucaaacuaaugu

SEQ ID NO: 1046063 - RNA, 19 nt, Homo sapiens
  misc_RNA (1)...(19): siRNA sense strand
ccacuagccauaaagaaag

SEQ ID NO: 1046064 - RNA, 19 nt, Homo sapiens
  misc_RNA (1)...(19): siRNA sense strand
acccugggcauuauaauuu

SEQ ID NO: 1046065 - RNA, 19 nt, Homo sapiens
  misc_RNA (1)...(19): siRNA sense strand
acacaaagugaagaaguuu

SEQ ID NO: 1046066 - RNA, 19 nt, Homo sapiens
  misc_RNA (1)...(19): siRNA sense strand
aaucagaagacaagaugaa

SEQ ID NO: 1046067 - RNA, 19 nt, Homo sapiens
  misc_RNA (1)...(19): siRNA sense strand
caggacgggaucaaacuaa

SEQ ID NO: 1046068 - RNA, 19 nt, Homo sapiens
  misc_RNA (1)...(19): siRNA sense strand
gccaagaugcggguauuug

SEQ ID NO: 1046069 - RNA, 19 nt, Homo sapiens
  misc_RNA (1)...(19): siRNA sense strand
ugaugccucugagcuguuu

SEQ ID NO: 1046070 - RNA, 19 nt, Homo sapiens
  misc_RNA (1)...(19): siRNA sense strand
gcuguuuccugggcaaugu

SEQ ID NO: 1046071 - RNA, 19 nt, Homo sapiens
  misc_RNA (1)...(19): siRNA sense strand
uaaggugaucgaaguaugu

SEQ ID NO: 1046072 - RNA, 19 nt, Homo sapiens
  misc_RNA (1)...(19): siRNA sense strand
gauaccaaggcucccauga

SEQ ID NO: 1046073 - RNA, 19 nt, Homo sapiens
  misc_RNA (1)...(19): siRNA sense strand
cacuagccauaaagaaaga

SEQ ID NO: 1046074 - RNA, 19 nt, Homo sapiens
  misc_RNA (1)...(19): siRNA sense strand
cccacuagccauaaagaaa

SEQ ID NO: 1046075 - RNA, 19 nt, Homo sapiens
  misc_RNA (1)...(19): siRNA sense strand
ugaucgaaguaugugauuu

SEQ ID NO: 1046076 - RNA, 19 nt, Homo sapiens
  misc_RNA (1)...(19): siRNA sense strand
cauagcuccuaccauugaa

SEQ ID NO: 1046077 - RNA, 19 nt, Homo sapiens
  misc_RNA (1)...(19): siRNA sense strand
ccauuugguuccacauucu

SEQ ID NO: 1046078 - RNA, 19 nt, Homo sapiens
  misc_RNA (1)...(19): siRNA sense strand
uccagguucucuacaguga

SEQ ID NO: 1046079 - RNA, 19 nt, Homo sapiens
  misc_RNA (1)...(19): siRNA sense strand
gucuuucucuuuucaguua

SEQ ID NO: 1046080 - RNA, 19 nt, Homo sapiens
  misc_RNA (1)...(19): siRNA sense strand
cuauaaaucagaagacaag

SEQ ID NO: 1046081 - RNA, 19 nt, Homo sapiens
  misc_RNA (1)...(19): siRNA sense strand
gcaagugggacaacaucca

SEQ ID NO: 1046082 - RNA, 19 nt, Homo sapiens
  misc_RNA (1)...(19): siRNA sense strand
gcuuucaaucagagacuua

SEQ ID NO: 1046083 - RNA, 19 nt, Homo sapiens
  misc_RNA (1)...(19): siRNA sense strand
aaacaaguuccaucgaagu

SEQ ID NO: 1046084 - RNA, 19 nt, Homo sapiens
  misc_RNA (1)...(19): siRNA sense strand
auuagcagaugccaagaug

SEQ ID NO: 1046085 - RNA, 19 nt, Homo sapiens
  misc_RNA (1)...(19): siRNA sense strand
ccugguagccaccugagaa

SEQ ID NO: 1046086 - RNA, 19 nt, Homo sapiens
  misc_RNA (1)...(19): siRNA sense strand
gaaagaaaacgcagauggu

SEQ ID NO: 1046087 - RNA, 19 nt, Homo sapiens
  misc_RNA (1)...(19): siRNA sense strand
acuaauguuugaugcuuuc

SEQ ID NO: 1046088 - RNA, 19 nt, Homo sapiens
  misc_RNA (1)...(19): siRNA sense strand
gagcaacuguaaaacgaau

SEQ ID NO: 1046089 - RNA, 19 nt, Homo sapiens
  misc_RNA (1)...(19): siRNA sense strand
gguuccacauucugcuuug

SEQ ID NO: 1046090 - RNA, 19 nt, Homo sapiens
  misc_RNA (1)...(19): siRNA sense strand
cccauuugguuccacauuc

SEQ ID NO: 1046091 - RNA, 19 nt, Homo sapiens
  misc_RNA (1)...(19): siRNA sense strand
aauauuguggcgugcauuu

SEQ ID NO: 1046092 - RNA, 19 nt, Homo sapiens
  misc_RNA (1)...(19): siRNA sense strand
caacuucagaggacugucu

SEQ ID NO: 1046093 - RNA, 19 nt, Homo sapiens
  misc_RNA (1)...(19): siRNA sense strand
aaagugaagaaguuuguuc

SEQ ID NO: 1046094 - RNA, 19 nt, Homo sapiens
  misc_RNA (1)...(19): siRNA sense strand
ugaugcgaauacacacaaa

SEQ ID NO: 1046095 - RNA, 19 nt, Homo sapiens
  misc_RNA (1)...(19): siRNA sense strand
uggaguggacauccucuuu

SEQ ID NO: 1046096 - RNA, 19 nt, Homo sapiens
  misc_RNA (1)...(19): siRNA sense strand
ccuacuugcugcagguugu

SEQ ID NO: 1046097 - RNA, 19 nt, Homo sapiens
  misc_RNA (1)...(19): siRNA sense strand
ucaggacgggaucaaacua

SEQ ID NO: 1046098 - RNA, 19 nt, Homo sapiens
  misc_RNA (1)...(19): siRNA sense strand
aaacaugcacgaccuacag

SEQ ID NO: 1046099 - RNA, 19 nt, Homo sapiens
  misc_RNA (1)...(19): siRNA sense strand
augcuuggcucuccacaca

SEQ ID NO: 1046100 - RNA, 19 nt, Homo sapiens
  misc_RNA (1)...(19): siRNA sense strand
gccaacagcuccucaacca

SEQ ID NO: 1046101 - RNA, 19 nt, Homo sapiens
  misc_RNA (1)...(19): siRNA sense strand
ccgcugguguacuacuuua

SEQ ID NO: 1046102 - RNA, 19 nt, Homo sapiens
  misc_RNA (1)...(19): siRNA sense strand
uggcuaaccucgucaucuu

SEQ ID NO: 1046103 - RNA, 19 nt, Homo sapiens
  misc_RNA (1)...(19): siRNA sense strand
gcgacgagcuguggaaagg

SEQ ID NO: 1046104 - RNA, 19 nt, Homo sapiens
  misc_RNA (1)...(19): siRNA sense strand
guacggcagcugcaucuuc

SEQ ID NO: 1046105 - RNA, 19 nt, Homo sapiens
  misc_RNA (1)...(19): siRNA sense strand
uggacccgcugguguacua

SEQ ID NO: 1046106 - RNA, 19 nt, Homo sapiens
  misc_RNA (1)...(19): siRNA sense strand
gcagcugcaucuuccugau

SEQ ID NO: 1046107 - RNA, 19 nt, Homo sapiens
  misc_RNA (1)...(19): siRNA sense strand
guggugagcguguacaugu

SEQ ID NO: 1046108 - RNA, 19 nt, Homo sapiens
  misc_RNA (1)...(19): siRNA sense strand
ccguucgucucuccuacua

SEQ ID NO: 1046109 - RNA, 19 nt, Homo sapiens
  misc_RNA (1)...(19): siRNA sense strand
ucuuccagaugaacaugua

SEQ ID NO: 1046110 - RNA, 19 nt, Homo sapiens
  misc_RNA (1)...(19): siRNA sense strand
ccaggauuccgcccucuga

SEQ ID NO: 1046111 - RNA, 19 nt, Homo sapiens
  misc_RNA (1)...(19): siRNA sense strand
gcgcucauccugguguuug

SEQ ID NO: 1046112 - RNA, 19 nt, Homo sapiens
  misc_RNA (1)...(19): siRNA sense strand
uguccugacuaccgaccua

SEQ ID NO: 1046113 - RNA, 19 nt, Homo sapiens
  misc_RNA (1)...(19): siRNA sense strand
gcuccucaaccaacaguuc

SEQ ID NO: 1046114 - RNA, 19 nt, Homo sapiens
  misc_RNA (1)...(19): siRNA sense strand
ggugagcguguacaugugu

SEQ ID NO: 1046115 - RNA, 19 nt, Homo sapiens
  misc_RNA (1)...(19): siRNA sense strand
gcacaaacauugauacuga

SEQ ID NO: 1046116 - RNA, 19 nt, Homo sapiens
  misc_RNA (1)...(19): siRNA sense strand
ggagauagauuuacccuuu

SEQ ID NO: 1046117 - RNA, 19 nt, Homo sapiens
  misc_RNA (1)...(19): siRNA sense strand
gaacuuacuucguauguuu

SEQ ID NO: 1046118 - RNA, 19 nt, Homo sapiens
  misc_RNA (1)...(19): siRNA sense strand
gaacaagaauccauacuga

SEQ ID NO: 1046119 - RNA, 19 nt, Homo sapiens
  misc_RNA (1)...(19): siRNA sense strand
cauaauagcugacaugugu

SEQ ID NO: 1046120 - RNA, 19 nt, Homo sapiens
  misc_RNA (1)...(19): siRNA sense strand
gaaagaacaagaauccaua

SEQ ID NO: 1046121 - RNA, 19 nt, Homo sapiens
  misc_RNA (1)...(19): siRNA sense strand
gcgaauggcucuugggauu

SEQ ID NO: 1046122 - RNA, 19 nt, Homo sapiens
  misc_RNA (1)...(19): siRNA sense strand
gaagacaaguuggauauuc

SEQ ID NO: 1046123 - RNA, 19 nt, Homo sapiens
  misc_RNA (1)...(19): siRNA sense strand
cgugugagguucaguaaua

SEQ ID NO: 1046124 - RNA, 19 nt, Homo sapiens
  misc_RNA (1)...(19): siRNA sense strand
ccucugaacuuacuucgua

SEQ ID NO: 1046125 - RNA, 19 nt, Homo sapiens
  misc_RNA (1)...(19): siRNA sense strand
gaagggcucuuaagacaag

SEQ ID NO: 1046126 - RNA, 19 nt, Homo sapiens
  misc_RNA (1)...(19): siRNA sense strand
gcucuaugcugucuauauu

SEQ ID NO: 1046127 - RNA, 19 nt, Homo sapiens
  misc_RNA (1)...(19): siRNA sense strand
ggaaucagaagaauauuug

SEQ ID NO: 1046128 - RNA, 19 nt, Homo sapiens
  misc_RNA (1)...(19): siRNA sense strand
cagaagggcucuuaagaca

SEQ ID NO: 1046129 - RNA, 19 nt, Homo sapiens
  misc_RNA (1)...(19): siRNA sense strand
gcaaauuugucauaucaag

SEQ ID NO: 1046130 - RNA, 19 nt, Homo sapiens
  misc_RNA (1)...(19): siRNA sense strand
gcaaaguugucucgcaugu

SEQ ID NO: 1046131 - RNA, 19 nt, Homo sapiens
  misc_RNA (1)...(19): siRNA sense strand
gaaauuccaugaucuucca

SEQ ID NO: 1046132 - RNA, 19 nt, Homo sapiens
  misc_RNA (1)...(19): siRNA sense strand
acugagaucugccaaguuu

SEQ ID NO: 1046133 - RNA, 19 nt, Homo sapiens
  misc_RNA (1)...(19): siRNA sense strand
caacagauacaacuaugaa

SEQ ID NO: 1046134 - RNA, 19 nt, Homo sapiens
  misc_RNA (1)...(19): siRNA sense strand
gaaacuuacugcaacucaa

SEQ ID NO: 1046135 - RNA, 19 nt, Homo sapiens
  misc_RNA (1)...(19): siRNA sense strand
uacaauaccucuguccaua

SEQ ID NO: 1046136 - RNA, 19 nt, Homo sapiens
  misc_RNA (1)...(19): siRNA sense strand
gcacaacagauacaacuau

SEQ ID NO: 1046137 - RNA, 19 nt, Homo sapiens
  misc_RNA (1)...(19): siRNA sense strand
gagaagacaaguuggauau

SEQ ID NO: 1046138 - RNA, 19 nt, Homo sapiens
  misc_RNA (1)...(19): siRNA sense strand
caagaggacuucgcggaaa

SEQ ID NO: 1046139 - RNA, 19 nt, Homo sapiens
  misc_RNA (1)...(19): siRNA sense strand
gaauaguucuuugagugaa

SEQ ID NO: 1046140 - RNA, 19 nt, Homo sapiens
  misc_RNA (1)...(19): siRNA sense strand
gcugacauguguaugcaaa

SEQ ID NO: 1046141 - RNA, 19 nt, Homo sapiens
  misc_RNA (1)...(19): siRNA sense strand
uuucuuaccucaucauuga

SEQ ID NO: 1046142 - RNA, 19 nt, Homo sapiens
  misc_RNA (1)...(19): siRNA sense strand
aaaguugucucgcauguca

SEQ ID NO: 1046143 - RNA, 19 nt, Homo sapiens
  misc_RNA (1)...(19): siRNA sense strand
caauaccucuguccauaau

SEQ ID NO: 1046144 - RNA, 19 nt, Homo sapiens
  misc_RNA (1)...(19): siRNA sense strand
uaacaguggagauagauuu

SEQ ID NO: 1046145 - RNA, 19 nt, Homo sapiens
  misc_RNA (1)...(19): siRNA sense strand
aauccuugcugcaguauuu

SEQ ID NO: 1046146 - RNA, 19 nt, Homo sapiens
  misc_RNA (1)...(19): siRNA sense strand
gcugcaguauuuccaagua

SEQ ID NO: 1046147 - RNA, 19 nt, Homo sapiens
  misc_RNA (1)...(19): siRNA sense strand
ccaaguaacaguggagaua

SEQ ID NO: 1046148 - RNA, 19 nt, Homo sapiens
  misc_RNA (1)...(19): siRNA sense strand
gaauggcucuugggauugu

SEQ ID NO: 1046149 - RNA, 19 nt, Homo sapiens
  misc_RNA (1)...(19): siRNA sense strand
uggcaaauuugucauauca

SEQ ID NO: 1046150 - RNA, 19 nt, Homo sapiens
  misc_RNA (1)...(19): siRNA sense strand
ugucauauccugugaaaga

SEQ ID NO: 1046151 - RNA, 19 nt, Homo sapiens
  misc_RNA (1)...(19): siRNA sense strand
uccaugaucuuccaaguga

SEQ ID NO: 1046152 - RNA, 19 nt, Homo sapiens
  misc_RNA (1)...(19): siRNA sense strand
gcauugcucuugaggaucu

SEQ ID NO: 1046153 - RNA, 19 nt, Homo sapiens
  misc_RNA (1)...(19): siRNA sense strand
uaacucuccuaugccauua

SEQ ID NO: 1046154 - RNA, 19 nt, Homo sapiens
  misc_RNA (1)...(19): siRNA sense strand
gaagguuacuuugcugcuu

SEQ ID NO: 1046155 - RNA, 19 nt, Homo sapiens
  misc_RNA (1)...(19): siRNA sense strand
gaucucagaagggcucuua

SEQ ID NO: 1046156 - RNA, 19 nt, Homo sapiens
  misc_RNA (1)...(19): siRNA sense strand
caugucauauccugugaaa

SEQ ID NO: 1046157 - RNA, 19 nt, Homo sapiens
  misc_RNA (1)...(19): siRNA sense strand
gggaaucagaagaauauuu

SEQ ID NO: 1046158 - RNA, 19 nt, Homo sapiens
  misc_RNA (1)...(19): siRNA sense strand
uaauugggauccugugaug

SEQ ID NO: 1046159 - RNA, 19 nt, Homo sapiens
  misc_RNA (1)...(19): siRNA sense strand
gagauagauuuacccuuuc

SEQ ID NO: 1046160 - RNA, 19 nt, Homo sapiens
  misc_RNA (1)...(19): siRNA sense strand
acaagaauccauacugaaa

SEQ ID NO: 1046161 - RNA, 19 nt, Homo sapiens
  misc_RNA (1)...(19): siRNA sense strand
ucaguaauaucauggagau

SEQ ID NO: 1046162 - RNA, 19 nt, Homo sapiens
  misc_RNA (1)...(19): siRNA sense strand
ugagugaaccucuguaugu

SEQ ID NO: 1046163 - RNA, 19 nt, Homo sapiens
  misc_RNA (1)...(19): siRNA sense strand
ucucagaguuccugugguu

SEQ ID NO: 1046164 - RNA, 19 nt, Homo sapiens
  misc_RNA (1)...(19): siRNA sense strand
gagguucaguaauaucaug

SEQ ID NO: 1046165 - RNA, 19 nt, Homo sapiens
  misc_RNA (1)...(19): siRNA sense strand
guaugugccugugaaauuc

SEQ ID NO: 1046166 - RNA, 19 nt, Homo sapiens
  misc_RNA (1)...(19): siRNA sense strand
gauaggcacacuugcacua

SEQ ID NO: 1046167 - RNA, 19 nt, Homo sapiens
  misc_RNA (1)...(19): siRNA sense strand
agacaagacugcaaauggu

SEQ ID NO: 1046168 - RNA, 19 nt, Homo sapiens
  misc_RNA (1)...(19): siRNA sense strand
acacaaguugcuauaguua

SEQ ID NO: 1046169 - RNA, 19 nt, Homo sapiens
  misc_RNA (1)...(19): siRNA sense strand
cacacaaguugcuauaguu

SEQ ID NO: 1046170 - RNA, 19 nt, Homo sapiens
  misc_RNA (1)...(19): siRNA sense strand
ccugagagcacaaacauug

SEQ ID NO: 1046171 - RNA, 19 nt, Homo sapiens
  misc_RNA (1)...(19): siRNA sense strand
guacaacaaaccauucuuc

SEQ ID NO: 1046172 - RNA, 19 nt, Homo sapiens
  misc_RNA (1)...(19): siRNA sense strand
gcaguuuucuugguuauuu

SEQ ID NO: 1046173 - RNA, 19 nt, Homo sapiens
  misc_RNA (1)...(19): siRNA sense strand
acacacaaguugcuauagu

SEQ ID NO: 1046174 - RNA, 19 nt, Homo sapiens
  misc_RNA (1)...(19): siRNA sense strand
gagagcacaaacauugaua

SEQ ID NO: 1046175 - RNA, 19 nt, Homo sapiens
  misc_RNA (1)...(19): siRNA sense strand
gaugugauauggguugcuu

SEQ ID NO: 1046176 - RNA, 19 nt, Homo sapiens
  misc_RNA (1)...(19): siRNA sense strand
guaacucuccuaugccauu

SEQ ID NO: 1046177 - RNA, 19 nt, Homo sapiens
  misc_RNA (1)...(19): siRNA sense strand
cacaguagguuccauuugg

SEQ ID NO: 1046178 - RNA, 19 nt, Homo sapiens
  misc_RNA (1)...(19): siRNA sense strand
agacaacaguguacaagag

SEQ ID NO: 1046179 - RNA, 19 nt, Homo sapiens
  misc_RNA (1)...(19): siRNA sense strand
gagugaaccucuguaugug

SEQ ID NO: 1046180 - RNA, 19 nt, Homo sapiens
  misc_RNA (1)...(19): siRNA sense strand
gacuucgaguuucccaaua

SEQ ID NO: 1046181 - RNA, 19 nt, Homo sapiens
  misc_RNA (1)...(19): siRNA sense strand
ggacuucgaguuucccaau

SEQ ID NO: 1046182 - RNA, 19 nt, Homo sapiens
  misc_RNA (1)...(19): siRNA sense strand
cagcuuccgucaagucaug

SEQ ID NO: 1046183 - RNA, 19 nt, Homo sapiens
  misc_RNA (1)...(19): siRNA sense strand
cacaacagauacaacuaug

SEQ ID NO: 1046184 - RNA, 19 nt, Homo sapiens
  misc_RNA (1)...(19): siRNA sense strand
ucagagaguuccagaagac

SEQ ID NO: 1046185 - RNA, 19 nt, Homo sapiens
  misc_RNA (1)...(19): siRNA sense strand
gugggaaucagaagaauau

SEQ ID NO: 1046186 - RNA, 19 nt, Homo sapiens
  misc_RNA (1)...(19): siRNA sense strand
gauauuccaauguucuuug

SEQ ID NO: 1046187 - RNA, 19 nt, Homo sapiens
  misc_RNA (1)...(19): siRNA sense strand
cggcauugcucuugaggau

SEQ ID NO: 1046188 - RNA, 19 nt, Homo sapiens
  misc_RNA (1)...(19): siRNA sense strand
cgaguuucccaauaaagua

SEQ ID NO: 1046189 - RNA, 19 nt, Homo sapiens
  misc_RNA (1)...(19): siRNA sense strand
uuaaucugcugcucuuaug

SEQ ID NO: 1046190 - RNA, 19 nt, Homo sapiens
  misc_RNA (1)...(19): siRNA sense strand
uugcagaugcugaagguua

SEQ ID NO: 1046191 - RNA, 19 nt, Homo sapiens
  misc_RNA (1)...(19): siRNA sense strand
ggaagagacacaguagguu

SEQ ID NO: 1046192 - RNA, 19 nt, Homo sapiens
  misc_RNA (1)...(19): siRNA sense strand
cuuaauccuugcugcagua

SEQ ID NO: 1046193 - RNA, 19 nt, Homo sapiens
  misc_RNA (1)...(19): siRNA sense strand
caagaagcacuuucagaca

SEQ ID NO: 1046194 - RNA, 19 nt, Homo sapiens
  misc_RNA (1)...(19): siRNA sense strand
ggaaacuuacugcaacuca

SEQ ID NO: 1046195 - RNA, 19 nt, Homo sapiens
  misc_RNA (1)...(19): siRNA sense strand
agacacacaaguugcuaua

SEQ ID NO: 1046196 - RNA, 19 nt, Homo sapiens
  misc_RNA (1)...(19): siRNA sense strand
uggaggcguuguacuggua

SEQ ID NO: 1046197 - RNA, 19 nt, Homo sapiens
  misc_RNA (1)...(19): siRNA sense strand
gagacaacaguguacaaga

SEQ ID NO: 1046198 - RNA, 19 nt, Homo sapiens
  misc_RNA (1)...(19): siRNA sense strand
uauuguaacucuccuaugc

SEQ ID NO: 1046199 - RNA, 19 nt, Homo sapiens
  misc_RNA (1)...(19): siRNA sense strand
agacugagaucugccaagu

SEQ ID NO: 1046200 - RNA, 19 nt, Homo sapiens
  misc_RNA (1)...(19): siRNA sense strand
cacaaacauugauacugaa

SEQ ID NO: 1046201 - RNA, 19 nt, Homo sapiens
  misc_RNA (1)...(19): siRNA sense strand
uguaugugccugugaaauu

SEQ ID NO: 1046202 - RNA, 19 nt, Homo sapiens
  misc_RNA (1)...(19): siRNA sense strand
ugaauaguucuuugaguga

SEQ ID NO: 1046203 - RNA, 19 nt, Homo sapiens
  misc_RNA (1)...(19): siRNA sense strand
agauagagaagacaaguug

SEQ ID NO: 1046204 - RNA, 19 nt, Homo sapiens
  misc_RNA (1)...(19): siRNA sense strand
ggugggaaucagaagaaua

SEQ ID NO: 1046205 - RNA, 19 nt, Homo sapiens
  misc_RNA (1)...(19): siRNA sense strand
acucuccuaugccauuaua

SEQ ID NO: 1046206 - RNA, 19 nt, Homo sapiens
  misc_RNA (1)...(19): siRNA sense strand
gauuugaggacuucgaguu

SEQ ID NO: 1046207 - RNA, 19 nt, Homo sapiens
  misc_RNA (1)...(19): siRNA sense strand
guugcuuccucugaacuua

SEQ ID NO: 1046208 - RNA, 19 nt, Homo sapiens
  misc_RNA (1)...(19): siRNA sense strand
ucuaugcugucuauauugu

SEQ ID NO: 1046209 - RNA, 19 nt, Homo sapiens
  misc_RNA (1)...(19): siRNA sense strand
ccugugaaauuccaugauc

SEQ ID NO: 1046210 - RNA, 19 nt, Homo sapiens
  misc_RNA (1)...(19): siRNA sense strand
guaauaucauggagauucg

SEQ ID NO: 1046211 - RNA, 19 nt, Homo sapiens
  misc_RNA (1)...(19): siRNA sense strand
acaauaccucuguccauaa

SEQ ID NO: 1046212 - RNA, 19 nt, Homo sapiens
  misc_RNA (1)...(19): siRNA sense strand
cugcaguauuuccaaguaa

SEQ ID NO: 1046213 - RNA, 19 nt, Homo sapiens
  misc_RNA (1)...(19): siRNA sense strand
ucauuucuaugcacagugu

SEQ ID NO: 1046214 - RNA, 19 nt, Homo sapiens
  misc_RNA (1)...(19): siRNA sense strand
caugcucuaugcugucuau

SEQ ID NO: 1046215 - RNA, 19 nt, Homo sapiens
  misc_RNA (1)...(19): siRNA sense strand
uaacagagcccaacuuuga

SEQ ID NO: 1046216 - RNA, 19 nt, Homo sapiens
  misc_RNA (1)...(19): siRNA sense strand
gagaagacuuugggacauu

SEQ ID NO: 1046217 - RNA, 19 nt, Homo sapiens
  misc_RNA (1)...(19): siRNA sense strand
uaaaguguaugugcaauug

SEQ ID NO: 1046218 - RNA, 19 nt, Homo sapiens
  misc_RNA (1)...(19): siRNA sense strand
ggacuaaauuggugguugu

SEQ ID NO: 1046219 - RNA, 19 nt, Homo sapiens
  misc_RNA (1)...(19): siRNA sense strand
gcugcgagcucugcaagua

SEQ ID NO: 1046220 - RNA, 19 nt, Homo sapiens
  misc_RNA (1)...(19): siRNA sense strand
ugaagacacuggagcagaa

SEQ ID NO: 1046221 - RNA, 19 nt, Homo sapiens
  misc_RNA (1)...(19): siRNA sense strand
gggaagaacagaaugagaa

SEQ ID NO: 1046222 - RNA, 19 nt, Homo sapiens
  misc_RNA (1)...(19): siRNA sense strand
gaaguaagaccaaagaaaa

SEQ ID NO: 1046223 - RNA, 19 nt, Homo sapiens
  misc_RNA (1)...(19): siRNA sense strand
agaaaucauucacgucuga

SEQ ID NO: 1046224 - RNA, 19 nt, Homo sapiens
  misc_RNA (1)...(19): siRNA sense strand
guucaaaacuguccagaaa

SEQ ID NO: 1046225 - RNA, 19 nt, Homo sapiens
  misc_RNA (1)...(19): siRNA sense strand
gaacagaaugagaagacuu

SEQ ID NO: 1046226 - RNA, 19 nt, Homo sapiens
  misc_RNA (1)...(19): siRNA sense strand
ugggagaaguugcagauga

SEQ ID NO: 1046227 - RNA, 19 nt, Homo sapiens
  misc_RNA (1)...(19): siRNA sense strand
ggagagggaagaacagaau

SEQ ID NO: 1046228 - RNA, 19 nt, Homo sapiens
  misc_RNA (1)...(19): siRNA sense strand
agagugaucuauguucaaa

SEQ ID NO: 1046229 - RNA, 19 nt, Homo sapiens
  misc_RNA (1)...(19): siRNA sense strand
gagcccaacuuugaaaaua

SEQ ID NO: 1046230 - RNA, 19 nt, Homo sapiens
  misc_RNA (1)...(19): siRNA sense strand
cuacagaaguaagaccaaa

SEQ ID NO: 1046231 - RNA, 19 nt, Homo sapiens
  misc_RNA (1)...(19): siRNA sense strand
gaauggcccuuuuggacua

SEQ ID NO: 1046232 - RNA, 19 nt, Homo sapiens
  misc_RNA (1)...(19): siRNA sense strand
agacucaaggccuauaaua

SEQ ID NO: 1046233 - RNA, 19 nt, Homo sapiens
  misc_RNA (1)...(19): siRNA sense strand
aagaucaugugcucaguga

SEQ ID NO: 1046234 - RNA, 19 nt, Homo sapiens
  misc_RNA (1)...(19): siRNA sense strand
guaaaguguaugugcaauu

SEQ ID NO: 1046235 - RNA, 19 nt, Homo sapiens
  misc_RNA (1)...(19): siRNA sense strand
caggacaucugcaggaucu

SEQ ID NO: 1046236 - RNA, 19 nt, Homo sapiens
  misc_RNA (1)...(19): siRNA sense strand
gaucaugugcucagugaca

SEQ ID NO: 1046237 - RNA, 19 nt, Homo sapiens
  misc_RNA (1)...(19): siRNA sense strand
agaaguaagaccaaagaaa

SEQ ID NO: 1046238 - RNA, 19 nt, Homo sapiens
  misc_RNA (1)...(19): siRNA sense strand
gaucugccacugugaagga

SEQ ID NO: 1046239 - RNA, 19 nt, Homo sapiens
  misc_RNA (1)...(19): siRNA sense strand
ccuuguaugugcucauuga

SEQ ID NO: 1046240 - RNA, 19 nt, Homo sapiens
  misc_RNA (1)...(19): siRNA sense strand
agaagacuuugggacauuu

SEQ ID NO: 1046241 - RNA, 19 nt, Homo sapiens
  misc_RNA (1)...(19): siRNA sense strand
gcacaggaagccuccacuu

SEQ ID NO: 1046242 - RNA, 19 nt, Homo sapiens
  misc_RNA (1)...(19): siRNA sense strand
uaugugcaauuguggaaga

SEQ ID NO: 1046243 - RNA, 19 nt, Homo sapiens
  misc_RNA (1)...(19): siRNA sense strand
ggaagaacagaaugagaag

SEQ ID NO: 1046244 - RNA, 19 nt, Homo sapiens
  misc_RNA (1)...(19): siRNA sense strand
uauguucaguguaaagugu

SEQ ID NO: 1046245 - RNA, 19 nt, Homo sapiens
  misc_RNA (1)...(19): siRNA sense strand
gggagaaguugcagaugac

SEQ ID NO: 1046246 - RNA, 19 nt, Homo sapiens
  misc_RNA (1)...(19): siRNA sense strand
gaagacacuggagcagaaa

SEQ ID NO: 1046247 - RNA, 19 nt, Homo sapiens
  misc_RNA (1)...(19): siRNA sense strand
ccacgucauugccaucaca

SEQ ID NO: 1046248 - RNA, 19 nt, Homo sapiens
  misc_RNA (1)...(19): siRNA sense strand
ggaagaucaugugcucagu

SEQ ID NO: 1046249 - RNA, 19 nt, Homo sapiens
  misc_RNA (1)...(19): siRNA sense strand
gaagaacagaaugagaaga

SEQ ID NO: 1046250 - RNA, 19 nt, Homo sapiens
  misc_RNA (1)...(19): siRNA sense strand
gaagagacucaaggccuau

SEQ ID NO: 1046251 - RNA, 19 nt, Homo sapiens
  misc_RNA (1)...(19): siRNA sense strand
ugagaagacuuugggacau

SEQ ID NO: 1046252 - RNA, 19 nt, Homo sapiens
  misc_RNA (1)...(19): siRNA sense strand
ucauugccaucacaugugu

SEQ ID NO: 1046253 - RNA, 19 nt, Homo sapiens
  misc_RNA (1)...(19): siRNA sense strand
acuaacagagcccaacuuu

SEQ ID NO: 1046254 - RNA, 19 nt, Homo sapiens
  misc_RNA (1)...(19): siRNA sense strand
ucaaaacuguccagaaaca

SEQ ID NO: 1046255 - RNA, 19 nt, Homo sapiens
  misc_RNA (1)...(19): siRNA sense strand
cacuggagcagaaaucauu

SEQ ID NO: 1046256 - RNA, 19 nt, Homo sapiens
  misc_RNA (1)...(19): siRNA sense strand
ucaagcaacauuucuaagg

SEQ ID NO: 1046257 - RNA, 19 nt, Homo sapiens
  misc_RNA (1)...(19): siRNA sense strand
acagaaguaagaccaaaga

SEQ ID NO: 1046258 - RNA, 19 nt, Homo sapiens
  misc_RNA (1)...(19): siRNA sense strand
aacagaaugagaagacuuu

SEQ ID NO: 1046259 - RNA, 19 nt, Homo sapiens
  misc_RNA (1)...(19): siRNA sense strand
gcccaacuuugaaaauaaa

SEQ ID NO: 1046260 - RNA, 19 nt, Homo sapiens
  misc_RNA (1)...(19): siRNA sense strand
guccuuguaugugcucauu

SEQ ID NO: 1046261 - RNA, 19 nt, Homo sapiens
  misc_RNA (1)...(19): siRNA sense strand
gcucugcaaguaugaguuc

SEQ ID NO: 1046262 - RNA, 19 nt, Homo sapiens
  misc_RNA (1)...(19): siRNA sense strand
acagagcccaacuuugaaa

SEQ ID NO: 1046263 - RNA, 19 nt, Homo sapiens
  misc_RNA (1)...(19): siRNA sense strand
gagcgcaggaagaucaugu

SEQ ID NO: 1046264 - RNA, 19 nt, Homo sapiens
  misc_RNA (1)...(19): siRNA sense strand
gaaaaugggagaaguugca

SEQ ID NO: 1046265 - RNA, 19 nt, Homo sapiens
  misc_RNA (1)...(19): siRNA sense strand
ucauggagaccaagcugaa

SEQ ID NO: 1046266 - RNA, 19 nt, Homo sapiens
  misc_RNA (1)...(19): siRNA sense strand
cacagagccugaagacacu

SEQ ID NO: 1046267 - RNA, 19 nt, Homo sapiens
  misc_RNA (1)...(19): siRNA sense strand
gaucuauguucaaaacugu

SEQ ID NO: 1046268 - RNA, 19 nt, Homo sapiens
  misc_RNA (1)...(19): siRNA sense strand
guacugcugaggagaucaa

SEQ ID NO: 1046269 - RNA, 19 nt, Homo sapiens
  misc_RNA (1)...(19): siRNA sense strand
aagcugaagccacugagaa

SEQ ID NO: 1046270 - RNA, 19 nt, Homo sapiens
  misc_RNA (1)...(19): siRNA sense strand
gagagggaagaacagaaug

SEQ ID NO: 1046271 - RNA, 19 nt, Homo sapiens
  misc_RNA (1)...(19): siRNA sense strand
agagggaagaacagaauga

SEQ ID NO: 1046272 - RNA, 19 nt, Homo sapiens
  misc_RNA (1)...(19): siRNA sense strand
aaguguaugugcaauugug

SEQ ID NO: 1046273 - RNA, 19 nt, Homo sapiens
  misc_RNA (1)...(19): siRNA sense strand
ugggacauuucaugaguca

SEQ ID NO: 1046274 - RNA, 19 nt, Homo sapiens
  misc_RNA (1)...(19): siRNA sense strand
gccaggacaucugcaggau

SEQ ID NO: 1046275 - RNA, 19 nt, Homo sapiens
  misc_RNA (1)...(19): siRNA sense strand
gaagacuuugggacauuuc

SEQ ID NO: 1046276 - RNA, 19 nt, Homo sapiens
  misc_RNA (1)...(19): siRNA sense strand
ugcgagcucugcaaguaug

SEQ ID NO: 1046277 - RNA, 19 nt, Homo sapiens
  misc_RNA (1)...(19): siRNA sense strand
cauucaagcaacauuucua

SEQ ID NO: 1046278 - RNA, 19 nt, Homo sapiens
  misc_RNA (1)...(19): siRNA sense strand
gagacucaaggccuauaau

SEQ ID NO: 1046279 - RNA, 19 nt, Homo sapiens
  misc_RNA (1)...(19): siRNA sense strand
cgucauugccaucacaugu

SEQ ID NO: 1046280 - RNA, 19 nt, Homo sapiens
  misc_RNA (1)...(19): siRNA sense strand
uguguggucugguccuugu

SEQ ID NO: 1046281 - RNA, 19 nt, Homo sapiens
  misc_RNA (1)...(19): siRNA sense strand
ggucugguccuuguaugug

SEQ ID NO: 1046282 - RNA, 19 nt, Homo sapiens
  misc_RNA (1)...(19): siRNA sense strand
gguaucaguuucaucauua

SEQ ID NO: 1046283 - RNA, 19 nt, Homo sapiens
  misc_RNA (1)...(19): siRNA sense strand
gugcagagauaacaaauga

SEQ ID NO: 1046284 - RNA, 19 nt, Homo sapiens
  misc_RNA (1)...(19): siRNA sense strand
ggaaucaacaccuuuauug

SEQ ID NO: 1046285 - RNA, 19 nt, Homo sapiens
  misc_RNA (1)...(19): siRNA sense strand
gaaacccacaucagaaaua

SEQ ID NO: 1046286 - RNA, 19 nt, Homo sapiens
  misc_RNA (1)...(19): siRNA sense strand
gcagagaaauaaagaaguc

SEQ ID NO: 1046287 - RNA, 19 nt, Homo sapiens
  misc_RNA (1)...(19): siRNA sense strand
caaugccgguucuuuauuu

SEQ ID NO: 1046288 - RNA, 19 nt, Homo sapiens
  misc_RNA (1)...(19): siRNA sense strand
aagcgugaauccaguauua

SEQ ID NO: 1046289 - RNA, 19 nt, Homo sapiens
  misc_RNA (1)...(19): siRNA sense strand
ggaacgcuaugccuuggua

SEQ ID NO: 1046290 - RNA, 19 nt, Homo sapiens
  misc_RNA (1)...(19): siRNA sense strand
gauaacaaaugagaucuuc

SEQ ID NO: 1046291 - RNA, 19 nt, Homo sapiens
  misc_RNA (1)...(19): siRNA sense strand
gcagaaacccacaucagaa

SEQ ID NO: 1046292 - RNA, 19 nt, Homo sapiens
  misc_RNA (1)...(19): siRNA sense strand
cuaagcaguuccuggauuu

SEQ ID NO: 1046293 - RNA, 19 nt, Homo sapiens
  misc_RNA (1)...(19): siRNA sense strand
gcagagauaacaaaugaga

SEQ ID NO: 1046294 - RNA, 19 nt, Homo sapiens
  misc_RNA (1)...(19): siRNA sense strand
ggaagagaguaauaucauc

SEQ ID NO: 1046295 - RNA, 19 nt, Homo sapiens
  misc_RNA (1)...(19): siRNA sense strand
gaagagaguaauaucauca

SEQ ID NO: 1046296 - RNA, 19 nt, Homo sapiens
  misc_RNA (1)...(19): siRNA sense strand
gucaucaucuugcaaggua

SEQ ID NO: 1046297 - RNA, 19 nt, Homo sapiens
  misc_RNA (1)...(19): siRNA sense strand
gggcucaacuugccaguca

SEQ ID NO: 1046298 - RNA, 19 nt, Homo sapiens
  misc_RNA (1)...(19): siRNA sense strand
ggugcuggcucaacucuug

SEQ ID NO: 1046299 - RNA, 19 nt, Homo sapiens
  misc_RNA (1)...(19): siRNA sense strand
uuacagaacuucacuaagc

SEQ ID NO: 1046300 - RNA, 19 nt, Homo sapiens
  misc_RNA (1)...(19): siRNA sense strand
cuaaugagaagcauguaua

SEQ ID NO: 1046301 - RNA, 19 nt, Homo sapiens
  misc_RNA (1)...(19): siRNA sense strand
gcauguauauuaccuacuc

SEQ ID NO: 1046302 - RNA, 19 nt, Homo sapiens
  misc_RNA (1)...(19): siRNA sense strand
caagguaucaguuucauca

SEQ ID NO: 1046303 - RNA, 19 nt, Homo sapiens
  misc_RNA (1)...(19): siRNA sense strand
gugcagugguuccaagauu

SEQ ID NO: 1046304 - RNA, 19 nt, Homo sapiens
  misc_RNA (1)...(19): siRNA sense strand
gugauccucugcuuauuug

SEQ ID NO: 1046305 - RNA, 19 nt, Homo sapiens
  misc_RNA (1)...(19): siRNA sense strand
ccagcuauaugcuucuuau

SEQ ID NO: 1046306 - RNA, 19 nt, Homo sapiens
  misc_RNA (1)...(19): siRNA sense strand
ugucaaugccgguucuuua

SEQ ID NO: 1046307 - RNA, 19 nt, Homo sapiens
  misc_RNA (1)...(19): siRNA sense strand
aaccauuccuuaucccaua

SEQ ID NO: 1046308 - RNA, 19 nt, Homo sapiens
  misc_RNA (1)...(19): siRNA sense strand
caagugagaauccagaugu

SEQ ID NO: 1046309 - RNA, 19 nt, Homo sapiens
  misc_RNA (1)...(19): siRNA sense strand
ugagaagcauguauauuac

SEQ ID NO: 1046310 - RNA, 19 nt, Homo sapiens
  misc_RNA (1)...(19): siRNA sense strand
caacuugccagucagcauu

SEQ ID NO: 1046311 - RNA, 19 nt, Homo sapiens
  misc_RNA (1)...(19): siRNA sense strand
cagaaacccacaucagaaa

SEQ ID NO: 1046312 - RNA, 19 nt, Homo sapiens
  misc_RNA (1)...(19): siRNA sense strand
ccaugcagguuguagaguu

SEQ ID NO: 1046313 - RNA, 19 nt, Homo sapiens
  misc_RNA (1)...(19): siRNA sense strand
agaggaaacucacgaaggu

SEQ ID NO: 1046314 - RNA, 19 nt, Homo sapiens
  misc_RNA (1)...(19): siRNA sense strand
ugacugugauuguaguaga

SEQ ID NO: 1046315 - RNA, 19 nt, Homo sapiens
  misc_RNA (1)...(19): siRNA sense strand
uagaagcuauugcaaccuu

SEQ ID NO: 1046316 - RNA, 19 nt, Homo sapiens
  misc_RNA (1)...(19): siRNA sense strand
cuacuacgccuacauauac

SEQ ID NO: 1046317 - RNA, 19 nt, Homo sapiens
  misc_RNA (1)...(19): siRNA sense strand
ccagaggaagagaguaaua

SEQ ID NO: 1046318 - RNA, 19 nt, Homo sapiens
  misc_RNA (1)...(19): siRNA sense strand
ucagagagggcucaacuug

SEQ ID NO: 1046319 - RNA, 19 nt, Homo sapiens
  misc_RNA (1)...(19): siRNA sense strand
aaacccagcagagaaauaa

SEQ ID NO: 1046320 - RNA, 19 nt, Homo sapiens
  misc_RNA (1)...(19): siRNA sense strand
uauauuaccuacucaacca

SEQ ID NO: 1046321 - RNA, 19 nt, Homo sapiens
  misc_RNA (1)...(19): siRNA sense strand
gaggaagagaguaauauca

SEQ ID NO: 1046322 - RNA, 19 nt, Homo sapiens
  misc_RNA (1)...(19): siRNA sense strand
ccacugugauccucugcuu

SEQ ID NO: 1046323 - RNA, 19 nt, Homo sapiens
  misc_RNA (1)...(19): siRNA sense strand
caaugugacuguggacguu

SEQ ID NO: 1046324 - RNA, 19 nt, Homo sapiens
  misc_RNA (1)...(19): siRNA sense strand
gaagucaucaagcgugaau

SEQ ID NO: 1046325 - RNA, 19 nt, Homo sapiens
  misc_RNA (1)...(19): siRNA sense strand
ccugaccagugcagagaua

SEQ ID NO: 1046326 - RNA, 19 nt, Homo sapiens
  misc_RNA (1)...(19): siRNA sense strand
gugcuaugcuggguauuug

SEQ ID NO: 1046327 - RNA, 19 nt, Homo sapiens
  misc_RNA (1)...(19): siRNA sense strand
cagaaauacucagcacuuc

SEQ ID NO: 1046328 - RNA, 19 nt, Homo sapiens
  misc_RNA (1)...(19): siRNA sense strand
gaaauacucagcacuucag

SEQ ID NO: 1046329 - RNA, 19 nt, Homo sapiens
  misc_RNA (1)...(19): siRNA sense strand
gcagugguuccaagauuug

SEQ ID NO: 1046330 - RNA, 19 nt, Homo sapiens
  misc_RNA (1)...(19): siRNA sense strand
uggcgaacaugucguacuu

SEQ ID NO: 1046331 - RNA, 19 nt, Homo sapiens
  misc_RNA (1)...(19): siRNA sense strand
guaauaucaucaugucaac

SEQ ID NO: 1046332 - RNA, 19 nt, Homo sapiens
  misc_RNA (1)...(19): siRNA sense strand
agaguaauaucaucauguc

SEQ ID NO: 1046333 - RNA, 19 nt, Homo sapiens
  misc_RNA (1)...(19): siRNA sense strand
gagaguaauaucaucaugu

SEQ ID NO: 1046334 - RNA, 19 nt, Homo sapiens
  misc_RNA (1)...(19): siRNA sense strand
ugcaguggguuaugugaaa

SEQ ID NO: 1046335 - RNA, 19 nt, Homo sapiens
  misc_RNA (1)...(19): siRNA sense strand
gcgaacaugucguacuuuu

SEQ ID NO: 1046336 - RNA, 19 nt, Homo sapiens
  misc_RNA (1)...(19): siRNA sense strand
uguuuguccucaccgauua

SEQ ID NO: 1046337 - RNA, 19 nt, Homo sapiens
  misc_RNA (1)...(19): siRNA sense strand
gaucagagagggcucaacu

SEQ ID NO: 1046338 - RNA, 19 nt, Homo sapiens
  misc_RNA (1)...(19): siRNA sense strand
gaaagucaacugggaccuu

SEQ ID NO: 1046339 - RNA, 19 nt, Homo sapiens
  misc_RNA (1)...(19): siRNA sense strand
ucagaaauacucagcacuu

SEQ ID NO: 1046340 - RNA, 19 nt, Homo sapiens
  misc_RNA (1)...(19): siRNA sense strand
gcaaaacccagcagagaaa

SEQ ID NO: 1046341 - RNA, 19 nt, Homo sapiens
  misc_RNA (1)...(19): siRNA sense strand
ugaagaccaugcagguugu

SEQ ID NO: 1046342 - RNA, 19 nt, Homo sapiens
  misc_RNA (1)...(19): siRNA sense strand
uuaccuggcugcugcuguu

SEQ ID NO: 1046343 - RNA, 19 nt, Homo sapiens
  misc_RNA (1)...(19): siRNA sense strand
gaagcuauugcaaccuuug

SEQ ID NO: 1046344 - RNA, 19 nt, Homo sapiens
  misc_RNA (1)...(19): siRNA sense strand
ccuacuacgccuacauaua

SEQ ID NO: 1046345 - RNA, 19 nt, Homo sapiens
  misc_RNA (1)...(19): siRNA sense strand
ggccuacuacgccuacaua

SEQ ID NO: 1046346 - RNA, 19 nt, Homo sapiens
  misc_RNA (1)...(19): siRNA sense strand
ccucagaaccauuccuuau

SEQ ID NO: 1046347 - RNA, 19 nt, Homo sapiens
  misc_RNA (1)...(19): siRNA sense strand
caaccaaaucccagaagga

SEQ ID NO: 1046348 - RNA, 19 nt, Homo sapiens
  misc_RNA (1)...(19): siRNA sense strand
gauauucaaguccagcuau

SEQ ID NO: 1046349 - RNA, 19 nt, Homo sapiens
  misc_RNA (1)...(19): siRNA sense strand
ugcagugguuccaagauuu

SEQ ID NO: 1046350 - RNA, 19 nt, Homo sapiens
  misc_RNA (1)...(19): siRNA sense strand
gaacaugucguacuuuuac

SEQ ID NO: 1046351 - RNA, 19 nt, Homo sapiens
  misc_RNA (1)...(19): siRNA sense strand
acuaagcaguuccuggauu

SEQ ID NO: 1046352 - RNA, 19 nt, Homo sapiens
  misc_RNA (1)...(19): siRNA sense strand
ugaauaagggccagcugaa

SEQ ID NO: 1046353 - RNA, 19 nt, Homo sapiens
  misc_RNA (1)...(19): siRNA sense strand
ggucuucucaguugucaau

SEQ ID NO: 1046354 - RNA, 19 nt, Homo sapiens
  misc_RNA (1)...(19): siRNA sense strand
ccgauuauguccgcuacaa

SEQ ID NO: 1046355 - RNA, 19 nt, Homo sapiens
  misc_RNA (1)...(19): siRNA sense strand
gaagcauguauauuaccua

SEQ ID NO: 1046356 - RNA, 19 nt, Homo sapiens
  misc_RNA (1)...(19): siRNA sense strand
gcuaugccuugguauuugg

SEQ ID NO: 1046357 - RNA, 19 nt, Homo sapiens
  misc_RNA (1)...(19): siRNA sense strand
cugguggucuucucaguug

SEQ ID NO: 1046358 - RNA, 19 nt, Homo sapiens
  misc_RNA (1)...(19): siRNA sense strand
aaugagaucuuccccguuu

SEQ ID NO: 1046359 - RNA, 19 nt, Homo sapiens
  misc_RNA (1)...(19): siRNA sense strand
gcuguuguuuggccaagga

SEQ ID NO: 1046360 - RNA, 19 nt, Homo sapiens
  misc_RNA (1)...(19): siRNA sense strand
ggucggugcuggcucaacu

SEQ ID NO: 1046361 - RNA, 19 nt, Homo sapiens
  misc_RNA (1)...(19): siRNA sense strand
ucagaaccauuccuuaucc

SEQ ID NO: 1046362 - RNA, 19 nt, Homo sapiens
  misc_RNA (1)...(19): siRNA sense strand
guauuucagauugcaguua

SEQ ID NO: 1046363 - RNA, 19 nt, Homo sapiens
  misc_RNA (1)...(19): siRNA sense strand
cauagcaguauuucagauu

SEQ ID NO: 1046364 - RNA, 19 nt, Homo sapiens
  misc_RNA (1)...(19): siRNA sense strand
ucuuauaaccauagcagua

SEQ ID NO: 1046365 - RNA, 19 nt, Homo sapiens
  misc_RNA (1)...(19): siRNA sense strand
auauucaaguccagcuaua

SEQ ID NO: 1046366 - RNA, 19 nt, Homo sapiens
  misc_RNA (1)...(19): siRNA sense strand
ucaaugccgguucuuuauu

SEQ ID NO: 1046367 - RNA, 19 nt, Homo sapiens
  misc_RNA (1)...(19): siRNA sense strand
gagcagaaacccacaucag

SEQ ID NO: 1046368 - RNA, 19 nt, Homo sapiens
  misc_RNA (1)...(19): siRNA sense strand
uaugcuggguauuugauau

SEQ ID NO: 1046369 - RNA, 19 nt, Homo sapiens
  misc_RNA (1)...(19): siRNA sense strand
gauuguaguagaucagaga

SEQ ID NO: 1046370 - RNA, 19 nt, Homo sapiens
  misc_RNA (1)...(19): siRNA sense strand
ccauagcaguauuucagau

SEQ ID NO: 1046371 - RNA, 19 nt, Homo sapiens
  misc_RNA (1)...(19): siRNA sense strand
gccaaggagugaagaccau

SEQ ID NO: 1046372 - RNA, 19 nt, Homo sapiens
  misc_RNA (1)...(19): siRNA sense strand
gagcuauuuugcaguaauu

SEQ ID NO: 1046373 - RNA, 19 nt, Homo sapiens
  misc_RNA (1)...(19): siRNA sense strand
gaaucaacaccuuuauugc

SEQ ID NO: 1046374 - RNA, 19 nt, Homo sapiens
  misc_RNA (1)...(19): siRNA sense strand
gcauuacacagccaauauc

SEQ ID NO: 1046375 - RNA, 19 nt, Homo sapiens
  misc_RNA (1)...(19): siRNA sense strand
gagaaauaaagaagucauc

SEQ ID NO: 1046376 - RNA, 19 nt, Homo sapiens
  misc_RNA (1)...(19): siRNA sense strand
cagcagagaaauaaagaag

SEQ ID NO: 1046377 - RNA, 19 nt, Homo sapiens
  misc_RNA (1)...(19): siRNA sense strand
gcgugaauccaguauuaga

SEQ ID NO: 1046378 - RNA, 19 nt, Homo sapiens
  misc_RNA (1)...(19): siRNA sense strand
agagaguaauaucaucaug

SEQ ID NO: 1046379 - RNA, 19 nt, Homo sapiens
  misc_RNA (1)...(19): siRNA sense strand
auagcaguauuucagauug

SEQ ID NO: 1046380 - RNA, 19 nt, Homo sapiens
  misc_RNA (1)...(19): siRNA sense strand
cugaacagccugaaaccaa

SEQ ID NO: 1046381 - RNA, 19 nt, Homo sapiens
  misc_RNA (1)...(19): siRNA sense strand
gaauccaguauuagaggaa

SEQ ID NO: 1046382 - RNA, 19 nt, Homo sapiens
  misc_RNA (1)...(19): siRNA sense strand
caaggaaacuguuacuuca

SEQ ID NO: 1046383 - RNA, 19 nt, Homo sapiens
  misc_RNA (1)...(19): siRNA sense strand
gcugaaggcugcaguggaa

SEQ ID NO: 1046384 - RNA, 19 nt, Homo sapiens
  misc_RNA (1)...(19): siRNA sense strand
gacgacaaauguaaucuug

SEQ ID NO: 1046385 - RNA, 19 nt, Homo sapiens
  misc_RNA (1)...(19): siRNA sense strand
caaauguaaucuugccaaa

SEQ ID NO: 1046386 - RNA, 19 nt, Homo sapiens
  misc_RNA (1)...(19): siRNA sense strand
gaugggacuuucagaucua

SEQ ID NO: 1046387 - RNA, 19 nt, Homo sapiens
  misc_RNA (1)...(19): siRNA sense strand
ggaacgacgacaaauguaa

SEQ ID NO: 1046388 - RNA, 19 nt, Homo sapiens
  misc_RNA (1)...(19): siRNA sense strand
gaagacugcgcggaauuua

SEQ ID NO: 1046389 - RNA, 19 nt, Homo sapiens
  misc_RNA (1)...(19): siRNA sense strand
ggaagacugcgcggaauuu

SEQ ID NO: 1046390 - RNA, 19 nt, Homo sapiens
  misc_RNA (1)...(19): siRNA sense strand
gaacgacgacaaauguaau

SEQ ID NO: 1046391 - RNA, 19 nt, Homo sapiens
  misc_RNA (1)...(19): siRNA sense strand
gaaccugacccagcuuaaa

SEQ ID NO: 1046392 - RNA, 19 nt, Homo sapiens
  misc_RNA (1)...(19): siRNA sense strand
ggaugggacuuucagaucu

SEQ ID NO: 1046393 - RNA, 19 nt, Homo sapiens
  misc_RNA (1)...(19): siRNA sense strand
ggacggcucaccucuguug

SEQ ID NO: 1046394 - RNA, 19 nt, Homo sapiens
  misc_RNA (1)...(19): siRNA sense strand
ugggugagcuuccagagaa

SEQ ID NO: 1046395 - RNA, 19 nt, Homo sapiens
  misc_RNA (1)...(19): siRNA sense strand
ugggugagcuuccagagaa

SEQ ID NO: 1046396 - RNA, 19 nt, Homo sapiens
  misc_RNA (1)...(19): siRNA sense strand
ugggugagcuuccagagaa

SEQ ID NO: 1046397 - RNA, 19 nt, Homo sapiens
  misc_RNA (1)...(19): siRNA sense strand
ugggugagcuuccagagaa

SEQ ID NO: 1046398 - RNA, 19 nt, Homo sapiens
  misc_RNA (1)...(19): siRNA sense strand
ugggugagcuuccagagaa

SEQ ID NO: 1046399 - RNA, 19 nt, Homo sapiens
  misc_RNA (1)...(19): siRNA sense strand
ugggugagcuuccagagaa

SEQ ID NO: 1046400 - RNA, 19 nt, Homo sapiens
  misc_RNA (1)...(19): siRNA sense strand
ccaaggaaacuguuacuuc

SEQ ID NO: 1046401 - RNA, 19 nt, Homo sapiens
  misc_RNA (1)...(19): siRNA sense strand
ggaaacuguuacuucaugu

SEQ ID NO: 1046402 - RNA, 19 nt, Homo sapiens
  misc_RNA (1)...(19): siRNA sense strand
caucaccgccugcaaagaa

SEQ ID NO: 1046403 - RNA, 19 nt, Homo sapiens
  misc_RNA (1)...(19): siRNA sense strand
gaggagagcccaacaacgu

SEQ ID NO: 1046404 - RNA, 19 nt, Homo sapiens
  misc_RNA (1)...(19): siRNA sense strand
ggccuuggauuccgacaga

SEQ ID NO: 1046405 - RNA, 19 nt, Homo sapiens
  misc_RNA (1)...(19): siRNA sense strand
gcugagaggccuuggauuc

SEQ ID NO: 1046406 - RNA, 19 nt, Homo sapiens
  misc_RNA (1)...(19): siRNA sense strand
cagcugcagucuuccagaa

SEQ ID NO: 1046407 - RNA, 19 nt, Homo sapiens
  misc_RNA (1)...(19): siRNA sense strand
gcucuuggcugggcuccuu

SEQ ID NO: 1046408 - RNA, 19 nt, Homo sapiens
  misc_RNA (1)...(19): siRNA sense strand
gggcccagcucgucguaau

SEQ ID NO: 1046409 - RNA, 19 nt, Homo sapiens
  misc_RNA (1)...(19): siRNA sense strand
aauccaagcugcaggagau

SEQ ID NO: 1046410 - RNA, 19 nt, Homo sapiens
  misc_RNA (1)...(19): siRNA sense strand
gaggaagacugcgcggaau

SEQ ID NO: 1046411 - RNA, 19 nt, Homo sapiens
  misc_RNA (1)...(19): siRNA sense strand
acuguuacuucaugucuaa

SEQ ID NO: 1046412 - RNA, 19 nt, Homo sapiens
  misc_RNA (1)...(19): siRNA sense strand
cuaagcagcaggagaucua

SEQ ID NO: 1046413 - RNA, 19 nt, Homo sapiens
  misc_RNA (1)...(19): siRNA sense strand
guggacggcucaccucugu

SEQ ID NO: 1046414 - RNA, 19 nt, Homo sapiens
  misc_RNA (1)...(19): siRNA sense strand
cuaagcagcaggagaucua

SEQ ID NO: 1046415 - RNA, 19 nt, Homo sapiens
  misc_RNA (1)...(19): siRNA sense strand
cuaagcagcaggagaucua

SEQ ID NO: 1046416 - RNA, 19 nt, Homo sapiens
  misc_RNA (1)...(19): siRNA sense strand
aggaaacuguuacuucaug

SEQ ID NO: 1046417 - RNA, 19 nt, Homo sapiens
  misc_RNA (1)...(19): siRNA sense strand
caagcaguauuggaacaga

SEQ ID NO: 1046418 - RNA, 19 nt, Homo sapiens
  misc_RNA (1)...(19): siRNA sense strand
caaauucuggaucugcaaa

SEQ ID NO: 1046419 - RNA, 19 nt, Homo sapiens
  misc_RNA (1)...(19): siRNA sense strand
aagacgcgaucuaccagaa

SEQ ID NO: 1046420 - RNA, 19 nt, Homo sapiens
  misc_RNA (1)...(19): siRNA sense strand
gagcuuagcagggugucuu

SEQ ID NO: 1046421 - RNA, 19 nt, Homo sapiens
  misc_RNA (1)...(19): siRNA sense strand
cagaaccugacccagcuua

SEQ ID NO: 1046422 - RNA, 19 nt, Homo sapiens
  misc_RNA (1)...(19): siRNA sense strand
ggagcugacucggcugaag

SEQ ID NO: 1046423 - RNA, 19 nt, Homo sapiens
  misc_RNA (1)...(19): siRNA sense strand
gggugagcuuccagagaaa

SEQ ID NO: 1046424 - RNA, 19 nt, Homo sapiens
  misc_RNA (1)...(19): siRNA sense strand
gcuggaacgacgacaaaug

SEQ ID NO: 1046425 - RNA, 19 nt, Homo sapiens
  misc_RNA (1)...(19): siRNA sense strand
ggaacuggcacgacuccau

SEQ ID NO: 1046426 - RNA, 19 nt, Homo sapiens
  misc_RNA (1)...(19): siRNA sense strand
gagcuuccagagaaaucua

SEQ ID NO: 1046427 - RNA, 19 nt, Homo sapiens
  misc_RNA (1)...(19): siRNA sense strand
gggugagcuuccagagaaa

SEQ ID NO: 1046428 - RNA, 19 nt, Homo sapiens
  misc_RNA (1)...(19): siRNA sense strand
gagcuuccagagaaaucua

SEQ ID NO: 1046429 - RNA, 19 nt, Homo sapiens
  misc_RNA (1)...(19): siRNA sense strand
gggugagcuuccagagaaa

SEQ ID NO: 1046430 - RNA, 19 nt, Homo sapiens
  misc_RNA (1)...(19): siRNA sense strand
gagcuuccagagaaaucua

SEQ ID NO: 1046431 - RNA, 19 nt, Homo sapiens
  misc_RNA (1)...(19): siRNA sense strand
gggugagcuuccagagaaa

SEQ ID NO: 1046432 - RNA, 19 nt, Homo sapiens
  misc_RNA (1)...(19): siRNA sense strand
gagcuuccagagaaaucua

SEQ ID NO: 1046433 - RNA, 19 nt, Homo sapiens
  misc_RNA (1)...(19): siRNA sense strand
gggugagcuuccagagaaa

SEQ ID NO: 1046434 - RNA, 19 nt, Homo sapiens
  misc_RNA (1)...(19): siRNA sense strand
gagcuuccagagaaaucua

SEQ ID NO: 1046435 - RNA, 19 nt, Homo sapiens
  misc_RNA (1)...(19): siRNA sense strand
gggugagcuuccagagaaa

SEQ ID NO: 1046436 - RNA, 19 nt, Homo sapiens
  misc_RNA (1)...(19): siRNA sense strand
gagcuuccagagaaaucua

SEQ ID NO: 1046437 - RNA, 19 nt, Homo sapiens
  misc_RNA (1)...(19): siRNA sense strand
ggaaggcacguggcaaugg

SEQ ID NO: 1046438 - RNA, 19 nt, Homo sapiens
  misc_RNA (1)...(19): siRNA sense strand
uccuacagcugcagucuuc

SEQ ID NO: 1046439 - RNA, 19 nt, Homo sapiens
  misc_RNA (1)...(19): siRNA sense strand
ggacuuucagaucuaaauc

SEQ ID NO: 1046440 - RNA, 19 nt, Homo sapiens
  misc_RNA (1)...(19): siRNA sense strand
ccaagcugcaggagaucua

SEQ ID NO: 1046441 - RNA, 19 nt, Homo sapiens
  misc_RNA (1)...(19): siRNA sense strand
cgacgacaaauguaaucuu

SEQ ID NO: 1046442 - RNA, 19 nt, Homo sapiens
  misc_RNA (1)...(19): siRNA sense strand
ccagcucgucguaaucaaa

SEQ ID NO: 1046443 - RNA, 19 nt, Homo sapiens
  misc_RNA (1)...(19): siRNA sense strand
ccauaagucaggaacaauc

SEQ ID NO: 1046444 - RNA, 19 nt, Homo sapiens
  misc_RNA (1)...(19): siRNA sense strand
ggaggaggaacagcugaga

SEQ ID NO: 1046445 - RNA, 19 nt, Homo sapiens
  misc_RNA (1)...(19): siRNA sense strand
agacugcgcggaauuuagu

SEQ ID NO: 1046446 - RNA, 19 nt, Homo sapiens
  misc_RNA (1)...(19): siRNA sense strand
cuccauaagucaggaacaa

SEQ ID NO: 1046447 - RNA, 19 nt, Homo sapiens
  misc_RNA (1)...(19): siRNA sense strand
ucaccuggaugggacuuuc

SEQ ID NO: 1046448 - RNA, 19 nt, Homo sapiens
  misc_RNA (1)...(19): siRNA sense strand
gaaacuguuacuucauguc

SEQ ID NO: 1046449 - RNA, 19 nt, Homo sapiens
  misc_RNA (1)...(19): siRNA sense strand
ccgacagacucgaggauac

SEQ ID NO: 1046450 - RNA, 19 nt, Homo sapiens
  misc_RNA (1)...(19): siRNA sense strand
cagggaugaagaacaguuu

SEQ ID NO: 1046451 - RNA, 19 nt, Homo sapiens
  misc_RNA (1)...(19): siRNA sense strand
gggacuuucagaucuaaau

SEQ ID NO: 1046452 - RNA, 19 nt, Homo sapiens
  misc_RNA (1)...(19): siRNA sense strand
cagcugagaggccuuggau

SEQ ID NO: 1046453 - RNA, 19 nt, Homo sapiens
  misc_RNA (1)...(19): siRNA sense strand
caggaaggcacguggcaau

SEQ ID NO: 1046454 - RNA, 19 nt, Homo sapiens
  misc_RNA (1)...(19): siRNA sense strand
ggcaagacgcgaucuacca

SEQ ID NO: 1046455 - RNA, 19 nt, Homo sapiens
  misc_RNA (1)...(19): siRNA sense strand
cgacagacucgaggauaca

SEQ ID NO: 1046456 - RNA, 19 nt, Homo sapiens
  misc_RNA (1)...(19): siRNA sense strand
ccagggaugaagaacaguu

SEQ ID NO: 1046457 - RNA, 19 nt, Homo sapiens
  misc_RNA (1)...(19): siRNA sense strand
cuggaacgacgacaaaugu

SEQ ID NO: 1046458 - RNA, 19 nt, Homo sapiens
  misc_RNA (1)...(19): siRNA sense strand
gcccagcucgucguaauca

SEQ ID NO: 1046459 - RNA, 19 nt, Homo sapiens
  misc_RNA (1)...(19): siRNA sense strand
ggaaagacguaguugaaua

SEQ ID NO: 1046460 - RNA, 19 nt, Homo sapiens
  misc_RNA (1)...(19): siRNA sense strand
gcaaauaugugaacuguug

SEQ ID NO: 1046461 - RNA, 19 nt, Homo sapiens
  misc_RNA (1)...(19): siRNA sense strand
gaacaggguugaaguaugu

SEQ ID NO: 1046462 - RNA, 19 nt, Homo sapiens
  misc_RNA (1)...(19): siRNA sense strand
gaggguaucucauuaggua

SEQ ID NO: 1046463 - RNA, 19 nt, Homo sapiens
  misc_RNA (1)...(19): siRNA sense strand
uagcauaacucaauucgua

SEQ ID NO: 1046464 - RNA, 19 nt, Homo sapiens
  misc_RNA (1)...(19): siRNA sense strand
agacagaucuuguuacauu

SEQ ID NO: 1046465 - RNA, 19 nt, Homo sapiens
  misc_RNA (1)...(19): siRNA sense strand
ggacauaggcacaaacuaa

SEQ ID NO: 1046466 - RNA, 19 nt, Homo sapiens
  misc_RNA (1)...(19): siRNA sense strand
ccaagaggguaucucauua

SEQ ID NO: 1046467 - RNA, 19 nt, Homo sapiens
  misc_RNA (1)...(19): siRNA sense strand
ggacaaacaccuuuagauu

SEQ ID NO: 1046468 - RNA, 19 nt, Homo sapiens
  misc_RNA (1)...(19): siRNA sense strand
ccaugaagcugcaauuaaa

SEQ ID NO: 1046469 - RNA, 19 nt, Homo sapiens
  misc_RNA (1)...(19): siRNA sense strand
acacagagcugcauauugu

SEQ ID NO: 1046470 - RNA, 19 nt, Homo sapiens
  misc_RNA (1)...(19): siRNA sense strand
gagcugauguccaugcuaa

SEQ ID NO: 1046471 - RNA, 19 nt, Homo sapiens
  misc_RNA (1)...(19): siRNA sense strand
ggacuuauuccuuuacaua

SEQ ID NO: 1046472 - RNA, 19 nt, Homo sapiens
  misc_RNA (1)...(19): siRNA sense strand
gagcugaugugcaugcuaa

SEQ ID NO: 1046473 - RNA, 19 nt, Homo sapiens
  misc_RNA (1)...(19): siRNA sense strand
aaacaucucucucuggaaa

SEQ ID NO: 1046474 - RNA, 19 nt, Homo sapiens
  misc_RNA (1)...(19): siRNA sense strand
gaacgaaugcuauuucaug

SEQ ID NO: 1046475 - RNA, 19 nt, Homo sapiens
  misc_RNA (1)...(19): siRNA sense strand
uaauguagcugauuuaugg

SEQ ID NO: 1046476 - RNA, 19 nt, Homo sapiens
  misc_RNA (1)...(19): siRNA sense strand
gagaacagaucacuuugga

SEQ ID NO: 1046477 - RNA, 19 nt, Homo sapiens
  misc_RNA (1)...(19): siRNA sense strand
gacaaacaccuuuagauuu

SEQ ID NO: 1046478 - RNA, 19 nt, Homo sapiens
  misc_RNA (1)...(19): siRNA sense strand
gcaauggacuuguggcaau

SEQ ID NO: 1046479 - RNA, 19 nt, Homo sapiens
  misc_RNA (1)...(19): siRNA sense strand
caacacugcucaauuguca

SEQ ID NO: 1046480 - RNA, 19 nt, Homo sapiens
  misc_RNA (1)...(19): siRNA sense strand
gcacagagauggaggucau

SEQ ID NO: 1046481 - RNA, 19 nt, Homo sapiens
  misc_RNA (1)...(19): siRNA sense strand
gaaagacguaguugaauau

SEQ ID NO: 1046482 - RNA, 19 nt, Homo sapiens
  misc_RNA (1)...(19): siRNA sense strand
guaguuaguucaaguggaa

SEQ ID NO: 1046483 - RNA, 19 nt, Homo sapiens
  misc_RNA (1)...(19): siRNA sense strand
acacggagcugaugugaau

SEQ ID NO: 1046484 - RNA, 19 nt, Homo sapiens
  misc_RNA (1)...(19): siRNA sense strand
agacguaguugaauauuug

SEQ ID NO: 1046485 - RNA, 19 nt, Homo sapiens
  misc_RNA (1)...(19): siRNA sense strand
gagccaaccauccgaaaua

SEQ ID NO: 1046486 - RNA, 19 nt, Homo sapiens
  misc_RNA (1)...(19): siRNA sense strand
gagcugacccgacucuuaa

SEQ ID NO: 1046487 - RNA, 19 nt, Homo sapiens
  misc_RNA (1)...(19): siRNA sense strand
gcacguggcaucugagaaa

SEQ ID NO: 1046488 - RNA, 19 nt, Homo sapiens
  misc_RNA (1)...(19): siRNA sense strand
gcaauucacuccucuucau

SEQ ID NO: 1046489 - RNA, 19 nt, Homo sapiens
  misc_RNA (1)...(19): siRNA sense strand
gaaacagcauugcauugug

SEQ ID NO: 1046490 - RNA, 19 nt, Homo sapiens
  misc_RNA (1)...(19): siRNA sense strand
gaaauacuccuuuggaucu

SEQ ID NO: 1046491 - RNA, 19 nt, Homo sapiens
  misc_RNA (1)...(19): siRNA sense strand
gagcaaacaucaaugaaaa

SEQ ID NO: 1046492 - RNA, 19 nt, Homo sapiens
  misc_RNA (1)...(19): siRNA sense strand
gaugaacucuuagaaagug

SEQ ID NO: 1046493 - RNA, 19 nt, Homo sapiens
  misc_RNA (1)...(19): siRNA sense strand
ccacaaccaugccaaugaa

SEQ ID NO: 1046494 - RNA, 19 nt, Homo sapiens
  misc_RNA (1)...(19): siRNA sense strand
gguaguggaacaauucuua

SEQ ID NO: 1046495 - RNA, 19 nt, Homo sapiens
  misc_RNA (1)...(19): siRNA sense strand
guucucuucucuuaaguua

SEQ ID NO: 1046496 - RNA, 19 nt, Homo sapiens
  misc_RNA (1)...(19): siRNA sense strand
gcauggagcugaugugcau

SEQ ID NO: 1046497 - RNA, 19 nt, Homo sapiens
  misc_RNA (1)...(19): siRNA sense strand
ugaaaggcaugcguacaua

SEQ ID NO: 1046498 - RNA, 19 nt, Homo sapiens
  misc_RNA (1)...(19): siRNA sense strand
acaaggagcugaaggagau

SEQ ID NO: 1046499 - RNA, 19 nt, Homo sapiens
  misc_RNA (1)...(19): siRNA sense strand
gcaccuaauggauauauuu

SEQ ID NO: 1046500 - RNA, 19 nt, Homo sapiens
  misc_RNA (1)...(19): siRNA sense strand
uaaggaaucuuggacuuga

SEQ ID NO: 1046501 - RNA, 19 nt, Homo sapiens
  misc_RNA (1)...(19): siRNA sense strand
ggagcugacccgacucuua

SEQ ID NO: 1046502 - RNA, 19 nt, Homo sapiens
  misc_RNA (1)...(19): siRNA sense strand
uagcagcucuacuaauaaa

SEQ ID NO: 1046503 - RNA, 19 nt, Homo sapiens
  misc_RNA (1)...(19): siRNA sense strand
ggagaugucgaaacuguaa

SEQ ID NO: 1046504 - RNA, 19 nt, Homo sapiens
  misc_RNA (1)...(19): siRNA sense strand
aaggaaagauugauguuug

SEQ ID NO: 1046505 - RNA, 19 nt, Homo sapiens
  misc_RNA (1)...(19): siRNA sense strand
gcacaaugcauguucuuau

SEQ ID NO: 1046506 - RNA, 19 nt, Homo sapiens
  misc_RNA (1)...(19): siRNA sense strand
cagcagucuugacaacuua

SEQ ID NO: 1046507 - RNA, 19 nt, Homo sapiens
  misc_RNA (1)...(19): siRNA sense strand
ggagcaaacaucaaugaaa

SEQ ID NO: 1046508 - RNA, 19 nt, Homo sapiens
  misc_RNA (1)...(19): siRNA sense strand
guuuggagcuggcauuuau

SEQ ID NO: 1046509 - RNA, 19 nt, Homo sapiens
  misc_RNA (1)...(19): siRNA sense strand
aacaaggucuuaacccaua

SEQ ID NO: 1046510 - RNA, 19 nt, Homo sapiens
  misc_RNA (1)...(19): siRNA sense strand
aaacaugaagcaaagguua

SEQ ID NO: 1046511 - RNA, 19 nt, Homo sapiens
  misc_RNA (1)...(19): siRNA sense strand
gaaggacagcauuggauuu

SEQ ID NO: 1046512 - RNA, 19 nt, Homo sapiens
  misc_RNA (1)...(19): siRNA sense strand
gaaugcaauuauccacaaa

SEQ ID NO: 1046513 - RNA, 19 nt, Homo sapiens
  misc_RNA (1)...(19): siRNA sense strand
cauaggcacaaacuaauua

SEQ ID NO: 1046514 - RNA, 19 nt, Homo sapiens
  misc_RNA (1)...(19): siRNA sense strand
ggauauauuugagagagaa

SEQ ID NO: 1046515 - RNA, 19 nt, Homo sapiens
  misc_RNA (1)...(19): siRNA sense strand
uaacucaauucguaaggaa

SEQ ID NO: 1046516 - RNA, 19 nt, Homo sapiens
  misc_RNA (1)...(19): siRNA sense strand
caucugcucugcccucuug

SEQ ID NO: 1046517 - RNA, 19 nt, Homo sapiens
  misc_RNA (1)...(19): siRNA sense strand
gaaguagucaaucuccuuu

SEQ ID NO: 1046518 - RNA, 19 nt, Homo sapiens
  misc_RNA (1)...(19): siRNA sense strand
gcugaaaacucuuccaaaa

SEQ ID NO: 1046519 - RNA, 19 nt, Homo sapiens
  misc_RNA (1)...(19): siRNA sense strand
aaacauggagcaguaguua

SEQ ID NO: 1046520 - RNA, 19 nt, Homo sapiens
  misc_RNA (1)...(19): siRNA sense strand
gaguguccgugguggaaua

SEQ ID NO: 1046521 - RNA, 19 nt, Homo sapiens
  misc_RNA (1)...(19): siRNA sense strand
aguauguucucuucucuua

SEQ ID NO: 1046522 - RNA, 19 nt, Homo sapiens
  misc_RNA (1)...(19): siRNA sense strand
cacaaugccuguucuuaug

SEQ ID NO: 1046523 - RNA, 19 nt, Homo sapiens
  misc_RNA (1)...(19): siRNA sense strand
gaaagucaacuccauuaca

SEQ ID NO: 1046524 - RNA, 19 nt, Homo sapiens
  misc_RNA (1)...(19): siRNA sense strand
cagaaagucaacuccauua

SEQ ID NO: 1046525 - RNA, 19 nt, Homo sapiens
  misc_RNA (1)...(19): siRNA sense strand
ggauauaacagaguaaaga

SEQ ID NO: 1046526 - RNA, 19 nt, Homo sapiens
  misc_RNA (1)...(19): siRNA sense strand
auaaagaguuucagucugu

SEQ ID NO: 1046527 - RNA, 19 nt, Homo sapiens
  misc_RNA (1)...(19): siRNA sense strand
acagaucacuuuggaugua

SEQ ID NO: 1046528 - RNA, 19 nt, Homo sapiens
  misc_RNA (1)...(19): siRNA sense strand
ggauggaaauacuccuuug

SEQ ID NO: 1046529 - RNA, 19 nt, Homo sapiens
  misc_RNA (1)...(19): siRNA sense strand
ggugaaacaugaagcaaag

SEQ ID NO: 1046530 - RNA, 19 nt, Homo sapiens
  misc_RNA (1)...(19): siRNA sense strand
uaaaugcaauggacuugug

SEQ ID NO: 1046531 - RNA, 19 nt, Homo sapiens
  misc_RNA (1)...(19): siRNA sense strand
gcagaaagucaacuccauu

SEQ ID NO: 1046532 - RNA, 19 nt, Homo sapiens
  misc_RNA (1)...(19): siRNA sense strand
agagagaacagaucacuuu

SEQ ID NO: 1046533 - RNA, 19 nt, Homo sapiens
  misc_RNA (1)...(19): siRNA sense strand
ggugugauccuaacauuau

SEQ ID NO: 1046534 - RNA, 19 nt, Homo sapiens
  misc_RNA (1)...(19): siRNA sense strand
ggaaggacagcauuggauu

SEQ ID NO: 1046535 - RNA, 19 nt, Homo sapiens
  misc_RNA (1)...(19): siRNA sense strand
aaaggagguuccaggagua

SEQ ID NO: 1046536 - RNA, 19 nt, Homo sapiens
  misc_RNA (1)...(19): siRNA sense strand
ggacaaaugggcuuucaca

SEQ ID NO: 1046537 - RNA, 19 nt, Homo sapiens
  misc_RNA (1)...(19): siRNA sense strand
aaacagggauggaaauacu

SEQ ID NO: 1046538 - RNA, 19 nt, Homo sapiens
  misc_RNA (1)...(19): siRNA sense strand
ggucagacuucucuacaca

SEQ ID NO: 1046539 - RNA, 19 nt, Homo sapiens
  misc_RNA (1)...(19): siRNA sense strand
gcacgagaagcugauguua

SEQ ID NO: 1046540 - RNA, 19 nt, Homo sapiens
  misc_RNA (1)...(19): siRNA sense strand
gcggaaagacguaguugaa

SEQ ID NO: 1046541 - RNA, 19 nt, Homo sapiens
  misc_RNA (1)...(19): siRNA sense strand
agcauuagcugaauauguu

SEQ ID NO: 1046542 - RNA, 19 nt, Homo sapiens
  misc_RNA (1)...(19): siRNA sense strand
gaggaagagaugcaaagua

SEQ ID NO: 1046543 - RNA, 19 nt, Homo sapiens
  misc_RNA (1)...(19): siRNA sense strand
agacaaaggaggacuuauu

SEQ ID NO: 1046544 - RNA, 19 nt, Homo sapiens
  misc_RNA (1)...(19): siRNA sense strand
uaagaacaggguugaagua

SEQ ID NO: 1046545 - RNA, 19 nt, Homo sapiens
  misc_RNA (1)...(19): siRNA sense strand
gcucuacucacaccauuaa

SEQ ID NO: 1046546 - RNA, 19 nt, Homo sapiens
  misc_RNA (1)...(19): siRNA sense strand
aggcuuauccugaguauuu

SEQ ID NO: 1046547 - RNA, 19 nt, Homo sapiens
  misc_RNA (1)...(19): siRNA sense strand
gacagaucuuguuacauuu

SEQ ID NO: 1046548 - RNA, 19 nt, Homo sapiens
  misc_RNA (1)...(19): siRNA sense strand
ugaaugcaauuauccacaa

SEQ ID NO: 1046549 - RNA, 19 nt, Homo sapiens
  misc_RNA (1)...(19): siRNA sense strand
gcacaaacuaauuaaagga

SEQ ID NO: 1046550 - RNA, 19 nt, Homo sapiens
  misc_RNA (1)...(19): siRNA sense strand
gcucugcccucuuguuaca

SEQ ID NO: 1046551 - RNA, 19 nt, Homo sapiens
  misc_RNA (1)...(19): siRNA sense strand
gaugggaaaugaaaaugua

SEQ ID NO: 1046552 - RNA, 19 nt, Homo sapiens
  misc_RNA (1)...(19): siRNA sense strand
uuaaugcucuggauaaucu

SEQ ID NO: 1046553 - RNA, 19 nt, Homo sapiens
  misc_RNA (1)...(19): siRNA sense strand
aaagucaacuccauuacau

SEQ ID NO: 1046554 - RNA, 19 nt, Homo sapiens
  misc_RNA (1)...(19): siRNA sense strand
gauauucaagaucugcuua

SEQ ID NO: 1046555 - RNA, 19 nt, Homo sapiens
  misc_RNA (1)...(19): siRNA sense strand
guggaacaauucuuauaga

SEQ ID NO: 1046556 - RNA, 19 nt, Homo sapiens
  misc_RNA (1)...(19): siRNA sense strand
uuacgggcauguagaugua

SEQ ID NO: 1046557 - RNA, 19 nt, Homo sapiens
  misc_RNA (1)...(19): siRNA sense strand
gacaaaggaggacuuauuc

SEQ ID NO: 1046558 - RNA, 19 nt, Homo sapiens
  misc_RNA (1)...(19): siRNA sense strand
gaucacuuuggauguauua

SEQ ID NO: 1046559 - RNA, 19 nt, Homo sapiens
  misc_RNA (1)...(19): siRNA sense strand
gcauauaucucucaucugu

SEQ ID NO: 1046560 - RNA, 19 nt, Homo sapiens
  misc_RNA (1)...(19): siRNA sense strand
guacauagucuucagauga

SEQ ID NO: 1046561 - RNA, 19 nt, Homo sapiens
  misc_RNA (1)...(19): siRNA sense strand
uagugagucuuccuuauua

SEQ ID NO: 1046562 - RNA, 19 nt, Homo sapiens
  misc_RNA (1)...(19): siRNA sense strand
aagcaaagcugauaguguu

SEQ ID NO: 1046563 - RNA, 19 nt, Homo sapiens
  misc_RNA (1)...(19): siRNA sense strand
guaugcaccuucauuuaaa

SEQ ID NO: 1046564 - RNA, 19 nt, Homo sapiens
  misc_RNA (1)...(19): siRNA sense strand
gcauacagauacgcauaua

SEQ ID NO: 1046565 - RNA, 19 nt, Homo sapiens
  misc_RNA (1)...(19): siRNA sense strand
guucuaggccuguguuaua

SEQ ID NO: 1046566 - RNA, 19 nt, Homo sapiens
  misc_RNA (1)...(19): siRNA sense strand
aaauacaucugugugcaua

SEQ ID NO: 1046567 - RNA, 19 nt, Homo sapiens
  misc_RNA (1)...(19): siRNA sense strand
gaagcaaagcugauagugu

SEQ ID NO: 1046568 - RNA, 19 nt, Homo sapiens
  misc_RNA (1)...(19): siRNA sense strand
caaauuguguacauagucu

SEQ ID NO: 1046569 - RNA, 19 nt, Homo sapiens
  misc_RNA (1)...(19): siRNA sense strand
gcaccuucauuuaaauaca

SEQ ID NO: 1046570 - RNA, 19 nt, Homo sapiens
  misc_RNA (1)...(19): siRNA sense strand
uguaugcaccuucauuuaa

SEQ ID NO: 1046571 - RNA, 19 nt, Homo sapiens
  misc_RNA (1)...(19): siRNA sense strand
gauaguguuugcuguuucu

SEQ ID NO: 1046572 - RNA, 19 nt, Homo sapiens
  misc_RNA (1)...(19): siRNA sense strand
gaccuuugauuucuguugu

SEQ ID NO: 1046573 - RNA, 19 nt, Homo sapiens
  misc_RNA (1)...(19): siRNA sense strand
guguuugccacaaguauua

SEQ ID NO: 1046574 - RNA, 19 nt, Homo sapiens
  misc_RNA (1)...(19): siRNA sense strand
guguaugcaccuucauuua

SEQ ID NO: 1046575 - RNA, 19 nt, Homo sapiens
  misc_RNA (1)...(19): siRNA sense strand
cagauacgcauauaugugu

SEQ ID NO: 1046576 - RNA, 19 nt, Homo sapiens
  misc_RNA (1)...(19): siRNA sense strand
auacagauacgcauauaug

SEQ ID NO: 1046577 - RNA, 19 nt, Homo sapiens
  misc_RNA (1)...(19): siRNA sense strand
auauaucucucaucuguag

SEQ ID NO: 1046578 - RNA, 19 nt, Homo sapiens
  misc_RNA (1)...(19): siRNA sense strand
uacauagucuucagaugau

SEQ ID NO: 1046579 - RNA, 19 nt, Homo sapiens
  misc_RNA (1)...(19): siRNA sense strand
gugcauacagauacgcaua

SEQ ID NO: 1046580 - RNA, 19 nt, Homo sapiens
  misc_RNA (1)...(19): siRNA sense strand
cugcaucccugcuaauagu

SEQ ID NO: 1046581 - RNA, 19 nt, Homo sapiens
  misc_RNA (1)...(19): siRNA sense strand
uuagugagucuuccuuauu

SEQ ID NO: 1046582 - RNA, 19 nt, Homo sapiens
  misc_RNA (1)...(19): siRNA sense strand
cuaggccuguguuauaugu

SEQ ID NO: 1046583 - RNA, 19 nt, Homo sapiens
  misc_RNA (1)...(19): siRNA sense strand
gcugauaguguuugcuguu

SEQ ID NO: 1046584 - RNA, 19 nt, Homo sapiens
  misc_RNA (1)...(19): siRNA sense strand
cugauaguguuugcuguuu

SEQ ID NO: 1046585 - RNA, 19 nt, Homo sapiens
  misc_RNA (1)...(19): siRNA sense strand
cuaauaguguuugccacaa

SEQ ID NO: 1046586 - RNA, 19 nt, Homo sapiens
  misc_RNA (1)...(19): siRNA sense strand
aguguuugcuguuucuuug

SEQ ID NO: 1046587 - RNA, 19 nt, Homo sapiens
  misc_RNA (1)...(19): siRNA sense strand
gacugaagcaaagcugaua

SEQ ID NO: 1046588 - RNA, 19 nt, Homo sapiens
  misc_RNA (1)...(19): siRNA sense strand
uaauaguguuugccacaag

SEQ ID NO: 1046589 - RNA, 19 nt, Homo sapiens
  misc_RNA (1)...(19): siRNA sense strand
ccuuugauuucuguuguuu

SEQ ID NO: 1046590 - RNA, 19 nt, Homo sapiens
  misc_RNA (1)...(19): siRNA sense strand
ucucaucuguaguuuccaa

SEQ ID NO: 1046591 - RNA, 19 nt, Homo sapiens
  misc_RNA (1)...(19): siRNA sense strand
augcauauaucucucaucu

SEQ ID NO: 1046592 - RNA, 19 nt, Homo sapiens
  misc_RNA (1)...(19): siRNA sense strand
cacaguguaugcaccuuca

SEQ ID NO: 1046593 - RNA, 19 nt, Homo sapiens
  misc_RNA (1)...(19): siRNA sense strand
cacccugcaucccugcuaa

SEQ ID NO: 1046594 - RNA, 19 nt, Homo sapiens
  misc_RNA (1)...(19): siRNA sense strand
caucuguaguuuccaagag

SEQ ID NO: 1046595 - RNA, 19 nt, Homo sapiens
  misc_RNA (1)...(19): siRNA sense strand
uauuagugagucuuccuua

SEQ ID NO: 1046596 - RNA, 19 nt, Homo sapiens
  misc_RNA (1)...(19): siRNA sense strand
ugauaguguuugcuguuuc

SEQ ID NO: 1046597 - RNA, 19 nt, Homo sapiens
  misc_RNA (1)...(19): siRNA sense strand
agugagucuuccuuauuaa

SEQ ID NO: 1046598 - RNA, 19 nt, Homo sapiens
  misc_RNA (1)...(19): siRNA sense strand
uaugaccuuugauuucugu

SEQ ID NO: 1046599 - RNA, 19 nt, Homo sapiens
  misc_RNA (1)...(19): siRNA sense strand
uaucucucaucuguaguuu

SEQ ID NO: 1046600 - RNA, 19 nt, Homo sapiens
  misc_RNA (1)...(19): siRNA sense strand
acauagucuucagaugaua

SEQ ID NO: 1046601 - RNA, 19 nt, Homo sapiens
  misc_RNA (1)...(19): siRNA sense strand
auacaucugugugcauaca

SEQ ID NO: 1046602 - RNA, 19 nt, Homo sapiens
  misc_RNA (1)...(19): siRNA sense strand
caaguauuagugagucuuc

SEQ ID NO: 1046603 - RNA, 19 nt, Homo sapiens
  misc_RNA (1)...(19): siRNA sense strand
acagauacgcauauaugug

SEQ ID NO: 1046604 - RNA, 19 nt, Homo sapiens
  misc_RNA (1)...(19): siRNA sense strand
uaaauacaucugugugcau

SEQ ID NO: 1046605 - RNA, 19 nt, Homo sapiens
  misc_RNA (1)...(19): siRNA sense strand
ucuguaguuuccaagaguu

SEQ ID NO: 1046606 - RNA, 19 nt, Homo sapiens
  misc_RNA (1)...(19): siRNA sense strand
aauaguguuugccacaagu

SEQ ID NO: 1046607 - RNA, 19 nt, Homo sapiens
  misc_RNA (1)...(19): siRNA sense strand
caucccugcuaauaguguu

SEQ ID NO: 1046608 - RNA, 19 nt, Homo sapiens
  misc_RNA (1)...(19): siRNA sense strand
gaacaggacuugaacauga

SEQ ID NO: 1046609 - RNA, 19 nt, Homo sapiens
  misc_RNA (1)...(19): siRNA sense strand
ggagacagcuuguggauga

SEQ ID NO: 1046610 - RNA, 19 nt, Homo sapiens
  misc_RNA (1)...(19): siRNA sense strand
gaacuuaacugugaagaga

SEQ ID NO: 1046611 - RNA, 19 nt, Homo sapiens
  misc_RNA (1)...(19): siRNA sense strand
gagaagauaugauaagaga

SEQ ID NO: 1046612 - RNA, 19 nt, Homo sapiens
  misc_RNA (1)...(19): siRNA sense strand
gaacagaagauauaccaua

SEQ ID NO: 1046613 - RNA, 19 nt, Homo sapiens
  misc_RNA (1)...(19): siRNA sense strand
agaaagagcugauggagaa

SEQ ID NO: 1046614 - RNA, 19 nt, Homo sapiens
  misc_RNA (1)...(19): siRNA sense strand
gaacagaaacacauaaaug

SEQ ID NO: 1046615 - RNA, 19 nt, Homo sapiens
  misc_RNA (1)...(19): siRNA sense strand
ggaagaacgugcuauggaa

SEQ ID NO: 1046616 - RNA, 19 nt, Homo sapiens
  misc_RNA (1)...(19): siRNA sense strand
caaagaaguuggcugagaa

SEQ ID NO: 1046617 - RNA, 19 nt, Homo sapiens
  misc_RNA (1)...(19): siRNA sense strand
gcaaagaaguuggcugaga

SEQ ID NO: 1046618 - RNA, 19 nt, Homo sapiens
  misc_RNA (1)...(19): siRNA sense strand
aagcacagauugcauuuaa

SEQ ID NO: 1046619 - RNA, 19 nt, Homo sapiens
  misc_RNA (1)...(19): siRNA sense strand
gauaagagaacagaagaua

SEQ ID NO: 1046620 - RNA, 19 nt, Homo sapiens
  misc_RNA (1)...(19): siRNA sense strand
ggagaaagaauuugacaga

SEQ ID NO: 1046621 - RNA, 19 nt, Homo sapiens
  misc_RNA (1)...(19): siRNA sense strand
gugaagagaaggagaauuu

SEQ ID NO: 1046622 - RNA, 19 nt, Homo sapiens
  misc_RNA (1)...(19): siRNA sense strand
ggaaagcacagauugcauu

SEQ ID NO: 1046623 - RNA, 19 nt, Homo sapiens
  misc_RNA (1)...(19): siRNA sense strand
gagaaagaauuugacagaa

SEQ ID NO: 1046624 - RNA, 19 nt, Homo sapiens
  misc_RNA (1)...(19): siRNA sense strand
caagagaggauagaacaua

SEQ ID NO: 1046625 - RNA, 19 nt, Homo sapiens
  misc_RNA (1)...(19): siRNA sense strand
ggagcuccguguugaauug

SEQ ID NO: 1046626 - RNA, 19 nt, Homo sapiens
  misc_RNA (1)...(19): siRNA sense strand
gaggucauguguacaagaa

SEQ ID NO: 1046627 - RNA, 19 nt, Homo sapiens
  misc_RNA (1)...(19): siRNA sense strand
gaacaggauaugcuaaaga

SEQ ID NO: 1046628 - RNA, 19 nt, Homo sapiens
  misc_RNA (1)...(19): siRNA sense strand
gagcagauguucuccaaac

SEQ ID NO: 1046629 - RNA, 19 nt, Homo sapiens
  misc_RNA (1)...(19): siRNA sense strand
gcaacgagaagcuaaagaa

SEQ ID NO: 1046630 - RNA, 19 nt, Homo sapiens
  misc_RNA (1)...(19): siRNA sense strand
gaaagcacagauugcauuu

SEQ ID NO: 1046631 - RNA, 19 nt, Homo sapiens
  misc_RNA (1)...(19): siRNA sense strand
uaaagaaacagaaggcaaa

SEQ ID NO: 1046632 - RNA, 19 nt, Homo sapiens
  misc_RNA (1)...(19): siRNA sense strand
gcaggaaacuaggaccauu

SEQ ID NO: 1046633 - RNA, 19 nt, Homo sapiens
  misc_RNA (1)...(19): siRNA sense strand
gcuccguguugaauuguua

SEQ ID NO: 1046634 - RNA, 19 nt, Homo sapiens
  misc_RNA (1)...(19): siRNA sense strand
uaacaacgcacagauuaaa

SEQ ID NO: 1046635 - RNA, 19 nt, Homo sapiens
  misc_RNA (1)...(19): siRNA sense strand
gaagagaaacgccgagagu

SEQ ID NO: 1046636 - RNA, 19 nt, Homo sapiens
  misc_RNA (1)...(19): siRNA sense strand
acgcacagauuaaacauga

SEQ ID NO: 1046637 - RNA, 19 nt, Homo sapiens
  misc_RNA (1)...(19): siRNA sense strand
gcaagacgccaacguuuag

SEQ ID NO: 1046638 - RNA, 19 nt, Homo sapiens
  misc_RNA (1)...(19): siRNA sense strand
gaaugaacaggauaugcua

SEQ ID NO: 1046639 - RNA, 19 nt, Homo sapiens
  misc_RNA (1)...(19): siRNA sense strand
gaacaggaagaacgugcua

SEQ ID NO: 1046640 - RNA, 19 nt, Homo sapiens
  misc_RNA (1)...(19): siRNA sense strand
gaacaugaagcucgugcaa

SEQ ID NO: 1046641 - RNA, 19 nt, Homo sapiens
  misc_RNA (1)...(19): siRNA sense strand
gugaggagcuccguguuga

SEQ ID NO: 1046642 - RNA, 19 nt, Homo sapiens
  misc_RNA (1)...(19): siRNA sense strand
gaagauaugauaagagaac

SEQ ID NO: 1046643 - RNA, 19 nt, Homo sapiens
  misc_RNA (1)...(19): siRNA sense strand
gaaaguaacaacgcacaga

SEQ ID NO: 1046644 - RNA, 19 nt, Homo sapiens
  misc_RNA (1)...(19): siRNA sense strand
guaacaacgcacagauuaa

SEQ ID NO: 1046645 - RNA, 19 nt, Homo sapiens
  misc_RNA (1)...(19): siRNA sense strand
ggcaaaagcugguggaaga

SEQ ID NO: 1046646 - RNA, 19 nt, Homo sapiens
  misc_RNA (1)...(19): siRNA sense strand
aaagauaggaugagagaga

SEQ ID NO: 1046647 - RNA, 19 nt, Homo sapiens
  misc_RNA (1)...(19): siRNA sense strand
gaagaaagaaaccauugag

SEQ ID NO: 1046648 - RNA, 19 nt, Homo sapiens
  misc_RNA (1)...(19): siRNA sense strand
aacaggauaugcuaaagaa

SEQ ID NO: 1046649 - RNA, 19 nt, Homo sapiens
  misc_RNA (1)...(19): siRNA sense strand
gcacagauuaaacaugaga

SEQ ID NO: 1046650 - RNA, 19 nt, Homo sapiens
  misc_RNA (1)...(19): siRNA sense strand
gagcggaaagcacagauug

SEQ ID NO: 1046651 - RNA, 19 nt, Homo sapiens
  misc_RNA (1)...(19): siRNA sense strand
gaaggagaauuuugcaaga

SEQ ID NO: 1046652 - RNA, 19 nt, Homo sapiens
  misc_RNA (1)...(19): siRNA sense strand
aagaaaccauugaggagaa

SEQ ID NO: 1046653 - RNA, 19 nt, Homo sapiens
  misc_RNA (1)...(19): siRNA sense strand
aguaacaacgcacagauua

SEQ ID NO: 1046654 - RNA, 19 nt, Homo sapiens
  misc_RNA (1)...(19): siRNA sense strand
gagaggauagaacauauuc

SEQ ID NO: 1046655 - RNA, 19 nt, Homo sapiens
  misc_RNA (1)...(19): siRNA sense strand
acagagacgugaggaagaa

SEQ ID NO: 1046656 - RNA, 19 nt, Homo sapiens
  misc_RNA (1)...(19): siRNA sense strand
gcaggaauacagagacgaa

SEQ ID NO: 1046657 - RNA, 19 nt, Homo sapiens
  misc_RNA (1)...(19): siRNA sense strand
ccaagaagcagagaaggaa

SEQ ID NO: 1046658 - RNA, 19 nt, Homo sapiens
  misc_RNA (1)...(19): siRNA sense strand
gaagacaaggcaaagaagu

SEQ ID NO: 1046659 - RNA, 19 nt, Homo sapiens
  misc_RNA (1)...(19): siRNA sense strand
acaugaagcucgugcaaag

SEQ ID NO: 1046660 - RNA, 19 nt, Homo sapiens
  misc_RNA (1)...(19): siRNA sense strand
aagagaggauagaacauau

SEQ ID NO: 1046661 - RNA, 19 nt, Homo sapiens
  misc_RNA (1)...(19): siRNA sense strand
ggaacagaaacacauaaau

SEQ ID NO: 1046662 - RNA, 19 nt, Homo sapiens
  misc_RNA (1)...(19): siRNA sense strand
gagacgaacaggacuugaa

SEQ ID NO: 1046663 - RNA, 19 nt, Homo sapiens
  misc_RNA (1)...(19): siRNA sense strand
gcaaagcaggaaacuagga

SEQ ID NO: 1046664 - RNA, 19 nt, Homo sapiens
  misc_RNA (1)...(19): siRNA sense strand
caagauguguuuggacaag

SEQ ID NO: 1046665 - RNA, 19 nt, Homo sapiens
  misc_RNA (1)...(19): siRNA sense strand
cguguugaauuguuaucua

SEQ ID NO: 1046666 - RNA, 19 nt, Homo sapiens
  misc_RNA (1)...(19): siRNA sense strand
caucaagugcugccucaaa

SEQ ID NO: 1046667 - RNA, 19 nt, Homo sapiens
  misc_RNA (1)...(19): siRNA sense strand
gagaacagaagauauacca

SEQ ID NO: 1046668 - RNA, 19 nt, Homo sapiens
  misc_RNA (1)...(19): siRNA sense strand
ugacagaauauuagaggaa

SEQ ID NO: 1046669 - RNA, 19 nt, Homo sapiens
  misc_RNA (1)...(19): siRNA sense strand
aagagcagauguucuccaa

SEQ ID NO: 1046670 - RNA, 19 nt, Homo sapiens
  misc_RNA (1)...(19): siRNA sense strand
gauaugauaagagaacaga

SEQ ID NO: 1046671 - RNA, 19 nt, Homo sapiens
  misc_RNA (1)...(19): siRNA sense strand
cagcagcagucccaagaag

SEQ ID NO: 1046672 - RNA, 19 nt, Homo sapiens
  misc_RNA (1)...(19): siRNA sense strand
gcccagaucaccagcauca

SEQ ID NO: 1046673 - RNA, 19 nt, Homo sapiens
  misc_RNA (1)...(19): siRNA sense strand
ugcaagacgccaacguuua

SEQ ID NO: 1046674 - RNA, 19 nt, Homo sapiens
  misc_RNA (1)...(19): siRNA sense strand
ggacaaggagcugagacuu

SEQ ID NO: 1046675 - RNA, 19 nt, Homo sapiens
  misc_RNA (1)...(19): siRNA sense strand
ugaagaaagaaaccauuga

SEQ ID NO: 1046676 - RNA, 19 nt, Homo sapiens
  misc_RNA (1)...(19): siRNA sense strand
cagauguucuccaaacucu

SEQ ID NO: 1046677 - RNA, 19 nt, Homo sapiens
  misc_RNA (1)...(19): siRNA sense strand
aagcagagaaggaagagaa

SEQ ID NO: 1046678 - RNA, 19 nt, Homo sapiens
  misc_RNA (1)...(19): siRNA sense strand
acaggaagaggcagauaaa

SEQ ID NO: 1046679 - RNA, 19 nt, Homo sapiens
  misc_RNA (1)...(19): siRNA sense strand
caggaaacuaggaccauuu

SEQ ID NO: 1046680 - RNA, 19 nt, Homo sapiens
  misc_RNA (1)...(19): siRNA sense strand
aagauaggaugagagagaa

SEQ ID NO: 1046681 - RNA, 19 nt, Homo sapiens
  misc_RNA (1)...(19): siRNA sense strand
gaggauagaacauauucag

SEQ ID NO: 1046682 - RNA, 19 nt, Homo sapiens
  misc_RNA (1)...(19): siRNA sense strand
gaagagaaggagaauuuug

SEQ ID NO: 1046683 - RNA, 19 nt, Homo sapiens
  misc_RNA (1)...(19): siRNA sense strand
ggucauguguacaagaaaa

SEQ ID NO: 1046684 - RNA, 19 nt, Homo sapiens
  misc_RNA (1)...(19): siRNA sense strand
ggaagacaaggcaaagaag

SEQ ID NO: 1046685 - RNA, 19 nt, Homo sapiens
  misc_RNA (1)...(19): siRNA sense strand
gauaugcuaaagaaacaga

SEQ ID NO: 1046686 - RNA, 19 nt, Homo sapiens
  misc_RNA (1)...(19): siRNA sense strand
gaggagcuccguguugaau

SEQ ID NO: 1046687 - RNA, 19 nt, Homo sapiens
  misc_RNA (1)...(19): siRNA sense strand
aagcagguguagcagcaaa

SEQ ID NO: 1046688 - RNA, 19 nt, Homo sapiens
  misc_RNA (1)...(19): siRNA sense strand
gaauauuagaggaagacaa

SEQ ID NO: 1046689 - RNA, 19 nt, Homo sapiens
  misc_RNA (1)...(19): siRNA sense strand
aggcaaagcaggaaacuag

SEQ ID NO: 1046690 - RNA, 19 nt, Homo sapiens
  misc_RNA (1)...(19): siRNA sense strand
caagaggcgaggagacaga

SEQ ID NO: 1046691 - RNA, 19 nt, Homo sapiens
  misc_RNA (1)...(19): siRNA sense strand
uguuaucuauccaucagaa

SEQ ID NO: 1046692 - RNA, 19 nt, Homo sapiens
  misc_RNA (1)...(19): siRNA sense strand
gcagcagucccaagaagca

SEQ ID NO: 1046693 - RNA, 19 nt, Homo sapiens
  misc_RNA (1)...(19): siRNA sense strand
agaaaccauugaggagaaa

SEQ ID NO: 1046694 - RNA, 19 nt, Homo sapiens
  misc_RNA (1)...(19): siRNA sense strand
acgagaagcuaaagaacag

SEQ ID NO: 1046695 - RNA, 19 nt, Homo sapiens
  misc_RNA (1)...(19): siRNA sense strand
aggauaugcuaaagaaaca

SEQ ID NO: 1046696 - RNA, 19 nt, Homo sapiens
  misc_RNA (1)...(19): siRNA sense strand
aacaggacuugaacaugaa

SEQ ID NO: 1046697 - RNA, 19 nt, Homo sapiens
  misc_RNA (1)...(19): siRNA sense strand
cauaaauauuuggcacaga

SEQ ID NO: 1046698 - RNA, 19 nt, Homo sapiens
  misc_RNA (1)...(19): siRNA sense strand
gaacgugcuauggaacaga

SEQ ID NO: 1046699 - RNA, 19 nt, Homo sapiens
  misc_RNA (1)...(19): siRNA sense strand
uaaagaacaggaagaacgu

SEQ ID NO: 1046700 - RNA, 19 nt, Homo sapiens
  misc_RNA (1)...(19): siRNA sense strand
gcagauguucuccaaacuc

SEQ ID NO: 1046701 - RNA, 19 nt, Homo sapiens
  misc_RNA (1)...(19): siRNA sense strand
agacaaggcaaagaaguug

SEQ ID NO: 1046702 - RNA, 19 nt, Homo sapiens
  misc_RNA (1)...(19): siRNA sense strand
ggagcggaaagcacagauu

SEQ ID NO: 1046703 - RNA, 19 nt, Homo sapiens
  misc_RNA (1)...(19): siRNA sense strand
aaagcuagaccagcaauuc

SEQ ID NO: 1046704 - RNA, 19 nt, Homo sapiens
  misc_RNA (1)...(19): siRNA sense strand
gaaggacaaggagcugaga

SEQ ID NO: 1046705 - RNA, 19 nt, Homo sapiens
  misc_RNA (1)...(19): siRNA sense strand
uacaggaagaggcagauaa

SEQ ID NO: 1046706 - RNA, 19 nt, Homo sapiens
  misc_RNA (1)...(19): siRNA sense strand
gaggagcugagcaggcaaa

SEQ ID NO: 1046707 - RNA, 19 nt, Homo sapiens
  misc_RNA (1)...(19): siRNA sense strand
caacuucagaugcaaaucg

SEQ ID NO: 1046708 - RNA, 19 nt, Homo sapiens
  misc_RNA (1)...(19): siRNA sense strand
gcacugagaugcagcucuu

SEQ ID NO: 1046709 - RNA, 19 nt, Homo sapiens
  misc_RNA (1)...(19): siRNA sense strand
gagcugacccucucuguga

SEQ ID NO: 1046710 - RNA, 19 nt, Homo sapiens
  misc_RNA (1)...(19): siRNA sense strand
gaaccuaccucugccaagu

SEQ ID NO: 1046711 - RNA, 19 nt, Homo sapiens
  misc_RNA (1)...(19): siRNA sense strand
gagcugaccugcaccuaca

SEQ ID NO: 1046712 - RNA, 19 nt, Homo sapiens
  misc_RNA (1)...(19): siRNA sense strand
gcagcaugguucaagauga

SEQ ID NO: 1046713 - RNA, 19 nt, Homo sapiens
  misc_RNA (1)...(19): siRNA sense strand
caacaacccaccagauuuc

SEQ ID NO: 1046714 - RNA, 19 nt, Homo sapiens
  misc_RNA (1)...(19): siRNA sense strand
caacugguucuaagucaaa

SEQ ID NO: 1046715 - RNA, 19 nt, Homo sapiens
  misc_RNA (1)...(19): siRNA sense strand
ccagauuucuacaccaaug

SEQ ID NO: 1046716 - RNA, 19 nt, Homo sapiens
  misc_RNA (1)...(19): siRNA sense strand
ucaacaacccaccagauuu

SEQ ID NO: 1046717 - RNA, 19 nt, Homo sapiens
  misc_RNA (1)...(19): siRNA sense strand
caccagauuucuacaccaa

SEQ ID NO: 1046718 - RNA, 19 nt, Homo sapiens
  misc_RNA (1)...(19): siRNA sense strand
ucucugagcacacuuguau

SEQ ID NO: 1046719 - RNA, 19 nt, Homo sapiens
  misc_RNA (1)...(19): siRNA sense strand
gucaacaacccaccagauu

SEQ ID NO: 1046720 - RNA, 19 nt, Homo sapiens
  misc_RNA (1)...(19): siRNA sense strand
cagcaugguucaagaugag

SEQ ID NO: 1046721 - RNA, 19 nt, Homo sapiens
  misc_RNA (1)...(19): siRNA sense strand
ccaacugguucuaagucaa

SEQ ID NO: 1046722 - RNA, 19 nt, Homo sapiens
  misc_RNA (1)...(19): siRNA sense strand
gaagaagcccaaggagaca

SEQ ID NO: 1046723 - RNA, 19 nt, Homo sapiens
  misc_RNA (1)...(19): siRNA sense strand
gcccuggaguggagcuuug

SEQ ID NO: 1046724 - RNA, 19 nt, Homo sapiens
  misc_RNA (1)...(19): siRNA sense strand
cauccaauccuguacuuca

SEQ ID NO: 1046725 - RNA, 19 nt, Homo sapiens
  misc_RNA (1)...(19): siRNA sense strand
gggugcgucuuggaacuuu

SEQ ID NO: 1046726 - RNA, 19 nt, Homo sapiens
  misc_RNA (1)...(19): siRNA sense strand
gggaaacccaucucugagu

SEQ ID NO: 1046727 - RNA, 19 nt, Homo sapiens
  misc_RNA (1)...(19): siRNA sense strand
ucugagcacacuuguauga

SEQ ID NO: 1046728 - RNA, 19 nt, Homo sapiens
  misc_RNA (1)...(19): siRNA sense strand
gggucagccugcuucagaa

SEQ ID NO: 1046729 - RNA, 19 nt, Homo sapiens
  misc_RNA (1)...(19): siRNA sense strand
ggccaucuguauccaacug

SEQ ID NO: 1046730 - RNA, 19 nt, Homo sapiens
  misc_RNA (1)...(19): siRNA sense strand
guauccaacugguucuaag

SEQ ID NO: 1046731 - RNA, 19 nt, Homo sapiens
  misc_RNA (1)...(19): siRNA sense strand
guaugagggcugauucuag

SEQ ID NO: 1046732 - RNA, 19 nt, Homo sapiens
  misc_RNA (1)...(19): siRNA sense strand
gggcuaaucaaccuuacug

SEQ ID NO: 1046733 - RNA, 19 nt, Homo sapiens
  misc_RNA (1)...(19): siRNA sense strand
ccucagauacuggaaccua

SEQ ID NO: 1046734 - RNA, 19 nt, Homo sapiens
  misc_RNA (1)...(19): siRNA sense strand
caacccaccagauuucuac

SEQ ID NO: 1046735 - RNA, 19 nt, Homo sapiens
  misc_RNA (1)...(19): siRNA sense strand
ucaccaauggccaucugua

SEQ ID NO: 1046736 - RNA, 19 nt, Homo sapiens
  misc_RNA (1)...(19): siRNA sense strand
caccaauggccaucuguau

SEQ ID NO: 1046737 - RNA, 19 nt, Homo sapiens
  misc_RNA (1)...(19): siRNA sense strand
aguccaagcucccuauggu

SEQ ID NO: 1046738 - RNA, 19 nt, Homo sapiens
  misc_RNA (1)...(19): siRNA sense strand
caacugggugcgucuugga

SEQ ID NO: 1046739 - RNA, 19 nt, Homo sapiens
  misc_RNA (1)...(19): siRNA sense strand
gcaccgugacgaccaccaa

SEQ ID NO: 1046740 - RNA, 19 nt, Homo sapiens
  misc_RNA (1)...(19): siRNA sense strand
cgggucagccugcuucaga

SEQ ID NO: 1046741 - RNA, 19 nt, Homo sapiens
  misc_RNA (1)...(19): siRNA sense strand
agaagcccaaggagacaua

SEQ ID NO: 1046742 - RNA, 19 nt, Homo sapiens
  misc_RNA (1)...(19): siRNA sense strand
ccaaguccaagcucccuau

SEQ ID NO: 1046743 - RNA, 19 nt, Homo sapiens
  misc_RNA (1)...(19): siRNA sense strand
ccacacugaaacugacuga

SEQ ID NO: 1046744 - RNA, 19 nt, Homo sapiens
  misc_RNA (1)...(19): siRNA sense strand
ugacgaccaccaaguccaa

SEQ ID NO: 1046745 - RNA, 19 nt, Homo sapiens
  misc_RNA (1)...(19): siRNA sense strand
gcucuacugcacugagaug

SEQ ID NO: 1046746 - RNA, 19 nt, Homo sapiens
  misc_RNA (1)...(19): siRNA sense strand
agaaguacgucaaggagaa

SEQ ID NO: 1046747 - RNA, 19 nt, Homo sapiens
  misc_RNA (1)...(19): siRNA sense strand
gggccguccugcucuauga

SEQ ID NO: 1046748 - RNA, 19 nt, Homo sapiens
  misc_RNA (1)...(19): siRNA sense strand
caucucaccugcugguaca

SEQ ID NO: 1046749 - RNA, 19 nt, Homo sapiens
  misc_RNA (1)...(19): siRNA sense strand
ggucccagaugccuacagu

SEQ ID NO: 1046750 - RNA, 19 nt, Homo sapiens
  misc_RNA (1)...(19): siRNA sense strand
gcacaccgaggucccagau

SEQ ID NO: 1046751 - RNA, 19 nt, Homo sapiens
  misc_RNA (1)...(19): siRNA sense strand
gaccugaaggcccaucuca

SEQ ID NO: 1046752 - RNA, 19 nt, Homo sapiens
  misc_RNA (1)...(19): siRNA sense strand
caaaguaacugcuguaauc

SEQ ID NO: 1046753 - RNA, 19 nt, Homo sapiens
  misc_RNA (1)...(19): siRNA sense strand
gaagaugacgauagaauuu

SEQ ID NO: 1046754 - RNA, 19 nt, Homo sapiens
  misc_RNA (1)...(19): siRNA sense strand
gagagaaguuucagcagaa

SEQ ID NO: 1046755 - RNA, 19 nt, Homo sapiens
  misc_RNA (1)...(19): siRNA sense strand
gaacaggaaauuagaucua

SEQ ID NO: 1046756 - RNA, 19 nt, Homo sapiens
  misc_RNA (1)...(19): siRNA sense strand
cagagaagaugacgauaga

SEQ ID NO: 1046757 - RNA, 19 nt, Homo sapiens
  misc_RNA (1)...(19): siRNA sense strand
aaacuaagcagaagaaauc

SEQ ID NO: 1046758 - RNA, 19 nt, Homo sapiens
  misc_RNA (1)...(19): siRNA sense strand
ggaaaugaauacggcagaa

SEQ ID NO: 1046759 - RNA, 19 nt, Homo sapiens
  misc_RNA (1)...(19): siRNA sense strand
caauaagagucacgaaauc

SEQ ID NO: 1046760 - RNA, 19 nt, Homo sapiens
  misc_RNA (1)...(19): siRNA sense strand
uaaagaagauagagaagcu

SEQ ID NO: 1046761 - RNA, 19 nt, Homo sapiens
  misc_RNA (1)...(19): siRNA sense strand
gcaccugggaguuccaaua

SEQ ID NO: 1046762 - RNA, 19 nt, Homo sapiens
  misc_RNA (1)...(19): siRNA sense strand
gggaggagacucugaauuc

SEQ ID NO: 1046763 - RNA, 19 nt, Homo sapiens
  misc_RNA (1)...(19): siRNA sense strand
cgacggaggucagcagaga

SEQ ID NO: 1046764 - RNA, 19 nt, Homo sapiens
  misc_RNA (1)...(19): siRNA sense strand
gagaagaugacgauagaau

SEQ ID NO: 1046765 - RNA, 19 nt, Homo sapiens
  misc_RNA (1)...(19): siRNA sense strand
caagucggcugaauuucug

SEQ ID NO: 1046766 - RNA, 19 nt, Homo sapiens
  misc_RNA (1)...(19): siRNA sense strand
gaaaugaauacggcagaaa

SEQ ID NO: 1046767 - RNA, 19 nt, Homo sapiens
  misc_RNA (1)...(19): siRNA sense strand
gaagcaaacuaagcagaag

SEQ ID NO: 1046768 - RNA, 19 nt, Homo sapiens
  misc_RNA (1)...(19): siRNA sense strand
cugaauuucugaugguuaa

SEQ ID NO: 1046769 - RNA, 19 nt, Homo sapiens
  misc_RNA (1)...(19): siRNA sense strand
ccaauaagagucacgaaau

SEQ ID NO: 1046770 - RNA, 19 nt, Homo sapiens
  misc_RNA (1)...(19): siRNA sense strand
gcagagaagaugacgauag

SEQ ID NO: 1046771 - RNA, 19 nt, Homo sapiens
  misc_RNA (1)...(19): siRNA sense strand
acugauggaugaggaaaua

SEQ ID NO: 1046772 - RNA, 19 nt, Homo sapiens
  misc_RNA (1)...(19): siRNA sense strand
cuacuucauugcauuguau

SEQ ID NO: 1046773 - RNA, 19 nt, Homo sapiens
  misc_RNA (1)...(19): siRNA sense strand
ggaggagacucugaauucu

SEQ ID NO: 1046774 - RNA, 19 nt, Homo sapiens
  misc_RNA (1)...(19): siRNA sense strand
ccugggaguuccaauaaga

SEQ ID NO: 1046775 - RNA, 19 nt, Homo sapiens
  misc_RNA (1)...(19): siRNA sense strand
aggagacucugaauucuga

SEQ ID NO: 1046776 - RNA, 19 nt, Homo sapiens
  misc_RNA (1)...(19): siRNA sense strand
gaagcaggagguacuauag

SEQ ID NO: 1046777 - RNA, 19 nt, Homo sapiens
  misc_RNA (1)...(19): siRNA sense strand
gguuaaagaagauagagaa

SEQ ID NO: 1046778 - RNA, 19 nt, Homo sapiens
  misc_RNA (1)...(19): siRNA sense strand
ucacgaaauccacaaagaa

SEQ ID NO: 1046779 - RNA, 19 nt, Homo sapiens
  misc_RNA (1)...(19): siRNA sense strand
uaacugcuguaaucagaag

SEQ ID NO: 1046780 - RNA, 19 nt, Homo sapiens
  misc_RNA (1)...(19): siRNA sense strand
gucacgaaauccacaaaga

SEQ ID NO: 1046781 - RNA, 19 nt, Homo sapiens
  misc_RNA (1)...(19): siRNA sense strand
caaacuaagcagaagaaau

SEQ ID NO: 1046782 - RNA, 19 nt, Homo sapiens
  misc_RNA (1)...(19): siRNA sense strand
gagguacuauagagagcaa

SEQ ID NO: 1046783 - RNA, 19 nt, Homo sapiens
  misc_RNA (1)...(19): siRNA sense strand
gcucaaaguaacugcugua

SEQ ID NO: 1046784 - RNA, 19 nt, Homo sapiens
  misc_RNA (1)...(19): siRNA sense strand
ggaaauuagaucuacuuca

SEQ ID NO: 1046785 - RNA, 19 nt, Homo sapiens
  misc_RNA (1)...(19): siRNA sense strand
caccugggaguuccaauaa

SEQ ID NO: 1046786 - RNA, 19 nt, Homo sapiens
  misc_RNA (1)...(19): siRNA sense strand
aguaacugcuguaaucaga

SEQ ID NO: 1046787 - RNA, 19 nt, Homo sapiens
  misc_RNA (1)...(19): siRNA sense strand
ugaagcaaacuaagcagaa

SEQ ID NO: 1046788 - RNA, 19 nt, Homo sapiens
  misc_RNA (1)...(19): siRNA sense strand
agaagcaggagguacuaua

SEQ ID NO: 1046789 - RNA, 19 nt, Homo sapiens
  misc_RNA (1)...(19): siRNA sense strand
agaaggcucugaagcaaac

SEQ ID NO: 1046790 - RNA, 19 nt, Homo sapiens
  misc_RNA (1)...(19): siRNA sense strand
ggaguuccaauaagaguca

SEQ ID NO: 1046791 - RNA, 19 nt, Homo sapiens
  misc_RNA (1)...(19): siRNA sense strand
gcugaauuucugaugguua

SEQ ID NO: 1046792 - RNA, 19 nt, Homo sapiens
  misc_RNA (1)...(19): siRNA sense strand
gaauacggcagaaauuacu

SEQ ID NO: 1046793 - RNA, 19 nt, Homo sapiens
  misc_RNA (1)...(19): siRNA sense strand
ccuugcagcucaccaacaa

SEQ ID NO: 1046794 - RNA, 19 nt, Homo sapiens
  misc_RNA (1)...(19): siRNA sense strand
cuacagaaggcacuggaaa

SEQ ID NO: 1046795 - RNA, 19 nt, Homo sapiens
  misc_RNA (1)...(19): siRNA sense strand
gagcaguccagaucucuca

SEQ ID NO: 1046796 - RNA, 19 nt, Homo sapiens
  misc_RNA (1)...(19): siRNA sense strand
gcaggagguacuauagaga

SEQ ID NO: 1046797 - RNA, 19 nt, Homo sapiens
  misc_RNA (1)...(19): siRNA sense strand
gaucuacuucauugcauug

SEQ ID NO: 1046798 - RNA, 19 nt, Homo sapiens
  misc_RNA (1)...(19): siRNA sense strand
agaagaugacgauagaauu

SEQ ID NO: 1046799 - RNA, 19 nt, Homo sapiens
  misc_RNA (1)...(19): siRNA sense strand
ccagaucucucagcauguc

SEQ ID NO: 1046800 - RNA, 19 nt, Homo sapiens
  misc_RNA (1)...(19): siRNA sense strand
cggcagaaauuacuuugac

SEQ ID NO: 1046801 - RNA, 19 nt, Homo sapiens
  misc_RNA (1)...(19): siRNA sense strand
uggauacucuugcucaaag

SEQ ID NO: 1046802 - RNA, 19 nt, Homo sapiens
  misc_RNA (1)...(19): siRNA sense strand
cagcagagaagaugacgau

SEQ ID NO: 1046803 - RNA, 19 nt, Homo sapiens
  misc_RNA (1)...(19): siRNA sense strand
ccaaagaucucagaaaacu

SEQ ID NO: 1046804 - RNA, 19 nt, Homo sapiens
  misc_RNA (1)...(19): siRNA sense strand
cauuagaacaggaaauuag

SEQ ID NO: 1046805 - RNA, 19 nt, Homo sapiens
  misc_RNA (1)...(19): siRNA sense strand
ccauuagaacaggaaauua

SEQ ID NO: 1046806 - RNA, 19 nt, Homo sapiens
  misc_RNA (1)...(19): siRNA sense strand
gaagauagagaagcuacag

SEQ ID NO: 1046807 - RNA, 19 nt, Homo sapiens
  misc_RNA (1)...(19): siRNA sense strand
cuauagagagcaaagauuc

SEQ ID NO: 1046808 - RNA, 19 nt, Homo sapiens
  misc_RNA (1)...(19): siRNA sense strand
ccaagucggcugaauuucu

SEQ ID NO: 1046809 - RNA, 19 nt, Homo sapiens
  misc_RNA (1)...(19): siRNA sense strand
ugcauuguauggaggauga

SEQ ID NO: 1046810 - RNA, 19 nt, Homo sapiens
  misc_RNA (1)...(19): siRNA sense strand
agauagagaagcuacagaa

SEQ ID NO: 1046811 - RNA, 19 nt, Homo sapiens
  misc_RNA (1)...(19): siRNA sense strand
augaauacggcagaaauua

SEQ ID NO: 1046812 - RNA, 19 nt, Homo sapiens
  misc_RNA (1)...(19): siRNA sense strand
aaaugaauacggcagaaau

SEQ ID NO: 1046813 - RNA, 19 nt, Homo sapiens
  misc_RNA (1)...(19): siRNA sense strand
ggauacucuugcucaaagu

SEQ ID NO: 1046814 - RNA, 19 nt, Homo sapiens
  misc_RNA (1)...(19): siRNA sense strand
uaauucugcuuggaaguuc

SEQ ID NO: 1046815 - RNA, 19 nt, Homo sapiens
  misc_RNA (1)...(19): siRNA sense strand
gaggagacucugaauucug

SEQ ID NO: 1046816 - RNA, 19 nt, Homo sapiens
  misc_RNA (1)...(19): siRNA sense strand
uaacaugagcaguccagau

SEQ ID NO: 1046817 - RNA, 19 nt, Homo sapiens
  misc_RNA (1)...(19): siRNA sense strand
gcaaacuaagcagaagaaa

SEQ ID NO: 1046818 - RNA, 19 nt, Homo sapiens
  misc_RNA (1)...(19): siRNA sense strand
ugauggaugaggaaauaaa

SEQ ID NO: 1046819 - RNA, 19 nt, Homo sapiens
  misc_RNA (1)...(19): siRNA sense strand
ucuacuucauugcauugua

SEQ ID NO: 1046820 - RNA, 19 nt, Homo sapiens
  misc_RNA (1)...(19): siRNA sense strand
gaggucagcagagaagaug

SEQ ID NO: 1046821 - RNA, 19 nt, Homo sapiens
  misc_RNA (1)...(19): siRNA sense strand
gaaccaaaaggaaaugaau

SEQ ID NO: 1046822 - RNA, 19 nt, Homo sapiens
  misc_RNA (1)...(19): siRNA sense strand
cauggauacucuugcucaa

SEQ ID NO: 1046823 - RNA, 19 nt, Homo sapiens
  misc_RNA (1)...(19): siRNA sense strand
caggaaauuagaucuacuu

SEQ ID NO: 1046824 - RNA, 19 nt, Homo sapiens
  misc_RNA (1)...(19): siRNA sense strand
gauagagaagcuacagaag

SEQ ID NO: 1046825 - RNA, 19 nt, Homo sapiens
  misc_RNA (1)...(19): siRNA sense strand
guuccaaagaucucagaaa

SEQ ID NO: 1046826 - RNA, 19 nt, Homo sapiens
  misc_RNA (1)...(19): siRNA sense strand
ggaggucagcagagaagau

SEQ ID NO: 1046827 - RNA, 19 nt, Homo sapiens
  misc_RNA (1)...(19): siRNA sense strand
aaugaauacggcagaaauu

SEQ ID NO: 1046828 - RNA, 19 nt, Homo sapiens
  misc_RNA (1)...(19): siRNA sense strand
ggaaauccagcuuuuaaca

SEQ ID NO: 1046829 - RNA, 19 nt, Homo sapiens
  misc_RNA (1)...(19): siRNA sense strand
uugaggaguuccaaagauc

SEQ ID NO: 1046830 - RNA, 19 nt, Homo sapiens
  misc_RNA (1)...(19): siRNA sense strand
cuugaggaguuccaaagau

SEQ ID NO: 1046831 - RNA, 19 nt, Homo sapiens
  misc_RNA (1)...(19): siRNA sense strand
ucugaugguuaaagaagau

SEQ ID NO: 1046832 - RNA, 19 nt, Homo sapiens
  misc_RNA (1)...(19): siRNA sense strand
cuaagcagaagaaauccaa

SEQ ID NO: 1046833 - RNA, 19 nt, Homo sapiens
  misc_RNA (1)...(19): siRNA sense strand
agaucuacuucauugcauu

SEQ ID NO: 1046834 - RNA, 19 nt, Homo sapiens
  misc_RNA (1)...(19): siRNA sense strand
ugaauacggcagaaauuac

SEQ ID NO: 1046835 - RNA, 19 nt, Homo sapiens
  misc_RNA (1)...(19): siRNA sense strand
ucaaaguaacugcuguaau

SEQ ID NO: 1046836 - RNA, 19 nt, Homo sapiens
  misc_RNA (1)...(19): siRNA sense strand
gaauuucugaugguuaaag

SEQ ID NO: 1046837 - RNA, 19 nt, Homo sapiens
  misc_RNA (1)...(19): siRNA sense strand
uuccaaagaucucagaaaa

SEQ ID NO: 1046838 - RNA, 19 nt, Homo sapiens
  misc_RNA (1)...(19): siRNA sense strand
aauccaagucggcugaauu

SEQ ID NO: 1046839 - RNA, 19 nt, Homo sapiens
  misc_RNA (1)...(19): siRNA sense strand
cggcugaauuucugauggu

SEQ ID NO: 1046840 - RNA, 19 nt, Homo sapiens
  misc_RNA (1)...(19): siRNA sense strand
ccaccacugcucaccuuga

SEQ ID NO: 1046841 - RNA, 19 nt, Homo sapiens
  misc_RNA (1)...(19): siRNA sense strand
gaaauccaagucggcugaa

SEQ ID NO: 1046842 - RNA, 19 nt, Homo sapiens
  misc_RNA (1)...(19): siRNA sense strand
ugagagcagacaaggagaa

SEQ ID NO: 1046843 - RNA, 19 nt, Homo sapiens
  misc_RNA (1)...(19): siRNA sense strand
aaauccagcuuuuaacaug

SEQ ID NO: 1046844 - RNA, 19 nt, Homo sapiens
  misc_RNA (1)...(19): siRNA sense strand
gaugguuaaagaagauaga

SEQ ID NO: 1046845 - RNA, 19 nt, Homo sapiens
  misc_RNA (1)...(19): siRNA sense strand
caugagcaguccagaucuc

SEQ ID NO: 1046846 - RNA, 19 nt, Homo sapiens
  misc_RNA (1)...(19): siRNA sense strand
cacgaaauccacaaagaag

SEQ ID NO: 1046847 - RNA, 19 nt, Homo sapiens
  misc_RNA (1)...(19): siRNA sense strand
guaacugcuguaaucagaa

SEQ ID NO: 1046848 - RNA, 19 nt, Homo sapiens
  misc_RNA (1)...(19): siRNA sense strand
gccagccucugcagaacca

SEQ ID NO: 1046849 - RNA, 19 nt, Homo sapiens
  misc_RNA (1)...(19): siRNA sense strand
acagaaggcacuggaaauc

SEQ ID NO: 1046850 - RNA, 19 nt, Homo sapiens
  misc_RNA (1)...(19): siRNA sense strand
uagaucuacuucauugcau

SEQ ID NO: 1046851 - RNA, 19 nt, Homo sapiens
  misc_RNA (1)...(19): siRNA sense strand
uagaacaggaaauuagauc

SEQ ID NO: 1046852 - RNA, 19 nt, Homo sapiens
  misc_RNA (1)...(19): siRNA sense strand
ccacagagccuaaguuuga

SEQ ID NO: 1046853 - RNA, 19 nt, Homo sapiens
  misc_RNA (1)...(19): siRNA sense strand
ugaaauacauuccuaucug

SEQ ID NO: 1046854 - RNA, 19 nt, Homo sapiens
  misc_RNA (1)...(19): siRNA sense strand
ggcucacgcugcccaauua

SEQ ID NO: 1046855 - RNA, 19 nt, Homo sapiens
  misc_RNA (1)...(19): siRNA sense strand
agaggagcguggucugaua

SEQ ID NO: 1046856 - RNA, 19 nt, Homo sapiens
  misc_RNA (1)...(19): siRNA sense strand
gagccuaaguuugacaugu

SEQ ID NO: 1046857 - RNA, 19 nt, Homo sapiens
  misc_RNA (1)...(19): siRNA sense strand
ccagaagacacuccagaaa

SEQ ID NO: 1046858 - RNA, 19 nt, Homo sapiens
  misc_RNA (1)...(19): siRNA sense strand
gugccuugcuuucauacuu

SEQ ID NO: 1046859 - RNA, 19 nt, Homo sapiens
  misc_RNA (1)...(19): siRNA sense strand
uguccaaccugcaauuugu

SEQ ID NO: 1046860 - RNA, 19 nt, Homo sapiens
  misc_RNA (1)...(19): siRNA sense strand
caauacaggcauucuugaa

SEQ ID NO: 1046861 - RNA, 19 nt, Homo sapiens
  misc_RNA (1)...(19): siRNA sense strand
gagcuacgauuuccccauu

SEQ ID NO: 1046862 - RNA, 19 nt, Homo sapiens
  misc_RNA (1)...(19): siRNA sense strand
auacaggcauucuugaagu

SEQ ID NO: 1046863 - RNA, 19 nt, Homo sapiens
  misc_RNA (1)...(19): siRNA sense strand
gaagacacuccagaaaaua

SEQ ID NO: 1046864 - RNA, 19 nt, Homo sapiens
  misc_RNA (1)...(19): siRNA sense strand
gggcucaugccaacaguga

SEQ ID NO: 1046865 - RNA, 19 nt, Homo sapiens
  misc_RNA (1)...(19): siRNA sense strand
gcucaucggcaccaucuuc

SEQ ID NO: 1046866 - RNA, 19 nt, Homo sapiens
  misc_RNA (1)...(19): siRNA sense strand
cgggugccuugcuuucaua

SEQ ID NO: 1046867 - RNA, 19 nt, Homo sapiens
  misc_RNA (1)...(19): siRNA sense strand
gccuaaguuugacauguug

SEQ ID NO: 1046868 - RNA, 19 nt, Homo sapiens
  misc_RNA (1)...(19): siRNA sense strand
caaaagaucagauugcaau

SEQ ID NO: 1046869 - RNA, 19 nt, Homo sapiens
  misc_RNA (1)...(19): siRNA sense strand
caaaggauuuucuucaagu

SEQ ID NO: 1046870 - RNA, 19 nt, Homo sapiens
  misc_RNA (1)...(19): siRNA sense strand
gcgggugccuugcuuucau

SEQ ID NO: 1046871 - RNA, 19 nt, Homo sapiens
  misc_RNA (1)...(19): siRNA sense strand
agaagacacuccagaaaau

SEQ ID NO: 1046872 - RNA, 19 nt, Homo sapiens
  misc_RNA (1)...(19): siRNA sense strand
agauugcaauuccagaaga

SEQ ID NO: 1046873 - RNA, 19 nt, Homo sapiens
  misc_RNA (1)...(19): siRNA sense strand
uaucugcccagucuucaaa

SEQ ID NO: 1046874 - RNA, 19 nt, Homo sapiens
  misc_RNA (1)...(19): siRNA sense strand
agccuaaguuugacauguu

SEQ ID NO: 1046875 - RNA, 19 nt, Homo sapiens
  misc_RNA (1)...(19): siRNA sense strand
gcccagucuucaaaggauu

SEQ ID NO: 1046876 - RNA, 19 nt, Homo sapiens
  misc_RNA (1)...(19): siRNA sense strand
uuugacauguuguacaaga

SEQ ID NO: 1046877 - RNA, 19 nt, Homo sapiens
  misc_RNA (1)...(19): siRNA sense strand
uuucauacuugacaacaca

SEQ ID NO: 1046878 - RNA, 19 nt, Homo sapiens
  misc_RNA (1)...(19): siRNA sense strand
gagcguggucugauacagu

SEQ ID NO: 1046879 - RNA, 19 nt, Homo sapiens
  misc_RNA (1)...(19): siRNA sense strand
cuuccagccucaagagcua

SEQ ID NO: 1046880 - RNA, 19 nt, Homo sapiens
  misc_RNA (1)...(19): siRNA sense strand
ggcauguucugcacucucu

SEQ ID NO: 1046881 - RNA, 19 nt, Homo sapiens
  misc_RNA (1)...(19): siRNA sense strand
cgccaucaauacaggcauu

SEQ ID NO: 1046882 - RNA, 19 nt, Homo sapiens
  misc_RNA (1)...(19): siRNA sense strand
aguuugacauguuguacaa

SEQ ID NO: 1046883 - RNA, 19 nt, Homo sapiens
  misc_RNA (1)...(19): siRNA sense strand
ucagauugcaauuccagaa

SEQ ID NO: 1046884 - RNA, 19 nt, Homo sapiens
  misc_RNA (1)...(19): siRNA sense strand
ccucaagagcuacgauuuc

SEQ ID NO: 1046885 - RNA, 19 nt, Homo sapiens
  misc_RNA (1)...(19): siRNA sense strand
cauguucugcacucucuuu

SEQ ID NO: 1046886 - RNA, 19 nt, Homo sapiens
  misc_RNA (1)...(19): siRNA sense strand
cagaagacacuccagaaaa

SEQ ID NO: 1046887 - RNA, 19 nt, Homo sapiens
  misc_RNA (1)...(19): siRNA sense strand
ggucugauacaguggaaag

SEQ ID NO: 1046888 - RNA, 19 nt, Homo sapiens
  misc_RNA (1)...(19): siRNA sense strand
aaagaucagauugcaauuc

SEQ ID NO: 1046889 - RNA, 19 nt, Homo sapiens
  misc_RNA (1)...(19): siRNA sense strand
cuaaguuugacauguugua

SEQ ID NO: 1046890 - RNA, 19 nt, Homo sapiens
  misc_RNA (1)...(19): siRNA sense strand
ugcaauuuguggacaugaa

SEQ ID NO: 1046891 - RNA, 19 nt, Homo sapiens
  misc_RNA (1)...(19): siRNA sense strand
gcucaugccaacagugaca

SEQ ID NO: 1046892 - RNA, 19 nt, Homo sapiens
  misc_RNA (1)...(19): siRNA sense strand
gcugaccacggagauguuu

SEQ ID NO: 1046893 - RNA, 19 nt, Homo sapiens
  misc_RNA (1)...(19): siRNA sense strand
uacaggcauucuugaagug

SEQ ID NO: 1046894 - RNA, 19 nt, Homo sapiens
  misc_RNA (1)...(19): siRNA sense strand
caucaauacaggcauucuu

SEQ ID NO: 1046895 - RNA, 19 nt, Homo sapiens
  misc_RNA (1)...(19): siRNA sense strand
ugccuugcuuucauacuug

SEQ ID NO: 1046896 - RNA, 19 nt, Homo sapiens
  misc_RNA (1)...(19): siRNA sense strand
gaaaauacagaaacugcau

SEQ ID NO: 1046897 - RNA, 19 nt, Homo sapiens
  misc_RNA (1)...(19): siRNA sense strand
aagaucagauugcaauucc

SEQ ID NO: 1046898 - RNA, 19 nt, Homo sapiens
  misc_RNA (1)...(19): siRNA sense strand
gcuguccaaccugcaauuu

SEQ ID NO: 1046899 - RNA, 19 nt, Homo sapiens
  misc_RNA (1)...(19): siRNA sense strand
aacccuggcgccaucaaua

SEQ ID NO: 1046900 - RNA, 19 nt, Homo sapiens
  misc_RNA (1)...(19): siRNA sense strand
gauugcaauuccagaagac

SEQ ID NO: 1046901 - RNA, 19 nt, Homo sapiens
  misc_RNA (1)...(19): siRNA sense strand
ugacauguuguacaagauc

SEQ ID NO: 1046902 - RNA, 19 nt, Homo sapiens
  misc_RNA (1)...(19): siRNA sense strand
gccucaagagcuacgauuu

SEQ ID NO: 1046903 - RNA, 19 nt, Homo sapiens
  misc_RNA (1)...(19): siRNA sense strand
gccuugcuuucauacuuga

SEQ ID NO: 1046904 - RNA, 19 nt, Homo sapiens
  misc_RNA (1)...(19): siRNA sense strand
ccacagagccuaaguuuga

SEQ ID NO: 1046905 - RNA, 19 nt, Homo sapiens
  misc_RNA (1)...(19): siRNA sense strand
ugaaauacauuccuaucug

SEQ ID NO: 1046906 - RNA, 19 nt, Homo sapiens
  misc_RNA (1)...(19): siRNA sense strand
ggcucacgcugcccaauua

SEQ ID NO: 1046907 - RNA, 19 nt, Homo sapiens
  misc_RNA (1)...(19): siRNA sense strand
agaggagcguggucugaua

SEQ ID NO: 1046908 - RNA, 19 nt, Homo sapiens
  misc_RNA (1)...(19): siRNA sense strand
gagccuaaguuugacaugu

SEQ ID NO: 1046909 - RNA, 19 nt, Homo sapiens
  misc_RNA (1)...(19): siRNA sense strand
ccagaagacacuccagaaa

SEQ ID NO: 1046910 - RNA, 19 nt, Homo sapiens
  misc_RNA (1)...(19): siRNA sense strand
gugccuugcuuucauacuu

SEQ ID NO: 1046911 - RNA, 19 nt, Homo sapiens
  misc_RNA (1)...(19): siRNA sense strand
uguccaaccugcaauuugu

SEQ ID NO: 1046912 - RNA, 19 nt, Homo sapiens
  misc_RNA (1)...(19): siRNA sense strand
caauacaggcauucuugaa

SEQ ID NO: 1046913 - RNA, 19 nt, Homo sapiens
  misc_RNA (1)...(19): siRNA sense strand
gagcuacgauuuccccauu

SEQ ID NO: 1046914 - RNA, 19 nt, Homo sapiens
  misc_RNA (1)...(19): siRNA sense strand
auacaggcauucuugaagu

SEQ ID NO: 1046915 - RNA, 19 nt, Homo sapiens
  misc_RNA (1)...(19): siRNA sense strand
gaagacacuccagaaaaua

SEQ ID NO: 1046916 - RNA, 19 nt, Homo sapiens
  misc_RNA (1)...(19): siRNA sense strand
gggcucaugccaacaguga

SEQ ID NO: 1046917 - RNA, 19 nt, Homo sapiens
  misc_RNA (1)...(19): siRNA sense strand
gcucaucggcaccaucuuc

SEQ ID NO: 1046918 - RNA, 19 nt, Homo sapiens
  misc_RNA (1)...(19): siRNA sense strand
cgggugccuugcuuucaua

SEQ ID NO: 1046919 - RNA, 19 nt, Homo sapiens
  misc_RNA (1)...(19): siRNA sense strand
gccuaaguuugacauguug

SEQ ID NO: 1046920 - RNA, 19 nt, Homo sapiens
  misc_RNA (1)...(19): siRNA sense strand
caaaagaucagauugcaau

SEQ ID NO: 1046921 - RNA, 19 nt, Homo sapiens
  misc_RNA (1)...(19): siRNA sense strand
caaaggauuuucuucaagu

SEQ ID NO: 1046922 - RNA, 19 nt, Homo sapiens
  misc_RNA (1)...(19): siRNA sense strand
gcgggugccuugcuuucau

SEQ ID NO: 1046923 - RNA, 19 nt, Homo sapiens
  misc_RNA (1)...(19): siRNA sense strand
agaagacacuccagaaaau

SEQ ID NO: 1046924 - RNA, 19 nt, Homo sapiens
  misc_RNA (1)...(19): siRNA sense strand
agauugcaauuccagaaga

SEQ ID NO: 1046925 - RNA, 19 nt, Homo sapiens
  misc_RNA (1)...(19): siRNA sense strand
uaucugcccagucuucaaa

SEQ ID NO: 1046926 - RNA, 19 nt, Homo sapiens
  misc_RNA (1)...(19): siRNA sense strand
agccuaaguuugacauguu

SEQ ID NO: 1046927 - RNA, 19 nt, Homo sapiens
  misc_RNA (1)...(19): siRNA sense strand
gcccagucuucaaaggauu

SEQ ID NO: 1046928 - RNA, 19 nt, Homo sapiens
  misc_RNA (1)...(19): siRNA sense strand
uuugacauguuguacaaga

SEQ ID NO: 1046929 - RNA, 19 nt, Homo sapiens
  misc_RNA (1)...(19): siRNA sense strand
uuucauacuugacaacaca

SEQ ID NO: 1046930 - RNA, 19 nt, Homo sapiens
  misc_RNA (1)...(19): siRNA sense strand
gagcguggucugauacagu

SEQ ID NO: 1046931 - RNA, 19 nt, Homo sapiens
  misc_RNA (1)...(19): siRNA sense strand
cuuccagccucaagagcua

SEQ ID NO: 1046932 - RNA, 19 nt, Homo sapiens
  misc_RNA (1)...(19): siRNA sense strand
ggcauguucugcacucucu

SEQ ID NO: 1046933 - RNA, 19 nt, Homo sapiens
  misc_RNA (1)...(19): siRNA sense strand
cgccaucaauacaggcauu

SEQ ID NO: 1046934 - RNA, 19 nt, Homo sapiens
  misc_RNA (1)...(19): siRNA sense strand
aguuugacauguuguacaa

SEQ ID NO: 1046935 - RNA, 19 nt, Homo sapiens
  misc_RNA (1)...(19): siRNA sense strand
ucagauugcaauuccagaa

SEQ ID NO: 1046936 - RNA, 19 nt, Homo sapiens
  misc_RNA (1)...(19): siRNA sense strand
ccucaagagcuacgauuuc

SEQ ID NO: 1046937 - RNA, 19 nt, Homo sapiens
  misc_RNA (1)...(19): siRNA sense strand
cauguucugcacucucuuu

SEQ ID NO: 1046938 - RNA, 19 nt, Homo sapiens
  misc_RNA (1)...(19): siRNA sense strand
cagaagacacuccagaaaa

SEQ ID NO: 1046939 - RNA, 19 nt, Homo sapiens
  misc_RNA (1)...(19): siRNA sense strand
ggucugauacaguggaaag

SEQ ID NO: 1046940 - RNA, 19 nt, Homo sapiens
  misc_RNA (1)...(19): siRNA sense strand
aaagaucagauugcaauuc

SEQ ID NO: 1046941 - RNA, 19 nt, Homo sapiens
  misc_RNA (1)...(19): siRNA sense strand
cuaaguuugacauguugua

SEQ ID NO: 1046942 - RNA, 19 nt, Homo sapiens
  misc_RNA (1)...(19): siRNA sense strand
ugcaauuuguggacaugaa

SEQ ID NO: 1046943 - RNA, 19 nt, Homo sapiens
  misc_RNA (1)...(19): siRNA sense strand
gcucaugccaacagugaca

SEQ ID NO: 1046944 - RNA, 19 nt, Homo sapiens
  misc_RNA (1)...(19): siRNA sense strand
gcugaccacggagauguuu

SEQ ID NO: 1046945 - RNA, 19 nt, Homo sapiens
  misc_RNA (1)...(19): siRNA sense strand
uacaggcauucuugaagug

SEQ ID NO: 1046946 - RNA, 19 nt, Homo sapiens
  misc_RNA (1)...(19): siRNA sense strand
caucaauacaggcauucuu

SEQ ID NO: 1046947 - RNA, 19 nt, Homo sapiens
  misc_RNA (1)...(19): siRNA sense strand
ugccuugcuuucauacuug

SEQ ID NO: 1046948 - RNA, 19 nt, Homo sapiens
  misc_RNA (1)...(19): siRNA sense strand
gaaaauacagaaacugcau

SEQ ID NO: 1046949 - RNA, 19 nt, Homo sapiens
  misc_RNA (1)...(19): siRNA sense strand
aagaucagauugcaauucc

SEQ ID NO: 1046950 - RNA, 19 nt, Homo sapiens
  misc_RNA (1)...(19): siRNA sense strand
gcuguccaaccugcaauuu

SEQ ID NO: 1046951 - RNA, 19 nt, Homo sapiens
  misc_RNA (1)...(19): siRNA sense strand
aacccuggcgccaucaaua

SEQ ID NO: 1046952 - RNA, 19 nt, Homo sapiens
  misc_RNA (1)...(19): siRNA sense strand
gauugcaauuccagaagac

SEQ ID NO: 1046953 - RNA, 19 nt, Homo sapiens
  misc_RNA (1)...(19): siRNA sense strand
ugacauguuguacaagauc

SEQ ID NO: 1046954 - RNA, 19 nt, Homo sapiens
  misc_RNA (1)...(19): siRNA sense strand
gccucaagagcuacgauuu

SEQ ID NO: 1046955 - RNA, 19 nt, Homo sapiens
  misc_RNA (1)...(19): siRNA sense strand
gccuugcuuucauacuuga

SEQ ID NO: 1046956 - RNA, 19 nt, Homo sapiens
  misc_RNA (1)...(19): siRNA sense strand
gcgaacacuuucaccauua

SEQ ID NO: 1046957 - RNA, 19 nt, Homo sapiens
  misc_RNA (1)...(19): siRNA sense strand
gaagaggugaauauguuua

SEQ ID NO: 1046958 - RNA, 19 nt, Homo sapiens
  misc_RNA (1)...(19): siRNA sense strand
gaaagaagaaggugguuca

SEQ ID NO: 1046959 - RNA, 19 nt, Homo sapiens
  misc_RNA (1)...(19): siRNA sense strand
gaacagccacagcagauga

SEQ ID NO: 1046960 - RNA, 19 nt, Homo sapiens
  misc_RNA (1)...(19): siRNA sense strand
agaagaaggugguucauag

SEQ ID NO: 1046961 - RNA, 19 nt, Homo sapiens
  misc_RNA (1)...(19): siRNA sense strand
ggaugaugaugaugaaguu

SEQ ID NO: 1046962 - RNA, 19 nt, Homo sapiens
  misc_RNA (1)...(19): siRNA sense strand
caaacaaucuguggaugga

SEQ ID NO: 1046963 - RNA, 19 nt, Homo sapiens
  misc_RNA (1)...(19): siRNA sense strand
gaagaaggugguucauaga

SEQ ID NO: 1046964 - RNA, 19 nt, Homo sapiens
  misc_RNA (1)...(19): siRNA sense strand
uugaagaggugaauauguu

SEQ ID NO: 1046965 - RNA, 19 nt, Homo sapiens
  misc_RNA (1)...(19): siRNA sense strand
gaaagaaacaaucaugaac

SEQ ID NO: 1046966 - RNA, 19 nt, Homo sapiens
  misc_RNA (1)...(19): siRNA sense strand
gagaggaugaugaugauga

SEQ ID NO: 1046967 - RNA, 19 nt, Homo sapiens
  misc_RNA (1)...(19): siRNA sense strand
gaugaggcuuccaagaaug

SEQ ID NO: 1046968 - RNA, 19 nt, Homo sapiens
  misc_RNA (1)...(19): siRNA sense strand
guaaacaauaucucuggua

SEQ ID NO: 1046969 - RNA, 19 nt, Homo sapiens
  misc_RNA (1)...(19): siRNA sense strand
ggccgaagcucugcccaaa

SEQ ID NO: 1046970 - RNA, 19 nt, Homo sapiens
  misc_RNA (1)...(19): siRNA sense strand
ugaugaggcuuccaagaau

SEQ ID NO: 1046971 - RNA, 19 nt, Homo sapiens
  misc_RNA (1)...(19): siRNA sense strand
ccgaagcucugcccaaaca

SEQ ID NO: 1046972 - RNA, 19 nt, Homo sapiens
  misc_RNA (1)...(19): siRNA sense strand
cagaucuuguggagaauuu

SEQ ID NO: 1046973 - RNA, 19 nt, Homo sapiens
  misc_RNA (1)...(19): siRNA sense strand
cuucaguucuccuuaaaga

SEQ ID NO: 1046974 - RNA, 19 nt, Homo sapiens
  misc_RNA (1)...(19): siRNA sense strand
caagaaugaggcaaacuga

SEQ ID NO: 1046975 - RNA, 19 nt, Homo sapiens
  misc_RNA (1)...(19): siRNA sense strand
gcagcugacagaaaugcua

SEQ ID NO: 1046976 - RNA, 19 nt, Homo sapiens
  misc_RNA (1)...(19): siRNA sense strand
gcgcauuggugggaaagga

SEQ ID NO: 1046977 - RNA, 19 nt, Homo sapiens
  misc_RNA (1)...(19): siRNA sense strand
ugaugaaguuccagaucuu

SEQ ID NO: 1046978 - RNA, 19 nt, Homo sapiens
  misc_RNA (1)...(19): siRNA sense strand
gaagcucugcccaaacaau

SEQ ID NO: 1046979 - RNA, 19 nt, Homo sapiens
  misc_RNA (1)...(19): siRNA sense strand
agaggaugaugaugaugaa

SEQ ID NO: 1046980 - RNA, 19 nt, Homo sapiens
  misc_RNA (1)...(19): siRNA sense strand
aacaaucuguggauggaaa

SEQ ID NO: 1046981 - RNA, 19 nt, Homo sapiens
  misc_RNA (1)...(19): siRNA sense strand
gaaguuagggguaaacaau

SEQ ID NO: 1046982 - RNA, 19 nt, Homo sapiens
  misc_RNA (1)...(19): siRNA sense strand
gaggugaauauguuuacaa

SEQ ID NO: 1046983 - RNA, 19 nt, Homo sapiens
  misc_RNA (1)...(19): siRNA sense strand
aagaaacaaucaugaacca

SEQ ID NO: 1046984 - RNA, 19 nt, Homo sapiens
  misc_RNA (1)...(19): siRNA sense strand
ugaagaggugaauauguuu

SEQ ID NO: 1046985 - RNA, 19 nt, Homo sapiens
  misc_RNA (1)...(19): siRNA sense strand
aagaagaaggugguucaua

SEQ ID NO: 1046986 - RNA, 19 nt, Homo sapiens
  misc_RNA (1)...(19): siRNA sense strand
uggagaggaugaugaugau

SEQ ID NO: 1046987 - RNA, 19 nt, Homo sapiens
  misc_RNA (1)...(19): siRNA sense strand
ccaagaaugaggcaaacug

SEQ ID NO: 1046988 - RNA, 19 nt, Homo sapiens
  misc_RNA (1)...(19): siRNA sense strand
gaugaugaaguuccagauc

SEQ ID NO: 1046989 - RNA, 19 nt, Homo sapiens
  misc_RNA (1)...(19): siRNA sense strand
uugaugaggcuuccaagaa

SEQ ID NO: 1046990 - RNA, 19 nt, Homo sapiens
  misc_RNA (1)...(19): siRNA sense strand
agcgaacacuuucaccauu

SEQ ID NO: 1046991 - RNA, 19 nt, Homo sapiens
  misc_RNA (1)...(19): siRNA sense strand
uuaaagaaguuagggguaa

SEQ ID NO: 1046992 - RNA, 19 nt, Homo sapiens
  misc_RNA (1)...(19): siRNA sense strand
gaugaaguuccagaucuug

SEQ ID NO: 1046993 - RNA, 19 nt, Homo sapiens
  misc_RNA (1)...(19): siRNA sense strand
cgaacacuuucaccauuac

SEQ ID NO: 1046994 - RNA, 19 nt, Homo sapiens
  misc_RNA (1)...(19): siRNA sense strand
uagaacagccacagcagau

SEQ ID NO: 1046995 - RNA, 19 nt, Homo sapiens
  misc_RNA (1)...(19): siRNA sense strand
aagaaggugguucauagaa

SEQ ID NO: 1046996 - RNA, 19 nt, Homo sapiens
  misc_RNA (1)...(19): siRNA sense strand
cuggagaggaugaugauga

SEQ ID NO: 1046997 - RNA, 19 nt, Homo sapiens
  misc_RNA (1)...(19): siRNA sense strand
acaaaccaaggaacaguga

SEQ ID NO: 1046998 - RNA, 19 nt, Homo sapiens
  misc_RNA (1)...(19): siRNA sense strand
cuacuggagaggaugauga

SEQ ID NO: 1046999 - RNA, 19 nt, Homo sapiens
  misc_RNA (1)...(19): siRNA sense strand
gaacacuuucaccauuaca

SEQ ID NO: 1047000 - RNA, 19 nt, Homo sapiens
  misc_RNA (1)...(19): siRNA sense strand
gcccaaacaaucuguggau

SEQ ID NO: 1047001 - RNA, 19 nt, Homo sapiens
  misc_RNA (1)...(19): siRNA sense strand
agccacagcagaugacaaa

SEQ ID NO: 1047002 - RNA, 19 nt, Homo sapiens
  misc_RNA (1)...(19): siRNA sense strand
uaaagaaguuagggguaaa

SEQ ID NO: 1047003 - RNA, 19 nt, Homo sapiens
  misc_RNA (1)...(19): siRNA sense strand
cagcgaacacuuucaccau

SEQ ID NO: 1047004 - RNA, 19 nt, Homo sapiens
  misc_RNA (1)...(19): siRNA sense strand
gauaguaccucagcaaaca

SEQ ID NO: 1047005 - RNA, 19 nt, Homo sapiens
  misc_RNA (1)...(19): siRNA sense strand
ccaaggagguggagauugu

SEQ ID NO: 1047006 - RNA, 19 nt, Homo sapiens
  misc_RNA (1)...(19): siRNA sense strand
gauggcagccugacaauga

SEQ ID NO: 1047007 - RNA, 19 nt, Homo sapiens
  misc_RNA (1)...(19): siRNA sense strand
gaaccgagaguuaaagaug

SEQ ID NO: 1047008 - RNA, 19 nt, Homo sapiens
  misc_RNA (1)...(19): siRNA sense strand
ccauuaaccugcaagagaa

SEQ ID NO: 1047009 - RNA, 19 nt, Homo sapiens
  misc_RNA (1)...(19): siRNA sense strand
ggacuggccagcacuaauu

SEQ ID NO: 1047010 - RNA, 19 nt, Homo sapiens
  misc_RNA (1)...(19): siRNA sense strand
caaggagucuggagccuau

SEQ ID NO: 1047011 - RNA, 19 nt, Homo sapiens
  misc_RNA (1)...(19): siRNA sense strand
gcacgccacugaaccacuu

SEQ ID NO: 1047012 - RNA, 19 nt, Homo sapiens
  misc_RNA (1)...(19): siRNA sense strand
ggaauggccuucaggaaaa

SEQ ID NO: 1047013 - RNA, 19 nt, Homo sapiens
  misc_RNA (1)...(19): siRNA sense strand
ccacgaggacuucacauuu

SEQ ID NO: 1047014 - RNA, 19 nt, Homo sapiens
  misc_RNA (1)...(19): siRNA sense strand
ggacaucccugagauugca

SEQ ID NO: 1047015 - RNA, 19 nt, Homo sapiens
  misc_RNA (1)...(19): siRNA sense strand
gaaacaagacccugauguc

SEQ ID NO: 1047016 - RNA, 19 nt, Homo sapiens
  misc_RNA (1)...(19): siRNA sense strand
gggaugagaucaagaagac

SEQ ID NO: 1047017 - RNA, 19 nt, Homo sapiens
  misc_RNA (1)...(19): siRNA sense strand
gaccagaaccgagaguuaa

SEQ ID NO: 1047018 - RNA, 19 nt, Homo sapiens
  misc_RNA (1)...(19): siRNA sense strand
gaagacagucccuccaugu

SEQ ID NO: 1047019 - RNA, 19 nt, Homo sapiens
  misc_RNA (1)...(19): siRNA sense strand
cacccaagcucaagaggaa

SEQ ID NO: 1047020 - RNA, 19 nt, Homo sapiens
  misc_RNA (1)...(19): siRNA sense strand
ggaagguccucuaugugau

SEQ ID NO: 1047021 - RNA, 19 nt, Homo sapiens
  misc_RNA (1)...(19): siRNA sense strand
ggauggagaucggcauaau

SEQ ID NO: 1047022 - RNA, 19 nt, Homo sapiens
  misc_RNA (1)...(19): siRNA sense strand
cacgaggacuucacauuug

SEQ ID NO: 1047023 - RNA, 19 nt, Homo sapiens
  misc_RNA (1)...(19): siRNA sense strand
cuaaggcacugcaagaugu

SEQ ID NO: 1047024 - RNA, 19 nt, Homo sapiens
  misc_RNA (1)...(19): siRNA sense strand
gcaacucaguggcuaccaa

SEQ ID NO: 1047025 - RNA, 19 nt, Homo sapiens
  misc_RNA (1)...(19): siRNA sense strand
gcgcuuggcucugguuaau

SEQ ID NO: 1047026 - RNA, 19 nt, Homo sapiens
  misc_RNA (1)...(19): siRNA sense strand
gauggagaucggcauaaua

SEQ ID NO: 1047027 - RNA, 19 nt, Homo sapiens
  misc_RNA (1)...(19): siRNA sense strand
ggaccaugccacccauuaa

SEQ ID NO: 1047028 - RNA, 19 nt, Homo sapiens
  misc_RNA (1)...(19): siRNA sense strand
cuagaaagccacaugaaga

SEQ ID NO: 1047029 - RNA, 19 nt, Homo sapiens
  misc_RNA (1)...(19): siRNA sense strand
aaagugaccaugaugauga

SEQ ID NO: 1047030 - RNA, 19 nt, Homo sapiens
  misc_RNA (1)...(19): siRNA sense strand
gcaaagugaccaugaugau

SEQ ID NO: 1047031 - RNA, 19 nt, Homo sapiens
  misc_RNA (1)...(19): siRNA sense strand
gagcuuugguauccagguu

SEQ ID NO: 1047032 - RNA, 19 nt, Homo sapiens
  misc_RNA (1)...(19): siRNA sense strand
uucuggagguuccuuauua

SEQ ID NO: 1047033 - RNA, 19 nt, Homo sapiens
  misc_RNA (1)...(19): siRNA sense strand
gcagaaagccccaggaaug

SEQ ID NO: 1047034 - RNA, 19 nt, Homo sapiens
  misc_RNA (1)...(19): siRNA sense strand
uuaaagaugugguguacag

SEQ ID NO: 1047035 - RNA, 19 nt, Homo sapiens
  misc_RNA (1)...(19): siRNA sense strand
ccaagcugcucaaguccaa

SEQ ID NO: 1047036 - RNA, 19 nt, Homo sapiens
  misc_RNA (1)...(19): siRNA sense strand
gaaccucacccaagcucaa

SEQ ID NO: 1047037 - RNA, 19 nt, Homo sapiens
  misc_RNA (1)...(19): siRNA sense strand
gcagcacccuggcagaaag

SEQ ID NO: 1047038 - RNA, 19 nt, Homo sapiens
  misc_RNA (1)...(19): siRNA sense strand
ugaccagaaccgagaguua

SEQ ID NO: 1047039 - RNA, 19 nt, Homo sapiens
  misc_RNA (1)...(19): siRNA sense strand
ggaccucaauggacuucug

SEQ ID NO: 1047040 - RNA, 19 nt, Homo sapiens
  misc_RNA (1)...(19): siRNA sense strand
cggaagguccucuauguga

SEQ ID NO: 1047041 - RNA, 19 nt, Homo sapiens
  misc_RNA (1)...(19): siRNA sense strand
gagcagcugcagacacauu

SEQ ID NO: 1047042 - RNA, 19 nt, Homo sapiens
  misc_RNA (1)...(19): siRNA sense strand
gagggcagcaugaaagaga

SEQ ID NO: 1047043 - RNA, 19 nt, Homo sapiens
  misc_RNA (1)...(19): siRNA sense strand
gcccacagcaccugacauu

SEQ ID NO: 1047044 - RNA, 19 nt, Homo sapiens
  misc_RNA (1)...(19): siRNA sense strand
gaagguccucuaugugaug

SEQ ID NO: 1047045 - RNA, 19 nt, Homo sapiens
  misc_RNA (1)...(19): siRNA sense strand
agcagugacucuagcauuu

SEQ ID NO: 1047046 - RNA, 19 nt, Homo sapiens
  misc_RNA (1)...(19): siRNA sense strand
gagcaaagugaccaugaug

SEQ ID NO: 1047047 - RNA, 19 nt, Homo sapiens
  misc_RNA (1)...(19): siRNA sense strand
ccacagcaccugacauuac

SEQ ID NO: 1047048 - RNA, 19 nt, Homo sapiens
  misc_RNA (1)...(19): siRNA sense strand
ugacaaccauaagaaacaa

SEQ ID NO: 1047049 - RNA, 19 nt, Homo sapiens
  misc_RNA (1)...(19): siRNA sense strand
guaccuggccuguggaugu

SEQ ID NO: 1047050 - RNA, 19 nt, Homo sapiens
  misc_RNA (1)...(19): siRNA sense strand
aaagaugugguguacagua

SEQ ID NO: 1047051 - RNA, 19 nt, Homo sapiens
  misc_RNA (1)...(19): siRNA sense strand
ccgagcagcugcagacaca

SEQ ID NO: 1047052 - RNA, 19 nt, Homo sapiens
  misc_RNA (1)...(19): siRNA sense strand
ucuccaagcugcucaaguc

SEQ ID NO: 1047053 - RNA, 19 nt, Homo sapiens
  misc_RNA (1)...(19): siRNA sense strand
agaagcaggucaucugucu

SEQ ID NO: 1047054 - RNA, 19 nt, Homo sapiens
  misc_RNA (1)...(19): siRNA sense strand
gcuuggcucugguuaaugg

SEQ ID NO: 1047055 - RNA, 19 nt, Homo sapiens
  misc_RNA (1)...(19): siRNA sense strand
aagaugugguguacaguau

SEQ ID NO: 1047056 - RNA, 19 nt, Homo sapiens
  misc_RNA (1)...(19): siRNA sense strand
caguggcccugcugcauga

SEQ ID NO: 1047057 - RNA, 19 nt, Homo sapiens
  misc_RNA (1)...(19): siRNA sense strand
ugauggagcugcugcaaaa

SEQ ID NO: 1047058 - RNA, 19 nt, Homo sapiens
  misc_RNA (1)...(19): siRNA sense strand
cgauggcuaugucaaguuc

SEQ ID NO: 1047059 - RNA, 19 nt, Homo sapiens
  misc_RNA (1)...(19): siRNA sense strand
gaggagagcagcccaacag

SEQ ID NO: 1047060 - RNA, 19 nt, Homo sapiens
  misc_RNA (1)...(19): siRNA sense strand
aacggaagguccucuaugu

SEQ ID NO: 1047061 - RNA, 19 nt, Homo sapiens
  misc_RNA (1)...(19): siRNA sense strand
caacggaagguccucuaug

SEQ ID NO: 1047062 - RNA, 19 nt, Homo sapiens
  misc_RNA (1)...(19): siRNA sense strand
ggaccucucagcagaauac

SEQ ID NO: 1047063 - RNA, 19 nt, Homo sapiens
  misc_RNA (1)...(19): siRNA sense strand
gugcugagcuuugguaucc

SEQ ID NO: 1047064 - RNA, 19 nt, Homo sapiens
  misc_RNA (1)...(19): siRNA sense strand
gcacugucgucagcuguag

SEQ ID NO: 1047065 - RNA, 19 nt, Homo sapiens
  misc_RNA (1)...(19): siRNA sense strand
gaguuaaagauguggugua

SEQ ID NO: 1047066 - RNA, 19 nt, Homo sapiens
  misc_RNA (1)...(19): siRNA sense strand
ggacacaggaauacuugca

SEQ ID NO: 1047067 - RNA, 19 nt, Homo sapiens
  misc_RNA (1)...(19): siRNA sense strand
caaagugaccaugaugaug

SEQ ID NO: 1047068 - RNA, 19 nt, Homo sapiens
  misc_RNA (1)...(19): siRNA sense strand
aggaauggccuucaggaaa

SEQ ID NO: 1047069 - RNA, 19 nt, Homo sapiens
  misc_RNA (1)...(19): siRNA sense strand
gaguggaaaccucaugaug

SEQ ID NO: 1047070 - RNA, 19 nt, Homo sapiens
  misc_RNA (1)...(19): siRNA sense strand
gcuagaaagccacaugaag

SEQ ID NO: 1047071 - RNA, 19 nt, Homo sapiens
  misc_RNA (1)...(19): siRNA sense strand
aggagcagcugacacaaca

SEQ ID NO: 1047072 - RNA, 19 nt, Homo sapiens
  misc_RNA (1)...(19): siRNA sense strand
cugaggagcugaccuugag

SEQ ID NO: 1047073 - RNA, 19 nt, Homo sapiens
  misc_RNA (1)...(19): siRNA sense strand
gcaacggaagguccucuau

SEQ ID NO: 1047074 - RNA, 19 nt, Homo sapiens
  misc_RNA (1)...(19): siRNA sense strand
caaccugauugcugugucu

SEQ ID NO: 1047075 - RNA, 19 nt, Homo sapiens
  misc_RNA (1)...(19): siRNA sense strand
ugagcaaagugaccaugau

SEQ ID NO: 1047076 - RNA, 19 nt, Homo sapiens
  misc_RNA (1)...(19): siRNA sense strand
ccgcucugcucaggugaua

SEQ ID NO: 1047077 - RNA, 19 nt, Homo sapiens
  misc_RNA (1)...(19): siRNA sense strand
agaccaagcccaaguugau

SEQ ID NO: 1047078 - RNA, 19 nt, Homo sapiens
  misc_RNA (1)...(19): siRNA sense strand
gauaucuucagcucaguga

SEQ ID NO: 1047079 - RNA, 19 nt, Homo sapiens
  misc_RNA (1)...(19): siRNA sense strand
gcagggcuucauuguggua

SEQ ID NO: 1047080 - RNA, 19 nt, Homo sapiens
  misc_RNA (1)...(19): siRNA sense strand
aguagcagcagcucccuua

SEQ ID NO: 1047081 - RNA, 19 nt, Homo sapiens
  misc_RNA (1)...(19): siRNA sense strand
ggaaaagcaagaaggauga

SEQ ID NO: 1047082 - RNA, 19 nt, Homo sapiens
  misc_RNA (1)...(19): siRNA sense strand
cauucgggcugccaacaau

SEQ ID NO: 1047083 - RNA, 19 nt, Homo sapiens
  misc_RNA (1)...(19): siRNA sense strand
gcagcuagaaagccacaug

SEQ ID NO: 1047084 - RNA, 19 nt, Homo sapiens
  misc_RNA (1)...(19): siRNA sense strand
guagaacgugcccuugaga

SEQ ID NO: 1047085 - RNA, 19 nt, Homo sapiens
  misc_RNA (1)...(19): siRNA sense strand
gcaggucaucugucucuca

SEQ ID NO: 1047086 - RNA, 19 nt, Homo sapiens
  misc_RNA (1)...(19): siRNA sense strand
cccauuaaccugcaagaga

SEQ ID NO: 1047087 - RNA, 19 nt, Homo sapiens
  misc_RNA (1)...(19): siRNA sense strand
gagaccaagcccaaguuga

SEQ ID NO: 1047088 - RNA, 19 nt, Homo sapiens
  misc_RNA (1)...(19): siRNA sense strand
cagugacucuagcauuuca

SEQ ID NO: 1047089 - RNA, 19 nt, Homo sapiens
  misc_RNA (1)...(19): siRNA sense strand
gcagugacucuagcauuuc

SEQ ID NO: 1047090 - RNA, 19 nt, Homo sapiens
  misc_RNA (1)...(19): siRNA sense strand
gugacaaccauaagaaaca

SEQ ID NO: 1047091 - RNA, 19 nt, Homo sapiens
  misc_RNA (1)...(19): siRNA sense strand
gcggcuagagcgcagcaua

SEQ ID NO: 1047092 - RNA, 19 nt, Homo sapiens
  misc_RNA (1)...(19): siRNA sense strand
ggugauaguaccucagcaa

SEQ ID NO: 1047093 - RNA, 19 nt, Homo sapiens
  misc_RNA (1)...(19): siRNA sense strand
uagcagugacucuagcauu

SEQ ID NO: 1047094 - RNA, 19 nt, Homo sapiens
  misc_RNA (1)...(19): siRNA sense strand
gagcagcugacacaacagu

SEQ ID NO: 1047095 - RNA, 19 nt, Homo sapiens
  misc_RNA (1)...(19): siRNA sense strand
ggcaggagcagcugacaca

SEQ ID NO: 1047096 - RNA, 19 nt, Homo sapiens
  misc_RNA (1)...(19): siRNA sense strand
uaagaaacaagacccugau

SEQ ID NO: 1047097 - RNA, 19 nt, Homo sapiens
  misc_RNA (1)...(19): siRNA sense strand
gugauaguaccucagcaaa

SEQ ID NO: 1047098 - RNA, 19 nt, Homo sapiens
  misc_RNA (1)...(19): siRNA sense strand
cggaccaugccacccauua

SEQ ID NO: 1047099 - RNA, 19 nt, Homo sapiens
  misc_RNA (1)...(19): siRNA sense strand
cagcauacgggaugagauc

SEQ ID NO: 1047100 - RNA, 19 nt, Homo sapiens
  misc_RNA (1)...(19): siRNA sense strand
agucacaggccacguagaa

SEQ ID NO: 1047101 - RNA, 19 nt, Homo sapiens
  misc_RNA (1)...(19): siRNA sense strand
cacagcaccugacauuacu

SEQ ID NO: 1047102 - RNA, 19 nt, Homo sapiens
  misc_RNA (1)...(19): siRNA sense strand
caggccauguuccagcaaa

SEQ ID NO: 1047103 - RNA, 19 nt, Homo sapiens
  misc_RNA (1)...(19): siRNA sense strand
cagcuagaaagccacauga

SEQ ID NO: 1047104 - RNA, 19 nt, Homo sapiens
  misc_RNA (1)...(19): siRNA sense strand
cagaaacgaucuacaagaa

SEQ ID NO: 1047105 - RNA, 19 nt, Homo sapiens
  misc_RNA (1)...(19): siRNA sense strand
gaaacgaucuacaagaacu

SEQ ID NO: 1047106 - RNA, 19 nt, Homo sapiens
  misc_RNA (1)...(19): siRNA sense strand
gaacuacuaccgaauccaa

SEQ ID NO: 1047107 - RNA, 19 nt, Homo sapiens
  misc_RNA (1)...(19): siRNA sense strand
ccaagugggugcaucugaa

SEQ ID NO: 1047108 - RNA, 19 nt, Homo sapiens
  misc_RNA (1)...(19): siRNA sense strand
ccaaacaccugaguaugau

SEQ ID NO: 1047109 - RNA, 19 nt, Homo sapiens
  misc_RNA (1)...(19): siRNA sense strand
uuacagaaacgaucuacaa

SEQ ID NO: 1047110 - RNA, 19 nt, Homo sapiens
  misc_RNA (1)...(19): siRNA sense strand
cccaaacaccugaguauga

SEQ ID NO: 1047111 - RNA, 19 nt, Homo sapiens
  misc_RNA (1)...(19): siRNA sense strand
caagaacuacuaccgaauc

SEQ ID NO: 1047112 - RNA, 19 nt, Homo sapiens
  misc_RNA (1)...(19): siRNA sense strand
ggaccaccaccguucgaaa

SEQ ID NO: 1047113 - RNA, 19 nt, Homo sapiens
  misc_RNA (1)...(19): siRNA sense strand
cagagcaguucaguuccua

SEQ ID NO: 1047114 - RNA, 19 nt, Homo sapiens
  misc_RNA (1)...(19): siRNA sense strand
acagaaacgaucuacaaga

SEQ ID NO: 1047115 - RNA, 19 nt, Homo sapiens
  misc_RNA (1)...(19): siRNA sense strand
cgucacggguaauuaugug

SEQ ID NO: 1047116 - RNA, 19 nt, Homo sapiens
  misc_RNA (1)...(19): siRNA sense strand
cgucguauggcaagagaaa

SEQ ID NO: 1047117 - RNA, 19 nt, Homo sapiens
  misc_RNA (1)...(19): siRNA sense strand
caacccuggucgucguaug

SEQ ID NO: 1047118 - RNA, 19 nt, Homo sapiens
  misc_RNA (1)...(19): siRNA sense strand
aaacauccgacacuaccuu

SEQ ID NO: 1047119 - RNA, 19 nt, Homo sapiens
  misc_RNA (1)...(19): siRNA sense strand
ggcccaaacaccugaguau

SEQ ID NO: 1047120 - RNA, 19 nt, Homo sapiens
  misc_RNA (1)...(19): siRNA sense strand
cgaucuacaagaacuacua

SEQ ID NO: 1047121 - RNA, 19 nt, Homo sapiens
  misc_RNA (1)...(19): siRNA sense strand
gaccaccaccguucgaaag

SEQ ID NO: 1047122 - RNA, 19 nt, Homo sapiens
  misc_RNA (1)...(19): siRNA sense strand
gagcggacacaucagucuu

SEQ ID NO: 1047123 - RNA, 19 nt, Homo sapiens
  misc_RNA (1)...(19): siRNA sense strand
aaacaccugaguaugaugu

SEQ ID NO: 1047124 - RNA, 19 nt, Homo sapiens
  misc_RNA (1)...(19): siRNA sense strand
gggccugaagcgcauguuu

SEQ ID NO: 1047125 - RNA, 19 nt, Homo sapiens
  misc_RNA (1)...(19): siRNA sense strand
cuacuaccgaauccaauug

SEQ ID NO: 1047126 - RNA, 19 nt, Homo sapiens
  misc_RNA (1)...(19): siRNA sense strand
agccagagcaguucaguuc

SEQ ID NO: 1047127 - RNA, 19 nt, Homo sapiens
  misc_RNA (1)...(19): siRNA sense strand
gccaaaacauccgacacua

SEQ ID NO: 1047128 - RNA, 19 nt, Homo sapiens
  misc_RNA (1)...(19): siRNA sense strand
aaacgaucuacaagaacua

SEQ ID NO: 1047129 - RNA, 19 nt, Homo sapiens
  misc_RNA (1)...(19): siRNA sense strand
ggccugaagcgcauguuuc

SEQ ID NO: 1047130 - RNA, 19 nt, Homo sapiens
  misc_RNA (1)...(19): siRNA sense strand
gaucuacaagaacuacuac

SEQ ID NO: 1047131 - RNA, 19 nt, Homo sapiens
  misc_RNA (1)...(19): siRNA sense strand
ccagagcaguucaguuccu

SEQ ID NO: 1047132 - RNA, 19 nt, Homo sapiens
  misc_RNA (1)...(19): siRNA sense strand
guacgagacccugcagaug

SEQ ID NO: 1047133 - RNA, 19 nt, Homo sapiens
  misc_RNA (1)...(19): siRNA sense strand
gaagaaagaccuccugauu

SEQ ID NO: 1047134 - RNA, 19 nt, Homo sapiens
  misc_RNA (1)...(19): siRNA sense strand
acagagaccugcugcauaa

SEQ ID NO: 1047135 - RNA, 19 nt, Homo sapiens
  misc_RNA (1)...(19): siRNA sense strand
ugaaagagcugcugacgau

SEQ ID NO: 1047136 - RNA, 19 nt, Homo sapiens
  misc_RNA (1)...(19): siRNA sense strand
ggacgaagaugcccagaag

SEQ ID NO: 1047137 - RNA, 19 nt, Homo sapiens
  misc_RNA (1)...(19): siRNA sense strand
ggaaagcucccgccugaaa

SEQ ID NO: 1047138 - RNA, 19 nt, Homo sapiens
  misc_RNA (1)...(19): siRNA sense strand
ugaaggagcucaucgucuu

SEQ ID NO: 1047139 - RNA, 19 nt, Homo sapiens
  misc_RNA (1)...(19): siRNA sense strand
gaagagaugaggaaaguuc

SEQ ID NO: 1047140 - RNA, 19 nt, Homo sapiens
  misc_RNA (1)...(19): siRNA sense strand
gaagggagccaugaagauu

SEQ ID NO: 1047141 - RNA, 19 nt, Homo sapiens
  misc_RNA (1)...(19): siRNA sense strand
gaagaugcccagaagagaa

SEQ ID NO: 1047142 - RNA, 19 nt, Homo sapiens
  misc_RNA (1)...(19): siRNA sense strand
agaaagaccuccugauugg

SEQ ID NO: 1047143 - RNA, 19 nt, Homo sapiens
  misc_RNA (1)...(19): siRNA sense strand
gaagaucaccggagaacug

SEQ ID NO: 1047144 - RNA, 19 nt, Homo sapiens
  misc_RNA (1)...(19): siRNA sense strand
gaaugaaggcugaguacga

SEQ ID NO: 1047145 - RNA, 19 nt, Homo sapiens
  misc_RNA (1)...(19): siRNA sense strand
ugaaggcggugguggagaa

SEQ ID NO: 1047146 - RNA, 19 nt, Homo sapiens
  misc_RNA (1)...(19): siRNA sense strand
cggaugagcuggaagaucu

SEQ ID NO: 1047147 - RNA, 19 nt, Homo sapiens
  misc_RNA (1)...(19): siRNA sense strand
gacagagaccugcugcaua

SEQ ID NO: 1047148 - RNA, 19 nt, Homo sapiens
  misc_RNA (1)...(19): siRNA sense strand
gcaggacauugccaaagau

SEQ ID NO: 1047149 - RNA, 19 nt, Homo sapiens
  misc_RNA (1)...(19): siRNA sense strand
ccaacaacaucccaaaguc

SEQ ID NO: 1047150 - RNA, 19 nt, Homo sapiens
  misc_RNA (1)...(19): siRNA sense strand
ugacgaugcugcagcugaa

SEQ ID NO: 1047151 - RNA, 19 nt, Homo sapiens
  misc_RNA (1)...(19): siRNA sense strand
ugaagccacucucugauag

SEQ ID NO: 1047152 - RNA, 19 nt, Homo sapiens
  misc_RNA (1)...(19): siRNA sense strand
gaagaagggagccaugaag

SEQ ID NO: 1047153 - RNA, 19 nt, Homo sapiens
  misc_RNA (1)...(19): siRNA sense strand
ggacauugccaaagauuuu

SEQ ID NO: 1047154 - RNA, 19 nt, Homo sapiens
  misc_RNA (1)...(19): siRNA sense strand
caacaacaucccaaaguca

SEQ ID NO: 1047155 - RNA, 19 nt, Homo sapiens
  misc_RNA (1)...(19): siRNA sense strand
ccggagaacuggaagagau

SEQ ID NO: 1047156 - RNA, 19 nt, Homo sapiens
  misc_RNA (1)...(19): siRNA sense strand
gaucgaggcagcccugaug

SEQ ID NO: 1047157 - RNA, 19 nt, Homo sapiens
  misc_RNA (1)...(19): siRNA sense strand
acuccaagcugguuagaau

SEQ ID NO: 1047158 - RNA, 19 nt, Homo sapiens
  misc_RNA (1)...(19): siRNA sense strand
uggaagagaugaggaaagu

SEQ ID NO: 1047159 - RNA, 19 nt, Homo sapiens
  misc_RNA (1)...(19): siRNA sense strand
ggacaucaaggcccaaugg

SEQ ID NO: 1047160 - RNA, 19 nt, Homo sapiens
  misc_RNA (1)...(19): siRNA sense strand
caggagcacugcaccuuca

SEQ ID NO: 1047161 - RNA, 19 nt, Homo sapiens
  misc_RNA (1)...(19): siRNA sense strand
aagaaagaccuccugauug

SEQ ID NO: 1047162 - RNA, 19 nt, Homo sapiens
  misc_RNA (1)...(19): siRNA sense strand
ccugggagcagcagauuaa

SEQ ID NO: 1047163 - RNA, 19 nt, Homo sapiens
  misc_RNA (1)...(19): siRNA sense strand
gaaggucagcaucucuuug

SEQ ID NO: 1047164 - RNA, 19 nt, Homo sapiens
  misc_RNA (1)...(19): siRNA sense strand
gagacagucaccuacauga

SEQ ID NO: 1047165 - RNA, 19 nt, Homo sapiens
  misc_RNA (1)...(19): siRNA sense strand
ggacagagaccugcugcau

SEQ ID NO: 1047166 - RNA, 19 nt, Homo sapiens
  misc_RNA (1)...(19): siRNA sense strand
cggaacaccucuccuuugg

SEQ ID NO: 1047167 - RNA, 19 nt, Homo sapiens
  misc_RNA (1)...(19): siRNA sense strand
gggaggagacagucaccua

SEQ ID NO: 1047168 - RNA, 19 nt, Homo sapiens
  misc_RNA (1)...(19): siRNA sense strand
ugaguacgaugcagugaag

SEQ ID NO: 1047169 - RNA, 19 nt, Homo sapiens
  misc_RNA (1)...(19): siRNA sense strand
ggagacagucaccuacaug

SEQ ID NO: 1047170 - RNA, 19 nt, Homo sapiens
  misc_RNA (1)...(19): siRNA sense strand
ucgcuaccauccaggagua

SEQ ID NO: 1047171 - RNA, 19 nt, Homo sapiens
  misc_RNA (1)...(19): siRNA sense strand
ugcaggacauugccaaaga

SEQ ID NO: 1047172 - RNA, 19 nt, Homo sapiens
  misc_RNA (1)...(19): siRNA sense strand
uggcagaauucccggagaa

SEQ ID NO: 1047173 - RNA, 19 nt, Homo sapiens
  misc_RNA (1)...(19): siRNA sense strand
gaucaccggagaacuggaa

SEQ ID NO: 1047174 - RNA, 19 nt, Homo sapiens
  misc_RNA (1)...(19): siRNA sense strand
cccaagaggccgaguuuga

SEQ ID NO: 1047175 - RNA, 19 nt, Homo sapiens
  misc_RNA (1)...(19): siRNA sense strand
gcugcacccuggccaacaa

SEQ ID NO: 1047176 - RNA, 19 nt, Homo sapiens
  misc_RNA (1)...(19): siRNA sense strand
caagaggccgaguuugaga

SEQ ID NO: 1047177 - RNA, 19 nt, Homo sapiens
  misc_RNA (1)...(19): siRNA sense strand
ccuugaggcugcuggaaga

SEQ ID NO: 1047178 - RNA, 19 nt, Homo sapiens
  misc_RNA (1)...(19): siRNA sense strand
gucaggauuucucaucaau

SEQ ID NO: 1047179 - RNA, 19 nt, Homo sapiens
  misc_RNA (1)...(19): siRNA sense strand
gggagcagcagauuaagca

SEQ ID NO: 1047180 - RNA, 19 nt, Homo sapiens
  misc_RNA (1)...(19): siRNA sense strand
cugaagccacucucugaua

SEQ ID NO: 1047181 - RNA, 19 nt, Homo sapiens
  misc_RNA (1)...(19): siRNA sense strand
gaaagcucccgccugaaag

SEQ ID NO: 1047182 - RNA, 19 nt, Homo sapiens
  misc_RNA (1)...(19): siRNA sense strand
gagaaugaaggcugaguac

SEQ ID NO: 1047183 - RNA, 19 nt, Homo sapiens
  misc_RNA (1)...(19): siRNA sense strand
caagcugguuagaaucauc

SEQ ID NO: 1047184 - RNA, 19 nt, Homo sapiens
  misc_RNA (1)...(19): siRNA sense strand
cagaauucccggagaagga

SEQ ID NO: 1047185 - RNA, 19 nt, Homo sapiens
  misc_RNA (1)...(19): siRNA sense strand
ccuccugauuggcaucuuu

SEQ ID NO: 1047186 - RNA, 19 nt, Homo sapiens
  misc_RNA (1)...(19): siRNA sense strand
ggaccugccuucccuucac

SEQ ID NO: 1047187 - RNA, 19 nt, Homo sapiens
  misc_RNA (1)...(19): siRNA sense strand
aaugaaggcugaguacgau

SEQ ID NO: 1047188 - RNA, 19 nt, Homo sapiens
  misc_RNA (1)...(19): siRNA sense strand
gaccucggaugagcuggaa

SEQ ID NO: 1047189 - RNA, 19 nt, Homo sapiens
  misc_RNA (1)...(19): siRNA sense strand
gaggcagcccugauggaaa

SEQ ID NO: 1047190 - RNA, 19 nt, Homo sapiens
  misc_RNA (1)...(19): siRNA sense strand
ugcugcagcugaagaaaga

SEQ ID NO: 1047191 - RNA, 19 nt, Homo sapiens
  misc_RNA (1)...(19): siRNA sense strand
cgaagaugcccagaagaga

SEQ ID NO: 1047192 - RNA, 19 nt, Homo sapiens
  misc_RNA (1)...(19): siRNA sense strand
gaaaacuccaagcugguua

SEQ ID NO: 1047193 - RNA, 19 nt, Homo sapiens
  misc_RNA (1)...(19): siRNA sense strand
aggcccagcucucaagguu

SEQ ID NO: 1047194 - RNA, 19 nt, Homo sapiens
  misc_RNA (1)...(19): siRNA sense strand
gagaccugcugcauaacag

SEQ ID NO: 1047195 - RNA, 19 nt, Homo sapiens
  misc_RNA (1)...(19): siRNA sense strand
gagaagaucaccggagaac

SEQ ID NO: 1047196 - RNA, 19 nt, Homo sapiens
  misc_RNA (1)...(19): siRNA sense strand
uggaagaucugcgcuacca

SEQ ID NO: 1047197 - RNA, 19 nt, Homo sapiens
  misc_RNA (1)...(19): siRNA sense strand
aggcagcccugauggaaag

SEQ ID NO: 1047198 - RNA, 19 nt, Homo sapiens
  misc_RNA (1)...(19): siRNA sense strand
gaccugccuucccuucaca

SEQ ID NO: 1047199 - RNA, 19 nt, Homo sapiens
  misc_RNA (1)...(19): siRNA sense strand
ggagaacuggaagagauga

SEQ ID NO: 1047200 - RNA, 19 nt, Homo sapiens
  misc_RNA (1)...(19): siRNA sense strand
aggcagguguggacgaguu

SEQ ID NO: 1047201 - RNA, 19 nt, Homo sapiens
  misc_RNA (1)...(19): siRNA sense strand
aaggucagcaucucuuuga

SEQ ID NO: 1047202 - RNA, 19 nt, Homo sapiens
  misc_RNA (1)...(19): siRNA sense strand
ccaaagucaggauuucuca

SEQ ID NO: 1047203 - RNA, 19 nt, Homo sapiens
  misc_RNA (1)...(19): siRNA sense strand
gcuggcuggugauggagaa

SEQ ID NO: 1047204 - RNA, 19 nt, Homo sapiens
  misc_RNA (1)...(19): siRNA sense strand
cgaggcagcccugauggaa

SEQ ID NO: 1047205 - RNA, 19 nt, Homo sapiens
  misc_RNA (1)...(19): siRNA sense strand
gcacagauggaggcugcaa

SEQ ID NO: 1047206 - RNA, 19 nt, Homo sapiens
  misc_RNA (1)...(19): siRNA sense strand
guacaaguccaagcugaag

SEQ ID NO: 1047207 - RNA, 19 nt, Homo sapiens
  misc_RNA (1)...(19): siRNA sense strand
ugaggcugcuggaagaaag

SEQ ID NO: 1047208 - RNA, 19 nt, Homo sapiens
  misc_RNA (1)...(19): siRNA sense strand
gaggagacagucaccuaca

SEQ ID NO: 1047209 - RNA, 19 nt, Homo sapiens
  misc_RNA (1)...(19): siRNA sense strand
agagaaugaaggcugagua

SEQ ID NO: 1047210 - RNA, 19 nt, Homo sapiens
  misc_RNA (1)...(19): siRNA sense strand
aaacaggcccagcucucaa

SEQ ID NO: 1047211 - RNA, 19 nt, Homo sapiens
  misc_RNA (1)...(19): siRNA sense strand
agaagaagggagccaugaa

SEQ ID NO: 1047212 - RNA, 19 nt, Homo sapiens
  misc_RNA (1)...(19): siRNA sense strand
cgucgacgcgcaaaucuuc

SEQ ID NO: 1047213 - RNA, 19 nt, Homo sapiens
  misc_RNA (1)...(19): siRNA sense strand
ucaccaacaacaucccaaa

SEQ ID NO: 1047214 - RNA, 19 nt, Homo sapiens
  misc_RNA (1)...(19): siRNA sense strand
agaggcugguggcagaauu

SEQ ID NO: 1047215 - RNA, 19 nt, Homo sapiens
  misc_RNA (1)...(19): siRNA sense strand
cccgggagcaugaggagua

SEQ ID NO: 1047216 - RNA, 19 nt, Homo sapiens
  misc_RNA (1)...(19): siRNA sense strand
accaguggaugcuguacaa

SEQ ID NO: 1047217 - RNA, 19 nt, Homo sapiens
  misc_RNA (1)...(19): siRNA sense strand
agggagccaugaagauuuc

SEQ ID NO: 1047218 - RNA, 19 nt, Homo sapiens
  misc_RNA (1)...(19): siRNA sense strand
aagggagccaugaagauuu

SEQ ID NO: 1047219 - RNA, 19 nt, Homo sapiens
  misc_RNA (1)...(19): siRNA sense strand
aagaagggagccaugaaga

SEQ ID NO: 1047220 - RNA, 19 nt, Homo sapiens
  misc_RNA (1)...(19): siRNA sense strand
agaagaugauggucacacu

SEQ ID NO: 1047221 - RNA, 19 nt, Homo sapiens
  misc_RNA (1)...(19): siRNA sense strand
aaagucaggauuucucauc

SEQ ID NO: 1047222 - RNA, 19 nt, Homo sapiens
  misc_RNA (1)...(19): siRNA sense strand
ggccaccugcugacacaaa

SEQ ID NO: 1047223 - RNA, 19 nt, Homo sapiens
  misc_RNA (1)...(19): siRNA sense strand
cagaaggucagcaucucuu

SEQ ID NO: 1047224 - RNA, 19 nt, Homo sapiens
  misc_RNA (1)...(19): siRNA sense strand
agucaggauuucucaucaa

SEQ ID NO: 1047225 - RNA, 19 nt, Homo sapiens
  misc_RNA (1)...(19): siRNA sense strand
gaagccacucucugauagu

SEQ ID NO: 1047226 - RNA, 19 nt, Homo sapiens
  misc_RNA (1)...(19): siRNA sense strand
gcacccuggccaacaacuu

SEQ ID NO: 1047227 - RNA, 19 nt, Homo sapiens
  misc_RNA (1)...(19): siRNA sense strand
gcagaggauggaaguggau

SEQ ID NO: 1047228 - RNA, 19 nt, Homo sapiens
  misc_RNA (1)...(19): siRNA sense strand
ggcccgagaugaguucuac

SEQ ID NO: 1047229 - RNA, 19 nt, Homo sapiens
  misc_RNA (1)...(19): siRNA sense strand
ugccuucccuucacaccuu

SEQ ID NO: 1047230 - RNA, 19 nt, Homo sapiens
  misc_RNA (1)...(19): siRNA sense strand
aaagcucccgccugaaaga

SEQ ID NO: 1047231 - RNA, 19 nt, Homo sapiens
  misc_RNA (1)...(19): siRNA sense strand
gccagaaggucagcaucuc

SEQ ID NO: 1047232 - RNA, 19 nt, Homo sapiens
  misc_RNA (1)...(19): siRNA sense strand
gucccaagaggccgaguuu

SEQ ID NO: 1047233 - RNA, 19 nt, Homo sapiens
  misc_RNA (1)...(19): siRNA sense strand
caaagacucugugguauuu

SEQ ID NO: 1047234 - RNA, 19 nt, Homo sapiens
  misc_RNA (1)...(19): siRNA sense strand
ggaaagagaugaugcugau

SEQ ID NO: 1047235 - RNA, 19 nt, Homo sapiens
  misc_RNA (1)...(19): siRNA sense strand
uauaagaccuucucccuuu

SEQ ID NO: 1047236 - RNA, 19 nt, Homo sapiens
  misc_RNA (1)...(19): siRNA sense strand
uaaggucacuccaacauuu

SEQ ID NO: 1047237 - RNA, 19 nt, Homo sapiens
  misc_RNA (1)...(19): siRNA sense strand
gcagaugacuuacaagcaa

SEQ ID NO: 1047238 - RNA, 19 nt, Homo sapiens
  misc_RNA (1)...(19): siRNA sense strand
gaagagcuauagaggauau

SEQ ID NO: 1047239 - RNA, 19 nt, Homo sapiens
  misc_RNA (1)...(19): siRNA sense strand
caaagucccucaucaggaa

SEQ ID NO: 1047240 - RNA, 19 nt, Homo sapiens
  misc_RNA (1)...(19): siRNA sense strand
gaauggcugugcugacuuu

SEQ ID NO: 1047241 - RNA, 19 nt, Homo sapiens
  misc_RNA (1)...(19): siRNA sense strand
acauaaagcugcuggauga

SEQ ID NO: 1047242 - RNA, 19 nt, Homo sapiens
  misc_RNA (1)...(19): siRNA sense strand
gagagcauguuguaucauu

SEQ ID NO: 1047243 - RNA, 19 nt, Homo sapiens
  misc_RNA (1)...(19): siRNA sense strand
caggaaagguuuaaucaug

SEQ ID NO: 1047244 - RNA, 19 nt, Homo sapiens
  misc_RNA (1)...(19): siRNA sense strand
uaaguuaaguucacccaaa

SEQ ID NO: 1047245 - RNA, 19 nt, Homo sapiens
  misc_RNA (1)...(19): siRNA sense strand
ggaaagguuuaaucaugaa

SEQ ID NO: 1047246 - RNA, 19 nt, Homo sapiens
  misc_RNA (1)...(19): siRNA sense strand
agaauaaacccucgagaua

SEQ ID NO: 1047247 - RNA, 19 nt, Homo sapiens
  misc_RNA (1)...(19): siRNA sense strand
ggaugagauugucagaaua

SEQ ID NO: 1047248 - RNA, 19 nt, Homo sapiens
  misc_RNA (1)...(19): siRNA sense strand
gcaaauauccaaggaaugu

SEQ ID NO: 1047249 - RNA, 19 nt, Homo sapiens
  misc_RNA (1)...(19): siRNA sense strand
gaauaaacccucgagauau

SEQ ID NO: 1047250 - RNA, 19 nt, Homo sapiens
  misc_RNA (1)...(19): siRNA sense strand
gacgcagccuuccucauua

SEQ ID NO: 1047251 - RNA, 19 nt, Homo sapiens
  misc_RNA (1)...(19): siRNA sense strand
cagcgucacugucuucaaa

SEQ ID NO: 1047252 - RNA, 19 nt, Homo sapiens
  misc_RNA (1)...(19): siRNA sense strand
gaugagauugucagaauaa

SEQ ID NO: 1047253 - RNA, 19 nt, Homo sapiens
  misc_RNA (1)...(19): siRNA sense strand
aaucagacaugucagcuuu

SEQ ID NO: 1047254 - RNA, 19 nt, Homo sapiens
  misc_RNA (1)...(19): siRNA sense strand
cuacagacauccugacaug

SEQ ID NO: 1047255 - RNA, 19 nt, Homo sapiens
  misc_RNA (1)...(19): siRNA sense strand
caugucagcuuucaagaug

SEQ ID NO: 1047256 - RNA, 19 nt, Homo sapiens
  misc_RNA (1)...(19): siRNA sense strand
gcauauaucaaguuaguug

SEQ ID NO: 1047257 - RNA, 19 nt, Homo sapiens
  misc_RNA (1)...(19): siRNA sense strand
ggucuuacguuucaaaguc

SEQ ID NO: 1047258 - RNA, 19 nt, Homo sapiens
  misc_RNA (1)...(19): siRNA sense strand
gcagagagcauguuguauc

SEQ ID NO: 1047259 - RNA, 19 nt, Homo sapiens
  misc_RNA (1)...(19): siRNA sense strand
gaggauauuucucaaggau

SEQ ID NO: 1047260 - RNA, 19 nt, Homo sapiens
  misc_RNA (1)...(19): siRNA sense strand
gguuagcccugguagcuuu

SEQ ID NO: 1047261 - RNA, 19 nt, Homo sapiens
  misc_RNA (1)...(19): siRNA sense strand
aaaguuuggucuuacguuu

SEQ ID NO: 1047262 - RNA, 19 nt, Homo sapiens
  misc_RNA (1)...(19): siRNA sense strand
ccgaagagcuauagaggau

SEQ ID NO: 1047263 - RNA, 19 nt, Homo sapiens
  misc_RNA (1)...(19): siRNA sense strand
cagagagcauguuguauca

SEQ ID NO: 1047264 - RNA, 19 nt, Homo sapiens
  misc_RNA (1)...(19): siRNA sense strand
gagaauggcugugcugacu

SEQ ID NO: 1047265 - RNA, 19 nt, Homo sapiens
  misc_RNA (1)...(19): siRNA sense strand
gugcagagagcauguugua

SEQ ID NO: 1047266 - RNA, 19 nt, Homo sapiens
  misc_RNA (1)...(19): siRNA sense strand
ccuuauagaagcucaaaua

SEQ ID NO: 1047267 - RNA, 19 nt, Homo sapiens
  misc_RNA (1)...(19): siRNA sense strand
agaagagucuacaugcaaa

SEQ ID NO: 1047268 - RNA, 19 nt, Homo sapiens
  misc_RNA (1)...(19): siRNA sense strand
ccaguucucuagugaagga

SEQ ID NO: 1047269 - RNA, 19 nt, Homo sapiens
  misc_RNA (1)...(19): siRNA sense strand
aggaaagguuuaaucauga

SEQ ID NO: 1047270 - RNA, 19 nt, Homo sapiens
  misc_RNA (1)...(19): siRNA sense strand
aauaaacccucgagauauc

SEQ ID NO: 1047271 - RNA, 19 nt, Homo sapiens
  misc_RNA (1)...(19): siRNA sense strand
agacaguuguuaccaguga

SEQ ID NO: 1047272 - RNA, 19 nt, Homo sapiens
  misc_RNA (1)...(19): siRNA sense strand
ccagugagccuuauagaag

SEQ ID NO: 1047273 - RNA, 19 nt, Homo sapiens
  misc_RNA (1)...(19): siRNA sense strand
ugaaaucaaucagacaugu

SEQ ID NO: 1047274 - RNA, 19 nt, Homo sapiens
  misc_RNA (1)...(19): siRNA sense strand
cggcaaauauccaaggaau

SEQ ID NO: 1047275 - RNA, 19 nt, Homo sapiens
  misc_RNA (1)...(19): siRNA sense strand
ccaaagacucugugguauu

SEQ ID NO: 1047276 - RNA, 19 nt, Homo sapiens
  misc_RNA (1)...(19): siRNA sense strand
caacauuucaccacuggaa

SEQ ID NO: 1047277 - RNA, 19 nt, Homo sapiens
  misc_RNA (1)...(19): siRNA sense strand
agacgcagccuuccucauu

SEQ ID NO: 1047278 - RNA, 19 nt, Homo sapiens
  misc_RNA (1)...(19): siRNA sense strand
gacccgagaugacucaagu

SEQ ID NO: 1047279 - RNA, 19 nt, Homo sapiens
  misc_RNA (1)...(19): siRNA sense strand
aggaugagauugucagaau

SEQ ID NO: 1047280 - RNA, 19 nt, Homo sapiens
  misc_RNA (1)...(19): siRNA sense strand
gggaugagacuaaguuaag

SEQ ID NO: 1047281 - RNA, 19 nt, Homo sapiens
  misc_RNA (1)...(19): siRNA sense strand
cgacuucugacaacgauaa

SEQ ID NO: 1047282 - RNA, 19 nt, Homo sapiens
  misc_RNA (1)...(19): siRNA sense strand
aagacucugugguauuuaa

SEQ ID NO: 1047283 - RNA, 19 nt, Homo sapiens
  misc_RNA (1)...(19): siRNA sense strand
cagaugacuuacaagcaaa

SEQ ID NO: 1047284 - RNA, 19 nt, Homo sapiens
  misc_RNA (1)...(19): siRNA sense strand
aagccaagccaaucagaua

SEQ ID NO: 1047285 - RNA, 19 nt, Homo sapiens
  misc_RNA (1)...(19): siRNA sense strand
gacauucagagcagaagua

SEQ ID NO: 1047286 - RNA, 19 nt, Homo sapiens
  misc_RNA (1)...(19): siRNA sense strand
guagcuuugucuuucauug

SEQ ID NO: 1047287 - RNA, 19 nt, Homo sapiens
  misc_RNA (1)...(19): siRNA sense strand
gaugcugauuccaguauuc

SEQ ID NO: 1047288 - RNA, 19 nt, Homo sapiens
  misc_RNA (1)...(19): siRNA sense strand
cagaagagucuacaugcaa

SEQ ID NO: 1047289 - RNA, 19 nt, Homo sapiens
  misc_RNA (1)...(19): siRNA sense strand
cuacgucccuuugagaaug

SEQ ID NO: 1047290 - RNA, 19 nt, Homo sapiens
  misc_RNA (1)...(19): siRNA sense strand
ggaugagacuaaguuaagu

SEQ ID NO: 1047291 - RNA, 19 nt, Homo sapiens
  misc_RNA (1)...(19): siRNA sense strand
agagguauccgaagagcua

SEQ ID NO: 1047292 - RNA, 19 nt, Homo sapiens
  misc_RNA (1)...(19): siRNA sense strand
gaauguggaagccuaaagu

SEQ ID NO: 1047293 - RNA, 19 nt, Homo sapiens
  misc_RNA (1)...(19): siRNA sense strand
ccagaagagucuacaugca

SEQ ID NO: 1047294 - RNA, 19 nt, Homo sapiens
  misc_RNA (1)...(19): siRNA sense strand
ugacuuacaagcaaaugaa

SEQ ID NO: 1047295 - RNA, 19 nt, Homo sapiens
  misc_RNA (1)...(19): siRNA sense strand
cauguuguaucauuguaug

SEQ ID NO: 1047296 - RNA, 19 nt, Homo sapiens
  misc_RNA (1)...(19): siRNA sense strand
cucaagugguggaugguua

SEQ ID NO: 1047297 - RNA, 19 nt, Homo sapiens
  misc_RNA (1)...(19): siRNA sense strand
uuucaccacuggaagauug

SEQ ID NO: 1047298 - RNA, 19 nt, Homo sapiens
  misc_RNA (1)...(19): siRNA sense strand
ccugguagcuuugucuuuc

SEQ ID NO: 1047299 - RNA, 19 nt, Homo sapiens
  misc_RNA (1)...(19): siRNA sense strand
gaugagacuaaguuaaguu

SEQ ID NO: 1047300 - RNA, 19 nt, Homo sapiens
  misc_RNA (1)...(19): siRNA sense strand
aaagagaugaugcugauuc

SEQ ID NO: 1047301 - RNA, 19 nt, Homo sapiens
  misc_RNA (1)...(19): siRNA sense strand
cagcaagagacaguuguua

SEQ ID NO: 1047302 - RNA, 19 nt, Homo sapiens
  misc_RNA (1)...(19): siRNA sense strand
acaagcaaaugaagaggau

SEQ ID NO: 1047303 - RNA, 19 nt, Homo sapiens
  misc_RNA (1)...(19): siRNA sense strand
cagaauaaacccucgagau

SEQ ID NO: 1047304 - RNA, 19 nt, Homo sapiens
  misc_RNA (1)...(19): siRNA sense strand
cccucgagauaucuuaaua

SEQ ID NO: 1047305 - RNA, 19 nt, Homo sapiens
  misc_RNA (1)...(19): siRNA sense strand
acgcagccuuccucauuaa

SEQ ID NO: 1047306 - RNA, 19 nt, Homo sapiens
  misc_RNA (1)...(19): siRNA sense strand
acuggaagauugaugacaa

SEQ ID NO: 1047307 - RNA, 19 nt, Homo sapiens
  misc_RNA (1)...(19): siRNA sense strand
gaugcuccagacccuauua

SEQ ID NO: 1047308 - RNA, 19 nt, Homo sapiens
  misc_RNA (1)...(19): siRNA sense strand
gagacuaaguuaaguucac

SEQ ID NO: 1047309 - RNA, 19 nt, Homo sapiens
  misc_RNA (1)...(19): siRNA sense strand
gagagcgacucagggacaa

SEQ ID NO: 1047310 - RNA, 19 nt, Homo sapiens
  misc_RNA (1)...(19): siRNA sense strand
ucagacaugucagcuuuca

SEQ ID NO: 1047311 - RNA, 19 nt, Homo sapiens
  misc_RNA (1)...(19): siRNA sense strand
ugaaggggcagaugacuua

SEQ ID NO: 1047312 - RNA, 19 nt, Homo sapiens
  misc_RNA (1)...(19): siRNA sense strand
gagcauguuguaucauugu

SEQ ID NO: 1047313 - RNA, 19 nt, Homo sapiens
  misc_RNA (1)...(19): siRNA sense strand
uuucuaaaccagacaguaa

SEQ ID NO: 1047314 - RNA, 19 nt, Homo sapiens
  misc_RNA (1)...(19): siRNA sense strand
gccaaucagauaacauuug

SEQ ID NO: 1047315 - RNA, 19 nt, Homo sapiens
  misc_RNA (1)...(19): siRNA sense strand
cuauagaggauauuucuca

SEQ ID NO: 1047316 - RNA, 19 nt, Homo sapiens
  misc_RNA (1)...(19): siRNA sense strand
gaaaaugucaggggaaaau

SEQ ID NO: 1047317 - RNA, 19 nt, Homo sapiens
  misc_RNA (1)...(19): siRNA sense strand
gccaggaaagguuuaauca

SEQ ID NO: 1047318 - RNA, 19 nt, Homo sapiens
  misc_RNA (1)...(19): siRNA sense strand
acccaaagacucuguggua

SEQ ID NO: 1047319 - RNA, 19 nt, Homo sapiens
  misc_RNA (1)...(19): siRNA sense strand
ccaagccaaucagauaaca

SEQ ID NO: 1047320 - RNA, 19 nt, Homo sapiens
  misc_RNA (1)...(19): siRNA sense strand
gaacguucucgcugcguau

SEQ ID NO: 1047321 - RNA, 19 nt, Homo sapiens
  misc_RNA (1)...(19): siRNA sense strand
ugauuccaguauucaguuu

SEQ ID NO: 1047322 - RNA, 19 nt, Homo sapiens
  misc_RNA (1)...(19): siRNA sense strand
cuuaauacgucgcuaugca

SEQ ID NO: 1047323 - RNA, 19 nt, Homo sapiens
  misc_RNA (1)...(19): siRNA sense strand
uauaauaaggucacuccaa

SEQ ID NO: 1047324 - RNA, 19 nt, Homo sapiens
  misc_RNA (1)...(19): siRNA sense strand
gaaaucaaucagacauguc

SEQ ID NO: 1047325 - RNA, 19 nt, Homo sapiens
  misc_RNA (1)...(19): siRNA sense strand
ggagggaguggacuaagca

SEQ ID NO: 1047326 - RNA, 19 nt, Homo sapiens
  misc_RNA (1)...(19): siRNA sense strand
gcuguggugggaaacauaa

SEQ ID NO: 1047327 - RNA, 19 nt, Homo sapiens
  misc_RNA (1)...(19): siRNA sense strand
aaaaugacuuggaaagaga

SEQ ID NO: 1047328 - RNA, 19 nt, Homo sapiens
  misc_RNA (1)...(19): siRNA sense strand
cugacaacgauaauaguua

SEQ ID NO: 1047329 - RNA, 19 nt, Homo sapiens
  misc_RNA (1)...(19): siRNA sense strand
aagccaaucagauaacauu

SEQ ID NO: 1047330 - RNA, 19 nt, Homo sapiens
  misc_RNA (1)...(19): siRNA sense strand
gaaagagaugaugcugauu

SEQ ID NO: 1047331 - RNA, 19 nt, Homo sapiens
  misc_RNA (1)...(19): siRNA sense strand
ucaagaugaggaugagauu

SEQ ID NO: 1047332 - RNA, 19 nt, Homo sapiens
  misc_RNA (1)...(19): siRNA sense strand
gaauacguacagcggcaaa

SEQ ID NO: 1047333 - RNA, 19 nt, Homo sapiens
  misc_RNA (1)...(19): siRNA sense strand
ggagaaagcugcaagagaa

SEQ ID NO: 1047334 - RNA, 19 nt, Homo sapiens
  misc_RNA (1)...(19): siRNA sense strand
gaagaucgauuccuggaua

SEQ ID NO: 1047335 - RNA, 19 nt, Homo sapiens
  misc_RNA (1)...(19): siRNA sense strand
gagaauaacucagaaagaa

SEQ ID NO: 1047336 - RNA, 19 nt, Homo sapiens
  misc_RNA (1)...(19): siRNA sense strand
gcacugagccuacauguau

SEQ ID NO: 1047337 - RNA, 19 nt, Homo sapiens
  misc_RNA (1)...(19): siRNA sense strand
gaaagucaaaggcuucuua

SEQ ID NO: 1047338 - RNA, 19 nt, Homo sapiens
  misc_RNA (1)...(19): siRNA sense strand
gcaaaagcaucuucuguua

SEQ ID NO: 1047339 - RNA, 19 nt, Homo sapiens
  misc_RNA (1)...(19): siRNA sense strand
gaaguuuggugcugcgaua

SEQ ID NO: 1047340 - RNA, 19 nt, Homo sapiens
  misc_RNA (1)...(19): siRNA sense strand
gcaggagaguuuaaucaaa

SEQ ID NO: 1047341 - RNA, 19 nt, Homo sapiens
  misc_RNA (1)...(19): siRNA sense strand
ggacagugcuacagccaaa

SEQ ID NO: 1047342 - RNA, 19 nt, Homo sapiens
  misc_RNA (1)...(19): siRNA sense strand
caaacugcaucacuacuuu

SEQ ID NO: 1047343 - RNA, 19 nt, Homo sapiens
  misc_RNA (1)...(19): siRNA sense strand
uagaugagaugaugucuga

SEQ ID NO: 1047344 - RNA, 19 nt, Homo sapiens
  misc_RNA (1)...(19): siRNA sense strand
cuaaauaucucuccuuucu

SEQ ID NO: 1047345 - RNA, 19 nt, Homo sapiens
  misc_RNA (1)...(19): siRNA sense strand
ggaugugaauuuacugaaa

SEQ ID NO: 1047346 - RNA, 19 nt, Homo sapiens
  misc_RNA (1)...(19): siRNA sense strand
gagaugaugucugaccuaa

SEQ ID NO: 1047347 - RNA, 19 nt, Homo sapiens
  misc_RNA (1)...(19): siRNA sense strand
ggaaacggguggcuaucuu

SEQ ID NO: 1047348 - RNA, 19 nt, Homo sapiens
  misc_RNA (1)...(19): siRNA sense strand
ggaagcuaccuaccuguua

SEQ ID NO: 1047349 - RNA, 19 nt, Homo sapiens
  misc_RNA (1)...(19): siRNA sense strand
caaagaaauuagugacaga

SEQ ID NO: 1047350 - RNA, 19 nt, Homo sapiens
  misc_RNA (1)...(19): siRNA sense strand
gaaagaggagaaagucaaa

SEQ ID NO: 1047351 - RNA, 19 nt, Homo sapiens
  misc_RNA (1)...(19): siRNA sense strand
agucaaaggcuucuuauuu

SEQ ID NO: 1047352 - RNA, 19 nt, Homo sapiens
  misc_RNA (1)...(19): siRNA sense strand
cuaccucucugcugaauga

SEQ ID NO: 1047353 - RNA, 19 nt, Homo sapiens
  misc_RNA (1)...(19): siRNA sense strand
acagugaauuccuagcuua

SEQ ID NO: 1047354 - RNA, 19 nt, Homo sapiens
  misc_RNA (1)...(19): siRNA sense strand
ggaaagaggagaaagucaa

SEQ ID NO: 1047355 - RNA, 19 nt, Homo sapiens
  misc_RNA (1)...(19): siRNA sense strand
gaaaguugaagaccuaaau

SEQ ID NO: 1047356 - RNA, 19 nt, Homo sapiens
  misc_RNA (1)...(19): siRNA sense strand
aaucaaacaccuucaagua

SEQ ID NO: 1047357 - RNA, 19 nt, Homo sapiens
  misc_RNA (1)...(19): siRNA sense strand
aaauaucucuccuuucuag

SEQ ID NO: 1047358 - RNA, 19 nt, Homo sapiens
  misc_RNA (1)...(19): siRNA sense strand
aaugaaaguugaagaccua

SEQ ID NO: 1047359 - RNA, 19 nt, Homo sapiens
  misc_RNA (1)...(19): siRNA sense strand
caauggacuucagaugaua

SEQ ID NO: 1047360 - RNA, 19 nt, Homo sapiens
  misc_RNA (1)...(19): siRNA sense strand
gcagaaggagcgaauguau

SEQ ID NO: 1047361 - RNA, 19 nt, Homo sapiens
  misc_RNA (1)...(19): siRNA sense strand
ugaaugaccucaaguacag

SEQ ID NO: 1047362 - RNA, 19 nt, Homo sapiens
  misc_RNA (1)...(19): siRNA sense strand
gaagcuaccuaccuguuac

SEQ ID NO: 1047363 - RNA, 19 nt, Homo sapiens
  misc_RNA (1)...(19): siRNA sense strand
gaaagcugcaagagaauau

SEQ ID NO: 1047364 - RNA, 19 nt, Homo sapiens
  misc_RNA (1)...(19): siRNA sense strand
ggaaaacaaggaagauuua

SEQ ID NO: 1047365 - RNA, 19 nt, Homo sapiens
  misc_RNA (1)...(19): siRNA sense strand
ggagacagaacaguuauug

SEQ ID NO: 1047366 - RNA, 19 nt, Homo sapiens
  misc_RNA (1)...(19): siRNA sense strand
gaccagagaauaacucaga

SEQ ID NO: 1047367 - RNA, 19 nt, Homo sapiens
  misc_RNA (1)...(19): siRNA sense strand
ucagaggaccagagaauaa

SEQ ID NO: 1047368 - RNA, 19 nt, Homo sapiens
  misc_RNA (1)...(19): siRNA sense strand
gaaccuggauggagaaaau

SEQ ID NO: 1047369 - RNA, 19 nt, Homo sapiens
  misc_RNA (1)...(19): siRNA sense strand
gaauaacucagaaagaaca

SEQ ID NO: 1047370 - RNA, 19 nt, Homo sapiens
  misc_RNA (1)...(19): siRNA sense strand
gaugugaauuuacugaaag

SEQ ID NO: 1047371 - RNA, 19 nt, Homo sapiens
  misc_RNA (1)...(19): siRNA sense strand
uagcagauguacuucaguu

SEQ ID NO: 1047372 - RNA, 19 nt, Homo sapiens
  misc_RNA (1)...(19): siRNA sense strand
aaaggcuucuuauuuggua

SEQ ID NO: 1047373 - RNA, 19 nt, Homo sapiens
  misc_RNA (1)...(19): siRNA sense strand
uagauaaagcuccaaguuu

SEQ ID NO: 1047374 - RNA, 19 nt, Homo sapiens
  misc_RNA (1)...(19): siRNA sense strand
gaagcagaauguccugagu

SEQ ID NO: 1047375 - RNA, 19 nt, Homo sapiens
  misc_RNA (1)...(19): siRNA sense strand
caggcaaguuuaucuuuga

SEQ ID NO: 1047376 - RNA, 19 nt, Homo sapiens
  misc_RNA (1)...(19): siRNA sense strand
gcuuggcacuccuagauga

SEQ ID NO: 1047377 - RNA, 19 nt, Homo sapiens
  misc_RNA (1)...(19): siRNA sense strand
gucguuggcuuucugauug

SEQ ID NO: 1047378 - RNA, 19 nt, Homo sapiens
  misc_RNA (1)...(19): siRNA sense strand
cauacacagucauuaauca

SEQ ID NO: 1047379 - RNA, 19 nt, Homo sapiens
  misc_RNA (1)...(19): siRNA sense strand
gaaauuagugacagagaca

SEQ ID NO: 1047380 - RNA, 19 nt, Homo sapiens
  misc_RNA (1)...(19): siRNA sense strand
ugaagguuauccaugauug

SEQ ID NO: 1047381 - RNA, 19 nt, Homo sapiens
  misc_RNA (1)...(19): siRNA sense strand
guacagcccaucagaggaa

SEQ ID NO: 1047382 - RNA, 19 nt, Homo sapiens
  misc_RNA (1)...(19): siRNA sense strand
cuacaaauccucaacaucu

SEQ ID NO: 1047383 - RNA, 19 nt, Homo sapiens
  misc_RNA (1)...(19): siRNA sense strand
gauacuagaagacaagaga

SEQ ID NO: 1047384 - RNA, 19 nt, Homo sapiens
  misc_RNA (1)...(19): siRNA sense strand
acaauggacuucagaugau

SEQ ID NO: 1047385 - RNA, 19 nt, Homo sapiens
  misc_RNA (1)...(19): siRNA sense strand
gugaauuccuagcuuaugu

SEQ ID NO: 1047386 - RNA, 19 nt, Homo sapiens
  misc_RNA (1)...(19): siRNA sense strand
uacaaauccucaacaucua

SEQ ID NO: 1047387 - RNA, 19 nt, Homo sapiens
  misc_RNA (1)...(19): siRNA sense strand
agauaaagcuccaaguuuu

SEQ ID NO: 1047388 - RNA, 19 nt, Homo sapiens
  misc_RNA (1)...(19): siRNA sense strand
cagaggaacugcuucaacu

SEQ ID NO: 1047389 - RNA, 19 nt, Homo sapiens
  misc_RNA (1)...(19): siRNA sense strand
cgaguuuacuuauuugaca

SEQ ID NO: 1047390 - RNA, 19 nt, Homo sapiens
  misc_RNA (1)...(19): siRNA sense strand
uugccgaguuuacuuauuu

SEQ ID NO: 1047391 - RNA, 19 nt, Homo sapiens
  misc_RNA (1)...(19): siRNA sense strand
ggccacaaauugccgaguu

SEQ ID NO: 1047392 - RNA, 19 nt, Homo sapiens
  misc_RNA (1)...(19): siRNA sense strand
gccacaaauugccgaguuu

SEQ ID NO: 1047393 - RNA, 19 nt, Homo sapiens
  misc_RNA (1)...(19): siRNA sense strand
ucaggcaaguuuaucuuug

SEQ ID NO: 1047394 - RNA, 19 nt, Homo sapiens
  misc_RNA (1)...(19): siRNA sense strand
gacagugaauuccuagcuu

SEQ ID NO: 1047395 - RNA, 19 nt, Homo sapiens
  misc_RNA (1)...(19): siRNA sense strand
acacacagguagcagaugu

SEQ ID NO: 1047396 - RNA, 19 nt, Homo sapiens
  misc_RNA (1)...(19): siRNA sense strand
guugaagaccuaaauguau

SEQ ID NO: 1047397 - RNA, 19 nt, Homo sapiens
  misc_RNA (1)...(19): siRNA sense strand
gaugaugucugaccuaacc

SEQ ID NO: 1047398 - RNA, 19 nt, Homo sapiens
  misc_RNA (1)...(19): siRNA sense strand
cuagaagacaagagaauuu

SEQ ID NO: 1047399 - RNA, 19 nt, Homo sapiens
  misc_RNA (1)...(19): siRNA sense strand
cacaauggacuucagauga

SEQ ID NO: 1047400 - RNA, 19 nt, Homo sapiens
  misc_RNA (1)...(19): siRNA sense strand
gaaaccagagugucuccaa

SEQ ID NO: 1047401 - RNA, 19 nt, Homo sapiens
  misc_RNA (1)...(19): siRNA sense strand
agaggagacagaacaguua

SEQ ID NO: 1047402 - RNA, 19 nt, Homo sapiens
  misc_RNA (1)...(19): siRNA sense strand
cuagugaggauuccaguaa

SEQ ID NO: 1047403 - RNA, 19 nt, Homo sapiens
  misc_RNA (1)...(19): siRNA sense strand
gagaauauagggugaaugc

SEQ ID NO: 1047404 - RNA, 19 nt, Homo sapiens
  misc_RNA (1)...(19): siRNA sense strand
ucaaguagccccuaaauau

SEQ ID NO: 1047405 - RNA, 19 nt, Homo sapiens
  misc_RNA (1)...(19): siRNA sense strand
cuuccaaacugcaucacua

SEQ ID NO: 1047406 - RNA, 19 nt, Homo sapiens
  misc_RNA (1)...(19): siRNA sense strand
gugcugcgauacuccauau

SEQ ID NO: 1047407 - RNA, 19 nt, Homo sapiens
  misc_RNA (1)...(19): siRNA sense strand
ucaggaaaauccagaagua

SEQ ID NO: 1047408 - RNA, 19 nt, Homo sapiens
  misc_RNA (1)...(19): siRNA sense strand
ccacaaauugccgaguuua

SEQ ID NO: 1047409 - RNA, 19 nt, Homo sapiens
  misc_RNA (1)...(19): siRNA sense strand
gaagaggaggugacauaca

SEQ ID NO: 1047410 - RNA, 19 nt, Homo sapiens
  misc_RNA (1)...(19): siRNA sense strand
ugaaagaggagacagaaca

SEQ ID NO: 1047411 - RNA, 19 nt, Homo sapiens
  misc_RNA (1)...(19): siRNA sense strand
uaaacaagcuacaaauccu

SEQ ID NO: 1047412 - RNA, 19 nt, Homo sapiens
  misc_RNA (1)...(19): siRNA sense strand
ucucaucaguauggaauuu

SEQ ID NO: 1047413 - RNA, 19 nt, Homo sapiens
  misc_RNA (1)...(19): siRNA sense strand
ggacuucagaugauacuag

SEQ ID NO: 1047414 - RNA, 19 nt, Homo sapiens
  misc_RNA (1)...(19): siRNA sense strand
caaauugccgaguuuacuu

SEQ ID NO: 1047415 - RNA, 19 nt, Homo sapiens
  misc_RNA (1)...(19): siRNA sense strand
agaaggagcgaauguaugu

SEQ ID NO: 1047416 - RNA, 19 nt, Homo sapiens
  misc_RNA (1)...(19): siRNA sense strand
agacagaacaguuauugau

SEQ ID NO: 1047417 - RNA, 19 nt, Homo sapiens
  misc_RNA (1)...(19): siRNA sense strand
gggagaaagcugcaagaga

SEQ ID NO: 1047418 - RNA, 19 nt, Homo sapiens
  misc_RNA (1)...(19): siRNA sense strand
ggaacugcuucaacucaag

SEQ ID NO: 1047419 - RNA, 19 nt, Homo sapiens
  misc_RNA (1)...(19): siRNA sense strand
gacuucagaugauacuaga

SEQ ID NO: 1047420 - RNA, 19 nt, Homo sapiens
  misc_RNA (1)...(19): siRNA sense strand
acuacuagaugaaguggaa

SEQ ID NO: 1047421 - RNA, 19 nt, Homo sapiens
  misc_RNA (1)...(19): siRNA sense strand
gaggaacugcuucaacuca

SEQ ID NO: 1047422 - RNA, 19 nt, Homo sapiens
  misc_RNA (1)...(19): siRNA sense strand
cccuaaauaucucuccuuu

SEQ ID NO: 1047423 - RNA, 19 nt, Homo sapiens
  misc_RNA (1)...(19): siRNA sense strand
cuacuuugcaggagaguuu

SEQ ID NO: 1047424 - RNA, 19 nt, Homo sapiens
  misc_RNA (1)...(19): siRNA sense strand
uugaagaccuaaauguaug

SEQ ID NO: 1047425 - RNA, 19 nt, Homo sapiens
  misc_RNA (1)...(19): siRNA sense strand
aggaagaggaggugacaua

SEQ ID NO: 1047426 - RNA, 19 nt, Homo sapiens
  misc_RNA (1)...(19): siRNA sense strand
ccugguggaugguuaccua

SEQ ID NO: 1047427 - RNA, 19 nt, Homo sapiens
  misc_RNA (1)...(19): siRNA sense strand
gacagaacaguuauugaug

SEQ ID NO: 1047428 - RNA, 19 nt, Homo sapiens
  misc_RNA (1)...(19): siRNA sense strand
uuaaucaauuccagcagaa

SEQ ID NO: 1047429 - RNA, 19 nt, Homo sapiens
  misc_RNA (1)...(19): siRNA sense strand
gaaacggguggcuaucuuc

SEQ ID NO: 1047430 - RNA, 19 nt, Homo sapiens
  misc_RNA (1)...(19): siRNA sense strand
acagguagcagauguacuu

SEQ ID NO: 1047431 - RNA, 19 nt, Homo sapiens
  misc_RNA (1)...(19): siRNA sense strand
guggcuaucuuccaaacug

SEQ ID NO: 1047432 - RNA, 19 nt, Homo sapiens
  misc_RNA (1)...(19): siRNA sense strand
gcuacagccaaagaaauua

SEQ ID NO: 1047433 - RNA, 19 nt, Homo sapiens
  misc_RNA (1)...(19): siRNA sense strand
gaaccaaggucaucuauca

SEQ ID NO: 1047434 - RNA, 19 nt, Homo sapiens
  misc_RNA (1)...(19): siRNA sense strand
ggacagagguggcagugaa

SEQ ID NO: 1047435 - RNA, 19 nt, Homo sapiens
  misc_RNA (1)...(19): siRNA sense strand
caagauaucugcauuuaag

SEQ ID NO: 1047436 - RNA, 19 nt, Homo sapiens
  misc_RNA (1)...(19): siRNA sense strand
caaccacugucucccauua

SEQ ID NO: 1047437 - RNA, 19 nt, Homo sapiens
  misc_RNA (1)...(19): siRNA sense strand
gaagagacccaaaugagaa

SEQ ID NO: 1047438 - RNA, 19 nt, Homo sapiens
  misc_RNA (1)...(19): siRNA sense strand
ucaaguaguucaacaagaa

SEQ ID NO: 1047439 - RNA, 19 nt, Homo sapiens
  misc_RNA (1)...(19): siRNA sense strand
gaaggcagcauuucucaaa

SEQ ID NO: 1047440 - RNA, 19 nt, Homo sapiens
  misc_RNA (1)...(19): siRNA sense strand
gaaaauguauggagugauu

SEQ ID NO: 1047441 - RNA, 19 nt, Homo sapiens
  misc_RNA (1)...(19): siRNA sense strand
agagagagguugucaagaa

SEQ ID NO: 1047442 - RNA, 19 nt, Homo sapiens
  misc_RNA (1)...(19): siRNA sense strand
gagaugauauuccaguaga

SEQ ID NO: 1047443 - RNA, 19 nt, Homo sapiens
  misc_RNA (1)...(19): siRNA sense strand
gagagagguugucaagaaa

SEQ ID NO: 1047444 - RNA, 19 nt, Homo sapiens
  misc_RNA (1)...(19): siRNA sense strand
caagaaggccugaugugua

SEQ ID NO: 1047445 - RNA, 19 nt, Homo sapiens
  misc_RNA (1)...(19): siRNA sense strand
aagaaggccugauguguaa

SEQ ID NO: 1047446 - RNA, 19 nt, Homo sapiens
  misc_RNA (1)...(19): siRNA sense strand
gggagcagaucaaguaguu

SEQ ID NO: 1047447 - RNA, 19 nt, Homo sapiens
  misc_RNA (1)...(19): siRNA sense strand
gaucaucagugaauucauc

SEQ ID NO: 1047448 - RNA, 19 nt, Homo sapiens
  misc_RNA (1)...(19): siRNA sense strand
ccaagaaaggcaucauuua

SEQ ID NO: 1047449 - RNA, 19 nt, Homo sapiens
  misc_RNA (1)...(19): siRNA sense strand
ggacagaagcagacagaaa

SEQ ID NO: 1047450 - RNA, 19 nt, Homo sapiens
  misc_RNA (1)...(19): siRNA sense strand
gagagguugucaagaaauu

SEQ ID NO: 1047451 - RNA, 19 nt, Homo sapiens
  misc_RNA (1)...(19): siRNA sense strand
guuccgagaugaagacuuu

SEQ ID NO: 1047452 - RNA, 19 nt, Homo sapiens
  misc_RNA (1)...(19): siRNA sense strand
aaacaucagucaagcagaa

SEQ ID NO: 1047453 - RNA, 19 nt, Homo sapiens
  misc_RNA (1)...(19): siRNA sense strand
gaacucagaaggccauuug

SEQ ID NO: 1047454 - RNA, 19 nt, Homo sapiens
  misc_RNA (1)...(19): siRNA sense strand
ggaggaugcucuaacugaa

SEQ ID NO: 1047455 - RNA, 19 nt, Homo sapiens
  misc_RNA (1)...(19): siRNA sense strand
ccaguagacuugucaaugu

SEQ ID NO: 1047456 - RNA, 19 nt, Homo sapiens
  misc_RNA (1)...(19): siRNA sense strand
gagagaugauauuccagua

SEQ ID NO: 1047457 - RNA, 19 nt, Homo sapiens
  misc_RNA (1)...(19): siRNA sense strand
acagaucucuuacuaaauc

SEQ ID NO: 1047458 - RNA, 19 nt, Homo sapiens
  misc_RNA (1)...(19): siRNA sense strand
ucagugaauucauccuaua

SEQ ID NO: 1047459 - RNA, 19 nt, Homo sapiens
  misc_RNA (1)...(19): siRNA sense strand
aaaggaaaccaguaagaua

SEQ ID NO: 1047460 - RNA, 19 nt, Homo sapiens
  misc_RNA (1)...(19): siRNA sense strand
caucaagaaugaacucaga

SEQ ID NO: 1047461 - RNA, 19 nt, Homo sapiens
  misc_RNA (1)...(19): siRNA sense strand
ccaaacagaguucuaguga

SEQ ID NO: 1047462 - RNA, 19 nt, Homo sapiens
  misc_RNA (1)...(19): siRNA sense strand
agaaagcgaugacacugaa

SEQ ID NO: 1047463 - RNA, 19 nt, Homo sapiens
  misc_RNA (1)...(19): siRNA sense strand
uaagaaagaggaagccaaa

SEQ ID NO: 1047464 - RNA, 19 nt, Homo sapiens
  misc_RNA (1)...(19): siRNA sense strand
guugggagauggaaaugaa

SEQ ID NO: 1047465 - RNA, 19 nt, Homo sapiens
  misc_RNA (1)...(19): siRNA sense strand
gcagaagauacuacuuuaa

SEQ ID NO: 1047466 - RNA, 19 nt, Homo sapiens
  misc_RNA (1)...(19): siRNA sense strand
gagaauaagcaaugcaaug

SEQ ID NO: 1047467 - RNA, 19 nt, Homo sapiens
  misc_RNA (1)...(19): siRNA sense strand
caagaaaggcaucauuuag

SEQ ID NO: 1047468 - RNA, 19 nt, Homo sapiens
  misc_RNA (1)...(19): siRNA sense strand
uaccaugacuguaaggaaa

SEQ ID NO: 1047469 - RNA, 19 nt, Homo sapiens
  misc_RNA (1)...(19): siRNA sense strand
gaaggauacuggaaagacu

SEQ ID NO: 1047470 - RNA, 19 nt, Homo sapiens
  misc_RNA (1)...(19): siRNA sense strand
gaacagaggaaaaugaaaa

SEQ ID NO: 1047471 - RNA, 19 nt, Homo sapiens
  misc_RNA (1)...(19): siRNA sense strand
gagcagagguuugcagaac

SEQ ID NO: 1047472 - RNA, 19 nt, Homo sapiens
  misc_RNA (1)...(19): siRNA sense strand
gugaagaccugugagaugu

SEQ ID NO: 1047473 - RNA, 19 nt, Homo sapiens
  misc_RNA (1)...(19): siRNA sense strand
gcacacgaauuugcuguca

SEQ ID NO: 1047474 - RNA, 19 nt, Homo sapiens
  misc_RNA (1)...(19): siRNA sense strand
ccauaauuauuucccagua

SEQ ID NO: 1047475 - RNA, 19 nt, Homo sapiens
  misc_RNA (1)...(19): siRNA sense strand
ucauuuagguuccgagaug

SEQ ID NO: 1047476 - RNA, 19 nt, Homo sapiens
  misc_RNA (1)...(19): siRNA sense strand
aaaacgagcugaugaauuc

SEQ ID NO: 1047477 - RNA, 19 nt, Homo sapiens
  misc_RNA (1)...(19): siRNA sense strand
ccaaaccugaggagauuua

SEQ ID NO: 1047478 - RNA, 19 nt, Homo sapiens
  misc_RNA (1)...(19): siRNA sense strand
gaagaccugugagaugugu

SEQ ID NO: 1047479 - RNA, 19 nt, Homo sapiens
  misc_RNA (1)...(19): siRNA sense strand
ucuccaagaucaucaguga

SEQ ID NO: 1047480 - RNA, 19 nt, Homo sapiens
  misc_RNA (1)...(19): siRNA sense strand
cucaagaaauugcaagaaa

SEQ ID NO: 1047481 - RNA, 19 nt, Homo sapiens
  misc_RNA (1)...(19): siRNA sense strand
gccaagaaaggcaucauuu

SEQ ID NO: 1047482 - RNA, 19 nt, Homo sapiens
  misc_RNA (1)...(19): siRNA sense strand
gucaagaaauuacccacaa

SEQ ID NO: 1047483 - RNA, 19 nt, Homo sapiens
  misc_RNA (1)...(19): siRNA sense strand
agcagaagauacuacuuua

SEQ ID NO: 1047484 - RNA, 19 nt, Homo sapiens
  misc_RNA (1)...(19): siRNA sense strand
cuucagcgauguucaguau

SEQ ID NO: 1047485 - RNA, 19 nt, Homo sapiens
  misc_RNA (1)...(19): siRNA sense strand
gauacuggaaagacuauuu

SEQ ID NO: 1047486 - RNA, 19 nt, Homo sapiens
  misc_RNA (1)...(19): siRNA sense strand
cgaugacacugaagaggaa

SEQ ID NO: 1047487 - RNA, 19 nt, Homo sapiens
  misc_RNA (1)...(19): siRNA sense strand
gagaaagcgaugacacuga

SEQ ID NO: 1047488 - RNA, 19 nt, Homo sapiens
  misc_RNA (1)...(19): siRNA sense strand
ucaagaaauugcaagaaag

SEQ ID NO: 1047489 - RNA, 19 nt, Homo sapiens
  misc_RNA (1)...(19): siRNA sense strand
aaggaaaccaguaagauaa

SEQ ID NO: 1047490 - RNA, 19 nt, Homo sapiens
  misc_RNA (1)...(19): siRNA sense strand
gaaggccauuugcaugugu

SEQ ID NO: 1047491 - RNA, 19 nt, Homo sapiens
  misc_RNA (1)...(19): siRNA sense strand
ggcaaagguugucccaaga

SEQ ID NO: 1047492 - RNA, 19 nt, Homo sapiens
  misc_RNA (1)...(19): siRNA sense strand
ggaaacccagucugaagaa

SEQ ID NO: 1047493 - RNA, 19 nt, Homo sapiens
  misc_RNA (1)...(19): siRNA sense strand
ccaaggucaucuaucaaga

SEQ ID NO: 1047494 - RNA, 19 nt, Homo sapiens
  misc_RNA (1)...(19): siRNA sense strand
cugaggagauuuacaguca

SEQ ID NO: 1047495 - RNA, 19 nt, Homo sapiens
  misc_RNA (1)...(19): siRNA sense strand
uaucugcauuuaaguguga

SEQ ID NO: 1047496 - RNA, 19 nt, Homo sapiens
  misc_RNA (1)...(19): siRNA sense strand
ggaaaccaguaagauaaag

SEQ ID NO: 1047497 - RNA, 19 nt, Homo sapiens
  misc_RNA (1)...(19): siRNA sense strand
cgacaggaauauagaagag

SEQ ID NO: 1047498 - RNA, 19 nt, Homo sapiens
  misc_RNA (1)...(19): siRNA sense strand
guaaauagugcacacgaau

SEQ ID NO: 1047499 - RNA, 19 nt, Homo sapiens
  misc_RNA (1)...(19): siRNA sense strand
gaagaagugagcccaguca

SEQ ID NO: 1047500 - RNA, 19 nt, Homo sapiens
  misc_RNA (1)...(19): siRNA sense strand
gaaaggcaucauuuagguu

SEQ ID NO: 1047501 - RNA, 19 nt, Homo sapiens
  misc_RNA (1)...(19): siRNA sense strand
agaaaggcaucauuuaggu

SEQ ID NO: 1047502 - RNA, 19 nt, Homo sapiens
  misc_RNA (1)...(19): siRNA sense strand
gagcagaucaaguaguuca

SEQ ID NO: 1047503 - RNA, 19 nt, Homo sapiens
  misc_RNA (1)...(19): siRNA sense strand
ggaaagagagagguuguca

SEQ ID NO: 1047504 - RNA, 19 nt, Homo sapiens
  misc_RNA (1)...(19): siRNA sense strand
caauggagccagcaacaga

SEQ ID NO: 1047505 - RNA, 19 nt, Homo sapiens
  misc_RNA (1)...(19): siRNA sense strand
gcagagguuugcagaacuc

SEQ ID NO: 1047506 - RNA, 19 nt, Homo sapiens
  misc_RNA (1)...(19): siRNA sense strand
cagcuccucuccaucaaga

SEQ ID NO: 1047507 - RNA, 19 nt, Homo sapiens
  misc_RNA (1)...(19): siRNA sense strand
gggcuccacuauauacaga

SEQ ID NO: 1047508 - RNA, 19 nt, Homo sapiens
  misc_RNA (1)...(19): siRNA sense strand
aagcagaagauacuacuuu

SEQ ID NO: 1047509 - RNA, 19 nt, Homo sapiens
  misc_RNA (1)...(19): siRNA sense strand
cuauaacccuccugcauca

SEQ ID NO: 1047510 - RNA, 19 nt, Homo sapiens
  misc_RNA (1)...(19): siRNA sense strand
guauuucuguggaacauag

SEQ ID NO: 1047511 - RNA, 19 nt, Homo sapiens
  misc_RNA (1)...(19): siRNA sense strand
ugaagaggccaaaucaaga

SEQ ID NO: 1047512 - RNA, 19 nt, Homo sapiens
  misc_RNA (1)...(19): siRNA sense strand
gcaguuuguucaucaagag

SEQ ID NO: 1047513 - RNA, 19 nt, Homo sapiens
  misc_RNA (1)...(19): siRNA sense strand
ggaaagacuauuuaaacag

SEQ ID NO: 1047514 - RNA, 19 nt, Homo sapiens
  misc_RNA (1)...(19): siRNA sense strand
gcagaggucauucuucaag

SEQ ID NO: 1047515 - RNA, 19 nt, Homo sapiens
  misc_RNA (1)...(19): siRNA sense strand
gaaacccagucugaagaau

SEQ ID NO: 1047516 - RNA, 19 nt, Homo sapiens
  misc_RNA (1)...(19): siRNA sense strand
gaggccaaaucaagagaga

SEQ ID NO: 1047517 - RNA, 19 nt, Homo sapiens
  misc_RNA (1)...(19): siRNA sense strand
guauggagugauuguauuu

SEQ ID NO: 1047518 - RNA, 19 nt, Homo sapiens
  misc_RNA (1)...(19): siRNA sense strand
acaaccagguggaaagaga

SEQ ID NO: 1047519 - RNA, 19 nt, Homo sapiens
  misc_RNA (1)...(19): siRNA sense strand
caagaaauugcaagaaagu

SEQ ID NO: 1047520 - RNA, 19 nt, Homo sapiens
  misc_RNA (1)...(19): siRNA sense strand
uaaauagugcacacgaauu

SEQ ID NO: 1047521 - RNA, 19 nt, Homo sapiens
  misc_RNA (1)...(19): siRNA sense strand
agcauaagguggacucuga

SEQ ID NO: 1047522 - RNA, 19 nt, Homo sapiens
  misc_RNA (1)...(19): siRNA sense strand
gaaaaggaaaccaguaaga

SEQ ID NO: 1047523 - RNA, 19 nt, Homo sapiens
  misc_RNA (1)...(19): siRNA sense strand
acagggcaauuuguccuua

SEQ ID NO: 1047524 - RNA, 19 nt, Homo sapiens
  misc_RNA (1)...(19): siRNA sense strand
caagggacaggcagaaguu

SEQ ID NO: 1047525 - RNA, 19 nt, Homo sapiens
  misc_RNA (1)...(19): siRNA sense strand
ccaagaucaucagugaauu

SEQ ID NO: 1047526 - RNA, 19 nt, Homo sapiens
  misc_RNA (1)...(19): siRNA sense strand
acaagagguuggugucaau

SEQ ID NO: 1047527 - RNA, 19 nt, Homo sapiens
  misc_RNA (1)...(19): siRNA sense strand
uugcagaggucauucuuca

SEQ ID NO: 1047528 - RNA, 19 nt, Homo sapiens
  misc_RNA (1)...(19): siRNA sense strand
gaagaggccaaaucaagag

SEQ ID NO: 1047529 - RNA, 19 nt, Homo sapiens
  misc_RNA (1)...(19): siRNA sense strand
caacaagaaggccugaugu

SEQ ID NO: 1047530 - RNA, 19 nt, Homo sapiens
  misc_RNA (1)...(19): siRNA sense strand
uaacaugauugaguucuac

SEQ ID NO: 1047531 - RNA, 19 nt, Homo sapiens
  misc_RNA (1)...(19): siRNA sense strand
gaaagagagagguugucaa

SEQ ID NO: 1047532 - RNA, 19 nt, Homo sapiens
  misc_RNA (1)...(19): siRNA sense strand
gcacaaaacgagcugauga

SEQ ID NO: 1047533 - RNA, 19 nt, Homo sapiens
  misc_RNA (1)...(19): siRNA sense strand
gaacaggacuggcuuguga

SEQ ID NO: 1047534 - RNA, 19 nt, Homo sapiens
  misc_RNA (1)...(19): siRNA sense strand
ggaaaugccuggcuucaga

SEQ ID NO: 1047535 - RNA, 19 nt, Homo sapiens
  misc_RNA (1)...(19): siRNA sense strand
gcacuucccuuguaaugga

SEQ ID NO: 1047536 - RNA, 19 nt, Homo sapiens
  misc_RNA (1)...(19): siRNA sense strand
ucaaagcacuguccauugu

SEQ ID NO: 1047537 - RNA, 19 nt, Homo sapiens
  misc_RNA (1)...(19): siRNA sense strand
gagcauugccuuucccauu

SEQ ID NO: 1047538 - RNA, 19 nt, Homo sapiens
  misc_RNA (1)...(19): siRNA sense strand
gaugacagccuuuaugagu

SEQ ID NO: 1047539 - RNA, 19 nt, Homo sapiens
  misc_RNA (1)...(19): siRNA sense strand
gcagaugacagccuuuaug

SEQ ID NO: 1047540 - RNA, 19 nt, Homo sapiens
  misc_RNA (1)...(19): siRNA sense strand
ugacagccuuuaugaguuc

SEQ ID NO: 1047541 - RNA, 19 nt, Homo sapiens
  misc_RNA (1)...(19): siRNA sense strand
ggucaaagcacuguccauu

SEQ ID NO: 1047542 - RNA, 19 nt, Homo sapiens
  misc_RNA (1)...(19): siRNA sense strand
gccaaaagcuaccggaaaa

SEQ ID NO: 1047543 - RNA, 19 nt, Homo sapiens
  misc_RNA (1)...(19): siRNA sense strand
ggucagcacccuggccuua

SEQ ID NO: 1047544 - RNA, 19 nt, Homo sapiens
  misc_RNA (1)...(19): siRNA sense strand
cagaugacagccuuuauga

SEQ ID NO: 1047545 - RNA, 19 nt, Homo sapiens
  misc_RNA (1)...(19): siRNA sense strand
cgggugcacuucccuugua

SEQ ID NO: 1047546 - RNA, 19 nt, Homo sapiens
  misc_RNA (1)...(19): siRNA sense strand
gaaaugccuggcuucagaa

SEQ ID NO: 1047547 - RNA, 19 nt, Homo sapiens
  misc_RNA (1)...(19): siRNA sense strand
gaauccagccaauuuguca

SEQ ID NO: 1047548 - RNA, 19 nt, Homo sapiens
  misc_RNA (1)...(19): siRNA sense strand
ucaguacuguccagaacuu

SEQ ID NO: 1047549 - RNA, 19 nt, Homo sapiens
  misc_RNA (1)...(19): siRNA sense strand
uggagcagguggcagauga

SEQ ID NO: 1047550 - RNA, 19 nt, Homo sapiens
  misc_RNA (1)...(19): siRNA sense strand
cgaagcugcuguccaugga

SEQ ID NO: 1047551 - RNA, 19 nt, Homo sapiens
  misc_RNA (1)...(19): siRNA sense strand
cuucauccguucaaagcua

SEQ ID NO: 1047552 - RNA, 19 nt, Homo sapiens
  misc_RNA (1)...(19): siRNA sense strand
gcgagcuggucauggguuu

SEQ ID NO: 1047553 - RNA, 19 nt, Homo sapiens
  misc_RNA (1)...(19): siRNA sense strand
cuacauugcuuaggaaacu

SEQ ID NO: 1047554 - RNA, 19 nt, Homo sapiens
  misc_RNA (1)...(19): siRNA sense strand
ccgggaauccagccaauuu

SEQ ID NO: 1047555 - RNA, 19 nt, Homo sapiens
  misc_RNA (1)...(19): siRNA sense strand
gguaggagccaucgucagu

SEQ ID NO: 1047556 - RNA, 19 nt, Homo sapiens
  misc_RNA (1)...(19): siRNA sense strand
ggaugccacugaccgauac

SEQ ID NO: 1047557 - RNA, 19 nt, Homo sapiens
  misc_RNA (1)...(19): siRNA sense strand
gggugcacuucccuuguaa

SEQ ID NO: 1047558 - RNA, 19 nt, Homo sapiens
  misc_RNA (1)...(19): siRNA sense strand
gaucuugagugccauuagc

SEQ ID NO: 1047559 - RNA, 19 nt, Homo sapiens
  misc_RNA (1)...(19): siRNA sense strand
ggacugcagagguggaaau

SEQ ID NO: 1047560 - RNA, 19 nt, Homo sapiens
  misc_RNA (1)...(19): siRNA sense strand
uuuaugaguuccuggauuc

SEQ ID NO: 1047561 - RNA, 19 nt, Homo sapiens
  misc_RNA (1)...(19): siRNA sense strand
gaucugcacgucuacuuag

SEQ ID NO: 1047562 - RNA, 19 nt, Homo sapiens
  misc_RNA (1)...(19): siRNA sense strand
cuucugggcucccgucugu

SEQ ID NO: 1047563 - RNA, 19 nt, Homo sapiens
  misc_RNA (1)...(19): siRNA sense strand
acucgaagcugcuguccau

SEQ ID NO: 1047564 - RNA, 19 nt, Homo sapiens
  misc_RNA (1)...(19): siRNA sense strand
ggagguugcugggcauguc

SEQ ID NO: 1047565 - RNA, 19 nt, Homo sapiens
  misc_RNA (1)...(19): siRNA sense strand
ggugaaagugaccgagaaa

SEQ ID NO: 1047566 - RNA, 19 nt, Homo sapiens
  misc_RNA (1)...(19): siRNA sense strand
guuccuggauucuguggau

SEQ ID NO: 1047567 - RNA, 19 nt, Homo sapiens
  misc_RNA (1)...(19): siRNA sense strand
gggaauccagccaauuugu

SEQ ID NO: 1047568 - RNA, 19 nt, Homo sapiens
  misc_RNA (1)...(19): siRNA sense strand
uuucuguucuggcacauga

SEQ ID NO: 1047569 - RNA, 19 nt, Homo sapiens
  misc_RNA (1)...(19): siRNA sense strand
cuggacugcuuccugauga

SEQ ID NO: 1047570 - RNA, 19 nt, Homo sapiens
  misc_RNA (1)...(19): siRNA sense strand
ugaucugcacgucuacuua

SEQ ID NO: 1047571 - RNA, 19 nt, Homo sapiens
  misc_RNA (1)...(19): siRNA sense strand
guaggagccaucgucagua

SEQ ID NO: 1047572 - RNA, 19 nt, Homo sapiens
  misc_RNA (1)...(19): siRNA sense strand
gcaggcguguguggcauca

SEQ ID NO: 1047573 - RNA, 19 nt, Homo sapiens
  misc_RNA (1)...(19): siRNA sense strand
ggaauccagccaauuuguc

SEQ ID NO: 1047574 - RNA, 19 nt, Homo sapiens
  misc_RNA (1)...(19): siRNA sense strand
gccauuagcaacagagcuu

SEQ ID NO: 1047575 - RNA, 19 nt, Homo sapiens
  misc_RNA (1)...(19): siRNA sense strand
ggucccaccgguagacaaa

SEQ ID NO: 1047576 - RNA, 19 nt, Homo sapiens
  misc_RNA (1)...(19): siRNA sense strand
gucaaagcacuguccauug

SEQ ID NO: 1047577 - RNA, 19 nt, Homo sapiens
  misc_RNA (1)...(19): siRNA sense strand
ccacugaccgauacagaag

SEQ ID NO: 1047578 - RNA, 19 nt, Homo sapiens
  misc_RNA (1)...(19): siRNA sense strand
gugcacuucccuuguaaug

SEQ ID NO: 1047579 - RNA, 19 nt, Homo sapiens
  misc_RNA (1)...(19): siRNA sense strand
uaggagccaucgucaguac

SEQ ID NO: 1047580 - RNA, 19 nt, Homo sapiens
  misc_RNA (1)...(19): siRNA sense strand
agcauugccuuucccauuc

SEQ ID NO: 1047581 - RNA, 19 nt, Homo sapiens
  misc_RNA (1)...(19): siRNA sense strand
aaggagagcgcuucugauc

SEQ ID NO: 1047582 - RNA, 19 nt, Homo sapiens
  misc_RNA (1)...(19): siRNA sense strand
ugaaagugaccgagaaacu

SEQ ID NO: 1047583 - RNA, 19 nt, Homo sapiens
  misc_RNA (1)...(19): siRNA sense strand
cgucaguacuguccagaac

SEQ ID NO: 1047584 - RNA, 19 nt, Homo sapiens
  misc_RNA (1)...(19): siRNA sense strand
ggacuuuuauccucuccuu

SEQ ID NO: 1047585 - RNA, 19 nt, Homo sapiens
  misc_RNA (1)...(19): siRNA sense strand
uggugaaagugaccgagaa

SEQ ID NO: 1047586 - RNA, 19 nt, Homo sapiens
  misc_RNA (1)...(19): siRNA sense strand
ggagccaucgucaguacug

SEQ ID NO: 1047587 - RNA, 19 nt, Homo sapiens
  misc_RNA (1)...(19): siRNA sense strand
uggcagaugacagccuuua

SEQ ID NO: 1047588 - RNA, 19 nt, Homo sapiens
  misc_RNA (1)...(19): siRNA sense strand
cuuuaugaguuccuggauu

SEQ ID NO: 1047589 - RNA, 19 nt, Homo sapiens
  misc_RNA (1)...(19): siRNA sense strand
gccacugaccgauacagaa

SEQ ID NO: 1047590 - RNA, 19 nt, Homo sapiens
  misc_RNA (1)...(19): siRNA sense strand
augacagccuuuaugaguu

SEQ ID NO: 1047591 - RNA, 19 nt, Homo sapiens
  misc_RNA (1)...(19): siRNA sense strand
caaagcacuguccauugug

SEQ ID NO: 1047592 - RNA, 19 nt, Homo sapiens
  misc_RNA (1)...(19): siRNA sense strand
aaaaggagagcgcuucuga

SEQ ID NO: 1047593 - RNA, 19 nt, Homo sapiens
  misc_RNA (1)...(19): siRNA sense strand
uggaugccacugaccgaua

SEQ ID NO: 1047594 - RNA, 19 nt, Homo sapiens
  misc_RNA (1)...(19): siRNA sense strand
gggaaccaagcaccuaauc

SEQ ID NO: 1047595 - RNA, 19 nt, Homo sapiens
  misc_RNA (1)...(19): siRNA sense strand
gcuggacugcuuccugaug

SEQ ID NO: 1047596 - RNA, 19 nt, Homo sapiens
  misc_RNA (1)...(19): siRNA sense strand
ucgcaaacauuaaggaaga

SEQ ID NO: 1047597 - RNA, 19 nt, Homo sapiens
  misc_RNA (1)...(19): siRNA sense strand
ccacucagccuucgagaug

SEQ ID NO: 1047598 - RNA, 19 nt, Homo sapiens
  misc_RNA (1)...(19): siRNA sense strand
gauggaggaggaagaggua

SEQ ID NO: 1047599 - RNA, 19 nt, Homo sapiens
  misc_RNA (1)...(19): siRNA sense strand
cgacaccagugcuccaucu

SEQ ID NO: 1047600 - RNA, 19 nt, Homo sapiens
  misc_RNA (1)...(19): siRNA sense strand
aggaagagguagacagcaa

SEQ ID NO: 1047601 - RNA, 19 nt, Homo sapiens
  misc_RNA (1)...(19): siRNA sense strand
ucgagaggguggccaagga

SEQ ID NO: 1047602 - RNA, 19 nt, Homo sapiens
  misc_RNA (1)...(19): siRNA sense strand
ccagagugcggcaaagguu

SEQ ID NO: 1047603 - RNA, 19 nt, Homo sapiens
  misc_RNA (1)...(19): siRNA sense strand
ccucagcgccuccuguuuc

SEQ ID NO: 1047604 - RNA, 19 nt, Homo sapiens
  misc_RNA (1)...(19): siRNA sense strand
cgacagccaagaccacuca

SEQ ID NO: 1047605 - RNA, 19 nt, Homo sapiens
  misc_RNA (1)...(19): siRNA sense strand
cagagugcggcaaagguuu

SEQ ID NO: 1047606 - RNA, 19 nt, Homo sapiens
  misc_RNA (1)...(19): siRNA sense strand
gaaggccgagcaggaggaa

SEQ ID NO: 1047607 - RNA, 19 nt, Homo sapiens
  misc_RNA (1)...(19): siRNA sense strand
ucaaggcgcacccgugucu

SEQ ID NO: 1047608 - RNA, 19 nt, Homo sapiens
  misc_RNA (1)...(19): siRNA sense strand
gaaagaagguagucaguuu

SEQ ID NO: 1047609 - RNA, 19 nt, Homo sapiens
  misc_RNA (1)...(19): siRNA sense strand
gagaaacccuauaaaugua

SEQ ID NO: 1047610 - RNA, 19 nt, Homo sapiens
  misc_RNA (1)...(19): siRNA sense strand
gagaaacccuauaaaugua

SEQ ID NO: 1047611 - RNA, 19 nt, Homo sapiens
  misc_RNA (1)...(19): siRNA sense strand
gcuaagaagucauauggua

SEQ ID NO: 1047612 - RNA, 19 nt, Homo sapiens
  misc_RNA (1)...(19): siRNA sense strand
ggagagaaaucauaugaau

SEQ ID NO: 1047613 - RNA, 19 nt, Homo sapiens
  misc_RNA (1)...(19): siRNA sense strand
gaaauggaccuuauaaaug

SEQ ID NO: 1047614 - RNA, 19 nt, Homo sapiens
  misc_RNA (1)...(19): siRNA sense strand
ucacaaauauggagagaaa

SEQ ID NO: 1047615 - RNA, 19 nt, Homo sapiens
  misc_RNA (1)...(19): siRNA sense strand
ggagaaacccuauaaaugu

SEQ ID NO: 1047616 - RNA, 19 nt, Homo sapiens
  misc_RNA (1)...(19): siRNA sense strand
ggaaauggaccuuauaaau

SEQ ID NO: 1047617 - RNA, 19 nt, Homo sapiens
  misc_RNA (1)...(19): siRNA sense strand
ggagaaagcuaagaaguca

SEQ ID NO: 1047618 - RNA, 19 nt, Homo sapiens
  misc_RNA (1)...(19): siRNA sense strand
ggagaaacccuaugaaugu

SEQ ID NO: 1047619 - RNA, 19 nt, Homo sapiens
  misc_RNA (1)...(19): siRNA sense strand
agagaaaccuuaugaaugu

SEQ ID NO: 1047620 - RNA, 19 nt, Homo sapiens
  misc_RNA (1)...(19): siRNA sense strand
gagagaaacccuauaaaug

SEQ ID NO: 1047621 - RNA, 19 nt, Homo sapiens
  misc_RNA (1)...(19): siRNA sense strand
gguaaagccuucaguuguu

SEQ ID NO: 1047622 - RNA, 19 nt, Homo sapiens
  misc_RNA (1)...(19): siRNA sense strand
gguaaagccuucaguuguu

SEQ ID NO: 1047623 - RNA, 19 nt, Homo sapiens
  misc_RNA (1)...(19): siRNA sense strand
gguaaagccuucaguuguu

SEQ ID NO: 1047624 - RNA, 19 nt, Homo sapiens
  misc_RNA (1)...(19): siRNA sense strand
gguaaagccuucaguuguu

SEQ ID NO: 1047625 - RNA, 19 nt, Homo sapiens
  misc_RNA (1)...(19): siRNA sense strand
gagagaaacccuaugauug

SEQ ID NO: 1047626 - RNA, 19 nt, Homo sapiens
  misc_RNA (1)...(19): siRNA sense strand
gaagacauaugauaaugca

SEQ ID NO: 1047627 - RNA, 19 nt, Homo sapiens
  misc_RNA (1)...(19): siRNA sense strand
gaacauugaagaucacaaa

SEQ ID NO: 1047628 - RNA, 19 nt, Homo sapiens
  misc_RNA (1)...(19): siRNA sense strand
gagaaacccuaugaaugua

SEQ ID NO: 1047629 - RNA, 19 nt, Homo sapiens
  misc_RNA (1)...(19): siRNA sense strand
gagaaacccuaugaaugua

SEQ ID NO: 1047630 - RNA, 19 nt, Homo sapiens
  misc_RNA (1)...(19): siRNA sense strand
gagaaacccuaugaaugua

SEQ ID NO: 1047631 - RNA, 19 nt, Homo sapiens
  misc_RNA (1)...(19): siRNA sense strand
gagaaacccuaugaaugua

SEQ ID NO: 1047632 - RNA, 19 nt, Homo sapiens
  misc_RNA (1)...(19): siRNA sense strand
gagaaacccuaugaaugua

SEQ ID NO: 1047633 - RNA, 19 nt, Homo sapiens
  misc_RNA (1)...(19): siRNA sense strand
gagaaacccuaugauugua

SEQ ID NO: 1047634 - RNA, 19 nt, Homo sapiens
  misc_RNA (1)...(19): siRNA sense strand
gagaaacccuaugaaugua

SEQ ID NO: 1047635 - RNA, 19 nt, Homo sapiens
  misc_RNA (1)...(19): siRNA sense strand
ggagagaaacccuaugauu

SEQ ID NO: 1047636 - RNA, 19 nt, Homo sapiens
  misc_RNA (1)...(19): siRNA sense strand
gguaaggccuucaguuguu

SEQ ID NO: 1047637 - RNA, 19 nt, Homo sapiens
  misc_RNA (1)...(19): siRNA sense strand
ggagagaaacccuauaaau

SEQ ID NO: 1047638 - RNA, 19 nt, Homo sapiens
  misc_RNA (1)...(19): siRNA sense strand
gagagaaaccuuaugaaug

SEQ ID NO: 1047639 - RNA, 19 nt, Homo sapiens
  misc_RNA (1)...(19): siRNA sense strand
gaaacccuaugaauguaaa

SEQ ID NO: 1047640 - RNA, 19 nt, Homo sapiens
  misc_RNA (1)...(19): siRNA sense strand
gguaaagccuucaaguguu

SEQ ID NO: 1047641 - RNA, 19 nt, Homo sapiens
  misc_RNA (1)...(19): siRNA sense strand
gaaacccuaugaauguaaa

SEQ ID NO: 1047642 - RNA, 19 nt, Homo sapiens
  misc_RNA (1)...(19): siRNA sense strand
gaaacccuaugaauguaaa

SEQ ID NO: 1047643 - RNA, 19 nt, Homo sapiens
  misc_RNA (1)...(19): siRNA sense strand
gaaacccuaugaauguaaa

SEQ ID NO: 1047644 - RNA, 19 nt, Homo sapiens
  misc_RNA (1)...(19): siRNA sense strand
gaaacccuaugaauguaaa

SEQ ID NO: 1047645 - RNA, 19 nt, Homo sapiens
  misc_RNA (1)...(19): siRNA sense strand
gaaacccuaugaauguaaa

SEQ ID NO: 1047646 - RNA, 19 nt, Homo sapiens
  misc_RNA (1)...(19): siRNA sense strand
gaaacccuaugaauguaaa

SEQ ID NO: 1047647 - RNA, 19 nt, Homo sapiens
  misc_RNA (1)...(19): siRNA sense strand
caagaaaccuuuguuaacu

SEQ ID NO: 1047648 - RNA, 19 nt, Homo sapiens
  misc_RNA (1)...(19): siRNA sense strand
agagaaaccuuaugagugu

SEQ ID NO: 1047649 - RNA, 19 nt, Homo sapiens
  misc_RNA (1)...(19): siRNA sense strand
gagagaaacccuaugaaug

SEQ ID NO: 1047650 - RNA, 19 nt, Homo sapiens
  misc_RNA (1)...(19): siRNA sense strand
gagagaaacccuaugaaug

SEQ ID NO: 1047651 - RNA, 19 nt, Homo sapiens
  misc_RNA (1)...(19): siRNA sense strand
gagagaaacccuaugaaug

SEQ ID NO: 1047652 - RNA, 19 nt, Homo sapiens
  misc_RNA (1)...(19): siRNA sense strand
gagagaaacccuaugaaug

SEQ ID NO: 1047653 - RNA, 19 nt, Homo sapiens
  misc_RNA (1)...(19): siRNA sense strand
gagagaaacccuaugaaug

SEQ ID NO: 1047654 - RNA, 19 nt, Homo sapiens
  misc_RNA (1)...(19): siRNA sense strand
ggagaaaccaucagucaga

SEQ ID NO: 1047655 - RNA, 19 nt, Homo sapiens
  misc_RNA (1)...(19): siRNA sense strand
ggagagaaaccuuaugaau

SEQ ID NO: 1047656 - RNA, 19 nt, Homo sapiens
  misc_RNA (1)...(19): siRNA sense strand
gggagaaacccuauaaaug

SEQ ID NO: 1047657 - RNA, 19 nt, Homo sapiens
  misc_RNA (1)...(19): siRNA sense strand
gguaaggcguuuaguuguu

SEQ ID NO: 1047658 - RNA, 19 nt, Homo sapiens
  misc_RNA (1)...(19): siRNA sense strand
gaauguaaacaauguggua

SEQ ID NO: 1047659 - RNA, 19 nt, Homo sapiens
  misc_RNA (1)...(19): siRNA sense strand
guaaagccuucaaguguuc

SEQ ID NO: 1047660 - RNA, 19 nt, Homo sapiens
  misc_RNA (1)...(19): siRNA sense strand
gaauguaaacaauguggua

SEQ ID NO: 1047661 - RNA, 19 nt, Homo sapiens
  misc_RNA (1)...(19): siRNA sense strand
agaagaacauugaagauca

SEQ ID NO: 1047662 - RNA, 19 nt, Homo sapiens
  misc_RNA (1)...(19): siRNA sense strand
ggagagaaacccuaugaau

SEQ ID NO: 1047663 - RNA, 19 nt, Homo sapiens
  misc_RNA (1)...(19): siRNA sense strand
gcaagaaaccuuuguuaac

SEQ ID NO: 1047664 - RNA, 19 nt, Homo sapiens
  misc_RNA (1)...(19): siRNA sense strand
ggagagaaacccuaugaau

SEQ ID NO: 1047665 - RNA, 19 nt, Homo sapiens
  misc_RNA (1)...(19): siRNA sense strand
ggagagaaacccuaugaau

SEQ ID NO: 1047666 - RNA, 19 nt, Homo sapiens
  misc_RNA (1)...(19): siRNA sense strand
ggagagaaacccuaugaau

SEQ ID NO: 1047667 - RNA, 19 nt, Homo sapiens
  misc_RNA (1)...(19): siRNA sense strand
ggagagaaacccuaugaau

SEQ ID NO: 1047668 - RNA, 19 nt, Homo sapiens
  misc_RNA (1)...(19): siRNA sense strand
gaauguaaacaguguggua

SEQ ID NO: 1047669 - RNA, 19 nt, Homo sapiens
  misc_RNA (1)...(19): siRNA sense strand
gaauguaaacaguguggua

SEQ ID NO: 1047670 - RNA, 19 nt, Homo sapiens
  misc_RNA (1)...(19): siRNA sense strand
gaauguaaacaguguggua

SEQ ID NO: 1047671 - RNA, 19 nt, Homo sapiens
  misc_RNA (1)...(19): siRNA sense strand
gaauguaaacaguguggua

SEQ ID NO: 1047672 - RNA, 19 nt, Homo sapiens
  misc_RNA (1)...(19): siRNA sense strand
ucgaauacaugaaagaguu

SEQ ID NO: 1047673 - RNA, 19 nt, Homo sapiens
  misc_RNA (1)...(19): siRNA sense strand
gaaaggacuauauguguca

SEQ ID NO: 1047674 - RNA, 19 nt, Homo sapiens
  misc_RNA (1)...(19): siRNA sense strand
gcccaguuccuuucaaaua

SEQ ID NO: 1047675 - RNA, 19 nt, Homo sapiens
  misc_RNA (1)...(19): siRNA sense strand
agagaaacccuauaaaugu

SEQ ID NO: 1047676 - RNA, 19 nt, Homo sapiens
  misc_RNA (1)...(19): siRNA sense strand
acagagaugugaugcaaga

SEQ ID NO: 1047677 - RNA, 19 nt, Homo sapiens
  misc_RNA (1)...(19): siRNA sense strand
agauucagcuuucgaaguu

SEQ ID NO: 1047678 - RNA, 19 nt, Homo sapiens
  misc_RNA (1)...(19): siRNA sense strand
ggauguggcugugaacuuc

SEQ ID NO: 1047679 - RNA, 19 nt, Homo sapiens
  misc_RNA (1)...(19): siRNA sense strand
gagaaaccuuaugaaugua

SEQ ID NO: 1047680 - RNA, 19 nt, Homo sapiens
  misc_RNA (1)...(19): siRNA sense strand
ggagagaaaccuuaugagu

SEQ ID NO: 1047681 - RNA, 19 nt, Homo sapiens
  misc_RNA (1)...(19): siRNA sense strand
gggagaaacccuaugaaug

SEQ ID NO: 1047682 - RNA, 19 nt, Homo sapiens
  misc_RNA (1)...(19): siRNA sense strand
cuacagagaugugaugcaa

SEQ ID NO: 1047683 - RNA, 19 nt, Homo sapiens
  misc_RNA (1)...(19): siRNA sense strand
agagaaacccuaugaaugu

SEQ ID NO: 1047684 - RNA, 19 nt, Homo sapiens
  misc_RNA (1)...(19): siRNA sense strand
agagaaacccuaugaaugu

SEQ ID NO: 1047685 - RNA, 19 nt, Homo sapiens
  misc_RNA (1)...(19): siRNA sense strand
agagaaacccuaugaaugu

SEQ ID NO: 1047686 - RNA, 19 nt, Homo sapiens
  misc_RNA (1)...(19): siRNA sense strand
ucgaaugcaugaaagaauu

SEQ ID NO: 1047687 - RNA, 19 nt, Homo sapiens
  misc_RNA (1)...(19): siRNA sense strand
agagaaacccuaugaaugu

SEQ ID NO: 1047688 - RNA, 19 nt, Homo sapiens
  misc_RNA (1)...(19): siRNA sense strand
agagaaacccuaugaaugu

SEQ ID NO: 1047689 - RNA, 19 nt, Homo sapiens
  misc_RNA (1)...(19): siRNA sense strand
aaauggaccuuauaaaugc

SEQ ID NO: 1047690 - RNA, 19 nt, Homo sapiens
  misc_RNA (1)...(19): siRNA sense strand
gugaaacccuaugaaugua

SEQ ID NO: 1047691 - RNA, 19 nt, Homo sapiens
  misc_RNA (1)...(19): siRNA sense strand
ggagugaaacccuaugaau

SEQ ID NO: 1047692 - RNA, 19 nt, Homo sapiens
  misc_RNA (1)...(19): siRNA sense strand
gaauguaaacaauguggaa

SEQ ID NO: 1047693 - RNA, 19 nt, Homo sapiens
  misc_RNA (1)...(19): siRNA sense strand
ucauuucucuuccaagcua

SEQ ID NO: 1047694 - RNA, 19 nt, Homo sapiens
  misc_RNA (1)...(19): siRNA sense strand
ggaaagaagguagucaguu

SEQ ID NO: 1047695 - RNA, 19 nt, Homo sapiens
  misc_RNA (1)...(19): siRNA sense strand
gggaggagaagaacauuga

SEQ ID NO: 1047696 - RNA, 19 nt, Homo sapiens
  misc_RNA (1)...(19): siRNA sense strand
gaacucauacuggagagaa

SEQ ID NO: 1047697 - RNA, 19 nt, Homo sapiens
  misc_RNA (1)...(19): siRNA sense strand
ccaugaauguaaacaaugu

SEQ ID NO: 1047698 - RNA, 19 nt, Homo sapiens
  misc_RNA (1)...(19): siRNA sense strand
gguagucaguuuggagaaa

SEQ ID NO: 1047699 - RNA, 19 nt, Homo sapiens
  misc_RNA (1)...(19): siRNA sense strand
agaaagcuaagaagucaua

SEQ ID NO: 1047700 - RNA, 19 nt, Homo sapiens
  misc_RNA (1)...(19): siRNA sense strand
gaaacccuaugcaugucaa

SEQ ID NO: 1047701 - RNA, 19 nt, Homo sapiens
  misc_RNA (1)...(19): siRNA sense strand
guaaggcguuuaguuguuc

SEQ ID NO: 1047702 - RNA, 19 nt, Homo sapiens
  misc_RNA (1)...(19): siRNA sense strand
ccauaugaauguagugugu

SEQ ID NO: 1047703 - RNA, 19 nt, Homo sapiens
  misc_RNA (1)...(19): siRNA sense strand
guaaagccuucaguuguuc

SEQ ID NO: 1047704 - RNA, 19 nt, Homo sapiens
  misc_RNA (1)...(19): siRNA sense strand
gagugaaacccuaugaaug

SEQ ID NO: 1047705 - RNA, 19 nt, Homo sapiens
  misc_RNA (1)...(19): siRNA sense strand
gcguuuaguuguuccaguu

SEQ ID NO: 1047706 - RNA, 19 nt, Homo sapiens
  misc_RNA (1)...(19): siRNA sense strand
guaaagccuucaguuguuc

SEQ ID NO: 1047707 - RNA, 19 nt, Homo sapiens
  misc_RNA (1)...(19): siRNA sense strand
guaaagccuucaguuguuc

SEQ ID NO: 1047708 - RNA, 19 nt, Homo sapiens
  misc_RNA (1)...(19): siRNA sense strand
aaagaaagcucgucugaaa

SEQ ID NO: 1047709 - RNA, 19 nt, Homo sapiens
  misc_RNA (1)...(19): siRNA sense strand
cagagugccuuuacacaaa

SEQ ID NO: 1047710 - RNA, 19 nt, Homo sapiens
  misc_RNA (1)...(19): siRNA sense strand
gaaggaagcagcuaugaag

SEQ ID NO: 1047711 - RNA, 19 nt, Homo sapiens
  misc_RNA (1)...(19): siRNA sense strand
gaggauccauuucauaaag

SEQ ID NO: 1047712 - RNA, 19 nt, Homo sapiens
  misc_RNA (1)...(19): siRNA sense strand
gaaagaaggaagcagcuau

SEQ ID NO: 1047713 - RNA, 19 nt, Homo sapiens
  misc_RNA (1)...(19): siRNA sense strand
ggauccauuucauaaagua

SEQ ID NO: 1047714 - RNA, 19 nt, Homo sapiens
  misc_RNA (1)...(19): siRNA sense strand
uaacgugccuguauuaaaa

SEQ ID NO: 1047715 - RNA, 19 nt, Homo sapiens
  misc_RNA (1)...(19): siRNA sense strand
uaaccagcuuggaccuuua

SEQ ID NO: 1047716 - RNA, 19 nt, Homo sapiens
  misc_RNA (1)...(19): siRNA sense strand
gaagaugaaaucccagaga

SEQ ID NO: 1047717 - RNA, 19 nt, Homo sapiens
  misc_RNA (1)...(19): siRNA sense strand
gcaggaagcuguuuuaggu

SEQ ID NO: 1047718 - RNA, 19 nt, Homo sapiens
  misc_RNA (1)...(19): siRNA sense strand
gaaagcucgucugaaagaa

SEQ ID NO: 1047719 - RNA, 19 nt, Homo sapiens
  misc_RNA (1)...(19): siRNA sense strand
uaggaugcaucuuucauug

SEQ ID NO: 1047720 - RNA, 19 nt, Homo sapiens
  misc_RNA (1)...(19): siRNA sense strand
gaaaagaaagcucgucuga

SEQ ID NO: 1047721 - RNA, 19 nt, Homo sapiens
  misc_RNA (1)...(19): siRNA sense strand
ggaugcaucuuucauuggu

SEQ ID NO: 1047722 - RNA, 19 nt, Homo sapiens
  misc_RNA (1)...(19): siRNA sense strand
ggugguaggaugcaucuuu

SEQ ID NO: 1047723 - RNA, 19 nt, Homo sapiens
  misc_RNA (1)...(19): siRNA sense strand
caaaacagauuaccaaagg

SEQ ID NO: 1047724 - RNA, 19 nt, Homo sapiens
  misc_RNA (1)...(19): siRNA sense strand
cagcuuggaccuuuagaaa

SEQ ID NO: 1047725 - RNA, 19 nt, Homo sapiens
  misc_RNA (1)...(19): siRNA sense strand
agaaagcucgucugaaaga

SEQ ID NO: 1047726 - RNA, 19 nt, Homo sapiens
  misc_RNA (1)...(19): siRNA sense strand
gguaugaggauccauuuca

SEQ ID NO: 1047727 - RNA, 19 nt, Homo sapiens
  misc_RNA (1)...(19): siRNA sense strand
guaggaugcaucuuucauu

SEQ ID NO: 1047728 - RNA, 19 nt, Homo sapiens
  misc_RNA (1)...(19): siRNA sense strand
uuaaccagcuuggaccuuu

SEQ ID NO: 1047729 - RNA, 19 nt, Homo sapiens
  misc_RNA (1)...(19): siRNA sense strand
caucuuucauugguuauug

SEQ ID NO: 1047730 - RNA, 19 nt, Homo sapiens
  misc_RNA (1)...(19): siRNA sense strand
gaaaauccaggaauuaugu

SEQ ID NO: 1047731 - RNA, 19 nt, Homo sapiens
  misc_RNA (1)...(19): siRNA sense strand
gaacaagaugcgagugaag

SEQ ID NO: 1047732 - RNA, 19 nt, Homo sapiens
  misc_RNA (1)...(19): siRNA sense strand
uagguuaugugaaagagau

SEQ ID NO: 1047733 - RNA, 19 nt, Homo sapiens
  misc_RNA (1)...(19): siRNA sense strand
augcaucuuucauugguua

SEQ ID NO: 1047734 - RNA, 19 nt, Homo sapiens
  misc_RNA (1)...(19): siRNA sense strand
acacaaaccuacggauugg

SEQ ID NO: 1047735 - RNA, 19 nt, Homo sapiens
  misc_RNA (1)...(19): siRNA sense strand
gugguaggaugcaucuuuc

SEQ ID NO: 1047736 - RNA, 19 nt, Homo sapiens
  misc_RNA (1)...(19): siRNA sense strand
agaacaagaugcgagugaa

SEQ ID NO: 1047737 - RNA, 19 nt, Homo sapiens
  misc_RNA (1)...(19): siRNA sense strand
aaagguauccguguugguu

SEQ ID NO: 1047738 - RNA, 19 nt, Homo sapiens
  misc_RNA (1)...(19): siRNA sense strand
uuacacaaaccuacggauu

SEQ ID NO: 1047739 - RNA, 19 nt, Homo sapiens
  misc_RNA (1)...(19): siRNA sense strand
ucaggucgcuucaaaagga

SEQ ID NO: 1047740 - RNA, 19 nt, Homo sapiens
  misc_RNA (1)...(19): siRNA sense strand
caacagagugccuuuacac

SEQ ID NO: 1047741 - RNA, 19 nt, Homo sapiens
  misc_RNA (1)...(19): siRNA sense strand
gcacaaaaccacaggaaag

SEQ ID NO: 1047742 - RNA, 19 nt, Homo sapiens
  misc_RNA (1)...(19): siRNA sense strand
ucagcuaucuaaugauugc

SEQ ID NO: 1047743 - RNA, 19 nt, Homo sapiens
  misc_RNA (1)...(19): siRNA sense strand
uacacaaaccuacggauug

SEQ ID NO: 1047744 - RNA, 19 nt, Homo sapiens
  misc_RNA (1)...(19): siRNA sense strand
gaugcuugaugcugcaaag

SEQ ID NO: 1047745 - RNA, 19 nt, Homo sapiens
  misc_RNA (1)...(19): siRNA sense strand
acagagugccuuuacacaa

SEQ ID NO: 1047746 - RNA, 19 nt, Homo sapiens
  misc_RNA (1)...(19): siRNA sense strand
gagcuccauucccgcacuu

SEQ ID NO: 1047747 - RNA, 19 nt, Homo sapiens
  misc_RNA (1)...(19): siRNA sense strand
gaugcaucuuucauugguu

SEQ ID NO: 1047748 - RNA, 19 nt, Homo sapiens
  misc_RNA (1)...(19): siRNA sense strand
aaagaaggaagcagcuaug

SEQ ID NO: 1047749 - RNA, 19 nt, Homo sapiens
  misc_RNA (1)...(19): siRNA sense strand
uuacaacagagugccuuua

SEQ ID NO: 1047750 - RNA, 19 nt, Homo sapiens
  misc_RNA (1)...(19): siRNA sense strand
ugaggauccauuucauaaa

SEQ ID NO: 1047751 - RNA, 19 nt, Homo sapiens
  misc_RNA (1)...(19): siRNA sense strand
aggaagcuguuuuagguua

SEQ ID NO: 1047752 - RNA, 19 nt, Homo sapiens
  misc_RNA (1)...(19): siRNA sense strand
acaacagagugccuuuaca

SEQ ID NO: 1047753 - RNA, 19 nt, Homo sapiens
  misc_RNA (1)...(19): siRNA sense strand
agaaggaagcagcuaugaa

SEQ ID NO: 1047754 - RNA, 19 nt, Homo sapiens
  misc_RNA (1)...(19): siRNA sense strand
gcuugaugcugcaaagaac

SEQ ID NO: 1047755 - RNA, 19 nt, Homo sapiens
  misc_RNA (1)...(19): siRNA sense strand
gaaagucccggagcuccau

SEQ ID NO: 1047756 - RNA, 19 nt, Homo sapiens
  misc_RNA (1)...(19): siRNA sense strand
aagaacaagaugcgaguga

SEQ ID NO: 1047757 - RNA, 19 nt, Homo sapiens
  misc_RNA (1)...(19): siRNA sense strand
ugaaagaaggaagcagcua

SEQ ID NO: 1047758 - RNA, 19 nt, Homo sapiens
  misc_RNA (1)...(19): siRNA sense strand
auggucaggucgcuucaaa

SEQ ID NO: 1047759 - RNA, 19 nt, Homo sapiens
  misc_RNA (1)...(19): siRNA sense strand
ggaagcuguuuuagguuau

SEQ ID NO: 1047760 - RNA, 19 nt, Homo sapiens
  misc_RNA (1)...(19): siRNA sense strand
gugguaugaggauccauuu

SEQ ID NO: 1047761 - RNA, 19 nt, Homo sapiens
  misc_RNA (1)...(19): siRNA sense strand
caagagagcuggaauucua

SEQ ID NO: 1047762 - RNA, 19 nt, Homo sapiens
  misc_RNA (1)...(19): siRNA sense strand
gagcuggaauucuauaaua

SEQ ID NO: 1047763 - RNA, 19 nt, Homo sapiens
  misc_RNA (1)...(19): siRNA sense strand
gaugugacccauaaauuua

SEQ ID NO: 1047764 - RNA, 19 nt, Homo sapiens
  misc_RNA (1)...(19): siRNA sense strand
ggaagaagcuuaacaaaag

SEQ ID NO: 1047765 - RNA, 19 nt, Homo sapiens
  misc_RNA (1)...(19): siRNA sense strand
ugacagaacuuuggcagaa

SEQ ID NO: 1047766 - RNA, 19 nt, Homo sapiens
  misc_RNA (1)...(19): siRNA sense strand
ccaagagauugcugaagua

SEQ ID NO: 1047767 - RNA, 19 nt, Homo sapiens
  misc_RNA (1)...(19): siRNA sense strand
uggaagaugugacccauaa

SEQ ID NO: 1047768 - RNA, 19 nt, Homo sapiens
  misc_RNA (1)...(19): siRNA sense strand
cauaauggguacugcuuaa

SEQ ID NO: 1047769 - RNA, 19 nt, Homo sapiens
  misc_RNA (1)...(19): siRNA sense strand
gcaaguucauuacucuuug

SEQ ID NO: 1047770 - RNA, 19 nt, Homo sapiens
  misc_RNA (1)...(19): siRNA sense strand
agagauugcugaaguagaa

SEQ ID NO: 1047771 - RNA, 19 nt, Homo sapiens
  misc_RNA (1)...(19): siRNA sense strand
gaagugcgaaugauagauu

SEQ ID NO: 1047772 - RNA, 19 nt, Homo sapiens
  misc_RNA (1)...(19): siRNA sense strand
ccaaacgauuuauaccuaa

SEQ ID NO: 1047773 - RNA, 19 nt, Homo sapiens
  misc_RNA (1)...(19): siRNA sense strand
gaaguagaagugcgaauga

SEQ ID NO: 1047774 - RNA, 19 nt, Homo sapiens
  misc_RNA (1)...(19): siRNA sense strand
caaaguggguauacugcaa

SEQ ID NO: 1047775 - RNA, 19 nt, Homo sapiens
  misc_RNA (1)...(19): siRNA sense strand
gccaagagauugcugaagu

SEQ ID NO: 1047776 - RNA, 19 nt, Homo sapiens
  misc_RNA (1)...(19): siRNA sense strand
gaagaugugacccauaaau

SEQ ID NO: 1047777 - RNA, 19 nt, Homo sapiens
  misc_RNA (1)...(19): siRNA sense strand
ggucagcaaguacccauua

SEQ ID NO: 1047778 - RNA, 19 nt, Homo sapiens
  misc_RNA (1)...(19): siRNA sense strand
cacaauagaugagggauau

SEQ ID NO: 1047779 - RNA, 19 nt, Homo sapiens
  misc_RNA (1)...(19): siRNA sense strand
gcaagacaauggguggaaa

SEQ ID NO: 1047780 - RNA, 19 nt, Homo sapiens
  misc_RNA (1)...(19): siRNA sense strand
aauaagcccuguauaaugg

SEQ ID NO: 1047781 - RNA, 19 nt, Homo sapiens
  misc_RNA (1)...(19): siRNA sense strand
ggacaaaguggguauacug

SEQ ID NO: 1047782 - RNA, 19 nt, Homo sapiens
  misc_RNA (1)...(19): siRNA sense strand
uaauaagcccuguauaaug

SEQ ID NO: 1047783 - RNA, 19 nt, Homo sapiens
  misc_RNA (1)...(19): siRNA sense strand
ccacugcaccaaacgauuu

SEQ ID NO: 1047784 - RNA, 19 nt, Homo sapiens
  misc_RNA (1)...(19): siRNA sense strand
gaugagggauauguuuaug

SEQ ID NO: 1047785 - RNA, 19 nt, Homo sapiens
  misc_RNA (1)...(19): siRNA sense strand
gcucauguguucccuagca

SEQ ID NO: 1047786 - RNA, 19 nt, Homo sapiens
  misc_RNA (1)...(19): siRNA sense strand
gacagaacuuuggcagaaa

SEQ ID NO: 1047787 - RNA, 19 nt, Homo sapiens
  misc_RNA (1)...(19): siRNA sense strand
uagaugagggauauguuua

SEQ ID NO: 1047788 - RNA, 19 nt, Homo sapiens
  misc_RNA (1)...(19): siRNA sense strand
gaagaagcuuaacaaaaga

SEQ ID NO: 1047789 - RNA, 19 nt, Homo sapiens
  misc_RNA (1)...(19): siRNA sense strand
accaaacgauuuauaccua

SEQ ID NO: 1047790 - RNA, 19 nt, Homo sapiens
  misc_RNA (1)...(19): siRNA sense strand
gcauuacggaagaagcuua

SEQ ID NO: 1047791 - RNA, 19 nt, Homo sapiens
  misc_RNA (1)...(19): siRNA sense strand
aaaccagcauuacggaaga

SEQ ID NO: 1047792 - RNA, 19 nt, Homo sapiens
  misc_RNA (1)...(19): siRNA sense strand
agaugugacccauaaauuu

SEQ ID NO: 1047793 - RNA, 19 nt, Homo sapiens
  misc_RNA (1)...(19): siRNA sense strand
cagcaaguacccauuaaug

SEQ ID NO: 1047794 - RNA, 19 nt, Homo sapiens
  misc_RNA (1)...(19): siRNA sense strand
caaguucauuacucuuugu

SEQ ID NO: 1047795 - RNA, 19 nt, Homo sapiens
  misc_RNA (1)...(19): siRNA sense strand
ggauauguuuaugggcuaa

SEQ ID NO: 1047796 - RNA, 19 nt, Homo sapiens
  misc_RNA (1)...(19): siRNA sense strand
gaaggacaaaguggguaua

SEQ ID NO: 1047797 - RNA, 19 nt, Homo sapiens
  misc_RNA (1)...(19): siRNA sense strand
guguuaaguuccacagcua

SEQ ID NO: 1047798 - RNA, 19 nt, Homo sapiens
  misc_RNA (1)...(19): siRNA sense strand
guagaagugcgaaugauag

SEQ ID NO: 1047799 - RNA, 19 nt, Homo sapiens
  misc_RNA (1)...(19): siRNA sense strand
gguuuaugcugcugacugu

SEQ ID NO: 1047800 - RNA, 19 nt, Homo sapiens
  misc_RNA (1)...(19): siRNA sense strand
ggaaggacaaaguggguau

SEQ ID NO: 1047801 - RNA, 19 nt, Homo sapiens
  misc_RNA (1)...(19): siRNA sense strand
gucagcaaguacccauuaa

SEQ ID NO: 1047802 - RNA, 19 nt, Homo sapiens
  misc_RNA (1)...(19): siRNA sense strand
gugcuuggcaugaggguuu

SEQ ID NO: 1047803 - RNA, 19 nt, Homo sapiens
  misc_RNA (1)...(19): siRNA sense strand
aauggguacugcuuaagaa

SEQ ID NO: 1047804 - RNA, 19 nt, Homo sapiens
  misc_RNA (1)...(19): siRNA sense strand
cgauagcuaugagacagaa

SEQ ID NO: 1047805 - RNA, 19 nt, Homo sapiens
  misc_RNA (1)...(19): siRNA sense strand
gagagcuggaauucuauaa

SEQ ID NO: 1047806 - RNA, 19 nt, Homo sapiens
  misc_RNA (1)...(19): siRNA sense strand
agcaacaggucagcaagua

SEQ ID NO: 1047807 - RNA, 19 nt, Homo sapiens
  misc_RNA (1)...(19): siRNA sense strand
gcuggaauucuauaauaug

SEQ ID NO: 1047808 - RNA, 19 nt, Homo sapiens
  misc_RNA (1)...(19): siRNA sense strand
ggguuuaucauguucauuc

SEQ ID NO: 1047809 - RNA, 19 nt, Homo sapiens
  misc_RNA (1)...(19): siRNA sense strand
agacagaaaaccagcauua

SEQ ID NO: 1047810 - RNA, 19 nt, Homo sapiens
  misc_RNA (1)...(19): siRNA sense strand
aaauguacuuucccaacug

SEQ ID NO: 1047811 - RNA, 19 nt, Homo sapiens
  misc_RNA (1)...(19): siRNA sense strand
guauucagaagauugagaa

SEQ ID NO: 1047812 - RNA, 19 nt, Homo sapiens
  misc_RNA (1)...(19): siRNA sense strand
uaauggguacugcuuaaga

SEQ ID NO: 1047813 - RNA, 19 nt, Homo sapiens
  misc_RNA (1)...(19): siRNA sense strand
ucauaauggguacugcuua

SEQ ID NO: 1047814 - RNA, 19 nt, Homo sapiens
  misc_RNA (1)...(19): siRNA sense strand
aagaugugacccauaaauu

SEQ ID NO: 1047815 - RNA, 19 nt, Homo sapiens
  misc_RNA (1)...(19): siRNA sense strand
ccaguauucagaagauuga

SEQ ID NO: 1047816 - RNA, 19 nt, Homo sapiens
  misc_RNA (1)...(19): siRNA sense strand
ggaagaugugacccauaaa

SEQ ID NO: 1047817 - RNA, 19 nt, Homo sapiens
  misc_RNA (1)...(19): siRNA sense strand
caauagaugagggauaugu

SEQ ID NO: 1047818 - RNA, 19 nt, Homo sapiens
  misc_RNA (1)...(19): siRNA sense strand
aguagaagugcgaaugaua

SEQ ID NO: 1047819 - RNA, 19 nt, Homo sapiens
  misc_RNA (1)...(19): siRNA sense strand
uaauggauguaaagauagg

SEQ ID NO: 1047820 - RNA, 19 nt, Homo sapiens
  misc_RNA (1)...(19): siRNA sense strand
guacgggaaggacaaagug

SEQ ID NO: 1047821 - RNA, 19 nt, Homo sapiens
  misc_RNA (1)...(19): siRNA sense strand
gacaauggguggaaaagca

SEQ ID NO: 1047822 - RNA, 19 nt, Homo sapiens
  misc_RNA (1)...(19): siRNA sense strand
guaugcgcgucacaggaaa

SEQ ID NO: 1047823 - RNA, 19 nt, Homo sapiens
  misc_RNA (1)...(19): siRNA sense strand
uuacgcaaguucauuacuc

SEQ ID NO: 1047824 - RNA, 19 nt, Homo sapiens
  misc_RNA (1)...(19): siRNA sense strand
gaggguuuaucauguucau

SEQ ID NO: 1047825 - RNA, 19 nt, Homo sapiens
  misc_RNA (1)...(19): siRNA sense strand
ugaaguagaagugcgaaug

SEQ ID NO: 1047826 - RNA, 19 nt, Homo sapiens
  misc_RNA (1)...(19): siRNA sense strand
gauguaaagauagggcaaa

SEQ ID NO: 1047827 - RNA, 19 nt, Homo sapiens
  misc_RNA (1)...(19): siRNA sense strand
acacaauagaugagggaua

SEQ ID NO: 1047828 - RNA, 19 nt, Homo sapiens
  misc_RNA (1)...(19): siRNA sense strand
gucagacacagaaguacua

SEQ ID NO: 1047829 - RNA, 19 nt, Homo sapiens
  misc_RNA (1)...(19): siRNA sense strand
gccaaccacuacaaaauug

SEQ ID NO: 1047830 - RNA, 19 nt, Homo sapiens
  misc_RNA (1)...(19): siRNA sense strand
ccuguauaauggauguaaa

SEQ ID NO: 1047831 - RNA, 19 nt, Homo sapiens
  misc_RNA (1)...(19): siRNA sense strand
auagaugagggauauguuu

SEQ ID NO: 1047832 - RNA, 19 nt, Homo sapiens
  misc_RNA (1)...(19): siRNA sense strand
aagugcgaaugauagauuu

SEQ ID NO: 1047833 - RNA, 19 nt, Homo sapiens
  misc_RNA (1)...(19): siRNA sense strand
auucugcagugguuugaaa

SEQ ID NO: 1047834 - RNA, 19 nt, Homo sapiens
  misc_RNA (1)...(19): siRNA sense strand
gcccaagagagcuggaauu

SEQ ID NO: 1047835 - RNA, 19 nt, Homo sapiens
  misc_RNA (1)...(19): siRNA sense strand
uugaaaaucuggagcaaga

SEQ ID NO: 1047836 - RNA, 19 nt, Homo sapiens
  misc_RNA (1)...(19): siRNA sense strand
cgcaaguucauuacucuuu

SEQ ID NO: 1047837 - RNA, 19 nt, Homo sapiens
  misc_RNA (1)...(19): siRNA sense strand
gccaguauucagaagauug

SEQ ID NO: 1047838 - RNA, 19 nt, Homo sapiens
  misc_RNA (1)...(19): siRNA sense strand
ugucacaggaacauuuaaa

SEQ ID NO: 1047839 - RNA, 19 nt, Homo sapiens
  misc_RNA (1)...(19): siRNA sense strand
gaaaagcaugucacaggaa

SEQ ID NO: 1047840 - RNA, 19 nt, Homo sapiens
  misc_RNA (1)...(19): siRNA sense strand
agacacagaaguacuagag

SEQ ID NO: 1047841 - RNA, 19 nt, Homo sapiens
  misc_RNA (1)...(19): siRNA sense strand
caucucagccaaccacuac

SEQ ID NO: 1047842 - RNA, 19 nt, Homo sapiens
  misc_RNA (1)...(19): siRNA sense strand
ccuagcaacacaauagaug

SEQ ID NO: 1047843 - RNA, 19 nt, Homo sapiens
  misc_RNA (1)...(19): siRNA sense strand
uagaagugcgaaugauaga

SEQ ID NO: 1047844 - RNA, 19 nt, Homo sapiens
  misc_RNA (1)...(19): siRNA sense strand
caagagauugcugaaguag

SEQ ID NO: 1047845 - RNA, 19 nt, Homo sapiens
  misc_RNA (1)...(19): siRNA sense strand
cuggaauucuauaauaugg

SEQ ID NO: 1047846 - RNA, 19 nt, Homo sapiens
  misc_RNA (1)...(19): siRNA sense strand
agagagcuggaauucuaua

SEQ ID NO: 1047847 - RNA, 19 nt, Homo sapiens
  misc_RNA (1)...(19): siRNA sense strand
cuagcaacacaauagauga

SEQ ID NO: 1047848 - RNA, 19 nt, Homo sapiens
  misc_RNA (1)...(19): siRNA sense strand
uguaugcgcgucacaggaa

SEQ ID NO: 1047849 - RNA, 19 nt, Homo sapiens
  misc_RNA (1)...(19): siRNA sense strand
uugaugguguucuucuaga

SEQ ID NO: 1047850 - RNA, 19 nt, Homo sapiens
  misc_RNA (1)...(19): siRNA sense strand
uaaguuccacagcuaaugg

SEQ ID NO: 1047851 - RNA, 19 nt, Homo sapiens
  misc_RNA (1)...(19): siRNA sense strand
uuuaugcugcugacuguuu

SEQ ID NO: 1047852 - RNA, 19 nt, Homo sapiens
  misc_RNA (1)...(19): siRNA sense strand
cggaagaagcuuaacaaaa

SEQ ID NO: 1047853 - RNA, 19 nt, Homo sapiens
  misc_RNA (1)...(19): siRNA sense strand
cauuacggaagaagcuuaa

SEQ ID NO: 1047854 - RNA, 19 nt, Homo sapiens
  misc_RNA (1)...(19): siRNA sense strand
gcuggcaccuuucucuaua

SEQ ID NO: 1047855 - RNA, 19 nt, Homo sapiens
  misc_RNA (1)...(19): siRNA sense strand
cauggcagcuggcaccuuu

SEQ ID NO: 1047856 - RNA, 19 nt, Homo sapiens
  misc_RNA (1)...(19): siRNA sense strand
ggccugcucuucauccaaa

SEQ ID NO: 1047857 - RNA, 19 nt, Homo sapiens
  misc_RNA (1)...(19): siRNA sense strand
gcacgugacgcuccaguuc

SEQ ID NO: 1047858 - RNA, 19 nt, Homo sapiens
  misc_RNA (1)...(19): siRNA sense strand
ucacuggccugcucuucau

SEQ ID NO: 1047859 - RNA, 19 nt, Homo sapiens
  misc_RNA (1)...(19): siRNA sense strand
gaaagcccugagccuagua

SEQ ID NO: 1047860 - RNA, 19 nt, Homo sapiens
  misc_RNA (1)...(19): siRNA sense strand
caaggucauucugcuccua

SEQ ID NO: 1047861 - RNA, 19 nt, Homo sapiens
  misc_RNA (1)...(19): siRNA sense strand
cuauaucaccuuucuggaa

SEQ ID NO: 1047862 - RNA, 19 nt, Homo sapiens
  misc_RNA (1)...(19): siRNA sense strand
gcaccuuucucuauaucac

SEQ ID NO: 1047863 - RNA, 19 nt, Homo sapiens
  misc_RNA (1)...(19): siRNA sense strand
ccgcagcauuggcaugaug

SEQ ID NO: 1047864 - RNA, 19 nt, Homo sapiens
  misc_RNA (1)...(19): siRNA sense strand
uggcuuugcugcuccacaa

SEQ ID NO: 1047865 - RNA, 19 nt, Homo sapiens
  misc_RNA (1)...(19): siRNA sense strand
agaucacacuggcuuacaa

SEQ ID NO: 1047866 - RNA, 19 nt, Homo sapiens
  misc_RNA (1)...(19): siRNA sense strand
ccgaggcgguagcuucaga

SEQ ID NO: 1047867 - RNA, 19 nt, Homo sapiens
  misc_RNA (1)...(19): siRNA sense strand
agaaagcccugagccuagu

SEQ ID NO: 1047868 - RNA, 19 nt, Homo sapiens
  misc_RNA (1)...(19): siRNA sense strand
gcucugcugggaacaguga

SEQ ID NO: 1047869 - RNA, 19 nt, Homo sapiens
  misc_RNA (1)...(19): siRNA sense strand
gcagcuggcaccuuucucu

SEQ ID NO: 1047870 - RNA, 19 nt, Homo sapiens
  misc_RNA (1)...(19): siRNA sense strand
ucacacuggcuuacaagga

SEQ ID NO: 1047871 - RNA, 19 nt, Homo sapiens
  misc_RNA (1)...(19): siRNA sense strand
gcucuucauccaaaucuag

SEQ ID NO: 1047872 - RNA, 19 nt, Homo sapiens
  misc_RNA (1)...(19): siRNA sense strand
gaucacacuggcuuacaag

SEQ ID NO: 1047873 - RNA, 19 nt, Homo sapiens
  misc_RNA (1)...(19): siRNA sense strand
gcuggccaguucugagcaa

SEQ ID NO: 1047874 - RNA, 19 nt, Homo sapiens
  misc_RNA (1)...(19): siRNA sense strand
agcaaaggauccucaaggu

SEQ ID NO: 1047875 - RNA, 19 nt, Homo sapiens
  misc_RNA (1)...(19): siRNA sense strand
cagcuggcaccuuucucua

SEQ ID NO: 1047876 - RNA, 19 nt, Homo sapiens
  misc_RNA (1)...(19): siRNA sense strand
aaaggauccucaaggucau

SEQ ID NO: 1047877 - RNA, 19 nt, Homo sapiens
  misc_RNA (1)...(19): siRNA sense strand
gcagaucacacuggcuuac

SEQ ID NO: 1047878 - RNA, 19 nt, Homo sapiens
  misc_RNA (1)...(19): siRNA sense strand
ggccaguucugagcaaagg

SEQ ID NO: 1047879 - RNA, 19 nt, Homo sapiens
  misc_RNA (1)...(19): siRNA sense strand
ggccgcagcauuggcauga

SEQ ID NO: 1047880 - RNA, 19 nt, Homo sapiens
  misc_RNA (1)...(19): siRNA sense strand
gaaggaaaccuacuacuga

SEQ ID NO: 1047881 - RNA, 19 nt, Homo sapiens
  misc_RNA (1)...(19): siRNA sense strand
gaagaggucugccggaaau

SEQ ID NO: 1047882 - RNA, 19 nt, Homo sapiens
  misc_RNA (1)...(19): siRNA sense strand
gccaagagcuccaagauca

SEQ ID NO: 1047883 - RNA, 19 nt, Homo sapiens
  misc_RNA (1)...(19): siRNA sense strand
gcaggcagcugacaugauc

SEQ ID NO: 1047884 - RNA, 19 nt, Homo sapiens
  misc_RNA (1)...(19): siRNA sense strand
gcaccgaccucaaggacuu

SEQ ID NO: 1047885 - RNA, 19 nt, Homo sapiens
  misc_RNA (1)...(19): siRNA sense strand
gacaaggacucacccaaga

SEQ ID NO: 1047886 - RNA, 19 nt, Homo sapiens
  misc_RNA (1)...(19): siRNA sense strand
ucaauuccaccaacaaaua

SEQ ID NO: 1047887 - RNA, 19 nt, Homo sapiens
  misc_RNA (1)...(19): siRNA sense strand
ggacauacgagcagaggaa

SEQ ID NO: 1047888 - RNA, 19 nt, Homo sapiens
  misc_RNA (1)...(19): siRNA sense strand
caacaucccugugcucaag

SEQ ID NO: 1047889 - RNA, 19 nt, Homo sapiens
  misc_RNA (1)...(19): siRNA sense strand
gaaagcgacaucaugaaga

SEQ ID NO: 1047890 - RNA, 19 nt, Homo sapiens
  misc_RNA (1)...(19): siRNA sense strand
caagaaaguggcugagauu

SEQ ID NO: 1047891 - RNA, 19 nt, Homo sapiens
  misc_RNA (1)...(19): siRNA sense strand
gugagaagaugcaggugaa

SEQ ID NO: 1047892 - RNA, 19 nt, Homo sapiens
  misc_RNA (1)...(19): siRNA sense strand
ggaccuggaugaccucaag

SEQ ID NO: 1047893 - RNA, 19 nt, Homo sapiens
  misc_RNA (1)...(19): siRNA sense strand
guacgaggcugccgaaagc

SEQ ID NO: 1047894 - RNA, 19 nt, Homo sapiens
  misc_RNA (1)...(19): siRNA sense strand
ucagggaccucauuugaca

SEQ ID NO: 1047895 - RNA, 19 nt, Homo sapiens
  misc_RNA (1)...(19): siRNA sense strand
uggaugaccucaagaagga

SEQ ID NO: 1047896 - RNA, 19 nt, Homo sapiens
  misc_RNA (1)...(19): siRNA sense strand
gagauucccuucaauucca

SEQ ID NO: 1047897 - RNA, 19 nt, Homo sapiens
  misc_RNA (1)...(19): siRNA sense strand
gcuugaggcugucaucuuc

SEQ ID NO: 1047898 - RNA, 19 nt, Homo sapiens
  misc_RNA (1)...(19): siRNA sense strand
gacgaaauccgcaaacuca

SEQ ID NO: 1047899 - RNA, 19 nt, Homo sapiens
  misc_RNA (1)...(19): siRNA sense strand
gcaucgaucugggcacuga

SEQ ID NO: 1047900 - RNA, 19 nt, Homo sapiens
  misc_RNA (1)...(19): siRNA sense strand
cagcagaagcucaucauug

SEQ ID NO: 1047901 - RNA, 19 nt, Homo sapiens
  misc_RNA (1)...(19): siRNA sense strand
agaacugccuggugaagaa

SEQ ID NO: 1047902 - RNA, 19 nt, Homo sapiens
  misc_RNA (1)...(19): siRNA sense strand
agaggaaggugguggaguu

SEQ ID NO: 1047903 - RNA, 19 nt, Homo sapiens
  misc_RNA (1)...(19): siRNA sense strand
ggacuucaccuccgagcaa

SEQ ID NO: 1047904 - RNA, 19 nt, Homo sapiens
  misc_RNA (1)...(19): siRNA sense strand
gagacagggugcaauugug

SEQ ID NO: 1047905 - RNA, 19 nt, Homo sapiens
  misc_RNA (1)...(19): siRNA sense strand
gauaccugcuggugaugaa

SEQ ID NO: 1047906 - RNA, 19 nt, Homo sapiens
  misc_RNA (1)...(19): siRNA sense strand
gcucugacgucuccaagca

SEQ ID NO: 1047907 - RNA, 19 nt, Homo sapiens
  misc_RNA (1)...(19): siRNA sense strand
ggaagaggucugccggaaa

SEQ ID NO: 1047908 - RNA, 19 nt, Homo sapiens
  misc_RNA (1)...(19): siRNA sense strand
ggacaacuccucccugacu

SEQ ID NO: 1047909 - RNA, 19 nt, Homo sapiens
  misc_RNA (1)...(19): siRNA sense strand
acaagaaaguggcugagau

SEQ ID NO: 1047910 - RNA, 19 nt, Homo sapiens
  misc_RNA (1)...(19): siRNA sense strand
gcaucaaggucaucauggu

SEQ ID NO: 1047911 - RNA, 19 nt, Homo sapiens
  misc_RNA (1)...(19): siRNA sense strand
gcacaagaugucaguggaa

SEQ ID NO: 1047912 - RNA, 19 nt, Homo sapiens
  misc_RNA (1)...(19): siRNA sense strand
agcagaagcucaucauugu

SEQ ID NO: 1047913 - RNA, 19 nt, Homo sapiens
  misc_RNA (1)...(19): siRNA sense strand
gcugagauucccuucaauu

SEQ ID NO: 1047914 - RNA, 19 nt, Homo sapiens
  misc_RNA (1)...(19): siRNA sense strand
ggacaagaaagaugacaag

SEQ ID NO: 1047915 - RNA, 19 nt, Homo sapiens
  misc_RNA (1)...(19): siRNA sense strand
caaucgcgcugucuucaag

SEQ ID NO: 1047916 - RNA, 19 nt, Homo sapiens
  misc_RNA (1)...(19): siRNA sense strand
gacgagauccugcagaauc

SEQ ID NO: 1047917 - RNA, 19 nt, Homo sapiens
  misc_RNA (1)...(19): siRNA sense strand
uggcugagauucccuucaa

SEQ ID NO: 1047918 - RNA, 19 nt, Homo sapiens
  misc_RNA (1)...(19): siRNA sense strand
gcccaucgccaucgagauu

SEQ ID NO: 1047919 - RNA, 19 nt, Homo sapiens
  misc_RNA (1)...(19): siRNA sense strand
gugcuugguuucugccauu

SEQ ID NO: 1047920 - RNA, 19 nt, Homo sapiens
  misc_RNA (1)...(19): siRNA sense strand
ggaccucauuugacaagag

SEQ ID NO: 1047921 - RNA, 19 nt, Homo sapiens
  misc_RNA (1)...(19): siRNA sense strand
gaucauggaguccuucaag

SEQ ID NO: 1047922 - RNA, 19 nt, Homo sapiens
  misc_RNA (1)...(19): siRNA sense strand
gccgaaagcgacaucauga

SEQ ID NO: 1047923 - RNA, 19 nt, Homo sapiens
  misc_RNA (1)...(19): siRNA sense strand
gcgagcgcgugcuugguuu

SEQ ID NO: 1047924 - RNA, 19 nt, Homo sapiens
  misc_RNA (1)...(19): siRNA sense strand
cagacugugugcaggguuu

SEQ ID NO: 1047925 - RNA, 19 nt, Homo sapiens
  misc_RNA (1)...(19): siRNA sense strand
gaucuucgacaaccuaaag

SEQ ID NO: 1047926 - RNA, 19 nt, Homo sapiens
  misc_RNA (1)...(19): siRNA sense strand
ccaucgagauugagcacuu

SEQ ID NO: 1047927 - RNA, 19 nt, Homo sapiens
  misc_RNA (1)...(19): siRNA sense strand
cagcaaagcccaggagauc

SEQ ID NO: 1047928 - RNA, 19 nt, Homo sapiens
  misc_RNA (1)...(19): siRNA sense strand
ucgguggcuucuucucuua

SEQ ID NO: 1047929 - RNA, 19 nt, Homo sapiens
  misc_RNA (1)...(19): siRNA sense strand
ucagagacagggugcaauu

SEQ ID NO: 1047930 - RNA, 19 nt, Homo sapiens
  misc_RNA (1)...(19): siRNA sense strand
ucgacgagauccugcagaa

SEQ ID NO: 1047931 - RNA, 19 nt, Homo sapiens
  misc_RNA (1)...(19): siRNA sense strand
ccaagaucauggaguccuu

SEQ ID NO: 1047932 - RNA, 19 nt, Homo sapiens
  misc_RNA (1)...(19): siRNA sense strand
ucaagaaggagguggcuau

SEQ ID NO: 1047933 - RNA, 19 nt, Homo sapiens
  misc_RNA (1)...(19): siRNA sense strand
cuucuucucuuacuuugug

SEQ ID NO: 1047934 - RNA, 19 nt, Homo sapiens
  misc_RNA (1)...(19): siRNA sense strand
gcacugucaugggccguau

SEQ ID NO: 1047935 - RNA, 19 nt, Homo sapiens
  misc_RNA (1)...(19): siRNA sense strand
aaagcgacaucaugaagag

SEQ ID NO: 1047936 - RNA, 19 nt, Homo sapiens
  misc_RNA (1)...(19): siRNA sense strand
ugaagaaggccgacauugg

SEQ ID NO: 1047937 - RNA, 19 nt, Homo sapiens
  misc_RNA (1)...(19): siRNA sense strand
ggaagaacugccuggugaa

SEQ ID NO: 1047938 - RNA, 19 nt, Homo sapiens
  misc_RNA (1)...(19): siRNA sense strand
gaccucauuugacaagagu

SEQ ID NO: 1047939 - RNA, 19 nt, Homo sapiens
  misc_RNA (1)...(19): siRNA sense strand
cagcagggcaugaagaaca

SEQ ID NO: 1047940 - RNA, 19 nt, Homo sapiens
  misc_RNA (1)...(19): siRNA sense strand
ccagcaauaucccggagau

SEQ ID NO: 1047941 - RNA, 19 nt, Homo sapiens
  misc_RNA (1)...(19): siRNA sense strand
agaaggagguggcuaugac

SEQ ID NO: 1047942 - RNA, 19 nt, Homo sapiens
  misc_RNA (1)...(19): siRNA sense strand
gaaagaugacaaggacuca

SEQ ID NO: 1047943 - RNA, 19 nt, Homo sapiens
  misc_RNA (1)...(19): siRNA sense strand
gcugcaagguggacaacuc

SEQ ID NO: 1047944 - RNA, 19 nt, Homo sapiens
  misc_RNA (1)...(19): siRNA sense strand
cgaaagcgacaucaugaag

SEQ ID NO: 1047945 - RNA, 19 nt, Homo sapiens
  misc_RNA (1)...(19): siRNA sense strand
gaagaacugccuggugaag

SEQ ID NO: 1047946 - RNA, 19 nt, Homo sapiens
  misc_RNA (1)...(19): siRNA sense strand
gaaggagguggcuaugaca

SEQ ID NO: 1047947 - RNA, 19 nt, Homo sapiens
  misc_RNA (1)...(19): siRNA sense strand
cgacugugaugacgugaac

SEQ ID NO: 1047948 - RNA, 19 nt, Homo sapiens
  misc_RNA (1)...(19): siRNA sense strand
gggcuuugccuucgacugu

SEQ ID NO: 1047949 - RNA, 19 nt, Homo sapiens
  misc_RNA (1)...(19): siRNA sense strand
caagagcuccaagaucaug

SEQ ID NO: 1047950 - RNA, 19 nt, Homo sapiens
  misc_RNA (1)...(19): siRNA sense strand
ggagaaggaaaccuacuac

SEQ ID NO: 1047951 - RNA, 19 nt, Homo sapiens
  misc_RNA (1)...(19): siRNA sense strand
acaagaaagaugacaagga

SEQ ID NO: 1047952 - RNA, 19 nt, Homo sapiens
  misc_RNA (1)...(19): siRNA sense strand
caagcaggcagcugacaug

SEQ ID NO: 1047953 - RNA, 19 nt, Homo sapiens
  misc_RNA (1)...(19): siRNA sense strand
gcaaucgcgcugucuucaa

SEQ ID NO: 1047954 - RNA, 19 nt, Homo sapiens
  misc_RNA (1)...(19): siRNA sense strand
ccaucgccaucgagauuga

SEQ ID NO: 1047955 - RNA, 19 nt, Homo sapiens
  misc_RNA (1)...(19): siRNA sense strand
ucauggaguccuucaagaa

SEQ ID NO: 1047956 - RNA, 19 nt, Homo sapiens
  misc_RNA (1)...(19): siRNA sense strand
cagagugggucaaguuuug

SEQ ID NO: 1047957 - RNA, 19 nt, Homo sapiens
  misc_RNA (1)...(19): siRNA sense strand
ggaaggugguggaguucac

SEQ ID NO: 1047958 - RNA, 19 nt, Homo sapiens
  misc_RNA (1)...(19): siRNA sense strand
gcgcaggcaucaaggucau

SEQ ID NO: 1047959 - RNA, 19 nt, Homo sapiens
  misc_RNA (1)...(19): siRNA sense strand
gcuuugccuucgacuguga

SEQ ID NO: 1047960 - RNA, 19 nt, Homo sapiens
  misc_RNA (1)...(19): siRNA sense strand
gcaucaucguggccaaugu

SEQ ID NO: 1047961 - RNA, 19 nt, Homo sapiens
  misc_RNA (1)...(19): siRNA sense strand
gaagaaccuggaggcugua

SEQ ID NO: 1047962 - RNA, 19 nt, Homo sapiens
  misc_RNA (1)...(19): siRNA sense strand
agaaggaaaccuacuacug

SEQ ID NO: 1047963 - RNA, 19 nt, Homo sapiens
  misc_RNA (1)...(19): siRNA sense strand
ggacggacaaauuggucaa

SEQ ID NO: 1047964 - RNA, 19 nt, Homo sapiens
  misc_RNA (1)...(19): siRNA sense strand
ugaagagacagcccaggaa

SEQ ID NO: 1047965 - RNA, 19 nt, Homo sapiens
  misc_RNA (1)...(19): siRNA sense strand
acaaauaccagcucuccau

SEQ ID NO: 1047966 - RNA, 19 nt, Homo sapiens
  misc_RNA (1)...(19): siRNA sense strand
agucugcccugcucaagug

SEQ ID NO: 1047967 - RNA, 19 nt, Homo sapiens
  misc_RNA (1)...(19): siRNA sense strand
agucagggaccucauuuga

SEQ ID NO: 1047968 - RNA, 19 nt, Homo sapiens
  misc_RNA (1)...(19): siRNA sense strand
ccagucagggaccucauuu

SEQ ID NO: 1047969 - RNA, 19 nt, Homo sapiens
  misc_RNA (1)...(19): siRNA sense strand
gcaugacagucgcccacau

SEQ ID NO: 1047970 - RNA, 19 nt, Homo sapiens
  misc_RNA (1)...(19): siRNA sense strand
ccgggaaggugagaagaug

SEQ ID NO: 1047971 - RNA, 19 nt, Homo sapiens
  misc_RNA (1)...(19): siRNA sense strand
acgagauccugcagaauca

SEQ ID NO: 1047972 - RNA, 19 nt, Homo sapiens
  misc_RNA (1)...(19): siRNA sense strand
gugugggcaucaucucuga

SEQ ID NO: 1047973 - RNA, 19 nt, Homo sapiens
  misc_RNA (1)...(19): siRNA sense strand
cuugguuucugccauuauu

SEQ ID NO: 1047974 - RNA, 19 nt, Homo sapiens
  misc_RNA (1)...(19): siRNA sense strand
cagcugaccugcggaucau

SEQ ID NO: 1047975 - RNA, 19 nt, Homo sapiens
  misc_RNA (1)...(19): siRNA sense strand
gacuucaccuccgagcaaa

SEQ ID NO: 1047976 - RNA, 19 nt, Homo sapiens
  misc_RNA (1)...(19): siRNA sense strand
cgaaauccgcaaacucauc

SEQ ID NO: 1047977 - RNA, 19 nt, Homo sapiens
  misc_RNA (1)...(19): siRNA sense strand
ucgacaaccuaaagaaguc

SEQ ID NO: 1047978 - RNA, 19 nt, Homo sapiens
  misc_RNA (1)...(19): siRNA sense strand
ccaucucacuggcguacga

SEQ ID NO: 1047979 - RNA, 19 nt, Homo sapiens
  misc_RNA (1)...(19): siRNA sense strand
ggguggagaaggaaaccua

SEQ ID NO: 1047980 - RNA, 19 nt, Homo sapiens
  misc_RNA (1)...(19): siRNA sense strand
gcaacaaggucaucacugu

SEQ ID NO: 1047981 - RNA, 19 nt, Homo sapiens
  misc_RNA (1)...(19): siRNA sense strand
caaggaaucugauaaugug

SEQ ID NO: 1047982 - RNA, 19 nt, Homo sapiens
  misc_RNA (1)...(19): siRNA sense strand
gaaacucuuccuugacuua

SEQ ID NO: 1047983 - RNA, 19 nt, Homo sapiens
  misc_RNA (1)...(19): siRNA sense strand
caauguauccucacccuua

SEQ ID NO: 1047984 - RNA, 19 nt, Homo sapiens
  misc_RNA (1)...(19): siRNA sense strand
gagaaacucuuccuugacu

SEQ ID NO: 1047985 - RNA, 19 nt, Homo sapiens
  misc_RNA (1)...(19): siRNA sense strand
ggaaaagcaucagcuauuu

SEQ ID NO: 1047986 - RNA, 19 nt, Homo sapiens
  misc_RNA (1)...(19): siRNA sense strand
ccuaugacauuaccuguga

SEQ ID NO: 1047987 - RNA, 19 nt, Homo sapiens
  misc_RNA (1)...(19): siRNA sense strand
uggagaaacucuuccuuga

SEQ ID NO: 1047988 - RNA, 19 nt, Homo sapiens
  misc_RNA (1)...(19): siRNA sense strand
ggacacagcaggucaagag

SEQ ID NO: 1047989 - RNA, 19 nt, Homo sapiens
  misc_RNA (1)...(19): siRNA sense strand
ggucaaggagccacaauug

SEQ ID NO: 1047990 - RNA, 19 nt, Homo sapiens
  misc_RNA (1)...(19): siRNA sense strand
gauccucaccuaugacauu

SEQ ID NO: 1047991 - RNA, 19 nt, Homo sapiens
  misc_RNA (1)...(19): siRNA sense strand
gacauuaccugugaggaau

SEQ ID NO: 1047992 - RNA, 19 nt, Homo sapiens
  misc_RNA (1)...(19): siRNA sense strand
aagcucaggacauguauua

SEQ ID NO: 1047993 - RNA, 19 nt, Homo sapiens
  misc_RNA (1)...(19): siRNA sense strand
gagagauuucgguccauua

SEQ ID NO: 1047994 - RNA, 19 nt, Homo sapiens
  misc_RNA (1)...(19): siRNA sense strand
cagaagcucaggacaugua

SEQ ID NO: 1047995 - RNA, 19 nt, Homo sapiens
  misc_RNA (1)...(19): siRNA sense strand
ccaaggaaucugauaaugu

SEQ ID NO: 1047996 - RNA, 19 nt, Homo sapiens
  misc_RNA (1)...(19): siRNA sense strand
gccaaggaaucugauaaug

SEQ ID NO: 1047997 - RNA, 19 nt, Homo sapiens
  misc_RNA (1)...(19): siRNA sense strand
caaggucaucacuguguua

SEQ ID NO: 1047998 - RNA, 19 nt, Homo sapiens
  misc_RNA (1)...(19): siRNA sense strand
ucagcuauuugacuuguug

SEQ ID NO: 1047999 - RNA, 19 nt, Homo sapiens
  misc_RNA (1)...(19): siRNA sense strand
ucaaggagccacaauugga

SEQ ID NO: 1048000 - RNA, 19 nt, Homo sapiens
  misc_RNA (1)...(19): siRNA sense strand
cacagcaggucaagagaga

SEQ ID NO: 1048001 - RNA, 19 nt, Homo sapiens
  misc_RNA (1)...(19): siRNA sense strand
gauuaugauuuccuguuca

SEQ ID NO: 1048002 - RNA, 19 nt, Homo sapiens
  misc_RNA (1)...(19): siRNA sense strand
ugcgggagauagaacaaua

SEQ ID NO: 1048003 - RNA, 19 nt, Homo sapiens
  misc_RNA (1)...(19): siRNA sense strand
ugacauuaccugugaggaa

SEQ ID NO: 1048004 - RNA, 19 nt, Homo sapiens
  misc_RNA (1)...(19): siRNA sense strand
gcuauuugacuuguuguaa

SEQ ID NO: 1048005 - RNA, 19 nt, Homo sapiens
  misc_RNA (1)...(19): siRNA sense strand
gcucaggacauguauuauc

SEQ ID NO: 1048006 - RNA, 19 nt, Homo sapiens
  misc_RNA (1)...(19): siRNA sense strand
ggagaccucagccaaggaa

SEQ ID NO: 1048007 - RNA, 19 nt, Homo sapiens
  misc_RNA (1)...(19): siRNA sense strand
gagccacaauuggaguuga

SEQ ID NO: 1048008 - RNA, 19 nt, Homo sapiens
  misc_RNA (1)...(19): siRNA sense strand
gcugaaaggagagagguuu

SEQ ID NO: 1048009 - RNA, 19 nt, Homo sapiens
  misc_RNA (1)...(19): siRNA sense strand
gguccauuacccagaguua

SEQ ID NO: 1048010 - RNA, 19 nt, Homo sapiens
  misc_RNA (1)...(19): siRNA sense strand
caucagcuauuugacuugu

SEQ ID NO: 1048011 - RNA, 19 nt, Homo sapiens
  misc_RNA (1)...(19): siRNA sense strand
agauugaccuggcugaaag

SEQ ID NO: 1048012 - RNA, 19 nt, Homo sapiens
  misc_RNA (1)...(19): siRNA sense strand
aaguaaagcuacagaucug

SEQ ID NO: 1048013 - RNA, 19 nt, Homo sapiens
  misc_RNA (1)...(19): siRNA sense strand
gggaaaagcaucagcuauu

SEQ ID NO: 1048014 - RNA, 19 nt, Homo sapiens
  misc_RNA (1)...(19): siRNA sense strand
gaacaauaugccagcaaca

SEQ ID NO: 1048015 - RNA, 19 nt, Homo sapiens
  misc_RNA (1)...(19): siRNA sense strand
ccacaauuggaguugauuu

SEQ ID NO: 1048016 - RNA, 19 nt, Homo sapiens
  misc_RNA (1)...(19): siRNA sense strand
caugccgacucaucaguga

SEQ ID NO: 1048017 - RNA, 19 nt, Homo sapiens
  misc_RNA (1)...(19): siRNA sense strand
cagccaaggaaucugauaa

SEQ ID NO: 1048018 - RNA, 19 nt, Homo sapiens
  misc_RNA (1)...(19): siRNA sense strand
cagcaggucaagagagauu

SEQ ID NO: 1048019 - RNA, 19 nt, Homo sapiens
  misc_RNA (1)...(19): siRNA sense strand
ccuugauccucaccuauga

SEQ ID NO: 1048020 - RNA, 19 nt, Homo sapiens
  misc_RNA (1)...(19): siRNA sense strand
agagagauuucgguccauu

SEQ ID NO: 1048021 - RNA, 19 nt, Homo sapiens
  misc_RNA (1)...(19): siRNA sense strand
gauuaagacaguggagauu

SEQ ID NO: 1048022 - RNA, 19 nt, Homo sapiens
  misc_RNA (1)...(19): siRNA sense strand
aaaguaaagcuacagaucu

SEQ ID NO: 1048023 - RNA, 19 nt, Homo sapiens
  misc_RNA (1)...(19): siRNA sense strand
gaaaagcaucagcuauuug

SEQ ID NO: 1048024 - RNA, 19 nt, Homo sapiens
  misc_RNA (1)...(19): siRNA sense strand
agauuaugauuuccuguuc

SEQ ID NO: 1048025 - RNA, 19 nt, Homo sapiens
  misc_RNA (1)...(19): siRNA sense strand
guuagugggcaacaagauu

SEQ ID NO: 1048026 - RNA, 19 nt, Homo sapiens
  misc_RNA (1)...(19): siRNA sense strand
gaguauggaagauuaugau

SEQ ID NO: 1048027 - RNA, 19 nt, Homo sapiens
  misc_RNA (1)...(19): siRNA sense strand
cugauaauguggagaaacu

SEQ ID NO: 1048028 - RNA, 19 nt, Homo sapiens
  misc_RNA (1)...(19): siRNA sense strand
cucagaagcucaggacaug

SEQ ID NO: 1048029 - RNA, 19 nt, Homo sapiens
  misc_RNA (1)...(19): siRNA sense strand
ggagaaacucuuccuugac

SEQ ID NO: 1048030 - RNA, 19 nt, Homo sapiens
  misc_RNA (1)...(19): siRNA sense strand
gacuuagcaugccgacuca

SEQ ID NO: 1048031 - RNA, 19 nt, Homo sapiens
  misc_RNA (1)...(19): siRNA sense strand
acaaggucaucacuguguu

SEQ ID NO: 1048032 - RNA, 19 nt, Homo sapiens
  misc_RNA (1)...(19): siRNA sense strand
ccagacagaacacacuugu

SEQ ID NO: 1048033 - RNA, 19 nt, Homo sapiens
  misc_RNA (1)...(19): siRNA sense strand
cucaggacauguauuaucu

SEQ ID NO: 1048034 - RNA, 19 nt, Homo sapiens
  misc_RNA (1)...(19): siRNA sense strand
gaagcucaggacauguauu

SEQ ID NO: 1048035 - RNA, 19 nt, Homo sapiens
  misc_RNA (1)...(19): siRNA sense strand
gauaauguggagaaacucu

SEQ ID NO: 1048036 - RNA, 19 nt, Homo sapiens
  misc_RNA (1)...(19): siRNA sense strand
gcaggucaagagagauuuc

SEQ ID NO: 1048037 - RNA, 19 nt, Homo sapiens
  misc_RNA (1)...(19): siRNA sense strand
aaucugauaauguggagaa

SEQ ID NO: 1048038 - RNA, 19 nt, Homo sapiens
  misc_RNA (1)...(19): siRNA sense strand
auuaagacaguggagauua

SEQ ID NO: 1048039 - RNA, 19 nt, Homo sapiens
  misc_RNA (1)...(19): siRNA sense strand
agcaucagcuauuugacuu

SEQ ID NO: 1048040 - RNA, 19 nt, Homo sapiens
  misc_RNA (1)...(19): siRNA sense strand
uuagugggcaacaagauug

SEQ ID NO: 1048041 - RNA, 19 nt, Homo sapiens
  misc_RNA (1)...(19): siRNA sense strand
caagauugaccuggcugaa

SEQ ID NO: 1048042 - RNA, 19 nt, Homo sapiens
  misc_RNA (1)...(19): siRNA sense strand
auccucaccuaugacauua

SEQ ID NO: 1048043 - RNA, 19 nt, Homo sapiens
  misc_RNA (1)...(19): siRNA sense strand
aagauugaccuggcugaaa

SEQ ID NO: 1048044 - RNA, 19 nt, Homo sapiens
  misc_RNA (1)...(19): siRNA sense strand
gcgggagauagaacaauau

SEQ ID NO: 1048045 - RNA, 19 nt, Homo sapiens
  misc_RNA (1)...(19): siRNA sense strand
agacaguggagauuaaugg

SEQ ID NO: 1048046 - RNA, 19 nt, Homo sapiens
  misc_RNA (1)...(19): siRNA sense strand
ccauuacccagaguuacua

SEQ ID NO: 1048047 - RNA, 19 nt, Homo sapiens
  misc_RNA (1)...(19): siRNA sense strand
aaaagcaucagcuauuuga

SEQ ID NO: 1048048 - RNA, 19 nt, Homo sapiens
  misc_RNA (1)...(19): siRNA sense strand
uaagacaguggagauuaau

SEQ ID NO: 1048049 - RNA, 19 nt, Homo sapiens
  misc_RNA (1)...(19): siRNA sense strand
gagaaaugcaacaaacuua

SEQ ID NO: 1048050 - RNA, 19 nt, Homo sapiens
  misc_RNA (1)...(19): siRNA sense strand
caagaacaauugcgggaaa

SEQ ID NO: 1048051 - RNA, 19 nt, Homo sapiens
  misc_RNA (1)...(19): siRNA sense strand
ggacaugcaagaacaauug

SEQ ID NO: 1048052 - RNA, 19 nt, Homo sapiens
  misc_RNA (1)...(19): siRNA sense strand
gugggagcauuauagauua

SEQ ID NO: 1048053 - RNA, 19 nt, Homo sapiens
  misc_RNA (1)...(19): siRNA sense strand
gaugagaaaugcaacaaac

SEQ ID NO: 1048054 - RNA, 19 nt, Homo sapiens
  misc_RNA (1)...(19): siRNA sense strand
ggacuuuccucuuucucuu

SEQ ID NO: 1048055 - RNA, 19 nt, Homo sapiens
  misc_RNA (1)...(19): siRNA sense strand
gccgugcucuucuuucuga

SEQ ID NO: 1048056 - RNA, 19 nt, Homo sapiens
  misc_RNA (1)...(19): siRNA sense strand
aaagggacaugcaagaaca

SEQ ID NO: 1048057 - RNA, 19 nt, Homo sapiens
  misc_RNA (1)...(19): siRNA sense strand
ugagaaaugcaacaaacuu

SEQ ID NO: 1048058 - RNA, 19 nt, Homo sapiens
  misc_RNA (1)...(19): siRNA sense strand
ugugggagcauuauagauu

SEQ ID NO: 1048059 - RNA, 19 nt, Homo sapiens
  misc_RNA (1)...(19): siRNA sense strand
ugggagcauuauagauuaa

SEQ ID NO: 1048060 - RNA, 19 nt, Homo sapiens
  misc_RNA (1)...(19): siRNA sense strand
uaaagggacaugcaagaac

SEQ ID NO: 1048061 - RNA, 19 nt, Homo sapiens
  misc_RNA (1)...(19): siRNA sense strand
aaacuuaaagggacaugca

SEQ ID NO: 1048062 - RNA, 19 nt, Homo sapiens
  misc_RNA (1)...(19): siRNA sense strand
aaacgaagaacuuauugcu

SEQ ID NO: 1048063 - RNA, 19 nt, Homo sapiens
  misc_RNA (1)...(19): siRNA sense strand
uuaaagggacaugcaagaa

SEQ ID NO: 1048064 - RNA, 19 nt, Homo sapiens
  misc_RNA (1)...(19): siRNA sense strand
gacuuuccucuuucucuuu

SEQ ID NO: 1048065 - RNA, 19 nt, Homo sapiens
  misc_RNA (1)...(19): siRNA sense strand
caugugggagcauuauaga

SEQ ID NO: 1048066 - RNA, 19 nt, Homo sapiens
  misc_RNA (1)...(19): siRNA sense strand
gggacaugcaagaacaauu

SEQ ID NO: 1048067 - RNA, 19 nt, Homo sapiens
  misc_RNA (1)...(19): siRNA sense strand
ccaugugggagcauuauag

SEQ ID NO: 1048068 - RNA, 19 nt, Homo sapiens
  misc_RNA (1)...(19): siRNA sense strand
gaagaacuuauugcucucu

SEQ ID NO: 1048069 - RNA, 19 nt, Homo sapiens
  misc_RNA (1)...(19): siRNA sense strand
cuuaaagggacaugcaaga

SEQ ID NO: 1048070 - RNA, 19 nt, Homo sapiens
  misc_RNA (1)...(19): siRNA sense strand
gaaagaggaugaagaauau

SEQ ID NO: 1048071 - RNA, 19 nt, Homo sapiens
  misc_RNA (1)...(19): siRNA sense strand
gaagaaggcugcccugaaa

SEQ ID NO: 1048072 - RNA, 19 nt, Homo sapiens
  misc_RNA (1)...(19): siRNA sense strand
gaaggcagcugcucccaaa

SEQ ID NO: 1048073 - RNA, 19 nt, Homo sapiens
  misc_RNA (1)...(19): siRNA sense strand
cuacauaucaggccaauua

SEQ ID NO: 1048074 - RNA, 19 nt, Homo sapiens
  misc_RNA (1)...(19): siRNA sense strand
gaugaagacugcucugaaa

SEQ ID NO: 1048075 - RNA, 19 nt, Homo sapiens
  misc_RNA (1)...(19): siRNA sense strand
ggaugaagaugaaauuaga

SEQ ID NO: 1048076 - RNA, 19 nt, Homo sapiens
  misc_RNA (1)...(19): siRNA sense strand
ggaagaaggugaugcagau

SEQ ID NO: 1048077 - RNA, 19 nt, Homo sapiens
  misc_RNA (1)...(19): siRNA sense strand
ggaaacuccuucucuuuga

SEQ ID NO: 1048078 - RNA, 19 nt, Homo sapiens
  misc_RNA (1)...(19): siRNA sense strand
gaaauuagaggcuacaaau

SEQ ID NO: 1048079 - RNA, 19 nt, Homo sapiens
  misc_RNA (1)...(19): siRNA sense strand
ggucuuugcuguuauuuga

SEQ ID NO: 1048080 - RNA, 19 nt, Homo sapiens
  misc_RNA (1)...(19): siRNA sense strand
gaagauggcuccgaaagag

SEQ ID NO: 1048081 - RNA, 19 nt, Homo sapiens
  misc_RNA (1)...(19): siRNA sense strand
caagauuacugaagauuuc

SEQ ID NO: 1048082 - RNA, 19 nt, Homo sapiens
  misc_RNA (1)...(19): siRNA sense strand
cgaaagagaauuugaagaa

SEQ ID NO: 1048083 - RNA, 19 nt, Homo sapiens
  misc_RNA (1)...(19): siRNA sense strand
gaagaagacagaaauacaa

SEQ ID NO: 1048084 - RNA, 19 nt, Homo sapiens
  misc_RNA (1)...(19): siRNA sense strand
gaagaugacggcucugaaa

SEQ ID NO: 1048085 - RNA, 19 nt, Homo sapiens
  misc_RNA (1)...(19): siRNA sense strand
ucaaggaaaucuuaaagga

SEQ ID NO: 1048086 - RNA, 19 nt, Homo sapiens
  misc_RNA (1)...(19): siRNA sense strand
gaagaugacucagagaaag

SEQ ID NO: 1048087 - RNA, 19 nt, Homo sapiens
  misc_RNA (1)...(19): siRNA sense strand
gaagaaggcaaucccguaa

SEQ ID NO: 1048088 - RNA, 19 nt, Homo sapiens
  misc_RNA (1)...(19): siRNA sense strand
gcaaagacuauaagaagaa

SEQ ID NO: 1048089 - RNA, 19 nt, Homo sapiens
  misc_RNA (1)...(19): siRNA sense strand
ugaagaauaugcagaugaa

SEQ ID NO: 1048090 - RNA, 19 nt, Homo sapiens
  misc_RNA (1)...(19): siRNA sense strand
agaaagaggaugaagaaua

SEQ ID NO: 1048091 - RNA, 19 nt, Homo sapiens
  misc_RNA (1)...(19): siRNA sense strand
agaggaagcugauuauugu

SEQ ID NO: 1048092 - RNA, 19 nt, Homo sapiens
  misc_RNA (1)...(19): siRNA sense strand
aaaaggagcuucaugaaaa

SEQ ID NO: 1048093 - RNA, 19 nt, Homo sapiens
  misc_RNA (1)...(19): siRNA sense strand
gggaugggacuacagauua

SEQ ID NO: 1048094 - RNA, 19 nt, Homo sapiens
  misc_RNA (1)...(19): siRNA sense strand
ggaagcugauuauuguauu

SEQ ID NO: 1048095 - RNA, 19 nt, Homo sapiens
  misc_RNA (1)...(19): siRNA sense strand
gaagacagaaauacaaaug

SEQ ID NO: 1048096 - RNA, 19 nt, Homo sapiens
  misc_RNA (1)...(19): siRNA sense strand
ugacaaagaguuagaagaa

SEQ ID NO: 1048097 - RNA, 19 nt, Homo sapiens
  misc_RNA (1)...(19): siRNA sense strand
gagaauaugaugccucaaa

SEQ ID NO: 1048098 - RNA, 19 nt, Homo sapiens
  misc_RNA (1)...(19): siRNA sense strand
caaggaagaugaagaugca

SEQ ID NO: 1048099 - RNA, 19 nt, Homo sapiens
  misc_RNA (1)...(19): siRNA sense strand
gaauauguuucauccuaug

SEQ ID NO: 1048100 - RNA, 19 nt, Homo sapiens
  misc_RNA (1)...(19): siRNA sense strand
ggcagcagcuuuauucuca

SEQ ID NO: 1048101 - RNA, 19 nt, Homo sapiens
  misc_RNA (1)...(19): siRNA sense strand
caaagaagaagaagaagug

SEQ ID NO: 1048102 - RNA, 19 nt, Homo sapiens
  misc_RNA (1)...(19): siRNA sense strand
gacaaagaguuagaagaaa

SEQ ID NO: 1048103 - RNA, 19 nt, Homo sapiens
  misc_RNA (1)...(19): siRNA sense strand
ugaaugagaucagagaaga

SEQ ID NO: 1048104 - RNA, 19 nt, Homo sapiens
  misc_RNA (1)...(19): siRNA sense strand
agaagaagcugucuaugca

SEQ ID NO: 1048105 - RNA, 19 nt, Homo sapiens
  misc_RNA (1)...(19): siRNA sense strand
ccaaugagaaguuguuuga

SEQ ID NO: 1048106 - RNA, 19 nt, Homo sapiens
  misc_RNA (1)...(19): siRNA sense strand
ccaauuauggcuucucuaa

SEQ ID NO: 1048107 - RNA, 19 nt, Homo sapiens
  misc_RNA (1)...(19): siRNA sense strand
gaugaugauuccaaugaga

SEQ ID NO: 1048108 - RNA, 19 nt, Homo sapiens
  misc_RNA (1)...(19): siRNA sense strand
ggaugggacuacagauuau

SEQ ID NO: 1048109 - RNA, 19 nt, Homo sapiens
  misc_RNA (1)...(19): siRNA sense strand
gaagaagugcaaagacuau

SEQ ID NO: 1048110 - RNA, 19 nt, Homo sapiens
  misc_RNA (1)...(19): siRNA sense strand
aagaugaccucaacaagga

SEQ ID NO: 1048111 - RNA, 19 nt, Homo sapiens
  misc_RNA (1)...(19): siRNA sense strand
uaugaugccucaaagaaga

SEQ ID NO: 1048112 - RNA, 19 nt, Homo sapiens
  misc_RNA (1)...(19): siRNA sense strand
agagagaguuugacgaaga

SEQ ID NO: 1048113 - RNA, 19 nt, Homo sapiens
  misc_RNA (1)...(19): siRNA sense strand
gaagcugauuauuguauuc

SEQ ID NO: 1048114 - RNA, 19 nt, Homo sapiens
  misc_RNA (1)...(19): siRNA sense strand
ccgcaaauguugaagaugu

SEQ ID NO: 1048115 - RNA, 19 nt, Homo sapiens
  misc_RNA (1)...(19): siRNA sense strand
gaaaagagaaucuguggaa

SEQ ID NO: 1048116 - RNA, 19 nt, Homo sapiens
  misc_RNA (1)...(19): siRNA sense strand
gaaguuguuugacgauucu

SEQ ID NO: 1048117 - RNA, 19 nt, Homo sapiens
  misc_RNA (1)...(19): siRNA sense strand
ugaugagucugaugagaaa

SEQ ID NO: 1048118 - RNA, 19 nt, Homo sapiens
  misc_RNA (1)...(19): siRNA sense strand
aagaagaggaggauacaua

SEQ ID NO: 1048119 - RNA, 19 nt, Homo sapiens
  misc_RNA (1)...(19): siRNA sense strand
gaaacuccuucucuuugau

SEQ ID NO: 1048120 - RNA, 19 nt, Homo sapiens
  misc_RNA (1)...(19): siRNA sense strand
ggaacgaugaguuugauga

SEQ ID NO: 1048121 - RNA, 19 nt, Homo sapiens
  misc_RNA (1)...(19): siRNA sense strand
ugagaaagaggaugaagaa

SEQ ID NO: 1048122 - RNA, 19 nt, Homo sapiens
  misc_RNA (1)...(19): siRNA sense strand
cagaggaagcugauuauug

SEQ ID NO: 1048123 - RNA, 19 nt, Homo sapiens
  misc_RNA (1)...(19): siRNA sense strand
aaugagaaguuguuugaug

SEQ ID NO: 1048124 - RNA, 19 nt, Homo sapiens
  misc_RNA (1)...(19): siRNA sense strand
cagaagaauuuaaggucaa

SEQ ID NO: 1048125 - RNA, 19 nt, Homo sapiens
  misc_RNA (1)...(19): siRNA sense strand
gaugaugagucugaugaga

SEQ ID NO: 1048126 - RNA, 19 nt, Homo sapiens
  misc_RNA (1)...(19): siRNA sense strand
gagagaguuugacgaagau

SEQ ID NO: 1048127 - RNA, 19 nt, Homo sapiens
  misc_RNA (1)...(19): siRNA sense strand
gaaaaggagcuucaugaaa

SEQ ID NO: 1048128 - RNA, 19 nt, Homo sapiens
  misc_RNA (1)...(19): siRNA sense strand
gagaagaaguuugaaaaga

SEQ ID NO: 1048129 - RNA, 19 nt, Homo sapiens
  misc_RNA (1)...(19): siRNA sense strand
guagaguguucgaaguuug

SEQ ID NO: 1048130 - RNA, 19 nt, Homo sapiens
  misc_RNA (1)...(19): siRNA sense strand
gaagcugucuaugcaacaa

SEQ ID NO: 1048131 - RNA, 19 nt, Homo sapiens
  misc_RNA (1)...(19): siRNA sense strand
caggaugguuucauguuga

SEQ ID NO: 1048132 - RNA, 19 nt, Homo sapiens
  misc_RNA (1)...(19): siRNA sense strand
gaaaaugacucugaaaacu

SEQ ID NO: 1048133 - RNA, 19 nt, Homo sapiens
  misc_RNA (1)...(19): siRNA sense strand
agaaggcaaucccguaaga

SEQ ID NO: 1048134 - RNA, 19 nt, Homo sapiens
  misc_RNA (1)...(19): siRNA sense strand
ccucaaagaagaagaagaa

SEQ ID NO: 1048135 - RNA, 19 nt, Homo sapiens
  misc_RNA (1)...(19): siRNA sense strand
ugaagaaccuauagaugag

SEQ ID NO: 1048136 - RNA, 19 nt, Homo sapiens
  misc_RNA (1)...(19): siRNA sense strand
gaugaugacgaugauauuu

SEQ ID NO: 1048137 - RNA, 19 nt, Homo sapiens
  misc_RNA (1)...(19): siRNA sense strand
gagaaguuguuugacgauu

SEQ ID NO: 1048138 - RNA, 19 nt, Homo sapiens
  misc_RNA (1)...(19): siRNA sense strand
ccagugagaaguuguuuga

SEQ ID NO: 1048139 - RNA, 19 nt, Homo sapiens
  misc_RNA (1)...(19): siRNA sense strand
cgaagaugaugauuccaau

SEQ ID NO: 1048140 - RNA, 19 nt, Homo sapiens
  misc_RNA (1)...(19): siRNA sense strand
caacuuggaugggaacgau

SEQ ID NO: 1048141 - RNA, 19 nt, Homo sapiens
  misc_RNA (1)...(19): siRNA sense strand
agaaagagucugaugaaga

SEQ ID NO: 1048142 - RNA, 19 nt, Homo sapiens
  misc_RNA (1)...(19): siRNA sense strand
gaugagaagaaguuugaaa

SEQ ID NO: 1048143 - RNA, 19 nt, Homo sapiens
  misc_RNA (1)...(19): siRNA sense strand
ucaggaugguuucauguug

SEQ ID NO: 1048144 - RNA, 19 nt, Homo sapiens
  misc_RNA (1)...(19): siRNA sense strand
gaagauguccaugcuagga

SEQ ID NO: 1048145 - RNA, 19 nt, Homo sapiens
  misc_RNA (1)...(19): siRNA sense strand
gagaaagagucugaugaag

SEQ ID NO: 1048146 - RNA, 19 nt, Homo sapiens
  misc_RNA (1)...(19): siRNA sense strand
gaugagcaguugcgaaugc

SEQ ID NO: 1048147 - RNA, 19 nt, Homo sapiens
  misc_RNA (1)...(19): siRNA sense strand
aaacaaugcuaaggaaagu

SEQ ID NO: 1048148 - RNA, 19 nt, Homo sapiens
  misc_RNA (1)...(19): siRNA sense strand
gaggaaaggcugagaggau

SEQ ID NO: 1048149 - RNA, 19 nt, Homo sapiens
  misc_RNA (1)...(19): siRNA sense strand
gagagauccucagacagaa

SEQ ID NO: 1048150 - RNA, 19 nt, Homo sapiens
  misc_RNA (1)...(19): siRNA sense strand
ccaagauuacugaagauuu

SEQ ID NO: 1048151 - RNA, 19 nt, Homo sapiens
  misc_RNA (1)...(19): siRNA sense strand
gaagagaauggccuugcaa

SEQ ID NO: 1048152 - RNA, 19 nt, Homo sapiens
  misc_RNA (1)...(19): siRNA sense strand
aagaggaucugaagaggau

SEQ ID NO: 1048153 - RNA, 19 nt, Homo sapiens
  misc_RNA (1)...(19): siRNA sense strand
gggagaauuugaagaaggu

SEQ ID NO: 1048154 - RNA, 19 nt, Homo sapiens
  misc_RNA (1)...(19): siRNA sense strand
uugaagaaccuauagauga

SEQ ID NO: 1048155 - RNA, 19 nt, Homo sapiens
  misc_RNA (1)...(19): siRNA sense strand
ggaugggaacgaugaguuu

SEQ ID NO: 1048156 - RNA, 19 nt, Homo sapiens
  misc_RNA (1)...(19): siRNA sense strand
ggcuacaaauuacauguug

SEQ ID NO: 1048157 - RNA, 19 nt, Homo sapiens
  misc_RNA (1)...(19): siRNA sense strand
uagaugagaagaaguuuga

SEQ ID NO: 1048158 - RNA, 19 nt, Homo sapiens
  misc_RNA (1)...(19): siRNA sense strand
gugcaaagacuauaagaag

SEQ ID NO: 1048159 - RNA, 19 nt, Homo sapiens
  misc_RNA (1)...(19): siRNA sense strand
gaauaugaugccucaaaga

SEQ ID NO: 1048160 - RNA, 19 nt, Homo sapiens
  misc_RNA (1)...(19): siRNA sense strand
aagagaaucuguggaacuu

SEQ ID NO: 1048161 - RNA, 19 nt, Homo sapiens
  misc_RNA (1)...(19): siRNA sense strand
ugagagagaguuugacgaa

SEQ ID NO: 1048162 - RNA, 19 nt, Homo sapiens
  misc_RNA (1)...(19): siRNA sense strand
aaaauggucucgagaaaga

SEQ ID NO: 1048163 - RNA, 19 nt, Homo sapiens
  misc_RNA (1)...(19): siRNA sense strand
gcuacaaauuacauguuga

SEQ ID NO: 1048164 - RNA, 19 nt, Homo sapiens
  misc_RNA (1)...(19): siRNA sense strand
aagaggaggauacauauga

SEQ ID NO: 1048165 - RNA, 19 nt, Homo sapiens
  misc_RNA (1)...(19): siRNA sense strand
gaagaggaggauacauaug

SEQ ID NO: 1048166 - RNA, 19 nt, Homo sapiens
  misc_RNA (1)...(19): siRNA sense strand
guacggagacggcaaggau

SEQ ID NO: 1048167 - RNA, 19 nt, Homo sapiens
  misc_RNA (1)...(19): siRNA sense strand
caacaaggagucugaagag

SEQ ID NO: 1048168 - RNA, 19 nt, Homo sapiens
  misc_RNA (1)...(19): siRNA sense strand
gaguugucaucaucaagaa

SEQ ID NO: 1048169 - RNA, 19 nt, Homo sapiens
  misc_RNA (1)...(19): siRNA sense strand
gcgaugaugaugacgauga

SEQ ID NO: 1048170 - RNA, 19 nt, Homo sapiens
  misc_RNA (1)...(19): siRNA sense strand
agaagaagcugauggcauu

SEQ ID NO: 1048171 - RNA, 19 nt, Homo sapiens
  misc_RNA (1)...(19): siRNA sense strand
gcugggagcugccaagaug

SEQ ID NO: 1048172 - RNA, 19 nt, Homo sapiens
  misc_RNA (1)...(19): siRNA sense strand
gggaagcuccucacaagaa

SEQ ID NO: 1048173 - RNA, 19 nt, Homo sapiens
  misc_RNA (1)...(19): siRNA sense strand
ccugucggcucacaagaua

SEQ ID NO: 1048174 - RNA, 19 nt, Homo sapiens
  misc_RNA (1)...(19): siRNA sense strand
gcccugcacuuucuagaga

SEQ ID NO: 1048175 - RNA, 19 nt, Homo sapiens
  misc_RNA (1)...(19): siRNA sense strand
cagggaagcuccucacaag

SEQ ID NO: 1048176 - RNA, 19 nt, Homo sapiens
  misc_RNA (1)...(19): siRNA sense strand
ggaagcuccucacaagaag

SEQ ID NO: 1048177 - RNA, 19 nt, Homo sapiens
  misc_RNA (1)...(19): siRNA sense strand
gcaacaaggagacggugaa

SEQ ID NO: 1048178 - RNA, 19 nt, Homo sapiens
  misc_RNA (1)...(19): siRNA sense strand
caugccagcuuaaggacaa

SEQ ID NO: 1048179 - RNA, 19 nt, Homo sapiens
  misc_RNA (1)...(19): siRNA sense strand
guccauggccgaccaagaa

SEQ ID NO: 1048180 - RNA, 19 nt, Homo sapiens
  misc_RNA (1)...(19): siRNA sense strand
ucaggaagaugggugugaa

SEQ ID NO: 1048181 - RNA, 19 nt, Homo sapiens
  misc_RNA (1)...(19): siRNA sense strand
ucauggcucuggacgcauu

SEQ ID NO: 1048182 - RNA, 19 nt, Homo sapiens
  misc_RNA (1)...(19): siRNA sense strand
caucagcucuguggagaag

SEQ ID NO: 1048183 - RNA, 19 nt, Homo sapiens
  misc_RNA (1)...(19): siRNA sense strand
gcucucugcucaucaaugc

SEQ ID NO: 1048184 - RNA, 19 nt, Homo sapiens
  misc_RNA (1)...(19): siRNA sense strand
ucagcucuguggagaagaa

SEQ ID NO: 1048185 - RNA, 19 nt, Homo sapiens
  misc_RNA (1)...(19): siRNA sense strand
cagcugcccuuaagaagac

SEQ ID NO: 1048186 - RNA, 19 nt, Homo sapiens
  misc_RNA (1)...(19): siRNA sense strand
aaagugauucgcugcauga

SEQ ID NO: 1048187 - RNA, 19 nt, Homo sapiens
  misc_RNA (1)...(19): siRNA sense strand
cacgagagcuacaguccau

SEQ ID NO: 1048188 - RNA, 19 nt, Homo sapiens
  misc_RNA (1)...(19): siRNA sense strand
gcaguugaggccuccugua

SEQ ID NO: 1048189 - RNA, 19 nt, Homo sapiens
  misc_RNA (1)...(19): siRNA sense strand
acaaggagacggugaagca

SEQ ID NO: 1048190 - RNA, 19 nt, Homo sapiens
  misc_RNA (1)...(19): siRNA sense strand
ccaaagugauucgcugcau

SEQ ID NO: 1048191 - RNA, 19 nt, Homo sapiens
  misc_RNA (1)...(19): siRNA sense strand
cauccacgcccugcacuuu

SEQ ID NO: 1048192 - RNA, 19 nt, Homo sapiens
  misc_RNA (1)...(19): siRNA sense strand
caggaaggcgcuacagugu

SEQ ID NO: 1048193 - RNA, 19 nt, Homo sapiens
  misc_RNA (1)...(19): siRNA sense strand
caguugaggccuccuguau

SEQ ID NO: 1048194 - RNA, 19 nt, Homo sapiens
  misc_RNA (1)...(19): siRNA sense strand
ccagcugcccuuaagaaga

SEQ ID NO: 1048195 - RNA, 19 nt, Homo sapiens
  misc_RNA (1)...(19): siRNA sense strand
guugaggccuccuguaucc

SEQ ID NO: 1048196 - RNA, 19 nt, Homo sapiens
  misc_RNA (1)...(19): siRNA sense strand
ccagggaagcuccucacaa

SEQ ID NO: 1048197 - RNA, 19 nt, Homo sapiens
  misc_RNA (1)...(19): siRNA sense strand
uauccgaacacgagagcua

SEQ ID NO: 1048198 - RNA, 19 nt, Homo sapiens
  misc_RNA (1)...(19): siRNA sense strand
cuucugcacugagguggaa

SEQ ID NO: 1048199 - RNA, 19 nt, Homo sapiens
  misc_RNA (1)...(19): siRNA sense strand
gggccugccuaugcauuca

SEQ ID NO: 1048200 - RNA, 19 nt, Homo sapiens
  misc_RNA (1)...(19): siRNA sense strand
ggacucagccugcuuauug

SEQ ID NO: 1048201 - RNA, 19 nt, Homo sapiens
  misc_RNA (1)...(19): siRNA sense strand
ggaaugacaugaacacuag

SEQ ID NO: 1048202 - RNA, 19 nt, Homo sapiens
  misc_RNA (1)...(19): siRNA sense strand
ucaaagagguuguggauuc

SEQ ID NO: 1048203 - RNA, 19 nt, Homo sapiens
  misc_RNA (1)...(19): siRNA sense strand
gaugaaggcucuagcaugu

SEQ ID NO: 1048204 - RNA, 19 nt, Homo sapiens
  misc_RNA (1)...(19): siRNA sense strand
guacagaagugaccucuca

SEQ ID NO: 1048205 - RNA, 19 nt, Homo sapiens
  misc_RNA (1)...(19): siRNA sense strand
caucaucccugaagucaaa

SEQ ID NO: 1048206 - RNA, 19 nt, Homo sapiens
  misc_RNA (1)...(19): siRNA sense strand
guacagcucuuaucguuca

SEQ ID NO: 1048207 - RNA, 19 nt, Homo sapiens
  misc_RNA (1)...(19): siRNA sense strand
gaaacagccucaggaagaa

SEQ ID NO: 1048208 - RNA, 19 nt, Homo sapiens
  misc_RNA (1)...(19): siRNA sense strand
gagaagugcuggacaaagu

SEQ ID NO: 1048209 - RNA, 19 nt, Homo sapiens
  misc_RNA (1)...(19): siRNA sense strand
ggagagaagugcuggacaa

SEQ ID NO: 1048210 - RNA, 19 nt, Homo sapiens
  misc_RNA (1)...(19): siRNA sense strand
ggaggaagauaaagcaaca

SEQ ID NO: 1048211 - RNA, 19 nt, Homo sapiens
  misc_RNA (1)...(19): siRNA sense strand
gagcaaauuugauucucuu

SEQ ID NO: 1048212 - RNA, 19 nt, Homo sapiens
  misc_RNA (1)...(19): siRNA sense strand
ugaaaugucucuuccagau

SEQ ID NO: 1048213 - RNA, 19 nt, Homo sapiens
  misc_RNA (1)...(19): siRNA sense strand
ugacggagaucuuggacaa

SEQ ID NO: 1048214 - RNA, 19 nt, Homo sapiens
  misc_RNA (1)...(19): siRNA sense strand
gcgcagugauggagaagaa

SEQ ID NO: 1048215 - RNA, 19 nt, Homo sapiens
  misc_RNA (1)...(19): siRNA sense strand
gcaagaggagcuauucuga

SEQ ID NO: 1048216 - RNA, 19 nt, Homo sapiens
  misc_RNA (1)...(19): siRNA sense strand
gaacccaccugccaaugca

SEQ ID NO: 1048217 - RNA, 19 nt, Homo sapiens
  misc_RNA (1)...(19): siRNA sense strand
ucagugagauuggaauuga

SEQ ID NO: 1048218 - RNA, 19 nt, Homo sapiens
  misc_RNA (1)...(19): siRNA sense strand
gaaagggcaggaagaagaa

SEQ ID NO: 1048219 - RNA, 19 nt, Homo sapiens
  misc_RNA (1)...(19): siRNA sense strand
ggacaaggaccuggaaaug

SEQ ID NO: 1048220 - RNA, 19 nt, Homo sapiens
  misc_RNA (1)...(19): siRNA sense strand
gcucuuaucguucacauga

SEQ ID NO: 1048221 - RNA, 19 nt, Homo sapiens
  misc_RNA (1)...(19): siRNA sense strand
ccacagggcuggcagacau

SEQ ID NO: 1048222 - RNA, 19 nt, Homo sapiens
  misc_RNA (1)...(19): siRNA sense strand
acaaggaccuggaaaugga

SEQ ID NO: 1048223 - RNA, 19 nt, Homo sapiens
  misc_RNA (1)...(19): siRNA sense strand
guagacaacuugcagaaac

SEQ ID NO: 1048224 - RNA, 19 nt, Homo sapiens
  misc_RNA (1)...(19): siRNA sense strand
gcagagaagcccugaaaca

SEQ ID NO: 1048225 - RNA, 19 nt, Homo sapiens
  misc_RNA (1)...(19): siRNA sense strand
ccuaagaacuuggagagaa

SEQ ID NO: 1048226 - RNA, 19 nt, Homo sapiens
  misc_RNA (1)...(19): siRNA sense strand
gcaaaccuguggccucauc

SEQ ID NO: 1048227 - RNA, 19 nt, Homo sapiens
  misc_RNA (1)...(19): siRNA sense strand
gaggagcuauucugaucuu

SEQ ID NO: 1048228 - RNA, 19 nt, Homo sapiens
  misc_RNA (1)...(19): siRNA sense strand
gaaagugguaccagugcua

SEQ ID NO: 1048229 - RNA, 19 nt, Homo sapiens
  misc_RNA (1)...(19): siRNA sense strand
gcagccagaugauuugaca

SEQ ID NO: 1048230 - RNA, 19 nt, Homo sapiens
  misc_RNA (1)...(19): siRNA sense strand
ugaaacaggcccagaagaa

SEQ ID NO: 1048231 - RNA, 19 nt, Homo sapiens
  misc_RNA (1)...(19): siRNA sense strand
ccauggagcuccucagaca

SEQ ID NO: 1048232 - RNA, 19 nt, Homo sapiens
  misc_RNA (1)...(19): siRNA sense strand
gguuguggauucucugaaa

SEQ ID NO: 1048233 - RNA, 19 nt, Homo sapiens
  misc_RNA (1)...(19): siRNA sense strand
cgaaagggcaggaagaaga

SEQ ID NO: 1048234 - RNA, 19 nt, Homo sapiens
  misc_RNA (1)...(19): siRNA sense strand
ggaaauggaggagcuaaug

SEQ ID NO: 1048235 - RNA, 19 nt, Homo sapiens
  misc_RNA (1)...(19): siRNA sense strand
aaaggagcgugcaauagaa

SEQ ID NO: 1048236 - RNA, 19 nt, Homo sapiens
  misc_RNA (1)...(19): siRNA sense strand
gguacaggcuuucaucagu

SEQ ID NO: 1048237 - RNA, 19 nt, Homo sapiens
  misc_RNA (1)...(19): siRNA sense strand
gcagcugccuuggagaauu

SEQ ID NO: 1048238 - RNA, 19 nt, Homo sapiens
  misc_RNA (1)...(19): siRNA sense strand
agaaacagccucaggaaga

SEQ ID NO: 1048239 - RNA, 19 nt, Homo sapiens
  misc_RNA (1)...(19): siRNA sense strand
gcagaaacagccucaggaa

SEQ ID NO: 1048240 - RNA, 19 nt, Homo sapiens
  misc_RNA (1)...(19): siRNA sense strand
cagaugagcagcccuuuga

SEQ ID NO: 1048241 - RNA, 19 nt, Homo sapiens
  misc_RNA (1)...(19): siRNA sense strand
aaagaugccugcccuaguc

SEQ ID NO: 1048242 - RNA, 19 nt, Homo sapiens
  misc_RNA (1)...(19): siRNA sense strand
ggaggcauuugcagccauu

SEQ ID NO: 1048243 - RNA, 19 nt, Homo sapiens
  misc_RNA (1)...(19): siRNA sense strand
gagcagcccuuugaucucu

SEQ ID NO: 1048244 - RNA, 19 nt, Homo sapiens
  misc_RNA (1)...(19): siRNA sense strand
ggccugugcuccuggauga

SEQ ID NO: 1048245 - RNA, 19 nt, Homo sapiens
  misc_RNA (1)...(19): siRNA sense strand
ucccuuaucucccucauug

SEQ ID NO: 1048246 - RNA, 19 nt, Homo sapiens
  misc_RNA (1)...(19): siRNA sense strand
gcaaauuugauucucuuga

SEQ ID NO: 1048247 - RNA, 19 nt, Homo sapiens
  misc_RNA (1)...(19): siRNA sense strand
aagaggagcuauucugauc

SEQ ID NO: 1048248 - RNA, 19 nt, Homo sapiens
  misc_RNA (1)...(19): siRNA sense strand
ugagaaaucagaagccaaa

SEQ ID NO: 1048249 - RNA, 19 nt, Homo sapiens
  misc_RNA (1)...(19): siRNA sense strand
agacagagccuaccaaggu

SEQ ID NO: 1048250 - RNA, 19 nt, Homo sapiens
  misc_RNA (1)...(19): siRNA sense strand
ggaagaagaagagcaagga

SEQ ID NO: 1048251 - RNA, 19 nt, Homo sapiens
  misc_RNA (1)...(19): siRNA sense strand
guaacccucugcucugaga

SEQ ID NO: 1048252 - RNA, 19 nt, Homo sapiens
  misc_RNA (1)...(19): siRNA sense strand
cagcuucaguggccagauu

SEQ ID NO: 1048253 - RNA, 19 nt, Homo sapiens
  misc_RNA (1)...(19): siRNA sense strand
gcagcgcagugauggagaa

SEQ ID NO: 1048254 - RNA, 19 nt, Homo sapiens
  misc_RNA (1)...(19): siRNA sense strand
cgguacagcucuuaucguu

SEQ ID NO: 1048255 - RNA, 19 nt, Homo sapiens
  misc_RNA (1)...(19): siRNA sense strand
uggcgaagguccagcugua

SEQ ID NO: 1048256 - RNA, 19 nt, Homo sapiens
  misc_RNA (1)...(19): siRNA sense strand
gcaguucgccuccaagaag

SEQ ID NO: 1048257 - RNA, 19 nt, Homo sapiens
  misc_RNA (1)...(19): siRNA sense strand
caacccaucucucauuggu

SEQ ID NO: 1048258 - RNA, 19 nt, Homo sapiens
  misc_RNA (1)...(19): siRNA sense strand
aaaguaguccugcuaaaga

SEQ ID NO: 1048259 - RNA, 19 nt, Homo sapiens
  misc_RNA (1)...(19): siRNA sense strand
gcaggaagaagaagagcaa

SEQ ID NO: 1048260 - RNA, 19 nt, Homo sapiens
  misc_RNA (1)...(19): siRNA sense strand
gaaccuuucuccauuugac

SEQ ID NO: 1048261 - RNA, 19 nt, Homo sapiens
  misc_RNA (1)...(19): siRNA sense strand
uugauucucuugacuuuga

SEQ ID NO: 1048262 - RNA, 19 nt, Homo sapiens
  misc_RNA (1)...(19): siRNA sense strand
gcccuuugaucucugcuuu

SEQ ID NO: 1048263 - RNA, 19 nt, Homo sapiens
  misc_RNA (1)...(19): siRNA sense strand
cacaagagguggcgaaggu

SEQ ID NO: 1048264 - RNA, 19 nt, Homo sapiens
  misc_RNA (1)...(19): siRNA sense strand
ugaaggcucuagcaugugu

SEQ ID NO: 1048265 - RNA, 19 nt, Homo sapiens
  misc_RNA (1)...(19): siRNA sense strand
aguacuaccugauccguuu

SEQ ID NO: 1048266 - RNA, 19 nt, Homo sapiens
  misc_RNA (1)...(19): siRNA sense strand
caaauuugauucucuugac

SEQ ID NO: 1048267 - RNA, 19 nt, Homo sapiens
  misc_RNA (1)...(19): siRNA sense strand
ucacaugaccauuaccaaa

SEQ ID NO: 1048268 - RNA, 19 nt, Homo sapiens
  misc_RNA (1)...(19): siRNA sense strand
ccugaagccugaaggaguu

SEQ ID NO: 1048269 - RNA, 19 nt, Homo sapiens
  misc_RNA (1)...(19): siRNA sense strand
gcccugaggaggaagauaa

SEQ ID NO: 1048270 - RNA, 19 nt, Homo sapiens
  misc_RNA (1)...(19): siRNA sense strand
acaaaguaguccugcuaaa

SEQ ID NO: 1048271 - RNA, 19 nt, Homo sapiens
  misc_RNA (1)...(19): siRNA sense strand
gagcaucuccucccugagu

SEQ ID NO: 1048272 - RNA, 19 nt, Homo sapiens
  misc_RNA (1)...(19): siRNA sense strand
ucacggcucugacggagau

SEQ ID NO: 1048273 - RNA, 19 nt, Homo sapiens
  misc_RNA (1)...(19): siRNA sense strand
cuaguuaaguccagaccaa

SEQ ID NO: 1048274 - RNA, 19 nt, Homo sapiens
  misc_RNA (1)...(19): siRNA sense strand
gcguagugcuggagauugu

SEQ ID NO: 1048275 - RNA, 19 nt, Homo sapiens
  misc_RNA (1)...(19): siRNA sense strand
ggagaauucuagcccuaag

SEQ ID NO: 1048276 - RNA, 19 nt, Homo sapiens
  misc_RNA (1)...(19): siRNA sense strand
ucaaaccugucuuguccuu

SEQ ID NO: 1048277 - RNA, 19 nt, Homo sapiens
  misc_RNA (1)...(19): siRNA sense strand
ugagccaccuguaagcaaa

SEQ ID NO: 1048278 - RNA, 19 nt, Homo sapiens
  misc_RNA (1)...(19): siRNA sense strand
gacaaaguaguccugcuaa

SEQ ID NO: 1048279 - RNA, 19 nt, Homo sapiens
  misc_RNA (1)...(19): siRNA sense strand
gagcuugacaacuguguga

SEQ ID NO: 1048280 - RNA, 19 nt, Homo sapiens
  misc_RNA (1)...(19): siRNA sense strand
ccaaaccaauccuauacca

SEQ ID NO: 1048281 - RNA, 19 nt, Homo sapiens
  misc_RNA (1)...(19): siRNA sense strand
gacucagccugcuuauuga

SEQ ID NO: 1048282 - RNA, 19 nt, Homo sapiens
  misc_RNA (1)...(19): siRNA sense strand
caaccggacuagcgaagca

SEQ ID NO: 1048283 - RNA, 19 nt, Homo sapiens
  misc_RNA (1)...(19): siRNA sense strand
gcaguuggcccuguucuag

SEQ ID NO: 1048284 - RNA, 19 nt, Homo sapiens
  misc_RNA (1)...(19): siRNA sense strand
aaagagggguugucauuga

SEQ ID NO: 1048285 - RNA, 19 nt, Homo sapiens
  misc_RNA (1)...(19): siRNA sense strand
caaagagguuguggauucu

SEQ ID NO: 1048286 - RNA, 19 nt, Homo sapiens
  misc_RNA (1)...(19): siRNA sense strand
uauccaaaccaauccuaua

SEQ ID NO: 1048287 - RNA, 19 nt, Homo sapiens
  misc_RNA (1)...(19): siRNA sense strand
uaaagaaggcccucuagac

SEQ ID NO: 1048288 - RNA, 19 nt, Homo sapiens
  misc_RNA (1)...(19): siRNA sense strand
caaaguaguccugcuaaag

SEQ ID NO: 1048289 - RNA, 19 nt, Homo sapiens
  misc_RNA (1)...(19): siRNA sense strand
cagcugccuuggagaauuc

SEQ ID NO: 1048290 - RNA, 19 nt, Homo sapiens
  misc_RNA (1)...(19): siRNA sense strand
ggagcagccagaugauuug

SEQ ID NO: 1048291 - RNA, 19 nt, Homo sapiens
  misc_RNA (1)...(19): siRNA sense strand
gagcuauucugaucuugac

SEQ ID NO: 1048292 - RNA, 19 nt, Homo sapiens
  misc_RNA (1)...(19): siRNA sense strand
ggagcuauucugaucuuga

SEQ ID NO: 1048293 - RNA, 19 nt, Homo sapiens
  misc_RNA (1)...(19): siRNA sense strand
aaacaccccuugagauuug

SEQ ID NO: 1048294 - RNA, 19 nt, Homo sapiens
  misc_RNA (1)...(19): siRNA sense strand
gcagcaacgccaagcagaa

SEQ ID NO: 1048295 - RNA, 19 nt, Homo sapiens
  misc_RNA (1)...(19): siRNA sense strand
aaagcuggcugacacuauc

SEQ ID NO: 1048296 - RNA, 19 nt, Homo sapiens
  misc_RNA (1)...(19): siRNA sense strand
cuaagaacuuggagagaag

SEQ ID NO: 1048297 - RNA, 19 nt, Homo sapiens
  misc_RNA (1)...(19): siRNA sense strand
cuaccaagguggaggucaa

SEQ ID NO: 1048298 - RNA, 19 nt, Homo sapiens
  misc_RNA (1)...(19): siRNA sense strand
cuucgucacuuaucgcuau

SEQ ID NO: 1048299 - RNA, 19 nt, Homo sapiens
  misc_RNA (1)...(19): siRNA sense strand
ggagcaguuugagaaauca

SEQ ID NO: 1048300 - RNA, 19 nt, Homo sapiens
  misc_RNA (1)...(19): siRNA sense strand
gcuguaaccuguuuaucua

SEQ ID NO: 1048301 - RNA, 19 nt, Homo sapiens
  misc_RNA (1)...(19): siRNA sense strand
gcaauaucauuuccuccaa

SEQ ID NO: 1048302 - RNA, 19 nt, Homo sapiens
  misc_RNA (1)...(19): siRNA sense strand
acacggagcugacgcagau

SEQ ID NO: 1048303 - RNA, 19 nt, Homo sapiens
  misc_RNA (1)...(19): siRNA sense strand
ggaccuggacgccaucaaa

SEQ ID NO: 1048304 - RNA, 19 nt, Homo sapiens
  misc_RNA (1)...(19): siRNA sense strand
cgagggcuguaaccuguuu

SEQ ID NO: 1048305 - RNA, 19 nt, Homo sapiens
  misc_RNA (1)...(19): siRNA sense strand
gaaaccgucuaugccaaug

SEQ ID NO: 1048306 - RNA, 19 nt, Homo sapiens
  misc_RNA (1)...(19): siRNA sense strand
gcugugcuuucgugaaguu

SEQ ID NO: 1048307 - RNA, 19 nt, Homo sapiens
  misc_RNA (1)...(19): siRNA sense strand
ccaaccagagcaaguguuu

SEQ ID NO: 1048308 - RNA, 19 nt, Homo sapiens
  misc_RNA (1)...(19): siRNA sense strand
gcaugaagaggcucaaagu

SEQ ID NO: 1048309 - RNA, 19 nt, Homo sapiens
  misc_RNA (1)...(19): siRNA sense strand
ggaaaccgucuaugccaau

SEQ ID NO: 1048310 - RNA, 19 nt, Homo sapiens
  misc_RNA (1)...(19): siRNA sense strand
gcugugccuuccucaccua

SEQ ID NO: 1048311 - RNA, 19 nt, Homo sapiens
  misc_RNA (1)...(19): siRNA sense strand
guagggaccggaagcuguu

SEQ ID NO: 1048312 - RNA, 19 nt, Homo sapiens
  misc_RNA (1)...(19): siRNA sense strand
ggugaagccugcggacagu

SEQ ID NO: 1048313 - RNA, 19 nt, Homo sapiens
  misc_RNA (1)...(19): siRNA sense strand
gcaggugucgugcccuuuc

SEQ ID NO: 1048314 - RNA, 19 nt, Homo sapiens
  misc_RNA (1)...(19): siRNA sense strand
caucaccaauggcuuugca

SEQ ID NO: 1048315 - RNA, 19 nt, Homo sapiens
  misc_RNA (1)...(19): siRNA sense strand
ggacgagaaggaccucaag

SEQ ID NO: 1048316 - RNA, 19 nt, Homo sapiens
  misc_RNA (1)...(19): siRNA sense strand
gaagaccuugcccggaaug

SEQ ID NO: 1048317 - RNA, 19 nt, Homo sapiens
  misc_RNA (1)...(19): siRNA sense strand
ucuccggaguccagcagua

SEQ ID NO: 1048318 - RNA, 19 nt, Homo sapiens
  misc_RNA (1)...(19): siRNA sense strand
caugaacggcuuccagauc

SEQ ID NO: 1048319 - RNA, 19 nt, Homo sapiens
  misc_RNA (1)...(19): siRNA sense strand
gaaggucccgagggcugua

SEQ ID NO: 1048320 - RNA, 19 nt, Homo sapiens
  misc_RNA (1)...(19): siRNA sense strand
cccaggcucucaugcaaca

SEQ ID NO: 1048321 - RNA, 19 nt, Homo sapiens
  misc_RNA (1)...(19): siRNA sense strand
gcucaaaguccagcugaag

SEQ ID NO: 1048322 - RNA, 19 nt, Homo sapiens
  misc_RNA (1)...(19): siRNA sense strand
ggcuguaaccuguuuaucu

SEQ ID NO: 1048323 - RNA, 19 nt, Homo sapiens
  misc_RNA (1)...(19): siRNA sense strand
gagcuaccaaccagagcaa

SEQ ID NO: 1048324 - RNA, 19 nt, Homo sapiens
  misc_RNA (1)...(19): siRNA sense strand
uuccuacccuucggcaaua

SEQ ID NO: 1048325 - RNA, 19 nt, Homo sapiens
  misc_RNA (1)...(19): siRNA sense strand
cgcccaggcucucaugcaa

SEQ ID NO: 1048326 - RNA, 19 nt, Homo sapiens
  misc_RNA (1)...(19): siRNA sense strand
cagggauuccgccaucaaa

SEQ ID NO: 1048327 - RNA, 19 nt, Homo sapiens
  misc_RNA (1)...(19): siRNA sense strand
ugaagccugcggacaguga

SEQ ID NO: 1048328 - RNA, 19 nt, Homo sapiens
  misc_RNA (1)...(19): siRNA sense strand
agaagaccuugcccggaau

SEQ ID NO: 1048329 - RNA, 19 nt, Homo sapiens
  misc_RNA (1)...(19): siRNA sense strand
gcaaguguuucggcuucgu

SEQ ID NO: 1048330 - RNA, 19 nt, Homo sapiens
  misc_RNA (1)...(19): siRNA sense strand
guuccuacccuucggcaau

SEQ ID NO: 1048331 - RNA, 19 nt, Homo sapiens
  misc_RNA (1)...(19): siRNA sense strand
gaagccugcggacagugaa

SEQ ID NO: 1048332 - RNA, 19 nt, Homo sapiens
  misc_RNA (1)...(19): siRNA sense strand
gcagccauccaggccauga

SEQ ID NO: 1048333 - RNA, 19 nt, Homo sapiens
  misc_RNA (1)...(19): siRNA sense strand
ggacgccaucaaacucuuc

SEQ ID NO: 1048334 - RNA, 19 nt, Homo sapiens
  misc_RNA (1)...(19): siRNA sense strand
aggcugugcuuucgugaag

SEQ ID NO: 1048335 - RNA, 19 nt, Homo sapiens
  misc_RNA (1)...(19): siRNA sense strand
gagaagcuaccgagacuug

SEQ ID NO: 1048336 - RNA, 19 nt, Homo sapiens
  misc_RNA (1)...(19): siRNA sense strand
ggaguccagugaagaggaa

SEQ ID NO: 1048337 - RNA, 19 nt, Homo sapiens
  misc_RNA (1)...(19): siRNA sense strand
gaugagaaguuggaaagag

SEQ ID NO: 1048338 - RNA, 19 nt, Homo sapiens
  misc_RNA (1)...(19): siRNA sense strand
gaaaggcaucggagcaaga

SEQ ID NO: 1048339 - RNA, 19 nt, Homo sapiens
  misc_RNA (1)...(19): siRNA sense strand
cuaagaagagccacaagaa

SEQ ID NO: 1048340 - RNA, 19 nt, Homo sapiens
  misc_RNA (1)...(19): siRNA sense strand
aagaagagccacaagaaga

SEQ ID NO: 1048341 - RNA, 19 nt, Homo sapiens
  misc_RNA (1)...(19): siRNA sense strand
ggucaucaccguagucaca

SEQ ID NO: 1048342 - RNA, 19 nt, Homo sapiens
  misc_RNA (1)...(19): siRNA sense strand
gagaaaggcaucggagcaa

SEQ ID NO: 1048343 - RNA, 19 nt, Homo sapiens
  misc_RNA (1)...(19): siRNA sense strand
agaggaggaugagaaguug

SEQ ID NO: 1048344 - RNA, 19 nt, Homo sapiens
  misc_RNA (1)...(19): siRNA sense strand
aagaagaggaggaugagaa

SEQ ID NO: 1048345 - RNA, 19 nt, Homo sapiens
  misc_RNA (1)...(19): siRNA sense strand
gaagcuaccgagacuugga

SEQ ID NO: 1048346 - RNA, 19 nt, Homo sapiens
  misc_RNA (1)...(19): siRNA sense strand
aagaggaggaugagaaguu

SEQ ID NO: 1048347 - RNA, 19 nt, Homo sapiens
  misc_RNA (1)...(19): siRNA sense strand
cggagaagcuaccgagacu

SEQ ID NO: 1048348 - RNA, 19 nt, Homo sapiens
  misc_RNA (1)...(19): siRNA sense strand
ccagugaagaggaagaaga

SEQ ID NO: 1048349 - RNA, 19 nt, Homo sapiens
  misc_RNA (1)...(19): siRNA sense strand
ccggagagggaaugaguaa

SEQ ID NO: 1048350 - RNA, 19 nt, Homo sapiens
  misc_RNA (1)...(19): siRNA sense strand
uaagaagagccacaagaag

SEQ ID NO: 1048351 - RNA, 19 nt, Homo sapiens
  misc_RNA (1)...(19): siRNA sense strand
cacaggagccacucaaagu

SEQ ID NO: 1048352 - RNA, 19 nt, Homo sapiens
  misc_RNA (1)...(19): siRNA sense strand
gaagaagaggaggaugaga

SEQ ID NO: 1048353 - RNA, 19 nt, Homo sapiens
  misc_RNA (1)...(19): siRNA sense strand
ggaagaagaggaggaugag

SEQ ID NO: 1048354 - RNA, 19 nt, Homo sapiens
  misc_RNA (1)...(19): siRNA sense strand
caucggagcaagaguccaa

SEQ ID NO: 1048355 - RNA, 19 nt, Homo sapiens
  misc_RNA (1)...(19): siRNA sense strand
gacacaggagccacucaaa

SEQ ID NO: 1048356 - RNA, 19 nt, Homo sapiens
  misc_RNA (1)...(19): siRNA sense strand
gaggaugagaaguuggaaa

SEQ ID NO: 1048357 - RNA, 19 nt, Homo sapiens
  misc_RNA (1)...(19): siRNA sense strand
gaagagccggagagggaau

SEQ ID NO: 1048358 - RNA, 19 nt, Homo sapiens
  misc_RNA (1)...(19): siRNA sense strand
ucuaagaagagccacaaga

SEQ ID NO: 1048359 - RNA, 19 nt, Homo sapiens
  misc_RNA (1)...(19): siRNA sense strand
cggcacagaucccguucca

SEQ ID NO: 1048360 - RNA, 19 nt, Homo sapiens
  misc_RNA (1)...(19): siRNA sense strand
ggucuaagaagagccacaa

SEQ ID NO: 1048361 - RNA, 19 nt, Homo sapiens
  misc_RNA (1)...(19): siRNA sense strand
aggaagaagaggaggauga

SEQ ID NO: 1048362 - RNA, 19 nt, Homo sapiens
  misc_RNA (1)...(19): siRNA sense strand
ggaugagaaguuggaaaga

SEQ ID NO: 1048363 - RNA, 19 nt, Homo sapiens
  misc_RNA (1)...(19): siRNA sense strand
augagaaguuggaaagagu

SEQ ID NO: 1048364 - RNA, 19 nt, Homo sapiens
  misc_RNA (1)...(19): siRNA sense strand
gaggagugcuuuggacuua

SEQ ID NO: 1048365 - RNA, 19 nt, Homo sapiens
  misc_RNA (1)...(19): siRNA sense strand
gaaacgcuauguauuagag

SEQ ID NO: 1048366 - RNA, 19 nt, Homo sapiens
  misc_RNA (1)...(19): siRNA sense strand
cgauaaagccauggaguua

SEQ ID NO: 1048367 - RNA, 19 nt, Homo sapiens
  misc_RNA (1)...(19): siRNA sense strand
gcaccaacccucaauaucu

SEQ ID NO: 1048368 - RNA, 19 nt, Homo sapiens
  misc_RNA (1)...(19): siRNA sense strand
gaaucuaugaguccaagua

SEQ ID NO: 1048369 - RNA, 19 nt, Homo sapiens
  misc_RNA (1)...(19): siRNA sense strand
gagaagcuaccgagacuug

SEQ ID NO: 1048370 - RNA, 19 nt, Homo sapiens
  misc_RNA (1)...(19): siRNA sense strand
gauaaagccauggaguuaa

SEQ ID NO: 1048371 - RNA, 19 nt, Homo sapiens
  misc_RNA (1)...(19): siRNA sense strand
ggaguccagugaagaggaa

SEQ ID NO: 1048372 - RNA, 19 nt, Homo sapiens
  misc_RNA (1)...(19): siRNA sense strand
cucaauaucugguggagaa

SEQ ID NO: 1048373 - RNA, 19 nt, Homo sapiens
  misc_RNA (1)...(19): siRNA sense strand
gaugagaaguuggaaagag

SEQ ID NO: 1048374 - RNA, 19 nt, Homo sapiens
  misc_RNA (1)...(19): siRNA sense strand
gaaaggcaucggagcaaga

SEQ ID NO: 1048375 - RNA, 19 nt, Homo sapiens
  misc_RNA (1)...(19): siRNA sense strand
gaagaggacauggaugaug

SEQ ID NO: 1048376 - RNA, 19 nt, Homo sapiens
  misc_RNA (1)...(19): siRNA sense strand
ggacuuacagcugaacuug

SEQ ID NO: 1048377 - RNA, 19 nt, Homo sapiens
  misc_RNA (1)...(19): siRNA sense strand
cuaagaagagccacaagaa

SEQ ID NO: 1048378 - RNA, 19 nt, Homo sapiens
  misc_RNA (1)...(19): siRNA sense strand
aagaagagccacaagaaga

SEQ ID NO: 1048379 - RNA, 19 nt, Homo sapiens
  misc_RNA (1)...(19): siRNA sense strand
ggagugcuuuggacuuaca

SEQ ID NO: 1048380 - RNA, 19 nt, Homo sapiens
  misc_RNA (1)...(19): siRNA sense strand
ggucaucaccguagucaca

SEQ ID NO: 1048381 - RNA, 19 nt, Homo sapiens
  misc_RNA (1)...(19): siRNA sense strand
agaggaagcugagcaacug

SEQ ID NO: 1048382 - RNA, 19 nt, Homo sapiens
  misc_RNA (1)...(19): siRNA sense strand
caccaacccucaauaucug

SEQ ID NO: 1048383 - RNA, 19 nt, Homo sapiens
  misc_RNA (1)...(19): siRNA sense strand
gaacuuguagucgauaaag

SEQ ID NO: 1048384 - RNA, 19 nt, Homo sapiens
  misc_RNA (1)...(19): siRNA sense strand
uggaagaggacauggauga

SEQ ID NO: 1048385 - RNA, 19 nt, Homo sapiens
  misc_RNA (1)...(19): siRNA sense strand
gagaaaggcaucggagcaa

SEQ ID NO: 1048386 - RNA, 19 nt, Homo sapiens
  misc_RNA (1)...(19): siRNA sense strand
agaggaggaugagaaguug

SEQ ID NO: 1048387 - RNA, 19 nt, Homo sapiens
  misc_RNA (1)...(19): siRNA sense strand
aagaagaggaggaugagaa

SEQ ID NO: 1048388 - RNA, 19 nt, Homo sapiens
  misc_RNA (1)...(19): siRNA sense strand
gaagcuaccgagacuugga

SEQ ID NO: 1048389 - RNA, 19 nt, Homo sapiens
  misc_RNA (1)...(19): siRNA sense strand
auaaagccauggaguuaag

SEQ ID NO: 1048390 - RNA, 19 nt, Homo sapiens
  misc_RNA (1)...(19): siRNA sense strand
aagaggaggaugagaaguu

SEQ ID NO: 1048391 - RNA, 19 nt, Homo sapiens
  misc_RNA (1)...(19): siRNA sense strand
cggagaagcuaccgagacu

SEQ ID NO: 1048392 - RNA, 19 nt, Homo sapiens
  misc_RNA (1)...(19): siRNA sense strand
ccagugaagaggaagaaga

SEQ ID NO: 1048393 - RNA, 19 nt, Homo sapiens
  misc_RNA (1)...(19): siRNA sense strand
ccggagagggaaugaguaa

SEQ ID NO: 1048394 - RNA, 19 nt, Homo sapiens
  misc_RNA (1)...(19): siRNA sense strand
uaagaagagccacaagaag

SEQ ID NO: 1048395 - RNA, 19 nt, Homo sapiens
  misc_RNA (1)...(19): siRNA sense strand
cacaggagccacucaaagu

SEQ ID NO: 1048396 - RNA, 19 nt, Homo sapiens
  misc_RNA (1)...(19): siRNA sense strand
ggaagaagaggaggaugag

SEQ ID NO: 1048397 - RNA, 19 nt, Homo sapiens
  misc_RNA (1)...(19): siRNA sense strand
caucggagcaagaguccaa

SEQ ID NO: 1048398 - RNA, 19 nt, Homo sapiens
  misc_RNA (1)...(19): siRNA sense strand
gaagaagaggaggaugaga

SEQ ID NO: 1048399 - RNA, 19 nt, Homo sapiens
  misc_RNA (1)...(19): siRNA sense strand
guggagaagaucauucgaa

SEQ ID NO: 1048400 - RNA, 19 nt, Homo sapiens
  misc_RNA (1)...(19): siRNA sense strand
gaggaugagaaguuggaaa

SEQ ID NO: 1048401 - RNA, 19 nt, Homo sapiens
  misc_RNA (1)...(19): siRNA sense strand
gacacaggagccacucaaa

SEQ ID NO: 1048402 - RNA, 19 nt, Homo sapiens
  misc_RNA (1)...(19): siRNA sense strand
ggaagaggacauggaugau

SEQ ID NO: 1048403 - RNA, 19 nt, Homo sapiens
  misc_RNA (1)...(19): siRNA sense strand
gaagagccggagagggaau

SEQ ID NO: 1048404 - RNA, 19 nt, Homo sapiens
  misc_RNA (1)...(19): siRNA sense strand
ucgauaaagccauggaguu

SEQ ID NO: 1048405 - RNA, 19 nt, Homo sapiens
  misc_RNA (1)...(19): siRNA sense strand
ucuaagaagagccacaaga

SEQ ID NO: 1048406 - RNA, 19 nt, Homo sapiens
  misc_RNA (1)...(19): siRNA sense strand
gaguuagugcucuggaaga

SEQ ID NO: 1048407 - RNA, 19 nt, Homo sapiens
  misc_RNA (1)...(19): siRNA sense strand
cggcacagaucccguucca

SEQ ID NO: 1048408 - RNA, 19 nt, Homo sapiens
  misc_RNA (1)...(19): siRNA sense strand
ggucuaagaagagccacaa

SEQ ID NO: 1048409 - RNA, 19 nt, Homo sapiens
  misc_RNA (1)...(19): siRNA sense strand
cugaacuuguagucgauaa

SEQ ID NO: 1048410 - RNA, 19 nt, Homo sapiens
  misc_RNA (1)...(19): siRNA sense strand
aggaagaagaggaggauga

SEQ ID NO: 1048411 - RNA, 19 nt, Homo sapiens
  misc_RNA (1)...(19): siRNA sense strand
ggaugagaaguuggaaaga

SEQ ID NO: 1048412 - RNA, 19 nt, Homo sapiens
  misc_RNA (1)...(19): siRNA sense strand
ucgaguuagugcucuggaa

SEQ ID NO: 1048413 - RNA, 19 nt, Homo sapiens
  misc_RNA (1)...(19): siRNA sense strand
augagaaguuggaaagagu

SEQ ID NO: 1048414 - RNA, 19 nt, Homo sapiens
  misc_RNA (1)...(19): siRNA sense strand
ccgcguggauggccuauua

SEQ ID NO: 1048415 - RNA, 19 nt, Homo sapiens
  misc_RNA (1)...(19): siRNA sense strand
gcagcuaccugaaggaguu

SEQ ID NO: 1048416 - RNA, 19 nt, Homo sapiens
  misc_RNA (1)...(19): siRNA sense strand
caagggagaagcuguguuu

SEQ ID NO: 1048417 - RNA, 19 nt, Homo sapiens
  misc_RNA (1)...(19): siRNA sense strand
caacuucuccauccacaug

SEQ ID NO: 1048418 - RNA, 19 nt, Homo sapiens
  misc_RNA (1)...(19): siRNA sense strand
ugaaggaguuccgggacua

SEQ ID NO: 1048419 - RNA, 19 nt, Homo sapiens
  misc_RNA (1)...(19): siRNA sense strand
gagcucagcaggugaaacu

SEQ ID NO: 1048420 - RNA, 19 nt, Homo sapiens
  misc_RNA (1)...(19): siRNA sense strand
uggagauucuggacgcaaa

SEQ ID NO: 1048421 - RNA, 19 nt, Homo sapiens
  misc_RNA (1)...(19): siRNA sense strand
caaucacccucucuacacu

SEQ ID NO: 1048422 - RNA, 19 nt, Homo sapiens
  misc_RNA (1)...(19): siRNA sense strand
gcgcucgccaucuuuguga

SEQ ID NO: 1048423 - RNA, 19 nt, Homo sapiens
  misc_RNA (1)...(19): siRNA sense strand
gcauuacgagguggagauu

SEQ ID NO: 1048424 - RNA, 19 nt, Homo sapiens
  misc_RNA (1)...(19): siRNA sense strand
gcaccgcagcuaccugaag

SEQ ID NO: 1048425 - RNA, 19 nt, Homo sapiens
  misc_RNA (1)...(19): siRNA sense strand
agacgcggaagaucccaua

SEQ ID NO: 1048426 - RNA, 19 nt, Homo sapiens
  misc_RNA (1)...(19): siRNA sense strand
ccgcguggauggccuauua

SEQ ID NO: 1048427 - RNA, 19 nt, Homo sapiens
  misc_RNA (1)...(19): siRNA sense strand
gcagcuaccugaaggaguu

SEQ ID NO: 1048428 - RNA, 19 nt, Homo sapiens
  misc_RNA (1)...(19): siRNA sense strand
caagggagaagcuguguuu

SEQ ID NO: 1048429 - RNA, 19 nt, Homo sapiens
  misc_RNA (1)...(19): siRNA sense strand
caacuucuccauccacaug

SEQ ID NO: 1048430 - RNA, 19 nt, Homo sapiens
  misc_RNA (1)...(19): siRNA sense strand
ugaaggaguuccgggacua

SEQ ID NO: 1048431 - RNA, 19 nt, Homo sapiens
  misc_RNA (1)...(19): siRNA sense strand
gagcucagcaggugaaacu

SEQ ID NO: 1048432 - RNA, 19 nt, Homo sapiens
  misc_RNA (1)...(19): siRNA sense strand
uggagauucuggacgcaaa

SEQ ID NO: 1048433 - RNA, 19 nt, Homo sapiens
  misc_RNA (1)...(19): siRNA sense strand
caaucacccucucuacacu

SEQ ID NO: 1048434 - RNA, 19 nt, Homo sapiens
  misc_RNA (1)...(19): siRNA sense strand
gcgcucgccaucuuuguga

SEQ ID NO: 1048435 - RNA, 19 nt, Homo sapiens
  misc_RNA (1)...(19): siRNA sense strand
gcauuacgagguggagauu

SEQ ID NO: 1048436 - RNA, 19 nt, Homo sapiens
  misc_RNA (1)...(19): siRNA sense strand
gcaccgcagcuaccugaag

SEQ ID NO: 1048437 - RNA, 19 nt, Homo sapiens
  misc_RNA (1)...(19): siRNA sense strand
agacgcggaagaucccaua

SEQ ID NO: 1048438 - RNA, 19 nt, Homo sapiens
  misc_RNA (1)...(19): siRNA sense strand
ggagaaagcugcaaugaau

SEQ ID NO: 1048439 - RNA, 19 nt, Homo sapiens
  misc_RNA (1)...(19): siRNA sense strand
acaaagaacuggaaugaaa

SEQ ID NO: 1048440 - RNA, 19 nt, Homo sapiens
  misc_RNA (1)...(19): siRNA sense strand
ggaaugaaaugacagaguu

SEQ ID NO: 1048441 - RNA, 19 nt, Homo sapiens
  misc_RNA (1)...(19): siRNA sense strand
gcauugagauguuugauga

SEQ ID NO: 1048442 - RNA, 19 nt, Homo sapiens
  misc_RNA (1)...(19): siRNA sense strand
gaaugccucucaccacuua

SEQ ID NO: 1048443 - RNA, 19 nt, Homo sapiens
  misc_RNA (1)...(19): siRNA sense strand
gaaguuuccugcagaguuu

SEQ ID NO: 1048444 - RNA, 19 nt, Homo sapiens
  misc_RNA (1)...(19): siRNA sense strand
gaagucaucacaaaguuua

SEQ ID NO: 1048445 - RNA, 19 nt, Homo sapiens
  misc_RNA (1)...(19): siRNA sense strand
gaucuugguuugauucgua

SEQ ID NO: 1048446 - RNA, 19 nt, Homo sapiens
  misc_RNA (1)...(19): siRNA sense strand
gcaaagaccuccugguucu

SEQ ID NO: 1048447 - RNA, 19 nt, Homo sapiens
  misc_RNA (1)...(19): siRNA sense strand
gggcagaagucaucacaaa

SEQ ID NO: 1048448 - RNA, 19 nt, Homo sapiens
  misc_RNA (1)...(19): siRNA sense strand
gaacuggaaugaaaugaca

SEQ ID NO: 1048449 - RNA, 19 nt, Homo sapiens
  misc_RNA (1)...(19): siRNA sense strand
gcacuugcauugagauguu

SEQ ID NO: 1048450 - RNA, 19 nt, Homo sapiens
  misc_RNA (1)...(19): siRNA sense strand
aagaugaaaugauggcuua

SEQ ID NO: 1048451 - RNA, 19 nt, Homo sapiens
  misc_RNA (1)...(19): siRNA sense strand
cgacugcgauggcuucaaa

SEQ ID NO: 1048452 - RNA, 19 nt, Homo sapiens
  misc_RNA (1)...(19): siRNA sense strand
uuaaagaucugcuacuuca

SEQ ID NO: 1048453 - RNA, 19 nt, Homo sapiens
  misc_RNA (1)...(19): siRNA sense strand
ggaaauuaguggagucugu

SEQ ID NO: 1048454 - RNA, 19 nt, Homo sapiens
  misc_RNA (1)...(19): siRNA sense strand
caggauggccuaauuagua

SEQ ID NO: 1048455 - RNA, 19 nt, Homo sapiens
  misc_RNA (1)...(19): siRNA sense strand
guauuuaucuuccacugaa

SEQ ID NO: 1048456 - RNA, 19 nt, Homo sapiens
  misc_RNA (1)...(19): siRNA sense strand
gaucaggauggccuaauua

SEQ ID NO: 1048457 - RNA, 19 nt, Homo sapiens
  misc_RNA (1)...(19): siRNA sense strand
ggacagaggagaacaaagu

SEQ ID NO: 1048458 - RNA, 19 nt, Homo sapiens
  misc_RNA (1)...(19): siRNA sense strand
gauuaaagaucugcuacuu

SEQ ID NO: 1048459 - RNA, 19 nt, Homo sapiens
  misc_RNA (1)...(19): siRNA sense strand
ggaucucauucacugauua

SEQ ID NO: 1048460 - RNA, 19 nt, Homo sapiens
  misc_RNA (1)...(19): siRNA sense strand
gaaagcagcaacauuagau

SEQ ID NO: 1048461 - RNA, 19 nt, Homo sapiens
  misc_RNA (1)...(19): siRNA sense strand
gguacuggauucugaaguu

SEQ ID NO: 1048462 - RNA, 19 nt, Homo sapiens
  misc_RNA (1)...(19): siRNA sense strand
gcaaagggcagaagucauc

SEQ ID NO: 1048463 - RNA, 19 nt, Homo sapiens
  misc_RNA (1)...(19): siRNA sense strand
ugggaaagcagcaacauua

SEQ ID NO: 1048464 - RNA, 19 nt, Homo sapiens
  misc_RNA (1)...(19): siRNA sense strand
gaaaguauagcugccaauu

SEQ ID NO: 1048465 - RNA, 19 nt, Homo sapiens
  misc_RNA (1)...(19): siRNA sense strand
gcaaggauacaaaugcaaa

SEQ ID NO: 1048466 - RNA, 19 nt, Homo sapiens
  misc_RNA (1)...(19): siRNA sense strand
ggaguacacuugaaagacu

SEQ ID NO: 1048467 - RNA, 19 nt, Homo sapiens
  misc_RNA (1)...(19): siRNA sense strand
gaaauuaguggagucugua

SEQ ID NO: 1048468 - RNA, 19 nt, Homo sapiens
  misc_RNA (1)...(19): siRNA sense strand
gcacauaaggaaauuagug

SEQ ID NO: 1048469 - RNA, 19 nt, Homo sapiens
  misc_RNA (1)...(19): siRNA sense strand
uaauuuggaucuugguuug

SEQ ID NO: 1048470 - RNA, 19 nt, Homo sapiens
  misc_RNA (1)...(19): siRNA sense strand
caacggcaauuacugcaau

SEQ ID NO: 1048471 - RNA, 19 nt, Homo sapiens
  misc_RNA (1)...(19): siRNA sense strand
guacuggauucugaaguuu

SEQ ID NO: 1048472 - RNA, 19 nt, Homo sapiens
  misc_RNA (1)...(19): siRNA sense strand
caacauggauuugaucaac

SEQ ID NO: 1048473 - RNA, 19 nt, Homo sapiens
  misc_RNA (1)...(19): siRNA sense strand
gagaacaaagugaacauug

SEQ ID NO: 1048474 - RNA, 19 nt, Homo sapiens
  misc_RNA (1)...(19): siRNA sense strand
ggaccucuaucacacugaa

SEQ ID NO: 1048475 - RNA, 19 nt, Homo sapiens
  misc_RNA (1)...(19): siRNA sense strand
aaacuucucugcauguauc

SEQ ID NO: 1048476 - RNA, 19 nt, Homo sapiens
  misc_RNA (1)...(19): siRNA sense strand
caaagacuguggagccaau

SEQ ID NO: 1048477 - RNA, 19 nt, Homo sapiens
  misc_RNA (1)...(19): siRNA sense strand
cagaagucaucacaaaguu

SEQ ID NO: 1048478 - RNA, 19 nt, Homo sapiens
  misc_RNA (1)...(19): siRNA sense strand
gcagaagucaucacaaagu

SEQ ID NO: 1048479 - RNA, 19 nt, Homo sapiens
  misc_RNA (1)...(19): siRNA sense strand
ggaaagcagcaacauuaga

SEQ ID NO: 1048480 - RNA, 19 nt, Homo sapiens
  misc_RNA (1)...(19): siRNA sense strand
caaagugaacauugugaaa

SEQ ID NO: 1048481 - RNA, 19 nt, Homo sapiens
  misc_RNA (1)...(19): siRNA sense strand
caaguuccaugacaaagca

SEQ ID NO: 1048482 - RNA, 19 nt, Homo sapiens
  misc_RNA (1)...(19): siRNA sense strand
gagagcuggauaauaguua

SEQ ID NO: 1048483 - RNA, 19 nt, Homo sapiens
  misc_RNA (1)...(19): siRNA sense strand
caacaagcacauaaggaaa

SEQ ID NO: 1048484 - RNA, 19 nt, Homo sapiens
  misc_RNA (1)...(19): siRNA sense strand
auggagagcuggauaauag

SEQ ID NO: 1048485 - RNA, 19 nt, Homo sapiens
  misc_RNA (1)...(19): siRNA sense strand
gauguuugaugacaaugga

SEQ ID NO: 1048486 - RNA, 19 nt, Homo sapiens
  misc_RNA (1)...(19): siRNA sense strand
ccaaagcuaugucauccau

SEQ ID NO: 1048487 - RNA, 19 nt, Homo sapiens
  misc_RNA (1)...(19): siRNA sense strand
agaaagcugcaaugaauuu

SEQ ID NO: 1048488 - RNA, 19 nt, Homo sapiens
  misc_RNA (1)...(19): siRNA sense strand
guugaugguucuuagcaaa

SEQ ID NO: 1048489 - RNA, 19 nt, Homo sapiens
  misc_RNA (1)...(19): siRNA sense strand
ugaccaggaugaaggagaa

SEQ ID NO: 1048490 - RNA, 19 nt, Homo sapiens
  misc_RNA (1)...(19): siRNA sense strand
gaauaguucuacugaugca

SEQ ID NO: 1048491 - RNA, 19 nt, Homo sapiens
  misc_RNA (1)...(19): siRNA sense strand
ugaggaauuucgggaagua

SEQ ID NO: 1048492 - RNA, 19 nt, Homo sapiens
  misc_RNA (1)...(19): siRNA sense strand
ggauacaaaugcaaagacu

SEQ ID NO: 1048493 - RNA, 19 nt, Homo sapiens
  misc_RNA (1)...(19): siRNA sense strand
uuaguggagucuguauuua

SEQ ID NO: 1048494 - RNA, 19 nt, Homo sapiens
  misc_RNA (1)...(19): siRNA sense strand
ucaacaagcacauaaggaa

SEQ ID NO: 1048495 - RNA, 19 nt, Homo sapiens
  misc_RNA (1)...(19): siRNA sense strand
gaacccaacauggauuuga

SEQ ID NO: 1048496 - RNA, 19 nt, Homo sapiens
  misc_RNA (1)...(19): siRNA sense strand
uuaauggaaucucuaagug

SEQ ID NO: 1048497 - RNA, 19 nt, Homo sapiens
  misc_RNA (1)...(19): siRNA sense strand
aggaugagguguuugaguu

SEQ ID NO: 1048498 - RNA, 19 nt, Homo sapiens
  misc_RNA (1)...(19): siRNA sense strand
gugcaaagaccuccugguu

SEQ ID NO: 1048499 - RNA, 19 nt, Homo sapiens
  misc_RNA (1)...(19): siRNA sense strand
ccacuuagaacccaacaug

SEQ ID NO: 1048500 - RNA, 19 nt, Homo sapiens
  misc_RNA (1)...(19): siRNA sense strand
gaguuuaauuuggaucuug

SEQ ID NO: 1048501 - RNA, 19 nt, Homo sapiens
  misc_RNA (1)...(19): siRNA sense strand
aggauggccuaauuaguaa

SEQ ID NO: 1048502 - RNA, 19 nt, Homo sapiens
  misc_RNA (1)...(19): siRNA sense strand
uuacaaagaacuggaauga

SEQ ID NO: 1048503 - RNA, 19 nt, Homo sapiens
  misc_RNA (1)...(19): siRNA sense strand
gugggaggccucagucaua

SEQ ID NO: 1048504 - RNA, 19 nt, Homo sapiens
  misc_RNA (1)...(19): siRNA sense strand
gagaaagcugcaaugaauu

SEQ ID NO: 1048505 - RNA, 19 nt, Homo sapiens
  misc_RNA (1)...(19): siRNA sense strand
ugagauguuugaugacaau

SEQ ID NO: 1048506 - RNA, 19 nt, Homo sapiens
  misc_RNA (1)...(19): siRNA sense strand
cugcagaguuuaauuugga

SEQ ID NO: 1048507 - RNA, 19 nt, Homo sapiens
  misc_RNA (1)...(19): siRNA sense strand
aaguauagcugccaauuuu

SEQ ID NO: 1048508 - RNA, 19 nt, Homo sapiens
  misc_RNA (1)...(19): siRNA sense strand
ucguaugacugaggaauuu

SEQ ID NO: 1048509 - RNA, 19 nt, Homo sapiens
  misc_RNA (1)...(19): siRNA sense strand
ugaaauccaaguuccauga

SEQ ID NO: 1048510 - RNA, 19 nt, Homo sapiens
  misc_RNA (1)...(19): siRNA sense strand
ggacacagggauuuagaca

SEQ ID NO: 1048511 - RNA, 19 nt, Homo sapiens
  misc_RNA (1)...(19): siRNA sense strand
cuugauagcuguccauguc

SEQ ID NO: 1048512 - RNA, 19 nt, Homo sapiens
  misc_RNA (1)...(19): siRNA sense strand
caaagaacuggaaugaaau

SEQ ID NO: 1048513 - RNA, 19 nt, Homo sapiens
  misc_RNA (1)...(19): siRNA sense strand
ggagagcuggauaauaguu

SEQ ID NO: 1048514 - RNA, 19 nt, Homo sapiens
  misc_RNA (1)...(19): siRNA sense strand
cuaaguggguccaguugau

SEQ ID NO: 1048515 - RNA, 19 nt, Homo sapiens
  misc_RNA (1)...(19): siRNA sense strand
gacaauggagagcuggaua

SEQ ID NO: 1048516 - RNA, 19 nt, Homo sapiens
  misc_RNA (1)...(19): siRNA sense strand
caaagcagcaaaggacaaa

SEQ ID NO: 1048517 - RNA, 19 nt, Homo sapiens
  misc_RNA (1)...(19): siRNA sense strand
cgaacacugugcgggauuu

SEQ ID NO: 1048518 - RNA, 19 nt, Homo sapiens
  misc_RNA (1)...(19): siRNA sense strand
aagccugucugcuguuuga

SEQ ID NO: 1048519 - RNA, 19 nt, Homo sapiens
  misc_RNA (1)...(19): siRNA sense strand
ggagaacaaagugaacauu

SEQ ID NO: 1048520 - RNA, 19 nt, Homo sapiens
  misc_RNA (1)...(19): siRNA sense strand
acacuugaaagacuugaua

SEQ ID NO: 1048521 - RNA, 19 nt, Homo sapiens
  misc_RNA (1)...(19): siRNA sense strand
gaguacacuugaaagacuu

SEQ ID NO: 1048522 - RNA, 19 nt, Homo sapiens
  misc_RNA (1)...(19): siRNA sense strand
gcaccgaugguauuuaucu

SEQ ID NO: 1048523 - RNA, 19 nt, Homo sapiens
  misc_RNA (1)...(19): siRNA sense strand
acaagcacauaaggaaauu

SEQ ID NO: 1048524 - RNA, 19 nt, Homo sapiens
  misc_RNA (1)...(19): siRNA sense strand
cgaaaugccacuggagaaa

SEQ ID NO: 1048525 - RNA, 19 nt, Homo sapiens
  misc_RNA (1)...(19): siRNA sense strand
aaaguauagcugccaauuu

SEQ ID NO: 1048526 - RNA, 19 nt, Homo sapiens
  misc_RNA (1)...(19): siRNA sense strand
gaagagucacacagaggaa

SEQ ID NO: 1048527 - RNA, 19 nt, Homo sapiens
  misc_RNA (1)...(19): siRNA sense strand
agaucaggauggccuaauu

SEQ ID NO: 1048528 - RNA, 19 nt, Homo sapiens
  misc_RNA (1)...(19): siRNA sense strand
ggaggccucagucauaguu

SEQ ID NO: 1048529 - RNA, 19 nt, Homo sapiens
  misc_RNA (1)...(19): siRNA sense strand
ucacuuuucuggagcauaa

SEQ ID NO: 1048530 - RNA, 19 nt, Homo sapiens
  misc_RNA (1)...(19): siRNA sense strand
gcauaaucaagcaaggaua

SEQ ID NO: 1048531 - RNA, 19 nt, Homo sapiens
  misc_RNA (1)...(19): siRNA sense strand
ggucaucaacaagcacaua

SEQ ID NO: 1048532 - RNA, 19 nt, Homo sapiens
  misc_RNA (1)...(19): siRNA sense strand
aaagaucugcuacuucaug

SEQ ID NO: 1048533 - RNA, 19 nt, Homo sapiens
  misc_RNA (1)...(19): siRNA sense strand
gaaugaaaugacagaguug

SEQ ID NO: 1048534 - RNA, 19 nt, Homo sapiens
  misc_RNA (1)...(19): siRNA sense strand
uuggaaagaucgauugcuu

SEQ ID NO: 1048535 - RNA, 19 nt, Homo sapiens
  misc_RNA (1)...(19): siRNA sense strand
ccacugaauuggcagaaaa

SEQ ID NO: 1048536 - RNA, 19 nt, Homo sapiens
  misc_RNA (1)...(19): siRNA sense strand
gaacuugaccaggaugaag

SEQ ID NO: 1048537 - RNA, 19 nt, Homo sapiens
  misc_RNA (1)...(19): siRNA sense strand
guucuggccugcaggagau

SEQ ID NO: 1048538 - RNA, 19 nt, Homo sapiens
  misc_RNA (1)...(19): siRNA sense strand
ggagaaagcugcaaugaau

SEQ ID NO: 1048539 - RNA, 19 nt, Homo sapiens
  misc_RNA (1)...(19): siRNA sense strand
acaaagaacuggaaugaaa

SEQ ID NO: 1048540 - RNA, 19 nt, Homo sapiens
  misc_RNA (1)...(19): siRNA sense strand
ggaaugaaaugacagaguu

SEQ ID NO: 1048541 - RNA, 19 nt, Homo sapiens
  misc_RNA (1)...(19): siRNA sense strand
gcauugagauguuugauga

SEQ ID NO: 1048542 - RNA, 19 nt, Homo sapiens
  misc_RNA (1)...(19): siRNA sense strand
gaaugccucucaccacuua

SEQ ID NO: 1048543 - RNA, 19 nt, Homo sapiens
  misc_RNA (1)...(19): siRNA sense strand
gaaguuuccugcagaguuu

SEQ ID NO: 1048544 - RNA, 19 nt, Homo sapiens
  misc_RNA (1)...(19): siRNA sense strand
gaagucaucacaaaguuua

SEQ ID NO: 1048545 - RNA, 19 nt, Homo sapiens
  misc_RNA (1)...(19): siRNA sense strand
gaucuugguuugauucgua

SEQ ID NO: 1048546 - RNA, 19 nt, Homo sapiens
  misc_RNA (1)...(19): siRNA sense strand
gcaaagaccuccugguucu

SEQ ID NO: 1048547 - RNA, 19 nt, Homo sapiens
  misc_RNA (1)...(19): siRNA sense strand
gggcagaagucaucacaaa

SEQ ID NO: 1048548 - RNA, 19 nt, Homo sapiens
  misc_RNA (1)...(19): siRNA sense strand
gaacuggaaugaaaugaca

SEQ ID NO: 1048549 - RNA, 19 nt, Homo sapiens
  misc_RNA (1)...(19): siRNA sense strand
gcacuugcauugagauguu

SEQ ID NO: 1048550 - RNA, 19 nt, Homo sapiens
  misc_RNA (1)...(19): siRNA sense strand
aagaugaaaugauggcuua

SEQ ID NO: 1048551 - RNA, 19 nt, Homo sapiens
  misc_RNA (1)...(19): siRNA sense strand
cgacugcgauggcuucaaa

SEQ ID NO: 1048552 - RNA, 19 nt, Homo sapiens
  misc_RNA (1)...(19): siRNA sense strand
uuaaagaucugcuacuuca

SEQ ID NO: 1048553 - RNA, 19 nt, Homo sapiens
  misc_RNA (1)...(19): siRNA sense strand
ggaaauuaguggagucugu

SEQ ID NO: 1048554 - RNA, 19 nt, Homo sapiens
  misc_RNA (1)...(19): siRNA sense strand
caggauggccuaauuagua

SEQ ID NO: 1048555 - RNA, 19 nt, Homo sapiens
  misc_RNA (1)...(19): siRNA sense strand
guauuuaucuuccacugaa

SEQ ID NO: 1048556 - RNA, 19 nt, Homo sapiens
  misc_RNA (1)...(19): siRNA sense strand
gaucaggauggccuaauua

SEQ ID NO: 1048557 - RNA, 19 nt, Homo sapiens
  misc_RNA (1)...(19): siRNA sense strand
ggacagaggagaacaaagu

SEQ ID NO: 1048558 - RNA, 19 nt, Homo sapiens
  misc_RNA (1)...(19): siRNA sense strand
gauuaaagaucugcuacuu

SEQ ID NO: 1048559 - RNA, 19 nt, Homo sapiens
  misc_RNA (1)...(19): siRNA sense strand
ggaucucauucacugauua

SEQ ID NO: 1048560 - RNA, 19 nt, Homo sapiens
  misc_RNA (1)...(19): siRNA sense strand
gaaagcagcaacauuagau

SEQ ID NO: 1048561 - RNA, 19 nt, Homo sapiens
  misc_RNA (1)...(19): siRNA sense strand
gguacuggauucugaaguu

SEQ ID NO: 1048562 - RNA, 19 nt, Homo sapiens
  misc_RNA (1)...(19): siRNA sense strand
gcaaagggcagaagucauc

SEQ ID NO: 1048563 - RNA, 19 nt, Homo sapiens
  misc_RNA (1)...(19): siRNA sense strand
ugggaaagcagcaacauua

SEQ ID NO: 1048564 - RNA, 19 nt, Homo sapiens
  misc_RNA (1)...(19): siRNA sense strand
gaaaguauagcugccaauu

SEQ ID NO: 1048565 - RNA, 19 nt, Homo sapiens
  misc_RNA (1)...(19): siRNA sense strand
gcaaggauacaaaugcaaa

SEQ ID NO: 1048566 - RNA, 19 nt, Homo sapiens
  misc_RNA (1)...(19): siRNA sense strand
ggaguacacuugaaagacu

SEQ ID NO: 1048567 - RNA, 19 nt, Homo sapiens
  misc_RNA (1)...(19): siRNA sense strand
gaaauuaguggagucugua

SEQ ID NO: 1048568 - RNA, 19 nt, Homo sapiens
  misc_RNA (1)...(19): siRNA sense strand
gcacauaaggaaauuagug

SEQ ID NO: 1048569 - RNA, 19 nt, Homo sapiens
  misc_RNA (1)...(19): siRNA sense strand
uaauuuggaucuugguuug

SEQ ID NO: 1048570 - RNA, 19 nt, Homo sapiens
  misc_RNA (1)...(19): siRNA sense strand
caacggcaauuacugcaau

SEQ ID NO: 1048571 - RNA, 19 nt, Homo sapiens
  misc_RNA (1)...(19): siRNA sense strand
guacuggauucugaaguuu

SEQ ID NO: 1048572 - RNA, 19 nt, Homo sapiens
  misc_RNA (1)...(19): siRNA sense strand
caacauggauuugaucaac

SEQ ID NO: 1048573 - RNA, 19 nt, Homo sapiens
  misc_RNA (1)...(19): siRNA sense strand
gagaacaaagugaacauug

SEQ ID NO: 1048574 - RNA, 19 nt, Homo sapiens
  misc_RNA (1)...(19): siRNA sense strand
ggaccucuaucacacugaa

SEQ ID NO: 1048575 - RNA, 19 nt, Homo sapiens
  misc_RNA (1)...(19): siRNA sense strand
aaacuucucugcauguauc

SEQ ID NO: 1048576 - RNA, 19 nt, Homo sapiens
  misc_RNA (1)...(19): siRNA sense strand
caaagacuguggagccaau

SEQ ID NO: 1048577 - RNA, 19 nt, Homo sapiens
  misc_RNA (1)...(19): siRNA sense strand
cagaagucaucacaaaguu

SEQ ID NO: 1048578 - RNA, 19 nt, Homo sapiens
  misc_RNA (1)...(19): siRNA sense strand
gcagaagucaucacaaagu

SEQ ID NO: 1048579 - RNA, 19 nt, Homo sapiens
  misc_RNA (1)...(19): siRNA sense strand
ggaaagcagcaacauuaga

SEQ ID NO: 1048580 - RNA, 19 nt, Homo sapiens
  misc_RNA (1)...(19): siRNA sense strand
caaagugaacauugugaaa

SEQ ID NO: 1048581 - RNA, 19 nt, Homo sapiens
  misc_RNA (1)...(19): siRNA sense strand
caaguuccaugacaaagca

SEQ ID NO: 1048582 - RNA, 19 nt, Homo sapiens
  misc_RNA (1)...(19): siRNA sense strand
gagagcuggauaauaguua

SEQ ID NO: 1048583 - RNA, 19 nt, Homo sapiens
  misc_RNA (1)...(19): siRNA sense strand
caacaagcacauaaggaaa

SEQ ID NO: 1048584 - RNA, 19 nt, Homo sapiens
  misc_RNA (1)...(19): siRNA sense strand
auggagagcuggauaauag

SEQ ID NO: 1048585 - RNA, 19 nt, Homo sapiens
  misc_RNA (1)...(19): siRNA sense strand
gauguuugaugacaaugga

SEQ ID NO: 1048586 - RNA, 19 nt, Homo sapiens
  misc_RNA (1)...(19): siRNA sense strand
ccaaagcuaugucauccau

SEQ ID NO: 1048587 - RNA, 19 nt, Homo sapiens
  misc_RNA (1)...(19): siRNA sense strand
agaaagcugcaaugaauuu

SEQ ID NO: 1048588 - RNA, 19 nt, Homo sapiens
  misc_RNA (1)...(19): siRNA sense strand
guugaugguucuuagcaaa

SEQ ID NO: 1048589 - RNA, 19 nt, Homo sapiens
  misc_RNA (1)...(19): siRNA sense strand
ugaccaggaugaaggagaa

SEQ ID NO: 1048590 - RNA, 19 nt, Homo sapiens
  misc_RNA (1)...(19): siRNA sense strand
gaauaguucuacugaugca

SEQ ID NO: 1048591 - RNA, 19 nt, Homo sapiens
  misc_RNA (1)...(19): siRNA sense strand
ugaggaauuucgggaagua

SEQ ID NO: 1048592 - RNA, 19 nt, Homo sapiens
  misc_RNA (1)...(19): siRNA sense strand
ggauacaaaugcaaagacu

SEQ ID NO: 1048593 - RNA, 19 nt, Homo sapiens
  misc_RNA (1)...(19): siRNA sense strand
uuaguggagucuguauuua

SEQ ID NO: 1048594 - RNA, 19 nt, Homo sapiens
  misc_RNA (1)...(19): siRNA sense strand
ucaacaagcacauaaggaa

SEQ ID NO: 1048595 - RNA, 19 nt, Homo sapiens
  misc_RNA (1)...(19): siRNA sense strand
gaacccaacauggauuuga

SEQ ID NO: 1048596 - RNA, 19 nt, Homo sapiens
  misc_RNA (1)...(19): siRNA sense strand
uuaauggaaucucuaagug

SEQ ID NO: 1048597 - RNA, 19 nt, Homo sapiens
  misc_RNA (1)...(19): siRNA sense strand
aggaugagguguuugaguu

SEQ ID NO: 1048598 - RNA, 19 nt, Homo sapiens
  misc_RNA (1)...(19): siRNA sense strand
gugcaaagaccuccugguu

SEQ ID NO: 1048599 - RNA, 19 nt, Homo sapiens
  misc_RNA (1)...(19): siRNA sense strand
ccacuuagaacccaacaug

SEQ ID NO: 1048600 - RNA, 19 nt, Homo sapiens
  misc_RNA (1)...(19): siRNA sense strand
gaguuuaauuuggaucuug

SEQ ID NO: 1048601 - RNA, 19 nt, Homo sapiens
  misc_RNA (1)...(19): siRNA sense strand
aggauggccuaauuaguaa

SEQ ID NO: 1048602 - RNA, 19 nt, Homo sapiens
  misc_RNA (1)...(19): siRNA sense strand
uuacaaagaacuggaauga

SEQ ID NO: 1048603 - RNA, 19 nt, Homo sapiens
  misc_RNA (1)...(19): siRNA sense strand
gugggaggccucagucaua

SEQ ID NO: 1048604 - RNA, 19 nt, Homo sapiens
  misc_RNA (1)...(19): siRNA sense strand
gagaaagcugcaaugaauu

SEQ ID NO: 1048605 - RNA, 19 nt, Homo sapiens
  misc_RNA (1)...(19): siRNA sense strand
ugagauguuugaugacaau

SEQ ID NO: 1048606 - RNA, 19 nt, Homo sapiens
  misc_RNA (1)...(19): siRNA sense strand
cugcagaguuuaauuugga

SEQ ID NO: 1048607 - RNA, 19 nt, Homo sapiens
  misc_RNA (1)...(19): siRNA sense strand
aaguauagcugccaauuuu

SEQ ID NO: 1048608 - RNA, 19 nt, Homo sapiens
  misc_RNA (1)...(19): siRNA sense strand
ucguaugacugaggaauuu

SEQ ID NO: 1048609 - RNA, 19 nt, Homo sapiens
  misc_RNA (1)...(19): siRNA sense strand
ugaaauccaaguuccauga

SEQ ID NO: 1048610 - RNA, 19 nt, Homo sapiens
  misc_RNA (1)...(19): siRNA sense strand
ggacacagggauuuagaca

SEQ ID NO: 1048611 - RNA, 19 nt, Homo sapiens
  misc_RNA (1)...(19): siRNA sense strand
cuugauagcuguccauguc

SEQ ID NO: 1048612 - RNA, 19 nt, Homo sapiens
  misc_RNA (1)...(19): siRNA sense strand
caaagaacuggaaugaaau

SEQ ID NO: 1048613 - RNA, 19 nt, Homo sapiens
  misc_RNA (1)...(19): siRNA sense strand
ggagagcuggauaauaguu

SEQ ID NO: 1048614 - RNA, 19 nt, Homo sapiens
  misc_RNA (1)...(19): siRNA sense strand
cuaaguggguccaguugau

SEQ ID NO: 1048615 - RNA, 19 nt, Homo sapiens
  misc_RNA (1)...(19): siRNA sense strand
gacaauggagagcuggaua

SEQ ID NO: 1048616 - RNA, 19 nt, Homo sapiens
  misc_RNA (1)...(19): siRNA sense strand
caaagcagcaaaggacaaa

SEQ ID NO: 1048617 - RNA, 19 nt, Homo sapiens
  misc_RNA (1)...(19): siRNA sense strand
cgaacacugugcgggauuu

SEQ ID NO: 1048618 - RNA, 19 nt, Homo sapiens
  misc_RNA (1)...(19): siRNA sense strand
aagccugucugcuguuuga

SEQ ID NO: 1048619 - RNA, 19 nt, Homo sapiens
  misc_RNA (1)...(19): siRNA sense strand
ggagaacaaagugaacauu

SEQ ID NO: 1048620 - RNA, 19 nt, Homo sapiens
  misc_RNA (1)...(19): siRNA sense strand
acacuugaaagacuugaua

SEQ ID NO: 1048621 - RNA, 19 nt, Homo sapiens
  misc_RNA (1)...(19): siRNA sense strand
gaguacacuugaaagacuu

SEQ ID NO: 1048622 - RNA, 19 nt, Homo sapiens
  misc_RNA (1)...(19): siRNA sense strand
gcaccgaugguauuuaucu

SEQ ID NO: 1048623 - RNA, 19 nt, Homo sapiens
  misc_RNA (1)...(19): siRNA sense strand
acaagcacauaaggaaauu

SEQ ID NO: 1048624 - RNA, 19 nt, Homo sapiens
  misc_RNA (1)...(19): siRNA sense strand
cgaaaugccacuggagaaa

SEQ ID NO: 1048625 - RNA, 19 nt, Homo sapiens
  misc_RNA (1)...(19): siRNA sense strand
aaaguauagcugccaauuu

SEQ ID NO: 1048626 - RNA, 19 nt, Homo sapiens
  misc_RNA (1)...(19): siRNA sense strand
gaagagucacacagaggaa

SEQ ID NO: 1048627 - RNA, 19 nt, Homo sapiens
  misc_RNA (1)...(19): siRNA sense strand
agaucaggauggccuaauu

SEQ ID NO: 1048628 - RNA, 19 nt, Homo sapiens
  misc_RNA (1)...(19): siRNA sense strand
ggaggccucagucauaguu

SEQ ID NO: 1048629 - RNA, 19 nt, Homo sapiens
  misc_RNA (1)...(19): siRNA sense strand
ucacuuuucuggagcauaa

SEQ ID NO: 1048630 - RNA, 19 nt, Homo sapiens
  misc_RNA (1)...(19): siRNA sense strand
gcauaaucaagcaaggaua

SEQ ID NO: 1048631 - RNA, 19 nt, Homo sapiens
  misc_RNA (1)...(19): siRNA sense strand
ggucaucaacaagcacaua

SEQ ID NO: 1048632 - RNA, 19 nt, Homo sapiens
  misc_RNA (1)...(19): siRNA sense strand
aaagaucugcuacuucaug

SEQ ID NO: 1048633 - RNA, 19 nt, Homo sapiens
  misc_RNA (1)...(19): siRNA sense strand
gaaugaaaugacagaguug

SEQ ID NO: 1048634 - RNA, 19 nt, Homo sapiens
  misc_RNA (1)...(19): siRNA sense strand
uuggaaagaucgauugcuu

SEQ ID NO: 1048635 - RNA, 19 nt, Homo sapiens
  misc_RNA (1)...(19): siRNA sense strand
ccacugaauuggcagaaaa

SEQ ID NO: 1048636 - RNA, 19 nt, Homo sapiens
  misc_RNA (1)...(19): siRNA sense strand
gaacuugaccaggaugaag

SEQ ID NO: 1048637 - RNA, 19 nt, Homo sapiens
  misc_RNA (1)...(19): siRNA sense strand
guucuggccugcaggagau

SEQ ID NO: 1048638 - RNA, 19 nt, Homo sapiens
  misc_RNA (1)...(19): siRNA sense strand
gagcagcccgcagaaguuu

SEQ ID NO: 1048639 - RNA, 19 nt, Homo sapiens
  misc_RNA (1)...(19): siRNA sense strand
gaaccgcucccaggaauca

SEQ ID NO: 1048640 - RNA, 19 nt, Homo sapiens
  misc_RNA (1)...(19): siRNA sense strand
ucagagcccugcccaacug

SEQ ID NO: 1048641 - RNA, 19 nt, Homo sapiens
  misc_RNA (1)...(19): siRNA sense strand
gcaagaccacgcugaccaa

SEQ ID NO: 1048642 - RNA, 19 nt, Homo sapiens
  misc_RNA (1)...(19): siRNA sense strand
uggaagacauucagaacuc

SEQ ID NO: 1048643 - RNA, 19 nt, Homo sapiens
  misc_RNA (1)...(19): siRNA sense strand
ggccaacgguguggaagug

SEQ ID NO: 1048644 - RNA, 19 nt, Homo sapiens
  misc_RNA (1)...(19): siRNA sense strand
gcuggagucucuggacaug

SEQ ID NO: 1048645 - RNA, 19 nt, Homo sapiens
  misc_RNA (1)...(19): siRNA sense strand
uggagucucuggacaugga

SEQ ID NO: 1048646 - RNA, 19 nt, Homo sapiens
  misc_RNA (1)...(19): siRNA sense strand
gugaaguccuggaagacau

SEQ ID NO: 1048647 - RNA, 19 nt, Homo sapiens
  misc_RNA (1)...(19): siRNA sense strand
ccacauccuccuccuggaa

SEQ ID NO: 1048648 - RNA, 19 nt, Homo sapiens
  misc_RNA (1)...(19): siRNA sense strand
gggacgugcuggagucucu

SEQ ID NO: 1048649 - RNA, 19 nt, Homo sapiens
  misc_RNA (1)...(19): siRNA sense strand
agaccacgcugaccaacag

SEQ ID NO: 1048650 - RNA, 19 nt, Homo sapiens
  misc_RNA (1)...(19): siRNA sense strand
cugaaccgcucccaggaau

SEQ ID NO: 1048651 - RNA, 19 nt, Homo sapiens
  misc_RNA (1)...(19): siRNA sense strand
ggaggccaacgguguggaa

SEQ ID NO: 1048652 - RNA, 19 nt, Homo sapiens
  misc_RNA (1)...(19): siRNA sense strand
gcugaaccgcucccaggaa

SEQ ID NO: 1048653 - RNA, 19 nt, Homo sapiens
  misc_RNA (1)...(19): siRNA sense strand
gcuuccugcucuacagcua

SEQ ID NO: 1048654 - RNA, 19 nt, Homo sapiens
  misc_RNA (1)...(19): siRNA sense strand
ugagcagcccgcagaaguu

SEQ ID NO: 1048655 - RNA, 19 nt, Homo sapiens
  misc_RNA (1)...(19): siRNA sense strand
caagaccaaauagcaguug

SEQ ID NO: 1048656 - RNA, 19 nt, Homo sapiens
  misc_RNA (1)...(19): siRNA sense strand
ugaaguccuggaagacauu

SEQ ID NO: 1048657 - RNA, 19 nt, Homo sapiens
  misc_RNA (1)...(19): siRNA sense strand
ccaagaccaaauagcaguu

SEQ ID NO: 1048658 - RNA, 19 nt, Homo sapiens
  misc_RNA (1)...(19): siRNA sense strand
uccgugaaguccuggaaga

SEQ ID NO: 1048659 - RNA, 19 nt, Homo sapiens
  misc_RNA (1)...(19): siRNA sense strand
gaccaacagccugcucaga

SEQ ID NO: 1048660 - RNA, 19 nt, Homo sapiens
  misc_RNA (1)...(19): siRNA sense strand
ccagcaggacagcauguga

SEQ ID NO: 1048661 - RNA, 19 nt, Homo sapiens
  misc_RNA (1)...(19): siRNA sense strand
gagcagcccgcagaaguuu

SEQ ID NO: 1048662 - RNA, 19 nt, Homo sapiens
  misc_RNA (1)...(19): siRNA sense strand
gaaccgcucccaggaauca

SEQ ID NO: 1048663 - RNA, 19 nt, Homo sapiens
  misc_RNA (1)...(19): siRNA sense strand
ucagagcccugcccaacug

SEQ ID NO: 1048664 - RNA, 19 nt, Homo sapiens
  misc_RNA (1)...(19): siRNA sense strand
gcaagaccacgcugaccaa

SEQ ID NO: 1048665 - RNA, 19 nt, Homo sapiens
  misc_RNA (1)...(19): siRNA sense strand
uggaagacauucagaacuc

SEQ ID NO: 1048666 - RNA, 19 nt, Homo sapiens
  misc_RNA (1)...(19): siRNA sense strand
ggccaacgguguggaagug

SEQ ID NO: 1048667 - RNA, 19 nt, Homo sapiens
  misc_RNA (1)...(19): siRNA sense strand
gcuggagucucuggacaug

SEQ ID NO: 1048668 - RNA, 19 nt, Homo sapiens
  misc_RNA (1)...(19): siRNA sense strand
uggagucucuggacaugga

SEQ ID NO: 1048669 - RNA, 19 nt, Homo sapiens
  misc_RNA (1)...(19): siRNA sense strand
gugaaguccuggaagacau

SEQ ID NO: 1048670 - RNA, 19 nt, Homo sapiens
  misc_RNA (1)...(19): siRNA sense strand
ccacauccuccuccuggaa

SEQ ID NO: 1048671 - RNA, 19 nt, Homo sapiens
  misc_RNA (1)...(19): siRNA sense strand
gggacgugcuggagucucu

SEQ ID NO: 1048672 - RNA, 19 nt, Homo sapiens
  misc_RNA (1)...(19): siRNA sense strand
agaccacgcugaccaacag

SEQ ID NO: 1048673 - RNA, 19 nt, Homo sapiens
  misc_RNA (1)...(19): siRNA sense strand
cugaaccgcucccaggaau

SEQ ID NO: 1048674 - RNA, 19 nt, Homo sapiens
  misc_RNA (1)...(19): siRNA sense strand
ggaggccaacgguguggaa

SEQ ID NO: 1048675 - RNA, 19 nt, Homo sapiens
  misc_RNA (1)...(19): siRNA sense strand
gcugaaccgcucccaggaa

SEQ ID NO: 1048676 - RNA, 19 nt, Homo sapiens
  misc_RNA (1)...(19): siRNA sense strand
gcuuccugcucuacagcua

SEQ ID NO: 1048677 - RNA, 19 nt, Homo sapiens
  misc_RNA (1)...(19): siRNA sense strand
ugagcagcccgcagaaguu

SEQ ID NO: 1048678 - RNA, 19 nt, Homo sapiens
  misc_RNA (1)...(19): siRNA sense strand
caagaccaaauagcaguug

SEQ ID NO: 1048679 - RNA, 19 nt, Homo sapiens
  misc_RNA (1)...(19): siRNA sense strand
ugaaguccuggaagacauu

SEQ ID NO: 1048680 - RNA, 19 nt, Homo sapiens
  misc_RNA (1)...(19): siRNA sense strand
ccaagaccaaauagcaguu

SEQ ID NO: 1048681 - RNA, 19 nt, Homo sapiens
  misc_RNA (1)...(19): siRNA sense strand
uccgugaaguccuggaaga

SEQ ID NO: 1048682 - RNA, 19 nt, Homo sapiens
  misc_RNA (1)...(19): siRNA sense strand
gaccaacagccugcucaga

SEQ ID NO: 1048683 - RNA, 19 nt, Homo sapiens
  misc_RNA (1)...(19): siRNA sense strand
ccagcaggacagcauguga

SEQ ID NO: 1048684 - RNA, 19 nt, Homo sapiens
  misc_RNA (1)...(19): siRNA sense strand
cagcaugguucauaaauuu

SEQ ID NO: 1048685 - RNA, 19 nt, Homo sapiens
  misc_RNA (1)...(19): siRNA sense strand
gaacaacuucccaccauug

SEQ ID NO: 1048686 - RNA, 19 nt, Homo sapiens
  misc_RNA (1)...(19): siRNA sense strand
gaagccauguuucuaccaa

SEQ ID NO: 1048687 - RNA, 19 nt, Homo sapiens
  misc_RNA (1)...(19): siRNA sense strand
ugaccaagcgccucuacua

SEQ ID NO: 1048688 - RNA, 19 nt, Homo sapiens
  misc_RNA (1)...(19): siRNA sense strand
ugaaucagccucagacuca

SEQ ID NO: 1048689 - RNA, 19 nt, Homo sapiens
  misc_RNA (1)...(19): siRNA sense strand
ucagcaugguucauaaauu

SEQ ID NO: 1048690 - RNA, 19 nt, Homo sapiens
  misc_RNA (1)...(19): siRNA sense strand
guacuccaaugagauguga

SEQ ID NO: 1048691 - RNA, 19 nt, Homo sapiens
  misc_RNA (1)...(19): siRNA sense strand
caacuuuggccucgccuuu

SEQ ID NO: 1048692 - RNA, 19 nt, Homo sapiens
  misc_RNA (1)...(19): siRNA sense strand
gugaacaacuucccaccau

SEQ ID NO: 1048693 - RNA, 19 nt, Homo sapiens
  misc_RNA (1)...(19): siRNA sense strand
ccaauuacacguacuccaa

SEQ ID NO: 1048694 - RNA, 19 nt, Homo sapiens
  misc_RNA (1)...(19): siRNA sense strand
ugaacaacuucccaccauu

SEQ ID NO: 1048695 - RNA, 19 nt, Homo sapiens
  misc_RNA (1)...(19): siRNA sense strand
acaaggccuucaagacuga

SEQ ID NO: 1048696 - RNA, 19 nt, Homo sapiens
  misc_RNA (1)...(19): siRNA sense strand
uuucauggcauucuucuuu

SEQ ID NO: 1048697 - RNA, 19 nt, Homo sapiens
  misc_RNA (1)...(19): siRNA sense strand
ugacagcuccuucaguuuc

SEQ ID NO: 1048698 - RNA, 19 nt, Homo sapiens
  misc_RNA (1)...(19): siRNA sense strand
gcauucuucuuuaccuuca

SEQ ID NO: 1048699 - RNA, 19 nt, Homo sapiens
  misc_RNA (1)...(19): siRNA sense strand
gacagcuccuucaguuuca

SEQ ID NO: 1048700 - RNA, 19 nt, Homo sapiens
  misc_RNA (1)...(19): siRNA sense strand
gcagagaaagugaacaacu

SEQ ID NO: 1048701 - RNA, 19 nt, Homo sapiens
  misc_RNA (1)...(19): siRNA sense strand
gcugguuucggcccauuua

SEQ ID NO: 1048702 - RNA, 19 nt, Homo sapiens
  misc_RNA (1)...(19): siRNA sense strand
uucauggcauucuucuuua

SEQ ID NO: 1048703 - RNA, 19 nt, Homo sapiens
  misc_RNA (1)...(19): siRNA sense strand
gcccucagcaugguucaua

SEQ ID NO: 1048704 - RNA, 19 nt, Homo sapiens
  misc_RNA (1)...(19): siRNA sense strand
agacuucgaggcagauauu

SEQ ID NO: 1048705 - RNA, 19 nt, Homo sapiens
  misc_RNA (1)...(19): siRNA sense strand
gcuccuacgucugcugguu

SEQ ID NO: 1048706 - RNA, 19 nt, Homo sapiens
  misc_RNA (1)...(19): siRNA sense strand
uuacaaggccuucaagacu

SEQ ID NO: 1048707 - RNA, 19 nt, Homo sapiens
  misc_RNA (1)...(19): siRNA sense strand
gcuaauucccacugucaug

SEQ ID NO: 1048708 - RNA, 19 nt, Homo sapiens
  misc_RNA (1)...(19): siRNA sense strand
ucuacuaccucuggauguu

SEQ ID NO: 1048709 - RNA, 19 nt, Homo sapiens
  misc_RNA (1)...(19): siRNA sense strand
ucaguuucauggcauucuu

SEQ ID NO: 1048710 - RNA, 19 nt, Homo sapiens
  misc_RNA (1)...(19): siRNA sense strand
ggauugcuaccaucuccuu

SEQ ID NO: 1048711 - RNA, 19 nt, Homo sapiens
  misc_RNA (1)...(19): siRNA sense strand
gguuucggcccauuuacaa

SEQ ID NO: 1048712 - RNA, 19 nt, Homo sapiens
  misc_RNA (1)...(19): siRNA sense strand
caauuacacguacuccaau

SEQ ID NO: 1048713 - RNA, 19 nt, Homo sapiens
  misc_RNA (1)...(19): siRNA sense strand
gcugaagccauguuucuac

SEQ ID NO: 1048714 - RNA, 19 nt, Homo sapiens
  misc_RNA (1)...(19): siRNA sense strand
ccaagcgccucuacuaccu

SEQ ID NO: 1048715 - RNA, 19 nt, Homo sapiens
  misc_RNA (1)...(19): siRNA sense strand
gaccaagcgccucuacuac

SEQ ID NO: 1048716 - RNA, 19 nt, Homo sapiens
  misc_RNA (1)...(19): siRNA sense strand
uacuaccucuggauguuga

SEQ ID NO: 1048717 - RNA, 19 nt, Homo sapiens
  misc_RNA (1)...(19): siRNA sense strand
gucugcggcuggauugcua

SEQ ID NO: 1048718 - RNA, 19 nt, Homo sapiens
  misc_RNA (1)...(19): siRNA sense strand
uacacguacuccaaugaga

SEQ ID NO: 1048719 - RNA, 19 nt, Homo sapiens
  misc_RNA (1)...(19): siRNA sense strand
ucccaccauugcccaaauu

SEQ ID NO: 1048720 - RNA, 19 nt, Homo sapiens
  misc_RNA (1)...(19): siRNA sense strand
gcggcuggauugcuaccau

SEQ ID NO: 1048721 - RNA, 19 nt, Homo sapiens
  misc_RNA (1)...(19): siRNA sense strand
gcgguggugaugcuaauuc

SEQ ID NO: 1048722 - RNA, 19 nt, Homo sapiens
  misc_RNA (1)...(19): siRNA sense strand
gacaggagauggucauuga

SEQ ID NO: 1048723 - RNA, 19 nt, Homo sapiens
  misc_RNA (1)...(19): siRNA sense strand
gcaccacucugaagcgaaa

SEQ ID NO: 1048724 - RNA, 19 nt, Homo sapiens
  misc_RNA (1)...(19): siRNA sense strand
gagcaaagcaugcgugaga

SEQ ID NO: 1048725 - RNA, 19 nt, Homo sapiens
  misc_RNA (1)...(19): siRNA sense strand
aaacaucuauucugccuau

SEQ ID NO: 1048726 - RNA, 19 nt, Homo sapiens
  misc_RNA (1)...(19): siRNA sense strand
gcuacgagcuucuggugaa

SEQ ID NO: 1048727 - RNA, 19 nt, Homo sapiens
  misc_RNA (1)...(19): siRNA sense strand
gcacggagacccucaagga

SEQ ID NO: 1048728 - RNA, 19 nt, Homo sapiens
  misc_RNA (1)...(19): siRNA sense strand
gaagcucccuauuggauca

SEQ ID NO: 1048729 - RNA, 19 nt, Homo sapiens
  misc_RNA (1)...(19): siRNA sense strand
ggaagucccugucaaaucc

SEQ ID NO: 1048730 - RNA, 19 nt, Homo sapiens
  misc_RNA (1)...(19): siRNA sense strand
agugauggguuaaaucuaa

SEQ ID NO: 1048731 - RNA, 19 nt, Homo sapiens
  misc_RNA (1)...(19): siRNA sense strand
acacagagcagucguaugu

SEQ ID NO: 1048732 - RNA, 19 nt, Homo sapiens
  misc_RNA (1)...(19): siRNA sense strand
ccacauuuaugccuauugu

SEQ ID NO: 1048733 - RNA, 19 nt, Homo sapiens
  misc_RNA (1)...(19): siRNA sense strand
gugaagagagcaagggaua

SEQ ID NO: 1048734 - RNA, 19 nt, Homo sapiens
  misc_RNA (1)...(19): siRNA sense strand
ggaagacgcagacaucauc

SEQ ID NO: 1048735 - RNA, 19 nt, Homo sapiens
  misc_RNA (1)...(19): siRNA sense strand
ggagauagaggcucacauc

SEQ ID NO: 1048736 - RNA, 19 nt, Homo sapiens
  misc_RNA (1)...(19): siRNA sense strand
caagggauaucaggagguu

SEQ ID NO: 1048737 - RNA, 19 nt, Homo sapiens
  misc_RNA (1)...(19): siRNA sense strand
gaagagagcaagggauauc

SEQ ID NO: 1048738 - RNA, 19 nt, Homo sapiens
  misc_RNA (1)...(19): siRNA sense strand
caagcuggcugacauucug

SEQ ID NO: 1048739 - RNA, 19 nt, Homo sapiens
  misc_RNA (1)...(19): siRNA sense strand
gcggaugguuuacauucuu

SEQ ID NO: 1048740 - RNA, 19 nt, Homo sapiens
  misc_RNA (1)...(19): siRNA sense strand
ugucugaccucaugaucaa

SEQ ID NO: 1048741 - RNA, 19 nt, Homo sapiens
  misc_RNA (1)...(19): siRNA sense strand
ccagauaucgccucagaga

SEQ ID NO: 1048742 - RNA, 19 nt, Homo sapiens
  misc_RNA (1)...(19): siRNA sense strand
ugacagugauggguuaaau

SEQ ID NO: 1048743 - RNA, 19 nt, Homo sapiens
  misc_RNA (1)...(19): siRNA sense strand
ugggugacauugaaaggua

SEQ ID NO: 1048744 - RNA, 19 nt, Homo sapiens
  misc_RNA (1)...(19): siRNA sense strand
gauaucaggagguuauuca

SEQ ID NO: 1048745 - RNA, 19 nt, Homo sapiens
  misc_RNA (1)...(19): siRNA sense strand
gcagcgagcccauccuugu

SEQ ID NO: 1048746 - RNA, 19 nt, Homo sapiens
  misc_RNA (1)...(19): siRNA sense strand
gcagcuggagcacauguuu

SEQ ID NO: 1048747 - RNA, 19 nt, Homo sapiens
  misc_RNA (1)...(19): siRNA sense strand
ccuggaagcucccuauugg

SEQ ID NO: 1048748 - RNA, 19 nt, Homo sapiens
  misc_RNA (1)...(19): siRNA sense strand
ugaauaaccagguguuugu

SEQ ID NO: 1048749 - RNA, 19 nt, Homo sapiens
  misc_RNA (1)...(19): siRNA sense strand
ggcaccgacuccuacauuu

SEQ ID NO: 1048750 - RNA, 19 nt, Homo sapiens
  misc_RNA (1)...(19): siRNA sense strand
ucauucaccugcucugaga

SEQ ID NO: 1048751 - RNA, 19 nt, Homo sapiens
  misc_RNA (1)...(19): siRNA sense strand
ccgagaagcugccaucacu

SEQ ID NO: 1048752 - RNA, 19 nt, Homo sapiens
  misc_RNA (1)...(19): siRNA sense strand
gguuuacauucuuggcaua

SEQ ID NO: 1048753 - RNA, 19 nt, Homo sapiens
  misc_RNA (1)...(19): siRNA sense strand
caucuauucugccuauauc

SEQ ID NO: 1048754 - RNA, 19 nt, Homo sapiens
  misc_RNA (1)...(19): siRNA sense strand
ggagguuauucagagcaua

SEQ ID NO: 1048755 - RNA, 19 nt, Homo sapiens
  misc_RNA (1)...(19): siRNA sense strand
ggaagcugccgcuggaaga

SEQ ID NO: 1048756 - RNA, 19 nt, Homo sapiens
  misc_RNA (1)...(19): siRNA sense strand
ggagauggucauugaagug

SEQ ID NO: 1048757 - RNA, 19 nt, Homo sapiens
  misc_RNA (1)...(19): siRNA sense strand
ggacacagagcagucguau

SEQ ID NO: 1048758 - RNA, 19 nt, Homo sapiens
  misc_RNA (1)...(19): siRNA sense strand
caguggaggugauggcuau

SEQ ID NO: 1048759 - RNA, 19 nt, Homo sapiens
  misc_RNA (1)...(19): siRNA sense strand
auggagagcuuguggucua

SEQ ID NO: 1048760 - RNA, 19 nt, Homo sapiens
  misc_RNA (1)...(19): siRNA sense strand
gggcaccgacuccuacauu

SEQ ID NO: 1048761 - RNA, 19 nt, Homo sapiens
  misc_RNA (1)...(19): siRNA sense strand
gagauggucauugaaguga

SEQ ID NO: 1048762 - RNA, 19 nt, Homo sapiens
  misc_RNA (1)...(19): siRNA sense strand
gccugacagugauggguua

SEQ ID NO: 1048763 - RNA, 19 nt, Homo sapiens
  misc_RNA (1)...(19): siRNA sense strand
caccaucuccuccagcuuu

SEQ ID NO: 1048764 - RNA, 19 nt, Homo sapiens
  misc_RNA (1)...(19): siRNA sense strand
auugagggauggaggauuu

SEQ ID NO: 1048765 - RNA, 19 nt, Homo sapiens
  misc_RNA (1)...(19): siRNA sense strand
gcacugaggauggcugugu

SEQ ID NO: 1048766 - RNA, 19 nt, Homo sapiens
  misc_RNA (1)...(19): siRNA sense strand
gauaacuuccucaaugcaa

SEQ ID NO: 1048767 - RNA, 19 nt, Homo sapiens
  misc_RNA (1)...(19): siRNA sense strand
gggauguggcgaccucuuu

SEQ ID NO: 1048768 - RNA, 19 nt, Homo sapiens
  misc_RNA (1)...(19): siRNA sense strand
aguacaagaugcuguggaa

SEQ ID NO: 1048769 - RNA, 19 nt, Homo sapiens
  misc_RNA (1)...(19): siRNA sense strand
agaacuccgugcucuguga

SEQ ID NO: 1048770 - RNA, 19 nt, Homo sapiens
  misc_RNA (1)...(19): siRNA sense strand
ggaagcacguggccaugac

SEQ ID NO: 1048771 - RNA, 19 nt, Homo sapiens
  misc_RNA (1)...(19): siRNA sense strand
caaggacgacgaccuaugg

SEQ ID NO: 1048772 - RNA, 19 nt, Homo sapiens
  misc_RNA (1)...(19): siRNA sense strand
gauggucauugaagugaag

SEQ ID NO: 1048773 - RNA, 19 nt, Homo sapiens
  misc_RNA (1)...(19): siRNA sense strand
ggccugccuuucucaaguu

SEQ ID NO: 1048774 - RNA, 19 nt, Homo sapiens
  misc_RNA (1)...(19): siRNA sense strand
cagcggaagucccugucaa

SEQ ID NO: 1048775 - RNA, 19 nt, Homo sapiens
  misc_RNA (1)...(19): siRNA sense strand
agaagaaaucccugaguga

SEQ ID NO: 1048776 - RNA, 19 nt, Homo sapiens
  misc_RNA (1)...(19): siRNA sense strand
ccacgugugucucuaccau

SEQ ID NO: 1048777 - RNA, 19 nt, Homo sapiens
  misc_RNA (1)...(19): siRNA sense strand
ugaccugcaucuuguaucu

SEQ ID NO: 1048778 - RNA, 19 nt, Homo sapiens
  misc_RNA (1)...(19): siRNA sense strand
gcaguggcaugcaguucuc

SEQ ID NO: 1048779 - RNA, 19 nt, Homo sapiens
  misc_RNA (1)...(19): siRNA sense strand
cagcucggccugcagauga

SEQ ID NO: 1048780 - RNA, 19 nt, Homo sapiens
  misc_RNA (1)...(19): siRNA sense strand
agaagcaggcgcugucuga

SEQ ID NO: 1048781 - RNA, 19 nt, Homo sapiens
  misc_RNA (1)...(19): siRNA sense strand
uugaggaccugcugagugu

SEQ ID NO: 1048782 - RNA, 19 nt, Homo sapiens
  misc_RNA (1)...(19): siRNA sense strand
uuaaaucuaagcagcauga

SEQ ID NO: 1048783 - RNA, 19 nt, Homo sapiens
  misc_RNA (1)...(19): siRNA sense strand
ugacacagccagcaaguac

SEQ ID NO: 1048784 - RNA, 19 nt, Homo sapiens
  misc_RNA (1)...(19): siRNA sense strand
ggagggacuucggccuaug

SEQ ID NO: 1048785 - RNA, 19 nt, Homo sapiens
  misc_RNA (1)...(19): siRNA sense strand
ucugugaccugcaucuugu

SEQ ID NO: 1048786 - RNA, 19 nt, Homo sapiens
  misc_RNA (1)...(19): siRNA sense strand
cagagcuggugcccuuuga

SEQ ID NO: 1048787 - RNA, 19 nt, Homo sapiens
  misc_RNA (1)...(19): siRNA sense strand
ccucaaggacgacgaccua

SEQ ID NO: 1048788 - RNA, 19 nt, Homo sapiens
  misc_RNA (1)...(19): siRNA sense strand
ggcgaucgguggcaagaag

SEQ ID NO: 1048789 - RNA, 19 nt, Homo sapiens
  misc_RNA (1)...(19): siRNA sense strand
gugugugggugacauugaa

SEQ ID NO: 1048790 - RNA, 19 nt, Homo sapiens
  misc_RNA (1)...(19): siRNA sense strand
acgcagacaucaucaaagg

SEQ ID NO: 1048791 - RNA, 19 nt, Homo sapiens
  misc_RNA (1)...(19): siRNA sense strand
agacgcagacaucaucaaa

SEQ ID NO: 1048792 - RNA, 19 nt, Homo sapiens
  misc_RNA (1)...(19): siRNA sense strand
cagagacccugacgcuucu

SEQ ID NO: 1048793 - RNA, 19 nt, Homo sapiens
  misc_RNA (1)...(19): siRNA sense strand
gcaucuuguaucugaauaa

SEQ ID NO: 1048794 - RNA, 19 nt, Homo sapiens
  misc_RNA (1)...(19): siRNA sense strand
gcuggaagacgcagacauc

SEQ ID NO: 1048795 - RNA, 19 nt, Homo sapiens
  misc_RNA (1)...(19): siRNA sense strand
cugccuauaucgauaacuu

SEQ ID NO: 1048796 - RNA, 19 nt, Homo sapiens
  misc_RNA (1)...(19): siRNA sense strand
uauucugccuauaucgaua

SEQ ID NO: 1048797 - RNA, 19 nt, Homo sapiens
  misc_RNA (1)...(19): siRNA sense strand
ugacccugcuggacacaga

SEQ ID NO: 1048798 - RNA, 19 nt, Homo sapiens
  misc_RNA (1)...(19): siRNA sense strand
cagcgagcccauccuugua

SEQ ID NO: 1048799 - RNA, 19 nt, Homo sapiens
  misc_RNA (1)...(19): siRNA sense strand
ggcccugaguccagucuga

SEQ ID NO: 1048800 - RNA, 19 nt, Homo sapiens
  misc_RNA (1)...(19): siRNA sense strand
ggcgaccucuuuccucauc

SEQ ID NO: 1048801 - RNA, 19 nt, Homo sapiens
  misc_RNA (1)...(19): siRNA sense strand
uuacgugggucaggauuca

SEQ ID NO: 1048802 - RNA, 19 nt, Homo sapiens
  misc_RNA (1)...(19): siRNA sense strand
gaagacgcagacaucauca

SEQ ID NO: 1048803 - RNA, 19 nt, Homo sapiens
  misc_RNA (1)...(19): siRNA sense strand
uggcugagcgcaucaacaa

SEQ ID NO: 1048804 - RNA, 19 nt, Homo sapiens
  misc_RNA (1)...(19): siRNA sense strand
ucaaguuccuagagcaaag

SEQ ID NO: 1048805 - RNA, 19 nt, Homo sapiens
  misc_RNA (1)...(19): siRNA sense strand
auaacuuccucaaugcaaa

SEQ ID NO: 1048806 - RNA, 19 nt, Homo sapiens
  misc_RNA (1)...(19): siRNA sense strand
aucgauaacuuccucaaug

SEQ ID NO: 1048807 - RNA, 19 nt, Homo sapiens
  misc_RNA (1)...(19): siRNA sense strand
gcgagcccauccuuguaga

SEQ ID NO: 1048808 - RNA, 19 nt, Homo sapiens
  misc_RNA (1)...(19): siRNA sense strand
gagcccauccgagaaguug

SEQ ID NO: 1048809 - RNA, 19 nt, Homo sapiens
  misc_RNA (1)...(19): siRNA sense strand
gcaagaaggaccggucucu

SEQ ID NO: 1048810 - RNA, 19 nt, Homo sapiens
  misc_RNA (1)...(19): siRNA sense strand
gguagcagccguuauucca

SEQ ID NO: 1048811 - RNA, 19 nt, Homo sapiens
  misc_RNA (1)...(19): siRNA sense strand
gguuaaaucuaagcagcau

SEQ ID NO: 1048812 - RNA, 19 nt, Homo sapiens
  misc_RNA (1)...(19): siRNA sense strand
ucgaugaggccaagaggaa

SEQ ID NO: 1048813 - RNA, 19 nt, Homo sapiens
  misc_RNA (1)...(19): siRNA sense strand
gacuucggccuaugucuga

SEQ ID NO: 1048814 - RNA, 19 nt, Homo sapiens
  misc_RNA (1)...(19): siRNA sense strand
cagcggaugguuuacauuc

SEQ ID NO: 1048815 - RNA, 19 nt, Homo sapiens
  misc_RNA (1)...(19): siRNA sense strand
ggagagacgagggcaguca

SEQ ID NO: 1048816 - RNA, 19 nt, Homo sapiens
  misc_RNA (1)...(19): siRNA sense strand
caagaagaaaucccugagu

SEQ ID NO: 1048817 - RNA, 19 nt, Homo sapiens
  misc_RNA (1)...(19): siRNA sense strand
cggaugguuuacauucuug

SEQ ID NO: 1048818 - RNA, 19 nt, Homo sapiens
  misc_RNA (1)...(19): siRNA sense strand
gcguccagcggaugguuua

SEQ ID NO: 1048819 - RNA, 19 nt, Homo sapiens
  misc_RNA (1)...(19): siRNA sense strand
ccaccucagccauggauga

SEQ ID NO: 1048820 - RNA, 19 nt, Homo sapiens
  misc_RNA (1)...(19): siRNA sense strand
gagcuggugcccuuugaca

SEQ ID NO: 1048821 - RNA, 19 nt, Homo sapiens
  misc_RNA (1)...(19): siRNA sense strand
ucuuguaucugaauaacca

SEQ ID NO: 1048822 - RNA, 19 nt, Homo sapiens
  misc_RNA (1)...(19): siRNA sense strand
gagacaagcucaccgaaau

SEQ ID NO: 1048823 - RNA, 19 nt, Homo sapiens
  misc_RNA (1)...(19): siRNA sense strand
gcaggaaucuggaccuuca

SEQ ID NO: 1048824 - RNA, 19 nt, Homo sapiens
  misc_RNA (1)...(19): siRNA sense strand
gugcacagguuucauauuc

SEQ ID NO: 1048825 - RNA, 19 nt, Homo sapiens
  misc_RNA (1)...(19): siRNA sense strand
ccagaagguuggaaaguug

SEQ ID NO: 1048826 - RNA, 19 nt, Homo sapiens
  misc_RNA (1)...(19): siRNA sense strand
ccaaagagcagcugaagau

SEQ ID NO: 1048827 - RNA, 19 nt, Homo sapiens
  misc_RNA (1)...(19): siRNA sense strand
caacccagcuguucauugg

SEQ ID NO: 1048828 - RNA, 19 nt, Homo sapiens
  misc_RNA (1)...(19): siRNA sense strand
gagguggugucauuuguga

SEQ ID NO: 1048829 - RNA, 19 nt, Homo sapiens
  misc_RNA (1)...(19): siRNA sense strand
gcacagguuucauauucca

SEQ ID NO: 1048830 - RNA, 19 nt, Homo sapiens
  misc_RNA (1)...(19): siRNA sense strand
cugaggagguggugucauu

SEQ ID NO: 1048831 - RNA, 19 nt, Homo sapiens
  misc_RNA (1)...(19): siRNA sense strand
gaagauccguaagagcaau

SEQ ID NO: 1048832 - RNA, 19 nt, Homo sapiens
  misc_RNA (1)...(19): siRNA sense strand
ggagaaggacaugaagaaa

SEQ ID NO: 1048833 - RNA, 19 nt, Homo sapiens
  misc_RNA (1)...(19): siRNA sense strand
ggacaugaagaaagccaaa

SEQ ID NO: 1048834 - RNA, 19 nt, Homo sapiens
  misc_RNA (1)...(19): siRNA sense strand
gagaaggacaugaagaaag

SEQ ID NO: 1048835 - RNA, 19 nt, Homo sapiens
  misc_RNA (1)...(19): siRNA sense strand
gaaacuuugagggaaauuu

SEQ ID NO: 1048836 - RNA, 19 nt, Homo sapiens
  misc_RNA (1)...(19): siRNA sense strand
ugucauuugugaagaagaa

SEQ ID NO: 1048837 - RNA, 19 nt, Homo sapiens
  misc_RNA (1)...(19): siRNA sense strand
cacuggaccuugcggaauu

SEQ ID NO: 1048838 - RNA, 19 nt, Homo sapiens
  misc_RNA (1)...(19): siRNA sense strand
aaggaaacuuugagggaaa

SEQ ID NO: 1048839 - RNA, 19 nt, Homo sapiens
  misc_RNA (1)...(19): siRNA sense strand
agaaggacaugaagaaagc

SEQ ID NO: 1048840 - RNA, 19 nt, Homo sapiens
  misc_RNA (1)...(19): siRNA sense strand
gcagauccucuacgugugu

SEQ ID NO: 1048841 - RNA, 19 nt, Homo sapiens
  misc_RNA (1)...(19): siRNA sense strand
gaggagguggugucauuug

SEQ ID NO: 1048842 - RNA, 19 nt, Homo sapiens
  misc_RNA (1)...(19): siRNA sense strand
gcaacccagcuguucauug

SEQ ID NO: 1048843 - RNA, 19 nt, Homo sapiens
  misc_RNA (1)...(19): siRNA sense strand
ggcaacgaguggagaagga

SEQ ID NO: 1048844 - RNA, 19 nt, Homo sapiens
  misc_RNA (1)...(19): siRNA sense strand
cagcugaagauccguaaga

SEQ ID NO: 1048845 - RNA, 19 nt, Homo sapiens
  misc_RNA (1)...(19): siRNA sense strand
cgagacaagcucaccgaaa

SEQ ID NO: 1048846 - RNA, 19 nt, Homo sapiens
  misc_RNA (1)...(19): siRNA sense strand
uugcggaauuugcuaagaa

SEQ ID NO: 1048847 - RNA, 19 nt, Homo sapiens
  misc_RNA (1)...(19): siRNA sense strand
gaguggagaaggacaugaa

SEQ ID NO: 1048848 - RNA, 19 nt, Homo sapiens
  misc_RNA (1)...(19): siRNA sense strand
gggcaggaaucuggaccuu

SEQ ID NO: 1048849 - RNA, 19 nt, Homo sapiens
  misc_RNA (1)...(19): siRNA sense strand
uggagaaggacaugaagaa

SEQ ID NO: 1048850 - RNA, 19 nt, Homo sapiens
  misc_RNA (1)...(19): siRNA sense strand
cguaagagcaaucagauac

SEQ ID NO: 1048851 - RNA, 19 nt, Homo sapiens
  misc_RNA (1)...(19): siRNA sense strand
cauacuggguacaucaaag

SEQ ID NO: 1048852 - RNA, 19 nt, Homo sapiens
  misc_RNA (1)...(19): siRNA sense strand
ugagggaaauuuugaguca

SEQ ID NO: 1048853 - RNA, 19 nt, Homo sapiens
  misc_RNA (1)...(19): siRNA sense strand
ggagguggugucauuugug

SEQ ID NO: 1048854 - RNA, 19 nt, Homo sapiens
  misc_RNA (1)...(19): siRNA sense strand
guuggaaaguuggcugcaa

SEQ ID NO: 1048855 - RNA, 19 nt, Homo sapiens
  misc_RNA (1)...(19): siRNA sense strand
cagguuucauauuccagaa

SEQ ID NO: 1048856 - RNA, 19 nt, Homo sapiens
  misc_RNA (1)...(19): siRNA sense strand
uaagagcaaucagauaccu

SEQ ID NO: 1048857 - RNA, 19 nt, Homo sapiens
  misc_RNA (1)...(19): siRNA sense strand
gcuaagaagcagccauggu

SEQ ID NO: 1048858 - RNA, 19 nt, Homo sapiens
  misc_RNA (1)...(19): siRNA sense strand
gacaagcucaccgaaaugg

SEQ ID NO: 1048859 - RNA, 19 nt, Homo sapiens
  misc_RNA (1)...(19): siRNA sense strand
aaaccauacuggguacauc

SEQ ID NO: 1048860 - RNA, 19 nt, Homo sapiens
  misc_RNA (1)...(19): siRNA sense strand
caugguggcguaagcuguu

SEQ ID NO: 1048861 - RNA, 19 nt, Homo sapiens
  misc_RNA (1)...(19): siRNA sense strand
ccgcgcagauccucuacgu

SEQ ID NO: 1048862 - RNA, 19 nt, Homo sapiens
  misc_RNA (1)...(19): siRNA sense strand
gccaaagagcagcugaaga

SEQ ID NO: 1048863 - RNA, 19 nt, Homo sapiens
  misc_RNA (1)...(19): siRNA sense strand
acucggaacugcagaagau

SEQ ID NO: 1048864 - RNA, 19 nt, Homo sapiens
  misc_RNA (1)...(19): siRNA sense strand
ccacaaggcagcugucaag

SEQ ID NO: 1048865 - RNA, 19 nt, Homo sapiens
  misc_RNA (1)...(19): siRNA sense strand
caccauagaccaccuguac

SEQ ID NO: 1048866 - RNA, 19 nt, Homo sapiens
  misc_RNA (1)...(19): siRNA sense strand
ggaaaaggaaacagaauag

SEQ ID NO: 1048867 - RNA, 19 nt, Homo sapiens
  misc_RNA (1)...(19): siRNA sense strand
gcaccauagaccaccugua

SEQ ID NO: 1048868 - RNA, 19 nt, Homo sapiens
  misc_RNA (1)...(19): siRNA sense strand
ccaaaccaaucuucccuua

SEQ ID NO: 1048869 - RNA, 19 nt, Homo sapiens
  misc_RNA (1)...(19): siRNA sense strand
agacaaggcugcaaauuca

SEQ ID NO: 1048870 - RNA, 19 nt, Homo sapiens
  misc_RNA (1)...(19): siRNA sense strand
aaaccaaucuucccuuaca

SEQ ID NO: 1048871 - RNA, 19 nt, Homo sapiens
  misc_RNA (1)...(19): siRNA sense strand
gagacaaggcugcaaauuc

SEQ ID NO: 1048872 - RNA, 19 nt, Homo sapiens
  misc_RNA (1)...(19): siRNA sense strand
gaacccaggccaagacacu

SEQ ID NO: 1048873 - RNA, 19 nt, Homo sapiens
  misc_RNA (1)...(19): siRNA sense strand
acucuugucugcugagauc

SEQ ID NO: 1048874 - RNA, 19 nt, Homo sapiens
  misc_RNA (1)...(19): siRNA sense strand
ugcaggcuaugcuuucuga

SEQ ID NO: 1048875 - RNA, 19 nt, Homo sapiens
  misc_RNA (1)...(19): siRNA sense strand
gauccucccagaagauaag

SEQ ID NO: 1048876 - RNA, 19 nt, Homo sapiens
  misc_RNA (1)...(19): siRNA sense strand
agaucacucuccaaaccaa

SEQ ID NO: 1048877 - RNA, 19 nt, Homo sapiens
  misc_RNA (1)...(19): siRNA sense strand
ggccaagacacuaaaauga

SEQ ID NO: 1048878 - RNA, 19 nt, Homo sapiens
  misc_RNA (1)...(19): siRNA sense strand
gaaagacucuggaacaaau

SEQ ID NO: 1048879 - RNA, 19 nt, Homo sapiens
  misc_RNA (1)...(19): siRNA sense strand
gaacaaaucacagcccauu

SEQ ID NO: 1048880 - RNA, 19 nt, Homo sapiens
  misc_RNA (1)...(19): siRNA sense strand
ggaaagacucuggaacaaa

SEQ ID NO: 1048881 - RNA, 19 nt, Homo sapiens
  misc_RNA (1)...(19): siRNA sense strand
ggucaacgccgucauguuc

SEQ ID NO: 1048882 - RNA, 19 nt, Homo sapiens
  misc_RNA (1)...(19): siRNA sense strand
gcagagaccaucuuugaag

SEQ ID NO: 1048883 - RNA, 19 nt, Homo sapiens
  misc_RNA (1)...(19): siRNA sense strand
ucaacgccgucauguucua

SEQ ID NO: 1048884 - RNA, 19 nt, Homo sapiens
  misc_RNA (1)...(19): siRNA sense strand
gaucuucccucugcauguc

SEQ ID NO: 1048885 - RNA, 19 nt, Homo sapiens
  misc_RNA (1)...(19): siRNA sense strand
cuacaagcccuucaucauc

SEQ ID NO: 1048886 - RNA, 19 nt, Homo sapiens
  misc_RNA (1)...(19): siRNA sense strand
uaaaggaaagacucuggaa

SEQ ID NO: 1048887 - RNA, 19 nt, Homo sapiens
  misc_RNA (1)...(19): siRNA sense strand
gggcugagcagagcuuuca

SEQ ID NO: 1048888 - RNA, 19 nt, Homo sapiens
  misc_RNA (1)...(19): siRNA sense strand
aggaaagacucuggaacaa

SEQ ID NO: 1048889 - RNA, 19 nt, Homo sapiens
  misc_RNA (1)...(19): siRNA sense strand
augcagagaccaucuuuga

SEQ ID NO: 1048890 - RNA, 19 nt, Homo sapiens
  misc_RNA (1)...(19): siRNA sense strand
gcaucugcguccucaccaa

SEQ ID NO: 1048891 - RNA, 19 nt, Homo sapiens
  misc_RNA (1)...(19): siRNA sense strand
uggcggcucucaucaugga

SEQ ID NO: 1048892 - RNA, 19 nt, Homo sapiens
  misc_RNA (1)...(19): siRNA sense strand
gcuccugugugcagcuaau

SEQ ID NO: 1048893 - RNA, 19 nt, Homo sapiens
  misc_RNA (1)...(19): siRNA sense strand
ggaguucagcagccucaug

SEQ ID NO: 1048894 - RNA, 19 nt, Homo sapiens
  misc_RNA (1)...(19): siRNA sense strand
aaggaaagacucuggaaca

SEQ ID NO: 1048895 - RNA, 19 nt, Homo sapiens
  misc_RNA (1)...(19): siRNA sense strand
uguggcggcucucaucaug

SEQ ID NO: 1048896 - RNA, 19 nt, Homo sapiens
  misc_RNA (1)...(19): siRNA sense strand
cagguguggucaugguguu

SEQ ID NO: 1048897 - RNA, 19 nt, Homo sapiens
  misc_RNA (1)...(19): siRNA sense strand
cagcaugugccucuucauc

SEQ ID NO: 1048898 - RNA, 19 nt, Homo sapiens
  misc_RNA (1)...(19): siRNA sense strand
ggucuacaucuccgaaauc

SEQ ID NO: 1048899 - RNA, 19 nt, Homo sapiens
  misc_RNA (1)...(19): siRNA sense strand
cugugucccugaaacuaaa

SEQ ID NO: 1048900 - RNA, 19 nt, Homo sapiens
  misc_RNA (1)...(19): siRNA sense strand
aaacuaaaggaaagacucu

SEQ ID NO: 1048901 - RNA, 19 nt, Homo sapiens
  misc_RNA (1)...(19): siRNA sense strand
ucugugucccugaaacuaa

SEQ ID NO: 1048902 - RNA, 19 nt, Homo sapiens
  misc_RNA (1)...(19): siRNA sense strand
ggaaggagguguuuaugua

SEQ ID NO: 1048903 - RNA, 19 nt, Homo sapiens
  misc_RNA (1)...(19): siRNA sense strand
ggagaaagcucacccaguu

SEQ ID NO: 1048904 - RNA, 19 nt, Homo sapiens
  misc_RNA (1)...(19): siRNA sense strand
gaaauggaaucuguaauga

SEQ ID NO: 1048905 - RNA, 19 nt, Homo sapiens
  misc_RNA (1)...(19): siRNA sense strand
gaaauuaccacaccuacua

SEQ ID NO: 1048906 - RNA, 19 nt, Homo sapiens
  misc_RNA (1)...(19): siRNA sense strand
gcaccaagguuccuaaaga

SEQ ID NO: 1048907 - RNA, 19 nt, Homo sapiens
  misc_RNA (1)...(19): siRNA sense strand
guaaagaaauggaaucugu

SEQ ID NO: 1048908 - RNA, 19 nt, Homo sapiens
  misc_RNA (1)...(19): siRNA sense strand
uaaaucagcuguuucaugu

SEQ ID NO: 1048909 - RNA, 19 nt, Homo sapiens
  misc_RNA (1)...(19): siRNA sense strand
uuacugagcuuugugauaa

SEQ ID NO: 1048910 - RNA, 19 nt, Homo sapiens
  misc_RNA (1)...(19): siRNA sense strand
caacaaaguuacugugaau

SEQ ID NO: 1048911 - RNA, 19 nt, Homo sapiens
  misc_RNA (1)...(19): siRNA sense strand
uggauuaguuguacuguua

SEQ ID NO: 1048912 - RNA, 19 nt, Homo sapiens
  misc_RNA (1)...(19): siRNA sense strand
gaacaaacgcaucauugaa

SEQ ID NO: 1048913 - RNA, 19 nt, Homo sapiens
  misc_RNA (1)...(19): siRNA sense strand
ugaaagacaugcagaacaa

SEQ ID NO: 1048914 - RNA, 19 nt, Homo sapiens
  misc_RNA (1)...(19): siRNA sense strand
gaaauugcuugcggaguuu

SEQ ID NO: 1048915 - RNA, 19 nt, Homo sapiens
  misc_RNA (1)...(19): siRNA sense strand
gaacagguauuuuccuuuu

SEQ ID NO: 1048916 - RNA, 19 nt, Homo sapiens
  misc_RNA (1)...(19): siRNA sense strand
gcaacaaaguuacugugaa

SEQ ID NO: 1048917 - RNA, 19 nt, Homo sapiens
  misc_RNA (1)...(19): siRNA sense strand
ggucacacauuacauauag

SEQ ID NO: 1048918 - RNA, 19 nt, Homo sapiens
  misc_RNA (1)...(19): siRNA sense strand
gaaccaauuuagaacuuga

SEQ ID NO: 1048919 - RNA, 19 nt, Homo sapiens
  misc_RNA (1)...(19): siRNA sense strand
gaagcaauguggaaaauaa

SEQ ID NO: 1048920 - RNA, 19 nt, Homo sapiens
  misc_RNA (1)...(19): siRNA sense strand
uacaagaucucauaaagga

SEQ ID NO: 1048921 - RNA, 19 nt, Homo sapiens
  misc_RNA (1)...(19): siRNA sense strand
ggaaaggccuugcuuaucc

SEQ ID NO: 1048922 - RNA, 19 nt, Homo sapiens
  misc_RNA (1)...(19): siRNA sense strand
gugaagaggagcagauuua

SEQ ID NO: 1048923 - RNA, 19 nt, Homo sapiens
  misc_RNA (1)...(19): siRNA sense strand
gagagaggcagcagaaauu

SEQ ID NO: 1048924 - RNA, 19 nt, Homo sapiens
  misc_RNA (1)...(19): siRNA sense strand
gaacuguggugcaggaaca

SEQ ID NO: 1048925 - RNA, 19 nt, Homo sapiens
  misc_RNA (1)...(19): siRNA sense strand
uuacaagcauccucaguuu

SEQ ID NO: 1048926 - RNA, 19 nt, Homo sapiens
  misc_RNA (1)...(19): siRNA sense strand
cagaaaagcuuuauggaaa

SEQ ID NO: 1048927 - RNA, 19 nt, Homo sapiens
  misc_RNA (1)...(19): siRNA sense strand
caacaguggauuucucaua

SEQ ID NO: 1048928 - RNA, 19 nt, Homo sapiens
  misc_RNA (1)...(19): siRNA sense strand
gaagagauauguagaaaag

SEQ ID NO: 1048929 - RNA, 19 nt, Homo sapiens
  misc_RNA (1)...(19): siRNA sense strand
ccaggaagaagaagaauuu

SEQ ID NO: 1048930 - RNA, 19 nt, Homo sapiens
  misc_RNA (1)...(19): siRNA sense strand
acaguguucuuccauguua

SEQ ID NO: 1048931 - RNA, 19 nt, Homo sapiens
  misc_RNA (1)...(19): siRNA sense strand
aggcaaaccucucuacauu

SEQ ID NO: 1048932 - RNA, 19 nt, Homo sapiens
  misc_RNA (1)...(19): siRNA sense strand
agaaauugcuugcggaguu

SEQ ID NO: 1048933 - RNA, 19 nt, Homo sapiens
  misc_RNA (1)...(19): siRNA sense strand
ccacaacccuuacgcaaag

SEQ ID NO: 1048934 - RNA, 19 nt, Homo sapiens
  misc_RNA (1)...(19): siRNA sense strand
gaugugaggcuuucauuau

SEQ ID NO: 1048935 - RNA, 19 nt, Homo sapiens
  misc_RNA (1)...(19): siRNA sense strand
ucagcuguuucauguauua

SEQ ID NO: 1048936 - RNA, 19 nt, Homo sapiens
  misc_RNA (1)...(19): siRNA sense strand
ugugaggcuuucauuauua

SEQ ID NO: 1048937 - RNA, 19 nt, Homo sapiens
  misc_RNA (1)...(19): siRNA sense strand
cauacaagaucucauaaag

SEQ ID NO: 1048938 - RNA, 19 nt, Homo sapiens
  misc_RNA (1)...(19): siRNA sense strand
gaagaucgaccuacuggau

SEQ ID NO: 1048939 - RNA, 19 nt, Homo sapiens
  misc_RNA (1)...(19): siRNA sense strand
ggcaaaaggucuuguuuaa

SEQ ID NO: 1048940 - RNA, 19 nt, Homo sapiens
  misc_RNA (1)...(19): siRNA sense strand
gcagugccgugacaauguu

SEQ ID NO: 1048941 - RNA, 19 nt, Homo sapiens
  misc_RNA (1)...(19): siRNA sense strand
aaacugcaauggauguuga

SEQ ID NO: 1048942 - RNA, 19 nt, Homo sapiens
  misc_RNA (1)...(19): siRNA sense strand
cuaaagauccugcuguuug

SEQ ID NO: 1048943 - RNA, 19 nt, Homo sapiens
  misc_RNA (1)...(19): siRNA sense strand
gaagaagaauuuucaguuc

SEQ ID NO: 1048944 - RNA, 19 nt, Homo sapiens
  misc_RNA (1)...(19): siRNA sense strand
agaaaagucuuacgaagua

SEQ ID NO: 1048945 - RNA, 19 nt, Homo sapiens
  misc_RNA (1)...(19): siRNA sense strand
gcugggauaugaagaacaa

SEQ ID NO: 1048946 - RNA, 19 nt, Homo sapiens
  misc_RNA (1)...(19): siRNA sense strand
gcaacguccuagcaacaaa

SEQ ID NO: 1048947 - RNA, 19 nt, Homo sapiens
  misc_RNA (1)...(19): siRNA sense strand
guuccagcauuugauauua

SEQ ID NO: 1048948 - RNA, 19 nt, Homo sapiens
  misc_RNA (1)...(19): siRNA sense strand
ggaaugaccagguucuuca

SEQ ID NO: 1048949 - RNA, 19 nt, Homo sapiens
  misc_RNA (1)...(19): siRNA sense strand
agaaggaacucaggaaugu

SEQ ID NO: 1048950 - RNA, 19 nt, Homo sapiens
  misc_RNA (1)...(19): siRNA sense strand
gagaaagcucacccaguua

SEQ ID NO: 1048951 - RNA, 19 nt, Homo sapiens
  misc_RNA (1)...(19): siRNA sense strand
gaguacaugugaugcagaa

SEQ ID NO: 1048952 - RNA, 19 nt, Homo sapiens
  misc_RNA (1)...(19): siRNA sense strand
gcagcacucucaguuaaau

SEQ ID NO: 1048953 - RNA, 19 nt, Homo sapiens
  misc_RNA (1)...(19): siRNA sense strand
ucaggaaugugcaaugguu

SEQ ID NO: 1048954 - RNA, 19 nt, Homo sapiens
  misc_RNA (1)...(19): siRNA sense strand
gcugcaagcaacaaaguua

SEQ ID NO: 1048955 - RNA, 19 nt, Homo sapiens
  misc_RNA (1)...(19): siRNA sense strand
uacaguugccugagaauua

SEQ ID NO: 1048956 - RNA, 19 nt, Homo sapiens
  misc_RNA (1)...(19): siRNA sense strand
agaucgaccuacuggauua

SEQ ID NO: 1048957 - RNA, 19 nt, Homo sapiens
  misc_RNA (1)...(19): siRNA sense strand
auacaaaguucuugagcaa

SEQ ID NO: 1048958 - RNA, 19 nt, Homo sapiens
  misc_RNA (1)...(19): siRNA sense strand
gaucaaugcaucgguaauu

SEQ ID NO: 1048959 - RNA, 19 nt, Homo sapiens
  misc_RNA (1)...(19): siRNA sense strand
gaagaaggaacucaggaau

SEQ ID NO: 1048960 - RNA, 19 nt, Homo sapiens
  misc_RNA (1)...(19): siRNA sense strand
ggaaaguuauaccaugaag

SEQ ID NO: 1048961 - RNA, 19 nt, Homo sapiens
  misc_RNA (1)...(19): siRNA sense strand
aaucagcuguuucauguau

SEQ ID NO: 1048962 - RNA, 19 nt, Homo sapiens
  misc_RNA (1)...(19): siRNA sense strand
guacugcacucucagaacu

SEQ ID NO: 1048963 - RNA, 19 nt, Homo sapiens
  misc_RNA (1)...(19): siRNA sense strand
aaggaaagauacaaaguuc

SEQ ID NO: 1048964 - RNA, 19 nt, Homo sapiens
  misc_RNA (1)...(19): siRNA sense strand
cacuuuaccugcauuguga

SEQ ID NO: 1048965 - RNA, 19 nt, Homo sapiens
  misc_RNA (1)...(19): siRNA sense strand
aaggaaaguuauaccauga

SEQ ID NO: 1048966 - RNA, 19 nt, Homo sapiens
  misc_RNA (1)...(19): siRNA sense strand
gaauucacguguccacucu

SEQ ID NO: 1048967 - RNA, 19 nt, Homo sapiens
  misc_RNA (1)...(19): siRNA sense strand
guuauaccaugaagaagga

SEQ ID NO: 1048968 - RNA, 19 nt, Homo sapiens
  misc_RNA (1)...(19): siRNA sense strand
uugcagcacucucaguuaa

SEQ ID NO: 1048969 - RNA, 19 nt, Homo sapiens
  misc_RNA (1)...(19): siRNA sense strand
aagcauacaagaucucaua

SEQ ID NO: 1048970 - RNA, 19 nt, Homo sapiens
  misc_RNA (1)...(19): siRNA sense strand
uauggaaacugcaauggau

SEQ ID NO: 1048971 - RNA, 19 nt, Homo sapiens
  misc_RNA (1)...(19): siRNA sense strand
gagcaacaguggauuucuc

SEQ ID NO: 1048972 - RNA, 19 nt, Homo sapiens
  misc_RNA (1)...(19): siRNA sense strand
acaaaguucuugagcaaca

SEQ ID NO: 1048973 - RNA, 19 nt, Homo sapiens
  misc_RNA (1)...(19): siRNA sense strand
guauuuggaugcucaugga

SEQ ID NO: 1048974 - RNA, 19 nt, Homo sapiens
  misc_RNA (1)...(19): siRNA sense strand
caaaguuacugugaaugug

SEQ ID NO: 1048975 - RNA, 19 nt, Homo sapiens
  misc_RNA (1)...(19): siRNA sense strand
acaaacgcaucauugaaga

SEQ ID NO: 1048976 - RNA, 19 nt, Homo sapiens
  misc_RNA (1)...(19): siRNA sense strand
gaaaggccuugcuuaucca

SEQ ID NO: 1048977 - RNA, 19 nt, Homo sapiens
  misc_RNA (1)...(19): siRNA sense strand
ccaaacagaacauccauuc

SEQ ID NO: 1048978 - RNA, 19 nt, Homo sapiens
  misc_RNA (1)...(19): siRNA sense strand
gcauacaagaucucauaaa

SEQ ID NO: 1048979 - RNA, 19 nt, Homo sapiens
  misc_RNA (1)...(19): siRNA sense strand
agaaauggaaucuguaaug

SEQ ID NO: 1048980 - RNA, 19 nt, Homo sapiens
  misc_RNA (1)...(19): siRNA sense strand
gugcaaugguuaacccuau

SEQ ID NO: 1048981 - RNA, 19 nt, Homo sapiens
  misc_RNA (1)...(19): siRNA sense strand
acgcaucauugaagagaua

SEQ ID NO: 1048982 - RNA, 19 nt, Homo sapiens
  misc_RNA (1)...(19): siRNA sense strand
gugacaauguugagccaaa

SEQ ID NO: 1048983 - RNA, 19 nt, Homo sapiens
  misc_RNA (1)...(19): siRNA sense strand
cuacuacaguugccugaga

SEQ ID NO: 1048984 - RNA, 19 nt, Homo sapiens
  misc_RNA (1)...(19): siRNA sense strand
ccaauucuuuaucaugaug

SEQ ID NO: 1048985 - RNA, 19 nt, Homo sapiens
  misc_RNA (1)...(19): siRNA sense strand
ccacucagaagaaauauag

SEQ ID NO: 1048986 - RNA, 19 nt, Homo sapiens
  misc_RNA (1)...(19): siRNA sense strand
cgacagaaggcuagagaga

SEQ ID NO: 1048987 - RNA, 19 nt, Homo sapiens
  misc_RNA (1)...(19): siRNA sense strand
uggaaucuguaaugaaaga

SEQ ID NO: 1048988 - RNA, 19 nt, Homo sapiens
  misc_RNA (1)...(19): siRNA sense strand
gugcagccguucaugaugu

SEQ ID NO: 1048989 - RNA, 19 nt, Homo sapiens
  misc_RNA (1)...(19): siRNA sense strand
gaagaaaacauuggacaaa

SEQ ID NO: 1048990 - RNA, 19 nt, Homo sapiens
  misc_RNA (1)...(19): siRNA sense strand
uauaaucccuggagaaagc

SEQ ID NO: 1048991 - RNA, 19 nt, Homo sapiens
  misc_RNA (1)...(19): siRNA sense strand
cagaagaaauauagagacu

SEQ ID NO: 1048992 - RNA, 19 nt, Homo sapiens
  misc_RNA (1)...(19): siRNA sense strand
aaauaccacucagaagaaa

SEQ ID NO: 1048993 - RNA, 19 nt, Homo sapiens
  misc_RNA (1)...(19): siRNA sense strand
ggagguguuuauguacaaa

SEQ ID NO: 1048994 - RNA, 19 nt, Homo sapiens
  misc_RNA (1)...(19): siRNA sense strand
caccaagguuccuaaagau

SEQ ID NO: 1048995 - RNA, 19 nt, Homo sapiens
  misc_RNA (1)...(19): siRNA sense strand
aaacagaacauccauucau

SEQ ID NO: 1048996 - RNA, 19 nt, Homo sapiens
  misc_RNA (1)...(19): siRNA sense strand
uuacaggacuucugcuuac

SEQ ID NO: 1048997 - RNA, 19 nt, Homo sapiens
  misc_RNA (1)...(19): siRNA sense strand
ggauaguucaugucucuug

SEQ ID NO: 1048998 - RNA, 19 nt, Homo sapiens
  misc_RNA (1)...(19): siRNA sense strand
uaaagauccugcuguuugc

SEQ ID NO: 1048999 - RNA, 19 nt, Homo sapiens
  misc_RNA (1)...(19): siRNA sense strand
ccaguuccagcauuugaua

SEQ ID NO: 1049000 - RNA, 19 nt, Homo sapiens
  misc_RNA (1)...(19): siRNA sense strand
uaccacaccuacuacaguu

SEQ ID NO: 1049001 - RNA, 19 nt, Homo sapiens
  misc_RNA (1)...(19): siRNA sense strand
acaguugccugagaauuau

SEQ ID NO: 1049002 - RNA, 19 nt, Homo sapiens
  misc_RNA (1)...(19): siRNA sense strand
gagaauggcuuggaagaug

SEQ ID NO: 1049003 - RNA, 19 nt, Homo sapiens
  misc_RNA (1)...(19): siRNA sense strand
gagaaaugcuggcugugaa

SEQ ID NO: 1049004 - RNA, 19 nt, Homo sapiens
  misc_RNA (1)...(19): siRNA sense strand
ccacuacccugauguguau

SEQ ID NO: 1049005 - RNA, 19 nt, Homo sapiens
  misc_RNA (1)...(19): siRNA sense strand
ucacagagaggcucagaua

SEQ ID NO: 1049006 - RNA, 19 nt, Homo sapiens
  misc_RNA (1)...(19): siRNA sense strand
auacaggucugguuucaaa

SEQ ID NO: 1049007 - RNA, 19 nt, Homo sapiens
  misc_RNA (1)...(19): siRNA sense strand
uggaagauguggcuauuga

SEQ ID NO: 1049008 - RNA, 19 nt, Homo sapiens
  misc_RNA (1)...(19): siRNA sense strand
ggauacaggucugguuuca

SEQ ID NO: 1049009 - RNA, 19 nt, Homo sapiens
  misc_RNA (1)...(19): siRNA sense strand
gcucugaccacuucaaaga

SEQ ID NO: 1049010 - RNA, 19 nt, Homo sapiens
  misc_RNA (1)...(19): siRNA sense strand
gcagcgugauggccgagua

SEQ ID NO: 1049011 - RNA, 19 nt, Homo sapiens
  misc_RNA (1)...(19): siRNA sense strand
acagagaggcucagauaaa

SEQ ID NO: 1049012 - RNA, 19 nt, Homo sapiens
  misc_RNA (1)...(19): siRNA sense strand
agacaggaaugaccuaaag

SEQ ID NO: 1049013 - RNA, 19 nt, Homo sapiens
  misc_RNA (1)...(19): siRNA sense strand
aaacugagcuccccgaaga

SEQ ID NO: 1049014 - RNA, 19 nt, Homo sapiens
  misc_RNA (1)...(19): siRNA sense strand
cagagaggcucagauaaag

SEQ ID NO: 1049015 - RNA, 19 nt, Homo sapiens
  misc_RNA (1)...(19): siRNA sense strand
gaagacaggaaugaccuaa

SEQ ID NO: 1049016 - RNA, 19 nt, Homo sapiens
  misc_RNA (1)...(19): siRNA sense strand
uaaggaagccaggaaguga

SEQ ID NO: 1049017 - RNA, 19 nt, Homo sapiens
  misc_RNA (1)...(19): siRNA sense strand
gagaggcucagauaaagug

SEQ ID NO: 1049018 - RNA, 19 nt, Homo sapiens
  misc_RNA (1)...(19): siRNA sense strand
gccaggaagugaagauaag

SEQ ID NO: 1049019 - RNA, 19 nt, Homo sapiens
  misc_RNA (1)...(19): siRNA sense strand
gauaaagugagcccugaga

SEQ ID NO: 1049020 - RNA, 19 nt, Homo sapiens
  misc_RNA (1)...(19): siRNA sense strand
aaagugagcccugagaaug

SEQ ID NO: 1049021 - RNA, 19 nt, Homo sapiens
  misc_RNA (1)...(19): siRNA sense strand
cgagaaaugcuggcuguga

SEQ ID NO: 1049022 - RNA, 19 nt, Homo sapiens
  misc_RNA (1)...(19): siRNA sense strand
uaaagugagcccugagaau

SEQ ID NO: 1049023 - RNA, 19 nt, Homo sapiens
  misc_RNA (1)...(19): siRNA sense strand
gaggacagccagucugaag

SEQ ID NO: 1049024 - RNA, 19 nt, Homo sapiens
  misc_RNA (1)...(19): siRNA sense strand
ggcaggagaccaagaaagu

SEQ ID NO: 1049025 - RNA, 19 nt, Homo sapiens
  misc_RNA (1)...(19): siRNA sense strand
agaauggcuuggaagaugu

SEQ ID NO: 1049026 - RNA, 19 nt, Homo sapiens
  misc_RNA (1)...(19): siRNA sense strand
ugauguguaugcccgagaa

SEQ ID NO: 1049027 - RNA, 19 nt, Homo sapiens
  misc_RNA (1)...(19): siRNA sense strand
gauaaggaagccaggaagu

SEQ ID NO: 1049028 - RNA, 19 nt, Homo sapiens
  misc_RNA (1)...(19): siRNA sense strand
gaagccaggaagugaagau

SEQ ID NO: 1049029 - RNA, 19 nt, Homo sapiens
  misc_RNA (1)...(19): siRNA sense strand
gcaggagaccaagaaagug

SEQ ID NO: 1049030 - RNA, 19 nt, Homo sapiens
  misc_RNA (1)...(19): siRNA sense strand
cuuggaagauguggcuauu

SEQ ID NO: 1049031 - RNA, 19 nt, Homo sapiens
  misc_RNA (1)...(19): siRNA sense strand
gaggcccacuacccugaug

SEQ ID NO: 1049032 - RNA, 19 nt, Homo sapiens
  misc_RNA (1)...(19): siRNA sense strand
gaucacagagaggcucaga

SEQ ID NO: 1049033 - RNA, 19 nt, Homo sapiens
  misc_RNA (1)...(19): siRNA sense strand
gggcucugaccacuucaaa

SEQ ID NO: 1049034 - RNA, 19 nt, Homo sapiens
  misc_RNA (1)...(19): siRNA sense strand
ccggauacaggucugguuu

SEQ ID NO: 1049035 - RNA, 19 nt, Homo sapiens
  misc_RNA (1)...(19): siRNA sense strand
agaaaugcuggcugugaaa

SEQ ID NO: 1049036 - RNA, 19 nt, Homo sapiens
  misc_RNA (1)...(19): siRNA sense strand
cucaccagcuggaagaguu

SEQ ID NO: 1049037 - RNA, 19 nt, Homo sapiens
  misc_RNA (1)...(19): siRNA sense strand
ugagucaggaucacagaga

SEQ ID NO: 1049038 - RNA, 19 nt, Homo sapiens
  misc_RNA (1)...(19): siRNA sense strand
cacagagaggcucagauaa

SEQ ID NO: 1049039 - RNA, 19 nt, Homo sapiens
  misc_RNA (1)...(19): siRNA sense strand
ccagagugagucaggauca

SEQ ID NO: 1049040 - RNA, 19 nt, Homo sapiens
  misc_RNA (1)...(19): siRNA sense strand
cccacuacccugaugugua

SEQ ID NO: 1049041 - RNA, 19 nt, Homo sapiens
  misc_RNA (1)...(19): siRNA sense strand
caggaagugaagauaaguu

SEQ ID NO: 1049042 - RNA, 19 nt, Homo sapiens
  misc_RNA (1)...(19): siRNA sense strand
gaacuacugggaucccuaa

SEQ ID NO: 1049043 - RNA, 19 nt, Homo sapiens
  misc_RNA (1)...(19): siRNA sense strand
gcccggaacuucuccuuca

SEQ ID NO: 1049044 - RNA, 19 nt, Homo sapiens
  misc_RNA (1)...(19): siRNA sense strand
gcaugccacccgacccuua

SEQ ID NO: 1049045 - RNA, 19 nt, Homo sapiens
  misc_RNA (1)...(19): siRNA sense strand
guaccauccucaccguagu

SEQ ID NO: 1049046 - RNA, 19 nt, Homo sapiens
  misc_RNA (1)...(19): siRNA sense strand
cugcuuacgugccggucua

SEQ ID NO: 1049047 - RNA, 19 nt, Homo sapiens
  misc_RNA (1)...(19): siRNA sense strand
caucauugccaucuucaag

SEQ ID NO: 1049048 - RNA, 19 nt, Homo sapiens
  misc_RNA (1)...(19): siRNA sense strand
ccacuacuaccaucagucu

SEQ ID NO: 1049049 - RNA, 19 nt, Homo sapiens
  misc_RNA (1)...(19): siRNA sense strand
gugcugaccaccaucuguu

SEQ ID NO: 1049050 - RNA, 19 nt, Homo sapiens
  misc_RNA (1)...(19): siRNA sense strand
cggaacuucuccuucaucu

SEQ ID NO: 1049051 - RNA, 19 nt, Homo sapiens
  misc_RNA (1)...(19): siRNA sense strand
ccacaaacauuaccuguca

SEQ ID NO: 1049052 - RNA, 19 nt, Homo sapiens
  misc_RNA (1)...(19): siRNA sense strand
ggaugugcaugccauagua

SEQ ID NO: 1049053 - RNA, 19 nt, Homo sapiens
  misc_RNA (1)...(19): siRNA sense strand
gguaacaccuccucacucu

SEQ ID NO: 1049054 - RNA, 19 nt, Homo sapiens
  misc_RNA (1)...(19): siRNA sense strand
gcugggagcuggacaacgu

SEQ ID NO: 1049055 - RNA, 19 nt, Homo sapiens
  misc_RNA (1)...(19): siRNA sense strand
gcaaggcccaugauaguag

SEQ ID NO: 1049056 - RNA, 19 nt, Homo sapiens
  misc_RNA (1)...(19): siRNA sense strand
gcugagcucugccgucuac

SEQ ID NO: 1049057 - RNA, 19 nt, Homo sapiens
  misc_RNA (1)...(19): siRNA sense strand
ccuccucacucuggaauuu

SEQ ID NO: 1049058 - RNA, 19 nt, Homo sapiens
  misc_RNA (1)...(19): siRNA sense strand
caaggcccaugauaguaga

SEQ ID NO: 1049059 - RNA, 19 nt, Homo sapiens
  misc_RNA (1)...(19): siRNA sense strand
gaagaggagaacucaaucu

SEQ ID NO: 1049060 - RNA, 19 nt, Homo sapiens
  misc_RNA (1)...(19): siRNA sense strand
gcaggaagaggagaacuca

SEQ ID NO: 1049061 - RNA, 19 nt, Homo sapiens
  misc_RNA (1)...(19): siRNA sense strand
ggaagaggagaacucaauc

SEQ ID NO: 1049062 - RNA, 19 nt, Homo sapiens
  misc_RNA (1)...(19): siRNA sense strand
gaugugcaugccauaguaa

SEQ ID NO: 1049063 - RNA, 19 nt, Homo sapiens
  misc_RNA (1)...(19): siRNA sense strand
gcaggaugugcaugccaua

SEQ ID NO: 1049064 - RNA, 19 nt, Homo sapiens
  misc_RNA (1)...(19): siRNA sense strand
gaggucugccacaaacauu

SEQ ID NO: 1049065 - RNA, 19 nt, Homo sapiens
  misc_RNA (1)...(19): siRNA sense strand
aggaagaggagaacucaau

SEQ ID NO: 1049066 - RNA, 19 nt, Homo sapiens
  misc_RNA (1)...(19): siRNA sense strand
cugcaaggcccaugauagu

SEQ ID NO: 1049067 - RNA, 19 nt, Homo sapiens
  misc_RNA (1)...(19): siRNA sense strand
guaaccagaaccugugagu

SEQ ID NO: 1049068 - RNA, 19 nt, Homo sapiens
  misc_RNA (1)...(19): siRNA sense strand
aaccagaaccugugagucu

SEQ ID NO: 1049069 - RNA, 19 nt, Homo sapiens
  misc_RNA (1)...(19): siRNA sense strand
gaacauugauaacaacuuc

SEQ ID NO: 1049070 - RNA, 19 nt, Homo sapiens
  misc_RNA (1)...(19): siRNA sense strand
caaaggaggacacuuauga

SEQ ID NO: 1049071 - RNA, 19 nt, Homo sapiens
  misc_RNA (1)...(19): siRNA sense strand
gugaggaugucaacuauga

SEQ ID NO: 1049072 - RNA, 19 nt, Homo sapiens
  misc_RNA (1)...(19): siRNA sense strand
acacaaaggaggacacuua

SEQ ID NO: 1049073 - RNA, 19 nt, Homo sapiens
  misc_RNA (1)...(19): siRNA sense strand
ggaggacacuuaugagaac

SEQ ID NO: 1049074 - RNA, 19 nt, Homo sapiens
  misc_RNA (1)...(19): siRNA sense strand
ggacgguggugacuuugga

SEQ ID NO: 1049075 - RNA, 19 nt, Homo sapiens
  misc_RNA (1)...(19): siRNA sense strand
ggaggacccugacgucuac

SEQ ID NO: 1049076 - RNA, 19 nt, Homo sapiens
  misc_RNA (1)...(19): siRNA sense strand
gcccaucagugcagacauu

SEQ ID NO: 1049077 - RNA, 19 nt, Homo sapiens
  misc_RNA (1)...(19): siRNA sense strand
gaccaaugcucaggacuuc

SEQ ID NO: 1049078 - RNA, 19 nt, Homo sapiens
  misc_RNA (1)...(19): siRNA sense strand
ggacagcagugccuauucc

SEQ ID NO: 1049079 - RNA, 19 nt, Homo sapiens
  misc_RNA (1)...(19): siRNA sense strand
guacaacgugcgcauaaug

SEQ ID NO: 1049080 - RNA, 19 nt, Homo sapiens
  misc_RNA (1)...(19): siRNA sense strand
ugacggcccugcugaucuu

SEQ ID NO: 1049081 - RNA, 19 nt, Homo sapiens
  misc_RNA (1)...(19): siRNA sense strand
ggcagacucucuaugaaca

SEQ ID NO: 1049082 - RNA, 19 nt, Homo sapiens
  misc_RNA (1)...(19): siRNA sense strand
ccagagagcgcaacaacug

SEQ ID NO: 1049083 - RNA, 19 nt, Homo sapiens
  misc_RNA (1)...(19): siRNA sense strand
gcucaaggagugcucauau

SEQ ID NO: 1049084 - RNA, 19 nt, Homo sapiens
  misc_RNA (1)...(19): siRNA sense strand
ucagugaggaugucaacua

SEQ ID NO: 1049085 - RNA, 19 nt, Homo sapiens
  misc_RNA (1)...(19): siRNA sense strand
cucaaggagugcucauaua

SEQ ID NO: 1049086 - RNA, 19 nt, Homo sapiens
  misc_RNA (1)...(19): siRNA sense strand
ccucaaagccguaguguac

SEQ ID NO: 1049087 - RNA, 19 nt, Homo sapiens
  misc_RNA (1)...(19): siRNA sense strand
gugcggagacucuguguug

SEQ ID NO: 1049088 - RNA, 19 nt, Homo sapiens
  misc_RNA (1)...(19): siRNA sense strand
cagugaggaugucaacuau

SEQ ID NO: 1049089 - RNA, 19 nt, Homo sapiens
  misc_RNA (1)...(19): siRNA sense strand
gaggacaccaucaggcaaa

SEQ ID NO: 1049090 - RNA, 19 nt, Homo sapiens
  misc_RNA (1)...(19): siRNA sense strand
ucuggaacauugauaacaa

SEQ ID NO: 1049091 - RNA, 19 nt, Homo sapiens
  misc_RNA (1)...(19): siRNA sense strand
ccagaucacuacguuguca

SEQ ID NO: 1049092 - RNA, 19 nt, Homo sapiens
  misc_RNA (1)...(19): siRNA sense strand
caucaggccuucccagcau

SEQ ID NO: 1049093 - RNA, 19 nt, Homo sapiens
  misc_RNA (1)...(19): siRNA sense strand
ucgggaaccucaacgaguu

SEQ ID NO: 1049094 - RNA, 19 nt, Homo sapiens
  misc_RNA (1)...(19): siRNA sense strand
guggaguucuacuuccuuu

SEQ ID NO: 1049095 - RNA, 19 nt, Homo sapiens
  misc_RNA (1)...(19): siRNA sense strand
uaaugcggguggaguucua

SEQ ID NO: 1049096 - RNA, 19 nt, Homo sapiens
  misc_RNA (1)...(19): siRNA sense strand
gccgucgaguucuccuuua

SEQ ID NO: 1049097 - RNA, 19 nt, Homo sapiens
  misc_RNA (1)...(19): siRNA sense strand
caacaacuguccccaagau

SEQ ID NO: 1049098 - RNA, 19 nt, Homo sapiens
  misc_RNA (1)...(19): siRNA sense strand
cgaccaggccuacccauuc

SEQ ID NO: 1049099 - RNA, 19 nt, Homo sapiens
  misc_RNA (1)...(19): siRNA sense strand
ccaguucccuccaguugca

SEQ ID NO: 1049100 - RNA, 19 nt, Homo sapiens
  misc_RNA (1)...(19): siRNA sense strand
uggcuucccuuccuucaau

SEQ ID NO: 1049101 - RNA, 19 nt, Homo sapiens
  misc_RNA (1)...(19): siRNA sense strand
gagagagacgagcgacuga

SEQ ID NO: 1049102 - RNA, 19 nt, Homo sapiens
  misc_RNA (1)...(19): siRNA sense strand
ggcuaguggucaacaauca

SEQ ID NO: 1049103 - RNA, 19 nt, Homo sapiens
  misc_RNA (1)...(19): siRNA sense strand
gugggcagacucucuauga

SEQ ID NO: 1049104 - RNA, 19 nt, Homo sapiens
  misc_RNA (1)...(19): siRNA sense strand
cugggacgguggugacuuu

SEQ ID NO: 1049105 - RNA, 19 nt, Homo sapiens
  misc_RNA (1)...(19): siRNA sense strand
agagccagaucacuacguu

SEQ ID NO: 1049106 - RNA, 19 nt, Homo sapiens
  misc_RNA (1)...(19): siRNA sense strand
ggcaguguauggacaugug

SEQ ID NO: 1049107 - RNA, 19 nt, Homo sapiens
  misc_RNA (1)...(19): siRNA sense strand
cccagaaggugaccaaugc

SEQ ID NO: 1049108 - RNA, 19 nt, Homo sapiens
  misc_RNA (1)...(19): siRNA sense strand
ucaaggagugcucauauac

SEQ ID NO: 1049109 - RNA, 19 nt, Homo sapiens
  misc_RNA (1)...(19): siRNA sense strand
ugacacgcauguacaacgu

SEQ ID NO: 1049110 - RNA, 19 nt, Homo sapiens
  misc_RNA (1)...(19): siRNA sense strand
ggagacauuggcccacuuc

SEQ ID NO: 1049111 - RNA, 19 nt, Homo sapiens
  misc_RNA (1)...(19): siRNA sense strand
ggaacauugauaacaacuu

SEQ ID NO: 1049112 - RNA, 19 nt, Homo sapiens
  misc_RNA (1)...(19): siRNA sense strand
cgacugacacgcauguaca

SEQ ID NO: 1049113 - RNA, 19 nt, Homo sapiens
  misc_RNA (1)...(19): siRNA sense strand
gagagacgagcgacugaca

SEQ ID NO: 1049114 - RNA, 19 nt, Homo sapiens
  misc_RNA (1)...(19): siRNA sense strand
acccauuccugcacacaaa

SEQ ID NO: 1049115 - RNA, 19 nt, Homo sapiens
  misc_RNA (1)...(19): siRNA sense strand
gcccagaaggugaccaaug

SEQ ID NO: 1049116 - RNA, 19 nt, Homo sapiens
  misc_RNA (1)...(19): siRNA sense strand
gcacaucgggaaccucaac

SEQ ID NO: 1049117 - RNA, 19 nt, Homo sapiens
  misc_RNA (1)...(19): siRNA sense strand
gucgaguucuccuuuaugg

SEQ ID NO: 1049118 - RNA, 19 nt, Homo sapiens
  misc_RNA (1)...(19): siRNA sense strand
gcaccucaaagccguagug

SEQ ID NO: 1049119 - RNA, 19 nt, Homo sapiens
  misc_RNA (1)...(19): siRNA sense strand
ggaccgacacgcacuacgu

SEQ ID NO: 1049120 - RNA, 19 nt, Homo sapiens
  misc_RNA (1)...(19): siRNA sense strand
cuaugagccugaccuggau

SEQ ID NO: 1049121 - RNA, 19 nt, Homo sapiens
  misc_RNA (1)...(19): siRNA sense strand
cacaaaggaggacacuuau

SEQ ID NO: 1049122 - RNA, 19 nt, Homo sapiens
  misc_RNA (1)...(19): siRNA sense strand
gaccaggccuacccauucc

SEQ ID NO: 1049123 - RNA, 19 nt, Homo sapiens
  misc_RNA (1)...(19): siRNA sense strand
ccagccagcaggcagugua

SEQ ID NO: 1049124 - RNA, 19 nt, Homo sapiens
  misc_RNA (1)...(19): siRNA sense strand
ggauggccgcucugacuca

SEQ ID NO: 1049125 - RNA, 19 nt, Homo sapiens
  misc_RNA (1)...(19): siRNA sense strand
gagcgacugacacgcaugu

SEQ ID NO: 1049126 - RNA, 19 nt, Homo sapiens
  misc_RNA (1)...(19): siRNA sense strand
ugggcagacucucuaugaa

SEQ ID NO: 1049127 - RNA, 19 nt, Homo sapiens
  misc_RNA (1)...(19): siRNA sense strand
uggaggacccugacgucua

SEQ ID NO: 1049128 - RNA, 19 nt, Homo sapiens
  misc_RNA (1)...(19): siRNA sense strand
ugaccaaugcucaggacuu

SEQ ID NO: 1049129 - RNA, 19 nt, Homo sapiens
  misc_RNA (1)...(19): siRNA sense strand
gggcagacucucuaugaac

SEQ ID NO: 1049130 - RNA, 19 nt, Homo sapiens
  misc_RNA (1)...(19): siRNA sense strand
ccgucgaguucuccuuuau

SEQ ID NO: 1049131 - RNA, 19 nt, Homo sapiens
  misc_RNA (1)...(19): siRNA sense strand
acagugggcagacucucua

SEQ ID NO: 1049132 - RNA, 19 nt, Homo sapiens
  misc_RNA (1)...(19): siRNA sense strand
gcggguggaguucuacuuc

SEQ ID NO: 1049133 - RNA, 19 nt, Homo sapiens
  misc_RNA (1)...(19): siRNA sense strand
ucauugagaguguccugaa

SEQ ID NO: 1049134 - RNA, 19 nt, Homo sapiens
  misc_RNA (1)...(19): siRNA sense strand
aggaggacacuuaugagaa

SEQ ID NO: 1049135 - RNA, 19 nt, Homo sapiens
  misc_RNA (1)...(19): siRNA sense strand
aaggaggacacuuaugaga

SEQ ID NO: 1049136 - RNA, 19 nt, Homo sapiens
  misc_RNA (1)...(19): siRNA sense strand
gagcaucacugacggcuau

SEQ ID NO: 1049137 - RNA, 19 nt, Homo sapiens
  misc_RNA (1)...(19): siRNA sense strand
ucaccuacauccagaauga

SEQ ID NO: 1049138 - RNA, 19 nt, Homo sapiens
  misc_RNA (1)...(19): siRNA sense strand
ggagagaaaugaguagcaa

SEQ ID NO: 1049139 - RNA, 19 nt, Homo sapiens
  misc_RNA (1)...(19): siRNA sense strand
agaaaugaguagcaacaaa

SEQ ID NO: 1049140 - RNA, 19 nt, Homo sapiens
  misc_RNA (1)...(19): siRNA sense strand
gaaaugaguagcaacaaag

SEQ ID NO: 1049141 - RNA, 19 nt, Homo sapiens
  misc_RNA (1)...(19): siRNA sense strand
ggaagcauaugccgucucu

SEQ ID NO: 1049142 - RNA, 19 nt, Homo sapiens
  misc_RNA (1)...(19): siRNA sense strand
gagcagcggucagcagugu

SEQ ID NO: 1049143 - RNA, 19 nt, Homo sapiens
  misc_RNA (1)...(19): siRNA sense strand
gcaauuugacgaccucuuc

SEQ ID NO: 1049144 - RNA, 19 nt, Homo sapiens
  misc_RNA (1)...(19): siRNA sense strand
gaaaccguguucaucuucu

SEQ ID NO: 1049145 - RNA, 19 nt, Homo sapiens
  misc_RNA (1)...(19): siRNA sense strand
ggucagcaguguucgugau

SEQ ID NO: 1049146 - RNA, 19 nt, Homo sapiens
  misc_RNA (1)...(19): siRNA sense strand
gcaaggacagggagaaguc

SEQ ID NO: 1049147 - RNA, 19 nt, Homo sapiens
  misc_RNA (1)...(19): siRNA sense strand
cagcugaugugggcaacaa

SEQ ID NO: 1049148 - RNA, 19 nt, Homo sapiens
  misc_RNA (1)...(19): siRNA sense strand
gcuccaacagugccaauga

SEQ ID NO: 1049149 - RNA, 19 nt, Homo sapiens
  misc_RNA (1)...(19): siRNA sense strand
ucaccauccucauccucua

SEQ ID NO: 1049150 - RNA, 19 nt, Homo sapiens
  misc_RNA (1)...(19): siRNA sense strand
cucaagaaguggagcauca

SEQ ID NO: 1049151 - RNA, 19 nt, Homo sapiens
  misc_RNA (1)...(19): siRNA sense strand
gcgcaugcccuaccacuac

SEQ ID NO: 1049152 - RNA, 19 nt, Homo sapiens
  misc_RNA (1)...(19): siRNA sense strand
gaguguacaauccgcauga

SEQ ID NO: 1049153 - RNA, 19 nt, Homo sapiens
  misc_RNA (1)...(19): siRNA sense strand
gauccucuuugcccucauc

SEQ ID NO: 1049154 - RNA, 19 nt, Homo sapiens
  misc_RNA (1)...(19): siRNA sense strand
gagaaaugaguagcaacaa

SEQ ID NO: 1049155 - RNA, 19 nt, Homo sapiens
  misc_RNA (1)...(19): siRNA sense strand
caucgugggcccagcugua

SEQ ID NO: 1049156 - RNA, 19 nt, Homo sapiens
  misc_RNA (1)...(19): siRNA sense strand
ggugaucgcgguggaguug

SEQ ID NO: 1049157 - RNA, 19 nt, Homo sapiens
  misc_RNA (1)...(19): siRNA sense strand
agaagucucauucgugguu

SEQ ID NO: 1049158 - RNA, 19 nt, Homo sapiens
  misc_RNA (1)...(19): siRNA sense strand
guugagcacaggcugguuu

SEQ ID NO: 1049159 - RNA, 19 nt, Homo sapiens
  misc_RNA (1)...(19): siRNA sense strand
gcagcggucagcaguguuc

SEQ ID NO: 1049160 - RNA, 19 nt, Homo sapiens
  misc_RNA (1)...(19): siRNA sense strand
gugaccacgugcaugucua

SEQ ID NO: 1049161 - RNA, 19 nt, Homo sapiens
  misc_RNA (1)...(19): siRNA sense strand
gcugaugugggcaacaaga

SEQ ID NO: 1049162 - RNA, 19 nt, Homo sapiens
  misc_RNA (1)...(19): siRNA sense strand
agagaaaugaguagcaaca

SEQ ID NO: 1049163 - RNA, 19 nt, Homo sapiens
  misc_RNA (1)...(19): siRNA sense strand
cagcagacgccggagagaa

SEQ ID NO: 1049164 - RNA, 19 nt, Homo sapiens
  misc_RNA (1)...(19): siRNA sense strand
aaaugaguagcaacaaaga

SEQ ID NO: 1049165 - RNA, 19 nt, Homo sapiens
  misc_RNA (1)...(19): siRNA sense strand
caaccaccaccgcuucauc

SEQ ID NO: 1049166 - RNA, 19 nt, Homo sapiens
  misc_RNA (1)...(19): siRNA sense strand
gaucgagcgggcugagugu

SEQ ID NO: 1049167 - RNA, 19 nt, Homo sapiens
  misc_RNA (1)...(19): siRNA sense strand
gcagacgccggagagaaau

SEQ ID NO: 1049168 - RNA, 19 nt, Homo sapiens
  misc_RNA (1)...(19): siRNA sense strand
cugucaaccucaagaagug

SEQ ID NO: 1049169 - RNA, 19 nt, Homo sapiens
  misc_RNA (1)...(19): siRNA sense strand
gcccagcuguauggcauca

SEQ ID NO: 1049170 - RNA, 19 nt, Homo sapiens
  misc_RNA (1)...(19): siRNA sense strand
cgagcgggcugaguguaca

SEQ ID NO: 1049171 - RNA, 19 nt, Homo sapiens
  misc_RNA (1)...(19): siRNA sense strand
caagcugggcccugagauc

SEQ ID NO: 1049172 - RNA, 19 nt, Homo sapiens
  misc_RNA (1)...(19): siRNA sense strand
gcacaagucuuaauccaau

SEQ ID NO: 1049173 - RNA, 19 nt, Homo sapiens
  misc_RNA (1)...(19): siRNA sense strand
ucagugggauguccaauua

SEQ ID NO: 1049174 - RNA, 19 nt, Homo sapiens
  misc_RNA (1)...(19): siRNA sense strand
gcaaagccuucaucaagaa

SEQ ID NO: 1049175 - RNA, 19 nt, Homo sapiens
  misc_RNA (1)...(19): siRNA sense strand
gagagaauccaccauuaua

SEQ ID NO: 1049176 - RNA, 19 nt, Homo sapiens
  misc_RNA (1)...(19): siRNA sense strand
gagaaacccuaccagugua

SEQ ID NO: 1049177 - RNA, 19 nt, Homo sapiens
  misc_RNA (1)...(19): siRNA sense strand
gagagaaaccuuacaguug

SEQ ID NO: 1049178 - RNA, 19 nt, Homo sapiens
  misc_RNA (1)...(19): siRNA sense strand
gggaaggcguuuaugcaua

SEQ ID NO: 1049179 - RNA, 19 nt, Homo sapiens
  misc_RNA (1)...(19): siRNA sense strand
gagagaagcccuaugaaug

SEQ ID NO: 1049180 - RNA, 19 nt, Homo sapiens
  misc_RNA (1)...(19): siRNA sense strand
gagaagcccuaugaaugua

SEQ ID NO: 1049181 - RNA, 19 nt, Homo sapiens
  misc_RNA (1)...(19): siRNA sense strand
ucccagaagucaaaucuua

SEQ ID NO: 1049182 - RNA, 19 nt, Homo sapiens
  misc_RNA (1)...(19): siRNA sense strand
aauaugagcacaagucuua

SEQ ID NO: 1049183 - RNA, 19 nt, Homo sapiens
  misc_RNA (1)...(19): siRNA sense strand
ggagagagacccuuugugu

SEQ ID NO: 1049184 - RNA, 19 nt, Homo sapiens
  misc_RNA (1)...(19): siRNA sense strand
ggagagaaaccuuacaguu

SEQ ID NO: 1049185 - RNA, 19 nt, Homo sapiens
  misc_RNA (1)...(19): siRNA sense strand
ggcaaagccuucaucaaga

SEQ ID NO: 1049186 - RNA, 19 nt, Homo sapiens
  misc_RNA (1)...(19): siRNA sense strand
gagaaguguuugccaccua

SEQ ID NO: 1049187 - RNA, 19 nt, Homo sapiens
  misc_RNA (1)...(19): siRNA sense strand
agagaaaccuuacaguugu

SEQ ID NO: 1049188 - RNA, 19 nt, Homo sapiens
  misc_RNA (1)...(19): siRNA sense strand
gaaucugacuacccacuug

SEQ ID NO: 1049189 - RNA, 19 nt, Homo sapiens
  misc_RNA (1)...(19): siRNA sense strand
gaagucccaucuccucaga

SEQ ID NO: 1049190 - RNA, 19 nt, Homo sapiens
  misc_RNA (1)...(19): siRNA sense strand
ggagagaauccaccauuau

SEQ ID NO: 1049191 - RNA, 19 nt, Homo sapiens
  misc_RNA (1)...(19): siRNA sense strand
ggagagaagcccuaugaau

SEQ ID NO: 1049192 - RNA, 19 nt, Homo sapiens
  misc_RNA (1)...(19): siRNA sense strand
cgugaaaucucauacacuu

SEQ ID NO: 1049193 - RNA, 19 nt, Homo sapiens
  misc_RNA (1)...(19): siRNA sense strand
acuuggaacuccucauuua

SEQ ID NO: 1049194 - RNA, 19 nt, Homo sapiens
  misc_RNA (1)...(19): siRNA sense strand
uaacagaugugggaaagca

SEQ ID NO: 1049195 - RNA, 19 nt, Homo sapiens
  misc_RNA (1)...(19): siRNA sense strand
ggauguggcuguggauuuc

SEQ ID NO: 1049196 - RNA, 19 nt, Homo sapiens
  misc_RNA (1)...(19): siRNA sense strand
gagaauccaccauuauaau

SEQ ID NO: 1049197 - RNA, 19 nt, Homo sapiens
  misc_RNA (1)...(19): siRNA sense strand
gaacuccucauuuaaucaa

SEQ ID NO: 1049198 - RNA, 19 nt, Homo sapiens
  misc_RNA (1)...(19): siRNA sense strand
ggagagaagccuuaugagu

SEQ ID NO: 1049199 - RNA, 19 nt, Homo sapiens
  misc_RNA (1)...(19): siRNA sense strand
gggaugugauguuggagaa

SEQ ID NO: 1049200 - RNA, 19 nt, Homo sapiens
  misc_RNA (1)...(19): siRNA sense strand
gagcacaagucuuaaucca

SEQ ID NO: 1049201 - RNA, 19 nt, Homo sapiens
  misc_RNA (1)...(19): siRNA sense strand
ugaaaucucauacacuuga

SEQ ID NO: 1049202 - RNA, 19 nt, Homo sapiens
  misc_RNA (1)...(19): siRNA sense strand
auagaaaccucaucucagu

SEQ ID NO: 1049203 - RNA, 19 nt, Homo sapiens
  misc_RNA (1)...(19): siRNA sense strand
agacaucagauaacucaua

SEQ ID NO: 1049204 - RNA, 19 nt, Homo sapiens
  misc_RNA (1)...(19): siRNA sense strand
auaaaucguuugagaagug

SEQ ID NO: 1049205 - RNA, 19 nt, Homo sapiens
  misc_RNA (1)...(19): siRNA sense strand
gggaaagcaaagacaauuu

SEQ ID NO: 1049206 - RNA, 19 nt, Homo sapiens
  misc_RNA (1)...(19): siRNA sense strand
caggagagaagcccuauga

SEQ ID NO: 1049207 - RNA, 19 nt, Homo sapiens
  misc_RNA (1)...(19): siRNA sense strand
guauugggaugugauguug

SEQ ID NO: 1049208 - RNA, 19 nt, Homo sapiens
  misc_RNA (1)...(19): siRNA sense strand
caacacgugaaaucucaua

SEQ ID NO: 1049209 - RNA, 19 nt, Homo sapiens
  misc_RNA (1)...(19): siRNA sense strand
ggaaaacauucacuuggaa

SEQ ID NO: 1049210 - RNA, 19 nt, Homo sapiens
  misc_RNA (1)...(19): siRNA sense strand
ggaagcaucgggaaagcaa

SEQ ID NO: 1049211 - RNA, 19 nt, Homo sapiens
  misc_RNA (1)...(19): siRNA sense strand
gacaucagauaacucauac

SEQ ID NO: 1049212 - RNA, 19 nt, Homo sapiens
  misc_RNA (1)...(19): siRNA sense strand
agaaguguuugccaccuaa

SEQ ID NO: 1049213 - RNA, 19 nt, Homo sapiens
  misc_RNA (1)...(19): siRNA sense strand
gcuuaugaaugcagugaau

SEQ ID NO: 1049214 - RNA, 19 nt, Homo sapiens
  misc_RNA (1)...(19): siRNA sense strand
uaucauauguggcaaagcu

SEQ ID NO: 1049215 - RNA, 19 nt, Homo sapiens
  misc_RNA (1)...(19): siRNA sense strand
agagaauccaccauuauaa

SEQ ID NO: 1049216 - RNA, 19 nt, Homo sapiens
  misc_RNA (1)...(19): siRNA sense strand
ccagaagucaaaucuuauu

SEQ ID NO: 1049217 - RNA, 19 nt, Homo sapiens
  misc_RNA (1)...(19): siRNA sense strand
gcugagagaacccuguauu

SEQ ID NO: 1049218 - RNA, 19 nt, Homo sapiens
  misc_RNA (1)...(19): siRNA sense strand
caagguagagcaaggacaa

SEQ ID NO: 1049219 - RNA, 19 nt, Homo sapiens
  misc_RNA (1)...(19): siRNA sense strand
agagaaacccuaccagugu

SEQ ID NO: 1049220 - RNA, 19 nt, Homo sapiens
  misc_RNA (1)...(19): siRNA sense strand
cuugagaagucauuugaau

SEQ ID NO: 1049221 - RNA, 19 nt, Homo sapiens
  misc_RNA (1)...(19): siRNA sense strand
ggaaagcaaagacaauuuu

SEQ ID NO: 1049222 - RNA, 19 nt, Homo sapiens
  misc_RNA (1)...(19): siRNA sense strand
ccuugcaacucaucagaaa

SEQ ID NO: 1049223 - RNA, 19 nt, Homo sapiens
  misc_RNA (1)...(19): siRNA sense strand
agagaagcccuaugaaugu

SEQ ID NO: 1049224 - RNA, 19 nt, Homo sapiens
  misc_RNA (1)...(19): siRNA sense strand
aguggcagcugcuugauug

SEQ ID NO: 1049225 - RNA, 19 nt, Homo sapiens
  misc_RNA (1)...(19): siRNA sense strand
aggcacaccuugcaacuca

SEQ ID NO: 1049226 - RNA, 19 nt, Homo sapiens
  misc_RNA (1)...(19): siRNA sense strand
uggcaaagccuucaucaag

SEQ ID NO: 1049227 - RNA, 19 nt, Homo sapiens
  misc_RNA (1)...(19): siRNA sense strand
ucacuuggaacuccucauu

SEQ ID NO: 1049228 - RNA, 19 nt, Homo sapiens
  misc_RNA (1)...(19): siRNA sense strand
acacaccaaagaauucaua

SEQ ID NO: 1049229 - RNA, 19 nt, Homo sapiens
  misc_RNA (1)...(19): siRNA sense strand
cagguauaguucauccuuu

SEQ ID NO: 1049230 - RNA, 19 nt, Homo sapiens
  misc_RNA (1)...(19): siRNA sense strand
gggaaaacauucacuugga

SEQ ID NO: 1049231 - RNA, 19 nt, Homo sapiens
  misc_RNA (1)...(19): siRNA sense strand
agaaaacgcuuaugaaugc

SEQ ID NO: 1049232 - RNA, 19 nt, Homo sapiens
  misc_RNA (1)...(19): siRNA sense strand
ucagacaucagauaacuca

SEQ ID NO: 1049233 - RNA, 19 nt, Homo sapiens
  misc_RNA (1)...(19): siRNA sense strand
guguuugccaccuaauuua

SEQ ID NO: 1049234 - RNA, 19 nt, Homo sapiens
  misc_RNA (1)...(19): siRNA sense strand
auacaggagagaaaccuua

SEQ ID NO: 1049235 - RNA, 19 nt, Homo sapiens
  misc_RNA (1)...(19): siRNA sense strand
cauccgugcuuguuacaca

SEQ ID NO: 1049236 - RNA, 19 nt, Homo sapiens
  misc_RNA (1)...(19): siRNA sense strand
aaacaaaagugauccucaa

SEQ ID NO: 1049237 - RNA, 19 nt, Homo sapiens
  misc_RNA (1)...(19): siRNA sense strand
ggaacuccucauuuaauca

SEQ ID NO: 1049238 - RNA, 19 nt, Homo sapiens
  misc_RNA (1)...(19): siRNA sense strand
acacauccgugcuuguuac

SEQ ID NO: 1049239 - RNA, 19 nt, Homo sapiens
  misc_RNA (1)...(19): siRNA sense strand
cuaccaguguaucauaugu

SEQ ID NO: 1049240 - RNA, 19 nt, Homo sapiens
  misc_RNA (1)...(19): siRNA sense strand
acacuggagagaagccuua

SEQ ID NO: 1049241 - RNA, 19 nt, Homo sapiens
  misc_RNA (1)...(19): siRNA sense strand
cuaugaauguaacagaugu

SEQ ID NO: 1049242 - RNA, 19 nt, Homo sapiens
  misc_RNA (1)...(19): siRNA sense strand
uggaacuccucauuuaauc

SEQ ID NO: 1049243 - RNA, 19 nt, Homo sapiens
  misc_RNA (1)...(19): siRNA sense strand
gaugugauguuggagaacu

SEQ ID NO: 1049244 - RNA, 19 nt, Homo sapiens
  misc_RNA (1)...(19): siRNA sense strand
cuggagagaagccuuauga

SEQ ID NO: 1049245 - RNA, 19 nt, Homo sapiens
  misc_RNA (1)...(19): siRNA sense strand
ccucagacaucagauaacu

SEQ ID NO: 1049246 - RNA, 19 nt, Homo sapiens
  misc_RNA (1)...(19): siRNA sense strand
caaaagugauccucaaggu

SEQ ID NO: 1049247 - RNA, 19 nt, Homo sapiens
  misc_RNA (1)...(19): siRNA sense strand
uauaauaugagcacaaguc

SEQ ID NO: 1049248 - RNA, 19 nt, Homo sapiens
  misc_RNA (1)...(19): siRNA sense strand
cuauagaaaccucaucuca

SEQ ID NO: 1049249 - RNA, 19 nt, Homo sapiens
  misc_RNA (1)...(19): siRNA sense strand
uaauggagagagacccuuu

SEQ ID NO: 1049250 - RNA, 19 nt, Homo sapiens
  misc_RNA (1)...(19): siRNA sense strand
gauguuggagaacuauaga

SEQ ID NO: 1049251 - RNA, 19 nt, Homo sapiens
  misc_RNA (1)...(19): siRNA sense strand
uaaaucguuugagaagugu

SEQ ID NO: 1049252 - RNA, 19 nt, Homo sapiens
  misc_RNA (1)...(19): siRNA sense strand
gaagcccuaugaauguaac

SEQ ID NO: 1049253 - RNA, 19 nt, Homo sapiens
  misc_RNA (1)...(19): siRNA sense strand
cuacccacuuguugaugaa

SEQ ID NO: 1049254 - RNA, 19 nt, Homo sapiens
  misc_RNA (1)...(19): siRNA sense strand
uuaaucaacacgugaaauc

SEQ ID NO: 1049255 - RNA, 19 nt, Homo sapiens
  misc_RNA (1)...(19): siRNA sense strand
gacccuuugugugcaauga

SEQ ID NO: 1049256 - RNA, 19 nt, Homo sapiens
  misc_RNA (1)...(19): siRNA sense strand
guagaaaacgcuuaugaau

SEQ ID NO: 1049257 - RNA, 19 nt, Homo sapiens
  misc_RNA (1)...(19): siRNA sense strand
gaacuauagaaaccucauc

SEQ ID NO: 1049258 - RNA, 19 nt, Homo sapiens
  misc_RNA (1)...(19): siRNA sense strand
acuacccacuuguugauga

SEQ ID NO: 1049259 - RNA, 19 nt, Homo sapiens
  misc_RNA (1)...(19): siRNA sense strand
uguaacagaugugggaaag

SEQ ID NO: 1049260 - RNA, 19 nt, Homo sapiens
  misc_RNA (1)...(19): siRNA sense strand
ugagagaacccuguauugg

SEQ ID NO: 1049261 - RNA, 19 nt, Homo sapiens
  misc_RNA (1)...(19): siRNA sense strand
ccuuaugagugcagucaau

SEQ ID NO: 1049262 - RNA, 19 nt, Homo sapiens
  misc_RNA (1)...(19): siRNA sense strand
gaguggcagcugcuugauu

SEQ ID NO: 1049263 - RNA, 19 nt, Homo sapiens
  misc_RNA (1)...(19): siRNA sense strand
guuacacaccaaagaauuc

SEQ ID NO: 1049264 - RNA, 19 nt, Homo sapiens
  misc_RNA (1)...(19): siRNA sense strand
cagaagucaaaucuuauug

SEQ ID NO: 1049265 - RNA, 19 nt, Homo sapiens
  misc_RNA (1)...(19): siRNA sense strand
cgggaaagcaaagacaauu

SEQ ID NO: 1049266 - RNA, 19 nt, Homo sapiens
  misc_RNA (1)...(19): siRNA sense strand
caucagauaacucauacag

SEQ ID NO: 1049267 - RNA, 19 nt, Homo sapiens
  misc_RNA (1)...(19): siRNA sense strand
gaauucauacaggagagaa

SEQ ID NO: 1049268 - RNA, 19 nt, Homo sapiens
  misc_RNA (1)...(19): siRNA sense strand
ucauauguggcaaagcuuu

SEQ ID NO: 1049269 - RNA, 19 nt, Homo sapiens
  misc_RNA (1)...(19): siRNA sense strand
gugcugagagaacccugua

SEQ ID NO: 1049270 - RNA, 19 nt, Homo sapiens
  misc_RNA (1)...(19): siRNA sense strand
caccaaagaauucauacag

SEQ ID NO: 1049271 - RNA, 19 nt, Homo sapiens
  misc_RNA (1)...(19): siRNA sense strand
ugacuacccacuuguugau

SEQ ID NO: 1049272 - RNA, 19 nt, Homo sapiens
  misc_RNA (1)...(19): siRNA sense strand
ggaaagggcauccgacuua

SEQ ID NO: 1049273 - RNA, 19 nt, Homo sapiens
  misc_RNA (1)...(19): siRNA sense strand
ggaauagacucaaguaugc

SEQ ID NO: 1049274 - RNA, 19 nt, Homo sapiens
  misc_RNA (1)...(19): siRNA sense strand
gguaauaaaccuuggauuu

SEQ ID NO: 1049275 - RNA, 19 nt, Homo sapiens
  misc_RNA (1)...(19): siRNA sense strand
gaacgauacugugcagauu

SEQ ID NO: 1049276 - RNA, 19 nt, Homo sapiens
  misc_RNA (1)...(19): siRNA sense strand
gagaugagguaaagaagau

SEQ ID NO: 1049277 - RNA, 19 nt, Homo sapiens
  misc_RNA (1)...(19): siRNA sense strand
ggaaagacauccugguucu

SEQ ID NO: 1049278 - RNA, 19 nt, Homo sapiens
  misc_RNA (1)...(19): siRNA sense strand
acaaggauuuccaacauuu

SEQ ID NO: 1049279 - RNA, 19 nt, Homo sapiens
  misc_RNA (1)...(19): siRNA sense strand
ccacaaggauuuccaacau

SEQ ID NO: 1049280 - RNA, 19 nt, Homo sapiens
  misc_RNA (1)...(19): siRNA sense strand
gggaagauaaccagcuuua

SEQ ID NO: 1049281 - RNA, 19 nt, Homo sapiens
  misc_RNA (1)...(19): siRNA sense strand
ucacauacccugcuggauu

SEQ ID NO: 1049282 - RNA, 19 nt, Homo sapiens
  misc_RNA (1)...(19): siRNA sense strand
guaauaaaccuuggauuuc

SEQ ID NO: 1049283 - RNA, 19 nt, Homo sapiens
  misc_RNA (1)...(19): siRNA sense strand
guaaagaagauauguaugc

SEQ ID NO: 1049284 - RNA, 19 nt, Homo sapiens
  misc_RNA (1)...(19): siRNA sense strand
ggagaugagguaaagaaga

SEQ ID NO: 1049285 - RNA, 19 nt, Homo sapiens
  misc_RNA (1)...(19): siRNA sense strand
gaagauauguaugcaacac

SEQ ID NO: 1049286 - RNA, 19 nt, Homo sapiens
  misc_RNA (1)...(19): siRNA sense strand
cacaaggauuuccaacauu

SEQ ID NO: 1049287 - RNA, 19 nt, Homo sapiens
  misc_RNA (1)...(19): siRNA sense strand
caauguauguauggugauu

SEQ ID NO: 1049288 - RNA, 19 nt, Homo sapiens
  misc_RNA (1)...(19): siRNA sense strand
caaaauugauggcaagguu

SEQ ID NO: 1049289 - RNA, 19 nt, Homo sapiens
  misc_RNA (1)...(19): siRNA sense strand
gaaagggcauccgacuuac

SEQ ID NO: 1049290 - RNA, 19 nt, Homo sapiens
  misc_RNA (1)...(19): siRNA sense strand
gagguaaagaagauaugua

SEQ ID NO: 1049291 - RNA, 19 nt, Homo sapiens
  misc_RNA (1)...(19): siRNA sense strand
cacauacccugcuggauuc

SEQ ID NO: 1049292 - RNA, 19 nt, Homo sapiens
  misc_RNA (1)...(19): siRNA sense strand
ugacacaggcaauguaugu

SEQ ID NO: 1049293 - RNA, 19 nt, Homo sapiens
  misc_RNA (1)...(19): siRNA sense strand
ucaugaugcucgaaccauu

SEQ ID NO: 1049294 - RNA, 19 nt, Homo sapiens
  misc_RNA (1)...(19): siRNA sense strand
gcaaagugaggaagauuac

SEQ ID NO: 1049295 - RNA, 19 nt, Homo sapiens
  misc_RNA (1)...(19): siRNA sense strand
auacccugcuggauucaua

SEQ ID NO: 1049296 - RNA, 19 nt, Homo sapiens
  misc_RNA (1)...(19): siRNA sense strand
gacuuacuauugcugaaga

SEQ ID NO: 1049297 - RNA, 19 nt, Homo sapiens
  misc_RNA (1)...(19): siRNA sense strand
gauaaacuaacugguguau

SEQ ID NO: 1049298 - RNA, 19 nt, Homo sapiens
  misc_RNA (1)...(19): siRNA sense strand
ucaggaauagacucaagua

SEQ ID NO: 1049299 - RNA, 19 nt, Homo sapiens
  misc_RNA (1)...(19): siRNA sense strand
uaauaaaccuuggauuucc

SEQ ID NO: 1049300 - RNA, 19 nt, Homo sapiens
  misc_RNA (1)...(19): siRNA sense strand
uuuagggacugggaagaua

SEQ ID NO: 1049301 - RNA, 19 nt, Homo sapiens
  misc_RNA (1)...(19): siRNA sense strand
cagauccucucaucaaggu

SEQ ID NO: 1049302 - RNA, 19 nt, Homo sapiens
  misc_RNA (1)...(19): siRNA sense strand
gcuaaccucggucguguug

SEQ ID NO: 1049303 - RNA, 19 nt, Homo sapiens
  misc_RNA (1)...(19): siRNA sense strand
ggcauccgacuuacuauug

SEQ ID NO: 1049304 - RNA, 19 nt, Homo sapiens
  misc_RNA (1)...(19): siRNA sense strand
gaucacaaacagggaaaga

SEQ ID NO: 1049305 - RNA, 19 nt, Homo sapiens
  misc_RNA (1)...(19): siRNA sense strand
uaaccucggucguguuggu

SEQ ID NO: 1049306 - RNA, 19 nt, Homo sapiens
  misc_RNA (1)...(19): siRNA sense strand
gaugagguaaagaagauau

SEQ ID NO: 1049307 - RNA, 19 nt, Homo sapiens
  misc_RNA (1)...(19): siRNA sense strand
ucacaaacagggaaagaca

SEQ ID NO: 1049308 - RNA, 19 nt, Homo sapiens
  misc_RNA (1)...(19): siRNA sense strand
acgauacugugcagauuga

SEQ ID NO: 1049309 - RNA, 19 nt, Homo sapiens
  misc_RNA (1)...(19): siRNA sense strand
agauauguaugcaacacuu

SEQ ID NO: 1049310 - RNA, 19 nt, Homo sapiens
  misc_RNA (1)...(19): siRNA sense strand
gaugcuggauaaacuaacu

SEQ ID NO: 1049311 - RNA, 19 nt, Homo sapiens
  misc_RNA (1)...(19): siRNA sense strand
gacuggagaugagguaaag

SEQ ID NO: 1049312 - RNA, 19 nt, Homo sapiens
  misc_RNA (1)...(19): siRNA sense strand
uacuauugcugaagagaga

SEQ ID NO: 1049313 - RNA, 19 nt, Homo sapiens
  misc_RNA (1)...(19): siRNA sense strand
ggugauugcuggagcuaac

SEQ ID NO: 1049314 - RNA, 19 nt, Homo sapiens
  misc_RNA (1)...(19): siRNA sense strand
auacugugcagauugauuu

SEQ ID NO: 1049315 - RNA, 19 nt, Homo sapiens
  misc_RNA (1)...(19): siRNA sense strand
gauacugugcagauugauu

SEQ ID NO: 1049316 - RNA, 19 nt, Homo sapiens
  misc_RNA (1)...(19): siRNA sense strand
cuacccagauccucucauc

SEQ ID NO: 1049317 - RNA, 19 nt, Homo sapiens
  misc_RNA (1)...(19): siRNA sense strand
gaagaggcaaaguacaagu

SEQ ID NO: 1049318 - RNA, 19 nt, Homo sapiens
  misc_RNA (1)...(19): siRNA sense strand
ggauaaacuaacuggugua

SEQ ID NO: 1049319 - RNA, 19 nt, Homo sapiens
  misc_RNA (1)...(19): siRNA sense strand
ucaucaaggugaacgauac

SEQ ID NO: 1049320 - RNA, 19 nt, Homo sapiens
  misc_RNA (1)...(19): siRNA sense strand
caaacagagcaguggcuaa

SEQ ID NO: 1049321 - RNA, 19 nt, Homo sapiens
  misc_RNA (1)...(19): siRNA sense strand
uggaagaggcaaaguacaa

SEQ ID NO: 1049322 - RNA, 19 nt, Homo sapiens
  misc_RNA (1)...(19): siRNA sense strand
gggcauccgacuuacuauu

SEQ ID NO: 1049323 - RNA, 19 nt, Homo sapiens
  misc_RNA (1)...(19): siRNA sense strand
cacaggcaauguauguaug

SEQ ID NO: 1049324 - RNA, 19 nt, Homo sapiens
  misc_RNA (1)...(19): siRNA sense strand
acacaggcaauguauguau

SEQ ID NO: 1049325 - RNA, 19 nt, Homo sapiens
  misc_RNA (1)...(19): siRNA sense strand
aggaauagacucaaguaug

SEQ ID NO: 1049326 - RNA, 19 nt, Homo sapiens
  misc_RNA (1)...(19): siRNA sense strand
caacacuuccucaaaauug

SEQ ID NO: 1049327 - RNA, 19 nt, Homo sapiens
  misc_RNA (1)...(19): siRNA sense strand
cgacagguccucacaagcu

SEQ ID NO: 1049328 - RNA, 19 nt, Homo sapiens
  misc_RNA (1)...(19): siRNA sense strand
ugcaaagugaggaagauua

SEQ ID NO: 1049329 - RNA, 19 nt, Homo sapiens
  misc_RNA (1)...(19): siRNA sense strand
uugcagcgccgaagcauug

SEQ ID NO: 1049330 - RNA, 19 nt, Homo sapiens
  misc_RNA (1)...(19): siRNA sense strand
ccugcuggauucauagaug

SEQ ID NO: 1049331 - RNA, 19 nt, Homo sapiens
  misc_RNA (1)...(19): siRNA sense strand
ggaagaggcaaaguacaag

SEQ ID NO: 1049332 - RNA, 19 nt, Homo sapiens
  misc_RNA (1)...(19): siRNA sense strand
caaauuugacacaggcaau

SEQ ID NO: 1049333 - RNA, 19 nt, Homo sapiens
  misc_RNA (1)...(19): siRNA sense strand
gggaaagggcauccgacuu

SEQ ID NO: 1049334 - RNA, 19 nt, Homo sapiens
  misc_RNA (1)...(19): siRNA sense strand
caguggaagaggcaaagua

SEQ ID NO: 1049335 - RNA, 19 nt, Homo sapiens
  misc_RNA (1)...(19): siRNA sense strand
gcauccgacuuacuauugc

SEQ ID NO: 1049336 - RNA, 19 nt, Homo sapiens
  misc_RNA (1)...(19): siRNA sense strand
aagggcauccgacuuacua

SEQ ID NO: 1049337 - RNA, 19 nt, Homo sapiens
  misc_RNA (1)...(19): siRNA sense strand
aaacuaacugguguauuug

SEQ ID NO: 1049338 - RNA, 19 nt, Homo sapiens
  misc_RNA (1)...(19): siRNA sense strand
gcacuugaagcguguugca

SEQ ID NO: 1049339 - RNA, 19 nt, Homo sapiens
  misc_RNA (1)...(19): siRNA sense strand
ccucaggaauagacucaag

SEQ ID NO: 1049340 - RNA, 19 nt, Homo sapiens
  misc_RNA (1)...(19): siRNA sense strand
gguaaagaagauauguaug

SEQ ID NO: 1049341 - RNA, 19 nt, Homo sapiens
  misc_RNA (1)...(19): siRNA sense strand
uaugcaacacuuccucaaa

SEQ ID NO: 1049342 - RNA, 19 nt, Homo sapiens
  misc_RNA (1)...(19): siRNA sense strand
cagcuuugccacaaggauu

SEQ ID NO: 1049343 - RNA, 19 nt, Homo sapiens
  misc_RNA (1)...(19): siRNA sense strand
ugacuggagaugagguaaa

SEQ ID NO: 1049344 - RNA, 19 nt, Homo sapiens
  misc_RNA (1)...(19): siRNA sense strand
ugucaucagcauugagaaa

SEQ ID NO: 1049345 - RNA, 19 nt, Homo sapiens
  misc_RNA (1)...(19): siRNA sense strand
ugaacgauacugugcagau

SEQ ID NO: 1049346 - RNA, 19 nt, Homo sapiens
  misc_RNA (1)...(19): siRNA sense strand
aaagugaggaagauuacug

SEQ ID NO: 1049347 - RNA, 19 nt, Homo sapiens
  misc_RNA (1)...(19): siRNA sense strand
gacacaggcaauguaugua

SEQ ID NO: 1049348 - RNA, 19 nt, Homo sapiens
  misc_RNA (1)...(19): siRNA sense strand
gcaacacuuccucaaaauu

SEQ ID NO: 1049349 - RNA, 19 nt, Homo sapiens
  misc_RNA (1)...(19): siRNA sense strand
uuagggacugggaagauaa

SEQ ID NO: 1049350 - RNA, 19 nt, Homo sapiens
  misc_RNA (1)...(19): siRNA sense strand
gcauuuccgccuggucuau

SEQ ID NO: 1049351 - RNA, 19 nt, Homo sapiens
  misc_RNA (1)...(19): siRNA sense strand
gaacgacaccgucaaguac

SEQ ID NO: 1049352 - RNA, 19 nt, Homo sapiens
  misc_RNA (1)...(19): siRNA sense strand
acagguaucuggcuauugu

SEQ ID NO: 1049353 - RNA, 19 nt, Homo sapiens
  misc_RNA (1)...(19): siRNA sense strand
ccuuugagauggacuacua

SEQ ID NO: 1049354 - RNA, 19 nt, Homo sapiens
  misc_RNA (1)...(19): siRNA sense strand
gugcagaccuggaccucaa

SEQ ID NO: 1049355 - RNA, 19 nt, Homo sapiens
  misc_RNA (1)...(19): siRNA sense strand
ucaaggcggucccuggauu

SEQ ID NO: 1049356 - RNA, 19 nt, Homo sapiens
  misc_RNA (1)...(19): siRNA sense strand
ggaugaagaugaggaugug

SEQ ID NO: 1049357 - RNA, 19 nt, Homo sapiens
  misc_RNA (1)...(19): siRNA sense strand
ugacagguaucuggcuauu

SEQ ID NO: 1049358 - RNA, 19 nt, Homo sapiens
  misc_RNA (1)...(19): siRNA sense strand
cagcagcucuacuacaagu

SEQ ID NO: 1049359 - RNA, 19 nt, Homo sapiens
  misc_RNA (1)...(19): siRNA sense strand
ugauaugccuuuggaugaa

SEQ ID NO: 1049360 - RNA, 19 nt, Homo sapiens
  misc_RNA (1)...(19): siRNA sense strand
ccgaagagguggacugcau

SEQ ID NO: 1049361 - RNA, 19 nt, Homo sapiens
  misc_RNA (1)...(19): siRNA sense strand
cauuggaaacuucaucuuu

SEQ ID NO: 1049362 - RNA, 19 nt, Homo sapiens
  misc_RNA (1)...(19): siRNA sense strand
agaacgacaccgucaagua

SEQ ID NO: 1049363 - RNA, 19 nt, Homo sapiens
  misc_RNA (1)...(19): siRNA sense strand
ccacuuccuucccauucaa

SEQ ID NO: 1049364 - RNA, 19 nt, Homo sapiens
  misc_RNA (1)...(19): siRNA sense strand
ucaacuaccugcgcacugu

SEQ ID NO: 1049365 - RNA, 19 nt, Homo sapiens
  misc_RNA (1)...(19): siRNA sense strand
cuacuuccucuuuaucuuu

SEQ ID NO: 1049366 - RNA, 19 nt, Homo sapiens
  misc_RNA (1)...(19): siRNA sense strand
gugcaccucugucaacuac

SEQ ID NO: 1049367 - RNA, 19 nt, Homo sapiens
  misc_RNA (1)...(19): siRNA sense strand
gaagagguggacugcauca

SEQ ID NO: 1049368 - RNA, 19 nt, Homo sapiens
  misc_RNA (1)...(19): siRNA sense strand
ccgcugagaccacggauga

SEQ ID NO: 1049369 - RNA, 19 nt, Homo sapiens
  misc_RNA (1)...(19): siRNA sense strand
gcaacagcaugaucaacac

SEQ ID NO: 1049370 - RNA, 19 nt, Homo sapiens
  misc_RNA (1)...(19): siRNA sense strand
ccaucgccauugacaggua

SEQ ID NO: 1049371 - RNA, 19 nt, Homo sapiens
  misc_RNA (1)...(19): siRNA sense strand
gcgacuaugauaugccuuu

SEQ ID NO: 1049372 - RNA, 19 nt, Homo sapiens
  misc_RNA (1)...(19): siRNA sense strand
gacaaugccaccaacacuu

SEQ ID NO: 1049373 - RNA, 19 nt, Homo sapiens
  misc_RNA (1)...(19): siRNA sense strand
accagcagcucuacuacaa

SEQ ID NO: 1049374 - RNA, 19 nt, Homo sapiens
  misc_RNA (1)...(19): siRNA sense strand
ugagauggacuacuaugug

SEQ ID NO: 1049375 - RNA, 19 nt, Homo sapiens
  misc_RNA (1)...(19): siRNA sense strand
acuaugauaugccuuugga

SEQ ID NO: 1049376 - RNA, 19 nt, Homo sapiens
  misc_RNA (1)...(19): siRNA sense strand
gaugaggaugugaccaauu

SEQ ID NO: 1049377 - RNA, 19 nt, Homo sapiens
  misc_RNA (1)...(19): siRNA sense strand
gaccuggaccucaagacaa

SEQ ID NO: 1049378 - RNA, 19 nt, Homo sapiens
  misc_RNA (1)...(19): siRNA sense strand
gcacugucucucucuaugu

SEQ ID NO: 1049379 - RNA, 19 nt, Homo sapiens
  misc_RNA (1)...(19): siRNA sense strand
ggaaacuucaucuuuaucg

SEQ ID NO: 1049380 - RNA, 19 nt, Homo sapiens
  misc_RNA (1)...(19): siRNA sense strand
augaggaugugaccaauuc

SEQ ID NO: 1049381 - RNA, 19 nt, Homo sapiens
  misc_RNA (1)...(19): siRNA sense strand
cuaccucacugccuucuac

SEQ ID NO: 1049382 - RNA, 19 nt, Homo sapiens
  misc_RNA (1)...(19): siRNA sense strand
cgacuaugauaugccuuug

SEQ ID NO: 1049383 - RNA, 19 nt, Homo sapiens
  misc_RNA (1)...(19): siRNA sense strand
ccucaccgccuacgugcua

SEQ ID NO: 1049384 - RNA, 19 nt, Homo sapiens
  misc_RNA (1)...(19): siRNA sense strand
gcaccucugucaacuaccu

SEQ ID NO: 1049385 - RNA, 19 nt, Homo sapiens
  misc_RNA (1)...(19): siRNA sense strand
gauaugccuuuggaugaag

SEQ ID NO: 1049386 - RNA, 19 nt, Homo sapiens
  misc_RNA (1)...(19): siRNA sense strand
caagaacgacaccgucaag

SEQ ID NO: 1049387 - RNA, 19 nt, Homo sapiens
  misc_RNA (1)...(19): siRNA sense strand
ccaccagcuuccuuucugu

SEQ ID NO: 1049388 - RNA, 19 nt, Homo sapiens
  misc_RNA (1)...(19): siRNA sense strand
ggagaagcacuaccucacu

SEQ ID NO: 1049389 - RNA, 19 nt, Homo sapiens
  misc_RNA (1)...(19): siRNA sense strand
guaucuggcuauuguccau

SEQ ID NO: 1049390 - RNA, 19 nt, Homo sapiens
  misc_RNA (1)...(19): siRNA sense strand
cggaugaagugccaaacag

SEQ ID NO: 1049391 - RNA, 19 nt, Homo sapiens
  misc_RNA (1)...(19): siRNA sense strand
gcccugguccgcuacaaga

SEQ ID NO: 1049392 - RNA, 19 nt, Homo sapiens
  misc_RNA (1)...(19): siRNA sense strand
gccacuuccuucccauuca

SEQ ID NO: 1049393 - RNA, 19 nt, Homo sapiens
  misc_RNA (1)...(19): siRNA sense strand
ccacggaugaagugccaaa

SEQ ID NO: 1049394 - RNA, 19 nt, Homo sapiens
  misc_RNA (1)...(19): siRNA sense strand
guggacugcaucagacuaa

SEQ ID NO: 1049395 - RNA, 19 nt, Homo sapiens
  misc_RNA (1)...(19): siRNA sense strand
ccuacuuccucuuuaucuu

SEQ ID NO: 1049396 - RNA, 19 nt, Homo sapiens
  misc_RNA (1)...(19): siRNA sense strand
cagagcagauccgcaagag

SEQ ID NO: 1049397 - RNA, 19 nt, Homo sapiens
  misc_RNA (1)...(19): siRNA sense strand
acaagaaacugcgcaaccu

SEQ ID NO: 1049398 - RNA, 19 nt, Homo sapiens
  misc_RNA (1)...(19): siRNA sense strand
cuuuaucuuuggcauagaa

SEQ ID NO: 1049399 - RNA, 19 nt, Homo sapiens
  misc_RNA (1)...(19): siRNA sense strand
aguccuacuuccucuuuau

SEQ ID NO: 1049400 - RNA, 19 nt, Homo sapiens
  misc_RNA (1)...(19): siRNA sense strand
acaaugccaccaacacuuc

SEQ ID NO: 1049401 - RNA, 19 nt, Homo sapiens
  misc_RNA (1)...(19): siRNA sense strand
caucgccauugacagguau

SEQ ID NO: 1049402 - RNA, 19 nt, Homo sapiens
  misc_RNA (1)...(19): siRNA sense strand
gcauuggaaacuucaucuu

SEQ ID NO: 1049403 - RNA, 19 nt, Homo sapiens
  misc_RNA (1)...(19): siRNA sense strand
agagguggacugcaucaga

SEQ ID NO: 1049404 - RNA, 19 nt, Homo sapiens
  misc_RNA (1)...(19): siRNA sense strand
gaccagcagcucuacuaca

SEQ ID NO: 1049405 - RNA, 19 nt, Homo sapiens
  misc_RNA (1)...(19): siRNA sense strand
uaucuuuggcauagaauuc

SEQ ID NO: 1049406 - RNA, 19 nt, Homo sapiens
  misc_RNA (1)...(19): siRNA sense strand
ccaauuccaggacguucuu

SEQ ID NO: 1049407 - RNA, 19 nt, Homo sapiens
  misc_RNA (1)...(19): siRNA sense strand
caucgugcgcgacuucuuc

SEQ ID NO: 1049408 - RNA, 19 nt, Homo sapiens
  misc_RNA (1)...(19): siRNA sense strand
uacuuccucuuuaucuuug

SEQ ID NO: 1049409 - RNA, 19 nt, Homo sapiens
  misc_RNA (1)...(19): siRNA sense strand
aagaugaggaugugaccaa

SEQ ID NO: 1049410 - RNA, 19 nt, Homo sapiens
  misc_RNA (1)...(19): siRNA sense strand
gcgcacugucucucucuau

SEQ ID NO: 1049411 - RNA, 19 nt, Homo sapiens
  misc_RNA (1)...(19): siRNA sense strand
cccgggagcucugguucaa

SEQ ID NO: 1049412 - RNA, 19 nt, Homo sapiens
  misc_RNA (1)...(19): siRNA sense strand
uggaccagcagcucuacua

SEQ ID NO: 1049413 - RNA, 19 nt, Homo sapiens
  misc_RNA (1)...(19): siRNA sense strand
ugagaccacggaugaagug

SEQ ID NO: 1049414 - RNA, 19 nt, Homo sapiens
  misc_RNA (1)...(19): siRNA sense strand
ggagaugcccucuguguuu

SEQ ID NO: 1049415 - RNA, 19 nt, Homo sapiens
  misc_RNA (1)...(19): siRNA sense strand
ggaaggagaacaagaagaa

SEQ ID NO: 1049416 - RNA, 19 nt, Homo sapiens
  misc_RNA (1)...(19): siRNA sense strand
ggacaagcccuuccgcaaa

SEQ ID NO: 1049417 - RNA, 19 nt, Homo sapiens
  misc_RNA (1)...(19): siRNA sense strand
caaacugcccgucaucuuu

SEQ ID NO: 1049418 - RNA, 19 nt, Homo sapiens
  misc_RNA (1)...(19): siRNA sense strand
gaggagcacuaccgcuuug

SEQ ID NO: 1049419 - RNA, 19 nt, Homo sapiens
  misc_RNA (1)...(19): siRNA sense strand
agaaggagaugcccucugu

SEQ ID NO: 1049420 - RNA, 19 nt, Homo sapiens
  misc_RNA (1)...(19): siRNA sense strand
gagaugcccucuguguuug

SEQ ID NO: 1049421 - RNA, 19 nt, Homo sapiens
  misc_RNA (1)...(19): siRNA sense strand
gugcccagcucccuaauca

SEQ ID NO: 1049422 - RNA, 19 nt, Homo sapiens
  misc_RNA (1)...(19): siRNA sense strand
agaagcagcugauccucaa

SEQ ID NO: 1049423 - RNA, 19 nt, Homo sapiens
  misc_RNA (1)...(19): siRNA sense strand
gacaagcccuuccgcaaac

SEQ ID NO: 1049424 - RNA, 19 nt, Homo sapiens
  misc_RNA (1)...(19): siRNA sense strand
agauucagcuggaacauca

SEQ ID NO: 1049425 - RNA, 19 nt, Homo sapiens
  misc_RNA (1)...(19): siRNA sense strand
ucaacgaccuggugaagag

SEQ ID NO: 1049426 - RNA, 19 nt, Homo sapiens
  misc_RNA (1)...(19): siRNA sense strand
ggaggagcacuaccgcuuu

SEQ ID NO: 1049427 - RNA, 19 nt, Homo sapiens
  misc_RNA (1)...(19): siRNA sense strand
gaaacaccuuccucaacag

SEQ ID NO: 1049428 - RNA, 19 nt, Homo sapiens
  misc_RNA (1)...(19): siRNA sense strand
caaauacgacgagaucuuc

SEQ ID NO: 1049429 - RNA, 19 nt, Homo sapiens
  misc_RNA (1)...(19): siRNA sense strand
acgcuuacaucaucagcua

SEQ ID NO: 1049430 - RNA, 19 nt, Homo sapiens
  misc_RNA (1)...(19): siRNA sense strand
gcuggaugaugaagaguuc

SEQ ID NO: 1049431 - RNA, 19 nt, Homo sapiens
  misc_RNA (1)...(19): siRNA sense strand
gcgacggcaugcuggauga

SEQ ID NO: 1049432 - RNA, 19 nt, Homo sapiens
  misc_RNA (1)...(19): siRNA sense strand
ccaaauacgacgagaucuu

SEQ ID NO: 1049433 - RNA, 19 nt, Homo sapiens
  misc_RNA (1)...(19): siRNA sense strand
gcugauggcgcaugacuuc

SEQ ID NO: 1049434 - RNA, 19 nt, Homo sapiens
  misc_RNA (1)...(19): siRNA sense strand
ggaccaagcuccccaacuc

SEQ ID NO: 1049435 - RNA, 19 nt, Homo sapiens
  misc_RNA (1)...(19): siRNA sense strand
acgacgagaucuucuacaa

SEQ ID NO: 1049436 - RNA, 19 nt, Homo sapiens
  misc_RNA (1)...(19): siRNA sense strand
aaacugcccgucaucuuug

SEQ ID NO: 1049437 - RNA, 19 nt, Homo sapiens
  misc_RNA (1)...(19): siRNA sense strand
agaccagcuucauccagua

SEQ ID NO: 1049438 - RNA, 19 nt, Homo sapiens
  misc_RNA (1)...(19): siRNA sense strand
cgacaucgccaagcucaug

SEQ ID NO: 1049439 - RNA, 19 nt, Homo sapiens
  misc_RNA (1)...(19): siRNA sense strand
ucuggaagcucagcgaugu

SEQ ID NO: 1049440 - RNA, 19 nt, Homo sapiens
  misc_RNA (1)...(19): siRNA sense strand
uccgcaaacucaacccuuu

SEQ ID NO: 1049441 - RNA, 19 nt, Homo sapiens
  misc_RNA (1)...(19): siRNA sense strand
gcccaccaccgacugcuuu

SEQ ID NO: 1049442 - RNA, 19 nt, Homo sapiens
  misc_RNA (1)...(19): siRNA sense strand
cgaguucacgcuuacauca

SEQ ID NO: 1049443 - RNA, 19 nt, Homo sapiens
  misc_RNA (1)...(19): siRNA sense strand
ucaucauccugcucuuuga

SEQ ID NO: 1049444 - RNA, 19 nt, Homo sapiens
  misc_RNA (1)...(19): siRNA sense strand
gggcaagaccagcuucauc

SEQ ID NO: 1049445 - RNA, 19 nt, Homo sapiens
  misc_RNA (1)...(19): siRNA sense strand
gcucaacaaggccgacaug

SEQ ID NO: 1049446 - RNA, 19 nt, Homo sapiens
  misc_RNA (1)...(19): siRNA sense strand
ucaaacugcccgucaucuu

SEQ ID NO: 1049447 - RNA, 19 nt, Homo sapiens
  misc_RNA (1)...(19): siRNA sense strand
gcgcguggaccucaucauc

SEQ ID NO: 1049448 - RNA, 19 nt, Homo sapiens
  misc_RNA (1)...(19): siRNA sense strand
gcacgggcaagaccagcuu

SEQ ID NO: 1049449 - RNA, 19 nt, Homo sapiens
  misc_RNA (1)...(19): siRNA sense strand
caugcuggaugaugaagag

SEQ ID NO: 1049450 - RNA, 19 nt, Homo sapiens
  misc_RNA (1)...(19): siRNA sense strand
uggaggcacuggacgagau

SEQ ID NO: 1049451 - RNA, 19 nt, Homo sapiens
  misc_RNA (1)...(19): siRNA sense strand
cuggagagcaucagcauca

SEQ ID NO: 1049452 - RNA, 19 nt, Homo sapiens
  misc_RNA (1)...(19): siRNA sense strand
gggaaggagaacaagaaga

SEQ ID NO: 1049453 - RNA, 19 nt, Homo sapiens
  misc_RNA (1)...(19): siRNA sense strand
guccaaauacgacgagauc

SEQ ID NO: 1049454 - RNA, 19 nt, Homo sapiens
  misc_RNA (1)...(19): siRNA sense strand
ggagagcaucagcaucauc

SEQ ID NO: 1049455 - RNA, 19 nt, Homo sapiens
  misc_RNA (1)...(19): siRNA sense strand
guucacgcuuacaucauca

SEQ ID NO: 1049456 - RNA, 19 nt, Homo sapiens
  misc_RNA (1)...(19): siRNA sense strand
gcucuuugaugcgcacaag

SEQ ID NO: 1049457 - RNA, 19 nt, Homo sapiens
  misc_RNA (1)...(19): siRNA sense strand
ggugcgaguucacgcuuac

SEQ ID NO: 1049458 - RNA, 19 nt, Homo sapiens
  misc_RNA (1)...(19): siRNA sense strand
gaagcagcugauccucaaa

SEQ ID NO: 1049459 - RNA, 19 nt, Homo sapiens
  misc_RNA (1)...(19): siRNA sense strand
cgcacaagcuggagaucuc

SEQ ID NO: 1049460 - RNA, 19 nt, Homo sapiens
  misc_RNA (1)...(19): siRNA sense strand
gaaggagaacaagaagaag

SEQ ID NO: 1049461 - RNA, 19 nt, Homo sapiens
  misc_RNA (1)...(19): siRNA sense strand
ugaccucggcccucaagga

SEQ ID NO: 1049462 - RNA, 19 nt, Homo sapiens
  misc_RNA (1)...(19): siRNA sense strand
gcucaacgaccuggugaag

SEQ ID NO: 1049463 - RNA, 19 nt, Homo sapiens
  misc_RNA (1)...(19): siRNA sense strand
acaagaagaagcagcugau

SEQ ID NO: 1049464 - RNA, 19 nt, Homo sapiens
  misc_RNA (1)...(19): siRNA sense strand
acggcaugcuggaugauga

SEQ ID NO: 1049465 - RNA, 19 nt, Homo sapiens
  misc_RNA (1)...(19): siRNA sense strand
guauagaacucaacagaaa

SEQ ID NO: 1049466 - RNA, 19 nt, Homo sapiens
  misc_RNA (1)...(19): siRNA sense strand
agaaacagcggaugaaaua

SEQ ID NO: 1049467 - RNA, 19 nt, Homo sapiens
  misc_RNA (1)...(19): siRNA sense strand
gguuacaacugaauuagaa

SEQ ID NO: 1049468 - RNA, 19 nt, Homo sapiens
  misc_RNA (1)...(19): siRNA sense strand
ucaaauaacugcaagaacu

SEQ ID NO: 1049469 - RNA, 19 nt, Homo sapiens
  misc_RNA (1)...(19): siRNA sense strand
gaaccagaguuaccuugug

SEQ ID NO: 1049470 - RNA, 19 nt, Homo sapiens
  misc_RNA (1)...(19): siRNA sense strand
agaguuaccuuguguugaa

SEQ ID NO: 1049471 - RNA, 19 nt, Homo sapiens
  misc_RNA (1)...(19): siRNA sense strand
gcagugaaagcuaacaauu

SEQ ID NO: 1049472 - RNA, 19 nt, Homo sapiens
  misc_RNA (1)...(19): siRNA sense strand
ccacagacuucaaauaacu

SEQ ID NO: 1049473 - RNA, 19 nt, Homo sapiens
  misc_RNA (1)...(19): siRNA sense strand
cauaagaauuccuacuuca

SEQ ID NO: 1049474 - RNA, 19 nt, Homo sapiens
  misc_RNA (1)...(19): siRNA sense strand
augaagagguuacaacuga

SEQ ID NO: 1049475 - RNA, 19 nt, Homo sapiens
  misc_RNA (1)...(19): siRNA sense strand
caggagcagugaaagcuaa

SEQ ID NO: 1049476 - RNA, 19 nt, Homo sapiens
  misc_RNA (1)...(19): siRNA sense strand
aaacagcggaugaaauauu

SEQ ID NO: 1049477 - RNA, 19 nt, Homo sapiens
  misc_RNA (1)...(19): siRNA sense strand
ccauaagaauuccuacuuc

SEQ ID NO: 1049478 - RNA, 19 nt, Homo sapiens
  misc_RNA (1)...(19): siRNA sense strand
gaaaacugcuuaugaagag

SEQ ID NO: 1049479 - RNA, 19 nt, Homo sapiens
  misc_RNA (1)...(19): siRNA sense strand
gaucagcaccaagcucuuu

SEQ ID NO: 1049480 - RNA, 19 nt, Homo sapiens
  misc_RNA (1)...(19): siRNA sense strand
aacagcggaugaaauauuu

SEQ ID NO: 1049481 - RNA, 19 nt, Homo sapiens
  misc_RNA (1)...(19): siRNA sense strand
gagaaacagcggaugaaau

SEQ ID NO: 1049482 - RNA, 19 nt, Homo sapiens
  misc_RNA (1)...(19): siRNA sense strand
ggagaaacagcggaugaaa

SEQ ID NO: 1049483 - RNA, 19 nt, Homo sapiens
  misc_RNA (1)...(19): siRNA sense strand
gcucccgucuacuuucuuu

SEQ ID NO: 1049484 - RNA, 19 nt, Homo sapiens
  misc_RNA (1)...(19): siRNA sense strand
ggaccguguagaacaaaua

SEQ ID NO: 1049485 - RNA, 19 nt, Homo sapiens
  misc_RNA (1)...(19): siRNA sense strand
caaauaacugcaagaacuu

SEQ ID NO: 1049486 - RNA, 19 nt, Homo sapiens
  misc_RNA (1)...(19): siRNA sense strand
gcuaacaauuccaugucaa

SEQ ID NO: 1049487 - RNA, 19 nt, Homo sapiens
  misc_RNA (1)...(19): siRNA sense strand
gaagagguuacaacugaau

SEQ ID NO: 1049488 - RNA, 19 nt, Homo sapiens
  misc_RNA (1)...(19): siRNA sense strand
ggagcuggaccguguagaa

SEQ ID NO: 1049489 - RNA, 19 nt, Homo sapiens
  misc_RNA (1)...(19): siRNA sense strand
gcuggaccguguagaacaa

SEQ ID NO: 1049490 - RNA, 19 nt, Homo sapiens
  misc_RNA (1)...(19): siRNA sense strand
gaccguguagaacaaauaa

SEQ ID NO: 1049491 - RNA, 19 nt, Homo sapiens
  misc_RNA (1)...(19): siRNA sense strand
ugaagagguuacaacugaa

SEQ ID NO: 1049492 - RNA, 19 nt, Homo sapiens
  misc_RNA (1)...(19): siRNA sense strand
acccacagacuucaaauaa

SEQ ID NO: 1049493 - RNA, 19 nt, Homo sapiens
  misc_RNA (1)...(19): siRNA sense strand
gccauaagaauuccuacuu

SEQ ID NO: 1049494 - RNA, 19 nt, Homo sapiens
  misc_RNA (1)...(19): siRNA sense strand
ccacugagagcaggacaaa

SEQ ID NO: 1049495 - RNA, 19 nt, Homo sapiens
  misc_RNA (1)...(19): siRNA sense strand
caaacccacagacuucaaa

SEQ ID NO: 1049496 - RNA, 19 nt, Homo sapiens
  misc_RNA (1)...(19): siRNA sense strand
gcaggagcagugaaagcua

SEQ ID NO: 1049497 - RNA, 19 nt, Homo sapiens
  misc_RNA (1)...(19): siRNA sense strand
gaacuucuugacugagaug

SEQ ID NO: 1049498 - RNA, 19 nt, Homo sapiens
  misc_RNA (1)...(19): siRNA sense strand
ucucagcacucuuccuaca

SEQ ID NO: 1049499 - RNA, 19 nt, Homo sapiens
  misc_RNA (1)...(19): siRNA sense strand
caaaacggccauaagaauu

SEQ ID NO: 1049500 - RNA, 19 nt, Homo sapiens
  misc_RNA (1)...(19): siRNA sense strand
agagguuacaacugaauua

SEQ ID NO: 1049501 - RNA, 19 nt, Homo sapiens
  misc_RNA (1)...(19): siRNA sense strand
cuaacaauuccaugucaaa

SEQ ID NO: 1049502 - RNA, 19 nt, Homo sapiens
  misc_RNA (1)...(19): siRNA sense strand
gaguuaccuuguguugaaa

SEQ ID NO: 1049503 - RNA, 19 nt, Homo sapiens
  misc_RNA (1)...(19): siRNA sense strand
gaaacagcggaugaaauau

SEQ ID NO: 1049504 - RNA, 19 nt, Homo sapiens
  misc_RNA (1)...(19): siRNA sense strand
ucagcacucuuccuacaag

SEQ ID NO: 1049505 - RNA, 19 nt, Homo sapiens
  misc_RNA (1)...(19): siRNA sense strand
ccguguagaacaaauaauu

SEQ ID NO: 1049506 - RNA, 19 nt, Homo sapiens
  misc_RNA (1)...(19): siRNA sense strand
ccagaguuaccuuguguug

SEQ ID NO: 1049507 - RNA, 19 nt, Homo sapiens
  misc_RNA (1)...(19): siRNA sense strand
gagcagugaaagcuaacaa

SEQ ID NO: 1049508 - RNA, 19 nt, Homo sapiens
  misc_RNA (1)...(19): siRNA sense strand
cagugaaagcuaacaauuc

SEQ ID NO: 1049509 - RNA, 19 nt, Homo sapiens
  misc_RNA (1)...(19): siRNA sense strand
aaccagaguuaccuugugu

SEQ ID NO: 1049510 - RNA, 19 nt, Homo sapiens
  misc_RNA (1)...(19): siRNA sense strand
uaguauagaacucaacaga

SEQ ID NO: 1049511 - RNA, 19 nt, Homo sapiens
  misc_RNA (1)...(19): siRNA sense strand
gcacauccuaggcacagau

SEQ ID NO: 1049512 - RNA, 19 nt, Homo sapiens
  misc_RNA (1)...(19): siRNA sense strand
cuucaaacccacagacuuc

SEQ ID NO: 1049513 - RNA, 19 nt, Homo sapiens
  misc_RNA (1)...(19): siRNA sense strand
ggcgagcccuucccaucau

SEQ ID NO: 1049514 - RNA, 19 nt, Homo sapiens
  misc_RNA (1)...(19): siRNA sense strand
ccaagcucuuuacggagaa

SEQ ID NO: 1049515 - RNA, 19 nt, Homo sapiens
  misc_RNA (1)...(19): siRNA sense strand
agugaaagcuaacaauucc

SEQ ID NO: 1049516 - RNA, 19 nt, Homo sapiens
  misc_RNA (1)...(19): siRNA sense strand
acugagagcaggacaaaca

SEQ ID NO: 1049517 - RNA, 19 nt, Homo sapiens
  misc_RNA (1)...(19): siRNA sense strand
caucaugcgcucacuaguc

SEQ ID NO: 1049518 - RNA, 19 nt, Homo sapiens
  misc_RNA (1)...(19): siRNA sense strand
gcgagcccuucccaucaug

SEQ ID NO: 1049519 - RNA, 19 nt, Homo sapiens
  misc_RNA (1)...(19): siRNA sense strand
gauaagaaaauagcaguga

SEQ ID NO: 1049520 - RNA, 19 nt, Homo sapiens
  misc_RNA (1)...(19): siRNA sense strand
uagcagugaucagcaccaa

SEQ ID NO: 1049521 - RNA, 19 nt, Homo sapiens
  misc_RNA (1)...(19): siRNA sense strand
gagguuacaacugaauuag

SEQ ID NO: 1049522 - RNA, 19 nt, Homo sapiens
  misc_RNA (1)...(19): siRNA sense strand
caagcucuuuacggagaaa

SEQ ID NO: 1049523 - RNA, 19 nt, Homo sapiens
  misc_RNA (1)...(19): siRNA sense strand
ccaaaacggccauaagaau

SEQ ID NO: 1049524 - RNA, 19 nt, Homo sapiens
  misc_RNA (1)...(19): siRNA sense strand
aaagcuaacaauuccaugu

SEQ ID NO: 1049525 - RNA, 19 nt, Homo sapiens
  misc_RNA (1)...(19): siRNA sense strand
gggcccaucgcacauccua

SEQ ID NO: 1049526 - RNA, 19 nt, Homo sapiens
  misc_RNA (1)...(19): siRNA sense strand
aagaauuccuacuucaaac

SEQ ID NO: 1049527 - RNA, 19 nt, Homo sapiens
  misc_RNA (1)...(19): siRNA sense strand
ugaaagcuaacaauuccau

SEQ ID NO: 1049528 - RNA, 19 nt, Homo sapiens
  misc_RNA (1)...(19): siRNA sense strand
aaggccagaaccagaguua

SEQ ID NO: 1049529 - RNA, 19 nt, Homo sapiens
  misc_RNA (1)...(19): siRNA sense strand
ggaaagaacuagagagaga

SEQ ID NO: 1049530 - RNA, 19 nt, Homo sapiens
  misc_RNA (1)...(19): siRNA sense strand
gaacaugaacggcgaguaa

SEQ ID NO: 1049531 - RNA, 19 nt, Homo sapiens
  misc_RNA (1)...(19): siRNA sense strand
ggaauuguguucguccuua

SEQ ID NO: 1049532 - RNA, 19 nt, Homo sapiens
  misc_RNA (1)...(19): siRNA sense strand
ccagggcucuccagaagua

SEQ ID NO: 1049533 - RNA, 19 nt, Homo sapiens
  misc_RNA (1)...(19): siRNA sense strand
cagaggaaguucaggauga

SEQ ID NO: 1049534 - RNA, 19 nt, Homo sapiens
  misc_RNA (1)...(19): siRNA sense strand
gaauuguguucguccuuaa

SEQ ID NO: 1049535 - RNA, 19 nt, Homo sapiens
  misc_RNA (1)...(19): siRNA sense strand
ccuauugccuucauccuuu

SEQ ID NO: 1049536 - RNA, 19 nt, Homo sapiens
  misc_RNA (1)...(19): siRNA sense strand
caaauuuguccuucgcuua

SEQ ID NO: 1049537 - RNA, 19 nt, Homo sapiens
  misc_RNA (1)...(19): siRNA sense strand
guaaagaagcggaaagcaa

SEQ ID NO: 1049538 - RNA, 19 nt, Homo sapiens
  misc_RNA (1)...(19): siRNA sense strand
gugaugaggcugugacuaa

SEQ ID NO: 1049539 - RNA, 19 nt, Homo sapiens
  misc_RNA (1)...(19): siRNA sense strand
ccuaacagccuccaaauuc

SEQ ID NO: 1049540 - RNA, 19 nt, Homo sapiens
  misc_RNA (1)...(19): siRNA sense strand
gauaccgaauccacuuauu

SEQ ID NO: 1049541 - RNA, 19 nt, Homo sapiens
  misc_RNA (1)...(19): siRNA sense strand
gaagaaaauuccauucauc

SEQ ID NO: 1049542 - RNA, 19 nt, Homo sapiens
  misc_RNA (1)...(19): siRNA sense strand
ugaagaggccgaacaugaa

SEQ ID NO: 1049543 - RNA, 19 nt, Homo sapiens
  misc_RNA (1)...(19): siRNA sense strand
guccucaucuuucucuuug

SEQ ID NO: 1049544 - RNA, 19 nt, Homo sapiens
  misc_RNA (1)...(19): siRNA sense strand
ggaauuaccagggcauugu

SEQ ID NO: 1049545 - RNA, 19 nt, Homo sapiens
  misc_RNA (1)...(19): siRNA sense strand
cgaguuguauuaugaagag

SEQ ID NO: 1049546 - RNA, 19 nt, Homo sapiens
  misc_RNA (1)...(19): siRNA sense strand
cagcauuggugguccuaga

SEQ ID NO: 1049547 - RNA, 19 nt, Homo sapiens
  misc_RNA (1)...(19): siRNA sense strand
aguggaggcuugucaguga

SEQ ID NO: 1049548 - RNA, 19 nt, Homo sapiens
  misc_RNA (1)...(19): siRNA sense strand
auagggaccugggcacuuu

SEQ ID NO: 1049549 - RNA, 19 nt, Homo sapiens
  misc_RNA (1)...(19): siRNA sense strand
ggcugaaagucuacaaugu

SEQ ID NO: 1049550 - RNA, 19 nt, Homo sapiens
  misc_RNA (1)...(19): siRNA sense strand
gcccuccucuucauccauu

SEQ ID NO: 1049551 - RNA, 19 nt, Homo sapiens
  misc_RNA (1)...(19): siRNA sense strand
gcuggugguugcaguggaa

SEQ ID NO: 1049552 - RNA, 19 nt, Homo sapiens
  misc_RNA (1)...(19): siRNA sense strand
caccuggccuucugcauca

SEQ ID NO: 1049553 - RNA, 19 nt, Homo sapiens
  misc_RNA (1)...(19): siRNA sense strand
agaaaagucugucaccauu

SEQ ID NO: 1049554 - RNA, 19 nt, Homo sapiens
  misc_RNA (1)...(19): siRNA sense strand
gcauucaaacuccucauuc

SEQ ID NO: 1049555 - RNA, 19 nt, Homo sapiens
  misc_RNA (1)...(19): siRNA sense strand
cguagucaaugugaagaaa

SEQ ID NO: 1049556 - RNA, 19 nt, Homo sapiens
  misc_RNA (1)...(19): siRNA sense strand
cuauucaagucauucgaaa

SEQ ID NO: 1049557 - RNA, 19 nt, Homo sapiens
  misc_RNA (1)...(19): siRNA sense strand
ugacaugccacggguguuu

SEQ ID NO: 1049558 - RNA, 19 nt, Homo sapiens
  misc_RNA (1)...(19): siRNA sense strand
ccacuuauucuggauauuc

SEQ ID NO: 1049559 - RNA, 19 nt, Homo sapiens
  misc_RNA (1)...(19): siRNA sense strand
gggcugaaagucuacaaug

SEQ ID NO: 1049560 - RNA, 19 nt, Homo sapiens
  misc_RNA (1)...(19): siRNA sense strand
gaaagcaaggcuggugguu

SEQ ID NO: 1049561 - RNA, 19 nt, Homo sapiens
  misc_RNA (1)...(19): siRNA sense strand
gaacuagagagagacacaa

SEQ ID NO: 1049562 - RNA, 19 nt, Homo sapiens
  misc_RNA (1)...(19): siRNA sense strand
aaggaccgcuggcucucua

SEQ ID NO: 1049563 - RNA, 19 nt, Homo sapiens
  misc_RNA (1)...(19): siRNA sense strand
aagaggacauugccaggau

SEQ ID NO: 1049564 - RNA, 19 nt, Homo sapiens
  misc_RNA (1)...(19): siRNA sense strand
gaagaggccgaacaugaac

SEQ ID NO: 1049565 - RNA, 19 nt, Homo sapiens
  misc_RNA (1)...(19): siRNA sense strand
gcauuggugguccuagaaa

SEQ ID NO: 1049566 - RNA, 19 nt, Homo sapiens
  misc_RNA (1)...(19): siRNA sense strand
gugguuuccuauuggcuuu

SEQ ID NO: 1049567 - RNA, 19 nt, Homo sapiens
  misc_RNA (1)...(19): siRNA sense strand
ccucaucuuucucuuugug

SEQ ID NO: 1049568 - RNA, 19 nt, Homo sapiens
  misc_RNA (1)...(19): siRNA sense strand
uuucuuggacuucuaguuu

SEQ ID NO: 1049569 - RNA, 19 nt, Homo sapiens
  misc_RNA (1)...(19): siRNA sense strand
ggaggcuugucagugauga

SEQ ID NO: 1049570 - RNA, 19 nt, Homo sapiens
  misc_RNA (1)...(19): siRNA sense strand
ccacggguguuuguguuuc

SEQ ID NO: 1049571 - RNA, 19 nt, Homo sapiens
  misc_RNA (1)...(19): siRNA sense strand
cauucaaacuccucauucu

SEQ ID NO: 1049572 - RNA, 19 nt, Homo sapiens
  misc_RNA (1)...(19): siRNA sense strand
gguccucaucuuucucuuu

SEQ ID NO: 1049573 - RNA, 19 nt, Homo sapiens
  misc_RNA (1)...(19): siRNA sense strand
gaugaggcugugacuaaug

SEQ ID NO: 1049574 - RNA, 19 nt, Homo sapiens
  misc_RNA (1)...(19): siRNA sense strand
augaagaggccgaacauga

SEQ ID NO: 1049575 - RNA, 19 nt, Homo sapiens
  misc_RNA (1)...(19): siRNA sense strand
cagaaguaccugcgcauca

SEQ ID NO: 1049576 - RNA, 19 nt, Homo sapiens
  misc_RNA (1)...(19): siRNA sense strand
gcacagcauaucccaagag

SEQ ID NO: 1049577 - RNA, 19 nt, Homo sapiens
  misc_RNA (1)...(19): siRNA sense strand
gggauggaauuguguucgu

SEQ ID NO: 1049578 - RNA, 19 nt, Homo sapiens
  misc_RNA (1)...(19): siRNA sense strand
ugaugaggcugugacuaau

SEQ ID NO: 1049579 - RNA, 19 nt, Homo sapiens
  misc_RNA (1)...(19): siRNA sense strand
caugaacggcgaguaaaga

SEQ ID NO: 1049580 - RNA, 19 nt, Homo sapiens
  misc_RNA (1)...(19): siRNA sense strand
uaacccaaaccuccuaaca

SEQ ID NO: 1049581 - RNA, 19 nt, Homo sapiens
  misc_RNA (1)...(19): siRNA sense strand
ucuuugugguuuccuauug

SEQ ID NO: 1049582 - RNA, 19 nt, Homo sapiens
  misc_RNA (1)...(19): siRNA sense strand
gagagccccuguugggaaa

SEQ ID NO: 1049583 - RNA, 19 nt, Homo sapiens
  misc_RNA (1)...(19): siRNA sense strand
ucaucauacucucugaaga

SEQ ID NO: 1049584 - RNA, 19 nt, Homo sapiens
  misc_RNA (1)...(19): siRNA sense strand
gaauuaccagggcauugug

SEQ ID NO: 1049585 - RNA, 19 nt, Homo sapiens
  misc_RNA (1)...(19): siRNA sense strand
gaugacaacuggggagaga

SEQ ID NO: 1049586 - RNA, 19 nt, Homo sapiens
  misc_RNA (1)...(19): siRNA sense strand
guagauggccccaguaaca

SEQ ID NO: 1049587 - RNA, 19 nt, Homo sapiens
  misc_RNA (1)...(19): siRNA sense strand
aauaugcagucucccuugu

SEQ ID NO: 1049588 - RNA, 19 nt, Homo sapiens
  misc_RNA (1)...(19): siRNA sense strand
gacggcagagggucagaaa

SEQ ID NO: 1049589 - RNA, 19 nt, Homo sapiens
  misc_RNA (1)...(19): siRNA sense strand
aaaagucugucaccauuca

SEQ ID NO: 1049590 - RNA, 19 nt, Homo sapiens
  misc_RNA (1)...(19): siRNA sense strand
ucacccggcagcagaacua

SEQ ID NO: 1049591 - RNA, 19 nt, Homo sapiens
  misc_RNA (1)...(19): siRNA sense strand
ggcauucaaacuccucauu

SEQ ID NO: 1049592 - RNA, 19 nt, Homo sapiens
  misc_RNA (1)...(19): siRNA sense strand
ggauuacgggauggaauug

SEQ ID NO: 1049593 - RNA, 19 nt, Homo sapiens
  misc_RNA (1)...(19): siRNA sense strand
guugggaaaugauucuacu

SEQ ID NO: 1049594 - RNA, 19 nt, Homo sapiens
  misc_RNA (1)...(19): siRNA sense strand
cccaaggccuuccuagaac

SEQ ID NO: 1049595 - RNA, 19 nt, Homo sapiens
  misc_RNA (1)...(19): siRNA sense strand
cuggauauucuuacuauuc

SEQ ID NO: 1049596 - RNA, 19 nt, Homo sapiens
  misc_RNA (1)...(19): siRNA sense strand
uggauuacgggauggaauu

SEQ ID NO: 1049597 - RNA, 19 nt, Homo sapiens
  misc_RNA (1)...(19): siRNA sense strand
gacagaggaaguucaggau

SEQ ID NO: 1049598 - RNA, 19 nt, Homo sapiens
  misc_RNA (1)...(19): siRNA sense strand
gccccacccugcaauauga

SEQ ID NO: 1049599 - RNA, 19 nt, Homo sapiens
  misc_RNA (1)...(19): siRNA sense strand
gaggacauugccaggauca

SEQ ID NO: 1049600 - RNA, 19 nt, Homo sapiens
  misc_RNA (1)...(19): siRNA sense strand
uggaugcccuccucuucau

SEQ ID NO: 1049601 - RNA, 19 nt, Homo sapiens
  misc_RNA (1)...(19): siRNA sense strand
cuagagagagacacaaguc

SEQ ID NO: 1049602 - RNA, 19 nt, Homo sapiens
  misc_RNA (1)...(19): siRNA sense strand
cuaacagccuccaaauucc

SEQ ID NO: 1049603 - RNA, 19 nt, Homo sapiens
  misc_RNA (1)...(19): siRNA sense strand
caccaucuauaacccaaac

SEQ ID NO: 1049604 - RNA, 19 nt, Homo sapiens
  misc_RNA (1)...(19): siRNA sense strand
guggaugcccuccucuuca

SEQ ID NO: 1049605 - RNA, 19 nt, Homo sapiens
  misc_RNA (1)...(19): siRNA sense strand
gacacaaucuccaagaaug

SEQ ID NO: 1049606 - RNA, 19 nt, Homo sapiens
  misc_RNA (1)...(19): siRNA sense strand
ucaccaaccuuucgucuuc

SEQ ID NO: 1049607 - RNA, 19 nt, Homo sapiens
  misc_RNA (1)...(19): siRNA sense strand
caagcuggcucucugguau

SEQ ID NO: 1049608 - RNA, 19 nt, Homo sapiens
  misc_RNA (1)...(19): siRNA sense strand
gaugaugccugcccagagu

SEQ ID NO: 1049609 - RNA, 19 nt, Homo sapiens
  misc_RNA (1)...(19): siRNA sense strand
ggcccacccucaaccaaua

SEQ ID NO: 1049610 - RNA, 19 nt, Homo sapiens
  misc_RNA (1)...(19): siRNA sense strand
gaucagguguuguccuaca

SEQ ID NO: 1049611 - RNA, 19 nt, Homo sapiens
  misc_RNA (1)...(19): siRNA sense strand
ggaggugcccuuugugaug

SEQ ID NO: 1049612 - RNA, 19 nt, Homo sapiens
  misc_RNA (1)...(19): siRNA sense strand
gaggagccagccaaugaua

SEQ ID NO: 1049613 - RNA, 19 nt, Homo sapiens
  misc_RNA (1)...(19): siRNA sense strand
caugggaggugcccuuugu

SEQ ID NO: 1049614 - RNA, 19 nt, Homo sapiens
  misc_RNA (1)...(19): siRNA sense strand
gcaagacaaacaaggcaaa

SEQ ID NO: 1049615 - RNA, 19 nt, Homo sapiens
  misc_RNA (1)...(19): siRNA sense strand
gcaccagcauuagauguca

SEQ ID NO: 1049616 - RNA, 19 nt, Homo sapiens
  misc_RNA (1)...(19): siRNA sense strand
cagacacaaucuccaagaa

SEQ ID NO: 1049617 - RNA, 19 nt, Homo sapiens
  misc_RNA (1)...(19): siRNA sense strand
gccuggagcugcagugguu

SEQ ID NO: 1049618 - RNA, 19 nt, Homo sapiens
  misc_RNA (1)...(19): siRNA sense strand
aaaggaggaucagguguug

SEQ ID NO: 1049619 - RNA, 19 nt, Homo sapiens
  misc_RNA (1)...(19): siRNA sense strand
guaagcccgcuguccaaua

SEQ ID NO: 1049620 - RNA, 19 nt, Homo sapiens
  misc_RNA (1)...(19): siRNA sense strand
gaggugcccuuugugaugu

SEQ ID NO: 1049621 - RNA, 19 nt, Homo sapiens
  misc_RNA (1)...(19): siRNA sense strand
aagcaaaccuggaguaucc

SEQ ID NO: 1049622 - RNA, 19 nt, Homo sapiens
  misc_RNA (1)...(19): siRNA sense strand
cccaagagcucagacacaa

SEQ ID NO: 1049623 - RNA, 19 nt, Homo sapiens
  misc_RNA (1)...(19): siRNA sense strand
uaagcccgcuguccaauac

SEQ ID NO: 1049624 - RNA, 19 nt, Homo sapiens
  misc_RNA (1)...(19): siRNA sense strand
ugucauccgugggucuuua

SEQ ID NO: 1049625 - RNA, 19 nt, Homo sapiens
  misc_RNA (1)...(19): siRNA sense strand
gacaaacaaggcaaaucua

SEQ ID NO: 1049626 - RNA, 19 nt, Homo sapiens
  misc_RNA (1)...(19): siRNA sense strand
uggaggagccagccaauga

SEQ ID NO: 1049627 - RNA, 19 nt, Homo sapiens
  misc_RNA (1)...(19): siRNA sense strand
caagagcucagacacaauc

SEQ ID NO: 1049628 - RNA, 19 nt, Homo sapiens
  misc_RNA (1)...(19): siRNA sense strand
gaaugugcaagacaaacaa

SEQ ID NO: 1049629 - RNA, 19 nt, Homo sapiens
  misc_RNA (1)...(19): siRNA sense strand
agaacucaauguacugguu

SEQ ID NO: 1049630 - RNA, 19 nt, Homo sapiens
  misc_RNA (1)...(19): siRNA sense strand
caagacugcccacgacaga

SEQ ID NO: 1049631 - RNA, 19 nt, Homo sapiens
  misc_RNA (1)...(19): siRNA sense strand
gguguuguccuacaucaau

SEQ ID NO: 1049632 - RNA, 19 nt, Homo sapiens
  misc_RNA (1)...(19): siRNA sense strand
gcucagacacaaucuccaa

SEQ ID NO: 1049633 - RNA, 19 nt, Homo sapiens
  misc_RNA (1)...(19): siRNA sense strand
caaggaggaugccauugcu

SEQ ID NO: 1049634 - RNA, 19 nt, Homo sapiens
  misc_RNA (1)...(19): siRNA sense strand
ugaugugguucuucaaaca

SEQ ID NO: 1049635 - RNA, 19 nt, Homo sapiens
  misc_RNA (1)...(19): siRNA sense strand
agacaaacaaggcaaaucu

SEQ ID NO: 1049636 - RNA, 19 nt, Homo sapiens
  misc_RNA (1)...(19): siRNA sense strand
ggagccagccaaugauauc

SEQ ID NO: 1049637 - RNA, 19 nt, Homo sapiens
  misc_RNA (1)...(19): siRNA sense strand
gcacugcccaauguaaugu

SEQ ID NO: 1049638 - RNA, 19 nt, Homo sapiens
  misc_RNA (1)...(19): siRNA sense strand
aaccuuagaacucaaugua

SEQ ID NO: 1049639 - RNA, 19 nt, Homo sapiens
  misc_RNA (1)...(19): siRNA sense strand
uaucaaggaggaugccauu

SEQ ID NO: 1049640 - RNA, 19 nt, Homo sapiens
  misc_RNA (1)...(19): siRNA sense strand
gaguaagcccgcuguccaa

SEQ ID NO: 1049641 - RNA, 19 nt, Homo sapiens
  misc_RNA (1)...(19): siRNA sense strand
uuucuuugcaccagcauua

SEQ ID NO: 1049642 - RNA, 19 nt, Homo sapiens
  misc_RNA (1)...(19): siRNA sense strand
ccuuagaacucaauguacu

SEQ ID NO: 1049643 - RNA, 19 nt, Homo sapiens
  misc_RNA (1)...(19): siRNA sense strand
ccaagaaugggacccuuuc

SEQ ID NO: 1049644 - RNA, 19 nt, Homo sapiens
  misc_RNA (1)...(19): siRNA sense strand
ggaggagccagccaaugau

SEQ ID NO: 1049645 - RNA, 19 nt, Homo sapiens
  misc_RNA (1)...(19): siRNA sense strand
guaaugugacgcuggaagu

SEQ ID NO: 1049646 - RNA, 19 nt, Homo sapiens
  misc_RNA (1)...(19): siRNA sense strand
uggcugggcugguccucuu

SEQ ID NO: 1049647 - RNA, 19 nt, Homo sapiens
  misc_RNA (1)...(19): siRNA sense strand
cuacagcugcuccgugaau

SEQ ID NO: 1049648 - RNA, 19 nt, Homo sapiens
  misc_RNA (1)...(19): siRNA sense strand
ccagugggaucggcagcuu

SEQ ID NO: 1049649 - RNA, 19 nt, Homo sapiens
  misc_RNA (1)...(19): siRNA sense strand
acaaacaaggcaaaucuag

SEQ ID NO: 1049650 - RNA, 19 nt, Homo sapiens
  misc_RNA (1)...(19): siRNA sense strand
gcaaaccuggaguauccuu

SEQ ID NO: 1049651 - RNA, 19 nt, Homo sapiens
  misc_RNA (1)...(19): siRNA sense strand
ucaagcuggcucucuggua

SEQ ID NO: 1049652 - RNA, 19 nt, Homo sapiens
  misc_RNA (1)...(19): siRNA sense strand
agacacaaucuccaagaau

SEQ ID NO: 1049653 - RNA, 19 nt, Homo sapiens
  misc_RNA (1)...(19): siRNA sense strand
ucagacacaaucuccaaga

SEQ ID NO: 1049654 - RNA, 19 nt, Homo sapiens
  misc_RNA (1)...(19): siRNA sense strand
gugaugugguucuucaaac

SEQ ID NO: 1049655 - RNA, 19 nt, Homo sapiens
  misc_RNA (1)...(19): siRNA sense strand
cagguguuguccuacauca

SEQ ID NO: 1049656 - RNA, 19 nt, Homo sapiens
  misc_RNA (1)...(19): siRNA sense strand
uuccauccuuccagacuuu

SEQ ID NO: 1049657 - RNA, 19 nt, Homo sapiens
  misc_RNA (1)...(19): siRNA sense strand
ccgugaaugugcaagacaa

SEQ ID NO: 1049658 - RNA, 19 nt, Homo sapiens
  misc_RNA (1)...(19): siRNA sense strand
ucugcaaggcccacaauga

SEQ ID NO: 1049659 - RNA, 19 nt, Homo sapiens
  misc_RNA (1)...(19): siRNA sense strand
ugaaugugcaagacaaaca

SEQ ID NO: 1049660 - RNA, 19 nt, Homo sapiens
  misc_RNA (1)...(19): siRNA sense strand
gccagccaaugauaucaag

SEQ ID NO: 1049661 - RNA, 19 nt, Homo sapiens
  misc_RNA (1)...(19): siRNA sense strand
caagacaaacaaggcaaau

SEQ ID NO: 1049662 - RNA, 19 nt, Homo sapiens
  misc_RNA (1)...(19): siRNA sense strand
cagccaaugauaucaagga

SEQ ID NO: 1049663 - RNA, 19 nt, Homo sapiens
  misc_RNA (1)...(19): siRNA sense strand
uuaagccucaccaaccuuu

SEQ ID NO: 1049664 - RNA, 19 nt, Homo sapiens
  misc_RNA (1)...(19): siRNA sense strand
caagcaaaccuggaguauc

SEQ ID NO: 1049665 - RNA, 19 nt, Homo sapiens
  misc_RNA (1)...(19): siRNA sense strand
agacugcccacgacagaug

SEQ ID NO: 1049666 - RNA, 19 nt, Homo sapiens
  misc_RNA (1)...(19): siRNA sense strand
ucaaggaggaugccauugc

SEQ ID NO: 1049667 - RNA, 19 nt, Homo sapiens
  misc_RNA (1)...(19): siRNA sense strand
uuugugaugugguucuuca

SEQ ID NO: 1049668 - RNA, 19 nt, Homo sapiens
  misc_RNA (1)...(19): siRNA sense strand
gcagagaccuggguugaua

SEQ ID NO: 1049669 - RNA, 19 nt, Homo sapiens
  misc_RNA (1)...(19): siRNA sense strand
gaagaucucuauuccuaug

SEQ ID NO: 1049670 - RNA, 19 nt, Homo sapiens
  misc_RNA (1)...(19): siRNA sense strand
uaacaucuauggccuuuau

SEQ ID NO: 1049671 - RNA, 19 nt, Homo sapiens
  misc_RNA (1)...(19): siRNA sense strand
cauaucgccucuacaauuu

SEQ ID NO: 1049672 - RNA, 19 nt, Homo sapiens
  misc_RNA (1)...(19): siRNA sense strand
ggaaguggaucagggcuuu

SEQ ID NO: 1049673 - RNA, 19 nt, Homo sapiens
  misc_RNA (1)...(19): siRNA sense strand
gauagaagcaacuuuaaga

SEQ ID NO: 1049674 - RNA, 19 nt, Homo sapiens
  misc_RNA (1)...(19): siRNA sense strand
gggcuaacauguucagcua

SEQ ID NO: 1049675 - RNA, 19 nt, Homo sapiens
  misc_RNA (1)...(19): siRNA sense strand
gcaauaugcuagucucaca

SEQ ID NO: 1049676 - RNA, 19 nt, Homo sapiens
  misc_RNA (1)...(19): siRNA sense strand
ugagaacaguguggaguua

SEQ ID NO: 1049677 - RNA, 19 nt, Homo sapiens
  misc_RNA (1)...(19): siRNA sense strand
gguacacccucuuauauca

SEQ ID NO: 1049678 - RNA, 19 nt, Homo sapiens
  misc_RNA (1)...(19): siRNA sense strand
uugaagaucucuauuccua

SEQ ID NO: 1049679 - RNA, 19 nt, Homo sapiens
  misc_RNA (1)...(19): siRNA sense strand
guucagcuaugacaauuau

SEQ ID NO: 1049680 - RNA, 19 nt, Homo sapiens
  misc_RNA (1)...(19): siRNA sense strand
gcuaacauguucagcuaug

SEQ ID NO: 1049681 - RNA, 19 nt, Homo sapiens
  misc_RNA (1)...(19): siRNA sense strand
guggauagaagcaacuuua

SEQ ID NO: 1049682 - RNA, 19 nt, Homo sapiens
  misc_RNA (1)...(19): siRNA sense strand
ggauguggguggcuucuuc

SEQ ID NO: 1049683 - RNA, 19 nt, Homo sapiens
  misc_RNA (1)...(19): siRNA sense strand
ccauaucgccucuacaauu

SEQ ID NO: 1049684 - RNA, 19 nt, Homo sapiens
  misc_RNA (1)...(19): siRNA sense strand
gguaccagaugggugcuua

SEQ ID NO: 1049685 - RNA, 19 nt, Homo sapiens
  misc_RNA (1)...(19): siRNA sense strand
ggaaggcagagaaagauga

SEQ ID NO: 1049686 - RNA, 19 nt, Homo sapiens
  misc_RNA (1)...(19): siRNA sense strand
cuagaggaccgaagucuuu

SEQ ID NO: 1049687 - RNA, 19 nt, Homo sapiens
  misc_RNA (1)...(19): siRNA sense strand
ugauauaucuuccaacacu

SEQ ID NO: 1049688 - RNA, 19 nt, Homo sapiens
  misc_RNA (1)...(19): siRNA sense strand
gucagagacuggcaucauu

SEQ ID NO: 1049689 - RNA, 19 nt, Homo sapiens
  misc_RNA (1)...(19): siRNA sense strand
gaccuggguugauauaucu

SEQ ID NO: 1049690 - RNA, 19 nt, Homo sapiens
  misc_RNA (1)...(19): siRNA sense strand
caucucagcacaaugauau

SEQ ID NO: 1049691 - RNA, 19 nt, Homo sapiens
  misc_RNA (1)...(19): siRNA sense strand
gcaguacccucaggaugug

SEQ ID NO: 1049692 - RNA, 19 nt, Homo sapiens
  misc_RNA (1)...(19): siRNA sense strand
ggauggcucugacuaugag

SEQ ID NO: 1049693 - RNA, 19 nt, Homo sapiens
  misc_RNA (1)...(19): siRNA sense strand
uuuaagaccugugaagaga

SEQ ID NO: 1049694 - RNA, 19 nt, Homo sapiens
  misc_RNA (1)...(19): siRNA sense strand
ggaagaugauggacuaccu

SEQ ID NO: 1049695 - RNA, 19 nt, Homo sapiens
  misc_RNA (1)...(19): siRNA sense strand
gagccuugcuggacucucu

SEQ ID NO: 1049696 - RNA, 19 nt, Homo sapiens
  misc_RNA (1)...(19): siRNA sense strand
ucaucuggcuagacauuga

SEQ ID NO: 1049697 - RNA, 19 nt, Homo sapiens
  misc_RNA (1)...(19): siRNA sense strand
uaagaccugugaagagagu

SEQ ID NO: 1049698 - RNA, 19 nt, Homo sapiens
  misc_RNA (1)...(19): siRNA sense strand
ggugggacuuuccuucugu

SEQ ID NO: 1049699 - RNA, 19 nt, Homo sapiens
  misc_RNA (1)...(19): siRNA sense strand
gaagcugguggccaucgua

SEQ ID NO: 1049700 - RNA, 19 nt, Homo sapiens
  misc_RNA (1)...(19): siRNA sense strand
ucagcacaaugauauaauc

SEQ ID NO: 1049701 - RNA, 19 nt, Homo sapiens
  misc_RNA (1)...(19): siRNA sense strand
gcacauggcgacugcugau

SEQ ID NO: 1049702 - RNA, 19 nt, Homo sapiens
  misc_RNA (1)...(19): siRNA sense strand
gagaacaguguggaguuaa

SEQ ID NO: 1049703 - RNA, 19 nt, Homo sapiens
  misc_RNA (1)...(19): siRNA sense strand
caaccucuuugucuggaau

SEQ ID NO: 1049704 - RNA, 19 nt, Homo sapiens
  misc_RNA (1)...(19): siRNA sense strand
uugggaagaugauggacua

SEQ ID NO: 1049705 - RNA, 19 nt, Homo sapiens
  misc_RNA (1)...(19): siRNA sense strand
ggagccauaucgccucuac

SEQ ID NO: 1049706 - RNA, 19 nt, Homo sapiens
  misc_RNA (1)...(19): siRNA sense strand
gaaggcauuccugucauga

SEQ ID NO: 1049707 - RNA, 19 nt, Homo sapiens
  misc_RNA (1)...(19): siRNA sense strand
uaccaucucagcacaauga

SEQ ID NO: 1049708 - RNA, 19 nt, Homo sapiens
  misc_RNA (1)...(19): siRNA sense strand
ggauagaagcaacuuuaag

SEQ ID NO: 1049709 - RNA, 19 nt, Homo sapiens
  misc_RNA (1)...(19): siRNA sense strand
agacagauguucgcuggau

SEQ ID NO: 1049710 - RNA, 19 nt, Homo sapiens
  misc_RNA (1)...(19): siRNA sense strand
agaccuggguugauauauc

SEQ ID NO: 1049711 - RNA, 19 nt, Homo sapiens
  misc_RNA (1)...(19): siRNA sense strand
gggauggcucugacuauga

SEQ ID NO: 1049712 - RNA, 19 nt, Homo sapiens
  misc_RNA (1)...(19): siRNA sense strand
ucagcuaugacaauuauga

SEQ ID NO: 1049713 - RNA, 19 nt, Homo sapiens
  misc_RNA (1)...(19): siRNA sense strand
ggguugauauaucuuccaa

SEQ ID NO: 1049714 - RNA, 19 nt, Homo sapiens
  misc_RNA (1)...(19): siRNA sense strand
ggaccgaagucuuuugcuu

SEQ ID NO: 1049715 - RNA, 19 nt, Homo sapiens
  misc_RNA (1)...(19): siRNA sense strand
ucacuaaucccacgaugag

SEQ ID NO: 1049716 - RNA, 19 nt, Homo sapiens
  misc_RNA (1)...(19): siRNA sense strand
cagacaaccugaggcugaa

SEQ ID NO: 1049717 - RNA, 19 nt, Homo sapiens
  misc_RNA (1)...(19): siRNA sense strand
gaccgaagucuuuugcuua

SEQ ID NO: 1049718 - RNA, 19 nt, Homo sapiens
  misc_RNA (1)...(19): siRNA sense strand
ucugguacacccucuuaua

SEQ ID NO: 1049719 - RNA, 19 nt, Homo sapiens
  misc_RNA (1)...(19): siRNA sense strand
gaucucuauuccuaugugu

SEQ ID NO: 1049720 - RNA, 19 nt, Homo sapiens
  misc_RNA (1)...(19): siRNA sense strand
gcucagcucccaaccucuu

SEQ ID NO: 1049721 - RNA, 19 nt, Homo sapiens
  misc_RNA (1)...(19): siRNA sense strand
cuugagcgcuuggcuucua

SEQ ID NO: 1049722 - RNA, 19 nt, Homo sapiens
  misc_RNA (1)...(19): siRNA sense strand
caacccucaucgcgacuug

SEQ ID NO: 1049723 - RNA, 19 nt, Homo sapiens
  misc_RNA (1)...(19): siRNA sense strand
ugacucgguucaggauuga

SEQ ID NO: 1049724 - RNA, 19 nt, Homo sapiens
  misc_RNA (1)...(19): siRNA sense strand
cgucuuugguacuggcuuu

SEQ ID NO: 1049725 - RNA, 19 nt, Homo sapiens
  misc_RNA (1)...(19): siRNA sense strand
gcaacuuuaagaccuguga

SEQ ID NO: 1049726 - RNA, 19 nt, Homo sapiens
  misc_RNA (1)...(19): siRNA sense strand
uacccugacuucacuaauc

SEQ ID NO: 1049727 - RNA, 19 nt, Homo sapiens
  misc_RNA (1)...(19): siRNA sense strand
gauggcaagcgguauuuca

SEQ ID NO: 1049728 - RNA, 19 nt, Homo sapiens
  misc_RNA (1)...(19): siRNA sense strand
gagccugggaggagacauu

SEQ ID NO: 1049729 - RNA, 19 nt, Homo sapiens
  misc_RNA (1)...(19): siRNA sense strand
gcugauggcaagcgguauu

SEQ ID NO: 1049730 - RNA, 19 nt, Homo sapiens
  misc_RNA (1)...(19): siRNA sense strand
guggguggcuucuucaaaa

SEQ ID NO: 1049731 - RNA, 19 nt, Homo sapiens
  misc_RNA (1)...(19): siRNA sense strand
cgggauggcucugacuaug

SEQ ID NO: 1049732 - RNA, 19 nt, Homo sapiens
  misc_RNA (1)...(19): siRNA sense strand
gaggagacauucaaaacuc

SEQ ID NO: 1049733 - RNA, 19 nt, Homo sapiens
  misc_RNA (1)...(19): siRNA sense strand
ggccagcgauauucuuugc

SEQ ID NO: 1049734 - RNA, 19 nt, Homo sapiens
  misc_RNA (1)...(19): siRNA sense strand
caccagagccguuggaacu

SEQ ID NO: 1049735 - RNA, 19 nt, Homo sapiens
  misc_RNA (1)...(19): siRNA sense strand
uggcaucauugacgucuuc

SEQ ID NO: 1049736 - RNA, 19 nt, Homo sapiens
  misc_RNA (1)...(19): siRNA sense strand
ucagagacuggcaucauug

SEQ ID NO: 1049737 - RNA, 19 nt, Homo sapiens
  misc_RNA (1)...(19): siRNA sense strand
caagcgacagagaagcaua

SEQ ID NO: 1049738 - RNA, 19 nt, Homo sapiens
  misc_RNA (1)...(19): siRNA sense strand
ggcaucuucuggcucaaug

SEQ ID NO: 1049739 - RNA, 19 nt, Homo sapiens
  misc_RNA (1)...(19): siRNA sense strand
ugacaugaacgaaccaucu

SEQ ID NO: 1049740 - RNA, 19 nt, Homo sapiens
  misc_RNA (1)...(19): siRNA sense strand
cuaacauguucagcuauga

SEQ ID NO: 1049741 - RNA, 19 nt, Homo sapiens
  misc_RNA (1)...(19): siRNA sense strand
gauaccguguaccagaugu

SEQ ID NO: 1049742 - RNA, 19 nt, Homo sapiens
  misc_RNA (1)...(19): siRNA sense strand
guuaccaucucagcacaau

SEQ ID NO: 1049743 - RNA, 19 nt, Homo sapiens
  misc_RNA (1)...(19): siRNA sense strand
uccaugaggucaccaaggu

SEQ ID NO: 1049744 - RNA, 19 nt, Homo sapiens
  misc_RNA (1)...(19): siRNA sense strand
ucucagcacaaugauauaa

SEQ ID NO: 1049745 - RNA, 19 nt, Homo sapiens
  misc_RNA (1)...(19): siRNA sense strand
gugcuuaccagccauucuu

SEQ ID NO: 1049746 - RNA, 19 nt, Homo sapiens
  misc_RNA (1)...(19): siRNA sense strand
ugaacgaaccaucuguguu

SEQ ID NO: 1049747 - RNA, 19 nt, Homo sapiens
  misc_RNA (1)...(19): siRNA sense strand
gaaggcagagaaagaugag

SEQ ID NO: 1049748 - RNA, 19 nt, Homo sapiens
  misc_RNA (1)...(19): siRNA sense strand
gagugggaccauuugaaga

SEQ ID NO: 1049749 - RNA, 19 nt, Homo sapiens
  misc_RNA (1)...(19): siRNA sense strand
cuggugggcuaacauguuc

SEQ ID NO: 1049750 - RNA, 19 nt, Homo sapiens
  misc_RNA (1)...(19): siRNA sense strand
caaccugcccugugauguc

SEQ ID NO: 1049751 - RNA, 19 nt, Homo sapiens
  misc_RNA (1)...(19): siRNA sense strand
ccagagccguuggaacuac

SEQ ID NO: 1049752 - RNA, 19 nt, Homo sapiens
  misc_RNA (1)...(19): siRNA sense strand
cgguccaucugauccauga

SEQ ID NO: 1049753 - RNA, 19 nt, Homo sapiens
  misc_RNA (1)...(19): siRNA sense strand
cagagacuggcaucauuga

SEQ ID NO: 1049754 - RNA, 19 nt, Homo sapiens
  misc_RNA (1)...(19): siRNA sense strand
uggauagaagcaacuuuaa

SEQ ID NO: 1049755 - RNA, 19 nt, Homo sapiens
  misc_RNA (1)...(19): siRNA sense strand
ccgauaccguguaccagau

SEQ ID NO: 1049756 - RNA, 19 nt, Homo sapiens
  misc_RNA (1)...(19): siRNA sense strand
cauuugaagaucucuauuc

SEQ ID NO: 1049757 - RNA, 19 nt, Homo sapiens
  misc_RNA (1)...(19): siRNA sense strand
cgagugggaccauuugaag

SEQ ID NO: 1049758 - RNA, 19 nt, Homo sapiens
  misc_RNA (1)...(19): siRNA sense strand
ggaagcugguggccaucgu

SEQ ID NO: 1049759 - RNA, 19 nt, Homo sapiens
  misc_RNA (1)...(19): siRNA sense strand
agagaccuggguugauaua

SEQ ID NO: 1049760 - RNA, 19 nt, Homo sapiens
  misc_RNA (1)...(19): siRNA sense strand
ucuuggaguuugagcauca

SEQ ID NO: 1049761 - RNA, 19 nt, Homo sapiens
  misc_RNA (1)...(19): siRNA sense strand
ucuacaauuuggauguguu

SEQ ID NO: 1049762 - RNA, 19 nt, Homo sapiens
  misc_RNA (1)...(19): siRNA sense strand
aaugauauaauccgagaug

SEQ ID NO: 1049763 - RNA, 19 nt, Homo sapiens
  misc_RNA (1)...(19): siRNA sense strand
uaucgccucuacaauuugg

SEQ ID NO: 1049764 - RNA, 19 nt, Homo sapiens
  misc_RNA (1)...(19): siRNA sense strand
cuacagcuugguccugauu

SEQ ID NO: 1049765 - RNA, 19 nt, Homo sapiens
  misc_RNA (1)...(19): siRNA sense strand
cugguacacccucuuauau

SEQ ID NO: 1049766 - RNA, 19 nt, Homo sapiens
  misc_RNA (1)...(19): siRNA sense strand
gauuacccuugcuguggau

SEQ ID NO: 1049767 - RNA, 19 nt, Homo sapiens
  misc_RNA (1)...(19): siRNA sense strand
cuucugguacacccucuua

SEQ ID NO: 1049768 - RNA, 19 nt, Homo sapiens
  misc_RNA (1)...(19): siRNA sense strand
gcagagaccuggguugaua

SEQ ID NO: 1049769 - RNA, 19 nt, Homo sapiens
  misc_RNA (1)...(19): siRNA sense strand
gaagaucucuauuccuaug

SEQ ID NO: 1049770 - RNA, 19 nt, Homo sapiens
  misc_RNA (1)...(19): siRNA sense strand
uaacaucuauggccuuuau

SEQ ID NO: 1049771 - RNA, 19 nt, Homo sapiens
  misc_RNA (1)...(19): siRNA sense strand
gguaugacauucaaagcua

SEQ ID NO: 1049772 - RNA, 19 nt, Homo sapiens
  misc_RNA (1)...(19): siRNA sense strand
cauaucgccucuacaauuu

SEQ ID NO: 1049773 - RNA, 19 nt, Homo sapiens
  misc_RNA (1)...(19): siRNA sense strand
caauauagaugaucaguac

SEQ ID NO: 1049774 - RNA, 19 nt, Homo sapiens
  misc_RNA (1)...(19): siRNA sense strand
ggaaguggaucagggcuuu

SEQ ID NO: 1049775 - RNA, 19 nt, Homo sapiens
  misc_RNA (1)...(19): siRNA sense strand
gauagaagcaacuuuaaga

SEQ ID NO: 1049776 - RNA, 19 nt, Homo sapiens
  misc_RNA (1)...(19): siRNA sense strand
cagaauguaugaaggauga

SEQ ID NO: 1049777 - RNA, 19 nt, Homo sapiens
  misc_RNA (1)...(19): siRNA sense strand
gggcuaacauguucagcua

SEQ ID NO: 1049778 - RNA, 19 nt, Homo sapiens
  misc_RNA (1)...(19): siRNA sense strand
gcaauaugcuagucucaca

SEQ ID NO: 1049779 - RNA, 19 nt, Homo sapiens
  misc_RNA (1)...(19): siRNA sense strand
ugagaacaguguggaguua

SEQ ID NO: 1049780 - RNA, 19 nt, Homo sapiens
  misc_RNA (1)...(19): siRNA sense strand
gcgcaagccuggcaucaau

SEQ ID NO: 1049781 - RNA, 19 nt, Homo sapiens
  misc_RNA (1)...(19): siRNA sense strand
gugacuaccuucaauauag

SEQ ID NO: 1049782 - RNA, 19 nt, Homo sapiens
  misc_RNA (1)...(19): siRNA sense strand
gguacacccucuuauauca

SEQ ID NO: 1049783 - RNA, 19 nt, Homo sapiens
  misc_RNA (1)...(19): siRNA sense strand
uugaagaucucuauuccua

SEQ ID NO: 1049784 - RNA, 19 nt, Homo sapiens
  misc_RNA (1)...(19): siRNA sense strand
guucagcuaugacaauuau

SEQ ID NO: 1049785 - RNA, 19 nt, Homo sapiens
  misc_RNA (1)...(19): siRNA sense strand
gcaucaauguggcaucuga

SEQ ID NO: 1049786 - RNA, 19 nt, Homo sapiens
  misc_RNA (1)...(19): siRNA sense strand
guaccugccuguaacucua

SEQ ID NO: 1049787 - RNA, 19 nt, Homo sapiens
  misc_RNA (1)...(19): siRNA sense strand
gcuaacauguucagcuaug

SEQ ID NO: 1049788 - RNA, 19 nt, Homo sapiens
  misc_RNA (1)...(19): siRNA sense strand
guggauagaagcaacuuua

SEQ ID NO: 1049789 - RNA, 19 nt, Homo sapiens
  misc_RNA (1)...(19): siRNA sense strand
ggauguggguggcuucuuc

SEQ ID NO: 1049790 - RNA, 19 nt, Homo sapiens
  misc_RNA (1)...(19): siRNA sense strand
ccauaucgccucuacaauu

SEQ ID NO: 1049791 - RNA, 19 nt, Homo sapiens
  misc_RNA (1)...(19): siRNA sense strand
gguaccagaugggugcuua

SEQ ID NO: 1049792 - RNA, 19 nt, Homo sapiens
  misc_RNA (1)...(19): siRNA sense strand
ggaugugacuaccuucaau

SEQ ID NO: 1049793 - RNA, 19 nt, Homo sapiens
  misc_RNA (1)...(19): siRNA sense strand
ggaaggcagagaaagauga

SEQ ID NO: 1049794 - RNA, 19 nt, Homo sapiens
  misc_RNA (1)...(19): siRNA sense strand
cuagaggaccgaagucuuu

SEQ ID NO: 1049795 - RNA, 19 nt, Homo sapiens
  misc_RNA (1)...(19): siRNA sense strand
ugauauaucuuccaacacu

SEQ ID NO: 1049796 - RNA, 19 nt, Homo sapiens
  misc_RNA (1)...(19): siRNA sense strand
gucagagacuggcaucauu

SEQ ID NO: 1049797 - RNA, 19 nt, Homo sapiens
  misc_RNA (1)...(19): siRNA sense strand
ugacuaccuucaauauaga

SEQ ID NO: 1049798 - RNA, 19 nt, Homo sapiens
  misc_RNA (1)...(19): siRNA sense strand
gaugugacuaccuucaaua

SEQ ID NO: 1049799 - RNA, 19 nt, Homo sapiens
  misc_RNA (1)...(19): siRNA sense strand
gaccuggguugauauaucu

SEQ ID NO: 1049800 - RNA, 19 nt, Homo sapiens
  misc_RNA (1)...(19): siRNA sense strand
caucucagcacaaugauau

SEQ ID NO: 1049801 - RNA, 19 nt, Homo sapiens
  misc_RNA (1)...(19): siRNA sense strand
gcaguacccucaggaugug

SEQ ID NO: 1049802 - RNA, 19 nt, Homo sapiens
  misc_RNA (1)...(19): siRNA sense strand
ggaguauucaccugcgaua

SEQ ID NO: 1049803 - RNA, 19 nt, Homo sapiens
  misc_RNA (1)...(19): siRNA sense strand
ggauggcucugacuaugag

SEQ ID NO: 1049804 - RNA, 19 nt, Homo sapiens
  misc_RNA (1)...(19): siRNA sense strand
gggcacacguucaacuauc

SEQ ID NO: 1049805 - RNA, 19 nt, Homo sapiens
  misc_RNA (1)...(19): siRNA sense strand
acaaaaggaucuccagaaa

SEQ ID NO: 1049806 - RNA, 19 nt, Homo sapiens
  misc_RNA (1)...(19): siRNA sense strand
gcaucugauuggaguauuc

SEQ ID NO: 1049807 - RNA, 19 nt, Homo sapiens
  misc_RNA (1)...(19): siRNA sense strand
ggaagaugauggacuaccu

SEQ ID NO: 1049808 - RNA, 19 nt, Homo sapiens
  misc_RNA (1)...(19): siRNA sense strand
uuuaagaccugugaagaga

SEQ ID NO: 1049809 - RNA, 19 nt, Homo sapiens
  misc_RNA (1)...(19): siRNA sense strand
ggaggugugguaugacauu

SEQ ID NO: 1049810 - RNA, 19 nt, Homo sapiens
  misc_RNA (1)...(19): siRNA sense strand
gagccuugcuggacucucu

SEQ ID NO: 1049811 - RNA, 19 nt, Homo sapiens
  misc_RNA (1)...(19): siRNA sense strand
ggugugguaugacauucaa

SEQ ID NO: 1049812 - RNA, 19 nt, Homo sapiens
  misc_RNA (1)...(19): siRNA sense strand
ucaucuggcuagacauuga

SEQ ID NO: 1049813 - RNA, 19 nt, Homo sapiens
  misc_RNA (1)...(19): siRNA sense strand
ggugggacuuuccuucugu

SEQ ID NO: 1049814 - RNA, 19 nt, Homo sapiens
  misc_RNA (1)...(19): siRNA sense strand
uaagaccugugaagagagu

SEQ ID NO: 1049815 - RNA, 19 nt, Homo sapiens
  misc_RNA (1)...(19): siRNA sense strand
gaagcugguggccaucgua

SEQ ID NO: 1049816 - RNA, 19 nt, Homo sapiens
  misc_RNA (1)...(19): siRNA sense strand
gggaugcguugcugguuca

SEQ ID NO: 1049817 - RNA, 19 nt, Homo sapiens
  misc_RNA (1)...(19): siRNA sense strand
ucagcacaaugauauaauc

SEQ ID NO: 1049818 - RNA, 19 nt, Homo sapiens
  misc_RNA (1)...(19): siRNA sense strand
gcacauggcgacugcugau

SEQ ID NO: 1049819 - RNA, 19 nt, Homo sapiens
  misc_RNA (1)...(19): siRNA sense strand
gagaacaguguggaguuaa

SEQ ID NO: 1049820 - RNA, 19 nt, Homo sapiens
  misc_RNA (1)...(19): siRNA sense strand
ggcacacguucaacuauca

SEQ ID NO: 1049821 - RNA, 19 nt, Homo sapiens
  misc_RNA (1)...(19): siRNA sense strand
gagagcucuuucuggauga

SEQ ID NO: 1049822 - RNA, 19 nt, Homo sapiens
  misc_RNA (1)...(19): siRNA sense strand
uauagaugaucaguacuug

SEQ ID NO: 1049823 - RNA, 19 nt, Homo sapiens
  misc_RNA (1)...(19): siRNA sense strand
caaccucuuugucuggaau

SEQ ID NO: 1049824 - RNA, 19 nt, Homo sapiens
  misc_RNA (1)...(19): siRNA sense strand
uugggaagaugauggacua

SEQ ID NO: 1049825 - RNA, 19 nt, Homo sapiens
  misc_RNA (1)...(19): siRNA sense strand
ggagccauaucgccucuac

SEQ ID NO: 1049826 - RNA, 19 nt, Homo sapiens
  misc_RNA (1)...(19): siRNA sense strand
gaaggcauuccugucauga

SEQ ID NO: 1049827 - RNA, 19 nt, Homo sapiens
  misc_RNA (1)...(19): siRNA sense strand
uaccaucucagcacaauga

SEQ ID NO: 1049828 - RNA, 19 nt, Homo sapiens
  misc_RNA (1)...(19): siRNA sense strand
agacagauguucgcuggau

SEQ ID NO: 1049829 - RNA, 19 nt, Homo sapiens
  misc_RNA (1)...(19): siRNA sense strand
ggauagaagcaacuuuaag

SEQ ID NO: 1049830 - RNA, 19 nt, Homo sapiens
  misc_RNA (1)...(19): siRNA sense strand
agaccuggguugauauauc

SEQ ID NO: 1049831 - RNA, 19 nt, Homo sapiens
  misc_RNA (1)...(19): siRNA sense strand
gggauggcucugacuauga

SEQ ID NO: 1049832 - RNA, 19 nt, Homo sapiens
  misc_RNA (1)...(19): siRNA sense strand
ucagcuaugacaauuauga

SEQ ID NO: 1049833 - RNA, 19 nt, Homo sapiens
  misc_RNA (1)...(19): siRNA sense strand
ggguugauauaucuuccaa

SEQ ID NO: 1049834 - RNA, 19 nt, Homo sapiens
  misc_RNA (1)...(19): siRNA sense strand
ugaaggacacuuugagaca

SEQ ID NO: 1049835 - RNA, 19 nt, Homo sapiens
  misc_RNA (1)...(19): siRNA sense strand
uaagcaguaucccuguguu

SEQ ID NO: 1049836 - RNA, 19 nt, Homo sapiens
  misc_RNA (1)...(19): siRNA sense strand
ggaccgaagucuuuugcuu

SEQ ID NO: 1049837 - RNA, 19 nt, Homo sapiens
  misc_RNA (1)...(19): siRNA sense strand
gcaagccuggcaucaaugu

SEQ ID NO: 1049838 - RNA, 19 nt, Homo sapiens
  misc_RNA (1)...(19): siRNA sense strand
gagcggguggugauaauag

SEQ ID NO: 1049839 - RNA, 19 nt, Homo sapiens
  misc_RNA (1)...(19): siRNA sense strand
ucacuaaucccacgaugag

SEQ ID NO: 1049840 - RNA, 19 nt, Homo sapiens
  misc_RNA (1)...(19): siRNA sense strand
cagacaaccugaggcugaa

SEQ ID NO: 1049841 - RNA, 19 nt, Homo sapiens
  misc_RNA (1)...(19): siRNA sense strand
gaccgaagucuuuugcuua

SEQ ID NO: 1049842 - RNA, 19 nt, Homo sapiens
  misc_RNA (1)...(19): siRNA sense strand
ggauugagcggguggugau

SEQ ID NO: 1049843 - RNA, 19 nt, Homo sapiens
  misc_RNA (1)...(19): siRNA sense strand
ucugguacacccucuuaua

SEQ ID NO: 1049844 - RNA, 19 nt, Homo sapiens
  misc_RNA (1)...(19): siRNA sense strand
gaucucuauuccuaugugu

SEQ ID NO: 1049845 - RNA, 19 nt, Homo sapiens
  misc_RNA (1)...(19): siRNA sense strand
gcucagcucccaaccucuu

SEQ ID NO: 1049846 - RNA, 19 nt, Homo sapiens
  misc_RNA (1)...(19): siRNA sense strand
cuugagcgcuuggcuucua

SEQ ID NO: 1049847 - RNA, 19 nt, Homo sapiens
  misc_RNA (1)...(19): siRNA sense strand
caacccucaucgcgacuug

SEQ ID NO: 1049848 - RNA, 19 nt, Homo sapiens
  misc_RNA (1)...(19): siRNA sense strand
ugacucgguucaggauuga

SEQ ID NO: 1049849 - RNA, 19 nt, Homo sapiens
  misc_RNA (1)...(19): siRNA sense strand
cgucuuugguacuggcuuu

SEQ ID NO: 1049850 - RNA, 19 nt, Homo sapiens
  misc_RNA (1)...(19): siRNA sense strand
gcaacuuuaagaccuguga

SEQ ID NO: 1049851 - RNA, 19 nt, Homo sapiens
  misc_RNA (1)...(19): siRNA sense strand
uacccugacuucacuaauc

SEQ ID NO: 1049852 - RNA, 19 nt, Homo sapiens
  misc_RNA (1)...(19): siRNA sense strand
gauggcaagcgguauuuca

SEQ ID NO: 1049853 - RNA, 19 nt, Homo sapiens
  misc_RNA (1)...(19): siRNA sense strand
gagccugggaggagacauu

SEQ ID NO: 1049854 - RNA, 19 nt, Homo sapiens
  misc_RNA (1)...(19): siRNA sense strand
gcugauggcaagcgguauu

SEQ ID NO: 1049855 - RNA, 19 nt, Homo sapiens
  misc_RNA (1)...(19): siRNA sense strand
guggguggcuucuucaaaa

SEQ ID NO: 1049856 - RNA, 19 nt, Homo sapiens
  misc_RNA (1)...(19): siRNA sense strand
cgggauggcucugacuaug

SEQ ID NO: 1049857 - RNA, 19 nt, Homo sapiens
  misc_RNA (1)...(19): siRNA sense strand
gaggagacauucaaaacuc

SEQ ID NO: 1049858 - RNA, 19 nt, Homo sapiens
  misc_RNA (1)...(19): siRNA sense strand
gaugaugggcacacguuca

SEQ ID NO: 1049859 - RNA, 19 nt, Homo sapiens
  misc_RNA (1)...(19): siRNA sense strand
ggccagcgauauucuuugc

SEQ ID NO: 1049860 - RNA, 19 nt, Homo sapiens
  misc_RNA (1)...(19): siRNA sense strand
caccagagccguuggaacu

SEQ ID NO: 1049861 - RNA, 19 nt, Homo sapiens
  misc_RNA (1)...(19): siRNA sense strand
uggcaucauugacgucuuc

SEQ ID NO: 1049862 - RNA, 19 nt, Homo sapiens
  misc_RNA (1)...(19): siRNA sense strand
ucagagacuggcaucauug

SEQ ID NO: 1049863 - RNA, 19 nt, Homo sapiens
  misc_RNA (1)...(19): siRNA sense strand
caagcgacagagaagcaua

SEQ ID NO: 1049864 - RNA, 19 nt, Homo sapiens
  misc_RNA (1)...(19): siRNA sense strand
ggcaucuucuggcucaaug

SEQ ID NO: 1049865 - RNA, 19 nt, Homo sapiens
  misc_RNA (1)...(19): siRNA sense strand
ugacaugaacgaaccaucu

SEQ ID NO: 1049866 - RNA, 19 nt, Homo sapiens
  misc_RNA (1)...(19): siRNA sense strand
cuaacauguucagcuauga

SEQ ID NO: 1049867 - RNA, 19 nt, Homo sapiens
  misc_RNA (1)...(19): siRNA sense strand
aaaaggaucuccagaaagc

SEQ ID NO: 1049868 - RNA, 19 nt, Homo sapiens
  misc_RNA (1)...(19): siRNA sense strand
gcagagaccuggguugaua

SEQ ID NO: 1049869 - RNA, 19 nt, Homo sapiens
  misc_RNA (1)...(19): siRNA sense strand
gaagaucucuauuccuaug

SEQ ID NO: 1049870 - RNA, 19 nt, Homo sapiens
  misc_RNA (1)...(19): siRNA sense strand
uaacaucuauggccuuuau

SEQ ID NO: 1049871 - RNA, 19 nt, Homo sapiens
  misc_RNA (1)...(19): siRNA sense strand
gguaugacauucaaagcua

SEQ ID NO: 1049872 - RNA, 19 nt, Homo sapiens
  misc_RNA (1)...(19): siRNA sense strand
cauaucgccucuacaauuu

SEQ ID NO: 1049873 - RNA, 19 nt, Homo sapiens
  misc_RNA (1)...(19): siRNA sense strand
caauauagaugaucaguac

SEQ ID NO: 1049874 - RNA, 19 nt, Homo sapiens
  misc_RNA (1)...(19): siRNA sense strand
ggaaguggaucagggcuuu

SEQ ID NO: 1049875 - RNA, 19 nt, Homo sapiens
  misc_RNA (1)...(19): siRNA sense strand
gauagaagcaacuuuaaga

SEQ ID NO: 1049876 - RNA, 19 nt, Homo sapiens
  misc_RNA (1)...(19): siRNA sense strand
cagaauguaugaaggauga

SEQ ID NO: 1049877 - RNA, 19 nt, Homo sapiens
  misc_RNA (1)...(19): siRNA sense strand
gggcuaacauguucagcua

SEQ ID NO: 1049878 - RNA, 19 nt, Homo sapiens
  misc_RNA (1)...(19): siRNA sense strand
gcaauaugcuagucucaca

SEQ ID NO: 1049879 - RNA, 19 nt, Homo sapiens
  misc_RNA (1)...(19): siRNA sense strand
ugagaacaguguggaguua

SEQ ID NO: 1049880 - RNA, 19 nt, Homo sapiens
  misc_RNA (1)...(19): siRNA sense strand
gcgcaagccuggcaucaau

SEQ ID NO: 1049881 - RNA, 19 nt, Homo sapiens
  misc_RNA (1)...(19): siRNA sense strand
gugacuaccuucaauauag

SEQ ID NO: 1049882 - RNA, 19 nt, Homo sapiens
  misc_RNA (1)...(19): siRNA sense strand
gguacacccucuuauauca

SEQ ID NO: 1049883 - RNA, 19 nt, Homo sapiens
  misc_RNA (1)...(19): siRNA sense strand
uugaagaucucuauuccua

SEQ ID NO: 1049884 - RNA, 19 nt, Homo sapiens
  misc_RNA (1)...(19): siRNA sense strand
guucagcuaugacaauuau

SEQ ID NO: 1049885 - RNA, 19 nt, Homo sapiens
  misc_RNA (1)...(19): siRNA sense strand
gcaucaauguggcaucuga

SEQ ID NO: 1049886 - RNA, 19 nt, Homo sapiens
  misc_RNA (1)...(19): siRNA sense strand
guaccugccuguaacucua

SEQ ID NO: 1049887 - RNA, 19 nt, Homo sapiens
  misc_RNA (1)...(19): siRNA sense strand
gcuaacauguucagcuaug

SEQ ID NO: 1049888 - RNA, 19 nt, Homo sapiens
  misc_RNA (1)...(19): siRNA sense strand
guggauagaagcaacuuua

SEQ ID NO: 1049889 - RNA, 19 nt, Homo sapiens
  misc_RNA (1)...(19): siRNA sense strand
ggauguggguggcuucuuc

SEQ ID NO: 1049890 - RNA, 19 nt, Homo sapiens
  misc_RNA (1)...(19): siRNA sense strand
ccauaucgccucuacaauu

SEQ ID NO: 1049891 - RNA, 19 nt, Homo sapiens
  misc_RNA (1)...(19): siRNA sense strand
gguaccagaugggugcuua

SEQ ID NO: 1049892 - RNA, 19 nt, Homo sapiens
  misc_RNA (1)...(19): siRNA sense strand
ggaugugacuaccuucaau

SEQ ID NO: 1049893 - RNA, 19 nt, Homo sapiens
  misc_RNA (1)...(19): siRNA sense strand
ggaaggcagagaaagauga

SEQ ID NO: 1049894 - RNA, 19 nt, Homo sapiens
  misc_RNA (1)...(19): siRNA sense strand
cuagaggaccgaagucuuu

SEQ ID NO: 1049895 - RNA, 19 nt, Homo sapiens
  misc_RNA (1)...(19): siRNA sense strand
ugauauaucuuccaacacu

SEQ ID NO: 1049896 - RNA, 19 nt, Homo sapiens
  misc_RNA (1)...(19): siRNA sense strand
gucagagacuggcaucauu

SEQ ID NO: 1049897 - RNA, 19 nt, Homo sapiens
  misc_RNA (1)...(19): siRNA sense strand
ugacuaccuucaauauaga

SEQ ID NO: 1049898 - RNA, 19 nt, Homo sapiens
  misc_RNA (1)...(19): siRNA sense strand
gaugugacuaccuucaaua

SEQ ID NO: 1049899 - RNA, 19 nt, Homo sapiens
  misc_RNA (1)...(19): siRNA sense strand
gaccuggguugauauaucu

SEQ ID NO: 1049900 - RNA, 19 nt, Homo sapiens
  misc_RNA (1)...(19): siRNA sense strand
caucucagcacaaugauau

SEQ ID NO: 1049901 - RNA, 19 nt, Homo sapiens
  misc_RNA (1)...(19): siRNA sense strand
gcaguacccucaggaugug

SEQ ID NO: 1049902 - RNA, 19 nt, Homo sapiens
  misc_RNA (1)...(19): siRNA sense strand
ggaguauucaccugcgaua

SEQ ID NO: 1049903 - RNA, 19 nt, Homo sapiens
  misc_RNA (1)...(19): siRNA sense strand
ggauggcucugacuaugag

SEQ ID NO: 1049904 - RNA, 19 nt, Homo sapiens
  misc_RNA (1)...(19): siRNA sense strand
gggcacacguucaacuauc

SEQ ID NO: 1049905 - RNA, 19 nt, Homo sapiens
  misc_RNA (1)...(19): siRNA sense strand
acaaaaggaucuccagaaa

SEQ ID NO: 1049906 - RNA, 19 nt, Homo sapiens
  misc_RNA (1)...(19): siRNA sense strand
gcaucugauuggaguauuc

SEQ ID NO: 1049907 - RNA, 19 nt, Homo sapiens
  misc_RNA (1)...(19): siRNA sense strand
ggaagaugauggacuaccu

SEQ ID NO: 1049908 - RNA, 19 nt, Homo sapiens
  misc_RNA (1)...(19): siRNA sense strand
uuuaagaccugugaagaga

SEQ ID NO: 1049909 - RNA, 19 nt, Homo sapiens
  misc_RNA (1)...(19): siRNA sense strand
ggaggugugguaugacauu

SEQ ID NO: 1049910 - RNA, 19 nt, Homo sapiens
  misc_RNA (1)...(19): siRNA sense strand
gagccuugcuggacucucu

SEQ ID NO: 1049911 - RNA, 19 nt, Homo sapiens
  misc_RNA (1)...(19): siRNA sense strand
ggugugguaugacauucaa

SEQ ID NO: 1049912 - RNA, 19 nt, Homo sapiens
  misc_RNA (1)...(19): siRNA sense strand
ucaucuggcuagacauuga

SEQ ID NO: 1049913 - RNA, 19 nt, Homo sapiens
  misc_RNA (1)...(19): siRNA sense strand
ggugggacuuuccuucugu

SEQ ID NO: 1049914 - RNA, 19 nt, Homo sapiens
  misc_RNA (1)...(19): siRNA sense strand
uaagaccugugaagagagu

SEQ ID NO: 1049915 - RNA, 19 nt, Homo sapiens
  misc_RNA (1)...(19): siRNA sense strand
gaagcugguggccaucgua

SEQ ID NO: 1049916 - RNA, 19 nt, Homo sapiens
  misc_RNA (1)...(19): siRNA sense strand
gggaugcguugcugguuca

SEQ ID NO: 1049917 - RNA, 19 nt, Homo sapiens
  misc_RNA (1)...(19): siRNA sense strand
ucagcacaaugauauaauc

SEQ ID NO: 1049918 - RNA, 19 nt, Homo sapiens
  misc_RNA (1)...(19): siRNA sense strand
gcacauggcgacugcugau

SEQ ID NO: 1049919 - RNA, 19 nt, Homo sapiens
  misc_RNA (1)...(19): siRNA sense strand
gagaacaguguggaguuaa

SEQ ID NO: 1049920 - RNA, 19 nt, Homo sapiens
  misc_RNA (1)...(19): siRNA sense strand
ggcacacguucaacuauca

SEQ ID NO: 1049921 - RNA, 19 nt, Homo sapiens
  misc_RNA (1)...(19): siRNA sense strand
gagagcucuuucuggauga

SEQ ID NO: 1049922 - RNA, 19 nt, Homo sapiens
  misc_RNA (1)...(19): siRNA sense strand
uauagaugaucaguacuug

SEQ ID NO: 1049923 - RNA, 19 nt, Homo sapiens
  misc_RNA (1)...(19): siRNA sense strand
caaccucuuugucuggaau

SEQ ID NO: 1049924 - RNA, 19 nt, Homo sapiens
  misc_RNA (1)...(19): siRNA sense strand
uugggaagaugauggacua

SEQ ID NO: 1049925 - RNA, 19 nt, Homo sapiens
  misc_RNA (1)...(19): siRNA sense strand
ggagccauaucgccucuac

SEQ ID NO: 1049926 - RNA, 19 nt, Homo sapiens
  misc_RNA (1)...(19): siRNA sense strand
gaaggcauuccugucauga

SEQ ID NO: 1049927 - RNA, 19 nt, Homo sapiens
  misc_RNA (1)...(19): siRNA sense strand
uaccaucucagcacaauga

SEQ ID NO: 1049928 - RNA, 19 nt, Homo sapiens
  misc_RNA (1)...(19): siRNA sense strand
agacagauguucgcuggau

SEQ ID NO: 1049929 - RNA, 19 nt, Homo sapiens
  misc_RNA (1)...(19): siRNA sense strand
ggauagaagcaacuuuaag

SEQ ID NO: 1049930 - RNA, 19 nt, Homo sapiens
  misc_RNA (1)...(19): siRNA sense strand
agaccuggguugauauauc

SEQ ID NO: 1049931 - RNA, 19 nt, Homo sapiens
  misc_RNA (1)...(19): siRNA sense strand
gggauggcucugacuauga

SEQ ID NO: 1049932 - RNA, 19 nt, Homo sapiens
  misc_RNA (1)...(19): siRNA sense strand
ucagcuaugacaauuauga

SEQ ID NO: 1049933 - RNA, 19 nt, Homo sapiens
  misc_RNA (1)...(19): siRNA sense strand
ggguugauauaucuuccaa

SEQ ID NO: 1049934 - RNA, 19 nt, Homo sapiens
  misc_RNA (1)...(19): siRNA sense strand
ugaaggacacuuugagaca

SEQ ID NO: 1049935 - RNA, 19 nt, Homo sapiens
  misc_RNA (1)...(19): siRNA sense strand
uaagcaguaucccuguguu

SEQ ID NO: 1049936 - RNA, 19 nt, Homo sapiens
  misc_RNA (1)...(19): siRNA sense strand
ggaccgaagucuuuugcuu

SEQ ID NO: 1049937 - RNA, 19 nt, Homo sapiens
  misc_RNA (1)...(19): siRNA sense strand
gcaagccuggcaucaaugu

SEQ ID NO: 1049938 - RNA, 19 nt, Homo sapiens
  misc_RNA (1)...(19): siRNA sense strand
gagcggguggugauaauag

SEQ ID NO: 1049939 - RNA, 19 nt, Homo sapiens
  misc_RNA (1)...(19): siRNA sense strand
ucacuaaucccacgaugag

SEQ ID NO: 1049940 - RNA, 19 nt, Homo sapiens
  misc_RNA (1)...(19): siRNA sense strand
cagacaaccugaggcugaa

SEQ ID NO: 1049941 - RNA, 19 nt, Homo sapiens
  misc_RNA (1)...(19): siRNA sense strand
gaccgaagucuuuugcuua

SEQ ID NO: 1049942 - RNA, 19 nt, Homo sapiens
  misc_RNA (1)...(19): siRNA sense strand
ggauugagcggguggugau

SEQ ID NO: 1049943 - RNA, 19 nt, Homo sapiens
  misc_RNA (1)...(19): siRNA sense strand
ucugguacacccucuuaua

SEQ ID NO: 1049944 - RNA, 19 nt, Homo sapiens
  misc_RNA (1)...(19): siRNA sense strand
gaucucuauuccuaugugu

SEQ ID NO: 1049945 - RNA, 19 nt, Homo sapiens
  misc_RNA (1)...(19): siRNA sense strand
gcucagcucccaaccucuu

SEQ ID NO: 1049946 - RNA, 19 nt, Homo sapiens
  misc_RNA (1)...(19): siRNA sense strand
cuugagcgcuuggcuucua

SEQ ID NO: 1049947 - RNA, 19 nt, Homo sapiens
  misc_RNA (1)...(19): siRNA sense strand
caacccucaucgcgacuug

SEQ ID NO: 1049948 - RNA, 19 nt, Homo sapiens
  misc_RNA (1)...(19): siRNA sense strand
ugacucgguucaggauuga

SEQ ID NO: 1049949 - RNA, 19 nt, Homo sapiens
  misc_RNA (1)...(19): siRNA sense strand
cgucuuugguacuggcuuu

SEQ ID NO: 1049950 - RNA, 19 nt, Homo sapiens
  misc_RNA (1)...(19): siRNA sense strand
gcaacuuuaagaccuguga

SEQ ID NO: 1049951 - RNA, 19 nt, Homo sapiens
  misc_RNA (1)...(19): siRNA sense strand
uacccugacuucacuaauc

SEQ ID NO: 1049952 - RNA, 19 nt, Homo sapiens
  misc_RNA (1)...(19): siRNA sense strand
gauggcaagcgguauuuca

SEQ ID NO: 1049953 - RNA, 19 nt, Homo sapiens
  misc_RNA (1)...(19): siRNA sense strand
gagccugggaggagacauu

SEQ ID NO: 1049954 - RNA, 19 nt, Homo sapiens
  misc_RNA (1)...(19): siRNA sense strand
gcugauggcaagcgguauu

SEQ ID NO: 1049955 - RNA, 19 nt, Homo sapiens
  misc_RNA (1)...(19): siRNA sense strand
guggguggcuucuucaaaa

SEQ ID NO: 1049956 - RNA, 19 nt, Homo sapiens
  misc_RNA (1)...(19): siRNA sense strand
cgggauggcucugacuaug

SEQ ID NO: 1049957 - RNA, 19 nt, Homo sapiens
  misc_RNA (1)...(19): siRNA sense strand
gaggagacauucaaaacuc

SEQ ID NO: 1049958 - RNA, 19 nt, Homo sapiens
  misc_RNA (1)...(19): siRNA sense strand
gaugaugggcacacguuca

SEQ ID NO: 1049959 - RNA, 19 nt, Homo sapiens
  misc_RNA (1)...(19): siRNA sense strand
ggccagcgauauucuuugc

SEQ ID NO: 1049960 - RNA, 19 nt, Homo sapiens
  misc_RNA (1)...(19): siRNA sense strand
caccagagccguuggaacu

SEQ ID NO: 1049961 - RNA, 19 nt, Homo sapiens
  misc_RNA (1)...(19): siRNA sense strand
uggcaucauugacgucuuc

SEQ ID NO: 1049962 - RNA, 19 nt, Homo sapiens
  misc_RNA (1)...(19): siRNA sense strand
ucagagacuggcaucauug

SEQ ID NO: 1049963 - RNA, 19 nt, Homo sapiens
  misc_RNA (1)...(19): siRNA sense strand
caagcgacagagaagcaua

SEQ ID NO: 1049964 - RNA, 19 nt, Homo sapiens
  misc_RNA (1)...(19): siRNA sense strand
ggcaucuucuggcucaaug

SEQ ID NO: 1049965 - RNA, 19 nt, Homo sapiens
  misc_RNA (1)...(19): siRNA sense strand
ugacaugaacgaaccaucu

SEQ ID NO: 1049966 - RNA, 19 nt, Homo sapiens
  misc_RNA (1)...(19): siRNA sense strand
cuaacauguucagcuauga

SEQ ID NO: 1049967 - RNA, 19 nt, Homo sapiens
  misc_RNA (1)...(19): siRNA sense strand
aaaaggaucuccagaaagc

SEQ ID NO: 1049968 - RNA, 19 nt, Homo sapiens
  misc_RNA (1)...(19): siRNA sense strand
gaagcuagaucccaagauu

SEQ ID NO: 1049969 - RNA, 19 nt, Homo sapiens
  misc_RNA (1)...(19): siRNA sense strand
gaggauggcugaaguccaa

SEQ ID NO: 1049970 - RNA, 19 nt, Homo sapiens
  misc_RNA (1)...(19): siRNA sense strand
caaaggucaucgcagauaa

SEQ ID NO: 1049971 - RNA, 19 nt, Homo sapiens
  misc_RNA (1)...(19): siRNA sense strand
gggagaagcuagaugaaag

SEQ ID NO: 1049972 - RNA, 19 nt, Homo sapiens
  misc_RNA (1)...(19): siRNA sense strand
ggaguaaucgccugcauug

SEQ ID NO: 1049973 - RNA, 19 nt, Homo sapiens
  misc_RNA (1)...(19): siRNA sense strand
caucaucaaugccaaacaa

SEQ ID NO: 1049974 - RNA, 19 nt, Homo sapiens
  misc_RNA (1)...(19): siRNA sense strand
gagcacccguaucauuuau

SEQ ID NO: 1049975 - RNA, 19 nt, Homo sapiens
  misc_RNA (1)...(19): siRNA sense strand
cagaacugcuacaaaguga

SEQ ID NO: 1049976 - RNA, 19 nt, Homo sapiens
  misc_RNA (1)...(19): siRNA sense strand
caucaaugccaaacaauga

SEQ ID NO: 1049977 - RNA, 19 nt, Homo sapiens
  misc_RNA (1)...(19): siRNA sense strand
gcuacaaagugacuaaugg

SEQ ID NO: 1049978 - RNA, 19 nt, Homo sapiens
  misc_RNA (1)...(19): siRNA sense strand
gaagcuggcaucacugaga

SEQ ID NO: 1049979 - RNA, 19 nt, Homo sapiens
  misc_RNA (1)...(19): siRNA sense strand
cagagcacccguaucauuu

SEQ ID NO: 1049980 - RNA, 19 nt, Homo sapiens
  misc_RNA (1)...(19): siRNA sense strand
gagaucagcccuggcauga

SEQ ID NO: 1049981 - RNA, 19 nt, Homo sapiens
  misc_RNA (1)...(19): siRNA sense strand
gcacccguaucauuuaugg

SEQ ID NO: 1049982 - RNA, 19 nt, Homo sapiens
  misc_RNA (1)...(19): siRNA sense strand
gcccuggcaugaucaaaga

SEQ ID NO: 1049983 - RNA, 19 nt, Homo sapiens
  misc_RNA (1)...(19): siRNA sense strand
gagcucaucggcacucuga

SEQ ID NO: 1049984 - RNA, 19 nt, Homo sapiens
  misc_RNA (1)...(19): siRNA sense strand
ucagagcacccguaucauu

SEQ ID NO: 1049985 - RNA, 19 nt, Homo sapiens
  misc_RNA (1)...(19): siRNA sense strand
ggacaucaucaaugccaaa

SEQ ID NO: 1049986 - RNA, 19 nt, Homo sapiens
  misc_RNA (1)...(19): siRNA sense strand
ccaacaggcccaggaagua

SEQ ID NO: 1049987 - RNA, 19 nt, Homo sapiens
  misc_RNA (1)...(19): siRNA sense strand
agagagaaggcaugucuuu

SEQ ID NO: 1049988 - RNA, 19 nt, Homo sapiens
  misc_RNA (1)...(19): siRNA sense strand
acaaaggucaucgcagaua

SEQ ID NO: 1049989 - RNA, 19 nt, Homo sapiens
  misc_RNA (1)...(19): siRNA sense strand
gagagaaggcaugucuuug

SEQ ID NO: 1049990 - RNA, 19 nt, Homo sapiens
  misc_RNA (1)...(19): siRNA sense strand
gggaagcuggcaucacuga

SEQ ID NO: 1049991 - RNA, 19 nt, Homo sapiens
  misc_RNA (1)...(19): siRNA sense strand
uggcaucacugagaagguu

SEQ ID NO: 1049992 - RNA, 19 nt, Homo sapiens
  misc_RNA (1)...(19): siRNA sense strand
caucgcagauaacgugaag

SEQ ID NO: 1049993 - RNA, 19 nt, Homo sapiens
  misc_RNA (1)...(19): siRNA sense strand
agagcacccguaucauuua

SEQ ID NO: 1049994 - RNA, 19 nt, Homo sapiens
  misc_RNA (1)...(19): siRNA sense strand
gagccugugugggccauug

SEQ ID NO: 1049995 - RNA, 19 nt, Homo sapiens
  misc_RNA (1)...(19): siRNA sense strand
gaaagggaagcuggcauca

SEQ ID NO: 1049996 - RNA, 19 nt, Homo sapiens
  misc_RNA (1)...(19): siRNA sense strand
gaacugcuacaaagugacu

SEQ ID NO: 1049997 - RNA, 19 nt, Homo sapiens
  misc_RNA (1)...(19): siRNA sense strand
aagcuggcaucacugagaa

SEQ ID NO: 1049998 - RNA, 19 nt, Homo sapiens
  misc_RNA (1)...(19): siRNA sense strand
aagggaagcuggcaucacu

SEQ ID NO: 1049999 - RNA, 19 nt, Homo sapiens
  misc_RNA (1)...(19): siRNA sense strand
ugauguggauggcuuccuu

SEQ ID NO: 1050000 - RNA, 19 nt, Homo sapiens
  misc_RNA (1)...(19): siRNA sense strand
cagccagccugauguggau

SEQ ID NO: 1050001 - RNA, 19 nt, Homo sapiens
  misc_RNA (1)...(19): siRNA sense strand
ugaaguccaacgucucuga

SEQ ID NO: 1050002 - RNA, 19 nt, Homo sapiens
  misc_RNA (1)...(19): siRNA sense strand
ucagagagaaggcaugucu

SEQ ID NO: 1050003 - RNA, 19 nt, Homo sapiens
  misc_RNA (1)...(19): siRNA sense strand
cccaggaaguacacgagaa

SEQ ID NO: 1050004 - RNA, 19 nt, Homo sapiens
  misc_RNA (1)...(19): siRNA sense strand
agagaaggcaugucuuugg

SEQ ID NO: 1050005 - RNA, 19 nt, Homo sapiens
  misc_RNA (1)...(19): siRNA sense strand
gaaguccaacgucucugau

SEQ ID NO: 1050006 - RNA, 19 nt, Homo sapiens
  misc_RNA (1)...(19): siRNA sense strand
ggagaagcuagaugaaagg

SEQ ID NO: 1050007 - RNA, 19 nt, Homo sapiens
  misc_RNA (1)...(19): siRNA sense strand
ggguggugcuucccucaag

SEQ ID NO: 1050008 - RNA, 19 nt, Homo sapiens
  misc_RNA (1)...(19): siRNA sense strand
caacaggcccaggaaguac

SEQ ID NO: 1050009 - RNA, 19 nt, Homo sapiens
  misc_RNA (1)...(19): siRNA sense strand
gagcugauugggcagaaag

SEQ ID NO: 1050010 - RNA, 19 nt, Homo sapiens
  misc_RNA (1)...(19): siRNA sense strand
cgaauucguggacaucauc

SEQ ID NO: 1050011 - RNA, 19 nt, Homo sapiens
  misc_RNA (1)...(19): siRNA sense strand
ucgcagauaacgugaagga

SEQ ID NO: 1050012 - RNA, 19 nt, Homo sapiens
  misc_RNA (1)...(19): siRNA sense strand
ucacugagaagguuguuuu

SEQ ID NO: 1050013 - RNA, 19 nt, Homo sapiens
  misc_RNA (1)...(19): siRNA sense strand
gcagaaaguggcccaugcu

SEQ ID NO: 1050014 - RNA, 19 nt, Homo sapiens
  misc_RNA (1)...(19): siRNA sense strand
gacaaaggucaucgcagau

SEQ ID NO: 1050015 - RNA, 19 nt, Homo sapiens
  misc_RNA (1)...(19): siRNA sense strand
gcugaaguccaacgucucu

SEQ ID NO: 1050016 - RNA, 19 nt, Homo sapiens
  misc_RNA (1)...(19): siRNA sense strand
gaaagacucugaucacuuc

SEQ ID NO: 1050017 - RNA, 19 nt, Homo sapiens
  misc_RNA (1)...(19): siRNA sense strand
uaacacagaucaauugguu

SEQ ID NO: 1050018 - RNA, 19 nt, Homo sapiens
  misc_RNA (1)...(19): siRNA sense strand
caucggagcuacagaaauu

SEQ ID NO: 1050019 - RNA, 19 nt, Homo sapiens
  misc_RNA (1)...(19): siRNA sense strand
ggauaaggaugccaagaaa

SEQ ID NO: 1050020 - RNA, 19 nt, Homo sapiens
  misc_RNA (1)...(19): siRNA sense strand
gaugugaugugaaauuuga

SEQ ID NO: 1050021 - RNA, 19 nt, Homo sapiens
  misc_RNA (1)...(19): siRNA sense strand
gaaaccaccuuuguucuug

SEQ ID NO: 1050022 - RNA, 19 nt, Homo sapiens
  misc_RNA (1)...(19): siRNA sense strand
gaagaugugaugugaaauu

SEQ ID NO: 1050023 - RNA, 19 nt, Homo sapiens
  misc_RNA (1)...(19): siRNA sense strand
cagcauuucuuugaucuua

SEQ ID NO: 1050024 - RNA, 19 nt, Homo sapiens
  misc_RNA (1)...(19): siRNA sense strand
uagaaggucugauuaguug

SEQ ID NO: 1050025 - RNA, 19 nt, Homo sapiens
  misc_RNA (1)...(19): siRNA sense strand
gaagcacuguugugaagaa

SEQ ID NO: 1050026 - RNA, 19 nt, Homo sapiens
  misc_RNA (1)...(19): siRNA sense strand
ggagaagguuguauugugu

SEQ ID NO: 1050027 - RNA, 19 nt, Homo sapiens
  misc_RNA (1)...(19): siRNA sense strand
cagaggaaauugaagcuaa

SEQ ID NO: 1050028 - RNA, 19 nt, Homo sapiens
  misc_RNA (1)...(19): siRNA sense strand
gaaaauaaguucagugcuu

SEQ ID NO: 1050029 - RNA, 19 nt, Homo sapiens
  misc_RNA (1)...(19): siRNA sense strand
gggccagacuuucagauaa

SEQ ID NO: 1050030 - RNA, 19 nt, Homo sapiens
  misc_RNA (1)...(19): siRNA sense strand
caagugagccauuacauga

SEQ ID NO: 1050031 - RNA, 19 nt, Homo sapiens
  misc_RNA (1)...(19): siRNA sense strand
gagcuaauguguuugauac

SEQ ID NO: 1050032 - RNA, 19 nt, Homo sapiens
  misc_RNA (1)...(19): siRNA sense strand
aaacuuccauucagcuuaa

SEQ ID NO: 1050033 - RNA, 19 nt, Homo sapiens
  misc_RNA (1)...(19): siRNA sense strand
cuaagaaacucaagacauc

SEQ ID NO: 1050034 - RNA, 19 nt, Homo sapiens
  misc_RNA (1)...(19): siRNA sense strand
gcgaggagguaaacucuau

SEQ ID NO: 1050035 - RNA, 19 nt, Homo sapiens
  misc_RNA (1)...(19): siRNA sense strand
gugcaaugcucgacuaaug

SEQ ID NO: 1050036 - RNA, 19 nt, Homo sapiens
  misc_RNA (1)...(19): siRNA sense strand
agaagaggaugaugaaaug

SEQ ID NO: 1050037 - RNA, 19 nt, Homo sapiens
  misc_RNA (1)...(19): siRNA sense strand
aaugggagcuaauguguuu

SEQ ID NO: 1050038 - RNA, 19 nt, Homo sapiens
  misc_RNA (1)...(19): siRNA sense strand
uggaagaugugaugugaaa

SEQ ID NO: 1050039 - RNA, 19 nt, Homo sapiens
  misc_RNA (1)...(19): siRNA sense strand
gagcauugauucaccuaug

SEQ ID NO: 1050040 - RNA, 19 nt, Homo sapiens
  misc_RNA (1)...(19): siRNA sense strand
caaccucagucuaccauga

SEQ ID NO: 1050041 - RNA, 19 nt, Homo sapiens
  misc_RNA (1)...(19): siRNA sense strand
ggaaagugcugaggauagu

SEQ ID NO: 1050042 - RNA, 19 nt, Homo sapiens
  misc_RNA (1)...(19): siRNA sense strand
agauaaagguggaagugua

SEQ ID NO: 1050043 - RNA, 19 nt, Homo sapiens
  misc_RNA (1)...(19): siRNA sense strand
gaacgaacagcauguaaag

SEQ ID NO: 1050044 - RNA, 19 nt, Homo sapiens
  misc_RNA (1)...(19): siRNA sense strand
ggagaaauagauuaaguga

SEQ ID NO: 1050045 - RNA, 19 nt, Homo sapiens
  misc_RNA (1)...(19): siRNA sense strand
gcacuguugugaagaacuu

SEQ ID NO: 1050046 - RNA, 19 nt, Homo sapiens
  misc_RNA (1)...(19): siRNA sense strand
cucaagacaucuauaagua

SEQ ID NO: 1050047 - RNA, 19 nt, Homo sapiens
  misc_RNA (1)...(19): siRNA sense strand
ggccagacuuucagauaaa

SEQ ID NO: 1050048 - RNA, 19 nt, Homo sapiens
  misc_RNA (1)...(19): siRNA sense strand
ggagguaaacucuauuguu

SEQ ID NO: 1050049 - RNA, 19 nt, Homo sapiens
  misc_RNA (1)...(19): siRNA sense strand
gaacagcauguaaaggaaa

SEQ ID NO: 1050050 - RNA, 19 nt, Homo sapiens
  misc_RNA (1)...(19): siRNA sense strand
ucacgacgcuaugccauuu

SEQ ID NO: 1050051 - RNA, 19 nt, Homo sapiens
  misc_RNA (1)...(19): siRNA sense strand
ggaaagacucugaucacuu

SEQ ID NO: 1050052 - RNA, 19 nt, Homo sapiens
  misc_RNA (1)...(19): siRNA sense strand
cuugaaaguuuaacggaua

SEQ ID NO: 1050053 - RNA, 19 nt, Homo sapiens
  misc_RNA (1)...(19): siRNA sense strand
uaaguucagugcuucaaga

SEQ ID NO: 1050054 - RNA, 19 nt, Homo sapiens
  misc_RNA (1)...(19): siRNA sense strand
uaucaacucuaaugcauca

SEQ ID NO: 1050055 - RNA, 19 nt, Homo sapiens
  misc_RNA (1)...(19): siRNA sense strand
ggaaaccaccuuuguucuu

SEQ ID NO: 1050056 - RNA, 19 nt, Homo sapiens
  misc_RNA (1)...(19): siRNA sense strand
gcauuugcaggauuucuua

SEQ ID NO: 1050057 - RNA, 19 nt, Homo sapiens
  misc_RNA (1)...(19): siRNA sense strand
gaaagauugccauaucaga

SEQ ID NO: 1050058 - RNA, 19 nt, Homo sapiens
  misc_RNA (1)...(19): siRNA sense strand
caaaugggcaguuccuuau

SEQ ID NO: 1050059 - RNA, 19 nt, Homo sapiens
  misc_RNA (1)...(19): siRNA sense strand
caacaugugcugccgacua

SEQ ID NO: 1050060 - RNA, 19 nt, Homo sapiens
  misc_RNA (1)...(19): siRNA sense strand
ggaaauugaagcuaaagug

SEQ ID NO: 1050061 - RNA, 19 nt, Homo sapiens
  misc_RNA (1)...(19): siRNA sense strand
guagaaggucugauuaguu

SEQ ID NO: 1050062 - RNA, 19 nt, Homo sapiens
  misc_RNA (1)...(19): siRNA sense strand
gaguaacacagaucaauug

SEQ ID NO: 1050063 - RNA, 19 nt, Homo sapiens
  misc_RNA (1)...(19): siRNA sense strand
gaaauucgaaugcgagaag

SEQ ID NO: 1050064 - RNA, 19 nt, Homo sapiens
  misc_RNA (1)...(19): siRNA sense strand
ggacugcaacauucaagaa

SEQ ID NO: 1050065 - RNA, 19 nt, Homo sapiens
  misc_RNA (1)...(19): siRNA sense strand
caaacuaucaacucuaaug

SEQ ID NO: 1050066 - RNA, 19 nt, Homo sapiens
  misc_RNA (1)...(19): siRNA sense strand
gcaagugagccauuacaug

SEQ ID NO: 1050067 - RNA, 19 nt, Homo sapiens
  misc_RNA (1)...(19): siRNA sense strand
acaaaugggcaguuccuua

SEQ ID NO: 1050068 - RNA, 19 nt, Homo sapiens
  misc_RNA (1)...(19): siRNA sense strand
auacugauguggugaaugu

SEQ ID NO: 1050069 - RNA, 19 nt, Homo sapiens
  misc_RNA (1)...(19): siRNA sense strand
caggagaaauagauuaagu

SEQ ID NO: 1050070 - RNA, 19 nt, Homo sapiens
  misc_RNA (1)...(19): siRNA sense strand
gaaacucaagacaucuaua

SEQ ID NO: 1050071 - RNA, 19 nt, Homo sapiens
  misc_RNA (1)...(19): siRNA sense strand
gauaaagguggaaguguau

SEQ ID NO: 1050072 - RNA, 19 nt, Homo sapiens
  misc_RNA (1)...(19): siRNA sense strand
uagaagaacagauugcaaa

SEQ ID NO: 1050073 - RNA, 19 nt, Homo sapiens
  misc_RNA (1)...(19): siRNA sense strand
acacagaucaauugguuaa

SEQ ID NO: 1050074 - RNA, 19 nt, Homo sapiens
  misc_RNA (1)...(19): siRNA sense strand
caagcuauaacucagauuu

SEQ ID NO: 1050075 - RNA, 19 nt, Homo sapiens
  misc_RNA (1)...(19): siRNA sense strand
gguagaaggucugauuagu

SEQ ID NO: 1050076 - RNA, 19 nt, Homo sapiens
  misc_RNA (1)...(19): siRNA sense strand
uaaguaaagcuacaggaaa

SEQ ID NO: 1050077 - RNA, 19 nt, Homo sapiens
  misc_RNA (1)...(19): siRNA sense strand
cuaauguguuugauacuga

SEQ ID NO: 1050078 - RNA, 19 nt, Homo sapiens
  misc_RNA (1)...(19): siRNA sense strand
ggagcuaauguguuugaua

SEQ ID NO: 1050079 - RNA, 19 nt, Homo sapiens
  misc_RNA (1)...(19): siRNA sense strand
aaggaaagauugccauauc

SEQ ID NO: 1050080 - RNA, 19 nt, Homo sapiens
  misc_RNA (1)...(19): siRNA sense strand
uaaaggaaagauugccaua

SEQ ID NO: 1050081 - RNA, 19 nt, Homo sapiens
  misc_RNA (1)...(19): siRNA sense strand
cgaacagcauguaaaggaa

SEQ ID NO: 1050082 - RNA, 19 nt, Homo sapiens
  misc_RNA (1)...(19): siRNA sense strand
gcauguaaaggaaagauug

SEQ ID NO: 1050083 - RNA, 19 nt, Homo sapiens
  misc_RNA (1)...(19): siRNA sense strand
gcagaaauccaucaaagac

SEQ ID NO: 1050084 - RNA, 19 nt, Homo sapiens
  misc_RNA (1)...(19): siRNA sense strand
ucaagaagaggaugaugaa

SEQ ID NO: 1050085 - RNA, 19 nt, Homo sapiens
  misc_RNA (1)...(19): siRNA sense strand
cauaauuucucugucauca

SEQ ID NO: 1050086 - RNA, 19 nt, Homo sapiens
  misc_RNA (1)...(19): siRNA sense strand
gcuaauguguuugauacug

SEQ ID NO: 1050087 - RNA, 19 nt, Homo sapiens
  misc_RNA (1)...(19): siRNA sense strand
gaaauccaucaaagacauu

SEQ ID NO: 1050088 - RNA, 19 nt, Homo sapiens
  misc_RNA (1)...(19): siRNA sense strand
accaaacuaucaacucuaa

SEQ ID NO: 1050089 - RNA, 19 nt, Homo sapiens
  misc_RNA (1)...(19): siRNA sense strand
ggacaagcuauaacucaga

SEQ ID NO: 1050090 - RNA, 19 nt, Homo sapiens
  misc_RNA (1)...(19): siRNA sense strand
uggagaagguuguauugug

SEQ ID NO: 1050091 - RNA, 19 nt, Homo sapiens
  misc_RNA (1)...(19): siRNA sense strand
ggugugcaaugcucgacua

SEQ ID NO: 1050092 - RNA, 19 nt, Homo sapiens
  misc_RNA (1)...(19): siRNA sense strand
agaggaaauugaagcuaaa

SEQ ID NO: 1050093 - RNA, 19 nt, Homo sapiens
  misc_RNA (1)...(19): siRNA sense strand
uaaacuuccauucagcuua

SEQ ID NO: 1050094 - RNA, 19 nt, Homo sapiens
  misc_RNA (1)...(19): siRNA sense strand
gacaagcuauaacucagau

SEQ ID NO: 1050095 - RNA, 19 nt, Homo sapiens
  misc_RNA (1)...(19): siRNA sense strand
aauugaagcuaaaguggaa

SEQ ID NO: 1050096 - RNA, 19 nt, Homo sapiens
  misc_RNA (1)...(19): siRNA sense strand
ccacacucuuugaugguaa

SEQ ID NO: 1050097 - RNA, 19 nt, Homo sapiens
  misc_RNA (1)...(19): siRNA sense strand
cagaucaauugguuaagga

SEQ ID NO: 1050098 - RNA, 19 nt, Homo sapiens
  misc_RNA (1)...(19): siRNA sense strand
uauaguugcuguacagaag

SEQ ID NO: 1050099 - RNA, 19 nt, Homo sapiens
  misc_RNA (1)...(19): siRNA sense strand
agaaauccaucaaagacau

SEQ ID NO: 1050100 - RNA, 19 nt, Homo sapiens
  misc_RNA (1)...(19): siRNA sense strand
gccaggagaaauagauuaa

SEQ ID NO: 1050101 - RNA, 19 nt, Homo sapiens
  misc_RNA (1)...(19): siRNA sense strand
ggaauauggaaacuccuuu

SEQ ID NO: 1050102 - RNA, 19 nt, Homo sapiens
  misc_RNA (1)...(19): siRNA sense strand
caaaucagacuggaagaug

SEQ ID NO: 1050103 - RNA, 19 nt, Homo sapiens
  misc_RNA (1)...(19): siRNA sense strand
caugauaugagcauugauu

SEQ ID NO: 1050104 - RNA, 19 nt, Homo sapiens
  misc_RNA (1)...(19): siRNA sense strand
agaagguuguauuguguuu

SEQ ID NO: 1050105 - RNA, 19 nt, Homo sapiens
  misc_RNA (1)...(19): siRNA sense strand
gaaaguaaagaacgaacag

SEQ ID NO: 1050106 - RNA, 19 nt, Homo sapiens
  misc_RNA (1)...(19): siRNA sense strand
caacucuaaugcaucacuu

SEQ ID NO: 1050107 - RNA, 19 nt, Homo sapiens
  misc_RNA (1)...(19): siRNA sense strand
ucaaauggucauccagaaa

SEQ ID NO: 1050108 - RNA, 19 nt, Homo sapiens
  misc_RNA (1)...(19): siRNA sense strand
gccacacucuuugauggua

SEQ ID NO: 1050109 - RNA, 19 nt, Homo sapiens
  misc_RNA (1)...(19): siRNA sense strand
aaugggcaguuccuuauug

SEQ ID NO: 1050110 - RNA, 19 nt, Homo sapiens
  misc_RNA (1)...(19): siRNA sense strand
cuacagaaauuagaagaac

SEQ ID NO: 1050111 - RNA, 19 nt, Homo sapiens
  misc_RNA (1)...(19): siRNA sense strand
gcuaagaaacucaagacau

SEQ ID NO: 1050112 - RNA, 19 nt, Homo sapiens
  misc_RNA (1)...(19): siRNA sense strand
ugaagcagggccagacuuu

SEQ ID NO: 1050113 - RNA, 19 nt, Homo sapiens
  misc_RNA (1)...(19): siRNA sense strand
gaaggucugauuaguugga

SEQ ID NO: 1050114 - RNA, 19 nt, Homo sapiens
  misc_RNA (1)...(19): siRNA sense strand
ccacggaaaccaccuuugu

SEQ ID NO: 1050115 - RNA, 19 nt, Homo sapiens
  misc_RNA (1)...(19): siRNA sense strand
uggaagcacuguugugaag

SEQ ID NO: 1050116 - RNA, 19 nt, Homo sapiens
  misc_RNA (1)...(19): siRNA sense strand
ggaaacaacuuacacauuu

SEQ ID NO: 1050117 - RNA, 19 nt, Homo sapiens
  misc_RNA (1)...(19): siRNA sense strand
gagcaaagaugacuuacuu

SEQ ID NO: 1050118 - RNA, 19 nt, Homo sapiens
  misc_RNA (1)...(19): siRNA sense strand
aaacaucggucauggcaua

SEQ ID NO: 1050119 - RNA, 19 nt, Homo sapiens
  misc_RNA (1)...(19): siRNA sense strand
gaaauuuggaccuaugaua

SEQ ID NO: 1050120 - RNA, 19 nt, Homo sapiens
  misc_RNA (1)...(19): siRNA sense strand
gauaguggguuguggagaa

SEQ ID NO: 1050121 - RNA, 19 nt, Homo sapiens
  misc_RNA (1)...(19): siRNA sense strand
gaacaagagaugaaaccua

SEQ ID NO: 1050122 - RNA, 19 nt, Homo sapiens
  misc_RNA (1)...(19): siRNA sense strand
ggacuaagugcagauaaua

SEQ ID NO: 1050123 - RNA, 19 nt, Homo sapiens
  misc_RNA (1)...(19): siRNA sense strand
gaaguauauuugccuaaug

SEQ ID NO: 1050124 - RNA, 19 nt, Homo sapiens
  misc_RNA (1)...(19): siRNA sense strand
gagaugaaaccuacauuug

SEQ ID NO: 1050125 - RNA, 19 nt, Homo sapiens
  misc_RNA (1)...(19): siRNA sense strand
gauaugaugacaaaggaua

SEQ ID NO: 1050126 - RNA, 19 nt, Homo sapiens
  misc_RNA (1)...(19): siRNA sense strand
gaugaaauuuggaccuaug

SEQ ID NO: 1050127 - RNA, 19 nt, Homo sapiens
  misc_RNA (1)...(19): siRNA sense strand
aaauaucaguggaucagua

SEQ ID NO: 1050128 - RNA, 19 nt, Homo sapiens
  misc_RNA (1)...(19): siRNA sense strand
gugcaguucuuggaaauaa

SEQ ID NO: 1050129 - RNA, 19 nt, Homo sapiens
  misc_RNA (1)...(19): siRNA sense strand
caaacuaggaugaaugauu

SEQ ID NO: 1050130 - RNA, 19 nt, Homo sapiens
  misc_RNA (1)...(19): siRNA sense strand
ggauacagcaaucgacuuu

SEQ ID NO: 1050131 - RNA, 19 nt, Homo sapiens
  misc_RNA (1)...(19): siRNA sense strand
uaacaccuauagcugauga

SEQ ID NO: 1050132 - RNA, 19 nt, Homo sapiens
  misc_RNA (1)...(19): siRNA sense strand
cuggaaggauuacuauuaa

SEQ ID NO: 1050133 - RNA, 19 nt, Homo sapiens
  misc_RNA (1)...(19): siRNA sense strand
caacuuacacauuuaccua

SEQ ID NO: 1050134 - RNA, 19 nt, Homo sapiens
  misc_RNA (1)...(19): siRNA sense strand
gaugaaugauuugcacuau

SEQ ID NO: 1050135 - RNA, 19 nt, Homo sapiens
  misc_RNA (1)...(19): siRNA sense strand
gaaaaucaccgacuuugaa

SEQ ID NO: 1050136 - RNA, 19 nt, Homo sapiens
  misc_RNA (1)...(19): siRNA sense strand
uggaggauaugaugacaaa

SEQ ID NO: 1050137 - RNA, 19 nt, Homo sapiens
  misc_RNA (1)...(19): siRNA sense strand
gaaauuaaagguggaguuc

SEQ ID NO: 1050138 - RNA, 19 nt, Homo sapiens
  misc_RNA (1)...(19): siRNA sense strand
gacaaaggauacagcaauc

SEQ ID NO: 1050139 - RNA, 19 nt, Homo sapiens
  misc_RNA (1)...(19): siRNA sense strand
ggacguguucugcaaacua

SEQ ID NO: 1050140 - RNA, 19 nt, Homo sapiens
  misc_RNA (1)...(19): siRNA sense strand
ucuggaaggauuacuauua

SEQ ID NO: 1050141 - RNA, 19 nt, Homo sapiens
  misc_RNA (1)...(19): siRNA sense strand
ugaaugauuugcacuaucu

SEQ ID NO: 1050142 - RNA, 19 nt, Homo sapiens
  misc_RNA (1)...(19): siRNA sense strand
gagaaugcaccucauggaa

SEQ ID NO: 1050143 - RNA, 19 nt, Homo sapiens
  misc_RNA (1)...(19): siRNA sense strand
guggaucaguagcaauuaa

SEQ ID NO: 1050144 - RNA, 19 nt, Homo sapiens
  misc_RNA (1)...(19): siRNA sense strand
gcgcauacgugugcaguuc

SEQ ID NO: 1050145 - RNA, 19 nt, Homo sapiens
  misc_RNA (1)...(19): siRNA sense strand
acacaaagacacagacuug

SEQ ID NO: 1050146 - RNA, 19 nt, Homo sapiens
  misc_RNA (1)...(19): siRNA sense strand
ccaccuacaccacgugaua

SEQ ID NO: 1050147 - RNA, 19 nt, Homo sapiens
  misc_RNA (1)...(19): siRNA sense strand
auacagcaaucgacuuuau

SEQ ID NO: 1050148 - RNA, 19 nt, Homo sapiens
  misc_RNA (1)...(19): siRNA sense strand
aaacuuuccugcuggguau

SEQ ID NO: 1050149 - RNA, 19 nt, Homo sapiens
  misc_RNA (1)...(19): siRNA sense strand
accuauagcugaugauaaa

SEQ ID NO: 1050150 - RNA, 19 nt, Homo sapiens
  misc_RNA (1)...(19): siRNA sense strand
uggcauacuuuaacaccua

SEQ ID NO: 1050151 - RNA, 19 nt, Homo sapiens
  misc_RNA (1)...(19): siRNA sense strand
caaagacacagacuugguu

SEQ ID NO: 1050152 - RNA, 19 nt, Homo sapiens
  misc_RNA (1)...(19): siRNA sense strand
gugcuugcauuaauggaaa

SEQ ID NO: 1050153 - RNA, 19 nt, Homo sapiens
  misc_RNA (1)...(19): siRNA sense strand
agugaugguuggauucaua

SEQ ID NO: 1050154 - RNA, 19 nt, Homo sapiens
  misc_RNA (1)...(19): siRNA sense strand
gcaaucgacuuuauuuugu

SEQ ID NO: 1050155 - RNA, 19 nt, Homo sapiens
  misc_RNA (1)...(19): siRNA sense strand
aaacacagccuuauucacu

SEQ ID NO: 1050156 - RNA, 19 nt, Homo sapiens
  misc_RNA (1)...(19): siRNA sense strand
gagacacagugaacuccaa

SEQ ID NO: 1050157 - RNA, 19 nt, Homo sapiens
  misc_RNA (1)...(19): siRNA sense strand
cauguuagaaagucagaua

SEQ ID NO: 1050158 - RNA, 19 nt, Homo sapiens
  misc_RNA (1)...(19): siRNA sense strand
ggagaaagcccaaaacauc

SEQ ID NO: 1050159 - RNA, 19 nt, Homo sapiens
  misc_RNA (1)...(19): siRNA sense strand
ggaugaaugauuugcacua

SEQ ID NO: 1050160 - RNA, 19 nt, Homo sapiens
  misc_RNA (1)...(19): siRNA sense strand
ugacaaaggauacagcaau

SEQ ID NO: 1050161 - RNA, 19 nt, Homo sapiens
  misc_RNA (1)...(19): siRNA sense strand
gaagaacaaagaguccaaa

SEQ ID NO: 1050162 - RNA, 19 nt, Homo sapiens
  misc_RNA (1)...(19): siRNA sense strand
gacuuggucuggaaggauu

SEQ ID NO: 1050163 - RNA, 19 nt, Homo sapiens
  misc_RNA (1)...(19): siRNA sense strand
aaaccuacauuugggagaa

SEQ ID NO: 1050164 - RNA, 19 nt, Homo sapiens
  misc_RNA (1)...(19): siRNA sense strand
gcauacgugugcaguucuu

SEQ ID NO: 1050165 - RNA, 19 nt, Homo sapiens
  misc_RNA (1)...(19): siRNA sense strand
ugccuugacugcauuggua

SEQ ID NO: 1050166 - RNA, 19 nt, Homo sapiens
  misc_RNA (1)...(19): siRNA sense strand
ugacuuacuugccuuggau

SEQ ID NO: 1050167 - RNA, 19 nt, Homo sapiens
  misc_RNA (1)...(19): siRNA sense strand
ggagaaugcaccucaugga

SEQ ID NO: 1050168 - RNA, 19 nt, Homo sapiens
  misc_RNA (1)...(19): siRNA sense strand
aaacaagaccuagguuaug

SEQ ID NO: 1050169 - RNA, 19 nt, Homo sapiens
  misc_RNA (1)...(19): siRNA sense strand
acucucagcuguucugugu

SEQ ID NO: 1050170 - RNA, 19 nt, Homo sapiens
  misc_RNA (1)...(19): siRNA sense strand
guuagaaagucagauaucu

SEQ ID NO: 1050171 - RNA, 19 nt, Homo sapiens
  misc_RNA (1)...(19): siRNA sense strand
ucaccgagaagaacaaaga

SEQ ID NO: 1050172 - RNA, 19 nt, Homo sapiens
  misc_RNA (1)...(19): siRNA sense strand
gacguguucugcaaacuag

SEQ ID NO: 1050173 - RNA, 19 nt, Homo sapiens
  misc_RNA (1)...(19): siRNA sense strand
acacagacuugguuucaac

SEQ ID NO: 1050174 - RNA, 19 nt, Homo sapiens
  misc_RNA (1)...(19): siRNA sense strand
ggucauggcauacuuuaac

SEQ ID NO: 1050175 - RNA, 19 nt, Homo sapiens
  misc_RNA (1)...(19): siRNA sense strand
acagcaaucgacuuuauuu

SEQ ID NO: 1050176 - RNA, 19 nt, Homo sapiens
  misc_RNA (1)...(19): siRNA sense strand
agagaugaaaccuacauuu

SEQ ID NO: 1050177 - RNA, 19 nt, Homo sapiens
  misc_RNA (1)...(19): siRNA sense strand
gaggauaugaugacaaagg

SEQ ID NO: 1050178 - RNA, 19 nt, Homo sapiens
  misc_RNA (1)...(19): siRNA sense strand
cuagacaccuggacuuggu

SEQ ID NO: 1050179 - RNA, 19 nt, Homo sapiens
  misc_RNA (1)...(19): siRNA sense strand
gcauuaauggaaagcugua

SEQ ID NO: 1050180 - RNA, 19 nt, Homo sapiens
  misc_RNA (1)...(19): siRNA sense strand
auggaaagcuguacauuuu

SEQ ID NO: 1050181 - RNA, 19 nt, Homo sapiens
  misc_RNA (1)...(19): siRNA sense strand
uggaaacaacuuacacauu

SEQ ID NO: 1050182 - RNA, 19 nt, Homo sapiens
  misc_RNA (1)...(19): siRNA sense strand
caaaggauacagcaaucga

SEQ ID NO: 1050183 - RNA, 19 nt, Homo sapiens
  misc_RNA (1)...(19): siRNA sense strand
gacacagacuugguuucaa

SEQ ID NO: 1050184 - RNA, 19 nt, Homo sapiens
  misc_RNA (1)...(19): siRNA sense strand
aacacagccuuauucacua

SEQ ID NO: 1050185 - RNA, 19 nt, Homo sapiens
  misc_RNA (1)...(19): siRNA sense strand
ucaaacacagccuuauuca

SEQ ID NO: 1050186 - RNA, 19 nt, Homo sapiens
  misc_RNA (1)...(19): siRNA sense strand
uaaaacaagaccuagguua

SEQ ID NO: 1050187 - RNA, 19 nt, Homo sapiens
  misc_RNA (1)...(19): siRNA sense strand
gaugguuggauucauaaug

SEQ ID NO: 1050188 - RNA, 19 nt, Homo sapiens
  misc_RNA (1)...(19): siRNA sense strand
caucggucauggcauacuu

SEQ ID NO: 1050189 - RNA, 19 nt, Homo sapiens
  misc_RNA (1)...(19): siRNA sense strand
gaacucccagccuccaugu

SEQ ID NO: 1050190 - RNA, 19 nt, Homo sapiens
  misc_RNA (1)...(19): siRNA sense strand
cuccuaaacuucugcaaca

SEQ ID NO: 1050191 - RNA, 19 nt, Homo sapiens
  misc_RNA (1)...(19): siRNA sense strand
gauacagcaaucgacuuua

SEQ ID NO: 1050192 - RNA, 19 nt, Homo sapiens
  misc_RNA (1)...(19): siRNA sense strand
aauaucccauuaagugaug

SEQ ID NO: 1050193 - RNA, 19 nt, Homo sapiens
  misc_RNA (1)...(19): siRNA sense strand
uggacuaagugcagauaau

SEQ ID NO: 1050194 - RNA, 19 nt, Homo sapiens
  misc_RNA (1)...(19): siRNA sense strand
gauaaacuuuuccuaugug

SEQ ID NO: 1050195 - RNA, 19 nt, Homo sapiens
  misc_RNA (1)...(19): siRNA sense strand
ggucuggaaggauuacuau

SEQ ID NO: 1050196 - RNA, 19 nt, Homo sapiens
  misc_RNA (1)...(19): siRNA sense strand
caagagaugaaaccuacau

SEQ ID NO: 1050197 - RNA, 19 nt, Homo sapiens
  misc_RNA (1)...(19): siRNA sense strand
ccuaugugguggacuaagu

SEQ ID NO: 1050198 - RNA, 19 nt, Homo sapiens
  misc_RNA (1)...(19): siRNA sense strand
cgugugcaguucuuggaaa

SEQ ID NO: 1050199 - RNA, 19 nt, Homo sapiens
  misc_RNA (1)...(19): siRNA sense strand
ccaagacuguuuugauguu

SEQ ID NO: 1050200 - RNA, 19 nt, Homo sapiens
  misc_RNA (1)...(19): siRNA sense strand
gacuaagugcagauaauau

SEQ ID NO: 1050201 - RNA, 19 nt, Homo sapiens
  misc_RNA (1)...(19): siRNA sense strand
caguggaucaguagcaauu

SEQ ID NO: 1050202 - RNA, 19 nt, Homo sapiens
  misc_RNA (1)...(19): siRNA sense strand
ugggagcaaagaugacuua

SEQ ID NO: 1050203 - RNA, 19 nt, Homo sapiens
  misc_RNA (1)...(19): siRNA sense strand
ggagaaaaucaccgacuuu

SEQ ID NO: 1050204 - RNA, 19 nt, Homo sapiens
  misc_RNA (1)...(19): siRNA sense strand
aggauaugaugacaaagga

SEQ ID NO: 1050205 - RNA, 19 nt, Homo sapiens
  misc_RNA (1)...(19): siRNA sense strand
uggcggacguguucugcaa

SEQ ID NO: 1050206 - RNA, 19 nt, Homo sapiens
  misc_RNA (1)...(19): siRNA sense strand
gggauggcauaaugauguc

SEQ ID NO: 1050207 - RNA, 19 nt, Homo sapiens
  misc_RNA (1)...(19): siRNA sense strand
ccugcuggguauauaaaga

SEQ ID NO: 1050208 - RNA, 19 nt, Homo sapiens
  misc_RNA (1)...(19): siRNA sense strand
agacacagacuugguuuca

SEQ ID NO: 1050209 - RNA, 19 nt, Homo sapiens
  misc_RNA (1)...(19): siRNA sense strand
aacaagaccuagguuaugg

SEQ ID NO: 1050210 - RNA, 19 nt, Homo sapiens
  misc_RNA (1)...(19): siRNA sense strand
auuaagugaugguuggauu

SEQ ID NO: 1050211 - RNA, 19 nt, Homo sapiens
  misc_RNA (1)...(19): siRNA sense strand
guauauuugccuaaugaug

SEQ ID NO: 1050212 - RNA, 19 nt, Homo sapiens
  misc_RNA (1)...(19): siRNA sense strand
aaagacacagacuugguuu

SEQ ID NO: 1050213 - RNA, 19 nt, Homo sapiens
  misc_RNA (1)...(19): siRNA sense strand
augguuggauucauaaugu

SEQ ID NO: 1050214 - RNA, 19 nt, Homo sapiens
  misc_RNA (1)...(19): siRNA sense strand
uuuccuaugugguggacua

SEQ ID NO: 1050215 - RNA, 19 nt, Homo sapiens
  misc_RNA (1)...(19): siRNA sense strand
ggcauacuuuaacaccuau

SEQ ID NO: 1050216 - RNA, 19 nt, Homo sapiens
  misc_RNA (1)...(19): siRNA sense strand
gaacguugcuggugaaaua

SEQ ID NO: 1050217 - RNA, 19 nt, Homo sapiens
  misc_RNA (1)...(19): siRNA sense strand
uaaaugggcuggcagauua

SEQ ID NO: 1050218 - RNA, 19 nt, Homo sapiens
  misc_RNA (1)...(19): siRNA sense strand
gcacauuuauggacuuaua

SEQ ID NO: 1050219 - RNA, 19 nt, Homo sapiens
  misc_RNA (1)...(19): siRNA sense strand
gaagaacguugcuggugaa

SEQ ID NO: 1050220 - RNA, 19 nt, Homo sapiens
  misc_RNA (1)...(19): siRNA sense strand
ggaaugaggaaacauguaa

SEQ ID NO: 1050221 - RNA, 19 nt, Homo sapiens
  misc_RNA (1)...(19): siRNA sense strand
caacaaugccggaaucgua

SEQ ID NO: 1050222 - RNA, 19 nt, Homo sapiens
  misc_RNA (1)...(19): siRNA sense strand
ggaaggaguguauagagua

SEQ ID NO: 1050223 - RNA, 19 nt, Homo sapiens
  misc_RNA (1)...(19): siRNA sense strand
gaaaaucacuguuuagucu

SEQ ID NO: 1050224 - RNA, 19 nt, Homo sapiens
  misc_RNA (1)...(19): siRNA sense strand
gcugggaucuguucuuguu

SEQ ID NO: 1050225 - RNA, 19 nt, Homo sapiens
  misc_RNA (1)...(19): siRNA sense strand
gcucuuagccuugcaguuu

SEQ ID NO: 1050226 - RNA, 19 nt, Homo sapiens
  misc_RNA (1)...(19): siRNA sense strand
gaaggaguguauagaguag

SEQ ID NO: 1050227 - RNA, 19 nt, Homo sapiens
  misc_RNA (1)...(19): siRNA sense strand
cagaugagcuuauggaaaa

SEQ ID NO: 1050228 - RNA, 19 nt, Homo sapiens
  misc_RNA (1)...(19): siRNA sense strand
ggacauuugguuugcauuu

SEQ ID NO: 1050229 - RNA, 19 nt, Homo sapiens
  misc_RNA (1)...(19): siRNA sense strand
uggauuaaguggaguaaau

SEQ ID NO: 1050230 - RNA, 19 nt, Homo sapiens
  misc_RNA (1)...(19): siRNA sense strand
caucacaggugcuggaagu

SEQ ID NO: 1050231 - RNA, 19 nt, Homo sapiens
  misc_RNA (1)...(19): siRNA sense strand
guaaaugggcuggcagauu

SEQ ID NO: 1050232 - RNA, 19 nt, Homo sapiens
  misc_RNA (1)...(19): siRNA sense strand
gaaaagucauuugauguga

SEQ ID NO: 1050233 - RNA, 19 nt, Homo sapiens
  misc_RNA (1)...(19): siRNA sense strand
uagaguagccgaccagguu

SEQ ID NO: 1050234 - RNA, 19 nt, Homo sapiens
  misc_RNA (1)...(19): siRNA sense strand
ugaaauaguccucaucaca

SEQ ID NO: 1050235 - RNA, 19 nt, Homo sapiens
  misc_RNA (1)...(19): siRNA sense strand
cugcuaugauugcuaauga

SEQ ID NO: 1050236 - RNA, 19 nt, Homo sapiens
  misc_RNA (1)...(19): siRNA sense strand
uaccugcuaugauugcuaa

SEQ ID NO: 1050237 - RNA, 19 nt, Homo sapiens
  misc_RNA (1)...(19): siRNA sense strand
ugcugaaucuguauuugua

SEQ ID NO: 1050238 - RNA, 19 nt, Homo sapiens
  misc_RNA (1)...(19): siRNA sense strand
uaagauggcucgggaagcu

SEQ ID NO: 1050239 - RNA, 19 nt, Homo sapiens
  misc_RNA (1)...(19): siRNA sense strand
aagcacauuuauggacuua

SEQ ID NO: 1050240 - RNA, 19 nt, Homo sapiens
  misc_RNA (1)...(19): siRNA sense strand
ccagaugagcuuauggaaa

SEQ ID NO: 1050241 - RNA, 19 nt, Homo sapiens
  misc_RNA (1)...(19): siRNA sense strand
ucugggauaucaauaagga

SEQ ID NO: 1050242 - RNA, 19 nt, Homo sapiens
  misc_RNA (1)...(19): siRNA sense strand
aaguaaauuugcagccuuu

SEQ ID NO: 1050243 - RNA, 19 nt, Homo sapiens
  misc_RNA (1)...(19): siRNA sense strand
ugaggaaacauguaagaug

SEQ ID NO: 1050244 - RNA, 19 nt, Homo sapiens
  misc_RNA (1)...(19): siRNA sense strand
gacauuugguuugcauuuc

SEQ ID NO: 1050245 - RNA, 19 nt, Homo sapiens
  misc_RNA (1)...(19): siRNA sense strand
ggugaaauaguccucauca

SEQ ID NO: 1050246 - RNA, 19 nt, Homo sapiens
  misc_RNA (1)...(19): siRNA sense strand
uggguuugcugaaucugua

SEQ ID NO: 1050247 - RNA, 19 nt, Homo sapiens
  misc_RNA (1)...(19): siRNA sense strand
gggaaugaggaaacaugua

SEQ ID NO: 1050248 - RNA, 19 nt, Homo sapiens
  misc_RNA (1)...(19): siRNA sense strand
aaguucagcuggauuaagu

SEQ ID NO: 1050249 - RNA, 19 nt, Homo sapiens
  misc_RNA (1)...(19): siRNA sense strand
aaucaacaaugccggaauc

SEQ ID NO: 1050250 - RNA, 19 nt, Homo sapiens
  misc_RNA (1)...(19): siRNA sense strand
aaagaagucggcgauguuu

SEQ ID NO: 1050251 - RNA, 19 nt, Homo sapiens
  misc_RNA (1)...(19): siRNA sense strand
caagagugcacgccuauac

SEQ ID NO: 1050252 - RNA, 19 nt, Homo sapiens
  misc_RNA (1)...(19): siRNA sense strand
aaccugcaaucaucaaaga

SEQ ID NO: 1050253 - RNA, 19 nt, Homo sapiens
  misc_RNA (1)...(19): siRNA sense strand
uuucaaagcacauuuaugg

SEQ ID NO: 1050254 - RNA, 19 nt, Homo sapiens
  misc_RNA (1)...(19): siRNA sense strand
cggcugggaucuguucuug

SEQ ID NO: 1050255 - RNA, 19 nt, Homo sapiens
  misc_RNA (1)...(19): siRNA sense strand
ggauuaaguggaguaaaug

SEQ ID NO: 1050256 - RNA, 19 nt, Homo sapiens
  misc_RNA (1)...(19): siRNA sense strand
aaaucacuguuuagucuuc

SEQ ID NO: 1050257 - RNA, 19 nt, Homo sapiens
  misc_RNA (1)...(19): siRNA sense strand
acauuugguuugcauuuca

SEQ ID NO: 1050258 - RNA, 19 nt, Homo sapiens
  misc_RNA (1)...(19): siRNA sense strand
cuuucuaccugcuaugauu

SEQ ID NO: 1050259 - RNA, 19 nt, Homo sapiens
  misc_RNA (1)...(19): siRNA sense strand
ggaaaagucauuugaugug

SEQ ID NO: 1050260 - RNA, 19 nt, Homo sapiens
  misc_RNA (1)...(19): siRNA sense strand
gcaaucaucaaagaaacug

SEQ ID NO: 1050261 - RNA, 19 nt, Homo sapiens
  misc_RNA (1)...(19): siRNA sense strand
uaugauugcuaaugaccau

SEQ ID NO: 1050262 - RNA, 19 nt, Homo sapiens
  misc_RNA (1)...(19): siRNA sense strand
guucuuguucucugggaua

SEQ ID NO: 1050263 - RNA, 19 nt, Homo sapiens
  misc_RNA (1)...(19): siRNA sense strand
aaacaaaaggggaucaaaa

SEQ ID NO: 1050264 - RNA, 19 nt, Homo sapiens
  misc_RNA (1)...(19): siRNA sense strand
cugaaucuguauuuguaga

SEQ ID NO: 1050265 - RNA, 19 nt, Homo sapiens
  misc_RNA (1)...(19): siRNA sense strand
gaagcuggagccacaagag

SEQ ID NO: 1050266 - RNA, 19 nt, Homo sapiens
  misc_RNA (1)...(19): siRNA sense strand
uguagaaacauuuguccaa

SEQ ID NO: 1050267 - RNA, 19 nt, Homo sapiens
  misc_RNA (1)...(19): siRNA sense strand
gaguagccgaccagguuaa

SEQ ID NO: 1050268 - RNA, 19 nt, Homo sapiens
  misc_RNA (1)...(19): siRNA sense strand
ggacucggaaggcucuuag

SEQ ID NO: 1050269 - RNA, 19 nt, Homo sapiens
  misc_RNA (1)...(19): siRNA sense strand
aaagcacauuuauggacuu

SEQ ID NO: 1050270 - RNA, 19 nt, Homo sapiens
  misc_RNA (1)...(19): siRNA sense strand
caucaaagaaacuguucau

SEQ ID NO: 1050271 - RNA, 19 nt, Homo sapiens
  misc_RNA (1)...(19): siRNA sense strand
aacaaugccggaaucguaa

SEQ ID NO: 1050272 - RNA, 19 nt, Homo sapiens
  misc_RNA (1)...(19): siRNA sense strand
aggaaggaguguauagagu

SEQ ID NO: 1050273 - RNA, 19 nt, Homo sapiens
  misc_RNA (1)...(19): siRNA sense strand
aaaggaaggaguguauaga

SEQ ID NO: 1050274 - RNA, 19 nt, Homo sapiens
  misc_RNA (1)...(19): siRNA sense strand
ccugcaaucaucaaagaaa

SEQ ID NO: 1050275 - RNA, 19 nt, Homo sapiens
  misc_RNA (1)...(19): siRNA sense strand
ucucugggauaucaauaag

SEQ ID NO: 1050276 - RNA, 19 nt, Homo sapiens
  misc_RNA (1)...(19): siRNA sense strand
ggaagcuggagccacaaga

SEQ ID NO: 1050277 - RNA, 19 nt, Homo sapiens
  misc_RNA (1)...(19): siRNA sense strand
cuuguucucugggauauca

SEQ ID NO: 1050278 - RNA, 19 nt, Homo sapiens
  misc_RNA (1)...(19): siRNA sense strand
gguuugcauuucaaguuca

SEQ ID NO: 1050279 - RNA, 19 nt, Homo sapiens
  misc_RNA (1)...(19): siRNA sense strand
agaguagccgaccagguua

SEQ ID NO: 1050280 - RNA, 19 nt, Homo sapiens
  misc_RNA (1)...(19): siRNA sense strand
gucauuugaugugaauuuc

SEQ ID NO: 1050281 - RNA, 19 nt, Homo sapiens
  misc_RNA (1)...(19): siRNA sense strand
gccuauaccugcgauugca

SEQ ID NO: 1050282 - RNA, 19 nt, Homo sapiens
  misc_RNA (1)...(19): siRNA sense strand
gaaugaggaaacauguaag

SEQ ID NO: 1050283 - RNA, 19 nt, Homo sapiens
  misc_RNA (1)...(19): siRNA sense strand
cauuugguuugcauuucaa

SEQ ID NO: 1050284 - RNA, 19 nt, Homo sapiens
  misc_RNA (1)...(19): siRNA sense strand
uuccuugacuguccagaug

SEQ ID NO: 1050285 - RNA, 19 nt, Homo sapiens
  misc_RNA (1)...(19): siRNA sense strand
ccaaaaggaaggaguguau

SEQ ID NO: 1050286 - RNA, 19 nt, Homo sapiens
  misc_RNA (1)...(19): siRNA sense strand
cacaagagugcacgccuau

SEQ ID NO: 1050287 - RNA, 19 nt, Homo sapiens
  misc_RNA (1)...(19): siRNA sense strand
aaugaggaaacauguaaga

SEQ ID NO: 1050288 - RNA, 19 nt, Homo sapiens
  misc_RNA (1)...(19): siRNA sense strand
ucccaaagccacggaagaa

SEQ ID NO: 1050289 - RNA, 19 nt, Homo sapiens
  misc_RNA (1)...(19): siRNA sense strand
guaaauuugcagccuuugg

SEQ ID NO: 1050290 - RNA, 19 nt, Homo sapiens
  misc_RNA (1)...(19): siRNA sense strand
gaggaaagguugcagauua

SEQ ID NO: 1050291 - RNA, 19 nt, Homo sapiens
  misc_RNA (1)...(19): siRNA sense strand
agacaugguugguauauua

SEQ ID NO: 1050292 - RNA, 19 nt, Homo sapiens
  misc_RNA (1)...(19): siRNA sense strand
cgaaauacauugaguuuga

SEQ ID NO: 1050293 - RNA, 19 nt, Homo sapiens
  misc_RNA (1)...(19): siRNA sense strand
gaagaaagcuugugauucc

SEQ ID NO: 1050294 - RNA, 19 nt, Homo sapiens
  misc_RNA (1)...(19): siRNA sense strand
gcacagacaugguugguau

SEQ ID NO: 1050295 - RNA, 19 nt, Homo sapiens
  misc_RNA (1)...(19): siRNA sense strand
uaagauggcugguaaugaa

SEQ ID NO: 1050296 - RNA, 19 nt, Homo sapiens
  misc_RNA (1)...(19): siRNA sense strand
ugaauaagauggcugguaa

SEQ ID NO: 1050297 - RNA, 19 nt, Homo sapiens
  misc_RNA (1)...(19): siRNA sense strand
ggacuaagauucaacaaac

SEQ ID NO: 1050298 - RNA, 19 nt, Homo sapiens
  misc_RNA (1)...(19): siRNA sense strand
gaaugaagaugauaaacca

SEQ ID NO: 1050299 - RNA, 19 nt, Homo sapiens
  misc_RNA (1)...(19): siRNA sense strand
ggugguuucugcccaauua

SEQ ID NO: 1050300 - RNA, 19 nt, Homo sapiens
  misc_RNA (1)...(19): siRNA sense strand
gcaguuugcuuuccauguu

SEQ ID NO: 1050301 - RNA, 19 nt, Homo sapiens
  misc_RNA (1)...(19): siRNA sense strand
gaauaacacucccauggau

SEQ ID NO: 1050302 - RNA, 19 nt, Homo sapiens
  misc_RNA (1)...(19): siRNA sense strand
gcuggaagccugcaaagua

SEQ ID NO: 1050303 - RNA, 19 nt, Homo sapiens
  misc_RNA (1)...(19): siRNA sense strand
gaaaguggagaucgaaauu

SEQ ID NO: 1050304 - RNA, 19 nt, Homo sapiens
  misc_RNA (1)...(19): siRNA sense strand
guacacaccucaaggagau

SEQ ID NO: 1050305 - RNA, 19 nt, Homo sapiens
  misc_RNA (1)...(19): siRNA sense strand
gaagauuugcuguucuaua

SEQ ID NO: 1050306 - RNA, 19 nt, Homo sapiens
  misc_RNA (1)...(19): siRNA sense strand
acacaagcauuuagaagaa

SEQ ID NO: 1050307 - RNA, 19 nt, Homo sapiens
  misc_RNA (1)...(19): siRNA sense strand
gcacucaaaucuacaggau

SEQ ID NO: 1050308 - RNA, 19 nt, Homo sapiens
  misc_RNA (1)...(19): siRNA sense strand
uuaaugaucuuggaacuga

SEQ ID NO: 1050309 - RNA, 19 nt, Homo sapiens
  misc_RNA (1)...(19): siRNA sense strand
gaucuuguuucucugugua

SEQ ID NO: 1050310 - RNA, 19 nt, Homo sapiens
  misc_RNA (1)...(19): siRNA sense strand
cugaauaugugcaucgaua

SEQ ID NO: 1050311 - RNA, 19 nt, Homo sapiens
  misc_RNA (1)...(19): siRNA sense strand
gaaagaguguauggauaug

SEQ ID NO: 1050312 - RNA, 19 nt, Homo sapiens
  misc_RNA (1)...(19): siRNA sense strand
gagcaauuguugugacuuc

SEQ ID NO: 1050313 - RNA, 19 nt, Homo sapiens
  misc_RNA (1)...(19): siRNA sense strand
gaugauaaaccacauaauc

SEQ ID NO: 1050314 - RNA, 19 nt, Homo sapiens
  misc_RNA (1)...(19): siRNA sense strand
ggacagaggcauucuacug

SEQ ID NO: 1050315 - RNA, 19 nt, Homo sapiens
  misc_RNA (1)...(19): siRNA sense strand
gaagaugauaaaccacaua

SEQ ID NO: 1050316 - RNA, 19 nt, Homo sapiens
  misc_RNA (1)...(19): siRNA sense strand
aaaguucccuucugucuuc

SEQ ID NO: 1050317 - RNA, 19 nt, Homo sapiens
  misc_RNA (1)...(19): siRNA sense strand
gaaauaugccauugcuguu

SEQ ID NO: 1050318 - RNA, 19 nt, Homo sapiens
  misc_RNA (1)...(19): siRNA sense strand
gaaagguugcagauuauau

SEQ ID NO: 1050319 - RNA, 19 nt, Homo sapiens
  misc_RNA (1)...(19): siRNA sense strand
ggaauaacacucccaugga

SEQ ID NO: 1050320 - RNA, 19 nt, Homo sapiens
  misc_RNA (1)...(19): siRNA sense strand
uuaccuagcuuggaagauu

SEQ ID NO: 1050321 - RNA, 19 nt, Homo sapiens
  misc_RNA (1)...(19): siRNA sense strand
uauguuggauucaguaaug

SEQ ID NO: 1050322 - RNA, 19 nt, Homo sapiens
  misc_RNA (1)...(19): siRNA sense strand
gauuaacucuucaaacaac

SEQ ID NO: 1050323 - RNA, 19 nt, Homo sapiens
  misc_RNA (1)...(19): siRNA sense strand
ucaaggagauucugacaac

SEQ ID NO: 1050324 - RNA, 19 nt, Homo sapiens
  misc_RNA (1)...(19): siRNA sense strand
ggaugaagcacugcacuuu

SEQ ID NO: 1050325 - RNA, 19 nt, Homo sapiens
  misc_RNA (1)...(19): siRNA sense strand
ggagaugugucugcacuuc

SEQ ID NO: 1050326 - RNA, 19 nt, Homo sapiens
  misc_RNA (1)...(19): siRNA sense strand
uuacagcacucaaaucuac

SEQ ID NO: 1050327 - RNA, 19 nt, Homo sapiens
  misc_RNA (1)...(19): siRNA sense strand
gauaaaccacauaauccua

SEQ ID NO: 1050328 - RNA, 19 nt, Homo sapiens
  misc_RNA (1)...(19): siRNA sense strand
ugaaagaguguauggauau

SEQ ID NO: 1050329 - RNA, 19 nt, Homo sapiens
  misc_RNA (1)...(19): siRNA sense strand
cuggaagccugcaaaguaa

SEQ ID NO: 1050330 - RNA, 19 nt, Homo sapiens
  misc_RNA (1)...(19): siRNA sense strand
gauuugcuguucuauacaa

SEQ ID NO: 1050331 - RNA, 19 nt, Homo sapiens
  misc_RNA (1)...(19): siRNA sense strand
ggaaagguugcagauuaua

SEQ ID NO: 1050332 - RNA, 19 nt, Homo sapiens
  misc_RNA (1)...(19): siRNA sense strand
ugacuucacuaauaaagca

SEQ ID NO: 1050333 - RNA, 19 nt, Homo sapiens
  misc_RNA (1)...(19): siRNA sense strand
gaucccagguugaaagagu

SEQ ID NO: 1050334 - RNA, 19 nt, Homo sapiens
  misc_RNA (1)...(19): siRNA sense strand
gacacaagcauuuagaaga

SEQ ID NO: 1050335 - RNA, 19 nt, Homo sapiens
  misc_RNA (1)...(19): siRNA sense strand
uggaagauuugcuguucua

SEQ ID NO: 1050336 - RNA, 19 nt, Homo sapiens
  misc_RNA (1)...(19): siRNA sense strand
aauaugccauugcuguuaa

SEQ ID NO: 1050337 - RNA, 19 nt, Homo sapiens
  misc_RNA (1)...(19): siRNA sense strand
gaacgucugaucccagguu

SEQ ID NO: 1050338 - RNA, 19 nt, Homo sapiens
  misc_RNA (1)...(19): siRNA sense strand
aaucaaaccguccauaaga

SEQ ID NO: 1050339 - RNA, 19 nt, Homo sapiens
  misc_RNA (1)...(19): siRNA sense strand
gcacuucgaagauuugcuu

SEQ ID NO: 1050340 - RNA, 19 nt, Homo sapiens
  misc_RNA (1)...(19): siRNA sense strand
ugucuucaguccuguguaa

SEQ ID NO: 1050341 - RNA, 19 nt, Homo sapiens
  misc_RNA (1)...(19): siRNA sense strand
uugaaagaguguauggaua

SEQ ID NO: 1050342 - RNA, 19 nt, Homo sapiens
  misc_RNA (1)...(19): siRNA sense strand
uaccaaaguucccuucugu

SEQ ID NO: 1050343 - RNA, 19 nt, Homo sapiens
  misc_RNA (1)...(19): siRNA sense strand
gcaguucgaaauacauuga

SEQ ID NO: 1050344 - RNA, 19 nt, Homo sapiens
  misc_RNA (1)...(19): siRNA sense strand
cagauuauauuccucaacu

SEQ ID NO: 1050345 - RNA, 19 nt, Homo sapiens
  misc_RNA (1)...(19): siRNA sense strand
uggacaccaugauguauuu

SEQ ID NO: 1050346 - RNA, 19 nt, Homo sapiens
  misc_RNA (1)...(19): siRNA sense strand
aagauuugcuguucuauac

SEQ ID NO: 1050347 - RNA, 19 nt, Homo sapiens
  misc_RNA (1)...(19): siRNA sense strand
gcauuccuguggcauguau

SEQ ID NO: 1050348 - RNA, 19 nt, Homo sapiens
  misc_RNA (1)...(19): siRNA sense strand
ugaagcaguucgaaauaca

SEQ ID NO: 1050349 - RNA, 19 nt, Homo sapiens
  misc_RNA (1)...(19): siRNA sense strand
uagaagaaagcuugugauu

SEQ ID NO: 1050350 - RNA, 19 nt, Homo sapiens
  misc_RNA (1)...(19): siRNA sense strand
ccaaggacagguggaauaa

SEQ ID NO: 1050351 - RNA, 19 nt, Homo sapiens
  misc_RNA (1)...(19): siRNA sense strand
ucgaagauuugcuuuguca

SEQ ID NO: 1050352 - RNA, 19 nt, Homo sapiens
  misc_RNA (1)...(19): siRNA sense strand
cccaauuacuggugaaaga

SEQ ID NO: 1050353 - RNA, 19 nt, Homo sapiens
  misc_RNA (1)...(19): siRNA sense strand
gauggcugguaaugaauau

SEQ ID NO: 1050354 - RNA, 19 nt, Homo sapiens
  misc_RNA (1)...(19): siRNA sense strand
uacaauugcugaaggacaa

SEQ ID NO: 1050355 - RNA, 19 nt, Homo sapiens
  misc_RNA (1)...(19): siRNA sense strand
acauugaguuugaugcauu

SEQ ID NO: 1050356 - RNA, 19 nt, Homo sapiens
  misc_RNA (1)...(19): siRNA sense strand
aaauaugccauugcuguua

SEQ ID NO: 1050357 - RNA, 19 nt, Homo sapiens
  misc_RNA (1)...(19): siRNA sense strand
aaggacagguggaauaaca

SEQ ID NO: 1050358 - RNA, 19 nt, Homo sapiens
  misc_RNA (1)...(19): siRNA sense strand
gcuugugauuccugacuuu

SEQ ID NO: 1050359 - RNA, 19 nt, Homo sapiens
  misc_RNA (1)...(19): siRNA sense strand
gaugaagcacugcacuuug

SEQ ID NO: 1050360 - RNA, 19 nt, Homo sapiens
  misc_RNA (1)...(19): siRNA sense strand
gagaaaauaccuguucaua

SEQ ID NO: 1050361 - RNA, 19 nt, Homo sapiens
  misc_RNA (1)...(19): siRNA sense strand
aagaagugcuuuccagaag

SEQ ID NO: 1050362 - RNA, 19 nt, Homo sapiens
  misc_RNA (1)...(19): siRNA sense strand
aagaguguauggauauguu

SEQ ID NO: 1050363 - RNA, 19 nt, Homo sapiens
  misc_RNA (1)...(19): siRNA sense strand
aagaauaccaaguccagua

SEQ ID NO: 1050364 - RNA, 19 nt, Homo sapiens
  misc_RNA (1)...(19): siRNA sense strand
uggcauguaugacuucuca

SEQ ID NO: 1050365 - RNA, 19 nt, Homo sapiens
  misc_RNA (1)...(19): siRNA sense strand
cagcugugcuccauugaag

SEQ ID NO: 1050366 - RNA, 19 nt, Homo sapiens
  misc_RNA (1)...(19): siRNA sense strand
aggaaagguugcagauuau

SEQ ID NO: 1050367 - RNA, 19 nt, Homo sapiens
  misc_RNA (1)...(19): siRNA sense strand
cagauggugucaugcuaga

SEQ ID NO: 1050368 - RNA, 19 nt, Homo sapiens
  misc_RNA (1)...(19): siRNA sense strand
guagauggacagaggcauu

SEQ ID NO: 1050369 - RNA, 19 nt, Homo sapiens
  misc_RNA (1)...(19): siRNA sense strand
uaccuagcuuggaagauuu

SEQ ID NO: 1050370 - RNA, 19 nt, Homo sapiens
  misc_RNA (1)...(19): siRNA sense strand
gugcaucgauauguuggaa

SEQ ID NO: 1050371 - RNA, 19 nt, Homo sapiens
  misc_RNA (1)...(19): siRNA sense strand
ggaggaaagguugcagauu

SEQ ID NO: 1050372 - RNA, 19 nt, Homo sapiens
  misc_RNA (1)...(19): siRNA sense strand
ggacaccaugauguauuua

SEQ ID NO: 1050373 - RNA, 19 nt, Homo sapiens
  misc_RNA (1)...(19): siRNA sense strand
gauaauuugagacacuuug

SEQ ID NO: 1050374 - RNA, 19 nt, Homo sapiens
  misc_RNA (1)...(19): siRNA sense strand
ucucagggcaguuugcuuu

SEQ ID NO: 1050375 - RNA, 19 nt, Homo sapiens
  misc_RNA (1)...(19): siRNA sense strand
caacagcgagggcaaagag

SEQ ID NO: 1050376 - RNA, 19 nt, Homo sapiens
  misc_RNA (1)...(19): siRNA sense strand
aagcaaggaguaaauaaug

SEQ ID NO: 1050377 - RNA, 19 nt, Homo sapiens
  misc_RNA (1)...(19): siRNA sense strand
ucuguuaccuagcuuggaa

SEQ ID NO: 1050378 - RNA, 19 nt, Homo sapiens
  misc_RNA (1)...(19): siRNA sense strand
cacaagcauuuagaagaaa

SEQ ID NO: 1050379 - RNA, 19 nt, Homo sapiens
  misc_RNA (1)...(19): siRNA sense strand
gauuugcuuugucagcuau

SEQ ID NO: 1050380 - RNA, 19 nt, Homo sapiens
  misc_RNA (1)...(19): siRNA sense strand
ugucugcacuucgaagauu

SEQ ID NO: 1050381 - RNA, 19 nt, Homo sapiens
  misc_RNA (1)...(19): siRNA sense strand
ccugaagcaguucgaaaua

SEQ ID NO: 1050382 - RNA, 19 nt, Homo sapiens
  misc_RNA (1)...(19): siRNA sense strand
uuccucaacuggccaaauu

SEQ ID NO: 1050383 - RNA, 19 nt, Homo sapiens
  misc_RNA (1)...(19): siRNA sense strand
gagaaaguggagaucgaaa

SEQ ID NO: 1050384 - RNA, 19 nt, Homo sapiens
  misc_RNA (1)...(19): siRNA sense strand
gguaaugaauauguuggau

SEQ ID NO: 1050385 - RNA, 19 nt, Homo sapiens
  misc_RNA (1)...(19): siRNA sense strand
acuaauaaagcaaggagua

SEQ ID NO: 1050386 - RNA, 19 nt, Homo sapiens
  misc_RNA (1)...(19): siRNA sense strand
gcaucgauauguuggaaaa

SEQ ID NO: 1050387 - RNA, 19 nt, Homo sapiens
  misc_RNA (1)...(19): siRNA sense strand
ugugauuccugacuuuaug

SEQ ID NO: 1050388 - RNA, 19 nt, Homo sapiens
  misc_RNA (1)...(19): siRNA sense strand
gacaccaugauguauuuaa

SEQ ID NO: 1050389 - RNA, 19 nt, Homo sapiens
  misc_RNA (1)...(19): siRNA sense strand
cuaauaaagcaaggaguaa

SEQ ID NO: 1050390 - RNA, 19 nt, Homo sapiens
  misc_RNA (1)...(19): siRNA sense strand
cagaggcgcugguucuaaa

SEQ ID NO: 1050391 - RNA, 19 nt, Homo sapiens
  misc_RNA (1)...(19): siRNA sense strand
ugaggcagcuccagaauca

SEQ ID NO: 1050392 - RNA, 19 nt, Homo sapiens
  misc_RNA (1)...(19): siRNA sense strand
cagaagagccuguggucua

SEQ ID NO: 1050393 - RNA, 19 nt, Homo sapiens
  misc_RNA (1)...(19): siRNA sense strand
gaaggccucuguccacuac

SEQ ID NO: 1050394 - RNA, 19 nt, Homo sapiens
  misc_RNA (1)...(19): siRNA sense strand
acacagagcacgcccaugu

SEQ ID NO: 1050395 - RNA, 19 nt, Homo sapiens
  misc_RNA (1)...(19): siRNA sense strand
agaagagccuguggucuau

SEQ ID NO: 1050396 - RNA, 19 nt, Homo sapiens
  misc_RNA (1)...(19): siRNA sense strand
gauagcuccucaggcaauu

SEQ ID NO: 1050397 - RNA, 19 nt, Homo sapiens
  misc_RNA (1)...(19): siRNA sense strand
gcaucagggucagcaagaa

SEQ ID NO: 1050398 - RNA, 19 nt, Homo sapiens
  misc_RNA (1)...(19): siRNA sense strand
cagaacugcuggcacuguu

SEQ ID NO: 1050399 - RNA, 19 nt, Homo sapiens
  misc_RNA (1)...(19): siRNA sense strand
cagggcaggucgacaggaa

SEQ ID NO: 1050400 - RNA, 19 nt, Homo sapiens
  misc_RNA (1)...(19): siRNA sense strand
gagcaucccagcacuugug

SEQ ID NO: 1050401 - RNA, 19 nt, Homo sapiens
  misc_RNA (1)...(19): siRNA sense strand
ucgcucaacugcuccuuug

SEQ ID NO: 1050402 - RNA, 19 nt, Homo sapiens
  misc_RNA (1)...(19): siRNA sense strand
gggaugcucuacugagucu

SEQ ID NO: 1050403 - RNA, 19 nt, Homo sapiens
  misc_RNA (1)...(19): siRNA sense strand
ggaggcaccaggacucuuc

SEQ ID NO: 1050404 - RNA, 19 nt, Homo sapiens
  misc_RNA (1)...(19): siRNA sense strand
gcaagaaccaacagagcau

SEQ ID NO: 1050405 - RNA, 19 nt, Homo sapiens
  misc_RNA (1)...(19): siRNA sense strand
ggaaccagcagagcagcua

SEQ ID NO: 1050406 - RNA, 19 nt, Homo sapiens
  misc_RNA (1)...(19): siRNA sense strand
gcaaccugguggccaaguc

SEQ ID NO: 1050407 - RNA, 19 nt, Homo sapiens
  misc_RNA (1)...(19): siRNA sense strand
ggccaagucuaccacuagu

SEQ ID NO: 1050408 - RNA, 19 nt, Homo sapiens
  misc_RNA (1)...(19): siRNA sense strand
caucagaggcgcugguucu

SEQ ID NO: 1050409 - RNA, 19 nt, Homo sapiens
  misc_RNA (1)...(19): siRNA sense strand
aagagccuguggucuauca

SEQ ID NO: 1050410 - RNA, 19 nt, Homo sapiens
  misc_RNA (1)...(19): siRNA sense strand
ucagaggcgcugguucuaa

SEQ ID NO: 1050411 - RNA, 19 nt, Homo sapiens
  misc_RNA (1)...(19): siRNA sense strand
cagcggcucugugcuccuu

SEQ ID NO: 1050412 - RNA, 19 nt, Homo sapiens
  misc_RNA (1)...(19): siRNA sense strand
cccugcaggugccauguuu

SEQ ID NO: 1050413 - RNA, 19 nt, Homo sapiens
  misc_RNA (1)...(19): siRNA sense strand
cgauagcuccucaggcaau

SEQ ID NO: 1050414 - RNA, 19 nt, Homo sapiens
  misc_RNA (1)...(19): siRNA sense strand
cagagcaucccagcacuug

SEQ ID NO: 1050415 - RNA, 19 nt, Homo sapiens
  misc_RNA (1)...(19): siRNA sense strand
gcccaggcccacuuuggaa

SEQ ID NO: 1050416 - RNA, 19 nt, Homo sapiens
  misc_RNA (1)...(19): siRNA sense strand
ggaggaggaggagacauca

SEQ ID NO: 1050417 - RNA, 19 nt, Homo sapiens
  misc_RNA (1)...(19): siRNA sense strand
gcacaccuguccccaagca

SEQ ID NO: 1050418 - RNA, 19 nt, Homo sapiens
  misc_RNA (1)...(19): siRNA sense strand
gagccuguggucuaucaga

SEQ ID NO: 1050419 - RNA, 19 nt, Homo sapiens
  misc_RNA (1)...(19): siRNA sense strand
gagccagucuuuccuguau

SEQ ID NO: 1050420 - RNA, 19 nt, Homo sapiens
  misc_RNA (1)...(19): siRNA sense strand
gugaugagcugccgguguu

SEQ ID NO: 1050421 - RNA, 19 nt, Homo sapiens
  misc_RNA (1)...(19): siRNA sense strand
ucuggaaccuggaguuuga

SEQ ID NO: 1050422 - RNA, 19 nt, Homo sapiens
  misc_RNA (1)...(19): siRNA sense strand
guacgugggcaccgacuuu

SEQ ID NO: 1050423 - RNA, 19 nt, Homo sapiens
  misc_RNA (1)...(19): siRNA sense strand
ggaagcugcgguucuggaa

SEQ ID NO: 1050424 - RNA, 19 nt, Homo sapiens
  misc_RNA (1)...(19): siRNA sense strand
agacagguacggaggauga

SEQ ID NO: 1050425 - RNA, 19 nt, Homo sapiens
  misc_RNA (1)...(19): siRNA sense strand
gccagucuuuccuguauag

SEQ ID NO: 1050426 - RNA, 19 nt, Homo sapiens
  misc_RNA (1)...(19): siRNA sense strand
gcuuauuccucaagucagu

SEQ ID NO: 1050427 - RNA, 19 nt, Homo sapiens
  misc_RNA (1)...(19): siRNA sense strand
cgcgcuaucuuguguacuu

SEQ ID NO: 1050428 - RNA, 19 nt, Homo sapiens
  misc_RNA (1)...(19): siRNA sense strand
cagacugccuggauauggu

SEQ ID NO: 1050429 - RNA, 19 nt, Homo sapiens
  misc_RNA (1)...(19): siRNA sense strand
gaugagcugccgguguuug

SEQ ID NO: 1050430 - RNA, 19 nt, Homo sapiens
  misc_RNA (1)...(19): siRNA sense strand
guucgggagccacggauga

SEQ ID NO: 1050431 - RNA, 19 nt, Homo sapiens
  misc_RNA (1)...(19): siRNA sense strand
ccggucagguucaccaucu

SEQ ID NO: 1050432 - RNA, 19 nt, Homo sapiens
  misc_RNA (1)...(19): siRNA sense strand
gauggaagcuguaaucaca

SEQ ID NO: 1050433 - RNA, 19 nt, Homo sapiens
  misc_RNA (1)...(19): siRNA sense strand
ugaaagagaucucagacuu

SEQ ID NO: 1050434 - RNA, 19 nt, Homo sapiens
  misc_RNA (1)...(19): siRNA sense strand
gacagagaaugcaacaaua

SEQ ID NO: 1050435 - RNA, 19 nt, Homo sapiens
  misc_RNA (1)...(19): siRNA sense strand
gaaaaggagugaaaauuga

SEQ ID NO: 1050436 - RNA, 19 nt, Homo sapiens
  misc_RNA (1)...(19): siRNA sense strand
gcagugaccuagagaguuc

SEQ ID NO: 1050437 - RNA, 19 nt, Homo sapiens
  misc_RNA (1)...(19): siRNA sense strand
ggacugcgguuaugcuguu

SEQ ID NO: 1050438 - RNA, 19 nt, Homo sapiens
  misc_RNA (1)...(19): siRNA sense strand
ggacagagaaugcaacaau

SEQ ID NO: 1050439 - RNA, 19 nt, Homo sapiens
  misc_RNA (1)...(19): siRNA sense strand
gcccgaagcuaacuuguga

SEQ ID NO: 1050440 - RNA, 19 nt, Homo sapiens
  misc_RNA (1)...(19): siRNA sense strand
gugcauacauuaucaagau

SEQ ID NO: 1050441 - RNA, 19 nt, Homo sapiens
  misc_RNA (1)...(19): siRNA sense strand
acagauggacuuaguguua

SEQ ID NO: 1050442 - RNA, 19 nt, Homo sapiens
  misc_RNA (1)...(19): siRNA sense strand
gaaagagaucucagacuug

SEQ ID NO: 1050443 - RNA, 19 nt, Homo sapiens
  misc_RNA (1)...(19): siRNA sense strand
ggagagcccucaagaaucc

SEQ ID NO: 1050444 - RNA, 19 nt, Homo sapiens
  misc_RNA (1)...(19): siRNA sense strand
gaauucuguuggcuuugua

SEQ ID NO: 1050445 - RNA, 19 nt, Homo sapiens
  misc_RNA (1)...(19): siRNA sense strand
gggaaaauauagcagguua

SEQ ID NO: 1050446 - RNA, 19 nt, Homo sapiens
  misc_RNA (1)...(19): siRNA sense strand
ucauuggcauuccuguuua

SEQ ID NO: 1050447 - RNA, 19 nt, Homo sapiens
  misc_RNA (1)...(19): siRNA sense strand
gcagauauggcauccaaau

SEQ ID NO: 1050448 - RNA, 19 nt, Homo sapiens
  misc_RNA (1)...(19): siRNA sense strand
ggcagagaaugaagaagaa

SEQ ID NO: 1050449 - RNA, 19 nt, Homo sapiens
  misc_RNA (1)...(19): siRNA sense strand
gauauggcccgucaacaga

SEQ ID NO: 1050450 - RNA, 19 nt, Homo sapiens
  misc_RNA (1)...(19): siRNA sense strand
cagcaaaccuugggacauc

SEQ ID NO: 1050451 - RNA, 19 nt, Homo sapiens
  misc_RNA (1)...(19): siRNA sense strand
caacagagggcccagacuu

SEQ ID NO: 1050452 - RNA, 19 nt, Homo sapiens
  misc_RNA (1)...(19): siRNA sense strand
ccaaaucagacaugcgaua

SEQ ID NO: 1050453 - RNA, 19 nt, Homo sapiens
  misc_RNA (1)...(19): siRNA sense strand
ggaaaaggagugaaaauug

SEQ ID NO: 1050454 - RNA, 19 nt, Homo sapiens
  misc_RNA (1)...(19): siRNA sense strand
gcccagacuuuacgaguuc

SEQ ID NO: 1050455 - RNA, 19 nt, Homo sapiens
  misc_RNA (1)...(19): siRNA sense strand
aagcagauauggcauccaa

SEQ ID NO: 1050456 - RNA, 19 nt, Homo sapiens
  misc_RNA (1)...(19): siRNA sense strand
guauugagcacuaguggaa

SEQ ID NO: 1050457 - RNA, 19 nt, Homo sapiens
  misc_RNA (1)...(19): siRNA sense strand
gcaguuaguguugguauug

SEQ ID NO: 1050458 - RNA, 19 nt, Homo sapiens
  misc_RNA (1)...(19): siRNA sense strand
ccauggagccguaagaaga

SEQ ID NO: 1050459 - RNA, 19 nt, Homo sapiens
  misc_RNA (1)...(19): siRNA sense strand
gagggaagguugccagacu

SEQ ID NO: 1050460 - RNA, 19 nt, Homo sapiens
  misc_RNA (1)...(19): siRNA sense strand
ccaaacacaagaggaauuu

SEQ ID NO: 1050461 - RNA, 19 nt, Homo sapiens
  misc_RNA (1)...(19): siRNA sense strand
ccucaagaaucccagcauu

SEQ ID NO: 1050462 - RNA, 19 nt, Homo sapiens
  misc_RNA (1)...(19): siRNA sense strand
uggagaagccagaguauga

SEQ ID NO: 1050463 - RNA, 19 nt, Homo sapiens
  misc_RNA (1)...(19): siRNA sense strand
cagauggacuuaguguuau

SEQ ID NO: 1050464 - RNA, 19 nt, Homo sapiens
  misc_RNA (1)...(19): siRNA sense strand
acagagggcccagacuuua

SEQ ID NO: 1050465 - RNA, 19 nt, Homo sapiens
  misc_RNA (1)...(19): siRNA sense strand
gagcccaagugcccauaug

SEQ ID NO: 1050466 - RNA, 19 nt, Homo sapiens
  misc_RNA (1)...(19): siRNA sense strand
gaaugcaacaauauggaaa

SEQ ID NO: 1050467 - RNA, 19 nt, Homo sapiens
  misc_RNA (1)...(19): siRNA sense strand
acacuucaggucucaguua

SEQ ID NO: 1050468 - RNA, 19 nt, Homo sapiens
  misc_RNA (1)...(19): siRNA sense strand
cauaaucaguuccuacaac

SEQ ID NO: 1050469 - RNA, 19 nt, Homo sapiens
  misc_RNA (1)...(19): siRNA sense strand
uggcauuccuguuuauguu

SEQ ID NO: 1050470 - RNA, 19 nt, Homo sapiens
  misc_RNA (1)...(19): siRNA sense strand
ugugaauucuguuggcuuu

SEQ ID NO: 1050471 - RNA, 19 nt, Homo sapiens
  misc_RNA (1)...(19): siRNA sense strand
ugaagaugaugguccaauc

SEQ ID NO: 1050472 - RNA, 19 nt, Homo sapiens
  misc_RNA (1)...(19): siRNA sense strand
aaauauagcagguuagaag

SEQ ID NO: 1050473 - RNA, 19 nt, Homo sapiens
  misc_RNA (1)...(19): siRNA sense strand
ggcccagacuuuacgaguu

SEQ ID NO: 1050474 - RNA, 19 nt, Homo sapiens
  misc_RNA (1)...(19): siRNA sense strand
gaaugaagaagaagguagu

SEQ ID NO: 1050475 - RNA, 19 nt, Homo sapiens
  misc_RNA (1)...(19): siRNA sense strand
gagaaugcaacaauaugga

SEQ ID NO: 1050476 - RNA, 19 nt, Homo sapiens
  misc_RNA (1)...(19): siRNA sense strand
cagcgaaacggccagcuuu

SEQ ID NO: 1050477 - RNA, 19 nt, Homo sapiens
  misc_RNA (1)...(19): siRNA sense strand
gcauacauuaucaagauga

SEQ ID NO: 1050478 - RNA, 19 nt, Homo sapiens
  misc_RNA (1)...(19): siRNA sense strand
gucauuggcauuccuguuu

SEQ ID NO: 1050479 - RNA, 19 nt, Homo sapiens
  misc_RNA (1)...(19): siRNA sense strand
gaagccagaagguggagaa

SEQ ID NO: 1050480 - RNA, 19 nt, Homo sapiens
  misc_RNA (1)...(19): siRNA sense strand
uauagcagguuagaaguuc

SEQ ID NO: 1050481 - RNA, 19 nt, Homo sapiens
  misc_RNA (1)...(19): siRNA sense strand
gauauggcauccaaaucag

SEQ ID NO: 1050482 - RNA, 19 nt, Homo sapiens
  misc_RNA (1)...(19): siRNA sense strand
caaaucagacaugcgauau

SEQ ID NO: 1050483 - RNA, 19 nt, Homo sapiens
  misc_RNA (1)...(19): siRNA sense strand
caagaggaauuuggcuauc

SEQ ID NO: 1050484 - RNA, 19 nt, Homo sapiens
  misc_RNA (1)...(19): siRNA sense strand
ggaagauucacagcaggua

SEQ ID NO: 1050485 - RNA, 19 nt, Homo sapiens
  misc_RNA (1)...(19): siRNA sense strand
cagcugggcacguugauug

SEQ ID NO: 1050486 - RNA, 19 nt, Homo sapiens
  misc_RNA (1)...(19): siRNA sense strand
aaacacacuucaggucuca

SEQ ID NO: 1050487 - RNA, 19 nt, Homo sapiens
  misc_RNA (1)...(19): siRNA sense strand
gaagauucacagcagguau

SEQ ID NO: 1050488 - RNA, 19 nt, Homo sapiens
  misc_RNA (1)...(19): siRNA sense strand
gaagguugccagacugagu

SEQ ID NO: 1050489 - RNA, 19 nt, Homo sapiens
  misc_RNA (1)...(19): siRNA sense strand
ugccagacaucaccucaga

SEQ ID NO: 1050490 - RNA, 19 nt, Homo sapiens
  misc_RNA (1)...(19): siRNA sense strand
aaucagacaugcgauaugg

SEQ ID NO: 1050491 - RNA, 19 nt, Homo sapiens
  misc_RNA (1)...(19): siRNA sense strand
ugaauucuguuggcuuugu

SEQ ID NO: 1050492 - RNA, 19 nt, Homo sapiens
  misc_RNA (1)...(19): siRNA sense strand
agauauggcauccaaauca

SEQ ID NO: 1050493 - RNA, 19 nt, Homo sapiens
  misc_RNA (1)...(19): siRNA sense strand
gaaggccugacuaguguau

SEQ ID NO: 1050494 - RNA, 19 nt, Homo sapiens
  misc_RNA (1)...(19): siRNA sense strand
uugaaggccugacuagugu

SEQ ID NO: 1050495 - RNA, 19 nt, Homo sapiens
  misc_RNA (1)...(19): siRNA sense strand
ucuguuggcuuuguaugaa

SEQ ID NO: 1050496 - RNA, 19 nt, Homo sapiens
  misc_RNA (1)...(19): siRNA sense strand
gcagacaccaaagcuguga

SEQ ID NO: 1050497 - RNA, 19 nt, Homo sapiens
  misc_RNA (1)...(19): siRNA sense strand
gagaaugaagaagaaggua

SEQ ID NO: 1050498 - RNA, 19 nt, Homo sapiens
  misc_RNA (1)...(19): siRNA sense strand
gauggcagagaaugaagaa

SEQ ID NO: 1050499 - RNA, 19 nt, Homo sapiens
  misc_RNA (1)...(19): siRNA sense strand
acagagaaugcaacaauau

SEQ ID NO: 1050500 - RNA, 19 nt, Homo sapiens
  misc_RNA (1)...(19): siRNA sense strand
gaaaauauagcagguuaga

SEQ ID NO: 1050501 - RNA, 19 nt, Homo sapiens
  misc_RNA (1)...(19): siRNA sense strand
ccaguuauugcugcaguua

SEQ ID NO: 1050502 - RNA, 19 nt, Homo sapiens
  misc_RNA (1)...(19): siRNA sense strand
uggcagagaaugaagaaga

SEQ ID NO: 1050503 - RNA, 19 nt, Homo sapiens
  misc_RNA (1)...(19): siRNA sense strand
gaaggaaaaccuccaaaca

SEQ ID NO: 1050504 - RNA, 19 nt, Homo sapiens
  misc_RNA (1)...(19): siRNA sense strand
ggacauugaagccaaacca

SEQ ID NO: 1050505 - RNA, 19 nt, Homo sapiens
  misc_RNA (1)...(19): siRNA sense strand
guugugcccauuucucuuu

SEQ ID NO: 1050506 - RNA, 19 nt, Homo sapiens
  misc_RNA (1)...(19): siRNA sense strand
uggaagcuguaaucacaug

SEQ ID NO: 1050507 - RNA, 19 nt, Homo sapiens
  misc_RNA (1)...(19): siRNA sense strand
ccaaaccaagccacuauca

SEQ ID NO: 1050508 - RNA, 19 nt, Homo sapiens
  misc_RNA (1)...(19): siRNA sense strand
cagagaaugcaacaauaug

SEQ ID NO: 1050509 - RNA, 19 nt, Homo sapiens
  misc_RNA (1)...(19): siRNA sense strand
guaugaaagagaucucaga

SEQ ID NO: 1050510 - RNA, 19 nt, Homo sapiens
  misc_RNA (1)...(19): siRNA sense strand
uggaagcccuacagaugga

SEQ ID NO: 1050511 - RNA, 19 nt, Homo sapiens
  misc_RNA (1)...(19): siRNA sense strand
cuggagagcccucaagaau

SEQ ID NO: 1050512 - RNA, 19 nt, Homo sapiens
  misc_RNA (1)...(19): siRNA sense strand
aagaggaauuuggcuauca

SEQ ID NO: 1050513 - RNA, 19 nt, Homo sapiens
  misc_RNA (1)...(19): siRNA sense strand
caugaccugugcagugugu

SEQ ID NO: 1050514 - RNA, 19 nt, Homo sapiens
  misc_RNA (1)...(19): siRNA sense strand
ucagauggcagagaaugaa

SEQ ID NO: 1050515 - RNA, 19 nt, Homo sapiens
  misc_RNA (1)...(19): siRNA sense strand
gcauugaaggccugacuag

SEQ ID NO: 1050516 - RNA, 19 nt, Homo sapiens
  misc_RNA (1)...(19): siRNA sense strand
gaucucagacuugcauuac

SEQ ID NO: 1050517 - RNA, 19 nt, Homo sapiens
  misc_RNA (1)...(19): siRNA sense strand
gcccaagugcccauaugaa

SEQ ID NO: 1050518 - RNA, 19 nt, Homo sapiens
  misc_RNA (1)...(19): siRNA sense strand
gaguucugaugcacaguca

SEQ ID NO: 1050519 - RNA, 19 nt, Homo sapiens
  misc_RNA (1)...(19): siRNA sense strand
cuucaggucucaguuaugg

SEQ ID NO: 1050520 - RNA, 19 nt, Homo sapiens
  misc_RNA (1)...(19): siRNA sense strand
aggccugacuaguguauug

SEQ ID NO: 1050521 - RNA, 19 nt, Homo sapiens
  misc_RNA (1)...(19): siRNA sense strand
gcagguaugagggaaggaa

SEQ ID NO: 1050522 - RNA, 19 nt, Homo sapiens
  misc_RNA (1)...(19): siRNA sense strand
cauggagccguaagaagaa

SEQ ID NO: 1050523 - RNA, 19 nt, Homo sapiens
  misc_RNA (1)...(19): siRNA sense strand
ugaaugauggaagcuguaa

SEQ ID NO: 1050524 - RNA, 19 nt, Homo sapiens
  misc_RNA (1)...(19): siRNA sense strand
cauuggcauuccuguuuau

SEQ ID NO: 1050525 - RNA, 19 nt, Homo sapiens
  misc_RNA (1)...(19): siRNA sense strand
gggaagguugccagacuga

SEQ ID NO: 1050526 - RNA, 19 nt, Homo sapiens
  misc_RNA (1)...(19): siRNA sense strand
gcucagauggcagagaaug

SEQ ID NO: 1050527 - RNA, 19 nt, Homo sapiens
  misc_RNA (1)...(19): siRNA sense strand
ucaagaaucccagcauugg

SEQ ID NO: 1050528 - RNA, 19 nt, Homo sapiens
  misc_RNA (1)...(19): siRNA sense strand
acaagaggaauuuggcuau

SEQ ID NO: 1050529 - RNA, 19 nt, Homo sapiens
  misc_RNA (1)...(19): siRNA sense strand
aaacacaagaggaauuugg

SEQ ID NO: 1050530 - RNA, 19 nt, Homo sapiens
  misc_RNA (1)...(19): siRNA sense strand
cuacagauggacuuagugu

SEQ ID NO: 1050531 - RNA, 19 nt, Homo sapiens
  misc_RNA (1)...(19): siRNA sense strand
cugaaagcauccgcaguga

SEQ ID NO: 1050532 - RNA, 19 nt, Homo sapiens
  misc_RNA (1)...(19): siRNA sense strand
gcaaaucaauguuggaguu

SEQ ID NO: 1050533 - RNA, 19 nt, Homo sapiens
  misc_RNA (1)...(19): siRNA sense strand
gcuaaugaauucuguguuu

SEQ ID NO: 1050534 - RNA, 19 nt, Homo sapiens
  misc_RNA (1)...(19): siRNA sense strand
gaggagugcugcaaagauu

SEQ ID NO: 1050535 - RNA, 19 nt, Homo sapiens
  misc_RNA (1)...(19): siRNA sense strand
caacagcccuccuuauguc

SEQ ID NO: 1050536 - RNA, 19 nt, Homo sapiens
  misc_RNA (1)...(19): siRNA sense strand
gaagcugacaacccaaaua

SEQ ID NO: 1050537 - RNA, 19 nt, Homo sapiens
  misc_RNA (1)...(19): siRNA sense strand
gcaaggagcugcgcuucca

SEQ ID NO: 1050538 - RNA, 19 nt, Homo sapiens
  misc_RNA (1)...(19): siRNA sense strand
caacaagggcaaaucaaug

SEQ ID NO: 1050539 - RNA, 19 nt, Homo sapiens
  misc_RNA (1)...(19): siRNA sense strand
gcaauaugcauucuuccaa

SEQ ID NO: 1050540 - RNA, 19 nt, Homo sapiens
  misc_RNA (1)...(19): siRNA sense strand
ggugcugacuuaaagaaug

SEQ ID NO: 1050541 - RNA, 19 nt, Homo sapiens
  misc_RNA (1)...(19): siRNA sense strand
gauauucgccaccaaaugg

SEQ ID NO: 1050542 - RNA, 19 nt, Homo sapiens
  misc_RNA (1)...(19): siRNA sense strand
uggaggcacuucaggaauu

SEQ ID NO: 1050543 - RNA, 19 nt, Homo sapiens
  misc_RNA (1)...(19): siRNA sense strand
gaauggggcucuagugguu

SEQ ID NO: 1050544 - RNA, 19 nt, Homo sapiens
  misc_RNA (1)...(19): siRNA sense strand
agauugcgcuaaugaauuc

SEQ ID NO: 1050545 - RNA, 19 nt, Homo sapiens
  misc_RNA (1)...(19): siRNA sense strand
gaugauauucgccaccaaa

SEQ ID NO: 1050546 - RNA, 19 nt, Homo sapiens
  misc_RNA (1)...(19): siRNA sense strand
ggcccuggaugaugauauu

SEQ ID NO: 1050547 - RNA, 19 nt, Homo sapiens
  misc_RNA (1)...(19): siRNA sense strand
caacccaaauacagggauu

SEQ ID NO: 1050548 - RNA, 19 nt, Homo sapiens
  misc_RNA (1)...(19): siRNA sense strand
gguguuggcucauuauucg

SEQ ID NO: 1050549 - RNA, 19 nt, Homo sapiens
  misc_RNA (1)...(19): siRNA sense strand
acaaggagaagaaagauau

SEQ ID NO: 1050550 - RNA, 19 nt, Homo sapiens
  misc_RNA (1)...(19): siRNA sense strand
gggcucuagugguuuauga

SEQ ID NO: 1050551 - RNA, 19 nt, Homo sapiens
  misc_RNA (1)...(19): siRNA sense strand
cugaggcccuggcaucuuu

SEQ ID NO: 1050552 - RNA, 19 nt, Homo sapiens
  misc_RNA (1)...(19): siRNA sense strand
ggaggcacuucaggaauuc

SEQ ID NO: 1050553 - RNA, 19 nt, Homo sapiens
  misc_RNA (1)...(19): siRNA sense strand
gcugggcaguugggcaaua

SEQ ID NO: 1050554 - RNA, 19 nt, Homo sapiens
  misc_RNA (1)...(19): siRNA sense strand
ccuuaugucugcuauguca

SEQ ID NO: 1050555 - RNA, 19 nt, Homo sapiens
  misc_RNA (1)...(19): siRNA sense strand
caaagauugcgcuaaugaa

SEQ ID NO: 1050556 - RNA, 19 nt, Homo sapiens
  misc_RNA (1)...(19): siRNA sense strand
ccaacagcccuccuuaugu

SEQ ID NO: 1050557 - RNA, 19 nt, Homo sapiens
  misc_RNA (1)...(19): siRNA sense strand
caagggcaaaucaauguug

SEQ ID NO: 1050558 - RNA, 19 nt, Homo sapiens
  misc_RNA (1)...(19): siRNA sense strand
ucuagugguuuaugagaug

SEQ ID NO: 1050559 - RNA, 19 nt, Homo sapiens
  misc_RNA (1)...(19): siRNA sense strand
gucccguggugcugacuua

SEQ ID NO: 1050560 - RNA, 19 nt, Homo sapiens
  misc_RNA (1)...(19): siRNA sense strand
aggagguguuggcucauua

SEQ ID NO: 1050561 - RNA, 19 nt, Homo sapiens
  misc_RNA (1)...(19): siRNA sense strand
ccaacaagggcaaaucaau

SEQ ID NO: 1050562 - RNA, 19 nt, Homo sapiens
  misc_RNA (1)...(19): siRNA sense strand
aaagauugcgcuaaugaau

SEQ ID NO: 1050563 - RNA, 19 nt, Homo sapiens
  misc_RNA (1)...(19): siRNA sense strand
ggaggagugcugcaaagau

SEQ ID NO: 1050564 - RNA, 19 nt, Homo sapiens
  misc_RNA (1)...(19): siRNA sense strand
caacugcuacacuggaaug

SEQ ID NO: 1050565 - RNA, 19 nt, Homo sapiens
  misc_RNA (1)...(19): siRNA sense strand
caggagguguuggcucauu

SEQ ID NO: 1050566 - RNA, 19 nt, Homo sapiens
  misc_RNA (1)...(19): siRNA sense strand
caggagcuaaugacaguuu

SEQ ID NO: 1050567 - RNA, 19 nt, Homo sapiens
  misc_RNA (1)...(19): siRNA sense strand
gugcugacuuaaagaaugg

SEQ ID NO: 1050568 - RNA, 19 nt, Homo sapiens
  misc_RNA (1)...(19): siRNA sense strand
caaggagaagaaagauauu

SEQ ID NO: 1050569 - RNA, 19 nt, Homo sapiens
  misc_RNA (1)...(19): siRNA sense strand
gguggaggcacuucaggaa

SEQ ID NO: 1050570 - RNA, 19 nt, Homo sapiens
  misc_RNA (1)...(19): siRNA sense strand
ggauuggugccuuccgauu

SEQ ID NO: 1050571 - RNA, 19 nt, Homo sapiens
  misc_RNA (1)...(19): siRNA sense strand
uccaggagcuaaugacagu

SEQ ID NO: 1050572 - RNA, 19 nt, Homo sapiens
  misc_RNA (1)...(19): siRNA sense strand
gcucuagugguuuaugaga

SEQ ID NO: 1050573 - RNA, 19 nt, Homo sapiens
  misc_RNA (1)...(19): siRNA sense strand
aagauugcgcuaaugaauu

SEQ ID NO: 1050574 - RNA, 19 nt, Homo sapiens
  misc_RNA (1)...(19): siRNA sense strand
cacaaggagaagaaagaua

SEQ ID NO: 1050575 - RNA, 19 nt, Homo sapiens
  misc_RNA (1)...(19): siRNA sense strand
ggagguguuggcucauuau

SEQ ID NO: 1050576 - RNA, 19 nt, Homo sapiens
  misc_RNA (1)...(19): siRNA sense strand
gauuggugccuuccgauuc

SEQ ID NO: 1050577 - RNA, 19 nt, Homo sapiens
  misc_RNA (1)...(19): siRNA sense strand
gcugacaacccaaauacag

SEQ ID NO: 1050578 - RNA, 19 nt, Homo sapiens
  misc_RNA (1)...(19): siRNA sense strand
gcuauggccgagugaaugu

SEQ ID NO: 1050579 - RNA, 19 nt, Homo sapiens
  misc_RNA (1)...(19): siRNA sense strand
uccaacagcccuccuuaug

SEQ ID NO: 1050580 - RNA, 19 nt, Homo sapiens
  misc_RNA (1)...(19): siRNA sense strand
ugggcaauaugcauucuuc

SEQ ID NO: 1050581 - RNA, 19 nt, Homo sapiens
  misc_RNA (1)...(19): siRNA sense strand
gcaguugggcaauaugcau

SEQ ID NO: 1050582 - RNA, 19 nt, Homo sapiens
  misc_RNA (1)...(19): siRNA sense strand
cuuugggaguuuccaguuu

SEQ ID NO: 1050583 - RNA, 19 nt, Homo sapiens
  misc_RNA (1)...(19): siRNA sense strand
ggaguuccaggagcuaaug

SEQ ID NO: 1050584 - RNA, 19 nt, Homo sapiens
  misc_RNA (1)...(19): siRNA sense strand
ggaagcugacaacccaaau

SEQ ID NO: 1050585 - RNA, 19 nt, Homo sapiens
  misc_RNA (1)...(19): siRNA sense strand
gcgcuaaugaauucugugu

SEQ ID NO: 1050586 - RNA, 19 nt, Homo sapiens
  misc_RNA (1)...(19): siRNA sense strand
ccuccaacagcccuccuua

SEQ ID NO: 1050587 - RNA, 19 nt, Homo sapiens
  misc_RNA (1)...(19): siRNA sense strand
aacaagggcaaaucaaugu

SEQ ID NO: 1050588 - RNA, 19 nt, Homo sapiens
  misc_RNA (1)...(19): siRNA sense strand
gagaugguucccuccaaca

SEQ ID NO: 1050589 - RNA, 19 nt, Homo sapiens
  misc_RNA (1)...(19): siRNA sense strand
gagguguuggcucauuauu

SEQ ID NO: 1050590 - RNA, 19 nt, Homo sapiens
  misc_RNA (1)...(19): siRNA sense strand
ccguggugcugacuuaaag

SEQ ID NO: 1050591 - RNA, 19 nt, Homo sapiens
  misc_RNA (1)...(19): siRNA sense strand
ccacaaggagaagaaagau

SEQ ID NO: 1050592 - RNA, 19 nt, Homo sapiens
  misc_RNA (1)...(19): siRNA sense strand
gggcuauggccgagugaau

SEQ ID NO: 1050593 - RNA, 19 nt, Homo sapiens
  misc_RNA (1)...(19): siRNA sense strand
caaaucaauguuggaguuc

SEQ ID NO: 1050594 - RNA, 19 nt, Homo sapiens
  misc_RNA (1)...(19): siRNA sense strand
gagcaucgcuaugaucuaa

SEQ ID NO: 1050595 - RNA, 19 nt, Homo sapiens
  misc_RNA (1)...(19): siRNA sense strand
ggaccuggcuguggccuau

SEQ ID NO: 1050596 - RNA, 19 nt, Homo sapiens
  misc_RNA (1)...(19): siRNA sense strand
gaagugugcuggcugucau

SEQ ID NO: 1050597 - RNA, 19 nt, Homo sapiens
  misc_RNA (1)...(19): siRNA sense strand
agucggcacucuuggguua

SEQ ID NO: 1050598 - RNA, 19 nt, Homo sapiens
  misc_RNA (1)...(19): siRNA sense strand
guggagaacugguccuaca

SEQ ID NO: 1050599 - RNA, 19 nt, Homo sapiens
  misc_RNA (1)...(19): siRNA sense strand
ucaguggagucuucuuugu

SEQ ID NO: 1050600 - RNA, 19 nt, Homo sapiens
  misc_RNA (1)...(19): siRNA sense strand
gggugugugucaucgauau

SEQ ID NO: 1050601 - RNA, 19 nt, Homo sapiens
  misc_RNA (1)...(19): siRNA sense strand
gguccucaguggagucuuc

SEQ ID NO: 1050602 - RNA, 19 nt, Homo sapiens
  misc_RNA (1)...(19): siRNA sense strand
ccaggucucugcacuacgu

SEQ ID NO: 1050603 - RNA, 19 nt, Homo sapiens
  misc_RNA (1)...(19): siRNA sense strand
gcugcacccuggacgaugu

SEQ ID NO: 1050604 - RNA, 19 nt, Homo sapiens
  misc_RNA (1)...(19): siRNA sense strand
gcugucaucgccuuuauca

SEQ ID NO: 1050605 - RNA, 19 nt, Homo sapiens
  misc_RNA (1)...(19): siRNA sense strand
gagagcaucgcuaugaucu

SEQ ID NO: 1050606 - RNA, 19 nt, Homo sapiens
  misc_RNA (1)...(19): siRNA sense strand
gcaacuuucagguggauca

SEQ ID NO: 1050607 - RNA, 19 nt, Homo sapiens
  misc_RNA (1)...(19): siRNA sense strand
caccuucagcuacgaguuu

SEQ ID NO: 1050608 - RNA, 19 nt, Homo sapiens
  misc_RNA (1)...(19): siRNA sense strand
uaacaccacggcacucauc

SEQ ID NO: 1050609 - RNA, 19 nt, Homo sapiens
  misc_RNA (1)...(19): siRNA sense strand
ccucaguggagucuucuuu

SEQ ID NO: 1050610 - RNA, 19 nt, Homo sapiens
  misc_RNA (1)...(19): siRNA sense strand
ggagaacugguccuacaac

SEQ ID NO: 1050611 - RNA, 19 nt, Homo sapiens
  misc_RNA (1)...(19): siRNA sense strand
ccgagagcaucgcuaugau

SEQ ID NO: 1050612 - RNA, 19 nt, Homo sapiens
  misc_RNA (1)...(19): siRNA sense strand
cccgagagcaucgcuauga

SEQ ID NO: 1050613 - RNA, 19 nt, Homo sapiens
  misc_RNA (1)...(19): siRNA sense strand
gagucuucuuuguccauga

SEQ ID NO: 1050614 - RNA, 19 nt, Homo sapiens
  misc_RNA (1)...(19): siRNA sense strand
uggccuaucugcgaagugu

SEQ ID NO: 1050615 - RNA, 19 nt, Homo sapiens
  misc_RNA (1)...(19): siRNA sense strand
uggcugucaucgccuuuau

SEQ ID NO: 1050616 - RNA, 19 nt, Homo sapiens
  misc_RNA (1)...(19): siRNA sense strand
gugggugugugucaucgau

SEQ ID NO: 1050617 - RNA, 19 nt, Homo sapiens
  misc_RNA (1)...(19): siRNA sense strand
ugauugagcugaauaagua

SEQ ID NO: 1050618 - RNA, 19 nt, Homo sapiens
  misc_RNA (1)...(19): siRNA sense strand
gaaacacucugagauauau

SEQ ID NO: 1050619 - RNA, 19 nt, Homo sapiens
  misc_RNA (1)...(19): siRNA sense strand
aaaggaaggucuacaugua

SEQ ID NO: 1050620 - RNA, 19 nt, Homo sapiens
  misc_RNA (1)...(19): siRNA sense strand
caacaaguccuuugacauu

SEQ ID NO: 1050621 - RNA, 19 nt, Homo sapiens
  misc_RNA (1)...(19): siRNA sense strand
ggaaacacucugagauaua

SEQ ID NO: 1050622 - RNA, 19 nt, Homo sapiens
  misc_RNA (1)...(19): siRNA sense strand
ucucguaucccaauuauua

SEQ ID NO: 1050623 - RNA, 19 nt, Homo sapiens
  misc_RNA (1)...(19): siRNA sense strand
caacaaagacagccuaaug

SEQ ID NO: 1050624 - RNA, 19 nt, Homo sapiens
  misc_RNA (1)...(19): siRNA sense strand
gggaaacacucugagauau

SEQ ID NO: 1050625 - RNA, 19 nt, Homo sapiens
  misc_RNA (1)...(19): siRNA sense strand
ugaaguacaugaccaagug

SEQ ID NO: 1050626 - RNA, 19 nt, Homo sapiens
  misc_RNA (1)...(19): siRNA sense strand
ugaaugaccugcagcaagu

SEQ ID NO: 1050627 - RNA, 19 nt, Homo sapiens
  misc_RNA (1)...(19): siRNA sense strand
ccaagcagguucuauuaca

SEQ ID NO: 1050628 - RNA, 19 nt, Homo sapiens
  misc_RNA (1)...(19): siRNA sense strand
cuucggaccugauuucaaa

SEQ ID NO: 1050629 - RNA, 19 nt, Homo sapiens
  misc_RNA (1)...(19): siRNA sense strand
gaaaggaaaguuugucucu

SEQ ID NO: 1050630 - RNA, 19 nt, Homo sapiens
  misc_RNA (1)...(19): siRNA sense strand
ccuacugccuagaauauaa

SEQ ID NO: 1050631 - RNA, 19 nt, Homo sapiens
  misc_RNA (1)...(19): siRNA sense strand
gcgaugcucuugacuccuu

SEQ ID NO: 1050632 - RNA, 19 nt, Homo sapiens
  misc_RNA (1)...(19): siRNA sense strand
gucauugccugguuucaaa

SEQ ID NO: 1050633 - RNA, 19 nt, Homo sapiens
  misc_RNA (1)...(19): siRNA sense strand
ggaagcugcugguguuucu

SEQ ID NO: 1050634 - RNA, 19 nt, Homo sapiens
  misc_RNA (1)...(19): siRNA sense strand
uuacuugacuccagacuuc

SEQ ID NO: 1050635 - RNA, 19 nt, Homo sapiens
  misc_RNA (1)...(19): siRNA sense strand
caagcagguucuauuacaa

SEQ ID NO: 1050636 - RNA, 19 nt, Homo sapiens
  misc_RNA (1)...(19): siRNA sense strand
gcugugagguugagauucu

SEQ ID NO: 1050637 - RNA, 19 nt, Homo sapiens
  misc_RNA (1)...(19): siRNA sense strand
gaaggcugguucauaacug

SEQ ID NO: 1050638 - RNA, 19 nt, Homo sapiens
  misc_RNA (1)...(19): siRNA sense strand
guucauaacugagaaucga

SEQ ID NO: 1050639 - RNA, 19 nt, Homo sapiens
  misc_RNA (1)...(19): siRNA sense strand
gccggaagcugcugguguu

SEQ ID NO: 1050640 - RNA, 19 nt, Homo sapiens
  misc_RNA (1)...(19): siRNA sense strand
acaaagugauugagcugaa

SEQ ID NO: 1050641 - RNA, 19 nt, Homo sapiens
  misc_RNA (1)...(19): siRNA sense strand
ugacuuuaguggcugauga

SEQ ID NO: 1050642 - RNA, 19 nt, Homo sapiens
  misc_RNA (1)...(19): siRNA sense strand
acaacgagcucauggacau

SEQ ID NO: 1050643 - RNA, 19 nt, Homo sapiens
  misc_RNA (1)...(19): siRNA sense strand
gagagaugcuuccguuuug

SEQ ID NO: 1050644 - RNA, 19 nt, Homo sapiens
  misc_RNA (1)...(19): siRNA sense strand
ccucaaggcuguagacacu

SEQ ID NO: 1050645 - RNA, 19 nt, Homo sapiens
  misc_RNA (1)...(19): siRNA sense strand
cgccugaacgucauuauuu

SEQ ID NO: 1050646 - RNA, 19 nt, Homo sapiens
  misc_RNA (1)...(19): siRNA sense strand
caaagugauugagcugaau

SEQ ID NO: 1050647 - RNA, 19 nt, Homo sapiens
  misc_RNA (1)...(19): siRNA sense strand
gcucagacuacaucaguga

SEQ ID NO: 1050648 - RNA, 19 nt, Homo sapiens
  misc_RNA (1)...(19): siRNA sense strand
ggacgucuacaaugucaug

SEQ ID NO: 1050649 - RNA, 19 nt, Homo sapiens
  misc_RNA (1)...(19): siRNA sense strand
ugggaaacacucugagaua

SEQ ID NO: 1050650 - RNA, 19 nt, Homo sapiens
  misc_RNA (1)...(19): siRNA sense strand
ucaggucgguggacgucua

SEQ ID NO: 1050651 - RNA, 19 nt, Homo sapiens
  misc_RNA (1)...(19): siRNA sense strand
gagcacaguggaacacaug

SEQ ID NO: 1050652 - RNA, 19 nt, Homo sapiens
  misc_RNA (1)...(19): siRNA sense strand
aaguuugucucuccuuuga

SEQ ID NO: 1050653 - RNA, 19 nt, Homo sapiens
  misc_RNA (1)...(19): siRNA sense strand
uggaacacaugacugucua

SEQ ID NO: 1050654 - RNA, 19 nt, Homo sapiens
  misc_RNA (1)...(19): siRNA sense strand
ccaccuacugccuagaaua

SEQ ID NO: 1050655 - RNA, 19 nt, Homo sapiens
  misc_RNA (1)...(19): siRNA sense strand
ucaaggcuguagacacugu

SEQ ID NO: 1050656 - RNA, 19 nt, Homo sapiens
  misc_RNA (1)...(19): siRNA sense strand
ccaccaacaaguccuuuga

SEQ ID NO: 1050657 - RNA, 19 nt, Homo sapiens
  misc_RNA (1)...(19): siRNA sense strand
ucccaagcagguucuauua

SEQ ID NO: 1050658 - RNA, 19 nt, Homo sapiens
  misc_RNA (1)...(19): siRNA sense strand
ggauggacaaagugauuga

SEQ ID NO: 1050659 - RNA, 19 nt, Homo sapiens
  misc_RNA (1)...(19): siRNA sense strand
cauauaccaugagcgcauu

SEQ ID NO: 1050660 - RNA, 19 nt, Homo sapiens
  misc_RNA (1)...(19): siRNA sense strand
ucccaacggauaucaauuu

SEQ ID NO: 1050661 - RNA, 19 nt, Homo sapiens
  misc_RNA (1)...(19): siRNA sense strand
ggaaggucuacauguacua

SEQ ID NO: 1050662 - RNA, 19 nt, Homo sapiens
  misc_RNA (1)...(19): siRNA sense strand
acauuggcgucaacaaaga

SEQ ID NO: 1050663 - RNA, 19 nt, Homo sapiens
  misc_RNA (1)...(19): siRNA sense strand
gacauuggcgucaacaaag

SEQ ID NO: 1050664 - RNA, 19 nt, Homo sapiens
  misc_RNA (1)...(19): siRNA sense strand
acacuguccugaaguacau

SEQ ID NO: 1050665 - RNA, 19 nt, Homo sapiens
  misc_RNA (1)...(19): siRNA sense strand
gaugaucgggaacuacaug

SEQ ID NO: 1050666 - RNA, 19 nt, Homo sapiens
  misc_RNA (1)...(19): siRNA sense strand
aaagugauugagcugaaua

SEQ ID NO: 1050667 - RNA, 19 nt, Homo sapiens
  misc_RNA (1)...(19): siRNA sense strand
gcagucagcgaugcucuug

SEQ ID NO: 1050668 - RNA, 19 nt, Homo sapiens
  misc_RNA (1)...(19): siRNA sense strand
caacggauaucaauuuugc

SEQ ID NO: 1050669 - RNA, 19 nt, Homo sapiens
  misc_RNA (1)...(19): siRNA sense strand
guggacgucuacaauguca

SEQ ID NO: 1050670 - RNA, 19 nt, Homo sapiens
  misc_RNA (1)...(19): siRNA sense strand
ucuacaaugucaugugcaa

SEQ ID NO: 1050671 - RNA, 19 nt, Homo sapiens
  misc_RNA (1)...(19): siRNA sense strand
ggauaucaauuuugccaau

SEQ ID NO: 1050672 - RNA, 19 nt, Homo sapiens
  misc_RNA (1)...(19): siRNA sense strand
cgguggacgucuacaaugu

SEQ ID NO: 1050673 - RNA, 19 nt, Homo sapiens
  misc_RNA (1)...(19): siRNA sense strand
uuucaaauccaacuucaga

SEQ ID NO: 1050674 - RNA, 19 nt, Homo sapiens
  misc_RNA (1)...(19): siRNA sense strand
uaacugagaaucgagagau

SEQ ID NO: 1050675 - RNA, 19 nt, Homo sapiens
  misc_RNA (1)...(19): siRNA sense strand
aacaaguccuuugacauug

SEQ ID NO: 1050676 - RNA, 19 nt, Homo sapiens
  misc_RNA (1)...(19): siRNA sense strand
gguccagggugaugugcau

SEQ ID NO: 1050677 - RNA, 19 nt, Homo sapiens
  misc_RNA (1)...(19): siRNA sense strand
ugucucuccuuugacuuua

SEQ ID NO: 1050678 - RNA, 19 nt, Homo sapiens
  misc_RNA (1)...(19): siRNA sense strand
uacaagaaaggaaaguuug

SEQ ID NO: 1050679 - RNA, 19 nt, Homo sapiens
  misc_RNA (1)...(19): siRNA sense strand
acaugacugucuacgagaa

SEQ ID NO: 1050680 - RNA, 19 nt, Homo sapiens
  misc_RNA (1)...(19): siRNA sense strand
gagcugaauaaguacauca

SEQ ID NO: 1050681 - RNA, 19 nt, Homo sapiens
  misc_RNA (1)...(19): siRNA sense strand
uggagucauugccugguuu

SEQ ID NO: 1050682 - RNA, 19 nt, Homo sapiens
  misc_RNA (1)...(19): siRNA sense strand
ucucucguaucccaauuau

SEQ ID NO: 1050683 - RNA, 19 nt, Homo sapiens
  misc_RNA (1)...(19): siRNA sense strand
caccuacugccuagaauau

SEQ ID NO: 1050684 - RNA, 19 nt, Homo sapiens
  misc_RNA (1)...(19): siRNA sense strand
acaaguccuuugacauugg

SEQ ID NO: 1050685 - RNA, 19 nt, Homo sapiens
  misc_RNA (1)...(19): siRNA sense strand
gcugguucauaacugagaa

SEQ ID NO: 1050686 - RNA, 19 nt, Homo sapiens
  misc_RNA (1)...(19): siRNA sense strand
ggaaaguuugucucuccuu

SEQ ID NO: 1050687 - RNA, 19 nt, Homo sapiens
  misc_RNA (1)...(19): siRNA sense strand
uaaugccucucugguggaa

SEQ ID NO: 1050688 - RNA, 19 nt, Homo sapiens
  misc_RNA (1)...(19): siRNA sense strand
aaagaagccaucccaagca

SEQ ID NO: 1050689 - RNA, 19 nt, Homo sapiens
  misc_RNA (1)...(19): siRNA sense strand
acaaugucaugugcaaugu

SEQ ID NO: 1050690 - RNA, 19 nt, Homo sapiens
  misc_RNA (1)...(19): siRNA sense strand
uacaaugucaugugcaaug

SEQ ID NO: 1050691 - RNA, 19 nt, Homo sapiens
  misc_RNA (1)...(19): siRNA sense strand
aaggcugguucauaacuga

SEQ ID NO: 1050692 - RNA, 19 nt, Homo sapiens
  misc_RNA (1)...(19): siRNA sense strand
gugauugagcugaauaagu

SEQ ID NO: 1050693 - RNA, 19 nt, Homo sapiens
  misc_RNA (1)...(19): siRNA sense strand
cagaugaucgggaacuaca

SEQ ID NO: 1050694 - RNA, 19 nt, Homo sapiens
  misc_RNA (1)...(19): siRNA sense strand
ggcacugauucuucucuuc

SEQ ID NO: 1050695 - RNA, 19 nt, Homo sapiens
  misc_RNA (1)...(19): siRNA sense strand
ccaacaaguccuuugacau

SEQ ID NO: 1050696 - RNA, 19 nt, Homo sapiens
  misc_RNA (1)...(19): siRNA sense strand
gaagguuggcagcguggau

SEQ ID NO: 1050697 - RNA, 19 nt, Homo sapiens
  misc_RNA (1)...(19): siRNA sense strand
cgagagaugcuuccguuuu

SEQ ID NO: 1050698 - RNA, 19 nt, Homo sapiens
  misc_RNA (1)...(19): siRNA sense strand
caagaaaggaaaguuuguc

SEQ ID NO: 1050699 - RNA, 19 nt, Homo sapiens
  misc_RNA (1)...(19): siRNA sense strand
gccugaacgucauuauuuu

SEQ ID NO: 1050700 - RNA, 19 nt, Homo sapiens
  misc_RNA (1)...(19): siRNA sense strand
cuacugccuagaauauaaa

SEQ ID NO: 1050701 - RNA, 19 nt, Homo sapiens
  misc_RNA (1)...(19): siRNA sense strand
cccaauuauuauacccuaa

SEQ ID NO: 1050702 - RNA, 19 nt, Homo sapiens
  misc_RNA (1)...(19): siRNA sense strand
gaaggucuacauguacuac

SEQ ID NO: 1050703 - RNA, 19 nt, Homo sapiens
  misc_RNA (1)...(19): siRNA sense strand
uguuucugcuggaugguuu

SEQ ID NO: 1050704 - RNA, 19 nt, Homo sapiens
  misc_RNA (1)...(19): siRNA sense strand
cugguggaauggaucagaa

SEQ ID NO: 1050705 - RNA, 19 nt, Homo sapiens
  misc_RNA (1)...(19): siRNA sense strand
ugagcgcauugacguggaa

SEQ ID NO: 1050706 - RNA, 19 nt, Homo sapiens
  misc_RNA (1)...(19): siRNA sense strand
gaacuacccucugccauaa

SEQ ID NO: 1050707 - RNA, 19 nt, Homo sapiens
  misc_RNA (1)...(19): siRNA sense strand
gaaauguacaggauacuua

SEQ ID NO: 1050708 - RNA, 19 nt, Homo sapiens
  misc_RNA (1)...(19): siRNA sense strand
caaauucccugcauuguuc

SEQ ID NO: 1050709 - RNA, 19 nt, Homo sapiens
  misc_RNA (1)...(19): siRNA sense strand
gaagaagucucacaaacag

SEQ ID NO: 1050710 - RNA, 19 nt, Homo sapiens
  misc_RNA (1)...(19): siRNA sense strand
gaaaguagaagaagucuca

SEQ ID NO: 1050711 - RNA, 19 nt, Homo sapiens
  misc_RNA (1)...(19): siRNA sense strand
gcaaugacuccaaugauuu

SEQ ID NO: 1050712 - RNA, 19 nt, Homo sapiens
  misc_RNA (1)...(19): siRNA sense strand
caaccaggauggagauaaa

SEQ ID NO: 1050713 - RNA, 19 nt, Homo sapiens
  misc_RNA (1)...(19): siRNA sense strand
gaagugugaugaguauauu

SEQ ID NO: 1050714 - RNA, 19 nt, Homo sapiens
  misc_RNA (1)...(19): siRNA sense strand
aaacagaaauguacaggau

SEQ ID NO: 1050715 - RNA, 19 nt, Homo sapiens
  misc_RNA (1)...(19): siRNA sense strand
cgucaguccugccaauuua

SEQ ID NO: 1050716 - RNA, 19 nt, Homo sapiens
  misc_RNA (1)...(19): siRNA sense strand
ggagauaaaggaacucaaa

SEQ ID NO: 1050717 - RNA, 19 nt, Homo sapiens
  misc_RNA (1)...(19): siRNA sense strand
ggcaaacacuggaauccua

SEQ ID NO: 1050718 - RNA, 19 nt, Homo sapiens
  misc_RNA (1)...(19): siRNA sense strand
gauaaaggaacucaaagaa

SEQ ID NO: 1050719 - RNA, 19 nt, Homo sapiens
  misc_RNA (1)...(19): siRNA sense strand
gaucguucaucuuuauuug

SEQ ID NO: 1050720 - RNA, 19 nt, Homo sapiens
  misc_RNA (1)...(19): siRNA sense strand
aaagaagugugaugaguau

SEQ ID NO: 1050721 - RNA, 19 nt, Homo sapiens
  misc_RNA (1)...(19): siRNA sense strand
ggagccaccucucuacaga

SEQ ID NO: 1050722 - RNA, 19 nt, Homo sapiens
  misc_RNA (1)...(19): siRNA sense strand
ucacggaucguucaucuuu

SEQ ID NO: 1050723 - RNA, 19 nt, Homo sapiens
  misc_RNA (1)...(19): siRNA sense strand
gcccgaggaugauaacauu

SEQ ID NO: 1050724 - RNA, 19 nt, Homo sapiens
  misc_RNA (1)...(19): siRNA sense strand
uauuugaacuggcuaagaa

SEQ ID NO: 1050725 - RNA, 19 nt, Homo sapiens
  misc_RNA (1)...(19): siRNA sense strand
aaaugcagaugguuucaaa

SEQ ID NO: 1050726 - RNA, 19 nt, Homo sapiens
  misc_RNA (1)...(19): siRNA sense strand
gauaguuaccuuuggcaua

SEQ ID NO: 1050727 - RNA, 19 nt, Homo sapiens
  misc_RNA (1)...(19): siRNA sense strand
uaucuuggcuauacuagug

SEQ ID NO: 1050728 - RNA, 19 nt, Homo sapiens
  misc_RNA (1)...(19): siRNA sense strand
gaguaaagaugacauucuc

SEQ ID NO: 1050729 - RNA, 19 nt, Homo sapiens
  misc_RNA (1)...(19): siRNA sense strand
acagaacacuggagcaaug

SEQ ID NO: 1050730 - RNA, 19 nt, Homo sapiens
  misc_RNA (1)...(19): siRNA sense strand
auaguuaccuuuggcauaa

SEQ ID NO: 1050731 - RNA, 19 nt, Homo sapiens
  misc_RNA (1)...(19): siRNA sense strand
ugaacuacccucugccaua

SEQ ID NO: 1050732 - RNA, 19 nt, Homo sapiens
  misc_RNA (1)...(19): siRNA sense strand
ucacagugccgguguuauu

SEQ ID NO: 1050733 - RNA, 19 nt, Homo sapiens
  misc_RNA (1)...(19): siRNA sense strand
ccaaugauuucaccgaagu

SEQ ID NO: 1050734 - RNA, 19 nt, Homo sapiens
  misc_RNA (1)...(19): siRNA sense strand
gaagcaaacagaaauguac

SEQ ID NO: 1050735 - RNA, 19 nt, Homo sapiens
  misc_RNA (1)...(19): siRNA sense strand
cgaccuccuucacaaauau

SEQ ID NO: 1050736 - RNA, 19 nt, Homo sapiens
  misc_RNA (1)...(19): siRNA sense strand
ugacagugcccgaggauga

SEQ ID NO: 1050737 - RNA, 19 nt, Homo sapiens
  misc_RNA (1)...(19): siRNA sense strand
ugcauacucuugguuguua

SEQ ID NO: 1050738 - RNA, 19 nt, Homo sapiens
  misc_RNA (1)...(19): siRNA sense strand
gcggcuggcugucauuguu

SEQ ID NO: 1050739 - RNA, 19 nt, Homo sapiens
  misc_RNA (1)...(19): siRNA sense strand
caacaauaagugcuaauuc

SEQ ID NO: 1050740 - RNA, 19 nt, Homo sapiens
  misc_RNA (1)...(19): siRNA sense strand
caaaaguggacucgaauua

SEQ ID NO: 1050741 - RNA, 19 nt, Homo sapiens
  misc_RNA (1)...(19): siRNA sense strand
ucaaagaccguguaugcuu

SEQ ID NO: 1050742 - RNA, 19 nt, Homo sapiens
  misc_RNA (1)...(19): siRNA sense strand
gaucgugaaaguagaagaa

SEQ ID NO: 1050743 - RNA, 19 nt, Homo sapiens
  misc_RNA (1)...(19): siRNA sense strand
ggauggagauaaaggaacu

SEQ ID NO: 1050744 - RNA, 19 nt, Homo sapiens
  misc_RNA (1)...(19): siRNA sense strand
agcaaugacuccaaugauu

SEQ ID NO: 1050745 - RNA, 19 nt, Homo sapiens
  misc_RNA (1)...(19): siRNA sense strand
uagaagaagucucacaaac

SEQ ID NO: 1050746 - RNA, 19 nt, Homo sapiens
  misc_RNA (1)...(19): siRNA sense strand
guagaagaagucucacaaa

SEQ ID NO: 1050747 - RNA, 19 nt, Homo sapiens
  misc_RNA (1)...(19): siRNA sense strand
caauuuacagugagcuuaa

SEQ ID NO: 1050748 - RNA, 19 nt, Homo sapiens
  misc_RNA (1)...(19): siRNA sense strand
cuucacaaauaucagagua

SEQ ID NO: 1050749 - RNA, 19 nt, Homo sapiens
  misc_RNA (1)...(19): siRNA sense strand
gagcuaccucuucaucgua

SEQ ID NO: 1050750 - RNA, 19 nt, Homo sapiens
  misc_RNA (1)...(19): siRNA sense strand
gggaaaggaagagacauuu

SEQ ID NO: 1050751 - RNA, 19 nt, Homo sapiens
  misc_RNA (1)...(19): siRNA sense strand
cagggaaguucguaaucuu

SEQ ID NO: 1050752 - RNA, 19 nt, Homo sapiens
  misc_RNA (1)...(19): siRNA sense strand
uuacagaagcaaacagaaa

SEQ ID NO: 1050753 - RNA, 19 nt, Homo sapiens
  misc_RNA (1)...(19): siRNA sense strand
gugguuaccugcauacucu

SEQ ID NO: 1050754 - RNA, 19 nt, Homo sapiens
  misc_RNA (1)...(19): siRNA sense strand
uccuugagcuguaugguuu

SEQ ID NO: 1050755 - RNA, 19 nt, Homo sapiens
  misc_RNA (1)...(19): siRNA sense strand
ggaaguucguaaucuuugg

SEQ ID NO: 1050756 - RNA, 19 nt, Homo sapiens
  misc_RNA (1)...(19): siRNA sense strand
aaaguggacucgaauuaac

SEQ ID NO: 1050757 - RNA, 19 nt, Homo sapiens
  misc_RNA (1)...(19): siRNA sense strand
ggaucguucaucuuuauuu

SEQ ID NO: 1050758 - RNA, 19 nt, Homo sapiens
  misc_RNA (1)...(19): siRNA sense strand
uaaagaccgaucacagaaa

SEQ ID NO: 1050759 - RNA, 19 nt, Homo sapiens
  misc_RNA (1)...(19): siRNA sense strand
ucaaauucccugcauuguu

SEQ ID NO: 1050760 - RNA, 19 nt, Homo sapiens
  misc_RNA (1)...(19): siRNA sense strand
guucugguggugauaguua

SEQ ID NO: 1050761 - RNA, 19 nt, Homo sapiens
  misc_RNA (1)...(19): siRNA sense strand
ccgaccuccuucacaaaua

SEQ ID NO: 1050762 - RNA, 19 nt, Homo sapiens
  misc_RNA (1)...(19): siRNA sense strand
caggcugcaugguguauga

SEQ ID NO: 1050763 - RNA, 19 nt, Homo sapiens
  misc_RNA (1)...(19): siRNA sense strand
acagaaauguacaggauac

SEQ ID NO: 1050764 - RNA, 19 nt, Homo sapiens
  misc_RNA (1)...(19): siRNA sense strand
uggcuauacuaguggauuu

SEQ ID NO: 1050765 - RNA, 19 nt, Homo sapiens
  misc_RNA (1)...(19): siRNA sense strand
agaagaagucucacaaaca

SEQ ID NO: 1050766 - RNA, 19 nt, Homo sapiens
  misc_RNA (1)...(19): siRNA sense strand
ccaauuuacagugagcuua

SEQ ID NO: 1050767 - RNA, 19 nt, Homo sapiens
  misc_RNA (1)...(19): siRNA sense strand
gcaaguuuacagaagcaaa

SEQ ID NO: 1050768 - RNA, 19 nt, Homo sapiens
  misc_RNA (1)...(19): siRNA sense strand
ccuguugucugcucaguca

SEQ ID NO: 1050769 - RNA, 19 nt, Homo sapiens
  misc_RNA (1)...(19): siRNA sense strand
gcauucccuuggucaucua

SEQ ID NO: 1050770 - RNA, 19 nt, Homo sapiens
  misc_RNA (1)...(19): siRNA sense strand
uuaaagaccgaucacagaa

SEQ ID NO: 1050771 - RNA, 19 nt, Homo sapiens
  misc_RNA (1)...(19): siRNA sense strand
gggaaguucguaaucuuug

SEQ ID NO: 1050772 - RNA, 19 nt, Homo sapiens
  misc_RNA (1)...(19): siRNA sense strand
ugauuucaccgaaguagaa

SEQ ID NO: 1050773 - RNA, 19 nt, Homo sapiens
  misc_RNA (1)...(19): siRNA sense strand
cacggaucguucaucuuua

SEQ ID NO: 1050774 - RNA, 19 nt, Homo sapiens
  misc_RNA (1)...(19): siRNA sense strand
ccacacaucagcaaucucu

SEQ ID NO: 1050775 - RNA, 19 nt, Homo sapiens
  misc_RNA (1)...(19): siRNA sense strand
ccacagggaaguucguaau

SEQ ID NO: 1050776 - RNA, 19 nt, Homo sapiens
  misc_RNA (1)...(19): siRNA sense strand
agcaaucucucaccacuuc

SEQ ID NO: 1050777 - RNA, 19 nt, Homo sapiens
  misc_RNA (1)...(19): siRNA sense strand
ucugcuaacaugcuuauuu

SEQ ID NO: 1050778 - RNA, 19 nt, Homo sapiens
  misc_RNA (1)...(19): siRNA sense strand
guuuauuucugaucgugaa

SEQ ID NO: 1050779 - RNA, 19 nt, Homo sapiens
  misc_RNA (1)...(19): siRNA sense strand
ccauguuuguuauguacuu

SEQ ID NO: 1050780 - RNA, 19 nt, Homo sapiens
  misc_RNA (1)...(19): siRNA sense strand
gaaguucguaaucuuugga

SEQ ID NO: 1050781 - RNA, 19 nt, Homo sapiens
  misc_RNA (1)...(19): siRNA sense strand
agaagcaaacagaaaugua

SEQ ID NO: 1050782 - RNA, 19 nt, Homo sapiens
  misc_RNA (1)...(19): siRNA sense strand
acggaucguucaucuuuau

SEQ ID NO: 1050783 - RNA, 19 nt, Homo sapiens
  misc_RNA (1)...(19): siRNA sense strand
caaugacuccaaugauuuc

SEQ ID NO: 1050784 - RNA, 19 nt, Homo sapiens
  misc_RNA (1)...(19): siRNA sense strand
aaagaccgaucacagaaaa

SEQ ID NO: 1050785 - RNA, 19 nt, Homo sapiens
  misc_RNA (1)...(19): siRNA sense strand
agaagugugaugaguauau

SEQ ID NO: 1050786 - RNA, 19 nt, Homo sapiens
  misc_RNA (1)...(19): siRNA sense strand
gcauacucuugguuguuau

SEQ ID NO: 1050787 - RNA, 19 nt, Homo sapiens
  misc_RNA (1)...(19): siRNA sense strand
uaaccuaagcaacgccauu

SEQ ID NO: 1050788 - RNA, 19 nt, Homo sapiens
  misc_RNA (1)...(19): siRNA sense strand
aguagaaaauggucagaua

SEQ ID NO: 1050789 - RNA, 19 nt, Homo sapiens
  misc_RNA (1)...(19): siRNA sense strand
gcuacuugacauucuauga

SEQ ID NO: 1050790 - RNA, 19 nt, Homo sapiens
  misc_RNA (1)...(19): siRNA sense strand
cuuaaagaccgaucacaga

SEQ ID NO: 1050791 - RNA, 19 nt, Homo sapiens
  misc_RNA (1)...(19): siRNA sense strand
ucaauucaaagaccgugua

SEQ ID NO: 1050792 - RNA, 19 nt, Homo sapiens
  misc_RNA (1)...(19): siRNA sense strand
ggaaaggaagagacauuuu

SEQ ID NO: 1050793 - RNA, 19 nt, Homo sapiens
  misc_RNA (1)...(19): siRNA sense strand
agauaaaggaacucaaaga

SEQ ID NO: 1050794 - RNA, 19 nt, Homo sapiens
  misc_RNA (1)...(19): siRNA sense strand
gagauaaaggaacucaaag

SEQ ID NO: 1050795 - RNA, 19 nt, Homo sapiens
  misc_RNA (1)...(19): siRNA sense strand
uaccgugguuaccugcaua

SEQ ID NO: 1050796 - RNA, 19 nt, Homo sapiens
  misc_RNA (1)...(19): siRNA sense strand
ggauuuuccuugagcugua

SEQ ID NO: 1050797 - RNA, 19 nt, Homo sapiens
  misc_RNA (1)...(19): siRNA sense strand
gaugaguauauuccaggua

SEQ ID NO: 1050798 - RNA, 19 nt, Homo sapiens
  misc_RNA (1)...(19): siRNA sense strand
ggucagauaaauagcaagu

SEQ ID NO: 1050799 - RNA, 19 nt, Homo sapiens
  misc_RNA (1)...(19): siRNA sense strand
acagggaaguucguaaucu

SEQ ID NO: 1050800 - RNA, 19 nt, Homo sapiens
  misc_RNA (1)...(19): siRNA sense strand
cugcuaacaugcuuauuuu

SEQ ID NO: 1050801 - RNA, 19 nt, Homo sapiens
  misc_RNA (1)...(19): siRNA sense strand
ugagcuaccucuucaucgu

SEQ ID NO: 1050802 - RNA, 19 nt, Homo sapiens
  misc_RNA (1)...(19): siRNA sense strand
aaccuaagcaacgccauua

SEQ ID NO: 1050803 - RNA, 19 nt, Homo sapiens
  misc_RNA (1)...(19): siRNA sense strand
caauaagugcuaauucaac

SEQ ID NO: 1050804 - RNA, 19 nt, Homo sapiens
  misc_RNA (1)...(19): siRNA sense strand
auucuuccuucaucucuuu

SEQ ID NO: 1050805 - RNA, 19 nt, Homo sapiens
  misc_RNA (1)...(19): siRNA sense strand
aguccgaccuccuucacaa

SEQ ID NO: 1050806 - RNA, 19 nt, Homo sapiens
  misc_RNA (1)...(19): siRNA sense strand
gaagggaaauacaucauug

SEQ ID NO: 1050807 - RNA, 19 nt, Homo sapiens
  misc_RNA (1)...(19): siRNA sense strand
ggaaauaugagcaagcuuu

SEQ ID NO: 1050808 - RNA, 19 nt, Homo sapiens
  misc_RNA (1)...(19): siRNA sense strand
acacugggcuggaaauaug

SEQ ID NO: 1050809 - RNA, 19 nt, Homo sapiens
  misc_RNA (1)...(19): siRNA sense strand
caaacacgaugagcuuauu

SEQ ID NO: 1050810 - RNA, 19 nt, Homo sapiens
  misc_RNA (1)...(19): siRNA sense strand
gagccuaccuguuuaacuc

SEQ ID NO: 1050811 - RNA, 19 nt, Homo sapiens
  misc_RNA (1)...(19): siRNA sense strand
acgaugagcuuauuuccaa

SEQ ID NO: 1050812 - RNA, 19 nt, Homo sapiens
  misc_RNA (1)...(19): siRNA sense strand
ggaagggaaauacaucauu

SEQ ID NO: 1050813 - RNA, 19 nt, Homo sapiens
  misc_RNA (1)...(19): siRNA sense strand
ggccgagccuaccuguuua

SEQ ID NO: 1050814 - RNA, 19 nt, Homo sapiens
  misc_RNA (1)...(19): siRNA sense strand
ggacaacggcugggacuga

SEQ ID NO: 1050815 - RNA, 19 nt, Homo sapiens
  misc_RNA (1)...(19): siRNA sense strand
gugcacaccuggccaaaca

SEQ ID NO: 1050816 - RNA, 19 nt, Homo sapiens
  misc_RNA (1)...(19): siRNA sense strand
gaaguacaaggaagggaaa

SEQ ID NO: 1050817 - RNA, 19 nt, Homo sapiens
  misc_RNA (1)...(19): siRNA sense strand
gggaaauacaucauugaaa

SEQ ID NO: 1050818 - RNA, 19 nt, Homo sapiens
  misc_RNA (1)...(19): siRNA sense strand
uggccgagccuaccuguuu

SEQ ID NO: 1050819 - RNA, 19 nt, Homo sapiens
  misc_RNA (1)...(19): siRNA sense strand
aaaccacacugggcuggaa

SEQ ID NO: 1050820 - RNA, 19 nt, Homo sapiens
  misc_RNA (1)...(19): siRNA sense strand
ccaaacacgaugagcuuau

SEQ ID NO: 1050821 - RNA, 19 nt, Homo sapiens
  misc_RNA (1)...(19): siRNA sense strand
gaaauaugagcaagcuuuu

SEQ ID NO: 1050822 - RNA, 19 nt, Homo sapiens
  misc_RNA (1)...(19): siRNA sense strand
ccaagacuuuccgcagcua

SEQ ID NO: 1050823 - RNA, 19 nt, Homo sapiens
  misc_RNA (1)...(19): siRNA sense strand
caaggaagggaaauacauc

SEQ ID NO: 1050824 - RNA, 19 nt, Homo sapiens
  misc_RNA (1)...(19): siRNA sense strand
guacaaggaagggaaauac

SEQ ID NO: 1050825 - RNA, 19 nt, Homo sapiens
  misc_RNA (1)...(19): siRNA sense strand
gagacgagccagaaguaca

SEQ ID NO: 1050826 - RNA, 19 nt, Homo sapiens
  misc_RNA (1)...(19): siRNA sense strand
uagcugacauuuucuguga

SEQ ID NO: 1050827 - RNA, 19 nt, Homo sapiens
  misc_RNA (1)...(19): siRNA sense strand
ggccaaacacgaugagcuu

SEQ ID NO: 1050828 - RNA, 19 nt, Homo sapiens
  misc_RNA (1)...(19): siRNA sense strand
aaacacgaugagcuuauuu

SEQ ID NO: 1050829 - RNA, 19 nt, Homo sapiens
  misc_RNA (1)...(19): siRNA sense strand
ccacacugggcuggaaaua

SEQ ID NO: 1050830 - RNA, 19 nt, Homo sapiens
  misc_RNA (1)...(19): siRNA sense strand
gccaaacacgaugagcuua

SEQ ID NO: 1050831 - RNA, 19 nt, Homo sapiens
  misc_RNA (1)...(19): siRNA sense strand
agacgagccagaaguacaa

SEQ ID NO: 1050832 - RNA, 19 nt, Homo sapiens
  misc_RNA (1)...(19): siRNA sense strand
gagccagaaguacaaggaa

SEQ ID NO: 1050833 - RNA, 19 nt, Homo sapiens
  misc_RNA (1)...(19): siRNA sense strand
ccacucgguagcugacauu

SEQ ID NO: 1050834 - RNA, 19 nt, Homo sapiens
  misc_RNA (1)...(19): siRNA sense strand
acaaggaagggaaauacau

SEQ ID NO: 1050835 - RNA, 19 nt, Homo sapiens
  misc_RNA (1)...(19): siRNA sense strand
gaugagcuuauuuccaagu

SEQ ID NO: 1050836 - RNA, 19 nt, Homo sapiens
  misc_RNA (1)...(19): siRNA sense strand
gaaugaccuugaacaauga

SEQ ID NO: 1050837 - RNA, 19 nt, Homo sapiens
  misc_RNA (1)...(19): siRNA sense strand
ggacggaccucaucaacca

SEQ ID NO: 1050838 - RNA, 19 nt, Homo sapiens
  misc_RNA (1)...(19): siRNA sense strand
acuaugagcuggucaguuu

SEQ ID NO: 1050839 - RNA, 19 nt, Homo sapiens
  misc_RNA (1)...(19): siRNA sense strand
agaaugaccuugaacaaug

SEQ ID NO: 1050840 - RNA, 19 nt, Homo sapiens
  misc_RNA (1)...(19): siRNA sense strand
gacaugaaguaccacauuu

SEQ ID NO: 1050841 - RNA, 19 nt, Homo sapiens
  misc_RNA (1)...(19): siRNA sense strand
gcaacuggcuaccaucuuc

SEQ ID NO: 1050842 - RNA, 19 nt, Homo sapiens
  misc_RNA (1)...(19): siRNA sense strand
gaacagaauccauggagau

SEQ ID NO: 1050843 - RNA, 19 nt, Homo sapiens
  misc_RNA (1)...(19): siRNA sense strand
cuacaaauaugccaagauc

SEQ ID NO: 1050844 - RNA, 19 nt, Homo sapiens
  misc_RNA (1)...(19): siRNA sense strand
caggcuagauccacacuuu

SEQ ID NO: 1050845 - RNA, 19 nt, Homo sapiens
  misc_RNA (1)...(19): siRNA sense strand
agacacuaaugaccaauaa

SEQ ID NO: 1050846 - RNA, 19 nt, Homo sapiens
  misc_RNA (1)...(19): siRNA sense strand
gcucaaacccgaacacugu

SEQ ID NO: 1050847 - RNA, 19 nt, Homo sapiens
  misc_RNA (1)...(19): siRNA sense strand
gugaacaccuacaaauaug

SEQ ID NO: 1050848 - RNA, 19 nt, Homo sapiens
  misc_RNA (1)...(19): siRNA sense strand
auaaggagaugucagaugu

SEQ ID NO: 1050849 - RNA, 19 nt, Homo sapiens
  misc_RNA (1)...(19): siRNA sense strand
ggacuucagcuccaucaga

SEQ ID NO: 1050850 - RNA, 19 nt, Homo sapiens
  misc_RNA (1)...(19): siRNA sense strand
ucaagacacuaaugaccaa

SEQ ID NO: 1050851 - RNA, 19 nt, Homo sapiens
  misc_RNA (1)...(19): siRNA sense strand
gagaaugaccuugaacaau

SEQ ID NO: 1050852 - RNA, 19 nt, Homo sapiens
  misc_RNA (1)...(19): siRNA sense strand
gcacuggaccucacugaca

SEQ ID NO: 1050853 - RNA, 19 nt, Homo sapiens
  misc_RNA (1)...(19): siRNA sense strand
caauaaaucagaacaggau

SEQ ID NO: 1050854 - RNA, 19 nt, Homo sapiens
  misc_RNA (1)...(19): siRNA sense strand
cgacaugaaguaccacauu

SEQ ID NO: 1050855 - RNA, 19 nt, Homo sapiens
  misc_RNA (1)...(19): siRNA sense strand
cgugaacaccuacaaauau

SEQ ID NO: 1050856 - RNA, 19 nt, Homo sapiens
  misc_RNA (1)...(19): siRNA sense strand
gcaagaccaucgagaucag

SEQ ID NO: 1050857 - RNA, 19 nt, Homo sapiens
  misc_RNA (1)...(19): siRNA sense strand
guaugacgccacugaugua

SEQ ID NO: 1050858 - RNA, 19 nt, Homo sapiens
  misc_RNA (1)...(19): siRNA sense strand
gagaggaggaguacaacga

SEQ ID NO: 1050859 - RNA, 19 nt, Homo sapiens
  misc_RNA (1)...(19): siRNA sense strand
guacuacggaggaacagaa

SEQ ID NO: 1050860 - RNA, 19 nt, Homo sapiens
  misc_RNA (1)...(19): siRNA sense strand
caucucaucugcggcaaga

SEQ ID NO: 1050861 - RNA, 19 nt, Homo sapiens
  misc_RNA (1)...(19): siRNA sense strand
acaauaaggagaugucaga

SEQ ID NO: 1050862 - RNA, 19 nt, Homo sapiens
  misc_RNA (1)...(19): siRNA sense strand
ccuggaagcugcacaucug

SEQ ID NO: 1050863 - RNA, 19 nt, Homo sapiens
  misc_RNA (1)...(19): siRNA sense strand
gcagcaagaccaucgagau

SEQ ID NO: 1050864 - RNA, 19 nt, Homo sapiens
  misc_RNA (1)...(19): siRNA sense strand
aaggagaugucagauguga

SEQ ID NO: 1050865 - RNA, 19 nt, Homo sapiens
  misc_RNA (1)...(19): siRNA sense strand
ucagagaggaggaguacaa

SEQ ID NO: 1050866 - RNA, 19 nt, Homo sapiens
  misc_RNA (1)...(19): siRNA sense strand
ccacacgcucuacuacuuu

SEQ ID NO: 1050867 - RNA, 19 nt, Homo sapiens
  misc_RNA (1)...(19): siRNA sense strand
gcacaugaaggcccuacug

SEQ ID NO: 1050868 - RNA, 19 nt, Homo sapiens
  misc_RNA (1)...(19): siRNA sense strand
gaacaauaaggagauguca

SEQ ID NO: 1050869 - RNA, 19 nt, Homo sapiens
  misc_RNA (1)...(19): siRNA sense strand
gcuugcagcucauguucga

SEQ ID NO: 1050870 - RNA, 19 nt, Homo sapiens
  misc_RNA (1)...(19): siRNA sense strand
gguaugacgccacugaugu

SEQ ID NO: 1050871 - RNA, 19 nt, Homo sapiens
  misc_RNA (1)...(19): siRNA sense strand
cgagcgagccgaugccuau

SEQ ID NO: 1050872 - RNA, 19 nt, Homo sapiens
  misc_RNA (1)...(19): siRNA sense strand
ccgugaacaccuacaaaua

SEQ ID NO: 1050873 - RNA, 19 nt, Homo sapiens
  misc_RNA (1)...(19): siRNA sense strand
gaaggaaagcuguuuuaug

SEQ ID NO: 1050874 - RNA, 19 nt, Homo sapiens
  misc_RNA (1)...(19): siRNA sense strand
gaacugcuucagccacuca

SEQ ID NO: 1050875 - RNA, 19 nt, Homo sapiens
  misc_RNA (1)...(19): siRNA sense strand
gacauucgcugugcugcau

SEQ ID NO: 1050876 - RNA, 19 nt, Homo sapiens
  misc_RNA (1)...(19): siRNA sense strand
cgagaaugaccuugaacaa

SEQ ID NO: 1050877 - RNA, 19 nt, Homo sapiens
  misc_RNA (1)...(19): siRNA sense strand
ucucggagcugagugacuu

SEQ ID NO: 1050878 - RNA, 19 nt, Homo sapiens
  misc_RNA (1)...(19): siRNA sense strand
agagugccgugaacaccua

SEQ ID NO: 1050879 - RNA, 19 nt, Homo sapiens
  misc_RNA (1)...(19): siRNA sense strand
cgccacagcccaucacuug

SEQ ID NO: 1050880 - RNA, 19 nt, Homo sapiens
  misc_RNA (1)...(19): siRNA sense strand
caucuucacccacugcuau

SEQ ID NO: 1050881 - RNA, 19 nt, Homo sapiens
  misc_RNA (1)...(19): siRNA sense strand
ugccuggucuggacuguga

SEQ ID NO: 1050882 - RNA, 19 nt, Homo sapiens
  misc_RNA (1)...(19): siRNA sense strand
gagaucagcgacaugaagu

SEQ ID NO: 1050883 - RNA, 19 nt, Homo sapiens
  misc_RNA (1)...(19): siRNA sense strand
ggguuaacaccauggauga

SEQ ID NO: 1050884 - RNA, 19 nt, Homo sapiens
  misc_RNA (1)...(19): siRNA sense strand
gcauggagagugccgugaa

SEQ ID NO: 1050885 - RNA, 19 nt, Homo sapiens
  misc_RNA (1)...(19): siRNA sense strand
ugacagcuucuaacagguu

SEQ ID NO: 1050886 - RNA, 19 nt, Homo sapiens
  misc_RNA (1)...(19): siRNA sense strand
guccagaugcugauugaug

SEQ ID NO: 1050887 - RNA, 19 nt, Homo sapiens
  misc_RNA (1)...(19): siRNA sense strand
uccacacgcucuacuacuu

SEQ ID NO: 1050888 - RNA, 19 nt, Homo sapiens
  misc_RNA (1)...(19): siRNA sense strand
acgaagcgaugguccagau

SEQ ID NO: 1050889 - RNA, 19 nt, Homo sapiens
  misc_RNA (1)...(19): siRNA sense strand
aaggaaagcuguuuuaugc

SEQ ID NO: 1050890 - RNA, 19 nt, Homo sapiens
  misc_RNA (1)...(19): siRNA sense strand
acgaggacaugaacugcuu

SEQ ID NO: 1050891 - RNA, 19 nt, Homo sapiens
  misc_RNA (1)...(19): siRNA sense strand
ggaagcugcacaucuggau

SEQ ID NO: 1050892 - RNA, 19 nt, Homo sapiens
  misc_RNA (1)...(19): siRNA sense strand
gcacaucuggaucgagucu

SEQ ID NO: 1050893 - RNA, 19 nt, Homo sapiens
  misc_RNA (1)...(19): siRNA sense strand
gaugaugcaguaucuguac

SEQ ID NO: 1050894 - RNA, 19 nt, Homo sapiens
  misc_RNA (1)...(19): siRNA sense strand
gaaccucggcagcucaaac

SEQ ID NO: 1050895 - RNA, 19 nt, Homo sapiens
  misc_RNA (1)...(19): siRNA sense strand
acaaauaugccaagaucca

SEQ ID NO: 1050896 - RNA, 19 nt, Homo sapiens
  misc_RNA (1)...(19): siRNA sense strand
ucagcgacaugaaguacca

SEQ ID NO: 1050897 - RNA, 19 nt, Homo sapiens
  misc_RNA (1)...(19): siRNA sense strand
cagcaagaccaucgagauc

SEQ ID NO: 1050898 - RNA, 19 nt, Homo sapiens
  misc_RNA (1)...(19): siRNA sense strand
gcaucucggagcugaguga

SEQ ID NO: 1050899 - RNA, 19 nt, Homo sapiens
  misc_RNA (1)...(19): siRNA sense strand
gaacuaugagcuggucagu

SEQ ID NO: 1050900 - RNA, 19 nt, Homo sapiens
  misc_RNA (1)...(19): siRNA sense strand
gaucagcgacaugaaguac

SEQ ID NO: 1050901 - RNA, 19 nt, Homo sapiens
  misc_RNA (1)...(19): siRNA sense strand
gguggaaggaaagcuguuu

SEQ ID NO: 1050902 - RNA, 19 nt, Homo sapiens
  misc_RNA (1)...(19): siRNA sense strand
ccacagcccaucacuuggu

SEQ ID NO: 1050903 - RNA, 19 nt, Homo sapiens
  misc_RNA (1)...(19): siRNA sense strand
gccgugaacaccuacaaau

SEQ ID NO: 1050904 - RNA, 19 nt, Homo sapiens
  misc_RNA (1)...(19): siRNA sense strand
uucagaugaugaugcagua

SEQ ID NO: 1050905 - RNA, 19 nt, Homo sapiens
  misc_RNA (1)...(19): siRNA sense strand
cgagaucagcgacaugaag

SEQ ID NO: 1050906 - RNA, 19 nt, Homo sapiens
  misc_RNA (1)...(19): siRNA sense strand
uaacagguucaagacacua

SEQ ID NO: 1050907 - RNA, 19 nt, Homo sapiens
  misc_RNA (1)...(19): siRNA sense strand
caggguaugacgccacuga

SEQ ID NO: 1050908 - RNA, 19 nt, Homo sapiens
  misc_RNA (1)...(19): siRNA sense strand
gcuucuaacagguucaaga

SEQ ID NO: 1050909 - RNA, 19 nt, Homo sapiens
  misc_RNA (1)...(19): siRNA sense strand
ggguaugacgccacugaug

SEQ ID NO: 1050910 - RNA, 19 nt, Homo sapiens
  misc_RNA (1)...(19): siRNA sense strand
cgugcacucugucuacauc

SEQ ID NO: 1050911 - RNA, 19 nt, Homo sapiens
  misc_RNA (1)...(19): siRNA sense strand
aacuggcccuguucuguga

SEQ ID NO: 1050912 - RNA, 19 nt, Homo sapiens
  misc_RNA (1)...(19): siRNA sense strand
ugaugaugcaguaucugua

SEQ ID NO: 1050913 - RNA, 19 nt, Homo sapiens
  misc_RNA (1)...(19): siRNA sense strand
aagacacuaaugaccaaua

SEQ ID NO: 1050914 - RNA, 19 nt, Homo sapiens
  misc_RNA (1)...(19): siRNA sense strand
gggcuugcagcucauguuc

SEQ ID NO: 1050915 - RNA, 19 nt, Homo sapiens
  misc_RNA (1)...(19): siRNA sense strand
cacacgcucuacuacuuuc

SEQ ID NO: 1050916 - RNA, 19 nt, Homo sapiens
  misc_RNA (1)...(19): siRNA sense strand
gacacuaaugaccaauaaa

SEQ ID NO: 1050917 - RNA, 19 nt, Homo sapiens
  misc_RNA (1)...(19): siRNA sense strand
ggaauuagcugaacaacuu

SEQ ID NO: 1050918 - RNA, 19 nt, Homo sapiens
  misc_RNA (1)...(19): siRNA sense strand
gguagaagaugguggauua

SEQ ID NO: 1050919 - RNA, 19 nt, Homo sapiens
  misc_RNA (1)...(19): siRNA sense strand
caaauucccucauuacuuu

SEQ ID NO: 1050920 - RNA, 19 nt, Homo sapiens
  misc_RNA (1)...(19): siRNA sense strand
gaacagugaagaaagauua

SEQ ID NO: 1050921 - RNA, 19 nt, Homo sapiens
  misc_RNA (1)...(19): siRNA sense strand
gaaagucucuggaaucaca

SEQ ID NO: 1050922 - RNA, 19 nt, Homo sapiens
  misc_RNA (1)...(19): siRNA sense strand
ggauuaagcuggcuaagga

SEQ ID NO: 1050923 - RNA, 19 nt, Homo sapiens
  misc_RNA (1)...(19): siRNA sense strand
gcucagggcucuuugugua

SEQ ID NO: 1050924 - RNA, 19 nt, Homo sapiens
  misc_RNA (1)...(19): siRNA sense strand
ggaacaagcugagaaacaa

SEQ ID NO: 1050925 - RNA, 19 nt, Homo sapiens
  misc_RNA (1)...(19): siRNA sense strand
caauagguguuaagguuua

SEQ ID NO: 1050926 - RNA, 19 nt, Homo sapiens
  misc_RNA (1)...(19): siRNA sense strand
gagaauggcaucuaaguuu

SEQ ID NO: 1050927 - RNA, 19 nt, Homo sapiens
  misc_RNA (1)...(19): siRNA sense strand
gaagaacugucauuucaca

SEQ ID NO: 1050928 - RNA, 19 nt, Homo sapiens
  misc_RNA (1)...(19): siRNA sense strand
caagaacagugaagaaaga

SEQ ID NO: 1050929 - RNA, 19 nt, Homo sapiens
  misc_RNA (1)...(19): siRNA sense strand
ggaagaguauggccuguga

SEQ ID NO: 1050930 - RNA, 19 nt, Homo sapiens
  misc_RNA (1)...(19): siRNA sense strand
ugauagaucucucuucaaa

SEQ ID NO: 1050931 - RNA, 19 nt, Homo sapiens
  misc_RNA (1)...(19): siRNA sense strand
gguaacaguucaagggaua

SEQ ID NO: 1050932 - RNA, 19 nt, Homo sapiens
  misc_RNA (1)...(19): siRNA sense strand
gaaacaguaucacaugguu

SEQ ID NO: 1050933 - RNA, 19 nt, Homo sapiens
  misc_RNA (1)...(19): siRNA sense strand
gaugaagucuugagagaug

SEQ ID NO: 1050934 - RNA, 19 nt, Homo sapiens
  misc_RNA (1)...(19): siRNA sense strand
ggaggaaacccacauauuc

SEQ ID NO: 1050935 - RNA, 19 nt, Homo sapiens
  misc_RNA (1)...(19): siRNA sense strand
caaagcagcugagagagaa

SEQ ID NO: 1050936 - RNA, 19 nt, Homo sapiens
  misc_RNA (1)...(19): siRNA sense strand
aaacagauggagacuauua

SEQ ID NO: 1050937 - RNA, 19 nt, Homo sapiens
  misc_RNA (1)...(19): siRNA sense strand
ggauagauaugcuacaaca

SEQ ID NO: 1050938 - RNA, 19 nt, Homo sapiens
  misc_RNA (1)...(19): siRNA sense strand
gaugaagagugguccauga

SEQ ID NO: 1050939 - RNA, 19 nt, Homo sapiens
  misc_RNA (1)...(19): siRNA sense strand
agaauggcaucuaaguuua

SEQ ID NO: 1050940 - RNA, 19 nt, Homo sapiens
  misc_RNA (1)...(19): siRNA sense strand
gggaggagauccagauguu

SEQ ID NO: 1050941 - RNA, 19 nt, Homo sapiens
  misc_RNA (1)...(19): siRNA sense strand
gaagagugguccaugaaca

SEQ ID NO: 1050942 - RNA, 19 nt, Homo sapiens
  misc_RNA (1)...(19): siRNA sense strand
gaagaaacaguaucacaug

SEQ ID NO: 1050943 - RNA, 19 nt, Homo sapiens
  misc_RNA (1)...(19): siRNA sense strand
gaaguaauccuugucagaa

SEQ ID NO: 1050944 - RNA, 19 nt, Homo sapiens
  misc_RNA (1)...(19): siRNA sense strand
caucuaaguuuaugggaaa

SEQ ID NO: 1050945 - RNA, 19 nt, Homo sapiens
  misc_RNA (1)...(19): siRNA sense strand
gagaaagggucagauacuu

SEQ ID NO: 1050946 - RNA, 19 nt, Homo sapiens
  misc_RNA (1)...(19): siRNA sense strand
gaaaauagagcaagagaaa

SEQ ID NO: 1050947 - RNA, 19 nt, Homo sapiens
  misc_RNA (1)...(19): siRNA sense strand
gagagaacgucuuggugaa

SEQ ID NO: 1050948 - RNA, 19 nt, Homo sapiens
  misc_RNA (1)...(19): siRNA sense strand
gaacacacccggaaagucu

SEQ ID NO: 1050949 - RNA, 19 nt, Homo sapiens
  misc_RNA (1)...(19): siRNA sense strand
gauauagaaccaagacuuu

SEQ ID NO: 1050950 - RNA, 19 nt, Homo sapiens
  misc_RNA (1)...(19): siRNA sense strand
gaaggaacaagcugagaaa

SEQ ID NO: 1050951 - RNA, 19 nt, Homo sapiens
  misc_RNA (1)...(19): siRNA sense strand
cagcacaaauucccucauu

SEQ ID NO: 1050952 - RNA, 19 nt, Homo sapiens
  misc_RNA (1)...(19): siRNA sense strand
ucaagaaaguagagaauca

SEQ ID NO: 1050953 - RNA, 19 nt, Homo sapiens
  misc_RNA (1)...(19): siRNA sense strand
cgaaagauaugggucaaug

SEQ ID NO: 1050954 - RNA, 19 nt, Homo sapiens
  misc_RNA (1)...(19): siRNA sense strand
ggaaaccaguacugaugaa

SEQ ID NO: 1050955 - RNA, 19 nt, Homo sapiens
  misc_RNA (1)...(19): siRNA sense strand
gagaaagcuuugaggauca

SEQ ID NO: 1050956 - RNA, 19 nt, Homo sapiens
  misc_RNA (1)...(19): siRNA sense strand
uguagugugucaucgauua

SEQ ID NO: 1050957 - RNA, 19 nt, Homo sapiens
  misc_RNA (1)...(19): siRNA sense strand
gaugauaaucuaagccuaa

SEQ ID NO: 1050958 - RNA, 19 nt, Homo sapiens
  misc_RNA (1)...(19): siRNA sense strand
uagagcagcuacuuuguug

SEQ ID NO: 1050959 - RNA, 19 nt, Homo sapiens
  misc_RNA (1)...(19): siRNA sense strand
guugauagaucucucuuca

SEQ ID NO: 1050960 - RNA, 19 nt, Homo sapiens
  misc_RNA (1)...(19): siRNA sense strand
gaaacuaauaugagcauga

SEQ ID NO: 1050961 - RNA, 19 nt, Homo sapiens
  misc_RNA (1)...(19): siRNA sense strand
uagagaaucagacuuagua

SEQ ID NO: 1050962 - RNA, 19 nt, Homo sapiens
  misc_RNA (1)...(19): siRNA sense strand
aaacccacauauucagaua

SEQ ID NO: 1050963 - RNA, 19 nt, Homo sapiens
  misc_RNA (1)...(19): siRNA sense strand
gcaauagguguuaagguuu

SEQ ID NO: 1050964 - RNA, 19 nt, Homo sapiens
  misc_RNA (1)...(19): siRNA sense strand
aaagagaaagggucagaua

SEQ ID NO: 1050965 - RNA, 19 nt, Homo sapiens
  misc_RNA (1)...(19): siRNA sense strand
gaaugaagaccagcaagaa

SEQ ID NO: 1050966 - RNA, 19 nt, Homo sapiens
  misc_RNA (1)...(19): siRNA sense strand
gaacaucuacgggauacaa

SEQ ID NO: 1050967 - RNA, 19 nt, Homo sapiens
  misc_RNA (1)...(19): siRNA sense strand
gaaucuaacccaaggcaaa

SEQ ID NO: 1050968 - RNA, 19 nt, Homo sapiens
  misc_RNA (1)...(19): siRNA sense strand
uuugagagcuaaauucuug

SEQ ID NO: 1050969 - RNA, 19 nt, Homo sapiens
  misc_RNA (1)...(19): siRNA sense strand
ggaagagaaccaaaggaaa

SEQ ID NO: 1050970 - RNA, 19 nt, Homo sapiens
  misc_RNA (1)...(19): siRNA sense strand
gauaaucuaagccuaaaug

SEQ ID NO: 1050971 - RNA, 19 nt, Homo sapiens
  misc_RNA (1)...(19): siRNA sense strand
ggaagaagaaagagacaga

SEQ ID NO: 1050972 - RNA, 19 nt, Homo sapiens
  misc_RNA (1)...(19): siRNA sense strand
gagccaagauuaucaaagc

SEQ ID NO: 1050973 - RNA, 19 nt, Homo sapiens
  misc_RNA (1)...(19): siRNA sense strand
ggauacaaagucuacauuu

SEQ ID NO: 1050974 - RNA, 19 nt, Homo sapiens
  misc_RNA (1)...(19): siRNA sense strand
ccagaagacccaagagaaa

SEQ ID NO: 1050975 - RNA, 19 nt, Homo sapiens
  misc_RNA (1)...(19): siRNA sense strand
ccaaacugauggaaagaga

SEQ ID NO: 1050976 - RNA, 19 nt, Homo sapiens
  misc_RNA (1)...(19): siRNA sense strand
gaacaagcugagaaacaaa

SEQ ID NO: 1050977 - RNA, 19 nt, Homo sapiens
  misc_RNA (1)...(19): siRNA sense strand
ugcaauagguguuaagguu

SEQ ID NO: 1050978 - RNA, 19 nt, Homo sapiens
  misc_RNA (1)...(19): siRNA sense strand
gaagagaaccaaaggaaaa

SEQ ID NO: 1050979 - RNA, 19 nt, Homo sapiens
  misc_RNA (1)...(19): siRNA sense strand
agaaagagacagaugguuu

SEQ ID NO: 1050980 - RNA, 19 nt, Homo sapiens
  misc_RNA (1)...(19): siRNA sense strand
gaggaaacccacauauuca

SEQ ID NO: 1050981 - RNA, 19 nt, Homo sapiens
  misc_RNA (1)...(19): siRNA sense strand
ugucaucgauuacuaaagu

SEQ ID NO: 1050982 - RNA, 19 nt, Homo sapiens
  misc_RNA (1)...(19): siRNA sense strand
gcacaaauucccucauuac

SEQ ID NO: 1050983 - RNA, 19 nt, Homo sapiens
  misc_RNA (1)...(19): siRNA sense strand
gaauauggaauuagcugaa

SEQ ID NO: 1050984 - RNA, 19 nt, Homo sapiens
  misc_RNA (1)...(19): siRNA sense strand
gagacccucugaugaugaa

SEQ ID NO: 1050985 - RNA, 19 nt, Homo sapiens
  misc_RNA (1)...(19): siRNA sense strand
ggaaaggcauccgagaaag

SEQ ID NO: 1050986 - RNA, 19 nt, Homo sapiens
  misc_RNA (1)...(19): siRNA sense strand
gaagauaaaggauuagacu

SEQ ID NO: 1050987 - RNA, 19 nt, Homo sapiens
  misc_RNA (1)...(19): siRNA sense strand
aacaagcucuuuaugagaa

SEQ ID NO: 1050988 - RNA, 19 nt, Homo sapiens
  misc_RNA (1)...(19): siRNA sense strand
gaacaagaaguugauagau

SEQ ID NO: 1050989 - RNA, 19 nt, Homo sapiens
  misc_RNA (1)...(19): siRNA sense strand
ggauauagaaccaagacuu

SEQ ID NO: 1050990 - RNA, 19 nt, Homo sapiens
  misc_RNA (1)...(19): siRNA sense strand
guagaaacuuugaggacau

SEQ ID NO: 1050991 - RNA, 19 nt, Homo sapiens
  misc_RNA (1)...(19): siRNA sense strand
aaaggaaacuaugaggaaa

SEQ ID NO: 1050992 - RNA, 19 nt, Homo sapiens
  misc_RNA (1)...(19): siRNA sense strand
acaagaaguugauagaucu

SEQ ID NO: 1050993 - RNA, 19 nt, Homo sapiens
  misc_RNA (1)...(19): siRNA sense strand
ugguaaagauguuugaaga

SEQ ID NO: 1050994 - RNA, 19 nt, Homo sapiens
  misc_RNA (1)...(19): siRNA sense strand
gaaacuauaacacagauac

SEQ ID NO: 1050995 - RNA, 19 nt, Homo sapiens
  misc_RNA (1)...(19): siRNA sense strand
gagaaucagacuuaguaaa

SEQ ID NO: 1050996 - RNA, 19 nt, Homo sapiens
  misc_RNA (1)...(19): siRNA sense strand
uacuaaaguuucaguggua

SEQ ID NO: 1050997 - RNA, 19 nt, Homo sapiens
  misc_RNA (1)...(19): siRNA sense strand
gaggaaaggcauccgagaa

SEQ ID NO: 1050998 - RNA, 19 nt, Homo sapiens
  misc_RNA (1)...(19): siRNA sense strand
caauuucccaagcaucuua

SEQ ID NO: 1050999 - RNA, 19 nt, Homo sapiens
  misc_RNA (1)...(19): siRNA sense strand
ucacaaggaggaagaagaa

SEQ ID NO: 1051000 - RNA, 19 nt, Homo sapiens
  misc_RNA (1)...(19): siRNA sense strand
agauaugggucaauggaaa

SEQ ID NO: 1051001 - RNA, 19 nt, Homo sapiens
  misc_RNA (1)...(19): siRNA sense strand
cauuguagccgaaagauau

SEQ ID NO: 1051002 - RNA, 19 nt, Homo sapiens
  misc_RNA (1)...(19): siRNA sense strand
aguaucacaugguuuauga

SEQ ID NO: 1051003 - RNA, 19 nt, Homo sapiens
  misc_RNA (1)...(19): siRNA sense strand
cagcuacuuuguuggauga

SEQ ID NO: 1051004 - RNA, 19 nt, Homo sapiens
  misc_RNA (1)...(19): siRNA sense strand
ccauagagcagcuacuuug

SEQ ID NO: 1051005 - RNA, 19 nt, Homo sapiens
  misc_RNA (1)...(19): siRNA sense strand
cacccuggaugacauguuu

SEQ ID NO: 1051006 - RNA, 19 nt, Homo sapiens
  misc_RNA (1)...(19): siRNA sense strand
cggaaagucucuggaauca

SEQ ID NO: 1051007 - RNA, 19 nt, Homo sapiens
  misc_RNA (1)...(19): siRNA sense strand
gaauuagcugaacaacuua

SEQ ID NO: 1051008 - RNA, 19 nt, Homo sapiens
  misc_RNA (1)...(19): siRNA sense strand
gacaagaaacauucaaauc

SEQ ID NO: 1051009 - RNA, 19 nt, Homo sapiens
  misc_RNA (1)...(19): siRNA sense strand
gagacaagaaacauucaaa

SEQ ID NO: 1051010 - RNA, 19 nt, Homo sapiens
  misc_RNA (1)...(19): siRNA sense strand
gaaaguagagaaucagacu

SEQ ID NO: 1051011 - RNA, 19 nt, Homo sapiens
  misc_RNA (1)...(19): siRNA sense strand
acaccaacauguuccagaa

SEQ ID NO: 1051012 - RNA, 19 nt, Homo sapiens
  misc_RNA (1)...(19): siRNA sense strand
gagucuugcugcacaaaug

SEQ ID NO: 1051013 - RNA, 19 nt, Homo sapiens
  misc_RNA (1)...(19): siRNA sense strand
ggucagauacuuucaugau

SEQ ID NO: 1051014 - RNA, 19 nt, Homo sapiens
  misc_RNA (1)...(19): siRNA sense strand
ggaaagagaaagggucaga

SEQ ID NO: 1051015 - RNA, 19 nt, Homo sapiens
  misc_RNA (1)...(19): siRNA sense strand
gaagaaagagacagauggu

SEQ ID NO: 1051016 - RNA, 19 nt, Homo sapiens
  misc_RNA (1)...(19): siRNA sense strand
caaggaggaagaagaaaga

SEQ ID NO: 1051017 - RNA, 19 nt, Homo sapiens
  misc_RNA (1)...(19): siRNA sense strand
gaagaugacuggauggaaa

SEQ ID NO: 1051018 - RNA, 19 nt, Homo sapiens
  misc_RNA (1)...(19): siRNA sense strand
gaacugccauuaucccaua

SEQ ID NO: 1051019 - RNA, 19 nt, Homo sapiens
  misc_RNA (1)...(19): siRNA sense strand
gagagguggugaaacauua

SEQ ID NO: 1051020 - RNA, 19 nt, Homo sapiens
  misc_RNA (1)...(19): siRNA sense strand
ggacauggcagcccaaauu

SEQ ID NO: 1051021 - RNA, 19 nt, Homo sapiens
  misc_RNA (1)...(19): siRNA sense strand
ggacaacgguggcuucuac

SEQ ID NO: 1051022 - RNA, 19 nt, Homo sapiens
  misc_RNA (1)...(19): siRNA sense strand
caucaucacugaauacaug

SEQ ID NO: 1051023 - RNA, 19 nt, Homo sapiens
  misc_RNA (1)...(19): siRNA sense strand
gggccaaguuucccauuaa

SEQ ID NO: 1051024 - RNA, 19 nt, Homo sapiens
  misc_RNA (1)...(19): siRNA sense strand
gcacgcugcucauccgaaa

SEQ ID NO: 1051025 - RNA, 19 nt, Homo sapiens
  misc_RNA (1)...(19): siRNA sense strand
cgacggagaucugggcuuu

SEQ ID NO: 1051026 - RNA, 19 nt, Homo sapiens
  misc_RNA (1)...(19): siRNA sense strand
ggugaaacauuacaagauc

SEQ ID NO: 1051027 - RNA, 19 nt, Homo sapiens
  misc_RNA (1)...(19): siRNA sense strand
gaacugguccgccauuaca

SEQ ID NO: 1051028 - RNA, 19 nt, Homo sapiens
  misc_RNA (1)...(19): siRNA sense strand
gcagugugcuggaggacuu

SEQ ID NO: 1051029 - RNA, 19 nt, Homo sapiens
  misc_RNA (1)...(19): siRNA sense strand
gcucacacccggaagauga

SEQ ID NO: 1051030 - RNA, 19 nt, Homo sapiens
  misc_RNA (1)...(19): siRNA sense strand
cagaggagcuguaccaacu

SEQ ID NO: 1051031 - RNA, 19 nt, Homo sapiens
  misc_RNA (1)...(19): siRNA sense strand
ccaacauucuggugucuga

SEQ ID NO: 1051032 - RNA, 19 nt, Homo sapiens
  misc_RNA (1)...(19): siRNA sense strand
gagcccaucuacaucauca

SEQ ID NO: 1051033 - RNA, 19 nt, Homo sapiens
  misc_RNA (1)...(19): siRNA sense strand
gaaggcauggcauucauug

SEQ ID NO: 1051034 - RNA, 19 nt, Homo sapiens
  misc_RNA (1)...(19): siRNA sense strand
gaaugggagucuaguggau

SEQ ID NO: 1051035 - RNA, 19 nt, Homo sapiens
  misc_RNA (1)...(19): siRNA sense strand
ggagagguggugaaacauu

SEQ ID NO: 1051036 - RNA, 19 nt, Homo sapiens
  misc_RNA (1)...(19): siRNA sense strand
acacgaagguggcggugaa

SEQ ID NO: 1051037 - RNA, 19 nt, Homo sapiens
  misc_RNA (1)...(19): siRNA sense strand
ccaucuacaucaucacuga

SEQ ID NO: 1051038 - RNA, 19 nt, Homo sapiens
  misc_RNA (1)...(19): siRNA sense strand
acccugagcugcaagauug

SEQ ID NO: 1051039 - RNA, 19 nt, Homo sapiens
  misc_RNA (1)...(19): siRNA sense strand
uugaagagcggaauuauau

SEQ ID NO: 1051040 - RNA, 19 nt, Homo sapiens
  misc_RNA (1)...(19): siRNA sense strand
ugugagaacugccauuauc

SEQ ID NO: 1051041 - RNA, 19 nt, Homo sapiens
  misc_RNA (1)...(19): siRNA sense strand
gaggagcuguaccaacuca

SEQ ID NO: 1051042 - RNA, 19 nt, Homo sapiens
  misc_RNA (1)...(19): siRNA sense strand
ucaacaaacuccuggacau

SEQ ID NO: 1051043 - RNA, 19 nt, Homo sapiens
  misc_RNA (1)...(19): siRNA sense strand
cugaauacauggagaaugg

SEQ ID NO: 1051044 - RNA, 19 nt, Homo sapiens
  misc_RNA (1)...(19): siRNA sense strand
agucagauguguggucuuu

SEQ ID NO: 1051045 - RNA, 19 nt, Homo sapiens
  misc_RNA (1)...(19): siRNA sense strand
gcagaaggcauggcauuca

SEQ ID NO: 1051046 - RNA, 19 nt, Homo sapiens
  misc_RNA (1)...(19): siRNA sense strand
gugcgggacccacugguua

SEQ ID NO: 1051047 - RNA, 19 nt, Homo sapiens
  misc_RNA (1)...(19): siRNA sense strand
gggacccacugguuaccua

SEQ ID NO: 1051048 - RNA, 19 nt, Homo sapiens
  misc_RNA (1)...(19): siRNA sense strand
guaccagccucagccuuga

SEQ ID NO: 1051049 - RNA, 19 nt, Homo sapiens
  misc_RNA (1)...(19): siRNA sense strand
ggagaucugggcuuugaga

SEQ ID NO: 1051050 - RNA, 19 nt, Homo sapiens
  misc_RNA (1)...(19): siRNA sense strand
ggacauucaccaucaaguc

SEQ ID NO: 1051051 - RNA, 19 nt, Homo sapiens
  misc_RNA (1)...(19): siRNA sense strand
caacaaacuccuggacaug

SEQ ID NO: 1051052 - RNA, 19 nt, Homo sapiens
  misc_RNA (1)...(19): siRNA sense strand
agggagagguggugaaaca

SEQ ID NO: 1051053 - RNA, 19 nt, Homo sapiens
  misc_RNA (1)...(19): siRNA sense strand
gagcuguaccaacucauga

SEQ ID NO: 1051054 - RNA, 19 nt, Homo sapiens
  misc_RNA (1)...(19): siRNA sense strand
ccaaguuucccauuaagug

SEQ ID NO: 1051055 - RNA, 19 nt, Homo sapiens
  misc_RNA (1)...(19): siRNA sense strand
cgccagaagccauuaacua

SEQ ID NO: 1051056 - RNA, 19 nt, Homo sapiens
  misc_RNA (1)...(19): siRNA sense strand
acggagaucugggcuuuga

SEQ ID NO: 1051057 - RNA, 19 nt, Homo sapiens
  misc_RNA (1)...(19): siRNA sense strand
ucauugaggacaacgagua

SEQ ID NO: 1051058 - RNA, 19 nt, Homo sapiens
  misc_RNA (1)...(19): siRNA sense strand
cagaaggcauggcauucau

SEQ ID NO: 1051059 - RNA, 19 nt, Homo sapiens
  misc_RNA (1)...(19): siRNA sense strand
ggaagaugacuggauggaa

SEQ ID NO: 1051060 - RNA, 19 nt, Homo sapiens
  misc_RNA (1)...(19): siRNA sense strand
ucuacaucaucacugaaua

SEQ ID NO: 1051061 - RNA, 19 nt, Homo sapiens
  misc_RNA (1)...(19): siRNA sense strand
ucaugaggcugugcuggaa

SEQ ID NO: 1051062 - RNA, 19 nt, Homo sapiens
  misc_RNA (1)...(19): siRNA sense strand
gacauucaccaucaaguca

SEQ ID NO: 1051063 - RNA, 19 nt, Homo sapiens
  misc_RNA (1)...(19): siRNA sense strand
ucauugaagagcggaauua

SEQ ID NO: 1051064 - RNA, 19 nt, Homo sapiens
  misc_RNA (1)...(19): siRNA sense strand
gacauggcagcccaaauug

SEQ ID NO: 1051065 - RNA, 19 nt, Homo sapiens
  misc_RNA (1)...(19): siRNA sense strand
ggugcgcccugacaacugu

SEQ ID NO: 1051066 - RNA, 19 nt, Homo sapiens
  misc_RNA (1)...(19): siRNA sense strand
gccagaagccauuaacuac

SEQ ID NO: 1051067 - RNA, 19 nt, Homo sapiens
  misc_RNA (1)...(19): siRNA sense strand
caacgguggcuucuacauc

SEQ ID NO: 1051068 - RNA, 19 nt, Homo sapiens
  misc_RNA (1)...(19): siRNA sense strand
ccacagagggccaguacca

SEQ ID NO: 1051069 - RNA, 19 nt, Homo sapiens
  misc_RNA (1)...(19): siRNA sense strand
acccggaggugauucagaa

SEQ ID NO: 1051070 - RNA, 19 nt, Homo sapiens
  misc_RNA (1)...(19): siRNA sense strand
uuacaccaaugcuucagau

SEQ ID NO: 1051071 - RNA, 19 nt, Homo sapiens
  misc_RNA (1)...(19): siRNA sense strand
ggccaaguuucccauuaag

SEQ ID NO: 1051072 - RNA, 19 nt, Homo sapiens
  misc_RNA (1)...(19): siRNA sense strand
ggagcuguaccaacucaug

SEQ ID NO: 1051073 - RNA, 19 nt, Homo sapiens
  misc_RNA (1)...(19): siRNA sense strand
gguccgccauuacaccaau

SEQ ID NO: 1051074 - RNA, 19 nt, Homo sapiens
  misc_RNA (1)...(19): siRNA sense strand
uacgggacauucaccauca

SEQ ID NO: 1051075 - RNA, 19 nt, Homo sapiens
  misc_RNA (1)...(19): siRNA sense strand
ccuucgggcugccaacauu

SEQ ID NO: 1051076 - RNA, 19 nt, Homo sapiens
  misc_RNA (1)...(19): siRNA sense strand
ucacugaauacauggagaa

SEQ ID NO: 1051077 - RNA, 19 nt, Homo sapiens
  misc_RNA (1)...(19): siRNA sense strand
gaccaacccggaggugauu

SEQ ID NO: 1051078 - RNA, 19 nt, Homo sapiens
  misc_RNA (1)...(19): siRNA sense strand
ucacggcuccuuccucauc

SEQ ID NO: 1051079 - RNA, 19 nt, Homo sapiens
  misc_RNA (1)...(19): siRNA sense strand
gcagcucacacccggaaga

SEQ ID NO: 1051080 - RNA, 19 nt, Homo sapiens
  misc_RNA (1)...(19): siRNA sense strand
ucagauguguggucuuuug

SEQ ID NO: 1051081 - RNA, 19 nt, Homo sapiens
  misc_RNA (1)...(19): siRNA sense strand
ggagaaugggagucuagug

SEQ ID NO: 1051082 - RNA, 19 nt, Homo sapiens
  misc_RNA (1)...(19): siRNA sense strand
ccagggagagguggugaaa

SEQ ID NO: 1051083 - RNA, 19 nt, Homo sapiens
  misc_RNA (1)...(19): siRNA sense strand
ugugugagaacugccauua

SEQ ID NO: 1051084 - RNA, 19 nt, Homo sapiens
  misc_RNA (1)...(19): siRNA sense strand
ugaagagcggaauuauauu

SEQ ID NO: 1051085 - RNA, 19 nt, Homo sapiens
  misc_RNA (1)...(19): siRNA sense strand
ggggccaaguuucccauua

SEQ ID NO: 1051086 - RNA, 19 nt, Homo sapiens
  misc_RNA (1)...(19): siRNA sense strand
gggcugugcacacgguuga

SEQ ID NO: 1051087 - RNA, 19 nt, Homo sapiens
  misc_RNA (1)...(19): siRNA sense strand
uuaucgcucugcacagcua

SEQ ID NO: 1051088 - RNA, 19 nt, Homo sapiens
  misc_RNA (1)...(19): siRNA sense strand
caggagcccaucuacauca

SEQ ID NO: 1051089 - RNA, 19 nt, Homo sapiens
  misc_RNA (1)...(19): siRNA sense strand
ucaugaagcagcugcaaca

SEQ ID NO: 1051090 - RNA, 19 nt, Homo sapiens
  misc_RNA (1)...(19): siRNA sense strand
aggccaaccucaugaagca

SEQ ID NO: 1051091 - RNA, 19 nt, Homo sapiens
  misc_RNA (1)...(19): siRNA sense strand
aacgguggcuucuacaucu

SEQ ID NO: 1051092 - RNA, 19 nt, Homo sapiens
  misc_RNA (1)...(19): siRNA sense strand
gccauuaacuacgggacau

SEQ ID NO: 1051093 - RNA, 19 nt, Homo sapiens
  misc_RNA (1)...(19): siRNA sense strand
uggccuagcacgccucauu

SEQ ID NO: 1051094 - RNA, 19 nt, Homo sapiens
  misc_RNA (1)...(19): siRNA sense strand
augggagucuaguggauuu

SEQ ID NO: 1051095 - RNA, 19 nt, Homo sapiens
  misc_RNA (1)...(19): siRNA sense strand
guggugaaacauuacaaga

SEQ ID NO: 1051096 - RNA, 19 nt, Homo sapiens
  misc_RNA (1)...(19): siRNA sense strand
gagaucugggcuuugagaa

SEQ ID NO: 1051097 - RNA, 19 nt, Homo sapiens
  misc_RNA (1)...(19): siRNA sense strand
cauucaccaucaagucaga

SEQ ID NO: 1051098 - RNA, 19 nt, Homo sapiens
  misc_RNA (1)...(19): siRNA sense strand
ggccuagcacgccucauug

SEQ ID NO: 1051099 - RNA, 19 nt, Homo sapiens
  misc_RNA (1)...(19): siRNA sense strand
cccaggagcccaucuacau

SEQ ID NO: 1051100 - RNA, 19 nt, Homo sapiens
  misc_RNA (1)...(19): siRNA sense strand
ggaggacgagugggagguu

SEQ ID NO: 1051101 - RNA, 19 nt, Homo sapiens
  misc_RNA (1)...(19): siRNA sense strand
cauggagaaugggagucua

SEQ ID NO: 1051102 - RNA, 19 nt, Homo sapiens
  misc_RNA (1)...(19): siRNA sense strand
cauggcagcccaaauugca

SEQ ID NO: 1051103 - RNA, 19 nt, Homo sapiens
  misc_RNA (1)...(19): siRNA sense strand
ccagggagacgcugaagcu

SEQ ID NO: 1051104 - RNA, 19 nt, Homo sapiens
  misc_RNA (1)...(19): siRNA sense strand
auugaagagcggaauuaua

SEQ ID NO: 1051105 - RNA, 19 nt, Homo sapiens
  misc_RNA (1)...(19): siRNA sense strand
gccaaugguucuugaauua

SEQ ID NO: 1051106 - RNA, 19 nt, Homo sapiens
  misc_RNA (1)...(19): siRNA sense strand
gcaauugucuguaguccaa

SEQ ID NO: 1051107 - RNA, 19 nt, Homo sapiens
  misc_RNA (1)...(19): siRNA sense strand
gaaauguccugcccuuuua

SEQ ID NO: 1051108 - RNA, 19 nt, Homo sapiens
  misc_RNA (1)...(19): siRNA sense strand
ggacaucuagcaaaucuaa

SEQ ID NO: 1051109 - RNA, 19 nt, Homo sapiens
  misc_RNA (1)...(19): siRNA sense strand
gaaauucuccagcuucuau

SEQ ID NO: 1051110 - RNA, 19 nt, Homo sapiens
  misc_RNA (1)...(19): siRNA sense strand
ugaauuaacaccacagaua

SEQ ID NO: 1051111 - RNA, 19 nt, Homo sapiens
  misc_RNA (1)...(19): siRNA sense strand
caagaaguauacagaauag

SEQ ID NO: 1051112 - RNA, 19 nt, Homo sapiens
  misc_RNA (1)...(19): siRNA sense strand
gcacagaucaugaccugaa

SEQ ID NO: 1051113 - RNA, 19 nt, Homo sapiens
  misc_RNA (1)...(19): siRNA sense strand
ccaagaaguauacagaaua

SEQ ID NO: 1051114 - RNA, 19 nt, Homo sapiens
  misc_RNA (1)...(19): siRNA sense strand
ugaaaccuauguugaagaa

SEQ ID NO: 1051115 - RNA, 19 nt, Homo sapiens
  misc_RNA (1)...(19): siRNA sense strand
gaagagagaaugcaaggau

SEQ ID NO: 1051116 - RNA, 19 nt, Homo sapiens
  misc_RNA (1)...(19): siRNA sense strand
gauaaacagucgagcaaag

SEQ ID NO: 1051117 - RNA, 19 nt, Homo sapiens
  misc_RNA (1)...(19): siRNA sense strand
gaagaauaagcaaauggua

SEQ ID NO: 1051118 - RNA, 19 nt, Homo sapiens
  misc_RNA (1)...(19): siRNA sense strand
gagaaugcaaggauuauug

SEQ ID NO: 1051119 - RNA, 19 nt, Homo sapiens
  misc_RNA (1)...(19): siRNA sense strand
auacagaccuuucuuagca

SEQ ID NO: 1051120 - RNA, 19 nt, Homo sapiens
  misc_RNA (1)...(19): siRNA sense strand
ccaagagaguuaucuagau

SEQ ID NO: 1051121 - RNA, 19 nt, Homo sapiens
  misc_RNA (1)...(19): siRNA sense strand
caugaaaguuuggcuacua

SEQ ID NO: 1051122 - RNA, 19 nt, Homo sapiens
  misc_RNA (1)...(19): siRNA sense strand
gaggaagaguuaaucaagu

SEQ ID NO: 1051123 - RNA, 19 nt, Homo sapiens
  misc_RNA (1)...(19): siRNA sense strand
caccacagauaguacagua

SEQ ID NO: 1051124 - RNA, 19 nt, Homo sapiens
  misc_RNA (1)...(19): siRNA sense strand
ggaagaguuaaucaaguua

SEQ ID NO: 1051125 - RNA, 19 nt, Homo sapiens
  misc_RNA (1)...(19): siRNA sense strand
ggaagcugcugcugagauc

SEQ ID NO: 1051126 - RNA, 19 nt, Homo sapiens
  misc_RNA (1)...(19): siRNA sense strand
gguaagaauucuccaagag

SEQ ID NO: 1051127 - RNA, 19 nt, Homo sapiens
  misc_RNA (1)...(19): siRNA sense strand
gaauuaacaccacagauag

SEQ ID NO: 1051128 - RNA, 19 nt, Homo sapiens
  misc_RNA (1)...(19): siRNA sense strand
uggaaaagcucuauaaaug

SEQ ID NO: 1051129 - RNA, 19 nt, Homo sapiens
  misc_RNA (1)...(19): siRNA sense strand
gaucaugaccugaagcaau

SEQ ID NO: 1051130 - RNA, 19 nt, Homo sapiens
  misc_RNA (1)...(19): siRNA sense strand
gaugaaaccuauguugaag

SEQ ID NO: 1051131 - RNA, 19 nt, Homo sapiens
  misc_RNA (1)...(19): siRNA sense strand
uaaauucucccacagcuau

SEQ ID NO: 1051132 - RNA, 19 nt, Homo sapiens
  misc_RNA (1)...(19): siRNA sense strand
gaccugaagcaauuaguuu

SEQ ID NO: 1051133 - RNA, 19 nt, Homo sapiens
  misc_RNA (1)...(19): siRNA sense strand
gcucugaggccaacaugaa

SEQ ID NO: 1051134 - RNA, 19 nt, Homo sapiens
  misc_RNA (1)...(19): siRNA sense strand
guccugcccuuuuauauua

SEQ ID NO: 1051135 - RNA, 19 nt, Homo sapiens
  misc_RNA (1)...(19): siRNA sense strand
ggaagcaauugucuguagu

SEQ ID NO: 1051136 - RNA, 19 nt, Homo sapiens
  misc_RNA (1)...(19): siRNA sense strand
cagcuucuauccaaacuca

SEQ ID NO: 1051137 - RNA, 19 nt, Homo sapiens
  misc_RNA (1)...(19): siRNA sense strand
aggaagaguuaaucaaguu

SEQ ID NO: 1051138 - RNA, 19 nt, Homo sapiens
  misc_RNA (1)...(19): siRNA sense strand
agagagaaugcaaggauua

SEQ ID NO: 1051139 - RNA, 19 nt, Homo sapiens
  misc_RNA (1)...(19): siRNA sense strand
uuccauagcucagauaaga

SEQ ID NO: 1051140 - RNA, 19 nt, Homo sapiens
  misc_RNA (1)...(19): siRNA sense strand
gaauuuccauagcucagau

SEQ ID NO: 1051141 - RNA, 19 nt, Homo sapiens
  misc_RNA (1)...(19): siRNA sense strand
uuagcaugcuucaccuaua

SEQ ID NO: 1051142 - RNA, 19 nt, Homo sapiens
  misc_RNA (1)...(19): siRNA sense strand
ggauaaggaaacugaauuc

SEQ ID NO: 1051143 - RNA, 19 nt, Homo sapiens
  misc_RNA (1)...(19): siRNA sense strand
ucaccuauacaacugauaa

SEQ ID NO: 1051144 - RNA, 19 nt, Homo sapiens
  misc_RNA (1)...(19): siRNA sense strand
ucccacagcuauaaaggaa

SEQ ID NO: 1051145 - RNA, 19 nt, Homo sapiens
  misc_RNA (1)...(19): siRNA sense strand
cggaagcaauugucuguag

SEQ ID NO: 1051146 - RNA, 19 nt, Homo sapiens
  misc_RNA (1)...(19): siRNA sense strand
gaggccaacaugaaaguuu

SEQ ID NO: 1051147 - RNA, 19 nt, Homo sapiens
  misc_RNA (1)...(19): siRNA sense strand
cgccaaugguucuugaauu

SEQ ID NO: 1051148 - RNA, 19 nt, Homo sapiens
  misc_RNA (1)...(19): siRNA sense strand
ugagaagaauaagcaaaug

SEQ ID NO: 1051149 - RNA, 19 nt, Homo sapiens
  misc_RNA (1)...(19): siRNA sense strand
guaaggccauuauuuaacc

SEQ ID NO: 1051150 - RNA, 19 nt, Homo sapiens
  misc_RNA (1)...(19): siRNA sense strand
uaagagagacgccaauggu

SEQ ID NO: 1051151 - RNA, 19 nt, Homo sapiens
  misc_RNA (1)...(19): siRNA sense strand
caaggauuauugagagaag

SEQ ID NO: 1051152 - RNA, 19 nt, Homo sapiens
  misc_RNA (1)...(19): siRNA sense strand
ccacagcuauaaaggaaac

SEQ ID NO: 1051153 - RNA, 19 nt, Homo sapiens
  misc_RNA (1)...(19): siRNA sense strand
gcuguuaacacccagagaa

SEQ ID NO: 1051154 - RNA, 19 nt, Homo sapiens
  misc_RNA (1)...(19): siRNA sense strand
aagagagaaugcaaggauu

SEQ ID NO: 1051155 - RNA, 19 nt, Homo sapiens
  misc_RNA (1)...(19): siRNA sense strand
aagcaaaugguaagaauuc

SEQ ID NO: 1051156 - RNA, 19 nt, Homo sapiens
  misc_RNA (1)...(19): siRNA sense strand
cuauacaacugauaaacag

SEQ ID NO: 1051157 - RNA, 19 nt, Homo sapiens
  misc_RNA (1)...(19): siRNA sense strand
cccaagaaguauacagaau

SEQ ID NO: 1051158 - RNA, 19 nt, Homo sapiens
  misc_RNA (1)...(19): siRNA sense strand
auaauccuguugagaagaa

SEQ ID NO: 1051159 - RNA, 19 nt, Homo sapiens
  misc_RNA (1)...(19): siRNA sense strand
uagcaugcuucaccuauac

SEQ ID NO: 1051160 - RNA, 19 nt, Homo sapiens
  misc_RNA (1)...(19): siRNA sense strand
gauaagagagacgccaaug

SEQ ID NO: 1051161 - RNA, 19 nt, Homo sapiens
  misc_RNA (1)...(19): siRNA sense strand
gcaaggauuauugagagaa

SEQ ID NO: 1051162 - RNA, 19 nt, Homo sapiens
  misc_RNA (1)...(19): siRNA sense strand
aucaugaccugaagcaauu

SEQ ID NO: 1051163 - RNA, 19 nt, Homo sapiens
  misc_RNA (1)...(19): siRNA sense strand
caaguuaauagagcaguuu

SEQ ID NO: 1051164 - RNA, 19 nt, Homo sapiens
  misc_RNA (1)...(19): siRNA sense strand
gaacuaggugccgaugaga

SEQ ID NO: 1051165 - RNA, 19 nt, Homo sapiens
  misc_RNA (1)...(19): siRNA sense strand
caaugguucuugaauuaac

SEQ ID NO: 1051166 - RNA, 19 nt, Homo sapiens
  misc_RNA (1)...(19): siRNA sense strand
ccaaugguucuugaauuaa

SEQ ID NO: 1051167 - RNA, 19 nt, Homo sapiens
  misc_RNA (1)...(19): siRNA sense strand
gagagaaugcaaggauuau

SEQ ID NO: 1051168 - RNA, 19 nt, Homo sapiens
  misc_RNA (1)...(19): siRNA sense strand
ccugcaggcuguguucuuu

SEQ ID NO: 1051169 - RNA, 19 nt, Homo sapiens
  misc_RNA (1)...(19): siRNA sense strand
aagaugcgaucaccuccaa

SEQ ID NO: 1051170 - RNA, 19 nt, Homo sapiens
  misc_RNA (1)...(19): siRNA sense strand
augaaaguuuggcuacuaa

SEQ ID NO: 1051171 - RNA, 19 nt, Homo sapiens
  misc_RNA (1)...(19): siRNA sense strand
ucaaguuaauagagcaguu

SEQ ID NO: 1051172 - RNA, 19 nt, Homo sapiens
  misc_RNA (1)...(19): siRNA sense strand
uagagcaguuuccagaauc

SEQ ID NO: 1051173 - RNA, 19 nt, Homo sapiens
  misc_RNA (1)...(19): siRNA sense strand
gaauuccucaggcuacaga

SEQ ID NO: 1051174 - RNA, 19 nt, Homo sapiens
  misc_RNA (1)...(19): siRNA sense strand
gagaagaauaagcaaaugg

SEQ ID NO: 1051175 - RNA, 19 nt, Homo sapiens
  misc_RNA (1)...(19): siRNA sense strand
uaaacagucgagcaaagaa

SEQ ID NO: 1051176 - RNA, 19 nt, Homo sapiens
  misc_RNA (1)...(19): siRNA sense strand
ucuagcaaaucuaaaugga

SEQ ID NO: 1051177 - RNA, 19 nt, Homo sapiens
  misc_RNA (1)...(19): siRNA sense strand
agacgccaaugguucuuga

SEQ ID NO: 1051178 - RNA, 19 nt, Homo sapiens
  misc_RNA (1)...(19): siRNA sense strand
uuaaaugcacagaucauga

SEQ ID NO: 1051179 - RNA, 19 nt, Homo sapiens
  misc_RNA (1)...(19): siRNA sense strand
ucauaauccuguugagaag

SEQ ID NO: 1051180 - RNA, 19 nt, Homo sapiens
  misc_RNA (1)...(19): siRNA sense strand
uuucaagaguugggacuaa

SEQ ID NO: 1051181 - RNA, 19 nt, Homo sapiens
  misc_RNA (1)...(19): siRNA sense strand
auagagcaguuuccagaau

SEQ ID NO: 1051182 - RNA, 19 nt, Homo sapiens
  misc_RNA (1)...(19): siRNA sense strand
ggaaaagcucuauaaaugu

SEQ ID NO: 1051183 - RNA, 19 nt, Homo sapiens
  misc_RNA (1)...(19): siRNA sense strand
ccauagcucagauaagaga

SEQ ID NO: 1051184 - RNA, 19 nt, Homo sapiens
  misc_RNA (1)...(19): siRNA sense strand
gaauaagcaaaugguaaga

SEQ ID NO: 1051185 - RNA, 19 nt, Homo sapiens
  misc_RNA (1)...(19): siRNA sense strand
cucuauaaauguucaguug

SEQ ID NO: 1051186 - RNA, 19 nt, Homo sapiens
  misc_RNA (1)...(19): siRNA sense strand
agaacuaggugccgaugag

SEQ ID NO: 1051187 - RNA, 19 nt, Homo sapiens
  misc_RNA (1)...(19): siRNA sense strand
agaaugcaaggauuauuga

SEQ ID NO: 1051188 - RNA, 19 nt, Homo sapiens
  misc_RNA (1)...(19): siRNA sense strand
uuucaacuuugcccaagaa

SEQ ID NO: 1051189 - RNA, 19 nt, Homo sapiens
  misc_RNA (1)...(19): siRNA sense strand
gaaaguuuggcuacuaaaa

SEQ ID NO: 1051190 - RNA, 19 nt, Homo sapiens
  misc_RNA (1)...(19): siRNA sense strand
uuugacagcugcaccuaau

SEQ ID NO: 1051191 - RNA, 19 nt, Homo sapiens
  misc_RNA (1)...(19): siRNA sense strand
aaacagucgagcaaagaaa

SEQ ID NO: 1051192 - RNA, 19 nt, Homo sapiens
  misc_RNA (1)...(19): siRNA sense strand
gaagcaauugucuguaguc

SEQ ID NO: 1051193 - RNA, 19 nt, Homo sapiens
  misc_RNA (1)...(19): siRNA sense strand
ugacagcugcaccuaaugu

SEQ ID NO: 1051194 - RNA, 19 nt, Homo sapiens
  misc_RNA (1)...(19): siRNA sense strand
cuauaaauguucaguugac

SEQ ID NO: 1051195 - RNA, 19 nt, Homo sapiens
  misc_RNA (1)...(19): siRNA sense strand
gagagacgccaaugguucu

SEQ ID NO: 1051196 - RNA, 19 nt, Homo sapiens
  misc_RNA (1)...(19): siRNA sense strand
gcuucuauccaaacucaaa

SEQ ID NO: 1051197 - RNA, 19 nt, Homo sapiens
  misc_RNA (1)...(19): siRNA sense strand
aaauacagaccuuucuuag

SEQ ID NO: 1051198 - RNA, 19 nt, Homo sapiens
  misc_RNA (1)...(19): siRNA sense strand
gaaccagaagcugaauguu

SEQ ID NO: 1051199 - RNA, 19 nt, Homo sapiens
  misc_RNA (1)...(19): siRNA sense strand
gcaguuuccagaaucuuuc

SEQ ID NO: 1051200 - RNA, 19 nt, Homo sapiens
  misc_RNA (1)...(19): siRNA sense strand
gcgaucaccuccaaaauac

SEQ ID NO: 1051201 - RNA, 19 nt, Homo sapiens
  misc_RNA (1)...(19): siRNA sense strand
guaguccaaccgcuguuaa

SEQ ID NO: 1051202 - RNA, 19 nt, Homo sapiens
  misc_RNA (1)...(19): siRNA sense strand
gagcaaagaaaauacaaga

SEQ ID NO: 1051203 - RNA, 19 nt, Homo sapiens
  misc_RNA (1)...(19): siRNA sense strand
uaacaccacagauaguaca

SEQ ID NO: 1051204 - RNA, 19 nt, Homo sapiens
  misc_RNA (1)...(19): siRNA sense strand
gcaaaucuaaauggaucaa

SEQ ID NO: 1051205 - RNA, 19 nt, Homo sapiens
  misc_RNA (1)...(19): siRNA sense strand
gcucagaccuguaugaaua

SEQ ID NO: 1051206 - RNA, 19 nt, Homo sapiens
  misc_RNA (1)...(19): siRNA sense strand
ggacugcucuaucauuaua

SEQ ID NO: 1051207 - RNA, 19 nt, Homo sapiens
  misc_RNA (1)...(19): siRNA sense strand
cuaaagcccuugugaagua

SEQ ID NO: 1051208 - RNA, 19 nt, Homo sapiens
  misc_RNA (1)...(19): siRNA sense strand
gcacagagguagcaaaugg

SEQ ID NO: 1051209 - RNA, 19 nt, Homo sapiens
  misc_RNA (1)...(19): siRNA sense strand
caagagaccuuuggaugaa

SEQ ID NO: 1051210 - RNA, 19 nt, Homo sapiens
  misc_RNA (1)...(19): siRNA sense strand
ccaaacagcugcagagaca

SEQ ID NO: 1051211 - RNA, 19 nt, Homo sapiens
  misc_RNA (1)...(19): siRNA sense strand
gaaaggaagcucaauccaa

SEQ ID NO: 1051212 - RNA, 19 nt, Homo sapiens
  misc_RNA (1)...(19): siRNA sense strand
cagacgacauuaucaauug

SEQ ID NO: 1051213 - RNA, 19 nt, Homo sapiens
  misc_RNA (1)...(19): siRNA sense strand
ugaaguaucuggaacaucu

SEQ ID NO: 1051214 - RNA, 19 nt, Homo sapiens
  misc_RNA (1)...(19): siRNA sense strand
acaagagacugcagaaaga

SEQ ID NO: 1051215 - RNA, 19 nt, Homo sapiens
  misc_RNA (1)...(19): siRNA sense strand
gacauuaucaauugccuua

SEQ ID NO: 1051216 - RNA, 19 nt, Homo sapiens
  misc_RNA (1)...(19): siRNA sense strand
gcagcaggcgggauuuaua

SEQ ID NO: 1051217 - RNA, 19 nt, Homo sapiens
  misc_RNA (1)...(19): siRNA sense strand
ccacuuagcugugcuguac

SEQ ID NO: 1051218 - RNA, 19 nt, Homo sapiens
  misc_RNA (1)...(19): siRNA sense strand
gaagauggccaagugcaaa

SEQ ID NO: 1051219 - RNA, 19 nt, Homo sapiens
  misc_RNA (1)...(19): siRNA sense strand
ugcaaacgcuuccucauga

SEQ ID NO: 1051220 - RNA, 19 nt, Homo sapiens
  misc_RNA (1)...(19): siRNA sense strand
ucuggaacaucuugugaua

SEQ ID NO: 1051221 - RNA, 19 nt, Homo sapiens
  misc_RNA (1)...(19): siRNA sense strand
uggaacaucuugugauaga

SEQ ID NO: 1051222 - RNA, 19 nt, Homo sapiens
  misc_RNA (1)...(19): siRNA sense strand
cgacacagccuugcucaaa

SEQ ID NO: 1051223 - RNA, 19 nt, Homo sapiens
  misc_RNA (1)...(19): siRNA sense strand
gaacuagugugggccuaug

SEQ ID NO: 1051224 - RNA, 19 nt, Homo sapiens
  misc_RNA (1)...(19): siRNA sense strand
cuacaggacuuugaaggaa

SEQ ID NO: 1051225 - RNA, 19 nt, Homo sapiens
  misc_RNA (1)...(19): siRNA sense strand
augaauacaucguggauuu

SEQ ID NO: 1051226 - RNA, 19 nt, Homo sapiens
  misc_RNA (1)...(19): siRNA sense strand
acgauaagaugaaguugaa

SEQ ID NO: 1051227 - RNA, 19 nt, Homo sapiens
  misc_RNA (1)...(19): siRNA sense strand
aagaugaaguugaaaggaa

SEQ ID NO: 1051228 - RNA, 19 nt, Homo sapiens
  misc_RNA (1)...(19): siRNA sense strand
gaacagcagaagaacaguu

SEQ ID NO: 1051229 - RNA, 19 nt, Homo sapiens
  misc_RNA (1)...(19): siRNA sense strand
ucaagaagcccgugaacga

SEQ ID NO: 1051230 - RNA, 19 nt, Homo sapiens
  misc_RNA (1)...(19): siRNA sense strand
caaggagcgcgucaacaua

SEQ ID NO: 1051231 - RNA, 19 nt, Homo sapiens
  misc_RNA (1)...(19): siRNA sense strand
gaacaucuugugauagaca

SEQ ID NO: 1051232 - RNA, 19 nt, Homo sapiens
  misc_RNA (1)...(19): siRNA sense strand
gacaagagacugcagaaag

SEQ ID NO: 1051233 - RNA, 19 nt, Homo sapiens
  misc_RNA (1)...(19): siRNA sense strand
agaagaggcuuugguuuua

SEQ ID NO: 1051234 - RNA, 19 nt, Homo sapiens
  misc_RNA (1)...(19): siRNA sense strand
uuggacugcucuaucauua

SEQ ID NO: 1051235 - RNA, 19 nt, Homo sapiens
  misc_RNA (1)...(19): siRNA sense strand
cagccuugcucaaacugua

SEQ ID NO: 1051236 - RNA, 19 nt, Homo sapiens
  misc_RNA (1)...(19): siRNA sense strand
gaacgagaacccugugagu

SEQ ID NO: 1051237 - RNA, 19 nt, Homo sapiens
  misc_RNA (1)...(19): siRNA sense strand
acaaauacaggaucuucua

SEQ ID NO: 1051238 - RNA, 19 nt, Homo sapiens
  misc_RNA (1)...(19): siRNA sense strand
guagaaguuugcaucaucu

SEQ ID NO: 1051239 - RNA, 19 nt, Homo sapiens
  misc_RNA (1)...(19): siRNA sense strand
gcacuuggacugcucuauc

SEQ ID NO: 1051240 - RNA, 19 nt, Homo sapiens
  misc_RNA (1)...(19): siRNA sense strand
caauccaacucucagacaa

SEQ ID NO: 1051241 - RNA, 19 nt, Homo sapiens
  misc_RNA (1)...(19): siRNA sense strand
gaucguugccacaaguaaa

SEQ ID NO: 1051242 - RNA, 19 nt, Homo sapiens
  misc_RNA (1)...(19): siRNA sense strand
uaaucuacaccuacgauaa

SEQ ID NO: 1051243 - RNA, 19 nt, Homo sapiens
  misc_RNA (1)...(19): siRNA sense strand
guagaagaggcuuugguuu

SEQ ID NO: 1051244 - RNA, 19 nt, Homo sapiens
  misc_RNA (1)...(19): siRNA sense strand
uuacaucuugguuccauua

SEQ ID NO: 1051245 - RNA, 19 nt, Homo sapiens
  misc_RNA (1)...(19): siRNA sense strand
aguacaucauccacaauua

SEQ ID NO: 1051246 - RNA, 19 nt, Homo sapiens
  misc_RNA (1)...(19): siRNA sense strand
ggcgggauuuauacaguuu

SEQ ID NO: 1051247 - RNA, 19 nt, Homo sapiens
  misc_RNA (1)...(19): siRNA sense strand
cagguaauguacagaagga

SEQ ID NO: 1051248 - RNA, 19 nt, Homo sapiens
  misc_RNA (1)...(19): siRNA sense strand
gcagccacguuugcacuga

SEQ ID NO: 1051249 - RNA, 19 nt, Homo sapiens
  misc_RNA (1)...(19): siRNA sense strand
ccagacgacauuaucaauu

SEQ ID NO: 1051250 - RNA, 19 nt, Homo sapiens
  misc_RNA (1)...(19): siRNA sense strand
aggagaagauggccaagug

SEQ ID NO: 1051251 - RNA, 19 nt, Homo sapiens
  misc_RNA (1)...(19): siRNA sense strand
uguagaaguuugcaucauc

SEQ ID NO: 1051252 - RNA, 19 nt, Homo sapiens
  misc_RNA (1)...(19): siRNA sense strand
gauaagaugaaguugaaag

SEQ ID NO: 1051253 - RNA, 19 nt, Homo sapiens
  misc_RNA (1)...(19): siRNA sense strand
gcaaacgcuuccucaugag

SEQ ID NO: 1051254 - RNA, 19 nt, Homo sapiens
  misc_RNA (1)...(19): siRNA sense strand
ggacggccacuuccugugu

SEQ ID NO: 1051255 - RNA, 19 nt, Homo sapiens
  misc_RNA (1)...(19): siRNA sense strand
gggugcagaucgucaagga

SEQ ID NO: 1051256 - RNA, 19 nt, Homo sapiens
  misc_RNA (1)...(19): siRNA sense strand
gguaauguacagaaggauu

SEQ ID NO: 1051257 - RNA, 19 nt, Homo sapiens
  misc_RNA (1)...(19): siRNA sense strand
acacgcugcuggccaucua

SEQ ID NO: 1051258 - RNA, 19 nt, Homo sapiens
  misc_RNA (1)...(19): siRNA sense strand
gugcaaacgcuuccucaug

SEQ ID NO: 1051259 - RNA, 19 nt, Homo sapiens
  misc_RNA (1)...(19): siRNA sense strand
guaauguacagaaggauuc

SEQ ID NO: 1051260 - RNA, 19 nt, Homo sapiens
  misc_RNA (1)...(19): siRNA sense strand
cacguucacugccaccaaa

SEQ ID NO: 1051261 - RNA, 19 nt, Homo sapiens
  misc_RNA (1)...(19): siRNA sense strand
caugagaaggcgcugcaua

SEQ ID NO: 1051262 - RNA, 19 nt, Homo sapiens
  misc_RNA (1)...(19): siRNA sense strand
gaagaacaguuuuaaucca

SEQ ID NO: 1051263 - RNA, 19 nt, Homo sapiens
  misc_RNA (1)...(19): siRNA sense strand
gagccuguguuuguuagau

SEQ ID NO: 1051264 - RNA, 19 nt, Homo sapiens
  misc_RNA (1)...(19): siRNA sense strand
guacaucauccacaauuac

SEQ ID NO: 1051265 - RNA, 19 nt, Homo sapiens
  misc_RNA (1)...(19): siRNA sense strand
aaacaaauacaggaucuuc

SEQ ID NO: 1051266 - RNA, 19 nt, Homo sapiens
  misc_RNA (1)...(19): siRNA sense strand
gggagcugaucucucucua

SEQ ID NO: 1051267 - RNA, 19 nt, Homo sapiens
  misc_RNA (1)...(19): siRNA sense strand
ggccagguccgaaaacuua

SEQ ID NO: 1051268 - RNA, 19 nt, Homo sapiens
  misc_RNA (1)...(19): siRNA sense strand
caagagacugcagaaagaa

SEQ ID NO: 1051269 - RNA, 19 nt, Homo sapiens
  misc_RNA (1)...(19): siRNA sense strand
uggaugaacagcagaagaa

SEQ ID NO: 1051270 - RNA, 19 nt, Homo sapiens
  misc_RNA (1)...(19): siRNA sense strand
cugauuggguccugcagaa

SEQ ID NO: 1051271 - RNA, 19 nt, Homo sapiens
  misc_RNA (1)...(19): siRNA sense strand
cacuuggacugcucuauca

SEQ ID NO: 1051272 - RNA, 19 nt, Homo sapiens
  misc_RNA (1)...(19): siRNA sense strand
uaaagcccuugugaaguau

SEQ ID NO: 1051273 - RNA, 19 nt, Homo sapiens
  misc_RNA (1)...(19): siRNA sense strand
cagcacagagguagcaaau

SEQ ID NO: 1051274 - RNA, 19 nt, Homo sapiens
  misc_RNA (1)...(19): siRNA sense strand
cagagacacuugggcuuca

SEQ ID NO: 1051275 - RNA, 19 nt, Homo sapiens
  misc_RNA (1)...(19): siRNA sense strand
acaaggagcgcgucaacau

SEQ ID NO: 1051276 - RNA, 19 nt, Homo sapiens
  misc_RNA (1)...(19): siRNA sense strand
gacacagccuugcucaaac

SEQ ID NO: 1051277 - RNA, 19 nt, Homo sapiens
  misc_RNA (1)...(19): siRNA sense strand
caguacaucauccacaauu

SEQ ID NO: 1051278 - RNA, 19 nt, Homo sapiens
  misc_RNA (1)...(19): siRNA sense strand
ggucggagaaugugauugg

SEQ ID NO: 1051279 - RNA, 19 nt, Homo sapiens
  misc_RNA (1)...(19): siRNA sense strand
ggauagggagacaggaguu

SEQ ID NO: 1051280 - RNA, 19 nt, Homo sapiens
  misc_RNA (1)...(19): siRNA sense strand
ggaagcugggcgagcauga

SEQ ID NO: 1051281 - RNA, 19 nt, Homo sapiens
  misc_RNA (1)...(19): siRNA sense strand
aauacaggaucuucuagca

SEQ ID NO: 1051282 - RNA, 19 nt, Homo sapiens
  misc_RNA (1)...(19): siRNA sense strand
caaauacaggaucuucuag

SEQ ID NO: 1051283 - RNA, 19 nt, Homo sapiens
  misc_RNA (1)...(19): siRNA sense strand
acaggacuuugaaggaaga

SEQ ID NO: 1051284 - RNA, 19 nt, Homo sapiens
  misc_RNA (1)...(19): siRNA sense strand
ggagggccauauccuacag

SEQ ID NO: 1051285 - RNA, 19 nt, Homo sapiens
  misc_RNA (1)...(19): siRNA sense strand
cuagcaagccgcagaguag

SEQ ID NO: 1051286 - RNA, 19 nt, Homo sapiens
  misc_RNA (1)...(19): siRNA sense strand
ccgccacgccaccgaauuu

SEQ ID NO: 1051287 - RNA, 19 nt, Homo sapiens
  misc_RNA (1)...(19): siRNA sense strand
gaggucggaguucagguuu

SEQ ID NO: 1051288 - RNA, 19 nt, Homo sapiens
  misc_RNA (1)...(19): siRNA sense strand
acacagccuugcucaaacu

SEQ ID NO: 1051289 - RNA, 19 nt, Homo sapiens
  misc_RNA (1)...(19): siRNA sense strand
uagaagaggcuuugguuuu

SEQ ID NO: 1051290 - RNA, 19 nt, Homo sapiens
  misc_RNA (1)...(19): siRNA sense strand
gcacuggucggagaaugug

SEQ ID NO: 1051291 - RNA, 19 nt, Homo sapiens
  misc_RNA (1)...(19): siRNA sense strand
gcacgagcugcaggacuuu

SEQ ID NO: 1051292 - RNA, 19 nt, Homo sapiens
  misc_RNA (1)...(19): siRNA sense strand
gcagaguagaagaggcuuu

SEQ ID NO: 1051293 - RNA, 19 nt, Homo sapiens
  misc_RNA (1)...(19): siRNA sense strand
ggagggcugggcauguuug

SEQ ID NO: 1051294 - RNA, 19 nt, Homo sapiens
  misc_RNA (1)...(19): siRNA sense strand
cuacaccuacgauaagaug

SEQ ID NO: 1051295 - RNA, 19 nt, Homo sapiens
  misc_RNA (1)...(19): siRNA sense strand
agaaggcgcugcauauccu

SEQ ID NO: 1051296 - RNA, 19 nt, Homo sapiens
  misc_RNA (1)...(19): siRNA sense strand
gaugaacagcagaagaaca

SEQ ID NO: 1051297 - RNA, 19 nt, Homo sapiens
  misc_RNA (1)...(19): siRNA sense strand
uuucuuaccuacugcuuag

SEQ ID NO: 1051298 - RNA, 19 nt, Homo sapiens
  misc_RNA (1)...(19): siRNA sense strand
acccuccucuucaugagua

SEQ ID NO: 1051299 - RNA, 19 nt, Homo sapiens
  misc_RNA (1)...(19): siRNA sense strand
caggcgggauuuauacagu

SEQ ID NO: 1051300 - RNA, 19 nt, Homo sapiens
  misc_RNA (1)...(19): siRNA sense strand
cagccacguuugcacugaa

SEQ ID NO: 1051301 - RNA, 19 nt, Homo sapiens
  misc_RNA (1)...(19): siRNA sense strand
ucaagaggauagggagaca

SEQ ID NO: 1051302 - RNA, 19 nt, Homo sapiens
  misc_RNA (1)...(19): siRNA sense strand
agccuguguuuguuagaua

SEQ ID NO: 1051303 - RNA, 19 nt, Homo sapiens
  misc_RNA (1)...(19): siRNA sense strand
uaagaugaaguugaaagga

SEQ ID NO: 1051304 - RNA, 19 nt, Homo sapiens
  misc_RNA (1)...(19): siRNA sense strand
ccaccgccagcaacucuuu

SEQ ID NO: 1051305 - RNA, 19 nt, Homo sapiens
  misc_RNA (1)...(19): siRNA sense strand
ggacaugauuaaugaagua

SEQ ID NO: 1051306 - RNA, 19 nt, Homo sapiens
  misc_RNA (1)...(19): siRNA sense strand
ggagagaaguuaacagaug

SEQ ID NO: 1051307 - RNA, 19 nt, Homo sapiens
  misc_RNA (1)...(19): siRNA sense strand
gaaguuaacagaugaagaa

SEQ ID NO: 1051308 - RNA, 19 nt, Homo sapiens
  misc_RNA (1)...(19): siRNA sense strand
gagagaaguuaacagauga

SEQ ID NO: 1051309 - RNA, 19 nt, Homo sapiens
  misc_RNA (1)...(19): siRNA sense strand
guuaacagaugaagaaguu

SEQ ID NO: 1051310 - RNA, 19 nt, Homo sapiens
  misc_RNA (1)...(19): siRNA sense strand
ugaagaaguugaugaaaug

SEQ ID NO: 1051311 - RNA, 19 nt, Homo sapiens
  misc_RNA (1)...(19): siRNA sense strand
ugacaaagauggugaugga

SEQ ID NO: 1051312 - RNA, 19 nt, Homo sapiens
  misc_RNA (1)...(19): siRNA sense strand
ugacaaaccuuggagagaa

SEQ ID NO: 1051313 - RNA, 19 nt, Homo sapiens
  misc_RNA (1)...(19): siRNA sense strand
ugacaaugauggcaagaaa

SEQ ID NO: 1051314 - RNA, 19 nt, Homo sapiens
  misc_RNA (1)...(19): siRNA sense strand
gcagauugcagaauucaaa

SEQ ID NO: 1051315 - RNA, 19 nt, Homo sapiens
  misc_RNA (1)...(19): siRNA sense strand
gaacuucgccaugugauga

SEQ ID NO: 1051316 - RNA, 19 nt, Homo sapiens
  misc_RNA (1)...(19): siRNA sense strand
ggcaauggcuauauuagug

SEQ ID NO: 1051317 - RNA, 19 nt, Homo sapiens
  misc_RNA (1)...(19): siRNA sense strand
uacaggacaugauuaauga

SEQ ID NO: 1051318 - RNA, 19 nt, Homo sapiens
  misc_RNA (1)...(19): siRNA sense strand
ggauggcaauggcuauauu

SEQ ID NO: 1051319 - RNA, 19 nt, Homo sapiens
  misc_RNA (1)...(19): siRNA sense strand
gaaagacacagacagugaa

SEQ ID NO: 1051320 - RNA, 19 nt, Homo sapiens
  misc_RNA (1)...(19): siRNA sense strand
gaucagggaagcagauauu

SEQ ID NO: 1051321 - RNA, 19 nt, Homo sapiens
  misc_RNA (1)...(19): siRNA sense strand
acaauugacuucccugaau

SEQ ID NO: 1051322 - RNA, 19 nt, Homo sapiens
  misc_RNA (1)...(19): siRNA sense strand
ggaagcagauauugauggu

SEQ ID NO: 1051323 - RNA, 19 nt, Homo sapiens
  misc_RNA (1)...(19): siRNA sense strand
ugaaguagaugcugauggu

SEQ ID NO: 1051324 - RNA, 19 nt, Homo sapiens
  misc_RNA (1)...(19): siRNA sense strand
aagagcagauugcagaauu

SEQ ID NO: 1051325 - RNA, 19 nt, Homo sapiens
  misc_RNA (1)...(19): siRNA sense strand
gauggcaauggcuauauua

SEQ ID NO: 1051326 - RNA, 19 nt, Homo sapiens
  misc_RNA (1)...(19): siRNA sense strand
caaguaaacuaugaagagu

SEQ ID NO: 1051327 - RNA, 19 nt, Homo sapiens
  misc_RNA (1)...(19): siRNA sense strand
caaaggaauugggaacugu

SEQ ID NO: 1051328 - RNA, 19 nt, Homo sapiens
  misc_RNA (1)...(19): siRNA sense strand
ggaauugggaacuguaaug

SEQ ID NO: 1051329 - RNA, 19 nt, Homo sapiens
  misc_RNA (1)...(19): siRNA sense strand
gaagaagaaauuagagaag

SEQ ID NO: 1051330 - RNA, 19 nt, Homo sapiens
  misc_RNA (1)...(19): siRNA sense strand
guacaaaugaugacagcaa

SEQ ID NO: 1051331 - RNA, 19 nt, Homo sapiens
  misc_RNA (1)...(19): siRNA sense strand
ugacuucccugaauuucug

SEQ ID NO: 1051332 - RNA, 19 nt, Homo sapiens
  misc_RNA (1)...(19): siRNA sense strand
ugaaagacacagacaguga

SEQ ID NO: 1051333 - RNA, 19 nt, Homo sapiens
  misc_RNA (1)...(19): siRNA sense strand
gaacuauaacaacaaagga

SEQ ID NO: 1051334 - RNA, 19 nt, Homo sapiens
  misc_RNA (1)...(19): siRNA sense strand
ugauggugauggucaagua

SEQ ID NO: 1051335 - RNA, 19 nt, Homo sapiens
  misc_RNA (1)...(19): siRNA sense strand
gcagaacuucgccauguga

SEQ ID NO: 1051336 - RNA, 19 nt, Homo sapiens
  misc_RNA (1)...(19): siRNA sense strand
gaauugggaacuguaauga

SEQ ID NO: 1051337 - RNA, 19 nt, Homo sapiens
  misc_RNA (1)...(19): siRNA sense strand
gaacuguaaugagaucucu

SEQ ID NO: 1051338 - RNA, 19 nt, Homo sapiens
  misc_RNA (1)...(19): siRNA sense strand
uaacagaugaagaaguuga

SEQ ID NO: 1051339 - RNA, 19 nt, Homo sapiens
  misc_RNA (1)...(19): siRNA sense strand
ugagaucucuugggcagaa

SEQ ID NO: 1051340 - RNA, 19 nt, Homo sapiens
  misc_RNA (1)...(19): siRNA sense strand
cacagacagugaagaagaa

SEQ ID NO: 1051341 - RNA, 19 nt, Homo sapiens
  misc_RNA (1)...(19): siRNA sense strand
caaagauggugauggaacu

SEQ ID NO: 1051342 - RNA, 19 nt, Homo sapiens
  misc_RNA (1)...(19): siRNA sense strand
uuacaggacaugauuaaug

SEQ ID NO: 1051343 - RNA, 19 nt, Homo sapiens
  misc_RNA (1)...(19): siRNA sense strand
uacaaaugaugacagcaaa

SEQ ID NO: 1051344 - RNA, 19 nt, Homo sapiens
  misc_RNA (1)...(19): siRNA sense strand
ugauggaacuauaacaaca

SEQ ID NO: 1051345 - RNA, 19 nt, Homo sapiens
  misc_RNA (1)...(19): siRNA sense strand
gauggugauggaacuauaa

SEQ ID NO: 1051346 - RNA, 19 nt, Homo sapiens
  misc_RNA (1)...(19): siRNA sense strand
gaugguaauggcacaauug

SEQ ID NO: 1051347 - RNA, 19 nt, Homo sapiens
  misc_RNA (1)...(19): siRNA sense strand
uauuagugcugcagaacuu

SEQ ID NO: 1051348 - RNA, 19 nt, Homo sapiens
  misc_RNA (1)...(19): siRNA sense strand
agaaguugaugaaaugauc

SEQ ID NO: 1051349 - RNA, 19 nt, Homo sapiens
  misc_RNA (1)...(19): siRNA sense strand
gaagaaguugaugaaauga

SEQ ID NO: 1051350 - RNA, 19 nt, Homo sapiens
  misc_RNA (1)...(19): siRNA sense strand
agacacagacagugaagaa

SEQ ID NO: 1051351 - RNA, 19 nt, Homo sapiens
  misc_RNA (1)...(19): siRNA sense strand
agacagugaagaagaaauu

SEQ ID NO: 1051352 - RNA, 19 nt, Homo sapiens
  misc_RNA (1)...(19): siRNA sense strand
agagaagcauuccgugugu

SEQ ID NO: 1051353 - RNA, 19 nt, Homo sapiens
  misc_RNA (1)...(19): siRNA sense strand
ggugauggaacuauaacaa

SEQ ID NO: 1051354 - RNA, 19 nt, Homo sapiens
  misc_RNA (1)...(19): siRNA sense strand
gauugcagaauucaaagaa

SEQ ID NO: 1051355 - RNA, 19 nt, Homo sapiens
  misc_RNA (1)...(19): siRNA sense strand
gacaaaccuuggagagaag

SEQ ID NO: 1051356 - RNA, 19 nt, Homo sapiens
  misc_RNA (1)...(19): siRNA sense strand
gacagugaagaagaaauua

SEQ ID NO: 1051357 - RNA, 19 nt, Homo sapiens
  misc_RNA (1)...(19): siRNA sense strand
ggaacuauaacaacaaagg

SEQ ID NO: 1051358 - RNA, 19 nt, Homo sapiens
  misc_RNA (1)...(19): siRNA sense strand
ucaaguaaacuaugaagag

SEQ ID NO: 1051359 - RNA, 19 nt, Homo sapiens
  misc_RNA (1)...(19): siRNA sense strand
gagaagcauuccguguguu

SEQ ID NO: 1051360 - RNA, 19 nt, Homo sapiens
  misc_RNA (1)...(19): siRNA sense strand
agauggugauggaacuaua

SEQ ID NO: 1051361 - RNA, 19 nt, Homo sapiens
  misc_RNA (1)...(19): siRNA sense strand
acacagacagugaagaaga

SEQ ID NO: 1051362 - RNA, 19 nt, Homo sapiens
  misc_RNA (1)...(19): siRNA sense strand
gguaauggcacaauugacu

SEQ ID NO: 1051363 - RNA, 19 nt, Homo sapiens
  misc_RNA (1)...(19): siRNA sense strand
ccacagaagcagaguuaca

SEQ ID NO: 1051364 - RNA, 19 nt, Homo sapiens
  misc_RNA (1)...(19): siRNA sense strand
gaugaagaaguugaugaaa

SEQ ID NO: 1051365 - RNA, 19 nt, Homo sapiens
  misc_RNA (1)...(19): siRNA sense strand
cugcagaacuucgccaugu

SEQ ID NO: 1051366 - RNA, 19 nt, Homo sapiens
  misc_RNA (1)...(19): siRNA sense strand
gaagagcagauugcagaau

SEQ ID NO: 1051367 - RNA, 19 nt, Homo sapiens
  misc_RNA (1)...(19): siRNA sense strand
gcauuccguguguuugaua

SEQ ID NO: 1051368 - RNA, 19 nt, Homo sapiens
  misc_RNA (1)...(19): siRNA sense strand
gaguuacaggacaugauua

SEQ ID NO: 1051369 - RNA, 19 nt, Homo sapiens
  misc_RNA (1)...(19): siRNA sense strand
gaaguagaugcugauggua

SEQ ID NO: 1051370 - RNA, 19 nt, Homo sapiens
  misc_RNA (1)...(19): siRNA sense strand
gauggaacuauaacaacaa

SEQ ID NO: 1051371 - RNA, 19 nt, Homo sapiens
  misc_RNA (1)...(19): siRNA sense strand
agaagaaauuagagaagca

SEQ ID NO: 1051372 - RNA, 19 nt, Homo sapiens
  misc_RNA (1)...(19): siRNA sense strand
ucccacagaagcagaguua

SEQ ID NO: 1051373 - RNA, 19 nt, Homo sapiens
  misc_RNA (1)...(19): siRNA sense strand
caaaugaugacagcaaagu

SEQ ID NO: 1051374 - RNA, 19 nt, Homo sapiens
  misc_RNA (1)...(19): siRNA sense strand
gauggugauggucaaguaa

SEQ ID NO: 1051375 - RNA, 19 nt, Homo sapiens
  misc_RNA (1)...(19): siRNA sense strand
auugggaacuguaaugaga

SEQ ID NO: 1051376 - RNA, 19 nt, Homo sapiens
  misc_RNA (1)...(19): siRNA sense strand
acaaaggaauugggaacug

SEQ ID NO: 1051377 - RNA, 19 nt, Homo sapiens
  misc_RNA (1)...(19): siRNA sense strand
cugaauuucugacaaugau

SEQ ID NO: 1051378 - RNA, 19 nt, Homo sapiens
  misc_RNA (1)...(19): siRNA sense strand
cagggaagcagauauugau

SEQ ID NO: 1051379 - RNA, 19 nt, Homo sapiens
  misc_RNA (1)...(19): siRNA sense strand
ucagggaagcagauauuga

SEQ ID NO: 1051380 - RNA, 19 nt, Homo sapiens
  misc_RNA (1)...(19): siRNA sense strand
cagaugaagaaguugauga

SEQ ID NO: 1051381 - RNA, 19 nt, Homo sapiens
  misc_RNA (1)...(19): siRNA sense strand
gugaagaagaaauuagaga

SEQ ID NO: 1051382 - RNA, 19 nt, Homo sapiens
  misc_RNA (1)...(19): siRNA sense strand
ugaugguaauggcacaauu

SEQ ID NO: 1051383 - RNA, 19 nt, Homo sapiens
  misc_RNA (1)...(19): siRNA sense strand
gugauggucaaguaaacua

SEQ ID NO: 1051384 - RNA, 19 nt, Homo sapiens
  misc_RNA (1)...(19): siRNA sense strand
agaagcauuccguguguuu

SEQ ID NO: 1051385 - RNA, 19 nt, Homo sapiens
  misc_RNA (1)...(19): siRNA sense strand
guaauggcacaauugacuu

SEQ ID NO: 1051386 - RNA, 19 nt, Homo sapiens
  misc_RNA (1)...(19): siRNA sense strand
aaugaugacagcaaaguga

SEQ ID NO: 1051387 - RNA, 19 nt, Homo sapiens
  misc_RNA (1)...(19): siRNA sense strand
agaguuacaggacaugauu

SEQ ID NO: 1051388 - RNA, 19 nt, Homo sapiens
  misc_RNA (1)...(19): siRNA sense strand
cuauauuagugcugcagaa

SEQ ID NO: 1051389 - RNA, 19 nt, Homo sapiens
  misc_RNA (1)...(19): siRNA sense strand
gagcagauugcagaauuca

SEQ ID NO: 1051390 - RNA, 19 nt, Homo sapiens
  misc_RNA (1)...(19): siRNA sense strand
gcagaaucccacagaagca

SEQ ID NO: 1051391 - RNA, 19 nt, Homo sapiens
  misc_RNA (1)...(19): siRNA sense strand
gaagaaauuagagaagcau

SEQ ID NO: 1051392 - RNA, 19 nt, Homo sapiens
  misc_RNA (1)...(19): siRNA sense strand
cugaccaacugacugaaga

SEQ ID NO: 1051393 - RNA, 19 nt, Homo sapiens
  misc_RNA (1)...(19): siRNA sense strand
cagugaagaagaaauuaga

SEQ ID NO: 1051394 - RNA, 19 nt, Homo sapiens
  misc_RNA (1)...(19): siRNA sense strand
cuaugaagaguuuguacaa

SEQ ID NO: 1051395 - RNA, 19 nt, Homo sapiens
  misc_RNA (1)...(19): siRNA sense strand
aaguagaugcugaugguaa

SEQ ID NO: 1051396 - RNA, 19 nt, Homo sapiens
  misc_RNA (1)...(19): siRNA sense strand
aguagaugcugaugguaau

SEQ ID NO: 1051397 - RNA, 19 nt, Homo sapiens
  misc_RNA (1)...(19): siRNA sense strand
cauuccguguguuugauaa

SEQ ID NO: 1051398 - RNA, 19 nt, Homo sapiens
  misc_RNA (1)...(19): siRNA sense strand
gaaauuagagaagcauucc

SEQ ID NO: 1051399 - RNA, 19 nt, Homo sapiens
  misc_RNA (1)...(19): siRNA sense strand
aagcagaguuacaggacau

SEQ ID NO: 1051400 - RNA, 19 nt, Homo sapiens
  misc_RNA (1)...(19): siRNA sense strand
aaaggaauugggaacugua

SEQ ID NO: 1051401 - RNA, 19 nt, Homo sapiens
  misc_RNA (1)...(19): siRNA sense strand
gggcagaaucccacagaag

SEQ ID NO: 1051402 - RNA, 19 nt, Homo sapiens
  misc_RNA (1)...(19): siRNA sense strand
gaagcauuccguguguuug

SEQ ID NO: 1051403 - RNA, 19 nt, Homo sapiens
  misc_RNA (1)...(19): siRNA sense strand
aaaccuuggagagaaguua

SEQ ID NO: 1051404 - RNA, 19 nt, Homo sapiens
  misc_RNA (1)...(19): siRNA sense strand
gauggucaaguaaacuaug

SEQ ID NO: 1051405 - RNA, 19 nt, Homo sapiens
  misc_RNA (1)...(19): siRNA sense strand
ggaaagauaugaagacaaa

SEQ ID NO: 1051406 - RNA, 19 nt, Homo sapiens
  misc_RNA (1)...(19): siRNA sense strand
ggacagauuuacugcuaua

SEQ ID NO: 1051407 - RNA, 19 nt, Homo sapiens
  misc_RNA (1)...(19): siRNA sense strand
ucaaagagguaucagcaua

SEQ ID NO: 1051408 - RNA, 19 nt, Homo sapiens
  misc_RNA (1)...(19): siRNA sense strand
gcucugggauguuuaagua

SEQ ID NO: 1051409 - RNA, 19 nt, Homo sapiens
  misc_RNA (1)...(19): siRNA sense strand
cguccaagcuucacaauuu

SEQ ID NO: 1051410 - RNA, 19 nt, Homo sapiens
  misc_RNA (1)...(19): siRNA sense strand
gcaaagaaacagguuaaua

SEQ ID NO: 1051411 - RNA, 19 nt, Homo sapiens
  misc_RNA (1)...(19): siRNA sense strand
gaaauggagucaccagaau

SEQ ID NO: 1051412 - RNA, 19 nt, Homo sapiens
  misc_RNA (1)...(19): siRNA sense strand
gagcagaguuuccguuaau

SEQ ID NO: 1051413 - RNA, 19 nt, Homo sapiens
  misc_RNA (1)...(19): siRNA sense strand
agagagaccuucuguggua

SEQ ID NO: 1051414 - RNA, 19 nt, Homo sapiens
  misc_RNA (1)...(19): siRNA sense strand
gaacuuaugcugugcuauu

SEQ ID NO: 1051415 - RNA, 19 nt, Homo sapiens
  misc_RNA (1)...(19): siRNA sense strand
cauauaggaucuuugagua

SEQ ID NO: 1051416 - RNA, 19 nt, Homo sapiens
  misc_RNA (1)...(19): siRNA sense strand
gauauuccgugcugaaaug

SEQ ID NO: 1051417 - RNA, 19 nt, Homo sapiens
  misc_RNA (1)...(19): siRNA sense strand
gaagaguguaugagacuua

SEQ ID NO: 1051418 - RNA, 19 nt, Homo sapiens
  misc_RNA (1)...(19): siRNA sense strand
gcaaguuauucugucauua

SEQ ID NO: 1051419 - RNA, 19 nt, Homo sapiens
  misc_RNA (1)...(19): siRNA sense strand
caacagagagcuuugagaa

SEQ ID NO: 1051420 - RNA, 19 nt, Homo sapiens
  misc_RNA (1)...(19): siRNA sense strand
ggaaaggcccuccauuuua

SEQ ID NO: 1051421 - RNA, 19 nt, Homo sapiens
  misc_RNA (1)...(19): siRNA sense strand
ggaaauggagucaccagaa

SEQ ID NO: 1051422 - RNA, 19 nt, Homo sapiens
  misc_RNA (1)...(19): siRNA sense strand
gugcugaaaugauuaacaa

SEQ ID NO: 1051423 - RNA, 19 nt, Homo sapiens
  misc_RNA (1)...(19): siRNA sense strand
guugcuaaauggaaagaua

SEQ ID NO: 1051424 - RNA, 19 nt, Homo sapiens
  misc_RNA (1)...(19): siRNA sense strand
ccucaaggauuacacgaaa

SEQ ID NO: 1051425 - RNA, 19 nt, Homo sapiens
  misc_RNA (1)...(19): siRNA sense strand
aaacaugccuaucaucaca

SEQ ID NO: 1051426 - RNA, 19 nt, Homo sapiens
  misc_RNA (1)...(19): siRNA sense strand
gcuuaacucuggaaugguu

SEQ ID NO: 1051427 - RNA, 19 nt, Homo sapiens
  misc_RNA (1)...(19): siRNA sense strand
auuaaacccucuacuauga

SEQ ID NO: 1051428 - RNA, 19 nt, Homo sapiens
  misc_RNA (1)...(19): siRNA sense strand
agaaacagguuaauaugca

SEQ ID NO: 1051429 - RNA, 19 nt, Homo sapiens
  misc_RNA (1)...(19): siRNA sense strand
caaguacgggacagauuua

SEQ ID NO: 1051430 - RNA, 19 nt, Homo sapiens
  misc_RNA (1)...(19): siRNA sense strand
gaaugaagaggcucaagug

SEQ ID NO: 1051431 - RNA, 19 nt, Homo sapiens
  misc_RNA (1)...(19): siRNA sense strand
cagaagaaauccauauagg

SEQ ID NO: 1051432 - RNA, 19 nt, Homo sapiens
  misc_RNA (1)...(19): siRNA sense strand
cuaaacugguugcuaaaug

SEQ ID NO: 1051433 - RNA, 19 nt, Homo sapiens
  misc_RNA (1)...(19): siRNA sense strand
gauuaaacccucuacuaug

SEQ ID NO: 1051434 - RNA, 19 nt, Homo sapiens
  misc_RNA (1)...(19): siRNA sense strand
gcagaagaaauccauauag

SEQ ID NO: 1051435 - RNA, 19 nt, Homo sapiens
  misc_RNA (1)...(19): siRNA sense strand
ugaagaggcucaagugcau

SEQ ID NO: 1051436 - RNA, 19 nt, Homo sapiens
  misc_RNA (1)...(19): siRNA sense strand
cgggacagauuuacugcua

SEQ ID NO: 1051437 - RNA, 19 nt, Homo sapiens
  misc_RNA (1)...(19): siRNA sense strand
uaaacugguugcuaaaugg

SEQ ID NO: 1051438 - RNA, 19 nt, Homo sapiens
  misc_RNA (1)...(19): siRNA sense strand
agacaaacaugccuaucau

SEQ ID NO: 1051439 - RNA, 19 nt, Homo sapiens
  misc_RNA (1)...(19): siRNA sense strand
gaaaggcccuccauuuuac

SEQ ID NO: 1051440 - RNA, 19 nt, Homo sapiens
  misc_RNA (1)...(19): siRNA sense strand
gaagcggagugugccauga

SEQ ID NO: 1051441 - RNA, 19 nt, Homo sapiens
  misc_RNA (1)...(19): siRNA sense strand
ucaaguacgggacagauuu

SEQ ID NO: 1051442 - RNA, 19 nt, Homo sapiens
  misc_RNA (1)...(19): siRNA sense strand
gagagaccuucugugguaa

SEQ ID NO: 1051443 - RNA, 19 nt, Homo sapiens
  misc_RNA (1)...(19): siRNA sense strand
gcugugcuauuugauuaaa

SEQ ID NO: 1051444 - RNA, 19 nt, Homo sapiens
  misc_RNA (1)...(19): siRNA sense strand
acagagggccugaccauga

SEQ ID NO: 1051445 - RNA, 19 nt, Homo sapiens
  misc_RNA (1)...(19): siRNA sense strand
ucaagugcaugacaagcuu

SEQ ID NO: 1051446 - RNA, 19 nt, Homo sapiens
  misc_RNA (1)...(19): siRNA sense strand
ugauuaaacccucuacuau

SEQ ID NO: 1051447 - RNA, 19 nt, Homo sapiens
  misc_RNA (1)...(19): siRNA sense strand
augcugugcuauuugauua

SEQ ID NO: 1051448 - RNA, 19 nt, Homo sapiens
  misc_RNA (1)...(19): siRNA sense strand
gcaggccucucaguuggaa

SEQ ID NO: 1051449 - RNA, 19 nt, Homo sapiens
  misc_RNA (1)...(19): siRNA sense strand
ggacagagggccugaccau

SEQ ID NO: 1051450 - RNA, 19 nt, Homo sapiens
  misc_RNA (1)...(19): siRNA sense strand
gugcaaagaaacagguuaa

SEQ ID NO: 1051451 - RNA, 19 nt, Homo sapiens
  misc_RNA (1)...(19): siRNA sense strand
uuaucgagcuaguugauga

SEQ ID NO: 1051452 - RNA, 19 nt, Homo sapiens
  misc_RNA (1)...(19): siRNA sense strand
ucuaugcucugggauguuu

SEQ ID NO: 1051453 - RNA, 19 nt, Homo sapiens
  misc_RNA (1)...(19): siRNA sense strand
ggaaugaagaggcucaagu

SEQ ID NO: 1051454 - RNA, 19 nt, Homo sapiens
  misc_RNA (1)...(19): siRNA sense strand
aggaauuggugcaaagaaa

SEQ ID NO: 1051455 - RNA, 19 nt, Homo sapiens
  misc_RNA (1)...(19): siRNA sense strand
caagauauuccgugcugaa

SEQ ID NO: 1051456 - RNA, 19 nt, Homo sapiens
  misc_RNA (1)...(19): siRNA sense strand
gcacaucggccuccugcau

SEQ ID NO: 1051457 - RNA, 19 nt, Homo sapiens
  misc_RNA (1)...(19): siRNA sense strand
gagaguacagugcgcagaa

SEQ ID NO: 1051458 - RNA, 19 nt, Homo sapiens
  misc_RNA (1)...(19): siRNA sense strand
acagagagcuuugagaaaa

SEQ ID NO: 1051459 - RNA, 19 nt, Homo sapiens
  misc_RNA (1)...(19): siRNA sense strand
cagcguggccuucaucaug

SEQ ID NO: 1051460 - RNA, 19 nt, Homo sapiens
  misc_RNA (1)...(19): siRNA sense strand
gagagaggagugaccaaga

SEQ ID NO: 1051461 - RNA, 19 nt, Homo sapiens
  misc_RNA (1)...(19): siRNA sense strand
ugagcagaguuuccguuaa

SEQ ID NO: 1051462 - RNA, 19 nt, Homo sapiens
  misc_RNA (1)...(19): siRNA sense strand
ucggaaaggcccuccauuu

SEQ ID NO: 1051463 - RNA, 19 nt, Homo sapiens
  misc_RNA (1)...(19): siRNA sense strand
ccaaagugggacucaagua

SEQ ID NO: 1051464 - RNA, 19 nt, Homo sapiens
  misc_RNA (1)...(19): siRNA sense strand
ucugggauguuuaaguauu

SEQ ID NO: 1051465 - RNA, 19 nt, Homo sapiens
  misc_RNA (1)...(19): siRNA sense strand
ggucuaugcucugggaugu

SEQ ID NO: 1051466 - RNA, 19 nt, Homo sapiens
  misc_RNA (1)...(19): siRNA sense strand
aagcuuaacucuggaaugg

SEQ ID NO: 1051467 - RNA, 19 nt, Homo sapiens
  misc_RNA (1)...(19): siRNA sense strand
cuuaugcugugcuauuuga

SEQ ID NO: 1051468 - RNA, 19 nt, Homo sapiens
  misc_RNA (1)...(19): siRNA sense strand
caacaacagagagcuuuga

SEQ ID NO: 1051469 - RNA, 19 nt, Homo sapiens
  misc_RNA (1)...(19): siRNA sense strand
auccuaaacugguugcuaa

SEQ ID NO: 1051470 - RNA, 19 nt, Homo sapiens
  misc_RNA (1)...(19): siRNA sense strand
ggagucaccagaauguaug

SEQ ID NO: 1051471 - RNA, 19 nt, Homo sapiens
  misc_RNA (1)...(19): siRNA sense strand
cagauuuacugcuauaucg

SEQ ID NO: 1051472 - RNA, 19 nt, Homo sapiens
  misc_RNA (1)...(19): siRNA sense strand
gauagugaagcucuggaaa

SEQ ID NO: 1051473 - RNA, 19 nt, Homo sapiens
  misc_RNA (1)...(19): siRNA sense strand
gcuaguugaugaccauuuu

SEQ ID NO: 1051474 - RNA, 19 nt, Homo sapiens
  misc_RNA (1)...(19): siRNA sense strand
guuauucugucauuaucga

SEQ ID NO: 1051475 - RNA, 19 nt, Homo sapiens
  misc_RNA (1)...(19): siRNA sense strand
ucaagaagccguccaagcu

SEQ ID NO: 1051476 - RNA, 19 nt, Homo sapiens
  misc_RNA (1)...(19): siRNA sense strand
acaaacaugccuaucauca

SEQ ID NO: 1051477 - RNA, 19 nt, Homo sapiens
  misc_RNA (1)...(19): siRNA sense strand
uacuaugacugacaaggaa

SEQ ID NO: 1051478 - RNA, 19 nt, Homo sapiens
  misc_RNA (1)...(19): siRNA sense strand
gcagaguuuccguuaaugu

SEQ ID NO: 1051479 - RNA, 19 nt, Homo sapiens
  misc_RNA (1)...(19): siRNA sense strand
ugagcauccuccugugaaa

SEQ ID NO: 1051480 - RNA, 19 nt, Homo sapiens
  misc_RNA (1)...(19): siRNA sense strand
caaagagguaucagcauag

SEQ ID NO: 1051481 - RNA, 19 nt, Homo sapiens
  misc_RNA (1)...(19): siRNA sense strand
guacgggacagauuuacug

SEQ ID NO: 1051482 - RNA, 19 nt, Homo sapiens
  misc_RNA (1)...(19): siRNA sense strand
gcugaaaugauuaacaaca

SEQ ID NO: 1051483 - RNA, 19 nt, Homo sapiens
  misc_RNA (1)...(19): siRNA sense strand
gaauuggugcaaagaaaca

SEQ ID NO: 1051484 - RNA, 19 nt, Homo sapiens
  misc_RNA (1)...(19): siRNA sense strand
gauccuaaacugguugcua

SEQ ID NO: 1051485 - RNA, 19 nt, Homo sapiens
  misc_RNA (1)...(19): siRNA sense strand
ccucuacuaugacugacaa

SEQ ID NO: 1051486 - RNA, 19 nt, Homo sapiens
  misc_RNA (1)...(19): siRNA sense strand
caaagugggacucaaguac

SEQ ID NO: 1051487 - RNA, 19 nt, Homo sapiens
  misc_RNA (1)...(19): siRNA sense strand
ccaccuacauggccuacca

SEQ ID NO: 1051488 - RNA, 19 nt, Homo sapiens
  misc_RNA (1)...(19): siRNA sense strand
cugggauguuuaaguauuu

SEQ ID NO: 1051489 - RNA, 19 nt, Homo sapiens
  misc_RNA (1)...(19): siRNA sense strand
agaagaaauccauauagga

SEQ ID NO: 1051490 - RNA, 19 nt, Homo sapiens
  misc_RNA (1)...(19): siRNA sense strand
gguaucagcauaguguuga

SEQ ID NO: 1051491 - RNA, 19 nt, Homo sapiens
  misc_RNA (1)...(19): siRNA sense strand
ccuaucaucacaucaaaga

SEQ ID NO: 1051492 - RNA, 19 nt, Homo sapiens
  misc_RNA (1)...(19): siRNA sense strand
uaaugucucuaaggaacuu

SEQ ID NO: 1051493 - RNA, 19 nt, Homo sapiens
  misc_RNA (1)...(19): siRNA sense strand
ccguuaaugucucuaagga

SEQ ID NO: 1051494 - RNA, 19 nt, Homo sapiens
  misc_RNA (1)...(19): siRNA sense strand
gggacagauuuacugcuau

SEQ ID NO: 1051495 - RNA, 19 nt, Homo sapiens
  misc_RNA (1)...(19): siRNA sense strand
uaccauuacuuucgaagca

SEQ ID NO: 1051496 - RNA, 19 nt, Homo sapiens
  misc_RNA (1)...(19): siRNA sense strand
gaucuuugaguauuugcaa

SEQ ID NO: 1051497 - RNA, 19 nt, Homo sapiens
  misc_RNA (1)...(19): siRNA sense strand
agguuaauaugcagaagaa

SEQ ID NO: 1051498 - RNA, 19 nt, Homo sapiens
  misc_RNA (1)...(19): siRNA sense strand
caugcaaguuauucuguca

SEQ ID NO: 1051499 - RNA, 19 nt, Homo sapiens
  misc_RNA (1)...(19): siRNA sense strand
guccaagcuucacaauuuc

SEQ ID NO: 1051500 - RNA, 19 nt, Homo sapiens
  misc_RNA (1)...(19): siRNA sense strand
ccauauaggaucuuugagu

SEQ ID NO: 1051501 - RNA, 19 nt, Homo sapiens
  misc_RNA (1)...(19): siRNA sense strand
aaagagguaucagcauagu

SEQ ID NO: 1051502 - RNA, 19 nt, Homo sapiens
  misc_RNA (1)...(19): siRNA sense strand
ugcaaguuauucugucauu

SEQ ID NO: 1051503 - RNA, 19 nt, Homo sapiens
  misc_RNA (1)...(19): siRNA sense strand
gaggaauuggugcaaagaa

SEQ ID NO: 1051504 - RNA, 19 nt, Homo sapiens
  misc_RNA (1)...(19): siRNA sense strand
ggaaaagaagaguguauga

SEQ ID NO: 1051505 - RNA, 19 nt, Homo sapiens
  misc_RNA (1)...(19): siRNA sense strand
gcagagaacucaucaaaug

SEQ ID NO: 1051506 - RNA, 19 nt, Homo sapiens
  misc_RNA (1)...(19): siRNA sense strand
gcaaaucuauuccuacuug

SEQ ID NO: 1051507 - RNA, 19 nt, Homo sapiens
  misc_RNA (1)...(19): siRNA sense strand
gaagguacauuggacauaa

SEQ ID NO: 1051508 - RNA, 19 nt, Homo sapiens
  misc_RNA (1)...(19): siRNA sense strand
cgagagagcucaauccauu

SEQ ID NO: 1051509 - RNA, 19 nt, Homo sapiens
  misc_RNA (1)...(19): siRNA sense strand
gauagagucuugacacauu

SEQ ID NO: 1051510 - RNA, 19 nt, Homo sapiens
  misc_RNA (1)...(19): siRNA sense strand
gagacuggcucaagaauau

SEQ ID NO: 1051511 - RNA, 19 nt, Homo sapiens
  misc_RNA (1)...(19): siRNA sense strand
ggaaagccaugaacaguca

SEQ ID NO: 1051512 - RNA, 19 nt, Homo sapiens
  misc_RNA (1)...(19): siRNA sense strand
gaagacgauucccaccaua

SEQ ID NO: 1051513 - RNA, 19 nt, Homo sapiens
  misc_RNA (1)...(19): siRNA sense strand
gaacaugcugguuaucuaa

SEQ ID NO: 1051514 - RNA, 19 nt, Homo sapiens
  misc_RNA (1)...(19): siRNA sense strand
ggaagagucugaucaacca

SEQ ID NO: 1051515 - RNA, 19 nt, Homo sapiens
  misc_RNA (1)...(19): siRNA sense strand
gcagagaaauaaagucaag

SEQ ID NO: 1051516 - RNA, 19 nt, Homo sapiens
  misc_RNA (1)...(19): siRNA sense strand
gaacgucaauaagcacauu

SEQ ID NO: 1051517 - RNA, 19 nt, Homo sapiens
  misc_RNA (1)...(19): siRNA sense strand
caagaacaaccuagaaauu

SEQ ID NO: 1051518 - RNA, 19 nt, Homo sapiens
  misc_RNA (1)...(19): siRNA sense strand
gagcaggauccaaauauuu

SEQ ID NO: 1051519 - RNA, 19 nt, Homo sapiens
  misc_RNA (1)...(19): siRNA sense strand
ggccacugcuuuggaauua

SEQ ID NO: 1051520 - RNA, 19 nt, Homo sapiens
  misc_RNA (1)...(19): siRNA sense strand
gccaagagcugggauugaa

SEQ ID NO: 1051521 - RNA, 19 nt, Homo sapiens
  misc_RNA (1)...(19): siRNA sense strand
uaaaugagaagcagagaaa

SEQ ID NO: 1051522 - RNA, 19 nt, Homo sapiens
  misc_RNA (1)...(19): siRNA sense strand
gcaggaggaugaauuugau

SEQ ID NO: 1051523 - RNA, 19 nt, Homo sapiens
  misc_RNA (1)...(19): siRNA sense strand
ccacaaugauaaccaagaa

SEQ ID NO: 1051524 - RNA, 19 nt, Homo sapiens
  misc_RNA (1)...(19): siRNA sense strand
caagaaaguaucacaaaga

SEQ ID NO: 1051525 - RNA, 19 nt, Homo sapiens
  misc_RNA (1)...(19): siRNA sense strand
gaccaacacccuauggaua

SEQ ID NO: 1051526 - RNA, 19 nt, Homo sapiens
  misc_RNA (1)...(19): siRNA sense strand
gaucaaccaacucaaguaa

SEQ ID NO: 1051527 - RNA, 19 nt, Homo sapiens
  misc_RNA (1)...(19): siRNA sense strand
gaagaggacauagaugaaa

SEQ ID NO: 1051528 - RNA, 19 nt, Homo sapiens
  misc_RNA (1)...(19): siRNA sense strand
gcccagaaaucauggaguu

SEQ ID NO: 1051529 - RNA, 19 nt, Homo sapiens
  misc_RNA (1)...(19): siRNA sense strand
ucaauaagcacauucaaga

SEQ ID NO: 1051530 - RNA, 19 nt, Homo sapiens
  misc_RNA (1)...(19): siRNA sense strand
caucaguacuaaagucaaa

SEQ ID NO: 1051531 - RNA, 19 nt, Homo sapiens
  misc_RNA (1)...(19): siRNA sense strand
ccacugcuuuggaauuaaa

SEQ ID NO: 1051532 - RNA, 19 nt, Homo sapiens
  misc_RNA (1)...(19): siRNA sense strand
uaacuccaaugcagaaaug

SEQ ID NO: 1051533 - RNA, 19 nt, Homo sapiens
  misc_RNA (1)...(19): siRNA sense strand
ggaagacaauacccaaucu

SEQ ID NO: 1051534 - RNA, 19 nt, Homo sapiens
  misc_RNA (1)...(19): siRNA sense strand
gaagccaacucugaacaug

SEQ ID NO: 1051535 - RNA, 19 nt, Homo sapiens
  misc_RNA (1)...(19): siRNA sense strand
gcuaguuccugucaucuau

SEQ ID NO: 1051536 - RNA, 19 nt, Homo sapiens
  misc_RNA (1)...(19): siRNA sense strand
gcaugagcuuccaguguaa

SEQ ID NO: 1051537 - RNA, 19 nt, Homo sapiens
  misc_RNA (1)...(19): siRNA sense strand
aaacauagccaaggccuaa

SEQ ID NO: 1051538 - RNA, 19 nt, Homo sapiens
  misc_RNA (1)...(19): siRNA sense strand
gcaccaagaggccaagaaa

SEQ ID NO: 1051539 - RNA, 19 nt, Homo sapiens
  misc_RNA (1)...(19): siRNA sense strand
gcaagaugcaggaggauga

SEQ ID NO: 1051540 - RNA, 19 nt, Homo sapiens
  misc_RNA (1)...(19): siRNA sense strand
ugaacaugcugguuaucua

SEQ ID NO: 1051541 - RNA, 19 nt, Homo sapiens
  misc_RNA (1)...(19): siRNA sense strand
ccacaaagagacagaagaa

SEQ ID NO: 1051542 - RNA, 19 nt, Homo sapiens
  misc_RNA (1)...(19): siRNA sense strand
cccgacaaaugcaagauua

SEQ ID NO: 1051543 - RNA, 19 nt, Homo sapiens
  misc_RNA (1)...(19): siRNA sense strand
gcauaacccguuucuuuga

SEQ ID NO: 1051544 - RNA, 19 nt, Homo sapiens
  misc_RNA (1)...(19): siRNA sense strand
ugcaugagcuuccagugua

SEQ ID NO: 1051545 - RNA, 19 nt, Homo sapiens
  misc_RNA (1)...(19): siRNA sense strand
gacaauacccaaucugaug

SEQ ID NO: 1051546 - RNA, 19 nt, Homo sapiens
  misc_RNA (1)...(19): siRNA sense strand
uaaagaagaggacauagau

SEQ ID NO: 1051547 - RNA, 19 nt, Homo sapiens
  misc_RNA (1)...(19): siRNA sense strand
gcucaagaauauccucaug

SEQ ID NO: 1051548 - RNA, 19 nt, Homo sapiens
  misc_RNA (1)...(19): siRNA sense strand
caagaaagcagagaacuca

SEQ ID NO: 1051549 - RNA, 19 nt, Homo sapiens
  misc_RNA (1)...(19): siRNA sense strand
uacccaaucugaugauauu

SEQ ID NO: 1051550 - RNA, 19 nt, Homo sapiens
  misc_RNA (1)...(19): siRNA sense strand
guuaguuccuucacagauu

SEQ ID NO: 1051551 - RNA, 19 nt, Homo sapiens
  misc_RNA (1)...(19): siRNA sense strand
caacaaggauaagcacauc

SEQ ID NO: 1051552 - RNA, 19 nt, Homo sapiens
  misc_RNA (1)...(19): siRNA sense strand
cugcauaacccguuucuuu

SEQ ID NO: 1051553 - RNA, 19 nt, Homo sapiens
  misc_RNA (1)...(19): siRNA sense strand
aaacagcaguauccacaga

SEQ ID NO: 1051554 - RNA, 19 nt, Homo sapiens
  misc_RNA (1)...(19): siRNA sense strand
gaaagcagagaacucauca

SEQ ID NO: 1051555 - RNA, 19 nt, Homo sapiens
  misc_RNA (1)...(19): siRNA sense strand
caagagcaggauccaaaua

SEQ ID NO: 1051556 - RNA, 19 nt, Homo sapiens
  misc_RNA (1)...(19): siRNA sense strand
aaacuggccuagaagcuau

SEQ ID NO: 1051557 - RNA, 19 nt, Homo sapiens
  misc_RNA (1)...(19): siRNA sense strand
acaagaagauaacuccaau

SEQ ID NO: 1051558 - RNA, 19 nt, Homo sapiens
  misc_RNA (1)...(19): siRNA sense strand
aaagaggccacaucuguaa

SEQ ID NO: 1051559 - RNA, 19 nt, Homo sapiens
  misc_RNA (1)...(19): siRNA sense strand
caucgaacgucaauaagca

SEQ ID NO: 1051560 - RNA, 19 nt, Homo sapiens
  misc_RNA (1)...(19): siRNA sense strand
gaacaggagcaguaaacau

SEQ ID NO: 1051561 - RNA, 19 nt, Homo sapiens
  misc_RNA (1)...(19): siRNA sense strand
ucaagaauauccucaugca

SEQ ID NO: 1051562 - RNA, 19 nt, Homo sapiens
  misc_RNA (1)...(19): siRNA sense strand
aaucagaccuaugcuaguu

SEQ ID NO: 1051563 - RNA, 19 nt, Homo sapiens
  misc_RNA (1)...(19): siRNA sense strand
cagcugcaaucccgacaaa

SEQ ID NO: 1051564 - RNA, 19 nt, Homo sapiens
  misc_RNA (1)...(19): siRNA sense strand
caagaaagaaagacagaau

SEQ ID NO: 1051565 - RNA, 19 nt, Homo sapiens
  misc_RNA (1)...(19): siRNA sense strand
uuagugaacuugaccaaca

SEQ ID NO: 1051566 - RNA, 19 nt, Homo sapiens
  misc_RNA (1)...(19): siRNA sense strand
aacaggagcaguaaacaua

SEQ ID NO: 1051567 - RNA, 19 nt, Homo sapiens
  misc_RNA (1)...(19): siRNA sense strand
gaugauggcggcacugaug

SEQ ID NO: 1051568 - RNA, 19 nt, Homo sapiens
  misc_RNA (1)...(19): siRNA sense strand
guaauaccacgcccagaaa

SEQ ID NO: 1051569 - RNA, 19 nt, Homo sapiens
  misc_RNA (1)...(19): siRNA sense strand
caacaagaaaguaucacaa

SEQ ID NO: 1051570 - RNA, 19 nt, Homo sapiens
  misc_RNA (1)...(19): siRNA sense strand
gaugcaggaggaugaauuu

SEQ ID NO: 1051571 - RNA, 19 nt, Homo sapiens
  misc_RNA (1)...(19): siRNA sense strand
guugguacccacaaugaua

SEQ ID NO: 1051572 - RNA, 19 nt, Homo sapiens
  misc_RNA (1)...(19): siRNA sense strand
aagaagaggacauagauga

SEQ ID NO: 1051573 - RNA, 19 nt, Homo sapiens
  misc_RNA (1)...(19): siRNA sense strand
aaugagaagcagagaaaua

SEQ ID NO: 1051574 - RNA, 19 nt, Homo sapiens
  misc_RNA (1)...(19): siRNA sense strand
caacaaaaccccuugauca

SEQ ID NO: 1051575 - RNA, 19 nt, Homo sapiens
  misc_RNA (1)...(19): siRNA sense strand
caaaccaacugcugaaacg

SEQ ID NO: 1051576 - RNA, 19 nt, Homo sapiens
  misc_RNA (1)...(19): siRNA sense strand
agaaagaaagacagaauug

SEQ ID NO: 1051577 - RNA, 19 nt, Homo sapiens
  misc_RNA (1)...(19): siRNA sense strand
cgacaaaugcaagauuauu

SEQ ID NO: 1051578 - RNA, 19 nt, Homo sapiens
  misc_RNA (1)...(19): siRNA sense strand
aagcagagaacucaucaaa

SEQ ID NO: 1051579 - RNA, 19 nt, Homo sapiens
  misc_RNA (1)...(19): siRNA sense strand
agagcaggauccaaauauu

SEQ ID NO: 1051580 - RNA, 19 nt, Homo sapiens
  misc_RNA (1)...(19): siRNA sense strand
caacugaagguacauugga

SEQ ID NO: 1051581 - RNA, 19 nt, Homo sapiens
  misc_RNA (1)...(19): siRNA sense strand
gcuguggauucuugcauga

SEQ ID NO: 1051582 - RNA, 19 nt, Homo sapiens
  misc_RNA (1)...(19): siRNA sense strand
cuucacagauucuaaccaa

SEQ ID NO: 1051583 - RNA, 19 nt, Homo sapiens
  misc_RNA (1)...(19): siRNA sense strand
caagaguucuagccaagag

SEQ ID NO: 1051584 - RNA, 19 nt, Homo sapiens
  misc_RNA (1)...(19): siRNA sense strand
gagaagcagagaaauaaag

SEQ ID NO: 1051585 - RNA, 19 nt, Homo sapiens
  misc_RNA (1)...(19): siRNA sense strand
uaaccaagaacaagaagau

SEQ ID NO: 1051586 - RNA, 19 nt, Homo sapiens
  misc_RNA (1)...(19): siRNA sense strand
gcaagcaggaggaagacaa

SEQ ID NO: 1051587 - RNA, 19 nt, Homo sapiens
  misc_RNA (1)...(19): siRNA sense strand
gaaguugguacccacaaug

SEQ ID NO: 1051588 - RNA, 19 nt, Homo sapiens
  misc_RNA (1)...(19): siRNA sense strand
acaagaaaguaucacaaag

SEQ ID NO: 1051589 - RNA, 19 nt, Homo sapiens
  misc_RNA (1)...(19): siRNA sense strand
caacucaaguaagcaagau

SEQ ID NO: 1051590 - RNA, 19 nt, Homo sapiens
  misc_RNA (1)...(19): siRNA sense strand
gcagaacagggcaagaguu

SEQ ID NO: 1051591 - RNA, 19 nt, Homo sapiens
  misc_RNA (1)...(19): siRNA sense strand
ugucaucuauucgcuacua

SEQ ID NO: 1051592 - RNA, 19 nt, Homo sapiens
  misc_RNA (1)...(19): siRNA sense strand
cauggaaccuacugaugau

SEQ ID NO: 1051593 - RNA, 19 nt, Homo sapiens
  misc_RNA (1)...(19): siRNA sense strand
ggguaaaacuggccuagaa

SEQ ID NO: 1051594 - RNA, 19 nt, Homo sapiens
  misc_RNA (1)...(19): siRNA sense strand
caauaagcacauucaagaa

SEQ ID NO: 1051595 - RNA, 19 nt, Homo sapiens
  misc_RNA (1)...(19): siRNA sense strand
aagaaaguaucacaaagag

SEQ ID NO: 1051596 - RNA, 19 nt, Homo sapiens
  misc_RNA (1)...(19): siRNA sense strand
gcccauggaacacugcaua

SEQ ID NO: 1051597 - RNA, 19 nt, Homo sapiens
  misc_RNA (1)...(19): siRNA sense strand
cugguuaucuaaaugagaa

SEQ ID NO: 1051598 - RNA, 19 nt, Homo sapiens
  misc_RNA (1)...(19): siRNA sense strand
gcugcaaucccgacaaaug

SEQ ID NO: 1051599 - RNA, 19 nt, Homo sapiens
  misc_RNA (1)...(19): siRNA sense strand
ccagugacuuguccuccaa

SEQ ID NO: 1051600 - RNA, 19 nt, Homo sapiens
  misc_RNA (1)...(19): siRNA sense strand
ccaagaacaaccuagaaau

SEQ ID NO: 1051601 - RNA, 19 nt, Homo sapiens
  misc_RNA (1)...(19): siRNA sense strand
ccagaaaucauggaguuga

SEQ ID NO: 1051602 - RNA, 19 nt, Homo sapiens
  misc_RNA (1)...(19): siRNA sense strand
acucugaacaugcugguua

SEQ ID NO: 1051603 - RNA, 19 nt, Homo sapiens
  misc_RNA (1)...(19): siRNA sense strand
gaggaaagccaugaacagu

SEQ ID NO: 1051604 - RNA, 19 nt, Homo sapiens
  misc_RNA (1)...(19): siRNA sense strand
gacaaucagaccuaugcua

SEQ ID NO: 1051605 - RNA, 19 nt, Homo sapiens
  misc_RNA (1)...(19): siRNA sense strand
ggacagagguauaucauga

SEQ ID NO: 1051606 - RNA, 19 nt, Homo sapiens
  misc_RNA (1)...(19): siRNA sense strand
gaagauaaauggaggugaa

SEQ ID NO: 1051607 - RNA, 19 nt, Homo sapiens
  misc_RNA (1)...(19): siRNA sense strand
gggauucgauggauucuuu

SEQ ID NO: 1051608 - RNA, 19 nt, Homo sapiens
  misc_RNA (1)...(19): siRNA sense strand
ggagagaagcaucggauua

SEQ ID NO: 1051609 - RNA, 19 nt, Homo sapiens
  misc_RNA (1)...(19): siRNA sense strand
gggcugaucaugaagauua

SEQ ID NO: 1051610 - RNA, 19 nt, Homo sapiens
  misc_RNA (1)...(19): siRNA sense strand
ccaaacagggucagauuua

SEQ ID NO: 1051611 - RNA, 19 nt, Homo sapiens
  misc_RNA (1)...(19): siRNA sense strand
gaaagaagcacugggaaga

SEQ ID NO: 1051612 - RNA, 19 nt, Homo sapiens
  misc_RNA (1)...(19): siRNA sense strand
ucaagagacucccgaagaa

SEQ ID NO: 1051613 - RNA, 19 nt, Homo sapiens
  misc_RNA (1)...(19): siRNA sense strand
gcagugugguuugaagaua

SEQ ID NO: 1051614 - RNA, 19 nt, Homo sapiens
  misc_RNA (1)...(19): siRNA sense strand
agaaugggcugaucaugaa

SEQ ID NO: 1051615 - RNA, 19 nt, Homo sapiens
  misc_RNA (1)...(19): siRNA sense strand
gagagaagcaucggauuaa

SEQ ID NO: 1051616 - RNA, 19 nt, Homo sapiens
  misc_RNA (1)...(19): siRNA sense strand
gcaggaaacuccagaagac

SEQ ID NO: 1051617 - RNA, 19 nt, Homo sapiens
  misc_RNA (1)...(19): siRNA sense strand
ucagucagcucgaucaaga

SEQ ID NO: 1051618 - RNA, 19 nt, Homo sapiens
  misc_RNA (1)...(19): siRNA sense strand
gugagaagaugagcaauau

SEQ ID NO: 1051619 - RNA, 19 nt, Homo sapiens
  misc_RNA (1)...(19): siRNA sense strand
gaaacacagugguaugaag

SEQ ID NO: 1051620 - RNA, 19 nt, Homo sapiens
  misc_RNA (1)...(19): siRNA sense strand
ucagagaaguuccacauca

SEQ ID NO: 1051621 - RNA, 19 nt, Homo sapiens
  misc_RNA (1)...(19): siRNA sense strand
gcagaucaguguagacagu

SEQ ID NO: 1051622 - RNA, 19 nt, Homo sapiens
  misc_RNA (1)...(19): siRNA sense strand
gaacaaguuuugccaguga

SEQ ID NO: 1051623 - RNA, 19 nt, Homo sapiens
  misc_RNA (1)...(19): siRNA sense strand
ccaaugagauggauauucg

SEQ ID NO: 1051624 - RNA, 19 nt, Homo sapiens
  misc_RNA (1)...(19): siRNA sense strand
aaaguaagaccgaguuaaa

SEQ ID NO: 1051625 - RNA, 19 nt, Homo sapiens
  misc_RNA (1)...(19): siRNA sense strand
gacaaugcccugaaucuug

SEQ ID NO: 1051626 - RNA, 19 nt, Homo sapiens
  misc_RNA (1)...(19): siRNA sense strand
ccaaggccaucauuguauu

SEQ ID NO: 1051627 - RNA, 19 nt, Homo sapiens
  misc_RNA (1)...(19): siRNA sense strand
gaggugaaguugcaguguu

SEQ ID NO: 1051628 - RNA, 19 nt, Homo sapiens
  misc_RNA (1)...(19): siRNA sense strand
cagaagacccugaagaaug

SEQ ID NO: 1051629 - RNA, 19 nt, Homo sapiens
  misc_RNA (1)...(19): siRNA sense strand
gaacuaugacauugaaauc

SEQ ID NO: 1051630 - RNA, 19 nt, Homo sapiens
  misc_RNA (1)...(19): siRNA sense strand
gaugauuccugguguucuu

SEQ ID NO: 1051631 - RNA, 19 nt, Homo sapiens
  misc_RNA (1)...(19): siRNA sense strand
gacagucucuccucuuauc

SEQ ID NO: 1051632 - RNA, 19 nt, Homo sapiens
  misc_RNA (1)...(19): siRNA sense strand
ccagaaugcugaucucuac

SEQ ID NO: 1051633 - RNA, 19 nt, Homo sapiens
  misc_RNA (1)...(19): siRNA sense strand
uaaagagucuaaguucaga

SEQ ID NO: 1051634 - RNA, 19 nt, Homo sapiens
  misc_RNA (1)...(19): siRNA sense strand
gaugacacccuuucucgaa

SEQ ID NO: 1051635 - RNA, 19 nt, Homo sapiens
  misc_RNA (1)...(19): siRNA sense strand
ccgaagaaguguccgaaug

SEQ ID NO: 1051636 - RNA, 19 nt, Homo sapiens
  misc_RNA (1)...(19): siRNA sense strand
acagagauuugccuacuau

SEQ ID NO: 1051637 - RNA, 19 nt, Homo sapiens
  misc_RNA (1)...(19): siRNA sense strand
ggaagaagaaggauauuuu

SEQ ID NO: 1051638 - RNA, 19 nt, Homo sapiens
  misc_RNA (1)...(19): siRNA sense strand
gagucuaaguucagaguug

SEQ ID NO: 1051639 - RNA, 19 nt, Homo sapiens
  misc_RNA (1)...(19): siRNA sense strand
gcaugugacgagauaauuu

SEQ ID NO: 1051640 - RNA, 19 nt, Homo sapiens
  misc_RNA (1)...(19): siRNA sense strand
gagcaaaguguucgggauu

SEQ ID NO: 1051641 - RNA, 19 nt, Homo sapiens
  misc_RNA (1)...(19): siRNA sense strand
agagguauaucaugaagga

SEQ ID NO: 1051642 - RNA, 19 nt, Homo sapiens
  misc_RNA (1)...(19): siRNA sense strand
caaguuuccuggccucuca

SEQ ID NO: 1051643 - RNA, 19 nt, Homo sapiens
  misc_RNA (1)...(19): siRNA sense strand
gaaagucccgcuccgacaa

SEQ ID NO: 1051644 - RNA, 19 nt, Homo sapiens
  misc_RNA (1)...(19): siRNA sense strand
gagaagaugagcaauaugg

SEQ ID NO: 1051645 - RNA, 19 nt, Homo sapiens
  misc_RNA (1)...(19): siRNA sense strand
agaagacccugaagaaugg

SEQ ID NO: 1051646 - RNA, 19 nt, Homo sapiens
  misc_RNA (1)...(19): siRNA sense strand
gauaaauggaggugaaguu

SEQ ID NO: 1051647 - RNA, 19 nt, Homo sapiens
  misc_RNA (1)...(19): siRNA sense strand
gcagaacccaggaaugaau

SEQ ID NO: 1051648 - RNA, 19 nt, Homo sapiens
  misc_RNA (1)...(19): siRNA sense strand
ugacgcagcuccuccucaa

SEQ ID NO: 1051649 - RNA, 19 nt, Homo sapiens
  misc_RNA (1)...(19): siRNA sense strand
ccucaaguuuggugauaaa

SEQ ID NO: 1051650 - RNA, 19 nt, Homo sapiens
  misc_RNA (1)...(19): siRNA sense strand
gaagagaagccaguacauc

SEQ ID NO: 1051651 - RNA, 19 nt, Homo sapiens
  misc_RNA (1)...(19): siRNA sense strand
gaggaacaauuaagcuucu

SEQ ID NO: 1051652 - RNA, 19 nt, Homo sapiens
  misc_RNA (1)...(19): siRNA sense strand
gaugaugauuccugguguu

SEQ ID NO: 1051653 - RNA, 19 nt, Homo sapiens
  misc_RNA (1)...(19): siRNA sense strand
ggaacuaugacauugaaau

SEQ ID NO: 1051654 - RNA, 19 nt, Homo sapiens
  misc_RNA (1)...(19): siRNA sense strand
gauggaaacagaagauugu

SEQ ID NO: 1051655 - RNA, 19 nt, Homo sapiens
  misc_RNA (1)...(19): siRNA sense strand
gauggauucuuuggcauug

SEQ ID NO: 1051656 - RNA, 19 nt, Homo sapiens
  misc_RNA (1)...(19): siRNA sense strand
augcacagaugaccuauga

SEQ ID NO: 1051657 - RNA, 19 nt, Homo sapiens
  misc_RNA (1)...(19): siRNA sense strand
cagugugguuugaagauaa

SEQ ID NO: 1051658 - RNA, 19 nt, Homo sapiens
  misc_RNA (1)...(19): siRNA sense strand
gauaaugagguacgguauu

SEQ ID NO: 1051659 - RNA, 19 nt, Homo sapiens
  misc_RNA (1)...(19): siRNA sense strand
gagauuugccuacuauaca

SEQ ID NO: 1051660 - RNA, 19 nt, Homo sapiens
  misc_RNA (1)...(19): siRNA sense strand
gagauggagcccaagauga

SEQ ID NO: 1051661 - RNA, 19 nt, Homo sapiens
  misc_RNA (1)...(19): siRNA sense strand
gaaaccagagcaaaguguu

SEQ ID NO: 1051662 - RNA, 19 nt, Homo sapiens
  misc_RNA (1)...(19): siRNA sense strand
ccagagccuugcaaguaaa

SEQ ID NO: 1051663 - RNA, 19 nt, Homo sapiens
  misc_RNA (1)...(19): siRNA sense strand
ggagauggagcccaagaug

SEQ ID NO: 1051664 - RNA, 19 nt, Homo sapiens
  misc_RNA (1)...(19): siRNA sense strand
auaaugagguacgguauug

SEQ ID NO: 1051665 - RNA, 19 nt, Homo sapiens
  misc_RNA (1)...(19): siRNA sense strand
ugagcaauaugggaacuuu

SEQ ID NO: 1051666 - RNA, 19 nt, Homo sapiens
  misc_RNA (1)...(19): siRNA sense strand
uggucgaccucaucuauuu

SEQ ID NO: 1051667 - RNA, 19 nt, Homo sapiens
  misc_RNA (1)...(19): siRNA sense strand
aaccagagccuugcaagua

SEQ ID NO: 1051668 - RNA, 19 nt, Homo sapiens
  misc_RNA (1)...(19): siRNA sense strand
agaguuguguccagagaaa

SEQ ID NO: 1051669 - RNA, 19 nt, Homo sapiens
  misc_RNA (1)...(19): siRNA sense strand
cugggaagaggaacaauua

SEQ ID NO: 1051670 - RNA, 19 nt, Homo sapiens
  misc_RNA (1)...(19): siRNA sense strand
gcugugcauuggaggagua

SEQ ID NO: 1051671 - RNA, 19 nt, Homo sapiens
  misc_RNA (1)...(19): siRNA sense strand
cccgggagauccaagcaua

SEQ ID NO: 1051672 - RNA, 19 nt, Homo sapiens
  misc_RNA (1)...(19): siRNA sense strand
gaagauugugagaagauga

SEQ ID NO: 1051673 - RNA, 19 nt, Homo sapiens
  misc_RNA (1)...(19): siRNA sense strand
gcugaugaaugcacagaag

SEQ ID NO: 1051674 - RNA, 19 nt, Homo sapiens
  misc_RNA (1)...(19): siRNA sense strand
ccacagagauuugccuacu

SEQ ID NO: 1051675 - RNA, 19 nt, Homo sapiens
  misc_RNA (1)...(19): siRNA sense strand
gaaaauacucucccaagga

SEQ ID NO: 1051676 - RNA, 19 nt, Homo sapiens
  misc_RNA (1)...(19): siRNA sense strand
uugaggagauggaaacaga

SEQ ID NO: 1051677 - RNA, 19 nt, Homo sapiens
  misc_RNA (1)...(19): siRNA sense strand
gccuuuggcugucagagaa

SEQ ID NO: 1051678 - RNA, 19 nt, Homo sapiens
  misc_RNA (1)...(19): siRNA sense strand
ggucagauuuacugcucaa

SEQ ID NO: 1051679 - RNA, 19 nt, Homo sapiens
  misc_RNA (1)...(19): siRNA sense strand
aagaaugggcugaucauga

SEQ ID NO: 1051680 - RNA, 19 nt, Homo sapiens
  misc_RNA (1)...(19): siRNA sense strand
caaacagggucagauuuac

SEQ ID NO: 1051681 - RNA, 19 nt, Homo sapiens
  misc_RNA (1)...(19): siRNA sense strand
ggagugcagaguccuuaaa

SEQ ID NO: 1051682 - RNA, 19 nt, Homo sapiens
  misc_RNA (1)...(19): siRNA sense strand
ggagauggaaacagaagau

SEQ ID NO: 1051683 - RNA, 19 nt, Homo sapiens
  misc_RNA (1)...(19): siRNA sense strand
ggacugggcgauucugcuu

SEQ ID NO: 1051684 - RNA, 19 nt, Homo sapiens
  misc_RNA (1)...(19): siRNA sense strand
agagaagcaucggauuaaa

SEQ ID NO: 1051685 - RNA, 19 nt, Homo sapiens
  misc_RNA (1)...(19): siRNA sense strand
aaauggaggugaaguugca

SEQ ID NO: 1051686 - RNA, 19 nt, Homo sapiens
  misc_RNA (1)...(19): siRNA sense strand
caacaaaauccaagaagaa

SEQ ID NO: 1051687 - RNA, 19 nt, Homo sapiens
  misc_RNA (1)...(19): siRNA sense strand
cacagagauuugccuacua

SEQ ID NO: 1051688 - RNA, 19 nt, Homo sapiens
  misc_RNA (1)...(19): siRNA sense strand
accagagccuugcaaguaa

SEQ ID NO: 1051689 - RNA, 19 nt, Homo sapiens
  misc_RNA (1)...(19): siRNA sense strand
ggaggacagagguauauca

SEQ ID NO: 1051690 - RNA, 19 nt, Homo sapiens
  misc_RNA (1)...(19): siRNA sense strand
gugcucagcggaagaaaga

SEQ ID NO: 1051691 - RNA, 19 nt, Homo sapiens
  misc_RNA (1)...(19): siRNA sense strand
gaaacagaagauugugaga

SEQ ID NO: 1051692 - RNA, 19 nt, Homo sapiens
  misc_RNA (1)...(19): siRNA sense strand
aaacacagugguaugaaga

SEQ ID NO: 1051693 - RNA, 19 nt, Homo sapiens
  misc_RNA (1)...(19): siRNA sense strand
ggaagaggaacaauuaagc

SEQ ID NO: 1051694 - RNA, 19 nt, Homo sapiens
  misc_RNA (1)...(19): siRNA sense strand
ccaugccacucccgauuau

SEQ ID NO: 1051695 - RNA, 19 nt, Homo sapiens
  misc_RNA (1)...(19): siRNA sense strand
ucagaguuguguccagaga

SEQ ID NO: 1051696 - RNA, 19 nt, Homo sapiens
  misc_RNA (1)...(19): siRNA sense strand
aacagaagauugugagaag

SEQ ID NO: 1051697 - RNA, 19 nt, Homo sapiens
  misc_RNA (1)...(19): siRNA sense strand
gaugaaacacagugguaug

SEQ ID NO: 1051698 - RNA, 19 nt, Homo sapiens
  misc_RNA (1)...(19): siRNA sense strand
caagauggacugggcgauu

SEQ ID NO: 1051699 - RNA, 19 nt, Homo sapiens
  misc_RNA (1)...(19): siRNA sense strand
cuauacagaugaccuuucu

SEQ ID NO: 1051700 - RNA, 19 nt, Homo sapiens
  misc_RNA (1)...(19): siRNA sense strand
ugggaacuaugacauugaa

SEQ ID NO: 1051701 - RNA, 19 nt, Homo sapiens
  misc_RNA (1)...(19): siRNA sense strand
gaacuuugaacucuuccau

SEQ ID NO: 1051702 - RNA, 19 nt, Homo sapiens
  misc_RNA (1)...(19): siRNA sense strand
gcaauaugggaacuuugaa

SEQ ID NO: 1051703 - RNA, 19 nt, Homo sapiens
  misc_RNA (1)...(19): siRNA sense strand
aaacagaagauugugagaa

SEQ ID NO: 1051704 - RNA, 19 nt, Homo sapiens
  misc_RNA (1)...(19): siRNA sense strand
gccaaggccaucauuguau

SEQ ID NO: 1051705 - RNA, 19 nt, Homo sapiens
  misc_RNA (1)...(19): siRNA sense strand
gaacugagaccgaaauaua

SEQ ID NO: 1051706 - RNA, 19 nt, Homo sapiens
  misc_RNA (1)...(19): siRNA sense strand
aggaagagcugaacguuua

SEQ ID NO: 1051707 - RNA, 19 nt, Homo sapiens
  misc_RNA (1)...(19): siRNA sense strand
acaaugccaucaagucaua

SEQ ID NO: 1051708 - RNA, 19 nt, Homo sapiens
  misc_RNA (1)...(19): siRNA sense strand
gagcacaguagaauauaua

SEQ ID NO: 1051709 - RNA, 19 nt, Homo sapiens
  misc_RNA (1)...(19): siRNA sense strand
gccaugacccucugcauua

SEQ ID NO: 1051710 - RNA, 19 nt, Homo sapiens
  misc_RNA (1)...(19): siRNA sense strand
cauaugaauugcugaaguu

SEQ ID NO: 1051711 - RNA, 19 nt, Homo sapiens
  misc_RNA (1)...(19): siRNA sense strand
caacauacccauaucaagu

SEQ ID NO: 1051712 - RNA, 19 nt, Homo sapiens
  misc_RNA (1)...(19): siRNA sense strand
gagcucgucuucaggauca

SEQ ID NO: 1051713 - RNA, 19 nt, Homo sapiens
  misc_RNA (1)...(19): siRNA sense strand
gcauaugaauugcugaagu

SEQ ID NO: 1051714 - RNA, 19 nt, Homo sapiens
  misc_RNA (1)...(19): siRNA sense strand
acaaagacauggaggaaag

SEQ ID NO: 1051715 - RNA, 19 nt, Homo sapiens
  misc_RNA (1)...(19): siRNA sense strand
acaagggaauugcuccuaa

SEQ ID NO: 1051716 - RNA, 19 nt, Homo sapiens
  misc_RNA (1)...(19): siRNA sense strand
gcauggugcccuucaguuu

SEQ ID NO: 1051717 - RNA, 19 nt, Homo sapiens
  misc_RNA (1)...(19): siRNA sense strand
ggaguaaccccaaauauau

SEQ ID NO: 1051718 - RNA, 19 nt, Homo sapiens
  misc_RNA (1)...(19): siRNA sense strand
caaccagcauaucaauaga

SEQ ID NO: 1051719 - RNA, 19 nt, Homo sapiens
  misc_RNA (1)...(19): siRNA sense strand
gaaggaagagcugaacguu

SEQ ID NO: 1051720 - RNA, 19 nt, Homo sapiens
  misc_RNA (1)...(19): siRNA sense strand
caagggaauugcuccuaau

SEQ ID NO: 1051721 - RNA, 19 nt, Homo sapiens
  misc_RNA (1)...(19): siRNA sense strand
aaacucgccuuauguuaca

SEQ ID NO: 1051722 - RNA, 19 nt, Homo sapiens
  misc_RNA (1)...(19): siRNA sense strand
cauggugcccuucaguuua

SEQ ID NO: 1051723 - RNA, 19 nt, Homo sapiens
  misc_RNA (1)...(19): siRNA sense strand
uuacuugaccuuagagaaa

SEQ ID NO: 1051724 - RNA, 19 nt, Homo sapiens
  misc_RNA (1)...(19): siRNA sense strand
uuacauugcuugacuacca

SEQ ID NO: 1051725 - RNA, 19 nt, Homo sapiens
  misc_RNA (1)...(19): siRNA sense strand
gcagcaacauacccauauc

SEQ ID NO: 1051726 - RNA, 19 nt, Homo sapiens
  misc_RNA (1)...(19): siRNA sense strand
gcauaucaauagauuacca

SEQ ID NO: 1051727 - RNA, 19 nt, Homo sapiens
  misc_RNA (1)...(19): siRNA sense strand
guuuagaggcaacagaaua

SEQ ID NO: 1051728 - RNA, 19 nt, Homo sapiens
  misc_RNA (1)...(19): siRNA sense strand
gggacuuuaucaaggagua

SEQ ID NO: 1051729 - RNA, 19 nt, Homo sapiens
  misc_RNA (1)...(19): siRNA sense strand
gugcguggauuauauaagg

SEQ ID NO: 1051730 - RNA, 19 nt, Homo sapiens
  misc_RNA (1)...(19): siRNA sense strand
agaccgaaauauaauggaa

SEQ ID NO: 1051731 - RNA, 19 nt, Homo sapiens
  misc_RNA (1)...(19): siRNA sense strand
guacaaccagcauaucaau

SEQ ID NO: 1051732 - RNA, 19 nt, Homo sapiens
  misc_RNA (1)...(19): siRNA sense strand
gcaacagaauaccuugucu

SEQ ID NO: 1051733 - RNA, 19 nt, Homo sapiens
  misc_RNA (1)...(19): siRNA sense strand
gaaggugugcguggauuau

SEQ ID NO: 1051734 - RNA, 19 nt, Homo sapiens
  misc_RNA (1)...(19): siRNA sense strand
guugagcacaguagaauau

SEQ ID NO: 1051735 - RNA, 19 nt, Homo sapiens
  misc_RNA (1)...(19): siRNA sense strand
ugaaguacaaccagcauau

SEQ ID NO: 1051736 - RNA, 19 nt, Homo sapiens
  misc_RNA (1)...(19): siRNA sense strand
augaauugcugaaguugaa

SEQ ID NO: 1051737 - RNA, 19 nt, Homo sapiens
  misc_RNA (1)...(19): siRNA sense strand
auacccauaucaagucgua

SEQ ID NO: 1051738 - RNA, 19 nt, Homo sapiens
  misc_RNA (1)...(19): siRNA sense strand
ugagcacaguagaauauau

SEQ ID NO: 1051739 - RNA, 19 nt, Homo sapiens
  misc_RNA (1)...(19): siRNA sense strand
uauauggggugcagguuua

SEQ ID NO: 1051740 - RNA, 19 nt, Homo sapiens
  misc_RNA (1)...(19): siRNA sense strand
gcagcacuauccaaaauau

SEQ ID NO: 1051741 - RNA, 19 nt, Homo sapiens
  misc_RNA (1)...(19): siRNA sense strand
guaugaugcuguuguuaac

SEQ ID NO: 1051742 - RNA, 19 nt, Homo sapiens
  misc_RNA (1)...(19): siRNA sense strand
ggugugcguggauuauaua

SEQ ID NO: 1051743 - RNA, 19 nt, Homo sapiens
  misc_RNA (1)...(19): siRNA sense strand
ucacaaagacauggaggaa

SEQ ID NO: 1051744 - RNA, 19 nt, Homo sapiens
  misc_RNA (1)...(19): siRNA sense strand
cgugagugauggauuggaa

SEQ ID NO: 1051745 - RNA, 19 nt, Homo sapiens
  misc_RNA (1)...(19): siRNA sense strand
gccaucaagucauauaaaa

SEQ ID NO: 1051746 - RNA, 19 nt, Homo sapiens
  misc_RNA (1)...(19): siRNA sense strand
cagcauaucaauagauuac

SEQ ID NO: 1051747 - RNA, 19 nt, Homo sapiens
  misc_RNA (1)...(19): siRNA sense strand
cgccuuauguuacaguaug

SEQ ID NO: 1051748 - RNA, 19 nt, Homo sapiens
  misc_RNA (1)...(19): siRNA sense strand
agaaggcgucgguggauuu

SEQ ID NO: 1051749 - RNA, 19 nt, Homo sapiens
  misc_RNA (1)...(19): siRNA sense strand
gcaacauacccauaucaag

SEQ ID NO: 1051750 - RNA, 19 nt, Homo sapiens
  misc_RNA (1)...(19): siRNA sense strand
acaaccagcauaucaauag

SEQ ID NO: 1051751 - RNA, 19 nt, Homo sapiens
  misc_RNA (1)...(19): siRNA sense strand
ugaaggugugcguggauua

SEQ ID NO: 1051752 - RNA, 19 nt, Homo sapiens
  misc_RNA (1)...(19): siRNA sense strand
ccgacaauauaaaggaaug

SEQ ID NO: 1051753 - RNA, 19 nt, Homo sapiens
  misc_RNA (1)...(19): siRNA sense strand
ccacaccgacaauauaaag

SEQ ID NO: 1051754 - RNA, 19 nt, Homo sapiens
  misc_RNA (1)...(19): siRNA sense strand
gaaguacaaccagcauauc

SEQ ID NO: 1051755 - RNA, 19 nt, Homo sapiens
  misc_RNA (1)...(19): siRNA sense strand
caccgacaauauaaaggaa

SEQ ID NO: 1051756 - RNA, 19 nt, Homo sapiens
  misc_RNA (1)...(19): siRNA sense strand
aguaugaugcuguuguuaa

SEQ ID NO: 1051757 - RNA, 19 nt, Homo sapiens
  misc_RNA (1)...(19): siRNA sense strand
uuggaaacuugauggacua

SEQ ID NO: 1051758 - RNA, 19 nt, Homo sapiens
  misc_RNA (1)...(19): siRNA sense strand
ggaacugagaccgaaauau

SEQ ID NO: 1051759 - RNA, 19 nt, Homo sapiens
  misc_RNA (1)...(19): siRNA sense strand
agugauggauuggaacuga

SEQ ID NO: 1051760 - RNA, 19 nt, Homo sapiens
  misc_RNA (1)...(19): siRNA sense strand
uuacaaugccaucaaguca

SEQ ID NO: 1051761 - RNA, 19 nt, Homo sapiens
  misc_RNA (1)...(19): siRNA sense strand
gcacaguagaauauauauc

SEQ ID NO: 1051762 - RNA, 19 nt, Homo sapiens
  misc_RNA (1)...(19): siRNA sense strand
aucaauagauuaccagaag

SEQ ID NO: 1051763 - RNA, 19 nt, Homo sapiens
  misc_RNA (1)...(19): siRNA sense strand
accagcauaucaauagauu

SEQ ID NO: 1051764 - RNA, 19 nt, Homo sapiens
  misc_RNA (1)...(19): siRNA sense strand
gcauuacaaacccauuaug

SEQ ID NO: 1051765 - RNA, 19 nt, Homo sapiens
  misc_RNA (1)...(19): siRNA sense strand
gaagagcugaacguuuaga

SEQ ID NO: 1051766 - RNA, 19 nt, Homo sapiens
  misc_RNA (1)...(19): siRNA sense strand
cgccgugagugauggauug

SEQ ID NO: 1051767 - RNA, 19 nt, Homo sapiens
  misc_RNA (1)...(19): siRNA sense strand
ugacuaccauuuggaaacu

SEQ ID NO: 1051768 - RNA, 19 nt, Homo sapiens
  misc_RNA (1)...(19): siRNA sense strand
acagugguguaauagaugu

SEQ ID NO: 1051769 - RNA, 19 nt, Homo sapiens
  misc_RNA (1)...(19): siRNA sense strand
ggacuuuaucaaggaguaa

SEQ ID NO: 1051770 - RNA, 19 nt, Homo sapiens
  misc_RNA (1)...(19): siRNA sense strand
uauaucuguugcagcacua

SEQ ID NO: 1051771 - RNA, 19 nt, Homo sapiens
  misc_RNA (1)...(19): siRNA sense strand
cugcauuacaaacccauua

SEQ ID NO: 1051772 - RNA, 19 nt, Homo sapiens
  misc_RNA (1)...(19): siRNA sense strand
ccaguugagcacaguagaa

SEQ ID NO: 1051773 - RNA, 19 nt, Homo sapiens
  misc_RNA (1)...(19): siRNA sense strand
aacugagaccgaaauauaa

SEQ ID NO: 1051774 - RNA, 19 nt, Homo sapiens
  misc_RNA (1)...(19): siRNA sense strand
ggaauguuugauacacuug

SEQ ID NO: 1051775 - RNA, 19 nt, Homo sapiens
  misc_RNA (1)...(19): siRNA sense strand
aggaauguuugauacacuu

SEQ ID NO: 1051776 - RNA, 19 nt, Homo sapiens
  misc_RNA (1)...(19): siRNA sense strand
cagcaacauacccauauca

SEQ ID NO: 1051777 - RNA, 19 nt, Homo sapiens
  misc_RNA (1)...(19): siRNA sense strand
caaggaguaaccccaaaua

SEQ ID NO: 1051778 - RNA, 19 nt, Homo sapiens
  misc_RNA (1)...(19): siRNA sense strand
augaaaacgucucacauuu

SEQ ID NO: 1051779 - RNA, 19 nt, Homo sapiens
  misc_RNA (1)...(19): siRNA sense strand
aagaaggcgucgguggauu

SEQ ID NO: 1051780 - RNA, 19 nt, Homo sapiens
  misc_RNA (1)...(19): siRNA sense strand
caaagacauggaggaaaga

SEQ ID NO: 1051781 - RNA, 19 nt, Homo sapiens
  misc_RNA (1)...(19): siRNA sense strand
uacaaccagcauaucaaua

SEQ ID NO: 1051782 - RNA, 19 nt, Homo sapiens
  misc_RNA (1)...(19): siRNA sense strand
aaaggaauguuugauacac

SEQ ID NO: 1051783 - RNA, 19 nt, Homo sapiens
  misc_RNA (1)...(19): siRNA sense strand
aaggaagagcugaacguuu

SEQ ID NO: 1051784 - RNA, 19 nt, Homo sapiens
  misc_RNA (1)...(19): siRNA sense strand
gccuuauguuacaguauga

SEQ ID NO: 1051785 - RNA, 19 nt, Homo sapiens
  misc_RNA (1)...(19): siRNA sense strand
gaccgaaauauaauggaau

SEQ ID NO: 1051786 - RNA, 19 nt, Homo sapiens
  misc_RNA (1)...(19): siRNA sense strand
acaccgacaauauaaagga

SEQ ID NO: 1051787 - RNA, 19 nt, Homo sapiens
  misc_RNA (1)...(19): siRNA sense strand
guaaucacaaagacaugga

SEQ ID NO: 1051788 - RNA, 19 nt, Homo sapiens
  misc_RNA (1)...(19): siRNA sense strand
auggugcccuucaguuuau

SEQ ID NO: 1051789 - RNA, 19 nt, Homo sapiens
  misc_RNA (1)...(19): siRNA sense strand
ggaagagcugaacguuuag

SEQ ID NO: 1051790 - RNA, 19 nt, Homo sapiens
  misc_RNA (1)...(19): siRNA sense strand
ucgcagcaacauacccaua

SEQ ID NO: 1051791 - RNA, 19 nt, Homo sapiens
  misc_RNA (1)...(19): siRNA sense strand
ccagcauaucaauagauua

SEQ ID NO: 1051792 - RNA, 19 nt, Homo sapiens
  misc_RNA (1)...(19): siRNA sense strand
uugcugaaguugaaguaca

SEQ ID NO: 1051793 - RNA, 19 nt, Homo sapiens
  misc_RNA (1)...(19): siRNA sense strand
ccaugacccucugcauuac

SEQ ID NO: 1051794 - RNA, 19 nt, Homo sapiens
  misc_RNA (1)...(19): siRNA sense strand
gaauguuugauacacuugu

SEQ ID NO: 1051795 - RNA, 19 nt, Homo sapiens
  misc_RNA (1)...(19): siRNA sense strand
gguaugagaaccugauagc

SEQ ID NO: 1051796 - RNA, 19 nt, Homo sapiens
  misc_RNA (1)...(19): siRNA sense strand
gcuugacuaccauuuggaa

SEQ ID NO: 1051797 - RNA, 19 nt, Homo sapiens
  misc_RNA (1)...(19): siRNA sense strand
gcaaagaacuucagccuau

SEQ ID NO: 1051798 - RNA, 19 nt, Homo sapiens
  misc_RNA (1)...(19): siRNA sense strand
caaaggaacucaagaaaga

SEQ ID NO: 1051799 - RNA, 19 nt, Homo sapiens
  misc_RNA (1)...(19): siRNA sense strand
ucaaagagaucgaacauuu

SEQ ID NO: 1051800 - RNA, 19 nt, Homo sapiens
  misc_RNA (1)...(19): siRNA sense strand
ggaggaaacugucaaacua

SEQ ID NO: 1051801 - RNA, 19 nt, Homo sapiens
  misc_RNA (1)...(19): siRNA sense strand
gcuaucagcucaaacauaa

SEQ ID NO: 1051802 - RNA, 19 nt, Homo sapiens
  misc_RNA (1)...(19): siRNA sense strand
gagaagcacuuacaagaaa

SEQ ID NO: 1051803 - RNA, 19 nt, Homo sapiens
  misc_RNA (1)...(19): siRNA sense strand
guagaaggcacaaauauua

SEQ ID NO: 1051804 - RNA, 19 nt, Homo sapiens
  misc_RNA (1)...(19): siRNA sense strand
gaacaagaaucacuaccaa

SEQ ID NO: 1051805 - RNA, 19 nt, Homo sapiens
  misc_RNA (1)...(19): siRNA sense strand
gaaaugauguguucugaag

SEQ ID NO: 1051806 - RNA, 19 nt, Homo sapiens
  misc_RNA (1)...(19): siRNA sense strand
caaaggacauuaaaucuuc

SEQ ID NO: 1051807 - RNA, 19 nt, Homo sapiens
  misc_RNA (1)...(19): siRNA sense strand
agaaagaucuucauuguca

SEQ ID NO: 1051808 - RNA, 19 nt, Homo sapiens
  misc_RNA (1)...(19): siRNA sense strand
gaacagaaagccuucacua

SEQ ID NO: 1051809 - RNA, 19 nt, Homo sapiens
  misc_RNA (1)...(19): siRNA sense strand
ggacuuggacucuacauuu

SEQ ID NO: 1051810 - RNA, 19 nt, Homo sapiens
  misc_RNA (1)...(19): siRNA sense strand
gaagaccugugccaccaua

SEQ ID NO: 1051811 - RNA, 19 nt, Homo sapiens
  misc_RNA (1)...(19): siRNA sense strand
gagaagaaauuagacaaga

SEQ ID NO: 1051812 - RNA, 19 nt, Homo sapiens
  misc_RNA (1)...(19): siRNA sense strand
caagauaauucaagugaga

SEQ ID NO: 1051813 - RNA, 19 nt, Homo sapiens
  misc_RNA (1)...(19): siRNA sense strand
uaaauuacccgaacaagaa

SEQ ID NO: 1051814 - RNA, 19 nt, Homo sapiens
  misc_RNA (1)...(19): siRNA sense strand
gcucaaacauaaacaguga

SEQ ID NO: 1051815 - RNA, 19 nt, Homo sapiens
  misc_RNA (1)...(19): siRNA sense strand
gcacaaauuagacauauga

SEQ ID NO: 1051816 - RNA, 19 nt, Homo sapiens
  misc_RNA (1)...(19): siRNA sense strand
gcauaucccuuacagaaau

SEQ ID NO: 1051817 - RNA, 19 nt, Homo sapiens
  misc_RNA (1)...(19): siRNA sense strand
cagaaagccuucacuaaug

SEQ ID NO: 1051818 - RNA, 19 nt, Homo sapiens
  misc_RNA (1)...(19): siRNA sense strand
guagcuaucccucauaaua

SEQ ID NO: 1051819 - RNA, 19 nt, Homo sapiens
  misc_RNA (1)...(19): siRNA sense strand
gacuuggacucuacauuua

SEQ ID NO: 1051820 - RNA, 19 nt, Homo sapiens
  misc_RNA (1)...(19): siRNA sense strand
gcacaguacuugccuaugg

SEQ ID NO: 1051821 - RNA, 19 nt, Homo sapiens
  misc_RNA (1)...(19): siRNA sense strand
gaaaguaguaguucgugua

SEQ ID NO: 1051822 - RNA, 19 nt, Homo sapiens
  misc_RNA (1)...(19): siRNA sense strand
ggagugauguaucuaacaa

SEQ ID NO: 1051823 - RNA, 19 nt, Homo sapiens
  misc_RNA (1)...(19): siRNA sense strand
gaacuucagccuauuguau

SEQ ID NO: 1051824 - RNA, 19 nt, Homo sapiens
  misc_RNA (1)...(19): siRNA sense strand
gaaucugacuucaaagaga

SEQ ID NO: 1051825 - RNA, 19 nt, Homo sapiens
  misc_RNA (1)...(19): siRNA sense strand
uuucauaucuggagguaua

SEQ ID NO: 1051826 - RNA, 19 nt, Homo sapiens
  misc_RNA (1)...(19): siRNA sense strand
gccaagaugucacucauug

SEQ ID NO: 1051827 - RNA, 19 nt, Homo sapiens
  misc_RNA (1)...(19): siRNA sense strand
ggacacaacaucccacuga

SEQ ID NO: 1051828 - RNA, 19 nt, Homo sapiens
  misc_RNA (1)...(19): siRNA sense strand
gaagcaauuugaugagaau

SEQ ID NO: 1051829 - RNA, 19 nt, Homo sapiens
  misc_RNA (1)...(19): siRNA sense strand
gcaauguucuuaaugucaa

SEQ ID NO: 1051830 - RNA, 19 nt, Homo sapiens
  misc_RNA (1)...(19): siRNA sense strand
aagaauaucugaaguugga

SEQ ID NO: 1051831 - RNA, 19 nt, Homo sapiens
  misc_RNA (1)...(19): siRNA sense strand
aagaaucacuaccaaauga

SEQ ID NO: 1051832 - RNA, 19 nt, Homo sapiens
  misc_RNA (1)...(19): siRNA sense strand
gauguguucugaagacaaa

SEQ ID NO: 1051833 - RNA, 19 nt, Homo sapiens
  misc_RNA (1)...(19): siRNA sense strand
gaugaaacgucaacucagu

SEQ ID NO: 1051834 - RNA, 19 nt, Homo sapiens
  misc_RNA (1)...(19): siRNA sense strand
gaucauagacuugcaaugu

SEQ ID NO: 1051835 - RNA, 19 nt, Homo sapiens
  misc_RNA (1)...(19): siRNA sense strand
caacagugccauaaacaaa

SEQ ID NO: 1051836 - RNA, 19 nt, Homo sapiens
  misc_RNA (1)...(19): siRNA sense strand
caacaacagugccauaaac

SEQ ID NO: 1051837 - RNA, 19 nt, Homo sapiens
  misc_RNA (1)...(19): siRNA sense strand
gcaaaggacauuaaaucuu

SEQ ID NO: 1051838 - RNA, 19 nt, Homo sapiens
  misc_RNA (1)...(19): siRNA sense strand
agaaagccuucacuaauga

SEQ ID NO: 1051839 - RNA, 19 nt, Homo sapiens
  misc_RNA (1)...(19): siRNA sense strand
caaaauccgucuacaguaa

SEQ ID NO: 1051840 - RNA, 19 nt, Homo sapiens
  misc_RNA (1)...(19): siRNA sense strand
gaaaggacagcauacucua

SEQ ID NO: 1051841 - RNA, 19 nt, Homo sapiens
  misc_RNA (1)...(19): siRNA sense strand
gcagcuggauuucauaaag

SEQ ID NO: 1051842 - RNA, 19 nt, Homo sapiens
  misc_RNA (1)...(19): siRNA sense strand
uggaugagauuaaagaaga

SEQ ID NO: 1051843 - RNA, 19 nt, Homo sapiens
  misc_RNA (1)...(19): siRNA sense strand
gagcucgaaguguaaauua

SEQ ID NO: 1051844 - RNA, 19 nt, Homo sapiens
  misc_RNA (1)...(19): siRNA sense strand
ugaccaaacuggcgaacaa

SEQ ID NO: 1051845 - RNA, 19 nt, Homo sapiens
  misc_RNA (1)...(19): siRNA sense strand
cagcauaucccuuacagaa

SEQ ID NO: 1051846 - RNA, 19 nt, Homo sapiens
  misc_RNA (1)...(19): siRNA sense strand
gcccaaauccucagaagaa

SEQ ID NO: 1051847 - RNA, 19 nt, Homo sapiens
  misc_RNA (1)...(19): siRNA sense strand
guacugcaguuucauaucu

SEQ ID NO: 1051848 - RNA, 19 nt, Homo sapiens
  misc_RNA (1)...(19): siRNA sense strand
gcaaguacuuccggugcua

SEQ ID NO: 1051849 - RNA, 19 nt, Homo sapiens
  misc_RNA (1)...(19): siRNA sense strand
guuaaaggauucucuugga

SEQ ID NO: 1051850 - RNA, 19 nt, Homo sapiens
  misc_RNA (1)...(19): siRNA sense strand
agaaucagcauaucccuua

SEQ ID NO: 1051851 - RNA, 19 nt, Homo sapiens
  misc_RNA (1)...(19): siRNA sense strand
ggauauaauugcacaguac

SEQ ID NO: 1051852 - RNA, 19 nt, Homo sapiens
  misc_RNA (1)...(19): siRNA sense strand
gacaagauaauucaaguga

SEQ ID NO: 1051853 - RNA, 19 nt, Homo sapiens
  misc_RNA (1)...(19): siRNA sense strand
gaucuucauugucaccauu

SEQ ID NO: 1051854 - RNA, 19 nt, Homo sapiens
  misc_RNA (1)...(19): siRNA sense strand
aaugauagcugcuguuagu

SEQ ID NO: 1051855 - RNA, 19 nt, Homo sapiens
  misc_RNA (1)...(19): siRNA sense strand
caacaucccacugauauga

SEQ ID NO: 1051856 - RNA, 19 nt, Homo sapiens
  misc_RNA (1)...(19): siRNA sense strand
caaauccucagaagaaauu

SEQ ID NO: 1051857 - RNA, 19 nt, Homo sapiens
  misc_RNA (1)...(19): siRNA sense strand
ggaaacugucaaacuauaa

SEQ ID NO: 1051858 - RNA, 19 nt, Homo sapiens
  misc_RNA (1)...(19): siRNA sense strand
acagugccauaaacaaaua

SEQ ID NO: 1051859 - RNA, 19 nt, Homo sapiens
  misc_RNA (1)...(19): siRNA sense strand
cgugaucucuuaguaaauu

SEQ ID NO: 1051860 - RNA, 19 nt, Homo sapiens
  misc_RNA (1)...(19): siRNA sense strand
caaagaacuucagccuauu

SEQ ID NO: 1051861 - RNA, 19 nt, Homo sapiens
  misc_RNA (1)...(19): siRNA sense strand
uaaagugguucauguugug

SEQ ID NO: 1051862 - RNA, 19 nt, Homo sapiens
  misc_RNA (1)...(19): siRNA sense strand
acaagaauaucugaaguug

SEQ ID NO: 1051863 - RNA, 19 nt, Homo sapiens
  misc_RNA (1)...(19): siRNA sense strand
caaugauucucuuagcaaa

SEQ ID NO: 1051864 - RNA, 19 nt, Homo sapiens
  misc_RNA (1)...(19): siRNA sense strand
gggcaaaggacauuaaauc

SEQ ID NO: 1051865 - RNA, 19 nt, Homo sapiens
  misc_RNA (1)...(19): siRNA sense strand
aaccaacaauggaacauaa

SEQ ID NO: 1051866 - RNA, 19 nt, Homo sapiens
  misc_RNA (1)...(19): siRNA sense strand
gaaguagcuaucccucaua

SEQ ID NO: 1051867 - RNA, 19 nt, Homo sapiens
  misc_RNA (1)...(19): siRNA sense strand
gauucgugaucucuuagua

SEQ ID NO: 1051868 - RNA, 19 nt, Homo sapiens
  misc_RNA (1)...(19): siRNA sense strand
ucauagacuugcaauguug

SEQ ID NO: 1051869 - RNA, 19 nt, Homo sapiens
  misc_RNA (1)...(19): siRNA sense strand
gagaaagaaucagcauauc

SEQ ID NO: 1051870 - RNA, 19 nt, Homo sapiens
  misc_RNA (1)...(19): siRNA sense strand
ugaugaaccuggagugaug

SEQ ID NO: 1051871 - RNA, 19 nt, Homo sapiens
  misc_RNA (1)...(19): siRNA sense strand
aaacaaaccaacaauggaa

SEQ ID NO: 1051872 - RNA, 19 nt, Homo sapiens
  misc_RNA (1)...(19): siRNA sense strand
aggaaacugucaaacuaua

SEQ ID NO: 1051873 - RNA, 19 nt, Homo sapiens
  misc_RNA (1)...(19): siRNA sense strand
caaauuuacuugcgacaac

SEQ ID NO: 1051874 - RNA, 19 nt, Homo sapiens
  misc_RNA (1)...(19): siRNA sense strand
ggagguauauaaugaacag

SEQ ID NO: 1051875 - RNA, 19 nt, Homo sapiens
  misc_RNA (1)...(19): siRNA sense strand
gagaaaauauguaguacug

SEQ ID NO: 1051876 - RNA, 19 nt, Homo sapiens
  misc_RNA (1)...(19): siRNA sense strand
ggacucuacauuuacuaua

SEQ ID NO: 1051877 - RNA, 19 nt, Homo sapiens
  misc_RNA (1)...(19): siRNA sense strand
ggagggaggaggaauugaa

SEQ ID NO: 1051878 - RNA, 19 nt, Homo sapiens
  misc_RNA (1)...(19): siRNA sense strand
gaaucgagaagaaauuaga

SEQ ID NO: 1051879 - RNA, 19 nt, Homo sapiens
  misc_RNA (1)...(19): siRNA sense strand
cagaaucgagaagaaauua

SEQ ID NO: 1051880 - RNA, 19 nt, Homo sapiens
  misc_RNA (1)...(19): siRNA sense strand
gagcagaaggcagagauuu

SEQ ID NO: 1051881 - RNA, 19 nt, Homo sapiens
  misc_RNA (1)...(19): siRNA sense strand
ugaagcaauuugaugagaa

SEQ ID NO: 1051882 - RNA, 19 nt, Homo sapiens
  misc_RNA (1)...(19): siRNA sense strand
gaucgaacauuugguagag

SEQ ID NO: 1051883 - RNA, 19 nt, Homo sapiens
  misc_RNA (1)...(19): siRNA sense strand
cauaucccuuacagaaaua

SEQ ID NO: 1051884 - RNA, 19 nt, Homo sapiens
  misc_RNA (1)...(19): siRNA sense strand
aucaagagcucgaagugua

SEQ ID NO: 1051885 - RNA, 19 nt, Homo sapiens
  misc_RNA (1)...(19): siRNA sense strand
ggaucuagcuugucuucag

SEQ ID NO: 1051886 - RNA, 19 nt, Homo sapiens
  misc_RNA (1)...(19): siRNA sense strand
acagaaagccuucacuaau

SEQ ID NO: 1051887 - RNA, 19 nt, Homo sapiens
  misc_RNA (1)...(19): siRNA sense strand
gagcaauguucuuaauguc

SEQ ID NO: 1051888 - RNA, 19 nt, Homo sapiens
  misc_RNA (1)...(19): siRNA sense strand
gcauggaugagauuaaaga

SEQ ID NO: 1051889 - RNA, 19 nt, Homo sapiens
  misc_RNA (1)...(19): siRNA sense strand
gugagaagcacuuacaaga

SEQ ID NO: 1051890 - RNA, 19 nt, Homo sapiens
  misc_RNA (1)...(19): siRNA sense strand
ugaaguagcuaucccucau

SEQ ID NO: 1051891 - RNA, 19 nt, Homo sapiens
  misc_RNA (1)...(19): siRNA sense strand
acaguaaccuuaaugaaac

SEQ ID NO: 1051892 - RNA, 19 nt, Homo sapiens
  misc_RNA (1)...(19): siRNA sense strand
guuaagauuccuacagaaa

SEQ ID NO: 1051893 - RNA, 19 nt, Homo sapiens
  misc_RNA (1)...(19): siRNA sense strand
ggacauuaaaucuucuuug

SEQ ID NO: 1051894 - RNA, 19 nt, Homo sapiens
  misc_RNA (1)...(19): siRNA sense strand
gacaagaauaucugaaguu

SEQ ID NO: 1051895 - RNA, 19 nt, Homo sapiens
  misc_RNA (1)...(19): siRNA sense strand
gaaaauguugugugaagua

SEQ ID NO: 1051896 - RNA, 19 nt, Homo sapiens
  misc_RNA (1)...(19): siRNA sense strand
uaucugaaguuggaaaugu

SEQ ID NO: 1051897 - RNA, 19 nt, Homo sapiens
  misc_RNA (1)...(19): siRNA sense strand
ggagaaacaugcagauuau

SEQ ID NO: 1051898 - RNA, 19 nt, Homo sapiens
  misc_RNA (1)...(19): siRNA sense strand
gaagagauucuggcauuua

SEQ ID NO: 1051899 - RNA, 19 nt, Homo sapiens
  misc_RNA (1)...(19): siRNA sense strand
gcucaaagaaagaugauua

SEQ ID NO: 1051900 - RNA, 19 nt, Homo sapiens
  misc_RNA (1)...(19): siRNA sense strand
gagaaugaguggcaucuau

SEQ ID NO: 1051901 - RNA, 19 nt, Homo sapiens
  misc_RNA (1)...(19): siRNA sense strand
gagauucuggcauuuauua

SEQ ID NO: 1051902 - RNA, 19 nt, Homo sapiens
  misc_RNA (1)...(19): siRNA sense strand
gaacuuugacgguggauuu

SEQ ID NO: 1051903 - RNA, 19 nt, Homo sapiens
  misc_RNA (1)...(19): siRNA sense strand
gagauaugguggauccuuu

SEQ ID NO: 1051904 - RNA, 19 nt, Homo sapiens
  misc_RNA (1)...(19): siRNA sense strand
cagauuauaucgcauccua

SEQ ID NO: 1051905 - RNA, 19 nt, Homo sapiens
  misc_RNA (1)...(19): siRNA sense strand
uuacuuggcugguggcuuu

SEQ ID NO: 1051906 - RNA, 19 nt, Homo sapiens
  misc_RNA (1)...(19): siRNA sense strand
uuaaaggucuacagaaaga

SEQ ID NO: 1051907 - RNA, 19 nt, Homo sapiens
  misc_RNA (1)...(19): siRNA sense strand
gaagcuugaugcuauuaau

SEQ ID NO: 1051908 - RNA, 19 nt, Homo sapiens
  misc_RNA (1)...(19): siRNA sense strand
agacuucauuggauugaua

SEQ ID NO: 1051909 - RNA, 19 nt, Homo sapiens
  misc_RNA (1)...(19): siRNA sense strand
ccacagaaggauguuauua

SEQ ID NO: 1051910 - RNA, 19 nt, Homo sapiens
  misc_RNA (1)...(19): siRNA sense strand
gggagaaauugacacaaga

SEQ ID NO: 1051911 - RNA, 19 nt, Homo sapiens
  misc_RNA (1)...(19): siRNA sense strand
gcagacaggccaggagaua

SEQ ID NO: 1051912 - RNA, 19 nt, Homo sapiens
  misc_RNA (1)...(19): siRNA sense strand
gaaauugacacaagauucu

SEQ ID NO: 1051913 - RNA, 19 nt, Homo sapiens
  misc_RNA (1)...(19): siRNA sense strand
gggcagaucuauuguugca

SEQ ID NO: 1051914 - RNA, 19 nt, Homo sapiens
  misc_RNA (1)...(19): siRNA sense strand
gaaguuaccagauguaugc

SEQ ID NO: 1051915 - RNA, 19 nt, Homo sapiens
  misc_RNA (1)...(19): siRNA sense strand
uguuaaaggucuacagaaa

SEQ ID NO: 1051916 - RNA, 19 nt, Homo sapiens
  misc_RNA (1)...(19): siRNA sense strand
ggaaaaggcaaucgaauuu

SEQ ID NO: 1051917 - RNA, 19 nt, Homo sapiens
  misc_RNA (1)...(19): siRNA sense strand
ggaauauguuaaaggucua

SEQ ID NO: 1051918 - RNA, 19 nt, Homo sapiens
  misc_RNA (1)...(19): siRNA sense strand
uggagaaacaugcagauua

SEQ ID NO: 1051919 - RNA, 19 nt, Homo sapiens
  misc_RNA (1)...(19): siRNA sense strand
acagaaggauguuauuauc

SEQ ID NO: 1051920 - RNA, 19 nt, Homo sapiens
  misc_RNA (1)...(19): siRNA sense strand
gguccuggcuucccuaaag

SEQ ID NO: 1051921 - RNA, 19 nt, Homo sapiens
  misc_RNA (1)...(19): siRNA sense strand
ucaguugcaucaaguaaau

SEQ ID NO: 1051922 - RNA, 19 nt, Homo sapiens
  misc_RNA (1)...(19): siRNA sense strand
ugacguaaauaaaguugug

SEQ ID NO: 1051923 - RNA, 19 nt, Homo sapiens
  misc_RNA (1)...(19): siRNA sense strand
gaaugaguggcaucuauug

SEQ ID NO: 1051924 - RNA, 19 nt, Homo sapiens
  misc_RNA (1)...(19): siRNA sense strand
gaaacaugcagauuauauc

SEQ ID NO: 1051925 - RNA, 19 nt, Homo sapiens
  misc_RNA (1)...(19): siRNA sense strand
caagucaguugcaucaagu

SEQ ID NO: 1051926 - RNA, 19 nt, Homo sapiens
  misc_RNA (1)...(19): siRNA sense strand
uggaauugcuggauuguca

SEQ ID NO: 1051927 - RNA, 19 nt, Homo sapiens
  misc_RNA (1)...(19): siRNA sense strand
ugaaugugguggaauaagu

SEQ ID NO: 1051928 - RNA, 19 nt, Homo sapiens
  misc_RNA (1)...(19): siRNA sense strand
gaaggauguuauuaucaag

SEQ ID NO: 1051929 - RNA, 19 nt, Homo sapiens
  misc_RNA (1)...(19): siRNA sense strand
ggagaaguuaccagaugua

SEQ ID NO: 1051930 - RNA, 19 nt, Homo sapiens
  misc_RNA (1)...(19): siRNA sense strand
ggaauaagugcuaguaucg

SEQ ID NO: 1051931 - RNA, 19 nt, Homo sapiens
  misc_RNA (1)...(19): siRNA sense strand
ccggagaaguuaccagaug

SEQ ID NO: 1051932 - RNA, 19 nt, Homo sapiens
  misc_RNA (1)...(19): siRNA sense strand
uauccuguaugaacuuuga

SEQ ID NO: 1051933 - RNA, 19 nt, Homo sapiens
  misc_RNA (1)...(19): siRNA sense strand
gagaaacaugcagauuaua

SEQ ID NO: 1051934 - RNA, 19 nt, Homo sapiens
  misc_RNA (1)...(19): siRNA sense strand
gauuauaucgcauccuaug

SEQ ID NO: 1051935 - RNA, 19 nt, Homo sapiens
  misc_RNA (1)...(19): siRNA sense strand
gagaaauugacacaagauu

SEQ ID NO: 1051936 - RNA, 19 nt, Homo sapiens
  misc_RNA (1)...(19): siRNA sense strand
aagagauucuggcauuuau

SEQ ID NO: 1051937 - RNA, 19 nt, Homo sapiens
  misc_RNA (1)...(19): siRNA sense strand
uggcauuuauuaagucuug

SEQ ID NO: 1051938 - RNA, 19 nt, Homo sapiens
  misc_RNA (1)...(19): siRNA sense strand
uggaauaagugcuaguauc

SEQ ID NO: 1051939 - RNA, 19 nt, Homo sapiens
  misc_RNA (1)...(19): siRNA sense strand
gcuaguaucggacaugauc

SEQ ID NO: 1051940 - RNA, 19 nt, Homo sapiens
  misc_RNA (1)...(19): siRNA sense strand
ggaagcuugaugcuauuaa

SEQ ID NO: 1051941 - RNA, 19 nt, Homo sapiens
  misc_RNA (1)...(19): siRNA sense strand
gguggcaacuuuggcuuug

SEQ ID NO: 1051942 - RNA, 19 nt, Homo sapiens
  misc_RNA (1)...(19): siRNA sense strand
uugcaugccugaagaagug

SEQ ID NO: 1051943 - RNA, 19 nt, Homo sapiens
  misc_RNA (1)...(19): siRNA sense strand
gcacuccacagaaggaugu

SEQ ID NO: 1051944 - RNA, 19 nt, Homo sapiens
  misc_RNA (1)...(19): siRNA sense strand
cacagaaggauguuauuau

SEQ ID NO: 1051945 - RNA, 19 nt, Homo sapiens
  misc_RNA (1)...(19): siRNA sense strand
ggagauauuuggggagaaa

SEQ ID NO: 1051946 - RNA, 19 nt, Homo sapiens
  misc_RNA (1)...(19): siRNA sense strand
ucuuagugcuguccagauu

SEQ ID NO: 1051947 - RNA, 19 nt, Homo sapiens
  misc_RNA (1)...(19): siRNA sense strand
uauuaagucuugccaacau

SEQ ID NO: 1051948 - RNA, 19 nt, Homo sapiens
  misc_RNA (1)...(19): siRNA sense strand
gaaugugguggaauaagug

SEQ ID NO: 1051949 - RNA, 19 nt, Homo sapiens
  misc_RNA (1)...(19): siRNA sense strand
gauguaugcuacucauggu

SEQ ID NO: 1051950 - RNA, 19 nt, Homo sapiens
  misc_RNA (1)...(19): siRNA sense strand
ggagaaauugacacaagau

SEQ ID NO: 1051951 - RNA, 19 nt, Homo sapiens
  misc_RNA (1)...(19): siRNA sense strand
gugcuaguaucggacauga

SEQ ID NO: 1051952 - RNA, 19 nt, Homo sapiens
  misc_RNA (1)...(19): siRNA sense strand
acaagucaguugcaucaag

SEQ ID NO: 1051953 - RNA, 19 nt, Homo sapiens
  misc_RNA (1)...(19): siRNA sense strand
cugggcagaucuauuguug

SEQ ID NO: 1051954 - RNA, 19 nt, Homo sapiens
  misc_RNA (1)...(19): siRNA sense strand
ccagauguaugcuacucau

SEQ ID NO: 1051955 - RNA, 19 nt, Homo sapiens
  misc_RNA (1)...(19): siRNA sense strand
cggagaaguuaccagaugu

SEQ ID NO: 1051956 - RNA, 19 nt, Homo sapiens
  misc_RNA (1)...(19): siRNA sense strand
gaucucaugggacaacuuc

SEQ ID NO: 1051957 - RNA, 19 nt, Homo sapiens
  misc_RNA (1)...(19): siRNA sense strand
guuauuaucaagucagaug

SEQ ID NO: 1051958 - RNA, 19 nt, Homo sapiens
  misc_RNA (1)...(19): siRNA sense strand
uuacaagucaguugcauca

SEQ ID NO: 1051959 - RNA, 19 nt, Homo sapiens
  misc_RNA (1)...(19): siRNA sense strand
ggcaaucgaauuuguuuua

SEQ ID NO: 1051960 - RNA, 19 nt, Homo sapiens
  misc_RNA (1)...(19): siRNA sense strand
gggaagcuugaugcuauua

SEQ ID NO: 1051961 - RNA, 19 nt, Homo sapiens
  misc_RNA (1)...(19): siRNA sense strand
uuugugcgguggcaacuuu

SEQ ID NO: 1051962 - RNA, 19 nt, Homo sapiens
  misc_RNA (1)...(19): siRNA sense strand
ucugaguauuugagaauga

SEQ ID NO: 1051963 - RNA, 19 nt, Homo sapiens
  misc_RNA (1)...(19): siRNA sense strand
ggagauaugguggauccuu

SEQ ID NO: 1051964 - RNA, 19 nt, Homo sapiens
  misc_RNA (1)...(19): siRNA sense strand
uggcuucccuaaagauaau

SEQ ID NO: 1051965 - RNA, 19 nt, Homo sapiens
  misc_RNA (1)...(19): siRNA sense strand
gagaaguuaccagauguau

SEQ ID NO: 1051966 - RNA, 19 nt, Homo sapiens
  misc_RNA (1)...(19): siRNA sense strand
gguggaauaagugcuagua

SEQ ID NO: 1051967 - RNA, 19 nt, Homo sapiens
  misc_RNA (1)...(19): siRNA sense strand
uguggaauauguuaaaggu

SEQ ID NO: 1051968 - RNA, 19 nt, Homo sapiens
  misc_RNA (1)...(19): siRNA sense strand
gcuugaugcuauuaaugug

SEQ ID NO: 1051969 - RNA, 19 nt, Homo sapiens
  misc_RNA (1)...(19): siRNA sense strand
uggcaacuuuggcuuuguu

SEQ ID NO: 1051970 - RNA, 19 nt, Homo sapiens
  misc_RNA (1)...(19): siRNA sense strand
cagaaggauguuauuauca

SEQ ID NO: 1051971 - RNA, 19 nt, Homo sapiens
  misc_RNA (1)...(19): siRNA sense strand
agaaugaguggcaucuauu

SEQ ID NO: 1051972 - RNA, 19 nt, Homo sapiens
  misc_RNA (1)...(19): siRNA sense strand
uggaaggccggagaaguua

SEQ ID NO: 1051973 - RNA, 19 nt, Homo sapiens
  misc_RNA (1)...(19): siRNA sense strand
uauuuggaauugcuggauu

SEQ ID NO: 1051974 - RNA, 19 nt, Homo sapiens
  misc_RNA (1)...(19): siRNA sense strand
ggauguuauuaucaaguca

SEQ ID NO: 1051975 - RNA, 19 nt, Homo sapiens
  misc_RNA (1)...(19): siRNA sense strand
agacaggccaggagauaug

SEQ ID NO: 1051976 - RNA, 19 nt, Homo sapiens
  misc_RNA (1)...(19): siRNA sense strand
cauccuauggcucaaagaa

SEQ ID NO: 1051977 - RNA, 19 nt, Homo sapiens
  misc_RNA (1)...(19): siRNA sense strand
uuuagcaugucaagaugaa

SEQ ID NO: 1051978 - RNA, 19 nt, Homo sapiens
  misc_RNA (1)...(19): siRNA sense strand
gacaguaauggaucucaug

SEQ ID NO: 1051979 - RNA, 19 nt, Homo sapiens
  misc_RNA (1)...(19): siRNA sense strand
ugcaucaaguaaauucuga

SEQ ID NO: 1051980 - RNA, 19 nt, Homo sapiens
  misc_RNA (1)...(19): siRNA sense strand
agaaauugacacaagauuc

SEQ ID NO: 1051981 - RNA, 19 nt, Homo sapiens
  misc_RNA (1)...(19): siRNA sense strand
uccagauucuuacgcugua

SEQ ID NO: 1051982 - RNA, 19 nt, Homo sapiens
  misc_RNA (1)...(19): siRNA sense strand
uagcaugucaagaugaaga

SEQ ID NO: 1051983 - RNA, 19 nt, Homo sapiens
  misc_RNA (1)...(19): siRNA sense strand
guccuggcuucccuaaaga

SEQ ID NO: 1051984 - RNA, 19 nt, Homo sapiens
  misc_RNA (1)...(19): siRNA sense strand
gaaaaggcaaucgaauuug

SEQ ID NO: 1051985 - RNA, 19 nt, Homo sapiens
  misc_RNA (1)...(19): siRNA sense strand
ugacaguaauggaucucau

SEQ ID NO: 1051986 - RNA, 19 nt, Homo sapiens
  misc_RNA (1)...(19): siRNA sense strand
guuaaaggucuacagaaag

SEQ ID NO: 1051987 - RNA, 19 nt, Homo sapiens
  misc_RNA (1)...(19): siRNA sense strand
cuguaugucugaguauuug

SEQ ID NO: 1051988 - RNA, 19 nt, Homo sapiens
  misc_RNA (1)...(19): siRNA sense strand
aaaaggcaaucgaauuugu

SEQ ID NO: 1051989 - RNA, 19 nt, Homo sapiens
  misc_RNA (1)...(19): siRNA sense strand
gccaggagauaugguggau

SEQ ID NO: 1051990 - RNA, 19 nt, Homo sapiens
  misc_RNA (1)...(19): siRNA sense strand
uauguuaaaggucuacaga

SEQ ID NO: 1051991 - RNA, 19 nt, Homo sapiens
  misc_RNA (1)...(19): siRNA sense strand
auugcuggauugucacuuu

SEQ ID NO: 1051992 - RNA, 19 nt, Homo sapiens
  misc_RNA (1)...(19): siRNA sense strand
uccuauggcucaaagaaag

SEQ ID NO: 1051993 - RNA, 19 nt, Homo sapiens
  misc_RNA (1)...(19): siRNA sense strand
ggggagaaauugacacaag

SEQ ID NO: 1051994 - RNA, 19 nt, Homo sapiens
  misc_RNA (1)...(19): siRNA sense strand
gauucuggcauuuauuaag

SEQ ID NO: 1051995 - RNA, 19 nt, Homo sapiens
  misc_RNA (1)...(19): siRNA sense strand
aaaggcaaucgaauuuguu

SEQ ID NO: 1051996 - RNA, 19 nt, Homo sapiens
  misc_RNA (1)...(19): siRNA sense strand
cauaccuuauuuggaauug

SEQ ID NO: 1051997 - RNA, 19 nt, Homo sapiens
  misc_RNA (1)...(19): siRNA sense strand
caacagaacuuagcauaaa

SEQ ID NO: 1051998 - RNA, 19 nt, Homo sapiens
  misc_RNA (1)...(19): siRNA sense strand
gaugaaagcuguucuaaag

SEQ ID NO: 1051999 - RNA, 19 nt, Homo sapiens
  misc_RNA (1)...(19): siRNA sense strand
gcugguggcucuacaguua

SEQ ID NO: 1052000 - RNA, 19 nt, Homo sapiens
  misc_RNA (1)...(19): siRNA sense strand
caauggaucugauuauuuc

SEQ ID NO: 1052001 - RNA, 19 nt, Homo sapiens
  misc_RNA (1)...(19): siRNA sense strand
cauaaaugcugaaguguau

SEQ ID NO: 1052002 - RNA, 19 nt, Homo sapiens
  misc_RNA (1)...(19): siRNA sense strand
gcaauggaucugauuauuu

SEQ ID NO: 1052003 - RNA, 19 nt, Homo sapiens
  misc_RNA (1)...(19): siRNA sense strand
ucaaagccguucugugaaa

SEQ ID NO: 1052004 - RNA, 19 nt, Homo sapiens
  misc_RNA (1)...(19): siRNA sense strand
cauuaggucuuguugagua

SEQ ID NO: 1052005 - RNA, 19 nt, Homo sapiens
  misc_RNA (1)...(19): siRNA sense strand
agaaggaaauucaacagaa

SEQ ID NO: 1052006 - RNA, 19 nt, Homo sapiens
  misc_RNA (1)...(19): siRNA sense strand
aaucaaagccguucuguga

SEQ ID NO: 1052007 - RNA, 19 nt, Homo sapiens
  misc_RNA (1)...(19): siRNA sense strand
cugaauaugucuaagauug

SEQ ID NO: 1052008 - RNA, 19 nt, Homo sapiens
  misc_RNA (1)...(19): siRNA sense strand
gaaggaaauucaacagaac

SEQ ID NO: 1052009 - RNA, 19 nt, Homo sapiens
  misc_RNA (1)...(19): siRNA sense strand
gaucugcagcuucguagua

SEQ ID NO: 1052010 - RNA, 19 nt, Homo sapiens
  misc_RNA (1)...(19): siRNA sense strand
ggaaauucaacagaacuua

SEQ ID NO: 1052011 - RNA, 19 nt, Homo sapiens
  misc_RNA (1)...(19): siRNA sense strand
ucaaaccacuuagcgauga

SEQ ID NO: 1052012 - RNA, 19 nt, Homo sapiens
  misc_RNA (1)...(19): siRNA sense strand
aauagaugauuccgaguuu

SEQ ID NO: 1052013 - RNA, 19 nt, Homo sapiens
  misc_RNA (1)...(19): siRNA sense strand
gugcauuccugaaauagau

SEQ ID NO: 1052014 - RNA, 19 nt, Homo sapiens
  misc_RNA (1)...(19): siRNA sense strand
gaaauucaacagaacuuag

SEQ ID NO: 1052015 - RNA, 19 nt, Homo sapiens
  misc_RNA (1)...(19): siRNA sense strand
cagauacucaaaccacuua

SEQ ID NO: 1052016 - RNA, 19 nt, Homo sapiens
  misc_RNA (1)...(19): siRNA sense strand
ccagaugcauuaggucuug

SEQ ID NO: 1052017 - RNA, 19 nt, Homo sapiens
  misc_RNA (1)...(19): siRNA sense strand
gaauaugucuaagauuggu

SEQ ID NO: 1052018 - RNA, 19 nt, Homo sapiens
  misc_RNA (1)...(19): siRNA sense strand
gaaagcugguggcucuaca

SEQ ID NO: 1052019 - RNA, 19 nt, Homo sapiens
  misc_RNA (1)...(19): siRNA sense strand
cugauuauuucuacacuga

SEQ ID NO: 1052020 - RNA, 19 nt, Homo sapiens
  misc_RNA (1)...(19): siRNA sense strand
uaacugggaagaaauggaa

SEQ ID NO: 1052021 - RNA, 19 nt, Homo sapiens
  misc_RNA (1)...(19): siRNA sense strand
ugucuaagauugguuacuu

SEQ ID NO: 1052022 - RNA, 19 nt, Homo sapiens
  misc_RNA (1)...(19): siRNA sense strand
ccggugcauuccugaaaua

SEQ ID NO: 1052023 - RNA, 19 nt, Homo sapiens
  misc_RNA (1)...(19): siRNA sense strand
ucaacagaacuuagcauaa

SEQ ID NO: 1052024 - RNA, 19 nt, Homo sapiens
  misc_RNA (1)...(19): siRNA sense strand
gaccacagaaggaaauuca

SEQ ID NO: 1052025 - RNA, 19 nt, Homo sapiens
  misc_RNA (1)...(19): siRNA sense strand
cagagucauuguucuuuca

SEQ ID NO: 1052026 - RNA, 19 nt, Homo sapiens
  misc_RNA (1)...(19): siRNA sense strand
ccagagucauuguucuuuc

SEQ ID NO: 1052027 - RNA, 19 nt, Homo sapiens
  misc_RNA (1)...(19): siRNA sense strand
caagcagucauucauauca

SEQ ID NO: 1052028 - RNA, 19 nt, Homo sapiens
  misc_RNA (1)...(19): siRNA sense strand
gggaggagguaucacaaaa

SEQ ID NO: 1052029 - RNA, 19 nt, Homo sapiens
  misc_RNA (1)...(19): siRNA sense strand
cuuaaugaguggcuucaga

SEQ ID NO: 1052030 - RNA, 19 nt, Homo sapiens
  misc_RNA (1)...(19): siRNA sense strand
ugcaauggaucugauuauu

SEQ ID NO: 1052031 - RNA, 19 nt, Homo sapiens
  misc_RNA (1)...(19): siRNA sense strand
ucuuggagauuacucuuug

SEQ ID NO: 1052032 - RNA, 19 nt, Homo sapiens
  misc_RNA (1)...(19): siRNA sense strand
agcaguaucuguuggaaau

SEQ ID NO: 1052033 - RNA, 19 nt, Homo sapiens
  misc_RNA (1)...(19): siRNA sense strand
ggucuuguugaguaucuua

SEQ ID NO: 1052034 - RNA, 19 nt, Homo sapiens
  misc_RNA (1)...(19): siRNA sense strand
cuacacugaauaugucuaa

SEQ ID NO: 1052035 - RNA, 19 nt, Homo sapiens
  misc_RNA (1)...(19): siRNA sense strand
uaaugaguggcuucagaua

SEQ ID NO: 1052036 - RNA, 19 nt, Homo sapiens
  misc_RNA (1)...(19): siRNA sense strand
aaauaaagagccuuaacug

SEQ ID NO: 1052037 - RNA, 19 nt, Homo sapiens
  misc_RNA (1)...(19): siRNA sense strand
cuacaguuaagauccauuu

SEQ ID NO: 1052038 - RNA, 19 nt, Homo sapiens
  misc_RNA (1)...(19): siRNA sense strand
uaaaugcugaaguguauuc

SEQ ID NO: 1052039 - RNA, 19 nt, Homo sapiens
  misc_RNA (1)...(19): siRNA sense strand
gcucuacaguuaagaucca

SEQ ID NO: 1052040 - RNA, 19 nt, Homo sapiens
  misc_RNA (1)...(19): siRNA sense strand
cacugaauaugucuaagau

SEQ ID NO: 1052041 - RNA, 19 nt, Homo sapiens
  misc_RNA (1)...(19): siRNA sense strand
cagaaggaaauucaacaga

SEQ ID NO: 1052042 - RNA, 19 nt, Homo sapiens
  misc_RNA (1)...(19): siRNA sense strand
uuacuucuauaccgauugu

SEQ ID NO: 1052043 - RNA, 19 nt, Homo sapiens
  misc_RNA (1)...(19): siRNA sense strand
acacugaauaugucuaaga

SEQ ID NO: 1052044 - RNA, 19 nt, Homo sapiens
  misc_RNA (1)...(19): siRNA sense strand
aaauagaugauuccgaguu

SEQ ID NO: 1052045 - RNA, 19 nt, Homo sapiens
  misc_RNA (1)...(19): siRNA sense strand
agccuuaacugggaagaaa

SEQ ID NO: 1052046 - RNA, 19 nt, Homo sapiens
  misc_RNA (1)...(19): siRNA sense strand
ugaugaaagcuguucuaaa

SEQ ID NO: 1052047 - RNA, 19 nt, Homo sapiens
  misc_RNA (1)...(19): siRNA sense strand
caguaucuguuggaaaugu

SEQ ID NO: 1052048 - RNA, 19 nt, Homo sapiens
  misc_RNA (1)...(19): siRNA sense strand
cuauaccgauugucuugug

SEQ ID NO: 1052049 - RNA, 19 nt, Homo sapiens
  misc_RNA (1)...(19): siRNA sense strand
gaaauccaaauggcaguuc

SEQ ID NO: 1052050 - RNA, 19 nt, Homo sapiens
  misc_RNA (1)...(19): siRNA sense strand
cggcuucacccuccuaaug

SEQ ID NO: 1052051 - RNA, 19 nt, Homo sapiens
  misc_RNA (1)...(19): siRNA sense strand
uucaagcagucauucauau

SEQ ID NO: 1052052 - RNA, 19 nt, Homo sapiens
  misc_RNA (1)...(19): siRNA sense strand
gguuacuucuauaccgauu

SEQ ID NO: 1052053 - RNA, 19 nt, Homo sapiens
  misc_RNA (1)...(19): siRNA sense strand
caguucugcugaaauuugu

SEQ ID NO: 1052054 - RNA, 19 nt, Homo sapiens
  misc_RNA (1)...(19): siRNA sense strand
gccggugcauuccugaaau

SEQ ID NO: 1052055 - RNA, 19 nt, Homo sapiens
  misc_RNA (1)...(19): siRNA sense strand
gccagagucauuguucuuu

SEQ ID NO: 1052056 - RNA, 19 nt, Homo sapiens
  misc_RNA (1)...(19): siRNA sense strand
auucauugccuucaagaaa

SEQ ID NO: 1052057 - RNA, 19 nt, Homo sapiens
  misc_RNA (1)...(19): siRNA sense strand
uuucaagcagucauucaua

SEQ ID NO: 1052058 - RNA, 19 nt, Homo sapiens
  misc_RNA (1)...(19): siRNA sense strand
uuucuacacugaauauguc

SEQ ID NO: 1052059 - RNA, 19 nt, Homo sapiens
  misc_RNA (1)...(19): siRNA sense strand
ugcauuaggucuuguugag

SEQ ID NO: 1052060 - RNA, 19 nt, Homo sapiens
  misc_RNA (1)...(19): siRNA sense strand
guucugcugaaauuuguuu

SEQ ID NO: 1052061 - RNA, 19 nt, Homo sapiens
  misc_RNA (1)...(19): siRNA sense strand
ccagcaguaucuguuggaa

SEQ ID NO: 1052062 - RNA, 19 nt, Homo sapiens
  misc_RNA (1)...(19): siRNA sense strand
cuuguugaguaucuuaaug

SEQ ID NO: 1052063 - RNA, 19 nt, Homo sapiens
  misc_RNA (1)...(19): siRNA sense strand
ccacagaaggaaauucaac

SEQ ID NO: 1052064 - RNA, 19 nt, Homo sapiens
  misc_RNA (1)...(19): siRNA sense strand
uaugaugaaagcuguucua

SEQ ID NO: 1052065 - RNA, 19 nt, Homo sapiens
  misc_RNA (1)...(19): siRNA sense strand
acuuacaccuuccaugcaa

SEQ ID NO: 1052066 - RNA, 19 nt, Homo sapiens
  misc_RNA (1)...(19): siRNA sense strand
ccuaaugccagcaguaucu

SEQ ID NO: 1052067 - RNA, 19 nt, Homo sapiens
  misc_RNA (1)...(19): siRNA sense strand
acagaacuuagcauaaaug

SEQ ID NO: 1052068 - RNA, 19 nt, Homo sapiens
  misc_RNA (1)...(19): siRNA sense strand
caaagccguucugugaaaa

SEQ ID NO: 1052069 - RNA, 19 nt, Homo sapiens
  misc_RNA (1)...(19): siRNA sense strand
ucagauacucaaaccacuu

SEQ ID NO: 1052070 - RNA, 19 nt, Homo sapiens
  misc_RNA (1)...(19): siRNA sense strand
uggaaauguuggccagcuu

SEQ ID NO: 1052071 - RNA, 19 nt, Homo sapiens
  misc_RNA (1)...(19): siRNA sense strand
cccuuccgguaccuacuua

SEQ ID NO: 1052072 - RNA, 19 nt, Homo sapiens
  misc_RNA (1)...(19): siRNA sense strand
gaaaugauguuuacaccaa

SEQ ID NO: 1052073 - RNA, 19 nt, Homo sapiens
  misc_RNA (1)...(19): siRNA sense strand
guacauagcugaugaaacu

SEQ ID NO: 1052074 - RNA, 19 nt, Homo sapiens
  misc_RNA (1)...(19): siRNA sense strand
gcauaaacaucgccaauga

SEQ ID NO: 1052075 - RNA, 19 nt, Homo sapiens
  misc_RNA (1)...(19): siRNA sense strand
ggaaagguauuauaugaug

SEQ ID NO: 1052076 - RNA, 19 nt, Homo sapiens
  misc_RNA (1)...(19): siRNA sense strand
gaagaaaccaccaacauga

SEQ ID NO: 1052077 - RNA, 19 nt, Homo sapiens
  misc_RNA (1)...(19): siRNA sense strand
gggcaagaaucucugaaua

SEQ ID NO: 1052078 - RNA, 19 nt, Homo sapiens
  misc_RNA (1)...(19): siRNA sense strand
cauauacucuccacaguuu

SEQ ID NO: 1052079 - RNA, 19 nt, Homo sapiens
  misc_RNA (1)...(19): siRNA sense strand
gcaagaaucucugaauauc

SEQ ID NO: 1052080 - RNA, 19 nt, Homo sapiens
  misc_RNA (1)...(19): siRNA sense strand
gaucacagcuauugaacug

SEQ ID NO: 1052081 - RNA, 19 nt, Homo sapiens
  misc_RNA (1)...(19): siRNA sense strand
ggcaaacuguggcuucuua

SEQ ID NO: 1052082 - RNA, 19 nt, Homo sapiens
  misc_RNA (1)...(19): siRNA sense strand
caagguaacuaacaagaga

SEQ ID NO: 1052083 - RNA, 19 nt, Homo sapiens
  misc_RNA (1)...(19): siRNA sense strand
acagacaccugggaaauua

SEQ ID NO: 1052084 - RNA, 19 nt, Homo sapiens
  misc_RNA (1)...(19): siRNA sense strand
gaacugugcuuuggcauuc

SEQ ID NO: 1052085 - RNA, 19 nt, Homo sapiens
  misc_RNA (1)...(19): siRNA sense strand
ggacugauuugcugucuuc

SEQ ID NO: 1052086 - RNA, 19 nt, Homo sapiens
  misc_RNA (1)...(19): siRNA sense strand
cagaagaccuuaucaugug

SEQ ID NO: 1052087 - RNA, 19 nt, Homo sapiens
  misc_RNA (1)...(19): siRNA sense strand
ucacugagcuugucaaagg

SEQ ID NO: 1052088 - RNA, 19 nt, Homo sapiens
  misc_RNA (1)...(19): siRNA sense strand
gaguuaagcucguugacuu

SEQ ID NO: 1052089 - RNA, 19 nt, Homo sapiens
  misc_RNA (1)...(19): siRNA sense strand
gaaauuauagagaccauug

SEQ ID NO: 1052090 - RNA, 19 nt, Homo sapiens
  misc_RNA (1)...(19): siRNA sense strand
caaagcggaucacugugua

SEQ ID NO: 1052091 - RNA, 19 nt, Homo sapiens
  misc_RNA (1)...(19): siRNA sense strand
gaaacguuaugcagacuug

SEQ ID NO: 1052092 - RNA, 19 nt, Homo sapiens
  misc_RNA (1)...(19): siRNA sense strand
gaaauccuccaccuacuuu

SEQ ID NO: 1052093 - RNA, 19 nt, Homo sapiens
  misc_RNA (1)...(19): siRNA sense strand
ugacaugcauccugugaaa

SEQ ID NO: 1052094 - RNA, 19 nt, Homo sapiens
  misc_RNA (1)...(19): siRNA sense strand
gaagaauucaaccacuuua

SEQ ID NO: 1052095 - RNA, 19 nt, Homo sapiens
  misc_RNA (1)...(19): siRNA sense strand
gacaagagcuaggauaaca

SEQ ID NO: 1052096 - RNA, 19 nt, Homo sapiens
  misc_RNA (1)...(19): siRNA sense strand
gacccugguugauaaauuu

SEQ ID NO: 1052097 - RNA, 19 nt, Homo sapiens
  misc_RNA (1)...(19): siRNA sense strand
gagcaaauccaguacuauu

SEQ ID NO: 1052098 - RNA, 19 nt, Homo sapiens
  misc_RNA (1)...(19): siRNA sense strand
gaagacaauucgaagcaau

SEQ ID NO: 1052099 - RNA, 19 nt, Homo sapiens
  misc_RNA (1)...(19): siRNA sense strand
aaucagaccuugagagaga

SEQ ID NO: 1052100 - RNA, 19 nt, Homo sapiens
  misc_RNA (1)...(19): siRNA sense strand
gcacugccaucaaugacaa

SEQ ID NO: 1052101 - RNA, 19 nt, Homo sapiens
  misc_RNA (1)...(19): siRNA sense strand
ggcaaagucuacaagguaa

SEQ ID NO: 1052102 - RNA, 19 nt, Homo sapiens
  misc_RNA (1)...(19): siRNA sense strand
ggaagaaaccaccaacaug

SEQ ID NO: 1052103 - RNA, 19 nt, Homo sapiens
  misc_RNA (1)...(19): siRNA sense strand
ugucaaaggucuacucaga

SEQ ID NO: 1052104 - RNA, 19 nt, Homo sapiens
  misc_RNA (1)...(19): siRNA sense strand
gcuuuggcauucagcauua

SEQ ID NO: 1052105 - RNA, 19 nt, Homo sapiens
  misc_RNA (1)...(19): siRNA sense strand
ccaaugagcaaauccagua

SEQ ID NO: 1052106 - RNA, 19 nt, Homo sapiens
  misc_RNA (1)...(19): siRNA sense strand
ucaaaggucuacucagaug

SEQ ID NO: 1052107 - RNA, 19 nt, Homo sapiens
  misc_RNA (1)...(19): siRNA sense strand
uaugcagacuugcuaauuu

SEQ ID NO: 1052108 - RNA, 19 nt, Homo sapiens
  misc_RNA (1)...(19): siRNA sense strand
gaucuuggauaucuuugga

SEQ ID NO: 1052109 - RNA, 19 nt, Homo sapiens
  misc_RNA (1)...(19): siRNA sense strand
acaaagaggugcacucagu

SEQ ID NO: 1052110 - RNA, 19 nt, Homo sapiens
  misc_RNA (1)...(19): siRNA sense strand
guacacgucugcggagaaa

SEQ ID NO: 1052111 - RNA, 19 nt, Homo sapiens
  misc_RNA (1)...(19): siRNA sense strand
cuggaaagguauuauauga

SEQ ID NO: 1052112 - RNA, 19 nt, Homo sapiens
  misc_RNA (1)...(19): siRNA sense strand
uaacuuccaaggagucuua

SEQ ID NO: 1052113 - RNA, 19 nt, Homo sapiens
  misc_RNA (1)...(19): siRNA sense strand
ucagugauauggaugaaga

SEQ ID NO: 1052114 - RNA, 19 nt, Homo sapiens
  misc_RNA (1)...(19): siRNA sense strand
gcacaucaaacaccucuug

SEQ ID NO: 1052115 - RNA, 19 nt, Homo sapiens
  misc_RNA (1)...(19): siRNA sense strand
ggacauguuccuccagaaa

SEQ ID NO: 1052116 - RNA, 19 nt, Homo sapiens
  misc_RNA (1)...(19): siRNA sense strand
gauggaauaucagaaugaa

SEQ ID NO: 1052117 - RNA, 19 nt, Homo sapiens
  misc_RNA (1)...(19): siRNA sense strand
ggaaaggccaauaaucaga

SEQ ID NO: 1052118 - RNA, 19 nt, Homo sapiens
  misc_RNA (1)...(19): siRNA sense strand
gcccaaugcugaagcuuug

SEQ ID NO: 1052119 - RNA, 19 nt, Homo sapiens
  misc_RNA (1)...(19): siRNA sense strand
augcagacuugcuaauuua

SEQ ID NO: 1052120 - RNA, 19 nt, Homo sapiens
  misc_RNA (1)...(19): siRNA sense strand
guacacagacuucaagcaa

SEQ ID NO: 1052121 - RNA, 19 nt, Homo sapiens
  misc_RNA (1)...(19): siRNA sense strand
gauaaucuacgaugcaaau

SEQ ID NO: 1052122 - RNA, 19 nt, Homo sapiens
  misc_RNA (1)...(19): siRNA sense strand
agaaagcgcccaccugauu

SEQ ID NO: 1052123 - RNA, 19 nt, Homo sapiens
  misc_RNA (1)...(19): siRNA sense strand
gcaaagaccagugcauugu

SEQ ID NO: 1052124 - RNA, 19 nt, Homo sapiens
  misc_RNA (1)...(19): siRNA sense strand
gcagauggaauaucagaau

SEQ ID NO: 1052125 - RNA, 19 nt, Homo sapiens
  misc_RNA (1)...(19): siRNA sense strand
gaaacaucuguauggauua

SEQ ID NO: 1052126 - RNA, 19 nt, Homo sapiens
  misc_RNA (1)...(19): siRNA sense strand
gcacaacaaccgaaucauc

SEQ ID NO: 1052127 - RNA, 19 nt, Homo sapiens
  misc_RNA (1)...(19): siRNA sense strand
gguauuauaugaugcuucu

SEQ ID NO: 1052128 - RNA, 19 nt, Homo sapiens
  misc_RNA (1)...(19): siRNA sense strand
ggacaaagaggugcacuca

SEQ ID NO: 1052129 - RNA, 19 nt, Homo sapiens
  misc_RNA (1)...(19): siRNA sense strand
aaaguucuguuucugcaaa

SEQ ID NO: 1052130 - RNA, 19 nt, Homo sapiens
  misc_RNA (1)...(19): siRNA sense strand
uaaaggcaccuauggcaaa

SEQ ID NO: 1052131 - RNA, 19 nt, Homo sapiens
  misc_RNA (1)...(19): siRNA sense strand
gaggcagaauacaacauuu

SEQ ID NO: 1052132 - RNA, 19 nt, Homo sapiens
  misc_RNA (1)...(19): siRNA sense strand
caucaaacaccucuugcua

SEQ ID NO: 1052133 - RNA, 19 nt, Homo sapiens
  misc_RNA (1)...(19): siRNA sense strand
gaaagcgcccaccugauug

SEQ ID NO: 1052134 - RNA, 19 nt, Homo sapiens
  misc_RNA (1)...(19): siRNA sense strand
gaggaugcauaccagaaga

SEQ ID NO: 1052135 - RNA, 19 nt, Homo sapiens
  misc_RNA (1)...(19): siRNA sense strand
gcgguuggaugaagcaaug

SEQ ID NO: 1052136 - RNA, 19 nt, Homo sapiens
  misc_RNA (1)...(19): siRNA sense strand
cagcaaggauugagucucu

SEQ ID NO: 1052137 - RNA, 19 nt, Homo sapiens
  misc_RNA (1)...(19): siRNA sense strand
gcaaaaugcugccucuguu

SEQ ID NO: 1052138 - RNA, 19 nt, Homo sapiens
  misc_RNA (1)...(19): siRNA sense strand
gaugcucggaggaaauuua

SEQ ID NO: 1052139 - RNA, 19 nt, Homo sapiens
  misc_RNA (1)...(19): siRNA sense strand
uuacaaagcggaucacugu

SEQ ID NO: 1052140 - RNA, 19 nt, Homo sapiens
  misc_RNA (1)...(19): siRNA sense strand
caagcagaauccaacaaug

SEQ ID NO: 1052141 - RNA, 19 nt, Homo sapiens
  misc_RNA (1)...(19): siRNA sense strand
aaagugaggugcccaaugc

SEQ ID NO: 1052142 - RNA, 19 nt, Homo sapiens
  misc_RNA (1)...(19): siRNA sense strand
ccagaagaccuuaucaugu

SEQ ID NO: 1052143 - RNA, 19 nt, Homo sapiens
  misc_RNA (1)...(19): siRNA sense strand
ggauaacaguggccucaag

SEQ ID NO: 1052144 - RNA, 19 nt, Homo sapiens
  misc_RNA (1)...(19): siRNA sense strand
agacagggcugcggacguu

SEQ ID NO: 1052145 - RNA, 19 nt, Homo sapiens
  misc_RNA (1)...(19): siRNA sense strand
gcuauuuccucucaacauc

SEQ ID NO: 1052146 - RNA, 19 nt, Homo sapiens
  misc_RNA (1)...(19): siRNA sense strand
gaagggugaugcacgacau

SEQ ID NO: 1052147 - RNA, 19 nt, Homo sapiens
  misc_RNA (1)...(19): siRNA sense strand
cuagguacauagcugauga

SEQ ID NO: 1052148 - RNA, 19 nt, Homo sapiens
  misc_RNA (1)...(19): siRNA sense strand
ggcaagaaucucugaauau

SEQ ID NO: 1052149 - RNA, 19 nt, Homo sapiens
  misc_RNA (1)...(19): siRNA sense strand
gaccuuaucauguggaaga

SEQ ID NO: 1052150 - RNA, 19 nt, Homo sapiens
  misc_RNA (1)...(19): siRNA sense strand
aaacaucgccaaugagcaa

SEQ ID NO: 1052151 - RNA, 19 nt, Homo sapiens
  misc_RNA (1)...(19): siRNA sense strand
guucuuugccuccacauuu

SEQ ID NO: 1052152 - RNA, 19 nt, Homo sapiens
  misc_RNA (1)...(19): siRNA sense strand
uuaaaggaguacauggaaa

SEQ ID NO: 1052153 - RNA, 19 nt, Homo sapiens
  misc_RNA (1)...(19): siRNA sense strand
gaaaccaccaacaugaaga

SEQ ID NO: 1052154 - RNA, 19 nt, Homo sapiens
  misc_RNA (1)...(19): siRNA sense strand
ucacuauaauccuaugaug

SEQ ID NO: 1052155 - RNA, 19 nt, Homo sapiens
  misc_RNA (1)...(19): siRNA sense strand
gagcagauggaauaucaga

SEQ ID NO: 1052156 - RNA, 19 nt, Homo sapiens
  misc_RNA (1)...(19): siRNA sense strand
gcauauacucuccacaguu

SEQ ID NO: 1052157 - RNA, 19 nt, Homo sapiens
  misc_RNA (1)...(19): siRNA sense strand
cuugaccacccauuuauua

SEQ ID NO: 1052158 - RNA, 19 nt, Homo sapiens
  misc_RNA (1)...(19): siRNA sense strand
cagacaagagcuaggauaa

SEQ ID NO: 1052159 - RNA, 19 nt, Homo sapiens
  misc_RNA (1)...(19): siRNA sense strand
aauacugccuugaggauga

SEQ ID NO: 1052160 - RNA, 19 nt, Homo sapiens
  misc_RNA (1)...(19): siRNA sense strand
cagcucaacucaccaguac

SEQ ID NO: 1052161 - RNA, 19 nt, Homo sapiens
  misc_RNA (1)...(19): siRNA sense strand
gcucggaggaaauuuaaga

SEQ ID NO: 1052162 - RNA, 19 nt, Homo sapiens
  misc_RNA (1)...(19): siRNA sense strand
uggcaaagucuacaaggua

SEQ ID NO: 1052163 - RNA, 19 nt, Homo sapiens
  misc_RNA (1)...(19): siRNA sense strand
ccugugagcagcaguauga

SEQ ID NO: 1052164 - RNA, 19 nt, Homo sapiens
  misc_RNA (1)...(19): siRNA sense strand
uaacaguggccucaaguuc

SEQ ID NO: 1052165 - RNA, 19 nt, Homo sapiens
  misc_RNA (1)...(19): siRNA sense strand
cagcagcucuucucaaucc

SEQ ID NO: 1052166 - RNA, 19 nt, Homo sapiens
  misc_RNA (1)...(19): siRNA sense strand
aaagaccagugcauuguca

SEQ ID NO: 1052167 - RNA, 19 nt, Homo sapiens
  misc_RNA (1)...(19): siRNA sense strand
uccagaaucuaagcauaua

SEQ ID NO: 1052168 - RNA, 19 nt, Homo sapiens
  misc_RNA (1)...(19): siRNA sense strand
ugaagaaauugaggcagaa

SEQ ID NO: 1052169 - RNA, 19 nt, Homo sapiens
  misc_RNA (1)...(19): siRNA sense strand
gagaggaugcauaccagaa

SEQ ID NO: 1052170 - RNA, 19 nt, Homo sapiens
  misc_RNA (1)...(19): siRNA sense strand
ccaccuacuuuacuucauc

SEQ ID NO: 1052171 - RNA, 19 nt, Homo sapiens
  misc_RNA (1)...(19): siRNA sense strand
caguaugacucuuccuaug

SEQ ID NO: 1052172 - RNA, 19 nt, Homo sapiens
  misc_RNA (1)...(19): siRNA sense strand
ggacgaugauguaauugua

SEQ ID NO: 1052173 - RNA, 19 nt, Homo sapiens
  misc_RNA (1)...(19): siRNA sense strand
gcagggauauuuaaacuca

SEQ ID NO: 1052174 - RNA, 19 nt, Homo sapiens
  misc_RNA (1)...(19): siRNA sense strand
ggaauacucugacucgaau

SEQ ID NO: 1052175 - RNA, 19 nt, Homo sapiens
  misc_RNA (1)...(19): siRNA sense strand
gcaggaagcuaaauuacuc

SEQ ID NO: 1052176 - RNA, 19 nt, Homo sapiens
  misc_RNA (1)...(19): siRNA sense strand
ggacugugcccaagaauga

SEQ ID NO: 1052177 - RNA, 19 nt, Homo sapiens
  misc_RNA (1)...(19): siRNA sense strand
ggaagaaggccaucaagga

SEQ ID NO: 1052178 - RNA, 19 nt, Homo sapiens
  misc_RNA (1)...(19): siRNA sense strand
gaacacauauaugggcuau

SEQ ID NO: 1052179 - RNA, 19 nt, Homo sapiens
  misc_RNA (1)...(19): siRNA sense strand
gaauccagaugccagauau

SEQ ID NO: 1052180 - RNA, 19 nt, Homo sapiens
  misc_RNA (1)...(19): siRNA sense strand
acgagaaagucaucuauuu

SEQ ID NO: 1052181 - RNA, 19 nt, Homo sapiens
  misc_RNA (1)...(19): siRNA sense strand
ugggaaagcugguuuguuc

SEQ ID NO: 1052182 - RNA, 19 nt, Homo sapiens
  misc_RNA (1)...(19): siRNA sense strand
cugaagaacuggaagaaga

SEQ ID NO: 1052183 - RNA, 19 nt, Homo sapiens
  misc_RNA (1)...(19): siRNA sense strand
gaggaugggugccacuaug

SEQ ID NO: 1052184 - RNA, 19 nt, Homo sapiens
  misc_RNA (1)...(19): siRNA sense strand
gaaugacgcagaugaugaa

SEQ ID NO: 1052185 - RNA, 19 nt, Homo sapiens
  misc_RNA (1)...(19): siRNA sense strand
guagugggacuccggaaua

SEQ ID NO: 1052186 - RNA, 19 nt, Homo sapiens
  misc_RNA (1)...(19): siRNA sense strand
ggacuucagaacacauaua

SEQ ID NO: 1052187 - RNA, 19 nt, Homo sapiens
  misc_RNA (1)...(19): siRNA sense strand
ccagauauucggagcauuu

SEQ ID NO: 1052188 - RNA, 19 nt, Homo sapiens
  misc_RNA (1)...(19): siRNA sense strand
gauugaacauuccaaacug

SEQ ID NO: 1052189 - RNA, 19 nt, Homo sapiens
  misc_RNA (1)...(19): siRNA sense strand
gaagaucagaccagacuca

SEQ ID NO: 1052190 - RNA, 19 nt, Homo sapiens
  misc_RNA (1)...(19): siRNA sense strand
ggaauccagaugccagaua

SEQ ID NO: 1052191 - RNA, 19 nt, Homo sapiens
  misc_RNA (1)...(19): siRNA sense strand
gcuccagccucugaacuuu

SEQ ID NO: 1052192 - RNA, 19 nt, Homo sapiens
  misc_RNA (1)...(19): siRNA sense strand
ucugugugauucuguauaa

SEQ ID NO: 1052193 - RNA, 19 nt, Homo sapiens
  misc_RNA (1)...(19): siRNA sense strand
cacaacgacuuaugggaaa

SEQ ID NO: 1052194 - RNA, 19 nt, Homo sapiens
  misc_RNA (1)...(19): siRNA sense strand
cgagaaagucaucuauuug

SEQ ID NO: 1052195 - RNA, 19 nt, Homo sapiens
  misc_RNA (1)...(19): siRNA sense strand
ucaauagcaucuacagcaa

SEQ ID NO: 1052196 - RNA, 19 nt, Homo sapiens
  misc_RNA (1)...(19): siRNA sense strand
gaauugcuccagccucuga

SEQ ID NO: 1052197 - RNA, 19 nt, Homo sapiens
  misc_RNA (1)...(19): siRNA sense strand
gagaaagucaucuauuugg

SEQ ID NO: 1052198 - RNA, 19 nt, Homo sapiens
  misc_RNA (1)...(19): siRNA sense strand
acacauauaugggcuaucu

SEQ ID NO: 1052199 - RNA, 19 nt, Homo sapiens
  misc_RNA (1)...(19): siRNA sense strand
gugcugcuguuccuucuga

SEQ ID NO: 1052200 - RNA, 19 nt, Homo sapiens
  misc_RNA (1)...(19): siRNA sense strand
aaaagaauguggaggaaaa

SEQ ID NO: 1052201 - RNA, 19 nt, Homo sapiens
  misc_RNA (1)...(19): siRNA sense strand
ccaagaaugacgcagauga

SEQ ID NO: 1052202 - RNA, 19 nt, Homo sapiens
  misc_RNA (1)...(19): siRNA sense strand
agaaauggaugcaaaagaa

SEQ ID NO: 1052203 - RNA, 19 nt, Homo sapiens
  misc_RNA (1)...(19): siRNA sense strand
uuaaucaggugcugcuguu

SEQ ID NO: 1052204 - RNA, 19 nt, Homo sapiens
  misc_RNA (1)...(19): siRNA sense strand
acauaaaccuugggacuuc

SEQ ID NO: 1052205 - RNA, 19 nt, Homo sapiens
  misc_RNA (1)...(19): siRNA sense strand
acaaggugauauccaagaa

SEQ ID NO: 1052206 - RNA, 19 nt, Homo sapiens
  misc_RNA (1)...(19): siRNA sense strand
guaauuguacaaggugaua

SEQ ID NO: 1052207 - RNA, 19 nt, Homo sapiens
  misc_RNA (1)...(19): siRNA sense strand
agaaagucaucuauuugga

SEQ ID NO: 1052208 - RNA, 19 nt, Homo sapiens
  misc_RNA (1)...(19): siRNA sense strand
uuuggacgaugauguaauu

SEQ ID NO: 1052209 - RNA, 19 nt, Homo sapiens
  misc_RNA (1)...(19): siRNA sense strand
uaucuggacuaccggaaga

SEQ ID NO: 1052210 - RNA, 19 nt, Homo sapiens
  misc_RNA (1)...(19): siRNA sense strand
uaaggcaccugggcuggaa

SEQ ID NO: 1052211 - RNA, 19 nt, Homo sapiens
  misc_RNA (1)...(19): siRNA sense strand
uguacaaggugauauccaa

SEQ ID NO: 1052212 - RNA, 19 nt, Homo sapiens
  misc_RNA (1)...(19): siRNA sense strand
ggauugaacauuccaaacu

SEQ ID NO: 1052213 - RNA, 19 nt, Homo sapiens
  misc_RNA (1)...(19): siRNA sense strand
ccacuggaauggaagacau

SEQ ID NO: 1052214 - RNA, 19 nt, Homo sapiens
  misc_RNA (1)...(19): siRNA sense strand
gcaaaagaauguggaggaa

SEQ ID NO: 1052215 - RNA, 19 nt, Homo sapiens
  misc_RNA (1)...(19): siRNA sense strand
ugacgcagaugaugaaucc

SEQ ID NO: 1052216 - RNA, 19 nt, Homo sapiens
  misc_RNA (1)...(19): siRNA sense strand
gcgcaucaccaagcaauug

SEQ ID NO: 1052217 - RNA, 19 nt, Homo sapiens
  misc_RNA (1)...(19): siRNA sense strand
gcccaagaaugacgcagau

SEQ ID NO: 1052218 - RNA, 19 nt, Homo sapiens
  misc_RNA (1)...(19): siRNA sense strand
ggacuucccuaguguucac

SEQ ID NO: 1052219 - RNA, 19 nt, Homo sapiens
  misc_RNA (1)...(19): siRNA sense strand
gcccucugcucaggacaua

SEQ ID NO: 1052220 - RNA, 19 nt, Homo sapiens
  misc_RNA (1)...(19): siRNA sense strand
agagauuccuguggugauu

SEQ ID NO: 1052221 - RNA, 19 nt, Homo sapiens
  misc_RNA (1)...(19): siRNA sense strand
uuggagaaauggaugcaaa

SEQ ID NO: 1052222 - RNA, 19 nt, Homo sapiens
  misc_RNA (1)...(19): siRNA sense strand
ggacuccggaauacucuga

SEQ ID NO: 1052223 - RNA, 19 nt, Homo sapiens
  misc_RNA (1)...(19): siRNA sense strand
cgagacuccugaagaacug

SEQ ID NO: 1052224 - RNA, 19 nt, Homo sapiens
  misc_RNA (1)...(19): siRNA sense strand
gacauaaaccuugggacuu

SEQ ID NO: 1052225 - RNA, 19 nt, Homo sapiens
  misc_RNA (1)...(19): siRNA sense strand
agaaugacgcagaugauga

SEQ ID NO: 1052226 - RNA, 19 nt, Homo sapiens
  misc_RNA (1)...(19): siRNA sense strand
gcaucuacagcaacacuga

SEQ ID NO: 1052227 - RNA, 19 nt, Homo sapiens
  misc_RNA (1)...(19): siRNA sense strand
caagaaugacgcagaugau

SEQ ID NO: 1052228 - RNA, 19 nt, Homo sapiens
  misc_RNA (1)...(19): siRNA sense strand
cuauuuggacgaugaugua

SEQ ID NO: 1052229 - RNA, 19 nt, Homo sapiens
  misc_RNA (1)...(19): siRNA sense strand
aauagcaucuacagcaaca

SEQ ID NO: 1052230 - RNA, 19 nt, Homo sapiens
  misc_RNA (1)...(19): siRNA sense strand
gacuucagaacacauauau

SEQ ID NO: 1052231 - RNA, 19 nt, Homo sapiens
  misc_RNA (1)...(19): siRNA sense strand
gaagaacuggaagaagaga

SEQ ID NO: 1052232 - RNA, 19 nt, Homo sapiens
  misc_RNA (1)...(19): siRNA sense strand
gggaagaucagaccagacu

SEQ ID NO: 1052233 - RNA, 19 nt, Homo sapiens
  misc_RNA (1)...(19): siRNA sense strand
gaacuggaagaagagauuc

SEQ ID NO: 1052234 - RNA, 19 nt, Homo sapiens
  misc_RNA (1)...(19): siRNA sense strand
cuucagaacacauauaugg

SEQ ID NO: 1052235 - RNA, 19 nt, Homo sapiens
  misc_RNA (1)...(19): siRNA sense strand
ggugauauccaagaacugu

SEQ ID NO: 1052236 - RNA, 19 nt, Homo sapiens
  misc_RNA (1)...(19): siRNA sense strand
ggaggaugggugccacuau

SEQ ID NO: 1052237 - RNA, 19 nt, Homo sapiens
  misc_RNA (1)...(19): siRNA sense strand
ucugcaggaagcuaaauua

SEQ ID NO: 1052238 - RNA, 19 nt, Homo sapiens
  misc_RNA (1)...(19): siRNA sense strand
caacacugacgccaacauc

SEQ ID NO: 1052239 - RNA, 19 nt, Homo sapiens
  misc_RNA (1)...(19): siRNA sense strand
cggaauacucugacucgaa

SEQ ID NO: 1052240 - RNA, 19 nt, Homo sapiens
  misc_RNA (1)...(19): siRNA sense strand
uaaacucaaucaccauagc

SEQ ID NO: 1052241 - RNA, 19 nt, Homo sapiens
  misc_RNA (1)...(19): siRNA sense strand
ucagaugacugcgauuugc

SEQ ID NO: 1052242 - RNA, 19 nt, Homo sapiens
  misc_RNA (1)...(19): siRNA sense strand
ccaaacugagagaaauaaa

SEQ ID NO: 1052243 - RNA, 19 nt, Homo sapiens
  misc_RNA (1)...(19): siRNA sense strand
gagauuccuguggugauuu

SEQ ID NO: 1052244 - RNA, 19 nt, Homo sapiens
  misc_RNA (1)...(19): siRNA sense strand
cugcagggauauuuaaacu

SEQ ID NO: 1052245 - RNA, 19 nt, Homo sapiens
  misc_RNA (1)...(19): siRNA sense strand
ccucugcucaggacauaaa

SEQ ID NO: 1052246 - RNA, 19 nt, Homo sapiens
  misc_RNA (1)...(19): siRNA sense strand
acacugacgccaacaucuu

SEQ ID NO: 1052247 - RNA, 19 nt, Homo sapiens
  misc_RNA (1)...(19): siRNA sense strand
agaacuggaagaagagauu

SEQ ID NO: 1052248 - RNA, 19 nt, Homo sapiens
  misc_RNA (1)...(19): siRNA sense strand
caucuuguucuauguagug

SEQ ID NO: 1052249 - RNA, 19 nt, Homo sapiens
  misc_RNA (1)...(19): siRNA sense strand
aauccgagacuccugaaga

SEQ ID NO: 1052250 - RNA, 19 nt, Homo sapiens
  misc_RNA (1)...(19): siRNA sense strand
cacgagaaagucaucuauu

SEQ ID NO: 1052251 - RNA, 19 nt, Homo sapiens
  misc_RNA (1)...(19): siRNA sense strand
acacgagaaagucaucuau

SEQ ID NO: 1052252 - RNA, 19 nt, Homo sapiens
  misc_RNA (1)...(19): siRNA sense strand
agauuccuguggugauuug

SEQ ID NO: 1052253 - RNA, 19 nt, Homo sapiens
  misc_RNA (1)...(19): siRNA sense strand
caaacugagagaaauaaac

SEQ ID NO: 1052254 - RNA, 19 nt, Homo sapiens
  misc_RNA (1)...(19): siRNA sense strand
gaauacucugacucgaaua

SEQ ID NO: 1052255 - RNA, 19 nt, Homo sapiens
  misc_RNA (1)...(19): siRNA sense strand
ugauauccaagaacuguau

SEQ ID NO: 1052256 - RNA, 19 nt, Homo sapiens
  misc_RNA (1)...(19): siRNA sense strand
gaauggaagacauaaaccu

SEQ ID NO: 1052257 - RNA, 19 nt, Homo sapiens
  misc_RNA (1)...(19): siRNA sense strand
uugccaacaugacagaaug

SEQ ID NO: 1052258 - RNA, 19 nt, Homo sapiens
  misc_RNA (1)...(19): siRNA sense strand
ucucagaugacugcgauuu

SEQ ID NO: 1052259 - RNA, 19 nt, Homo sapiens
  misc_RNA (1)...(19): siRNA sense strand
auugaacauuccaaacuga

SEQ ID NO: 1052260 - RNA, 19 nt, Homo sapiens
  misc_RNA (1)...(19): siRNA sense strand
auccgagacuccugaagaa

SEQ ID NO: 1052261 - RNA, 19 nt, Homo sapiens
  misc_RNA (1)...(19): siRNA sense strand
aaggugauauccaagaacu

SEQ ID NO: 1052262 - RNA, 19 nt, Homo sapiens
  misc_RNA (1)...(19): siRNA sense strand
ucaacccgaugguccucaa

SEQ ID NO: 1052263 - RNA, 19 nt, Homo sapiens
  misc_RNA (1)...(19): siRNA sense strand
acucaucgaggccugaauu

SEQ ID NO: 1052264 - RNA, 19 nt, Homo sapiens
  misc_RNA (1)...(19): siRNA sense strand
gagaaauggaugcaaaaga

SEQ ID NO: 1052265 - RNA, 19 nt, Homo sapiens
  misc_RNA (1)...(19): siRNA sense strand
ugugugauucuguauaaga

SEQ ID NO: 1052266 - RNA, 19 nt, Homo sapiens
  misc_RNA (1)...(19): siRNA sense strand
aaacagacucgugggacuu

SEQ ID NO: 1052267 - RNA, 19 nt, Homo sapiens
  misc_RNA (1)...(19): siRNA sense strand
gcccaaagcucacugugua

SEQ ID NO: 1052268 - RNA, 19 nt, Homo sapiens
  misc_RNA (1)...(19): siRNA sense strand
aaagcucacuguguaauua

SEQ ID NO: 1052269 - RNA, 19 nt, Homo sapiens
  misc_RNA (1)...(19): siRNA sense strand
ggacacacccuccaguuau

SEQ ID NO: 1052270 - RNA, 19 nt, Homo sapiens
  misc_RNA (1)...(19): siRNA sense strand
ccagagaaagcaucauuaa

SEQ ID NO: 1052271 - RNA, 19 nt, Homo sapiens
  misc_RNA (1)...(19): siRNA sense strand
gagaaagcaucauuaagcu

SEQ ID NO: 1052272 - RNA, 19 nt, Homo sapiens
  misc_RNA (1)...(19): siRNA sense strand
gacacacccuccaguuaug

SEQ ID NO: 1052273 - RNA, 19 nt, Homo sapiens
  misc_RNA (1)...(19): siRNA sense strand
ucauuaagcucauggaaaa

SEQ ID NO: 1052274 - RNA, 19 nt, Homo sapiens
  misc_RNA (1)...(19): siRNA sense strand
caucgaaacccuccucaug

SEQ ID NO: 1052275 - RNA, 19 nt, Homo sapiens
  misc_RNA (1)...(19): siRNA sense strand
ucgaaacccuccucaugga

SEQ ID NO: 1052276 - RNA, 19 nt, Homo sapiens
  misc_RNA (1)...(19): siRNA sense strand
caaagcucacuguguaauu

SEQ ID NO: 1052277 - RNA, 19 nt, Homo sapiens
  misc_RNA (1)...(19): siRNA sense strand
uuaugaggcugccauggaa

SEQ ID NO: 1052278 - RNA, 19 nt, Homo sapiens
  misc_RNA (1)...(19): siRNA sense strand
gcccagagaaagcaucauu

SEQ ID NO: 1052279 - RNA, 19 nt, Homo sapiens
  misc_RNA (1)...(19): siRNA sense strand
agagaaagcaucauuaagc

SEQ ID NO: 1052280 - RNA, 19 nt, Homo sapiens
  misc_RNA (1)...(19): siRNA sense strand
guuaugaggcugccaugga

SEQ ID NO: 1052281 - RNA, 19 nt, Homo sapiens
  misc_RNA (1)...(19): siRNA sense strand
gagaucugcccgagcuuuc

SEQ ID NO: 1052282 - RNA, 19 nt, Homo sapiens
  misc_RNA (1)...(19): siRNA sense strand
cccagagaaagcaucauua

SEQ ID NO: 1052283 - RNA, 19 nt, Homo sapiens
  misc_RNA (1)...(19): siRNA sense strand
ccaaagcucacuguguaau

SEQ ID NO: 1052284 - RNA, 19 nt, Homo sapiens
  misc_RNA (1)...(19): siRNA sense strand
gaggcugccauggaacuuu

SEQ ID NO: 1052285 - RNA, 19 nt, Homo sapiens
  misc_RNA (1)...(19): siRNA sense strand
caucauuaagcucauggaa

SEQ ID NO: 1052286 - RNA, 19 nt, Homo sapiens
  misc_RNA (1)...(19): siRNA sense strand
cagagaaagcaucauuaag

SEQ ID NO: 1052287 - RNA, 19 nt, Homo sapiens
  misc_RNA (1)...(19): siRNA sense strand
cagcccugaucaagacaug

SEQ ID NO: 1052288 - RNA, 19 nt, Homo sapiens
  misc_RNA (1)...(19): siRNA sense strand
gaacugugcuucuugaaca

SEQ ID NO: 1052289 - RNA, 19 nt, Homo sapiens
  misc_RNA (1)...(19): siRNA sense strand
caauagagcccuuaacauu

SEQ ID NO: 1052290 - RNA, 19 nt, Homo sapiens
  misc_RNA (1)...(19): siRNA sense strand
gguaaacacugauccagaa

SEQ ID NO: 1052291 - RNA, 19 nt, Homo sapiens
  misc_RNA (1)...(19): siRNA sense strand
ggacagacuuaaaccaguu

SEQ ID NO: 1052292 - RNA, 19 nt, Homo sapiens
  misc_RNA (1)...(19): siRNA sense strand
gcaauugcuucgaugauga

SEQ ID NO: 1052293 - RNA, 19 nt, Homo sapiens
  misc_RNA (1)...(19): siRNA sense strand
ucaaaggccuggucauuca

SEQ ID NO: 1052294 - RNA, 19 nt, Homo sapiens
  misc_RNA (1)...(19): siRNA sense strand
guucagggcucaauuugug

SEQ ID NO: 1052295 - RNA, 19 nt, Homo sapiens
  misc_RNA (1)...(19): siRNA sense strand
caaggaaauuugagucuuc

SEQ ID NO: 1052296 - RNA, 19 nt, Homo sapiens
  misc_RNA (1)...(19): siRNA sense strand
gaucaaaggccuggucauu

SEQ ID NO: 1052297 - RNA, 19 nt, Homo sapiens
  misc_RNA (1)...(19): siRNA sense strand
gaaauuugagucuuccauu

SEQ ID NO: 1052298 - RNA, 19 nt, Homo sapiens
  misc_RNA (1)...(19): siRNA sense strand
gagaaccaauagcaaauag

SEQ ID NO: 1052299 - RNA, 19 nt, Homo sapiens
  misc_RNA (1)...(19): siRNA sense strand
guagagaaaguaacaaaug

SEQ ID NO: 1052300 - RNA, 19 nt, Homo sapiens
  misc_RNA (1)...(19): siRNA sense strand
gagaauugguagagaaagu

SEQ ID NO: 1052301 - RNA, 19 nt, Homo sapiens
  misc_RNA (1)...(19): siRNA sense strand
ccagaagccuuacagaagu

SEQ ID NO: 1052302 - RNA, 19 nt, Homo sapiens
  misc_RNA (1)...(19): siRNA sense strand
gaacagagaauugguagag

SEQ ID NO: 1052303 - RNA, 19 nt, Homo sapiens
  misc_RNA (1)...(19): siRNA sense strand
auagagcccuuaacauuga

SEQ ID NO: 1052304 - RNA, 19 nt, Homo sapiens
  misc_RNA (1)...(19): siRNA sense strand
caacucaggcuguagaaga

SEQ ID NO: 1052305 - RNA, 19 nt, Homo sapiens
  misc_RNA (1)...(19): siRNA sense strand
acuaugagauuucaguuga

SEQ ID NO: 1052306 - RNA, 19 nt, Homo sapiens
  misc_RNA (1)...(19): siRNA sense strand
acagagaauugguagagaa

SEQ ID NO: 1052307 - RNA, 19 nt, Homo sapiens
  misc_RNA (1)...(19): siRNA sense strand
ugaagggacuggcauaaac

SEQ ID NO: 1052308 - RNA, 19 nt, Homo sapiens
  misc_RNA (1)...(19): siRNA sense strand
aagaugagcuucgaacugu

SEQ ID NO: 1052309 - RNA, 19 nt, Homo sapiens
  misc_RNA (1)...(19): siRNA sense strand
aaauuugagucuuccauug

SEQ ID NO: 1052310 - RNA, 19 nt, Homo sapiens
  misc_RNA (1)...(19): siRNA sense strand
gccuggucauucaauauua

SEQ ID NO: 1052311 - RNA, 19 nt, Homo sapiens
  misc_RNA (1)...(19): siRNA sense strand
ggcagagaaucagguuaua

SEQ ID NO: 1052312 - RNA, 19 nt, Homo sapiens
  misc_RNA (1)...(19): siRNA sense strand
gaaccaauagcaaauagag

SEQ ID NO: 1052313 - RNA, 19 nt, Homo sapiens
  misc_RNA (1)...(19): siRNA sense strand
gaauugguagagaaaguaa

SEQ ID NO: 1052314 - RNA, 19 nt, Homo sapiens
  misc_RNA (1)...(19): siRNA sense strand
caauaaagaagaugagcuu

SEQ ID NO: 1052315 - RNA, 19 nt, Homo sapiens
  misc_RNA (1)...(19): siRNA sense strand
ugagagcacuaaaugaagu

SEQ ID NO: 1052316 - RNA, 19 nt, Homo sapiens
  misc_RNA (1)...(19): siRNA sense strand
ggucugagggucauuuaug

SEQ ID NO: 1052317 - RNA, 19 nt, Homo sapiens
  misc_RNA (1)...(19): siRNA sense strand
guuuaaugauggugcaauu

SEQ ID NO: 1052318 - RNA, 19 nt, Homo sapiens
  misc_RNA (1)...(19): siRNA sense strand
cagaagccuuacagaaguu

SEQ ID NO: 1052319 - RNA, 19 nt, Homo sapiens
  misc_RNA (1)...(19): siRNA sense strand
acacauuccuuuccagaag

SEQ ID NO: 1052320 - RNA, 19 nt, Homo sapiens
  misc_RNA (1)...(19): siRNA sense strand
cgagaaccaauagcaaaua

SEQ ID NO: 1052321 - RNA, 19 nt, Homo sapiens
  misc_RNA (1)...(19): siRNA sense strand
gcucuacaguccggaagaa

SEQ ID NO: 1052322 - RNA, 19 nt, Homo sapiens
  misc_RNA (1)...(19): siRNA sense strand
ccuggucauucaauauuaa

SEQ ID NO: 1052323 - RNA, 19 nt, Homo sapiens
  misc_RNA (1)...(19): siRNA sense strand
aaacgacaaggaaauuuga

SEQ ID NO: 1052324 - RNA, 19 nt, Homo sapiens
  misc_RNA (1)...(19): siRNA sense strand
ccaauagcaaauagaguuu

SEQ ID NO: 1052325 - RNA, 19 nt, Homo sapiens
  misc_RNA (1)...(19): siRNA sense strand
uuaacaggguugcaacuca

SEQ ID NO: 1052326 - RNA, 19 nt, Homo sapiens
  misc_RNA (1)...(19): siRNA sense strand
aauagagcccuuaacauug

SEQ ID NO: 1052327 - RNA, 19 nt, Homo sapiens
  misc_RNA (1)...(19): siRNA sense strand
cacaauagagcccuuaaca

SEQ ID NO: 1052328 - RNA, 19 nt, Homo sapiens
  misc_RNA (1)...(19): siRNA sense strand
gcaaauagaguuuucucaa

SEQ ID NO: 1052329 - RNA, 19 nt, Homo sapiens
  misc_RNA (1)...(19): siRNA sense strand
gggcucaauuuguguacug

SEQ ID NO: 1052330 - RNA, 19 nt, Homo sapiens
  misc_RNA (1)...(19): siRNA sense strand
auccagggcuuccuacuau

SEQ ID NO: 1052331 - RNA, 19 nt, Homo sapiens
  misc_RNA (1)...(19): siRNA sense strand
uaugagauuucaguugaug

SEQ ID NO: 1052332 - RNA, 19 nt, Homo sapiens
  misc_RNA (1)...(19): siRNA sense strand
gcuugaaucagcacaauag

SEQ ID NO: 1052333 - RNA, 19 nt, Homo sapiens
  misc_RNA (1)...(19): siRNA sense strand
acaaggaaauuugagucuu

SEQ ID NO: 1052334 - RNA, 19 nt, Homo sapiens
  misc_RNA (1)...(19): siRNA sense strand
ggccuggucauucaauauu

SEQ ID NO: 1052335 - RNA, 19 nt, Homo sapiens
  misc_RNA (1)...(19): siRNA sense strand
gacagacuuaaaccaguua

SEQ ID NO: 1052336 - RNA, 19 nt, Homo sapiens
  misc_RNA (1)...(19): siRNA sense strand
caauuuguguacuggaaca

SEQ ID NO: 1052337 - RNA, 19 nt, Homo sapiens
  misc_RNA (1)...(19): siRNA sense strand
cauccagggcuuccuacua

SEQ ID NO: 1052338 - RNA, 19 nt, Homo sapiens
  misc_RNA (1)...(19): siRNA sense strand
caaauagaguuuucucaag

SEQ ID NO: 1052339 - RNA, 19 nt, Homo sapiens
  misc_RNA (1)...(19): siRNA sense strand
cagagaauugguagagaaa

SEQ ID NO: 1052340 - RNA, 19 nt, Homo sapiens
  misc_RNA (1)...(19): siRNA sense strand
gcaaaacgacaaggaaauu

SEQ ID NO: 1052341 - RNA, 19 nt, Homo sapiens
  misc_RNA (1)...(19): siRNA sense strand
gguugcaacucaggcugua

SEQ ID NO: 1052342 - RNA, 19 nt, Homo sapiens
  misc_RNA (1)...(19): siRNA sense strand
ggaggcagagaaucagguu

SEQ ID NO: 1052343 - RNA, 19 nt, Homo sapiens
  misc_RNA (1)...(19): siRNA sense strand
gcagucgucagcguuguuu

SEQ ID NO: 1052344 - RNA, 19 nt, Homo sapiens
  misc_RNA (1)...(19): siRNA sense strand
agacuuaaaccaguuauag

SEQ ID NO: 1052345 - RNA, 19 nt, Homo sapiens
  misc_RNA (1)...(19): siRNA sense strand
gaguaaagucuuggacaga

SEQ ID NO: 1052346 - RNA, 19 nt, Homo sapiens
  misc_RNA (1)...(19): siRNA sense strand
gaagaguucagggcucaau

SEQ ID NO: 1052347 - RNA, 19 nt, Homo sapiens
  misc_RNA (1)...(19): siRNA sense strand
gauuucaguugaugauggu

SEQ ID NO: 1052348 - RNA, 19 nt, Homo sapiens
  misc_RNA (1)...(19): siRNA sense strand
ccagggcuuccuacuauga

SEQ ID NO: 1052349 - RNA, 19 nt, Homo sapiens
  misc_RNA (1)...(19): siRNA sense strand
gaguucagggcucaauuug

SEQ ID NO: 1052350 - RNA, 19 nt, Homo sapiens
  misc_RNA (1)...(19): siRNA sense strand
guucuaucguggugaguuc

SEQ ID NO: 1052351 - RNA, 19 nt, Homo sapiens
  misc_RNA (1)...(19): siRNA sense strand
gguagagaaaguaacaaau

SEQ ID NO: 1052352 - RNA, 19 nt, Homo sapiens
  misc_RNA (1)...(19): siRNA sense strand
agaguucagggcucaauuu

SEQ ID NO: 1052353 - RNA, 19 nt, Homo sapiens
  misc_RNA (1)...(19): siRNA sense strand
gcagagaaucagguuauac

SEQ ID NO: 1052354 - RNA, 19 nt, Homo sapiens
  misc_RNA (1)...(19): siRNA sense strand
cccguucgauauacacauu

SEQ ID NO: 1052355 - RNA, 19 nt, Homo sapiens
  misc_RNA (1)...(19): siRNA sense strand
guacuggaacaggaucaaa

SEQ ID NO: 1052356 - RNA, 19 nt, Homo sapiens
  misc_RNA (1)...(19): siRNA sense strand
ggaggaacuucuuuugagu

SEQ ID NO: 1052357 - RNA, 19 nt, Homo sapiens
  misc_RNA (1)...(19): siRNA sense strand
ggcagcgaguaaagucuug

SEQ ID NO: 1052358 - RNA, 19 nt, Homo sapiens
  misc_RNA (1)...(19): siRNA sense strand
guggugaguucaggugguu

SEQ ID NO: 1052359 - RNA, 19 nt, Homo sapiens
  misc_RNA (1)...(19): siRNA sense strand
agaauugguagagaaagua

SEQ ID NO: 1052360 - RNA, 19 nt, Homo sapiens
  misc_RNA (1)...(19): siRNA sense strand
cgauauacacauuccuuuc

SEQ ID NO: 1052361 - RNA, 19 nt, Homo sapiens
  misc_RNA (1)...(19): siRNA sense strand
ugcaauugcuucgaugaug

SEQ ID NO: 1052362 - RNA, 19 nt, Homo sapiens
  misc_RNA (1)...(19): siRNA sense strand
gacaaggaaauuugagucu

SEQ ID NO: 1052363 - RNA, 19 nt, Homo sapiens
  misc_RNA (1)...(19): siRNA sense strand
uguguucguucucguuguu

SEQ ID NO: 1052364 - RNA, 19 nt, Homo sapiens
  misc_RNA (1)...(19): siRNA sense strand
accaauagcaaauagaguu

SEQ ID NO: 1052365 - RNA, 19 nt, Homo sapiens
  misc_RNA (1)...(19): siRNA sense strand
gcuucgaacugugcuucuu

SEQ ID NO: 1052366 - RNA, 19 nt, Homo sapiens
  misc_RNA (1)...(19): siRNA sense strand
gauauacacauuccuuucc

SEQ ID NO: 1052367 - RNA, 19 nt, Homo sapiens
  misc_RNA (1)...(19): siRNA sense strand
aggcagagaaucagguuau

SEQ ID NO: 1052368 - RNA, 19 nt, Homo sapiens
  misc_RNA (1)...(19): siRNA sense strand
gaggcagagaaucagguua

SEQ ID NO: 1052369 - RNA, 19 nt, Homo sapiens
  misc_RNA (1)...(19): siRNA sense strand
aaggccuggucauucaaua

SEQ ID NO: 1052370 - RNA, 19 nt, Homo sapiens
  misc_RNA (1)...(19): siRNA sense strand
gguuguggauggaggaacu

SEQ ID NO: 1052371 - RNA, 19 nt, Homo sapiens
  misc_RNA (1)...(19): siRNA sense strand
uccagaagccuuacagaag

SEQ ID NO: 1052372 - RNA, 19 nt, Homo sapiens
  misc_RNA (1)...(19): siRNA sense strand
aauuugagucuuccauuga

SEQ ID NO: 1052373 - RNA, 19 nt, Homo sapiens
  misc_RNA (1)...(19): siRNA sense strand
aagcuugaaucagcacaau

SEQ ID NO: 1052374 - RNA, 19 nt, Homo sapiens
  misc_RNA (1)...(19): siRNA sense strand
gaucaauaaagaagaugag

SEQ ID NO: 1052375 - RNA, 19 nt, Homo sapiens
  misc_RNA (1)...(19): siRNA sense strand
cagcguuguuucuccucaa

SEQ ID NO: 1052376 - RNA, 19 nt, Homo sapiens
  misc_RNA (1)...(19): siRNA sense strand
cagacuuaaaccaguuaua

SEQ ID NO: 1052377 - RNA, 19 nt, Homo sapiens
  misc_RNA (1)...(19): siRNA sense strand
caaaggccuggucauucaa

SEQ ID NO: 1052378 - RNA, 19 nt, Homo sapiens
  misc_RNA (1)...(19): siRNA sense strand
ucagggcucaauuugugua

SEQ ID NO: 1052379 - RNA, 19 nt, Homo sapiens
  misc_RNA (1)...(19): siRNA sense strand
gcacaauagagcccuuaac

SEQ ID NO: 1052380 - RNA, 19 nt, Homo sapiens
  misc_RNA (1)...(19): siRNA sense strand
cagcacaauagagcccuua

SEQ ID NO: 1052381 - RNA, 19 nt, Homo sapiens
  misc_RNA (1)...(19): siRNA sense strand
cucaauuuguguacuggaa

SEQ ID NO: 1052382 - RNA, 19 nt, Homo sapiens
  misc_RNA (1)...(19): siRNA sense strand
gaaguaagauuaagagauc

SEQ ID NO: 1052383 - RNA, 19 nt, Homo sapiens
  misc_RNA (1)...(19): siRNA sense strand
gcaaauaucagucugcuaa

SEQ ID NO: 1052384 - RNA, 19 nt, Homo sapiens
  misc_RNA (1)...(19): siRNA sense strand
ggaaagaucugcagaaucc

SEQ ID NO: 1052385 - RNA, 19 nt, Homo sapiens
  misc_RNA (1)...(19): siRNA sense strand
cagcaaaugucccaaauug

SEQ ID NO: 1052386 - RNA, 19 nt, Homo sapiens
  misc_RNA (1)...(19): siRNA sense strand
gcaagcaaauccacauuau

SEQ ID NO: 1052387 - RNA, 19 nt, Homo sapiens
  misc_RNA (1)...(19): siRNA sense strand
gcaaaugucccaaauuguu

SEQ ID NO: 1052388 - RNA, 19 nt, Homo sapiens
  misc_RNA (1)...(19): siRNA sense strand
ggaaaggcauucagagugu

SEQ ID NO: 1052389 - RNA, 19 nt, Homo sapiens
  misc_RNA (1)...(19): siRNA sense strand
gaugguggcuggguagaua

SEQ ID NO: 1052390 - RNA, 19 nt, Homo sapiens
  misc_RNA (1)...(19): siRNA sense strand
gccauuaauuugugucaua

SEQ ID NO: 1052391 - RNA, 19 nt, Homo sapiens
  misc_RNA (1)...(19): siRNA sense strand
gagaagaggaaacaaauga

SEQ ID NO: 1052392 - RNA, 19 nt, Homo sapiens
  misc_RNA (1)...(19): siRNA sense strand
guucauggcuagagcaauu

SEQ ID NO: 1052393 - RNA, 19 nt, Homo sapiens
  misc_RNA (1)...(19): siRNA sense strand
gaagaggaaacaaaugaaa

SEQ ID NO: 1052394 - RNA, 19 nt, Homo sapiens
  misc_RNA (1)...(19): siRNA sense strand
cagaaucgguugugccauu

SEQ ID NO: 1052395 - RNA, 19 nt, Homo sapiens
  misc_RNA (1)...(19): siRNA sense strand
acaaugacaugcagaguau

SEQ ID NO: 1052396 - RNA, 19 nt, Homo sapiens
  misc_RNA (1)...(19): siRNA sense strand
agaccuacauugcuucuuu

SEQ ID NO: 1052397 - RNA, 19 nt, Homo sapiens
  misc_RNA (1)...(19): siRNA sense strand
guagagcugcaauucauua

SEQ ID NO: 1052398 - RNA, 19 nt, Homo sapiens
  misc_RNA (1)...(19): siRNA sense strand
ucagaaaguuuacagaauc

SEQ ID NO: 1052399 - RNA, 19 nt, Homo sapiens
  misc_RNA (1)...(19): siRNA sense strand
agaaagaccuacauugcuu

SEQ ID NO: 1052400 - RNA, 19 nt, Homo sapiens
  misc_RNA (1)...(19): siRNA sense strand
gagcugcaauucauuaugg

SEQ ID NO: 1052401 - RNA, 19 nt, Homo sapiens
  misc_RNA (1)...(19): siRNA sense strand
gcagaauccugggcugaaa

SEQ ID NO: 1052402 - RNA, 19 nt, Homo sapiens
  misc_RNA (1)...(19): siRNA sense strand
guacaaucgugguaugaug

SEQ ID NO: 1052403 - RNA, 19 nt, Homo sapiens
  misc_RNA (1)...(19): siRNA sense strand
gauaguagcagaaaugaag

SEQ ID NO: 1052404 - RNA, 19 nt, Homo sapiens
  misc_RNA (1)...(19): siRNA sense strand
caacccauauuguccauuc

SEQ ID NO: 1052405 - RNA, 19 nt, Homo sapiens
  misc_RNA (1)...(19): siRNA sense strand
guaacuguaugcaagcaaa

SEQ ID NO: 1052406 - RNA, 19 nt, Homo sapiens
  misc_RNA (1)...(19): siRNA sense strand
gacaaugacaugcagagua

SEQ ID NO: 1052407 - RNA, 19 nt, Homo sapiens
  misc_RNA (1)...(19): siRNA sense strand
caaaugucccaaauuguuu

SEQ ID NO: 1052408 - RNA, 19 nt, Homo sapiens
  misc_RNA (1)...(19): siRNA sense strand
gacuuuagcuacccauaug

SEQ ID NO: 1052409 - RNA, 19 nt, Homo sapiens
  misc_RNA (1)...(19): siRNA sense strand
ccaaauuguuucuugugaa

SEQ ID NO: 1052410 - RNA, 19 nt, Homo sapiens
  misc_RNA (1)...(19): siRNA sense strand
gaugauaguagcagaaaug

SEQ ID NO: 1052411 - RNA, 19 nt, Homo sapiens
  misc_RNA (1)...(19): siRNA sense strand
ccaacagccucuaauaugg

SEQ ID NO: 1052412 - RNA, 19 nt, Homo sapiens
  misc_RNA (1)...(19): siRNA sense strand
caaauuguuucuugugaag

SEQ ID NO: 1052413 - RNA, 19 nt, Homo sapiens
  misc_RNA (1)...(19): siRNA sense strand
gaaaaucugugcuacaaag

SEQ ID NO: 1052414 - RNA, 19 nt, Homo sapiens
  misc_RNA (1)...(19): siRNA sense strand
gagaaaaucugugcuacaa

SEQ ID NO: 1052415 - RNA, 19 nt, Homo sapiens
  misc_RNA (1)...(19): siRNA sense strand
gaaaggcauucagaguguu

SEQ ID NO: 1052416 - RNA, 19 nt, Homo sapiens
  misc_RNA (1)...(19): siRNA sense strand
ucacauugcccaagaguau

SEQ ID NO: 1052417 - RNA, 19 nt, Homo sapiens
  misc_RNA (1)...(19): siRNA sense strand
gacaaggaagaaagcauua

SEQ ID NO: 1052418 - RNA, 19 nt, Homo sapiens
  misc_RNA (1)...(19): siRNA sense strand
caaggaagaaagcauuauu

SEQ ID NO: 1052419 - RNA, 19 nt, Homo sapiens
  misc_RNA (1)...(19): siRNA sense strand
gcuaauuccuucacagucu

SEQ ID NO: 1052420 - RNA, 19 nt, Homo sapiens
  misc_RNA (1)...(19): siRNA sense strand
uaaaguuauuggcagugua

SEQ ID NO: 1052421 - RNA, 19 nt, Homo sapiens
  misc_RNA (1)...(19): siRNA sense strand
guagauaucacuagacaag

SEQ ID NO: 1052422 - RNA, 19 nt, Homo sapiens
  misc_RNA (1)...(19): siRNA sense strand
aaaggaacaaccugcaaua

SEQ ID NO: 1052423 - RNA, 19 nt, Homo sapiens
  misc_RNA (1)...(19): siRNA sense strand
agaguauacuguccucgua

SEQ ID NO: 1052424 - RNA, 19 nt, Homo sapiens
  misc_RNA (1)...(19): siRNA sense strand
ggguagauaucacuagaca

SEQ ID NO: 1052425 - RNA, 19 nt, Homo sapiens
  misc_RNA (1)...(19): siRNA sense strand
ccugcuggcuguuuggaua

SEQ ID NO: 1052426 - RNA, 19 nt, Homo sapiens
  misc_RNA (1)...(19): siRNA sense strand
agagaucagugcaaaggaa

SEQ ID NO: 1052427 - RNA, 19 nt, Homo sapiens
  misc_RNA (1)...(19): siRNA sense strand
gauggugagugguggauag

SEQ ID NO: 1052428 - RNA, 19 nt, Homo sapiens
  misc_RNA (1)...(19): siRNA sense strand
agaaucgguugugccauua

SEQ ID NO: 1052429 - RNA, 19 nt, Homo sapiens
  misc_RNA (1)...(19): siRNA sense strand
uguaaugccuguggacaaa

SEQ ID NO: 1052430 - RNA, 19 nt, Homo sapiens
  misc_RNA (1)...(19): siRNA sense strand
gugguaugaugaagugaaa

SEQ ID NO: 1052431 - RNA, 19 nt, Homo sapiens
  misc_RNA (1)...(19): siRNA sense strand
gaaaucacggugguuaugu

SEQ ID NO: 1052432 - RNA, 19 nt, Homo sapiens
  misc_RNA (1)...(19): siRNA sense strand
auucugaucuguccaguau

SEQ ID NO: 1052433 - RNA, 19 nt, Homo sapiens
  misc_RNA (1)...(19): siRNA sense strand
gcaaaggaacaaccugcaa

SEQ ID NO: 1052434 - RNA, 19 nt, Homo sapiens
  misc_RNA (1)...(19): siRNA sense strand
cauaugaacaugaaugcaa

SEQ ID NO: 1052435 - RNA, 19 nt, Homo sapiens
  misc_RNA (1)...(19): siRNA sense strand
gugguuauguugauguaau

SEQ ID NO: 1052436 - RNA, 19 nt, Homo sapiens
  misc_RNA (1)...(19): siRNA sense strand
gaaugcaacccauauuguc

SEQ ID NO: 1052437 - RNA, 19 nt, Homo sapiens
  misc_RNA (1)...(19): siRNA sense strand
uauccaacagccucuaaua

SEQ ID NO: 1052438 - RNA, 19 nt, Homo sapiens
  misc_RNA (1)...(19): siRNA sense strand
gaggaaaggcauucagagu

SEQ ID NO: 1052439 - RNA, 19 nt, Homo sapiens
  misc_RNA (1)...(19): siRNA sense strand
cacagucucuaaaguaaca

SEQ ID NO: 1052440 - RNA, 19 nt, Homo sapiens
  misc_RNA (1)...(19): siRNA sense strand
caucaaguccaauagaaau

SEQ ID NO: 1052441 - RNA, 19 nt, Homo sapiens
  misc_RNA (1)...(19): siRNA sense strand
agauaucacuagacaagga

SEQ ID NO: 1052442 - RNA, 19 nt, Homo sapiens
  misc_RNA (1)...(19): siRNA sense strand
cuacccauaugaacaugaa

SEQ ID NO: 1052443 - RNA, 19 nt, Homo sapiens
  misc_RNA (1)...(19): siRNA sense strand
gaacauggaccugcaagcu

SEQ ID NO: 1052444 - RNA, 19 nt, Homo sapiens
  misc_RNA (1)...(19): siRNA sense strand
caacagccucuaauaugga

SEQ ID NO: 1052445 - RNA, 19 nt, Homo sapiens
  misc_RNA (1)...(19): siRNA sense strand
caaaggaacaaccugcaau

SEQ ID NO: 1052446 - RNA, 19 nt, Homo sapiens
  misc_RNA (1)...(19): siRNA sense strand
aaagaaagaccuacauugc

SEQ ID NO: 1052447 - RNA, 19 nt, Homo sapiens
  misc_RNA (1)...(19): siRNA sense strand
gcaguguacauuaugaaau

SEQ ID NO: 1052448 - RNA, 19 nt, Homo sapiens
  misc_RNA (1)...(19): siRNA sense strand
cuucacagucucuaaagua

SEQ ID NO: 1052449 - RNA, 19 nt, Homo sapiens
  misc_RNA (1)...(19): siRNA sense strand
ggauguagagcuggaaaga

SEQ ID NO: 1052450 - RNA, 19 nt, Homo sapiens
  misc_RNA (1)...(19): siRNA sense strand
ucacggugguuauguugau

SEQ ID NO: 1052451 - RNA, 19 nt, Homo sapiens
  misc_RNA (1)...(19): siRNA sense strand
agacaaggaagaaagcauu

SEQ ID NO: 1052452 - RNA, 19 nt, Homo sapiens
  misc_RNA (1)...(19): siRNA sense strand
cccaaauuguuucuuguga

SEQ ID NO: 1052453 - RNA, 19 nt, Homo sapiens
  misc_RNA (1)...(19): siRNA sense strand
gguaugaugaagugaaaga

SEQ ID NO: 1052454 - RNA, 19 nt, Homo sapiens
  misc_RNA (1)...(19): siRNA sense strand
caucacagacaaugacaug

SEQ ID NO: 1052455 - RNA, 19 nt, Homo sapiens
  misc_RNA (1)...(19): siRNA sense strand
ggaaaagggccaucacaga

SEQ ID NO: 1052456 - RNA, 19 nt, Homo sapiens
  misc_RNA (1)...(19): siRNA sense strand
aaaucacggugguuauguu

SEQ ID NO: 1052457 - RNA, 19 nt, Homo sapiens
  misc_RNA (1)...(19): siRNA sense strand
guggauagccaaacaacga

SEQ ID NO: 1052458 - RNA, 19 nt, Homo sapiens
  misc_RNA (1)...(19): siRNA sense strand
auuaagagaucagugcaaa

SEQ ID NO: 1052459 - RNA, 19 nt, Homo sapiens
  misc_RNA (1)...(19): siRNA sense strand
gaacgacagcagucacaag

SEQ ID NO: 1052460 - RNA, 19 nt, Homo sapiens
  misc_RNA (1)...(19): siRNA sense strand
aaagggccaucacagacaa

SEQ ID NO: 1052461 - RNA, 19 nt, Homo sapiens
  misc_RNA (1)...(19): siRNA sense strand
gugggcaacuaguaacaga

SEQ ID NO: 1052462 - RNA, 19 nt, Homo sapiens
  misc_RNA (1)...(19): siRNA sense strand
aguguuugcuguuguguga

SEQ ID NO: 1052463 - RNA, 19 nt, Homo sapiens
  misc_RNA (1)...(19): siRNA sense strand
gaguauacuguccucguaa

SEQ ID NO: 1052464 - RNA, 19 nt, Homo sapiens
  misc_RNA (1)...(19): siRNA sense strand
ggauaguaaagcuaaaguu

SEQ ID NO: 1052465 - RNA, 19 nt, Homo sapiens
  misc_RNA (1)...(19): siRNA sense strand
cacagcaaaugucccaaau

SEQ ID NO: 1052466 - RNA, 19 nt, Homo sapiens
  misc_RNA (1)...(19): siRNA sense strand
gguauaauagacaaugaug

SEQ ID NO: 1052467 - RNA, 19 nt, Homo sapiens
  misc_RNA (1)...(19): siRNA sense strand
cauguacaaucgugguaug

SEQ ID NO: 1052468 - RNA, 19 nt, Homo sapiens
  misc_RNA (1)...(19): siRNA sense strand
ggcugugacuugugaaaca

SEQ ID NO: 1052469 - RNA, 19 nt, Homo sapiens
  misc_RNA (1)...(19): siRNA sense strand
uucacagucucuaaaguaa

SEQ ID NO: 1052470 - RNA, 19 nt, Homo sapiens
  misc_RNA (1)...(19): siRNA sense strand
ugucccaaauuguuucuug

SEQ ID NO: 1052471 - RNA, 19 nt, Homo sapiens
  misc_RNA (1)...(19): siRNA sense strand
gggcaacuaguaacagaau

SEQ ID NO: 1052472 - RNA, 19 nt, Homo sapiens
  misc_RNA (1)...(19): siRNA sense strand
cgaaaucacggugguuaug

SEQ ID NO: 1052473 - RNA, 19 nt, Homo sapiens
  misc_RNA (1)...(19): siRNA sense strand
ccacauuaugcucguguaa

SEQ ID NO: 1052474 - RNA, 19 nt, Homo sapiens
  misc_RNA (1)...(19): siRNA sense strand
caagcaaauccacauuaug

SEQ ID NO: 1052475 - RNA, 19 nt, Homo sapiens
  misc_RNA (1)...(19): siRNA sense strand
guugugccauuaauuugug

SEQ ID NO: 1052476 - RNA, 19 nt, Homo sapiens
  misc_RNA (1)...(19): siRNA sense strand
cuguagagcugcaauucau

SEQ ID NO: 1052477 - RNA, 19 nt, Homo sapiens
  misc_RNA (1)...(19): siRNA sense strand
cucagaaaguuuacagaau

SEQ ID NO: 1052478 - RNA, 19 nt, Homo sapiens
  misc_RNA (1)...(19): siRNA sense strand
ucucagaaaguuuacagaa

SEQ ID NO: 1052479 - RNA, 19 nt, Homo sapiens
  misc_RNA (1)...(19): siRNA sense strand
aaugacaugcagaguauuu

SEQ ID NO: 1052480 - RNA, 19 nt, Homo sapiens
  misc_RNA (1)...(19): siRNA sense strand
uccaacagccucuaauaug

SEQ ID NO: 1052481 - RNA, 19 nt, Homo sapiens
  misc_RNA (1)...(19): siRNA sense strand
ucucuaaaguaacaguuca

SEQ ID NO: 1052482 - RNA, 19 nt, Homo sapiens
  misc_RNA (1)...(19): siRNA sense strand
ggaggaggguggagaugaa

SEQ ID NO: 1052483 - RNA, 19 nt, Homo sapiens
  misc_RNA (1)...(19): siRNA sense strand
gaagaaggaaguuguggaa

SEQ ID NO: 1052484 - RNA, 19 nt, Homo sapiens
  misc_RNA (1)...(19): siRNA sense strand
agaaggaaguuguggaaga

SEQ ID NO: 1052485 - RNA, 19 nt, Homo sapiens
  misc_RNA (1)...(19): siRNA sense strand
gaaggaaguuguggaagag

SEQ ID NO: 1052486 - RNA, 19 nt, Homo sapiens
  misc_RNA (1)...(19): siRNA sense strand
ccaaggacuuaaaggagaa

SEQ ID NO: 1052487 - RNA, 19 nt, Homo sapiens
  misc_RNA (1)...(19): siRNA sense strand
gacaccagcuccgaaauca

SEQ ID NO: 1052488 - RNA, 19 nt, Homo sapiens
  misc_RNA (1)...(19): siRNA sense strand
gcgggcagcugaagaugau

SEQ ID NO: 1052489 - RNA, 19 nt, Homo sapiens
  misc_RNA (1)...(19): siRNA sense strand
ggaagaagaaggugauggu

SEQ ID NO: 1052490 - RNA, 19 nt, Homo sapiens
  misc_RNA (1)...(19): siRNA sense strand
uaaaggagaagaaggaagu

SEQ ID NO: 1052491 - RNA, 19 nt, Homo sapiens
  misc_RNA (1)...(19): siRNA sense strand
gcuccgaaaucaccaccaa

SEQ ID NO: 1052492 - RNA, 19 nt, Homo sapiens
  misc_RNA (1)...(19): siRNA sense strand
uaacgggaaugcuaaugag

SEQ ID NO: 1052493 - RNA, 19 nt, Homo sapiens
  misc_RNA (1)...(19): siRNA sense strand
ggaagaggaggaggaagaa

SEQ ID NO: 1052494 - RNA, 19 nt, Homo sapiens
  misc_RNA (1)...(19): siRNA sense strand
gaagagacgccccugcuaa

SEQ ID NO: 1052495 - RNA, 19 nt, Homo sapiens
  misc_RNA (1)...(19): siRNA sense strand
guagacaccagcuccgaaa

SEQ ID NO: 1052496 - RNA, 19 nt, Homo sapiens
  misc_RNA (1)...(19): siRNA sense strand
ggaagaagguggggaggaa

SEQ ID NO: 1052497 - RNA, 19 nt, Homo sapiens
  misc_RNA (1)...(19): siRNA sense strand
ccaccaaggacuuaaagga

SEQ ID NO: 1052498 - RNA, 19 nt, Homo sapiens
  misc_RNA (1)...(19): siRNA sense strand
ggagaagaaggaaguugug

SEQ ID NO: 1052499 - RNA, 19 nt, Homo sapiens
  misc_RNA (1)...(19): siRNA sense strand
ggaggaagaagaaggugau

SEQ ID NO: 1052500 - RNA, 19 nt, Homo sapiens
  misc_RNA (1)...(19): siRNA sense strand
cgggaaugcuaaugaggaa

SEQ ID NO: 1052501 - RNA, 19 nt, Homo sapiens
  misc_RNA (1)...(19): siRNA sense strand
ggaggaagaggaggaggaa

SEQ ID NO: 1052502 - RNA, 19 nt, Homo sapiens
  misc_RNA (1)...(19): siRNA sense strand
ggguggagaugaagaugag

SEQ ID NO: 1052503 - RNA, 19 nt, Homo sapiens
  misc_RNA (1)...(19): siRNA sense strand
cuaacgggaaugcuaauga

SEQ ID NO: 1052504 - RNA, 19 nt, Homo sapiens
  misc_RNA (1)...(19): siRNA sense strand
gcaagcgggcagcugaaga

SEQ ID NO: 1052505 - RNA, 19 nt, Homo sapiens
  misc_RNA (1)...(19): siRNA sense strand
ggacuuaaaggagaagaag

SEQ ID NO: 1052506 - RNA, 19 nt, Homo sapiens
  misc_RNA (1)...(19): siRNA sense strand
ggaggaggaagaagaaggu

SEQ ID NO: 1052507 - RNA, 19 nt, Homo sapiens
  misc_RNA (1)...(19): siRNA sense strand
caagcgggcagcugaagau

SEQ ID NO: 1052508 - RNA, 19 nt, Homo sapiens
  misc_RNA (1)...(19): siRNA sense strand
cugaagaugaugaggauga

SEQ ID NO: 1052509 - RNA, 19 nt, Homo sapiens
  misc_RNA (1)...(19): siRNA sense strand
gggcagcugaagaugauga

SEQ ID NO: 1052510 - RNA, 19 nt, Homo sapiens
  misc_RNA (1)...(19): siRNA sense strand
ggaaugcuaaugaggaaaa

SEQ ID NO: 1052511 - RNA, 19 nt, Homo sapiens
  misc_RNA (1)...(19): siRNA sense strand
aaucaccaccaaggacuua

SEQ ID NO: 1052512 - RNA, 19 nt, Homo sapiens
  misc_RNA (1)...(19): siRNA sense strand
aagaggaggaggaagaaga

SEQ ID NO: 1052513 - RNA, 19 nt, Homo sapiens
  misc_RNA (1)...(19): siRNA sense strand
ggaggguggagaugaagau

SEQ ID NO: 1052514 - RNA, 19 nt, Homo sapiens
  misc_RNA (1)...(19): siRNA sense strand
agaggaggaggaagaagaa

SEQ ID NO: 1052515 - RNA, 19 nt, Homo sapiens
  misc_RNA (1)...(19): siRNA sense strand
aggaagaggaggaggaaga

SEQ ID NO: 1052516 - RNA, 19 nt, Homo sapiens
  misc_RNA (1)...(19): siRNA sense strand
ggaagagacgccccugcua

SEQ ID NO: 1052517 - RNA, 19 nt, Homo sapiens
  misc_RNA (1)...(19): siRNA sense strand
ucaccaccaaggacuuaaa

SEQ ID NO: 1052518 - RNA, 19 nt, Homo sapiens
  misc_RNA (1)...(19): siRNA sense strand
gcacaaaccucacaaguca

SEQ ID NO: 1052519 - RNA, 19 nt, Homo sapiens
  misc_RNA (1)...(19): siRNA sense strand
gaacagacaucuuauugga

SEQ ID NO: 1052520 - RNA, 19 nt, Homo sapiens
  misc_RNA (1)...(19): siRNA sense strand
ggaagauguuuguguauuu

SEQ ID NO: 1052521 - RNA, 19 nt, Homo sapiens
  misc_RNA (1)...(19): siRNA sense strand
gagcgaacaucaaagaauu

SEQ ID NO: 1052522 - RNA, 19 nt, Homo sapiens
  misc_RNA (1)...(19): siRNA sense strand
acagacaucuuauuggaua

SEQ ID NO: 1052523 - RNA, 19 nt, Homo sapiens
  misc_RNA (1)...(19): siRNA sense strand
gaaaccaagacucaacuua

SEQ ID NO: 1052524 - RNA, 19 nt, Homo sapiens
  misc_RNA (1)...(19): siRNA sense strand
gaagauguuuguguauuug

SEQ ID NO: 1052525 - RNA, 19 nt, Homo sapiens
  misc_RNA (1)...(19): siRNA sense strand
gagagaagcccuacgaaug

SEQ ID NO: 1052526 - RNA, 19 nt, Homo sapiens
  misc_RNA (1)...(19): siRNA sense strand
agaagaaccuguacagaga

SEQ ID NO: 1052527 - RNA, 19 nt, Homo sapiens
  misc_RNA (1)...(19): siRNA sense strand
gaucggagaccuugugaaa

SEQ ID NO: 1052528 - RNA, 19 nt, Homo sapiens
  misc_RNA (1)...(19): siRNA sense strand
ccagaacagucacuuuauu

SEQ ID NO: 1052529 - RNA, 19 nt, Homo sapiens
  misc_RNA (1)...(19): siRNA sense strand
ggagaaacccuacgagugu

SEQ ID NO: 1052530 - RNA, 19 nt, Homo sapiens
  misc_RNA (1)...(19): siRNA sense strand
ggcauccgauucagucuua

SEQ ID NO: 1052531 - RNA, 19 nt, Homo sapiens
  misc_RNA (1)...(19): siRNA sense strand
gaaccaauguacugaugug

SEQ ID NO: 1052532 - RNA, 19 nt, Homo sapiens
  misc_RNA (1)...(19): siRNA sense strand
ucacuagucuuuccucaug

SEQ ID NO: 1052533 - RNA, 19 nt, Homo sapiens
  misc_RNA (1)...(19): siRNA sense strand
gaaaugccauccgccagaa

SEQ ID NO: 1052534 - RNA, 19 nt, Homo sapiens
  misc_RNA (1)...(19): siRNA sense strand
gagaagcccuguggauaga

SEQ ID NO: 1052535 - RNA, 19 nt, Homo sapiens
  misc_RNA (1)...(19): siRNA sense strand
gggaagauguuuguguauu

SEQ ID NO: 1052536 - RNA, 19 nt, Homo sapiens
  misc_RNA (1)...(19): siRNA sense strand
gcucaucccuugucacaca

SEQ ID NO: 1052537 - RNA, 19 nt, Homo sapiens
  misc_RNA (1)...(19): siRNA sense strand
gaacaucaaagaauucaca

SEQ ID NO: 1052538 - RNA, 19 nt, Homo sapiens
  misc_RNA (1)...(19): siRNA sense strand
uaccagaacagacaucuua

SEQ ID NO: 1052539 - RNA, 19 nt, Homo sapiens
  misc_RNA (1)...(19): siRNA sense strand
ggaaagccuucaacaggau

SEQ ID NO: 1052540 - RNA, 19 nt, Homo sapiens
  misc_RNA (1)...(19): siRNA sense strand
ucacaagucacuagucuuu

SEQ ID NO: 1052541 - RNA, 19 nt, Homo sapiens
  misc_RNA (1)...(19): siRNA sense strand
gcucuuaccugaucuugca

SEQ ID NO: 1052542 - RNA, 19 nt, Homo sapiens
  misc_RNA (1)...(19): siRNA sense strand
gaacagucacuuuauucaa

SEQ ID NO: 1052543 - RNA, 19 nt, Homo sapiens
  misc_RNA (1)...(19): siRNA sense strand
gaaaagcccuauaaaugug

SEQ ID NO: 1052544 - RNA, 19 nt, Homo sapiens
  misc_RNA (1)...(19): siRNA sense strand
ccagagcucuuaccugauc

SEQ ID NO: 1052545 - RNA, 19 nt, Homo sapiens
  misc_RNA (1)...(19): siRNA sense strand
ggaugacuguacuaagaaa

SEQ ID NO: 1052546 - RNA, 19 nt, Homo sapiens
  misc_RNA (1)...(19): siRNA sense strand
gagaggugaugcuggagaa

SEQ ID NO: 1052547 - RNA, 19 nt, Homo sapiens
  misc_RNA (1)...(19): siRNA sense strand
gaacguggucucccuggaa

SEQ ID NO: 1052548 - RNA, 19 nt, Homo sapiens
  misc_RNA (1)...(19): siRNA sense strand
ccagaggucuucccuugug

SEQ ID NO: 1052549 - RNA, 19 nt, Homo sapiens
  misc_RNA (1)...(19): siRNA sense strand
gaaaguaaugaauguggaa

SEQ ID NO: 1052550 - RNA, 19 nt, Homo sapiens
  misc_RNA (1)...(19): siRNA sense strand
cagaacagacaucuuauug

SEQ ID NO: 1052551 - RNA, 19 nt, Homo sapiens
  misc_RNA (1)...(19): siRNA sense strand
ggcagcgaguuagauauua

SEQ ID NO: 1052552 - RNA, 19 nt, Homo sapiens
  misc_RNA (1)...(19): siRNA sense strand
gcagagaaacccuuugagu

SEQ ID NO: 1052553 - RNA, 19 nt, Homo sapiens
  misc_RNA (1)...(19): siRNA sense strand
gggaaaagcccuauaaaug

SEQ ID NO: 1052554 - RNA, 19 nt, Homo sapiens
  misc_RNA (1)...(19): siRNA sense strand
cuauaaaugugaagacugu

SEQ ID NO: 1052555 - RNA, 19 nt, Homo sapiens
  misc_RNA (1)...(19): siRNA sense strand
agacucaacuuacaagaag

SEQ ID NO: 1052556 - RNA, 19 nt, Homo sapiens
  misc_RNA (1)...(19): siRNA sense strand
ggaaaagcccuauaaaugu

SEQ ID NO: 1052557 - RNA, 19 nt, Homo sapiens
  misc_RNA (1)...(19): siRNA sense strand
gaacucauacuggagagaa

SEQ ID NO: 1052558 - RNA, 19 nt, Homo sapiens
  misc_RNA (1)...(19): siRNA sense strand
ggagagaagcccuacgaau

SEQ ID NO: 1052559 - RNA, 19 nt, Homo sapiens
  misc_RNA (1)...(19): siRNA sense strand
ucggagaccuugugaaagu

SEQ ID NO: 1052560 - RNA, 19 nt, Homo sapiens
  misc_RNA (1)...(19): siRNA sense strand
acaagaagguggcuuugca

SEQ ID NO: 1052561 - RNA, 19 nt, Homo sapiens
  misc_RNA (1)...(19): siRNA sense strand
gaacucacacuggagagaa

SEQ ID NO: 1052562 - RNA, 19 nt, Homo sapiens
  misc_RNA (1)...(19): siRNA sense strand
guggaaaggccuucaguga

SEQ ID NO: 1052563 - RNA, 19 nt, Homo sapiens
  misc_RNA (1)...(19): siRNA sense strand
cgccagaacagucacuuua

SEQ ID NO: 1052564 - RNA, 19 nt, Homo sapiens
  misc_RNA (1)...(19): siRNA sense strand
gcagcgaguuagauauuac

SEQ ID NO: 1052565 - RNA, 19 nt, Homo sapiens
  misc_RNA (1)...(19): siRNA sense strand
uuggaugacuguacuaaga

SEQ ID NO: 1052566 - RNA, 19 nt, Homo sapiens
  misc_RNA (1)...(19): siRNA sense strand
gagcccagcccuuguuuua

SEQ ID NO: 1052567 - RNA, 19 nt, Homo sapiens
  misc_RNA (1)...(19): siRNA sense strand
gagcucaucccuugucaca

SEQ ID NO: 1052568 - RNA, 19 nt, Homo sapiens
  misc_RNA (1)...(19): siRNA sense strand
cuacaggugucaggaaugu

SEQ ID NO: 1052569 - RNA, 19 nt, Homo sapiens
  misc_RNA (1)...(19): siRNA sense strand
guacugauguggggauuaa

SEQ ID NO: 1052570 - RNA, 19 nt, Homo sapiens
  misc_RNA (1)...(19): siRNA sense strand
ggagaccuugugaaaguaa

SEQ ID NO: 1052571 - RNA, 19 nt, Homo sapiens
  misc_RNA (1)...(19): siRNA sense strand
aagagaagcccuguggaua

SEQ ID NO: 1052572 - RNA, 19 nt, Homo sapiens
  misc_RNA (1)...(19): siRNA sense strand
gaacucacacgggcgagaa

SEQ ID NO: 1052573 - RNA, 19 nt, Homo sapiens
  misc_RNA (1)...(19): siRNA sense strand
ggacacacaccggagagaa

SEQ ID NO: 1052574 - RNA, 19 nt, Homo sapiens
  misc_RNA (1)...(19): siRNA sense strand
caagccuccuguucagauu

SEQ ID NO: 1052575 - RNA, 19 nt, Homo sapiens
  misc_RNA (1)...(19): siRNA sense strand
gaagaaccaauguacugau

SEQ ID NO: 1052576 - RNA, 19 nt, Homo sapiens
  misc_RNA (1)...(19): siRNA sense strand
ccacuuggagcaaagagaa

SEQ ID NO: 1052577 - RNA, 19 nt, Homo sapiens
  misc_RNA (1)...(19): siRNA sense strand
ccagaacagacaucuuauu

SEQ ID NO: 1052578 - RNA, 19 nt, Homo sapiens
  misc_RNA (1)...(19): siRNA sense strand
gauuaaagaggguccacuu

SEQ ID NO: 1052579 - RNA, 19 nt, Homo sapiens
  misc_RNA (1)...(19): siRNA sense strand
gcagaucggagaccuugug

SEQ ID NO: 1052580 - RNA, 19 nt, Homo sapiens
  misc_RNA (1)...(19): siRNA sense strand
aaccaagacucaacuuaca

SEQ ID NO: 1052581 - RNA, 19 nt, Homo sapiens
  misc_RNA (1)...(19): siRNA sense strand
uaaagggaaccacuugugu

SEQ ID NO: 1052582 - RNA, 19 nt, Homo sapiens
  misc_RNA (1)...(19): siRNA sense strand
gagaagcccuacgaaugca

SEQ ID NO: 1052583 - RNA, 19 nt, Homo sapiens
  misc_RNA (1)...(19): siRNA sense strand
aagaaccaauguacugaug

SEQ ID NO: 1052584 - RNA, 19 nt, Homo sapiens
  misc_RNA (1)...(19): siRNA sense strand
gcuggugccugcucagaag

SEQ ID NO: 1052585 - RNA, 19 nt, Homo sapiens
  misc_RNA (1)...(19): siRNA sense strand
cagaacagucacuuuauuc

SEQ ID NO: 1052586 - RNA, 19 nt, Homo sapiens
  misc_RNA (1)...(19): siRNA sense strand
ccagccagugguauaaaua

SEQ ID NO: 1052587 - RNA, 19 nt, Homo sapiens
  misc_RNA (1)...(19): siRNA sense strand
ccagugguauaaauaugau

SEQ ID NO: 1052588 - RNA, 19 nt, Homo sapiens
  misc_RNA (1)...(19): siRNA sense strand
ccagaaaaccuauaaaauc

SEQ ID NO: 1052589 - RNA, 19 nt, Homo sapiens
  misc_RNA (1)...(19): siRNA sense strand
gccagugguauaaauauga

SEQ ID NO: 1052590 - RNA, 19 nt, Homo sapiens
  misc_RNA (1)...(19): siRNA sense strand
aaucaacacggcagagaaa

SEQ ID NO: 1052591 - RNA, 19 nt, Homo sapiens
  misc_RNA (1)...(19): siRNA sense strand
ucacagggaagcucuaaag

SEQ ID NO: 1052592 - RNA, 19 nt, Homo sapiens
  misc_RNA (1)...(19): siRNA sense strand
ccucacaagucacuagucu

SEQ ID NO: 1052593 - RNA, 19 nt, Homo sapiens
  misc_RNA (1)...(19): siRNA sense strand
aguaaugaauguggaaaug

SEQ ID NO: 1052594 - RNA, 19 nt, Homo sapiens
  misc_RNA (1)...(19): siRNA sense strand
aaagagaagcccuguggau

SEQ ID NO: 1052595 - RNA, 19 nt, Homo sapiens
  misc_RNA (1)...(19): siRNA sense strand
ugaagaaccaauguacuga

SEQ ID NO: 1052596 - RNA, 19 nt, Homo sapiens
  misc_RNA (1)...(19): siRNA sense strand
cuacgaaugcagugaaugu

SEQ ID NO: 1052597 - RNA, 19 nt, Homo sapiens
  misc_RNA (1)...(19): siRNA sense strand
cggagaccuugugaaagua

SEQ ID NO: 1052598 - RNA, 19 nt, Homo sapiens
  misc_RNA (1)...(19): siRNA sense strand
cagauuggaugacuguacu

SEQ ID NO: 1052599 - RNA, 19 nt, Homo sapiens
  misc_RNA (1)...(19): siRNA sense strand
gauuggaugacuguacuaa

SEQ ID NO: 1052600 - RNA, 19 nt, Homo sapiens
  misc_RNA (1)...(19): siRNA sense strand
ugacucagcaucagaggau

SEQ ID NO: 1052601 - RNA, 19 nt, Homo sapiens
  misc_RNA (1)...(19): siRNA sense strand
ggagugugggcgagccuuu

SEQ ID NO: 1052602 - RNA, 19 nt, Homo sapiens
  misc_RNA (1)...(19): siRNA sense strand
cggcagagaaacccuuuga

SEQ ID NO: 1052603 - RNA, 19 nt, Homo sapiens
  misc_RNA (1)...(19): siRNA sense strand
gccagaacagucacuuuau

SEQ ID NO: 1052604 - RNA, 19 nt, Homo sapiens
  misc_RNA (1)...(19): siRNA sense strand
uaaagcuuaucagagaaga

SEQ ID NO: 1052605 - RNA, 19 nt, Homo sapiens
  misc_RNA (1)...(19): siRNA sense strand
aaaccaagacucaacuuac

SEQ ID NO: 1052606 - RNA, 19 nt, Homo sapiens
  misc_RNA (1)...(19): siRNA sense strand
cagaggucuucccuuguga

SEQ ID NO: 1052607 - RNA, 19 nt, Homo sapiens
  misc_RNA (1)...(19): siRNA sense strand
gagugugggcgagccuuua

SEQ ID NO: 1052608 - RNA, 19 nt, Homo sapiens
  misc_RNA (1)...(19): siRNA sense strand
agagaagcccuguggauag

SEQ ID NO: 1052609 - RNA, 19 nt, Homo sapiens
  misc_RNA (1)...(19): siRNA sense strand
gagaaccccuaugaaugua

SEQ ID NO: 1052610 - RNA, 19 nt, Homo sapiens
  misc_RNA (1)...(19): siRNA sense strand
uggcagcgaguuagauauu

SEQ ID NO: 1052611 - RNA, 19 nt, Homo sapiens
  misc_RNA (1)...(19): siRNA sense strand
gcucuaaagggaaccacuu

SEQ ID NO: 1052612 - RNA, 19 nt, Homo sapiens
  misc_RNA (1)...(19): siRNA sense strand
uaagaaaccaagacucaac

SEQ ID NO: 1052613 - RNA, 19 nt, Homo sapiens
  misc_RNA (1)...(19): siRNA sense strand
acuaagaaaccaagacuca

SEQ ID NO: 1052614 - RNA, 19 nt, Homo sapiens
  misc_RNA (1)...(19): siRNA sense strand
guacuaagaaaccaagacu

SEQ ID NO: 1052615 - RNA, 19 nt, Homo sapiens
  misc_RNA (1)...(19): siRNA sense strand
gaaugcagugaauguggaa

SEQ ID NO: 1052616 - RNA, 19 nt, Homo sapiens
  misc_RNA (1)...(19): siRNA sense strand
guauggcccugacuaucca

SEQ ID NO: 1052617 - RNA, 19 nt, Homo sapiens
  misc_RNA (1)...(19): siRNA sense strand
ugugaagacugugggaaau

SEQ ID NO: 1052618 - RNA, 19 nt, Homo sapiens
  misc_RNA (1)...(19): siRNA sense strand
gaagaaagacuaccuauua

SEQ ID NO: 1052619 - RNA, 19 nt, Homo sapiens
  misc_RNA (1)...(19): siRNA sense strand
gauaucacauuggcuaaua

SEQ ID NO: 1052620 - RNA, 19 nt, Homo sapiens
  misc_RNA (1)...(19): siRNA sense strand
gaagaaaggacccauagga

SEQ ID NO: 1052621 - RNA, 19 nt, Homo sapiens
  misc_RNA (1)...(19): siRNA sense strand
ugacacagauuaccuagau

SEQ ID NO: 1052622 - RNA, 19 nt, Homo sapiens
  misc_RNA (1)...(19): siRNA sense strand
aaagggaacugcagguuug

SEQ ID NO: 1052623 - RNA, 19 nt, Homo sapiens
  misc_RNA (1)...(19): siRNA sense strand
uuaccuagauuccauauca

SEQ ID NO: 1052624 - RNA, 19 nt, Homo sapiens
  misc_RNA (1)...(19): siRNA sense strand
gaaaggagagaaaggugaa

SEQ ID NO: 1052625 - RNA, 19 nt, Homo sapiens
  misc_RNA (1)...(19): siRNA sense strand
ggagaaguagguccaauug

SEQ ID NO: 1052626 - RNA, 19 nt, Homo sapiens
  misc_RNA (1)...(19): siRNA sense strand
agaagaugaugaauuguga

SEQ ID NO: 1052627 - RNA, 19 nt, Homo sapiens
  misc_RNA (1)...(19): siRNA sense strand
ggaaguucaucugugcuuu

SEQ ID NO: 1052628 - RNA, 19 nt, Homo sapiens
  misc_RNA (1)...(19): siRNA sense strand
agaaguagguccaauuggu

SEQ ID NO: 1052629 - RNA, 19 nt, Homo sapiens
  misc_RNA (1)...(19): siRNA sense strand
gggcaauaccggauaaaga

SEQ ID NO: 1052630 - RNA, 19 nt, Homo sapiens
  misc_RNA (1)...(19): siRNA sense strand
uuaacaagguccucuucaa

SEQ ID NO: 1052631 - RNA, 19 nt, Homo sapiens
  misc_RNA (1)...(19): siRNA sense strand
cagauuaccuagauuccau

SEQ ID NO: 1052632 - RNA, 19 nt, Homo sapiens
  misc_RNA (1)...(19): siRNA sense strand
ggaguuugcagauguggaa

SEQ ID NO: 1052633 - RNA, 19 nt, Homo sapiens
  misc_RNA (1)...(19): siRNA sense strand
cuaauaagcaucuggcaau

SEQ ID NO: 1052634 - RNA, 19 nt, Homo sapiens
  misc_RNA (1)...(19): siRNA sense strand
gggagagaaaggagaagua

SEQ ID NO: 1052635 - RNA, 19 nt, Homo sapiens
  misc_RNA (1)...(19): siRNA sense strand
ccagggaucuauuacuuuu

SEQ ID NO: 1052636 - RNA, 19 nt, Homo sapiens
  misc_RNA (1)...(19): siRNA sense strand
caaucggacugguacacaa

SEQ ID NO: 1052637 - RNA, 19 nt, Homo sapiens
  misc_RNA (1)...(19): siRNA sense strand
ucuccggguuucucuuaua

SEQ ID NO: 1052638 - RNA, 19 nt, Homo sapiens
  misc_RNA (1)...(19): siRNA sense strand
agguauaucugcagcauuc

SEQ ID NO: 1052639 - RNA, 19 nt, Homo sapiens
  misc_RNA (1)...(19): siRNA sense strand
uagauuccauaucagaaga

SEQ ID NO: 1052640 - RNA, 19 nt, Homo sapiens
  misc_RNA (1)...(19): siRNA sense strand
gaaguucaucugugcuuuc

SEQ ID NO: 1052641 - RNA, 19 nt, Homo sapiens
  misc_RNA (1)...(19): siRNA sense strand
gggaagaaaggacccauag

SEQ ID NO: 1052642 - RNA, 19 nt, Homo sapiens
  misc_RNA (1)...(19): siRNA sense strand
ucuuauacguugacacaga

SEQ ID NO: 1052643 - RNA, 19 nt, Homo sapiens
  misc_RNA (1)...(19): siRNA sense strand
gaagucuggcuggagauuu

SEQ ID NO: 1052644 - RNA, 19 nt, Homo sapiens
  misc_RNA (1)...(19): siRNA sense strand
ggagagaaaggagaaguag

SEQ ID NO: 1052645 - RNA, 19 nt, Homo sapiens
  misc_RNA (1)...(19): siRNA sense strand
gguccacagucaucuaucu

SEQ ID NO: 1052646 - RNA, 19 nt, Homo sapiens
  misc_RNA (1)...(19): siRNA sense strand
cagcuacccagaagaaaga

SEQ ID NO: 1052647 - RNA, 19 nt, Homo sapiens
  misc_RNA (1)...(19): siRNA sense strand
acaagguccucuucaacga

SEQ ID NO: 1052648 - RNA, 19 nt, Homo sapiens
  misc_RNA (1)...(19): siRNA sense strand
ccagaagaaagacuaccua

SEQ ID NO: 1052649 - RNA, 19 nt, Homo sapiens
  misc_RNA (1)...(19): siRNA sense strand
cagaagaugaugaauugug

SEQ ID NO: 1052650 - RNA, 19 nt, Homo sapiens
  misc_RNA (1)...(19): siRNA sense strand
cagcuuauucuccggguuu

SEQ ID NO: 1052651 - RNA, 19 nt, Homo sapiens
  misc_RNA (1)...(19): siRNA sense strand
caacacaggaaaccaugau

SEQ ID NO: 1052652 - RNA, 19 nt, Homo sapiens
  misc_RNA (1)...(19): siRNA sense strand
cacauuggcuaauaagcau

SEQ ID NO: 1052653 - RNA, 19 nt, Homo sapiens
  misc_RNA (1)...(19): siRNA sense strand
aaagggagacagaggagaa

SEQ ID NO: 1052654 - RNA, 19 nt, Homo sapiens
  misc_RNA (1)...(19): siRNA sense strand
gacacagauuaccuagauu

SEQ ID NO: 1052655 - RNA, 19 nt, Homo sapiens
  misc_RNA (1)...(19): siRNA sense strand
agaagaaagacuaccuauu

SEQ ID NO: 1052656 - RNA, 19 nt, Homo sapiens
  misc_RNA (1)...(19): siRNA sense strand
ucacauuggcuaauaagca

SEQ ID NO: 1052657 - RNA, 19 nt, Homo sapiens
  misc_RNA (1)...(19): siRNA sense strand
ggagagacugggaagaaag

SEQ ID NO: 1052658 - RNA, 19 nt, Homo sapiens
  misc_RNA (1)...(19): siRNA sense strand
aaugggcaauaccggauaa

SEQ ID NO: 1052659 - RNA, 19 nt, Homo sapiens
  misc_RNA (1)...(19): siRNA sense strand
uaauaagcaucuggcaauc

SEQ ID NO: 1052660 - RNA, 19 nt, Homo sapiens
  misc_RNA (1)...(19): siRNA sense strand
uaacaagguccucuucaac

SEQ ID NO: 1052661 - RNA, 19 nt, Homo sapiens
  misc_RNA (1)...(19): siRNA sense strand
acaaccagcuacccagaag

SEQ ID NO: 1052662 - RNA, 19 nt, Homo sapiens
  misc_RNA (1)...(19): siRNA sense strand
acacagauuaccuagauuc

SEQ ID NO: 1052663 - RNA, 19 nt, Homo sapiens
  misc_RNA (1)...(19): siRNA sense strand
agaccagaauggccucuuc

SEQ ID NO: 1052664 - RNA, 19 nt, Homo sapiens
  misc_RNA (1)...(19): siRNA sense strand
cagaagaaagacuaccuau

SEQ ID NO: 1052665 - RNA, 19 nt, Homo sapiens
  misc_RNA (1)...(19): siRNA sense strand
gggaacugcagguuugaga

SEQ ID NO: 1052666 - RNA, 19 nt, Homo sapiens
  misc_RNA (1)...(19): siRNA sense strand
caaugggcaauaccggaua

SEQ ID NO: 1052667 - RNA, 19 nt, Homo sapiens
  misc_RNA (1)...(19): siRNA sense strand
gccuggaguuugcagaugu

SEQ ID NO: 1052668 - RNA, 19 nt, Homo sapiens
  misc_RNA (1)...(19): siRNA sense strand
aggagagacugggaagaaa

SEQ ID NO: 1052669 - RNA, 19 nt, Homo sapiens
  misc_RNA (1)...(19): siRNA sense strand
ccacagggaaguucaucug

SEQ ID NO: 1052670 - RNA, 19 nt, Homo sapiens
  misc_RNA (1)...(19): siRNA sense strand
ggcaauaccggauaaagac

SEQ ID NO: 1052671 - RNA, 19 nt, Homo sapiens
  misc_RNA (1)...(19): siRNA sense strand
agagaaaggagaaguaggu

SEQ ID NO: 1052672 - RNA, 19 nt, Homo sapiens
  misc_RNA (1)...(19): siRNA sense strand
ccagguauaucugcagcau

SEQ ID NO: 1052673 - RNA, 19 nt, Homo sapiens
  misc_RNA (1)...(19): siRNA sense strand
gaccuucgacgccaacaca

SEQ ID NO: 1052674 - RNA, 19 nt, Homo sapiens
  misc_RNA (1)...(19): siRNA sense strand
aaggagagacugggaagaa

SEQ ID NO: 1052675 - RNA, 19 nt, Homo sapiens
  misc_RNA (1)...(19): siRNA sense strand
gcaaucggacugguacaca

SEQ ID NO: 1052676 - RNA, 19 nt, Homo sapiens
  misc_RNA (1)...(19): siRNA sense strand
ggagacagaggagaacaag

SEQ ID NO: 1052677 - RNA, 19 nt, Homo sapiens
  misc_RNA (1)...(19): siRNA sense strand
gaccagagggagagaaagg

SEQ ID NO: 1052678 - RNA, 19 nt, Homo sapiens
  misc_RNA (1)...(19): siRNA sense strand
gauuccauaucagaagaug

SEQ ID NO: 1052679 - RNA, 19 nt, Homo sapiens
  misc_RNA (1)...(19): siRNA sense strand
ugcucuauguuacaaguuu

SEQ ID NO: 1052680 - RNA, 19 nt, Homo sapiens
  misc_RNA (1)...(19): siRNA sense strand
gguacacaaugggcaauac

SEQ ID NO: 1052681 - RNA, 19 nt, Homo sapiens
  misc_RNA (1)...(19): siRNA sense strand
gggaaguucaucugugcuu

SEQ ID NO: 1052682 - RNA, 19 nt, Homo sapiens
  misc_RNA (1)...(19): siRNA sense strand
ggaagaaaggacccauagg

SEQ ID NO: 1052683 - RNA, 19 nt, Homo sapiens
  misc_RNA (1)...(19): siRNA sense strand
gcagccagaagaugaaguc

SEQ ID NO: 1052684 - RNA, 19 nt, Homo sapiens
  misc_RNA (1)...(19): siRNA sense strand
gaaaagggaacugcagguu

SEQ ID NO: 1052685 - RNA, 19 nt, Homo sapiens
  misc_RNA (1)...(19): siRNA sense strand
cuacccagaagaaagacua

SEQ ID NO: 1052686 - RNA, 19 nt, Homo sapiens
  misc_RNA (1)...(19): siRNA sense strand
cuuauacguugacacagau

SEQ ID NO: 1052687 - RNA, 19 nt, Homo sapiens
  misc_RNA (1)...(19): siRNA sense strand
acacaggaaaccaugaugu

SEQ ID NO: 1052688 - RNA, 19 nt, Homo sapiens
  misc_RNA (1)...(19): siRNA sense strand
gcaggaaaggagagaaagg

SEQ ID NO: 1052689 - RNA, 19 nt, Homo sapiens
  misc_RNA (1)...(19): siRNA sense strand
gggagacagaggagaacaa

SEQ ID NO: 1052690 - RNA, 19 nt, Homo sapiens
  misc_RNA (1)...(19): siRNA sense strand
uuacaaguuuugccauuug

SEQ ID NO: 1052691 - RNA, 19 nt, Homo sapiens
  misc_RNA (1)...(19): siRNA sense strand
uauacguugacacagauua

SEQ ID NO: 1052692 - RNA, 19 nt, Homo sapiens
  misc_RNA (1)...(19): siRNA sense strand
cggcaggaaaggagagaaa

SEQ ID NO: 1052693 - RNA, 19 nt, Homo sapiens
  misc_RNA (1)...(19): siRNA sense strand
ucaacgagggagagcacua

SEQ ID NO: 1052694 - RNA, 19 nt, Homo sapiens
  misc_RNA (1)...(19): siRNA sense strand
caaauccgccuuuucuguu

SEQ ID NO: 1052695 - RNA, 19 nt, Homo sapiens
  misc_RNA (1)...(19): siRNA sense strand
gguagagacggcaggaaag

SEQ ID NO: 1052696 - RNA, 19 nt, Homo sapiens
  misc_RNA (1)...(19): siRNA sense strand
gagagacugggaagaaagg

SEQ ID NO: 1052697 - RNA, 19 nt, Homo sapiens
  misc_RNA (1)...(19): siRNA sense strand
gagaaguagguccaauugg

SEQ ID NO: 1052698 - RNA, 19 nt, Homo sapiens
  misc_RNA (1)...(19): siRNA sense strand
ucucuuauacguugacaca

SEQ ID NO: 1052699 - RNA, 19 nt, Homo sapiens
  misc_RNA (1)...(19): siRNA sense strand
gggcagacagcuuauucuc

SEQ ID NO: 1052700 - RNA, 19 nt, Homo sapiens
  misc_RNA (1)...(19): siRNA sense strand
gcucaaauccgccuuuucu

SEQ ID NO: 1052701 - RNA, 19 nt, Homo sapiens
  misc_RNA (1)...(19): siRNA sense strand
cugcagguuugagagguaa

SEQ ID NO: 1052702 - RNA, 19 nt, Homo sapiens
  misc_RNA (1)...(19): siRNA sense strand
guuacaaguuuugccauuu

SEQ ID NO: 1052703 - RNA, 19 nt, Homo sapiens
  misc_RNA (1)...(19): siRNA sense strand
ugaagaagcugcauauaaa

SEQ ID NO: 1052704 - RNA, 19 nt, Homo sapiens
  misc_RNA (1)...(19): siRNA sense strand
gaauguaacugcccugaaa

SEQ ID NO: 1052705 - RNA, 19 nt, Homo sapiens
  misc_RNA (1)...(19): siRNA sense strand
cgaagucacucuuaauuaa

SEQ ID NO: 1052706 - RNA, 19 nt, Homo sapiens
  misc_RNA (1)...(19): siRNA sense strand
gugaugagcugaaauugaa

SEQ ID NO: 1052707 - RNA, 19 nt, Homo sapiens
  misc_RNA (1)...(19): siRNA sense strand
auaaagagcuucugcaaga

SEQ ID NO: 1052708 - RNA, 19 nt, Homo sapiens
  misc_RNA (1)...(19): siRNA sense strand
gaucacaaccuucuagaaa

SEQ ID NO: 1052709 - RNA, 19 nt, Homo sapiens
  misc_RNA (1)...(19): siRNA sense strand
ucaaguaucuuuaccuuag

SEQ ID NO: 1052710 - RNA, 19 nt, Homo sapiens
  misc_RNA (1)...(19): siRNA sense strand
ggauauguaugaaugucua

SEQ ID NO: 1052711 - RNA, 19 nt, Homo sapiens
  misc_RNA (1)...(19): siRNA sense strand
caagugccauguacuguga

SEQ ID NO: 1052712 - RNA, 19 nt, Homo sapiens
  misc_RNA (1)...(19): siRNA sense strand
ccaaaucucuggaggaucu

SEQ ID NO: 1052713 - RNA, 19 nt, Homo sapiens
  misc_RNA (1)...(19): siRNA sense strand
gaucugcagcuuacucaua

SEQ ID NO: 1052714 - RNA, 19 nt, Homo sapiens
  misc_RNA (1)...(19): siRNA sense strand
cuagaaaacuccaagauaa

SEQ ID NO: 1052715 - RNA, 19 nt, Homo sapiens
  misc_RNA (1)...(19): siRNA sense strand
ggucuuaaaucacucgaau

SEQ ID NO: 1052716 - RNA, 19 nt, Homo sapiens
  misc_RNA (1)...(19): siRNA sense strand
gaucugcaguggcucauuc

SEQ ID NO: 1052717 - RNA, 19 nt, Homo sapiens
  misc_RNA (1)...(19): siRNA sense strand
cuaacgaagucacucuuaa

SEQ ID NO: 1052718 - RNA, 19 nt, Homo sapiens
  misc_RNA (1)...(19): siRNA sense strand
gaucaagcauuugcguuug

SEQ ID NO: 1052719 - RNA, 19 nt, Homo sapiens
  misc_RNA (1)...(19): siRNA sense strand
ucuucuaacucucuacuua

SEQ ID NO: 1052720 - RNA, 19 nt, Homo sapiens
  misc_RNA (1)...(19): siRNA sense strand
ccugaaagcuacccaagug

SEQ ID NO: 1052721 - RNA, 19 nt, Homo sapiens
  misc_RNA (1)...(19): siRNA sense strand
ugaaacaacugaagaagcu

SEQ ID NO: 1052722 - RNA, 19 nt, Homo sapiens
  misc_RNA (1)...(19): siRNA sense strand
gcaaucaucaccaaacugu

SEQ ID NO: 1052723 - RNA, 19 nt, Homo sapiens
  misc_RNA (1)...(19): siRNA sense strand
guacugugaugagcugaaa

SEQ ID NO: 1052724 - RNA, 19 nt, Homo sapiens
  misc_RNA (1)...(19): siRNA sense strand
acuccaagaucaagcauuu

SEQ ID NO: 1052725 - RNA, 19 nt, Homo sapiens
  misc_RNA (1)...(19): siRNA sense strand
cauaccaacugucaaugaa

SEQ ID NO: 1052726 - RNA, 19 nt, Homo sapiens
  misc_RNA (1)...(19): siRNA sense strand
uaaccagauugaccauauu

SEQ ID NO: 1052727 - RNA, 19 nt, Homo sapiens
  misc_RNA (1)...(19): siRNA sense strand
cugaagaagcugcauauaa

SEQ ID NO: 1052728 - RNA, 19 nt, Homo sapiens
  misc_RNA (1)...(19): siRNA sense strand
acaacgaacuggcugauag

SEQ ID NO: 1052729 - RNA, 19 nt, Homo sapiens
  misc_RNA (1)...(19): siRNA sense strand
gcuaacgaagucacucuua

SEQ ID NO: 1052730 - RNA, 19 nt, Homo sapiens
  misc_RNA (1)...(19): siRNA sense strand
guaugaaugucuacguguu

SEQ ID NO: 1052731 - RNA, 19 nt, Homo sapiens
  misc_RNA (1)...(19): siRNA sense strand
caacugaagaagcugcaua

SEQ ID NO: 1052732 - RNA, 19 nt, Homo sapiens
  misc_RNA (1)...(19): siRNA sense strand
caccggauauguaugaaug

SEQ ID NO: 1052733 - RNA, 19 nt, Homo sapiens
  misc_RNA (1)...(19): siRNA sense strand
gagcugaaauugaaaagug

SEQ ID NO: 1052734 - RNA, 19 nt, Homo sapiens
  misc_RNA (1)...(19): siRNA sense strand
aaacauaccaacugucaau

SEQ ID NO: 1052735 - RNA, 19 nt, Homo sapiens
  misc_RNA (1)...(19): siRNA sense strand
guaacugcccugaaagcua

SEQ ID NO: 1052736 - RNA, 19 nt, Homo sapiens
  misc_RNA (1)...(19): siRNA sense strand
ccaguacuaugauuaugau

SEQ ID NO: 1052737 - RNA, 19 nt, Homo sapiens
  misc_RNA (1)...(19): siRNA sense strand
cuugagaaguuugacauaa

SEQ ID NO: 1052738 - RNA, 19 nt, Homo sapiens
  misc_RNA (1)...(19): siRNA sense strand
gauaguggaauaccuggaa

SEQ ID NO: 1052739 - RNA, 19 nt, Homo sapiens
  misc_RNA (1)...(19): siRNA sense strand
acaauaagaucagcaacau

SEQ ID NO: 1052740 - RNA, 19 nt, Homo sapiens
  misc_RNA (1)...(19): siRNA sense strand
ucgaauaccuugacuugag

SEQ ID NO: 1052741 - RNA, 19 nt, Homo sapiens
  misc_RNA (1)...(19): siRNA sense strand
gcagcuuacucauaacaag

SEQ ID NO: 1052742 - RNA, 19 nt, Homo sapiens
  misc_RNA (1)...(19): siRNA sense strand
ugagaaguuugacauaaag

SEQ ID NO: 1052743 - RNA, 19 nt, Homo sapiens
  misc_RNA (1)...(19): siRNA sense strand
auaaccagauugaccauau

SEQ ID NO: 1052744 - RNA, 19 nt, Homo sapiens
  misc_RNA (1)...(19): siRNA sense strand
gagcuggaucuguccuaua

SEQ ID NO: 1052745 - RNA, 19 nt, Homo sapiens
  misc_RNA (1)...(19): siRNA sense strand
ccaguggccaguacuauga

SEQ ID NO: 1052746 - RNA, 19 nt, Homo sapiens
  misc_RNA (1)...(19): siRNA sense strand
uaacgaagucacucuuaau

SEQ ID NO: 1052747 - RNA, 19 nt, Homo sapiens
  misc_RNA (1)...(19): siRNA sense strand
gauugaccauauugaugaa

SEQ ID NO: 1052748 - RNA, 19 nt, Homo sapiens
  misc_RNA (1)...(19): siRNA sense strand
gcauauaaaccacaacaac

SEQ ID NO: 1052749 - RNA, 19 nt, Homo sapiens
  misc_RNA (1)...(19): siRNA sense strand
acgaagucacucuuaauua

SEQ ID NO: 1052750 - RNA, 19 nt, Homo sapiens
  misc_RNA (1)...(19): siRNA sense strand
agcuggaucuguccuauaa

SEQ ID NO: 1052751 - RNA, 19 nt, Homo sapiens
  misc_RNA (1)...(19): siRNA sense strand
uuaaaucacucgaauaccu

SEQ ID NO: 1052752 - RNA, 19 nt, Homo sapiens
  misc_RNA (1)...(19): siRNA sense strand
cuaagugcauuuacucucu

SEQ ID NO: 1052753 - RNA, 19 nt, Homo sapiens
  misc_RNA (1)...(19): siRNA sense strand
gaagaagcugcauauaaac

SEQ ID NO: 1052754 - RNA, 19 nt, Homo sapiens
  misc_RNA (1)...(19): siRNA sense strand
gcugaaagaggaugcuguu

SEQ ID NO: 1052755 - RNA, 19 nt, Homo sapiens
  misc_RNA (1)...(19): siRNA sense strand
aaacugugcaccagaaugu

SEQ ID NO: 1052756 - RNA, 19 nt, Homo sapiens
  misc_RNA (1)...(19): siRNA sense strand
uaucugcguuuaucucaca

SEQ ID NO: 1052757 - RNA, 19 nt, Homo sapiens
  misc_RNA (1)...(19): siRNA sense strand
cauucuagaucacaaccuu

SEQ ID NO: 1052758 - RNA, 19 nt, Homo sapiens
  misc_RNA (1)...(19): siRNA sense strand
gggcaaucaucaccaaacu

SEQ ID NO: 1052759 - RNA, 19 nt, Homo sapiens
  misc_RNA (1)...(19): siRNA sense strand
gccaguacuaugauuauga

SEQ ID NO: 1052760 - RNA, 19 nt, Homo sapiens
  misc_RNA (1)...(19): siRNA sense strand
uaaagagcuucugcaagau

SEQ ID NO: 1052761 - RNA, 19 nt, Homo sapiens
  misc_RNA (1)...(19): siRNA sense strand
agauugaccauauugauga

SEQ ID NO: 1052762 - RNA, 19 nt, Homo sapiens
  misc_RNA (1)...(19): siRNA sense strand
gaaugucuacguguugcua

SEQ ID NO: 1052763 - RNA, 19 nt, Homo sapiens
  misc_RNA (1)...(19): siRNA sense strand
uaagugcauuuacucucuu

SEQ ID NO: 1052764 - RNA, 19 nt, Homo sapiens
  misc_RNA (1)...(19): siRNA sense strand
uaccuugacuugagcuuca

SEQ ID NO: 1052765 - RNA, 19 nt, Homo sapiens
  misc_RNA (1)...(19): siRNA sense strand
ugcaguggcucauucuaga

SEQ ID NO: 1052766 - RNA, 19 nt, Homo sapiens
  misc_RNA (1)...(19): siRNA sense strand
ggaaucaaguaucuuuacc

SEQ ID NO: 1052767 - RNA, 19 nt, Homo sapiens
  misc_RNA (1)...(19): siRNA sense strand
gaacuggcugauaguggaa

SEQ ID NO: 1052768 - RNA, 19 nt, Homo sapiens
  misc_RNA (1)...(19): siRNA sense strand
cagauugaccauauugaug

SEQ ID NO: 1052769 - RNA, 19 nt, Homo sapiens
  misc_RNA (1)...(19): siRNA sense strand
gauuuuccccuaucaauuu

SEQ ID NO: 1052770 - RNA, 19 nt, Homo sapiens
  misc_RNA (1)...(19): siRNA sense strand
ccaauggugccuccuggaa

SEQ ID NO: 1052771 - RNA, 19 nt, Homo sapiens
  misc_RNA (1)...(19): siRNA sense strand
cucccugucucucuucuaa

SEQ ID NO: 1052772 - RNA, 19 nt, Homo sapiens
  misc_RNA (1)...(19): siRNA sense strand
ucaaucagauagccagacu

SEQ ID NO: 1052773 - RNA, 19 nt, Homo sapiens
  misc_RNA (1)...(19): siRNA sense strand
uggaggaucugcagcuuac

SEQ ID NO: 1052774 - RNA, 19 nt, Homo sapiens
  misc_RNA (1)...(19): siRNA sense strand
ccuggaaucaaguaucuuu

SEQ ID NO: 1052775 - RNA, 19 nt, Homo sapiens
  misc_RNA (1)...(19): siRNA sense strand
auaacaagaucacaaagcu

SEQ ID NO: 1052776 - RNA, 19 nt, Homo sapiens
  misc_RNA (1)...(19): siRNA sense strand
ccauuauccuacuccaaga

SEQ ID NO: 1052777 - RNA, 19 nt, Homo sapiens
  misc_RNA (1)...(19): siRNA sense strand
augaguauuucaagcguuu

SEQ ID NO: 1052778 - RNA, 19 nt, Homo sapiens
  misc_RNA (1)...(19): siRNA sense strand
uaaaucacucgaauaccuu

SEQ ID NO: 1052779 - RNA, 19 nt, Homo sapiens
  misc_RNA (1)...(19): siRNA sense strand
ccuuaggaauaaccagauu

SEQ ID NO: 1052780 - RNA, 19 nt, Homo sapiens
  misc_RNA (1)...(19): siRNA sense strand
agaucaagcauuugcguuu

SEQ ID NO: 1052781 - RNA, 19 nt, Homo sapiens
  misc_RNA (1)...(19): siRNA sense strand
ccagauugaccauauugau

SEQ ID NO: 1052782 - RNA, 19 nt, Homo sapiens
  misc_RNA (1)...(19): siRNA sense strand
caaugugucaucccugguu

SEQ ID NO: 1052783 - RNA, 19 nt, Homo sapiens
  misc_RNA (1)...(19): siRNA sense strand
gagucuaagugcauuuacu

SEQ ID NO: 1052784 - RNA, 19 nt, Homo sapiens
  misc_RNA (1)...(19): siRNA sense strand
uuaggaauaaccagauuga

SEQ ID NO: 1052785 - RNA, 19 nt, Homo sapiens
  misc_RNA (1)...(19): siRNA sense strand
ggaucuguccuauaacaag

SEQ ID NO: 1052786 - RNA, 19 nt, Homo sapiens
  misc_RNA (1)...(19): siRNA sense strand
cuggaucuguccuauaaca

SEQ ID NO: 1052787 - RNA, 19 nt, Homo sapiens
  misc_RNA (1)...(19): siRNA sense strand
caauuuaugggcaaucauc

SEQ ID NO: 1052788 - RNA, 19 nt, Homo sapiens
  misc_RNA (1)...(19): siRNA sense strand
uaugggcaaucaucaccaa

SEQ ID NO: 1052789 - RNA, 19 nt, Homo sapiens
  misc_RNA (1)...(19): siRNA sense strand
ggccaguacuaugauuaug

SEQ ID NO: 1052790 - RNA, 19 nt, Homo sapiens
  misc_RNA (1)...(19): siRNA sense strand
ugguaaaccugaccuucau

SEQ ID NO: 1052791 - RNA, 19 nt, Homo sapiens
  misc_RNA (1)...(19): siRNA sense strand
aacgaagucacucuuaauu

SEQ ID NO: 1052792 - RNA, 19 nt, Homo sapiens
  misc_RNA (1)...(19): siRNA sense strand
gagaaguuugacauaaaga

SEQ ID NO: 1052793 - RNA, 19 nt, Homo sapiens
  misc_RNA (1)...(19): siRNA sense strand
caacgaacuggcugauagu

SEQ ID NO: 1052794 - RNA, 19 nt, Homo sapiens
  misc_RNA (1)...(19): siRNA sense strand
cacaacaaccugacagagu

SEQ ID NO: 1052795 - RNA, 19 nt, Homo sapiens
  misc_RNA (1)...(19): siRNA sense strand
acucgaauaccuugacuug

SEQ ID NO: 1052796 - RNA, 19 nt, Homo sapiens
  misc_RNA (1)...(19): siRNA sense strand
ucauccaucuccagcacaa

SEQ ID NO: 1052797 - RNA, 19 nt, Homo sapiens
  misc_RNA (1)...(19): siRNA sense strand
aauggugccuccuggaauc

SEQ ID NO: 1052798 - RNA, 19 nt, Homo sapiens
  misc_RNA (1)...(19): siRNA sense strand
aucugcagcuuacucauaa

SEQ ID NO: 1052799 - RNA, 19 nt, Homo sapiens
  misc_RNA (1)...(19): siRNA sense strand
ucccaaaucucuggaggau

SEQ ID NO: 1052800 - RNA, 19 nt, Homo sapiens
  misc_RNA (1)...(19): siRNA sense strand
cagcuuacucauaacaaga

SEQ ID NO: 1052801 - RNA, 19 nt, Homo sapiens
  misc_RNA (1)...(19): siRNA sense strand
acauaaagagcuucugcaa

SEQ ID NO: 1052802 - RNA, 19 nt, Homo sapiens
  misc_RNA (1)...(19): siRNA sense strand
ugugaugagcugaaauuga

SEQ ID NO: 1052803 - RNA, 19 nt, Homo sapiens
  misc_RNA (1)...(19): siRNA sense strand
ggacgaagcucgcaagaag

SEQ ID NO: 1052804 - RNA, 19 nt, Homo sapiens
  misc_RNA (1)...(19): siRNA sense strand
gcaaggaccucaucuacca

SEQ ID NO: 1052805 - RNA, 19 nt, Homo sapiens
  misc_RNA (1)...(19): siRNA sense strand
gaaccuggcucugacaaga

SEQ ID NO: 1052806 - RNA, 19 nt, Homo sapiens
  misc_RNA (1)...(19): siRNA sense strand
gacaaggacuucaacauca

SEQ ID NO: 1052807 - RNA, 19 nt, Homo sapiens
  misc_RNA (1)...(19): siRNA sense strand
ucaagaagaugcugcguau

SEQ ID NO: 1052808 - RNA, 19 nt, Homo sapiens
  misc_RNA (1)...(19): siRNA sense strand
aaccacugcuccaucauua

SEQ ID NO: 1052809 - RNA, 19 nt, Homo sapiens
  misc_RNA (1)...(19): siRNA sense strand
gugacaaccuucuccuuga

SEQ ID NO: 1052810 - RNA, 19 nt, Homo sapiens
  misc_RNA (1)...(19): siRNA sense strand
ggaugacaguggucgaaug

SEQ ID NO: 1052811 - RNA, 19 nt, Homo sapiens
  misc_RNA (1)...(19): siRNA sense strand
uuaaaccacugcuccauca

SEQ ID NO: 1052812 - RNA, 19 nt, Homo sapiens
  misc_RNA (1)...(19): siRNA sense strand
agucggagauccuggguuu

SEQ ID NO: 1052813 - RNA, 19 nt, Homo sapiens
  misc_RNA (1)...(19): siRNA sense strand
gaucaucgaccgcaagaag

SEQ ID NO: 1052814 - RNA, 19 nt, Homo sapiens
  misc_RNA (1)...(19): siRNA sense strand
ccagcaagccgucgacuau

SEQ ID NO: 1052815 - RNA, 19 nt, Homo sapiens
  misc_RNA (1)...(19): siRNA sense strand
gagauucuggccauguuaa

SEQ ID NO: 1052816 - RNA, 19 nt, Homo sapiens
  misc_RNA (1)...(19): siRNA sense strand
ugacaaggacuucaacauc

SEQ ID NO: 1052817 - RNA, 19 nt, Homo sapiens
  misc_RNA (1)...(19): siRNA sense strand
acaaggacuucaacaucaa

SEQ ID NO: 1052818 - RNA, 19 nt, Homo sapiens
  misc_RNA (1)...(19): siRNA sense strand
gggcgaccuccucgaguua

SEQ ID NO: 1052819 - RNA, 19 nt, Homo sapiens
  misc_RNA (1)...(19): siRNA sense strand
ccucaagugugacaaccuu

SEQ ID NO: 1052820 - RNA, 19 nt, Homo sapiens
  misc_RNA (1)...(19): siRNA sense strand
gcuccaucauuaagaccua

SEQ ID NO: 1052821 - RNA, 19 nt, Homo sapiens
  misc_RNA (1)...(19): siRNA sense strand
acaucaagcuguccgacuu

SEQ ID NO: 1052822 - RNA, 19 nt, Homo sapiens
  misc_RNA (1)...(19): siRNA sense strand
cgucgacuauggagacaga

SEQ ID NO: 1052823 - RNA, 19 nt, Homo sapiens
  misc_RNA (1)...(19): siRNA sense strand
cgagaucuuugagacauca

SEQ ID NO: 1052824 - RNA, 19 nt, Homo sapiens
  misc_RNA (1)...(19): siRNA sense strand
uaaaaucugcuuacucuga

SEQ ID NO: 1052825 - RNA, 19 nt, Homo sapiens
  misc_RNA (1)...(19): siRNA sense strand
acucugagcgccugaaguu

SEQ ID NO: 1052826 - RNA, 19 nt, Homo sapiens
  misc_RNA (1)...(19): siRNA sense strand
ugacgcugcuguccucaag

SEQ ID NO: 1052827 - RNA, 19 nt, Homo sapiens
  misc_RNA (1)...(19): siRNA sense strand
gagagggcuccuaugcaaa

SEQ ID NO: 1052828 - RNA, 19 nt, Homo sapiens
  misc_RNA (1)...(19): siRNA sense strand
aaaccacugcuccaucauu

SEQ ID NO: 1052829 - RNA, 19 nt, Homo sapiens
  misc_RNA (1)...(19): siRNA sense strand
accgggaccucaaguguga

SEQ ID NO: 1052830 - RNA, 19 nt, Homo sapiens
  misc_RNA (1)...(19): siRNA sense strand
gcaagccgucgacuaugga

SEQ ID NO: 1052831 - RNA, 19 nt, Homo sapiens
  misc_RNA (1)...(19): siRNA sense strand
ggaccucaucuaccacaug

SEQ ID NO: 1052832 - RNA, 19 nt, Homo sapiens
  misc_RNA (1)...(19): siRNA sense strand
gggcuccuaugcaaaagua

SEQ ID NO: 1052833 - RNA, 19 nt, Homo sapiens
  misc_RNA (1)...(19): siRNA sense strand
caagaaguuccaccagcuu

SEQ ID NO: 1052834 - RNA, 19 nt, Homo sapiens
  misc_RNA (1)...(19): siRNA sense strand
uacgacgacuccaacauca

SEQ ID NO: 1052835 - RNA, 19 nt, Homo sapiens
  misc_RNA (1)...(19): siRNA sense strand
ugagauucuggccauguua

SEQ ID NO: 1052836 - RNA, 19 nt, Homo sapiens
  misc_RNA (1)...(19): siRNA sense strand
acaagaagucugccaccaa

SEQ ID NO: 1052837 - RNA, 19 nt, Homo sapiens
  misc_RNA (1)...(19): siRNA sense strand
gaugacaguggucgaaugg

SEQ ID NO: 1052838 - RNA, 19 nt, Homo sapiens
  misc_RNA (1)...(19): siRNA sense strand
ccacugcuccaucauuaag

SEQ ID NO: 1052839 - RNA, 19 nt, Homo sapiens
  misc_RNA (1)...(19): siRNA sense strand
gugcaaggaccucaucuac

SEQ ID NO: 1052840 - RNA, 19 nt, Homo sapiens
  misc_RNA (1)...(19): siRNA sense strand
acuccaacaucaagaagau

SEQ ID NO: 1052841 - RNA, 19 nt, Homo sapiens
  misc_RNA (1)...(19): siRNA sense strand
ccuaccagcccaaggugua

SEQ ID NO: 1052842 - RNA, 19 nt, Homo sapiens
  misc_RNA (1)...(19): siRNA sense strand
cagcuuuccuuggccauca

SEQ ID NO: 1052843 - RNA, 19 nt, Homo sapiens
  misc_RNA (1)...(19): siRNA sense strand
caaggucuacaucgucaug

SEQ ID NO: 1052844 - RNA, 19 nt, Homo sapiens
  misc_RNA (1)...(19): siRNA sense strand
ucauuaagaccuacgagau

SEQ ID NO: 1052845 - RNA, 19 nt, Homo sapiens
  misc_RNA (1)...(19): siRNA sense strand
ucaauguggcgaucaagau

SEQ ID NO: 1052846 - RNA, 19 nt, Homo sapiens
  misc_RNA (1)...(19): siRNA sense strand
gaaggagcaccgcgucaac

SEQ ID NO: 1052847 - RNA, 19 nt, Homo sapiens
  misc_RNA (1)...(19): siRNA sense strand
agaccuacgagaucuuuga

SEQ ID NO: 1052848 - RNA, 19 nt, Homo sapiens
  misc_RNA (1)...(19): siRNA sense strand
ggagcaccgcgucaacuuc

SEQ ID NO: 1052849 - RNA, 19 nt, Homo sapiens
  misc_RNA (1)...(19): siRNA sense strand
cgacgacuccaacaucaag

SEQ ID NO: 1052850 - RNA, 19 nt, Homo sapiens
  misc_RNA (1)...(19): siRNA sense strand
cuacgacgacuccaacauc

SEQ ID NO: 1052851 - RNA, 19 nt, Homo sapiens
  misc_RNA (1)...(19): siRNA sense strand
uacgagaucuuugagacau

SEQ ID NO: 1052852 - RNA, 19 nt, Homo sapiens
  misc_RNA (1)...(19): siRNA sense strand
cauuaagaccuacgagauc

SEQ ID NO: 1052853 - RNA, 19 nt, Homo sapiens
  misc_RNA (1)...(19): siRNA sense strand
gccuaggcgugauccucua

SEQ ID NO: 1052854 - RNA, 19 nt, Homo sapiens
  misc_RNA (1)...(19): siRNA sense strand
ugacaaccuucuccuugac

SEQ ID NO: 1052855 - RNA, 19 nt, Homo sapiens
  misc_RNA (1)...(19): siRNA sense strand
ccaccgggaccucaagugu

SEQ ID NO: 1052856 - RNA, 19 nt, Homo sapiens
  misc_RNA (1)...(19): siRNA sense strand
gcgaccuccucgaguuaau

SEQ ID NO: 1052857 - RNA, 19 nt, Homo sapiens
  misc_RNA (1)...(19): siRNA sense strand
caucacauggcaaggucua

SEQ ID NO: 1052858 - RNA, 19 nt, Homo sapiens
  misc_RNA (1)...(19): siRNA sense strand
acgaagcucgcaagaaguu

SEQ ID NO: 1052859 - RNA, 19 nt, Homo sapiens
  misc_RNA (1)...(19): siRNA sense strand
uugagauucuggccauguu

SEQ ID NO: 1052860 - RNA, 19 nt, Homo sapiens
  misc_RNA (1)...(19): siRNA sense strand
aagaaguuccaccagcuuu

SEQ ID NO: 1052861 - RNA, 19 nt, Homo sapiens
  misc_RNA (1)...(19): siRNA sense strand
gaccuccucgaguuaauca

SEQ ID NO: 1052862 - RNA, 19 nt, Homo sapiens
  misc_RNA (1)...(19): siRNA sense strand
gaugcugcguauccagaag

SEQ ID NO: 1052863 - RNA, 19 nt, Homo sapiens
  misc_RNA (1)...(19): siRNA sense strand
ccuccucgaguuaaucaaa

SEQ ID NO: 1052864 - RNA, 19 nt, Homo sapiens
  misc_RNA (1)...(19): siRNA sense strand
gaacacaccuggaguaaaa

SEQ ID NO: 1052865 - RNA, 19 nt, Homo sapiens
  misc_RNA (1)...(19): siRNA sense strand
uaaagagugucgaguuaua

SEQ ID NO: 1052866 - RNA, 19 nt, Homo sapiens
  misc_RNA (1)...(19): siRNA sense strand
ggacaucccugccaugcaa

SEQ ID NO: 1052867 - RNA, 19 nt, Homo sapiens
  misc_RNA (1)...(19): siRNA sense strand
aaacauaugugcucaggaa

SEQ ID NO: 1052868 - RNA, 19 nt, Homo sapiens
  misc_RNA (1)...(19): siRNA sense strand
ggaaggauaugguauaggu

SEQ ID NO: 1052869 - RNA, 19 nt, Homo sapiens
  misc_RNA (1)...(19): siRNA sense strand
ccuaaagagugucgaguua

SEQ ID NO: 1052870 - RNA, 19 nt, Homo sapiens
  misc_RNA (1)...(19): siRNA sense strand
uaagauggcuggaauagca

SEQ ID NO: 1052871 - RNA, 19 nt, Homo sapiens
  misc_RNA (1)...(19): siRNA sense strand
gagaagauccgcuuguuga

SEQ ID NO: 1052872 - RNA, 19 nt, Homo sapiens
  misc_RNA (1)...(19): siRNA sense strand
gaagggcuuucaaacauau

SEQ ID NO: 1052873 - RNA, 19 nt, Homo sapiens
  misc_RNA (1)...(19): siRNA sense strand
ggucaggaaguucuuauua

SEQ ID NO: 1052874 - RNA, 19 nt, Homo sapiens
  misc_RNA (1)...(19): siRNA sense strand
gaaagagauugcaaugauc

SEQ ID NO: 1052875 - RNA, 19 nt, Homo sapiens
  misc_RNA (1)...(19): siRNA sense strand
cuacaacucuccaaacgaa

SEQ ID NO: 1052876 - RNA, 19 nt, Homo sapiens
  misc_RNA (1)...(19): siRNA sense strand
agaaagagauugcaaugau

SEQ ID NO: 1052877 - RNA, 19 nt, Homo sapiens
  misc_RNA (1)...(19): siRNA sense strand
gcaggaaaguccaauccaa

SEQ ID NO: 1052878 - RNA, 19 nt, Homo sapiens
  misc_RNA (1)...(19): siRNA sense strand
ugaagaacuugcccgauaa

SEQ ID NO: 1052879 - RNA, 19 nt, Homo sapiens
  misc_RNA (1)...(19): siRNA sense strand
cagaagggcuuucaaacau

SEQ ID NO: 1052880 - RNA, 19 nt, Homo sapiens
  misc_RNA (1)...(19): siRNA sense strand
gcuaacauguaugcuauaa

SEQ ID NO: 1052881 - RNA, 19 nt, Homo sapiens
  misc_RNA (1)...(19): siRNA sense strand
ggagauuucagacuagaua

SEQ ID NO: 1052882 - RNA, 19 nt, Homo sapiens
  misc_RNA (1)...(19): siRNA sense strand
ggauagcuuucaagaagaa

SEQ ID NO: 1052883 - RNA, 19 nt, Homo sapiens
  misc_RNA (1)...(19): siRNA sense strand
gauaucuucugggaaauaa

SEQ ID NO: 1052884 - RNA, 19 nt, Homo sapiens
  misc_RNA (1)...(19): siRNA sense strand
uggaagaacugauuucaau

SEQ ID NO: 1052885 - RNA, 19 nt, Homo sapiens
  misc_RNA (1)...(19): siRNA sense strand
ggcagaaacuggacuacaa

SEQ ID NO: 1052886 - RNA, 19 nt, Homo sapiens
  misc_RNA (1)...(19): siRNA sense strand
gggaaaaccuuuagugauu

SEQ ID NO: 1052887 - RNA, 19 nt, Homo sapiens
  misc_RNA (1)...(19): siRNA sense strand
gucaggaaguucuuauuaa

SEQ ID NO: 1052888 - RNA, 19 nt, Homo sapiens
  misc_RNA (1)...(19): siRNA sense strand
ugacgaaguucaucuuuca

SEQ ID NO: 1052889 - RNA, 19 nt, Homo sapiens
  misc_RNA (1)...(19): siRNA sense strand
gaagugaggaacagaagaa

SEQ ID NO: 1052890 - RNA, 19 nt, Homo sapiens
  misc_RNA (1)...(19): siRNA sense strand
ggacaguuccaaugauaaa

SEQ ID NO: 1052891 - RNA, 19 nt, Homo sapiens
  misc_RNA (1)...(19): siRNA sense strand
ggaagaacugauuucaaua

SEQ ID NO: 1052892 - RNA, 19 nt, Homo sapiens
  misc_RNA (1)...(19): siRNA sense strand
cagguucacuucuuccuaa

SEQ ID NO: 1052893 - RNA, 19 nt, Homo sapiens
  misc_RNA (1)...(19): siRNA sense strand
ucauggagauuucagacua

SEQ ID NO: 1052894 - RNA, 19 nt, Homo sapiens
  misc_RNA (1)...(19): siRNA sense strand
gcagaacguucagccauau

SEQ ID NO: 1052895 - RNA, 19 nt, Homo sapiens
  misc_RNA (1)...(19): siRNA sense strand
caagugaugccacgaauau

SEQ ID NO: 1052896 - RNA, 19 nt, Homo sapiens
  misc_RNA (1)...(19): siRNA sense strand
aaggauagcuuucaagaag

SEQ ID NO: 1052897 - RNA, 19 nt, Homo sapiens
  misc_RNA (1)...(19): siRNA sense strand
ucaaggaaauggccaaagu

SEQ ID NO: 1052898 - RNA, 19 nt, Homo sapiens
  misc_RNA (1)...(19): siRNA sense strand
agaagggcuuucaaacaua

SEQ ID NO: 1052899 - RNA, 19 nt, Homo sapiens
  misc_RNA (1)...(19): siRNA sense strand
gaaguuguaugcacaugag

SEQ ID NO: 1052900 - RNA, 19 nt, Homo sapiens
  misc_RNA (1)...(19): siRNA sense strand
ggacaguuguuuguacaga

SEQ ID NO: 1052901 - RNA, 19 nt, Homo sapiens
  misc_RNA (1)...(19): siRNA sense strand
augaagaacuugcccgaua

SEQ ID NO: 1052902 - RNA, 19 nt, Homo sapiens
  misc_RNA (1)...(19): siRNA sense strand
aaggacaguuccaaugaua

SEQ ID NO: 1052903 - RNA, 19 nt, Homo sapiens
  misc_RNA (1)...(19): siRNA sense strand
gaacgcgcuuugcagauca

SEQ ID NO: 1052904 - RNA, 19 nt, Homo sapiens
  misc_RNA (1)...(19): siRNA sense strand
cggaguggcuaaugaagaa

SEQ ID NO: 1052905 - RNA, 19 nt, Homo sapiens
  misc_RNA (1)...(19): siRNA sense strand
caaacgaacuuucaguacu

SEQ ID NO: 1052906 - RNA, 19 nt, Homo sapiens
  misc_RNA (1)...(19): siRNA sense strand
caaccuggacaaagcaaua

SEQ ID NO: 1052907 - RNA, 19 nt, Homo sapiens
  misc_RNA (1)...(19): siRNA sense strand
ggaacgcgcuuugcagauc

SEQ ID NO: 1052908 - RNA, 19 nt, Homo sapiens
  misc_RNA (1)...(19): siRNA sense strand
guacuaccacagauugaua

SEQ ID NO: 1052909 - RNA, 19 nt, Homo sapiens
  misc_RNA (1)...(19): siRNA sense strand
ccaaggacaguuccaauga

SEQ ID NO: 1052910 - RNA, 19 nt, Homo sapiens
  misc_RNA (1)...(19): siRNA sense strand
cagcacagcaugauucuug

SEQ ID NO: 1052911 - RNA, 19 nt, Homo sapiens
  misc_RNA (1)...(19): siRNA sense strand
agaugaagauagcuaugua

SEQ ID NO: 1052912 - RNA, 19 nt, Homo sapiens
  misc_RNA (1)...(19): siRNA sense strand
gacagaaccugauguagcu

SEQ ID NO: 1052913 - RNA, 19 nt, Homo sapiens
  misc_RNA (1)...(19): siRNA sense strand
gcacagggaguauauagca

SEQ ID NO: 1052914 - RNA, 19 nt, Homo sapiens
  misc_RNA (1)...(19): siRNA sense strand
gguuguggcucacuggauu

SEQ ID NO: 1052915 - RNA, 19 nt, Homo sapiens
  misc_RNA (1)...(19): siRNA sense strand
agauggaccugacgaaguu

SEQ ID NO: 1052916 - RNA, 19 nt, Homo sapiens
  misc_RNA (1)...(19): siRNA sense strand
gcauugccauugagaagau

SEQ ID NO: 1052917 - RNA, 19 nt, Homo sapiens
  misc_RNA (1)...(19): siRNA sense strand
ucaagguucuuauagugaa

SEQ ID NO: 1052918 - RNA, 19 nt, Homo sapiens
  misc_RNA (1)...(19): siRNA sense strand
gaaagccgcauugccauug

SEQ ID NO: 1052919 - RNA, 19 nt, Homo sapiens
  misc_RNA (1)...(19): siRNA sense strand
gagggucucuggaacuugu

SEQ ID NO: 1052920 - RNA, 19 nt, Homo sapiens
  misc_RNA (1)...(19): siRNA sense strand
aaacgaacuuucaguacug

SEQ ID NO: 1052921 - RNA, 19 nt, Homo sapiens
  misc_RNA (1)...(19): siRNA sense strand
gaauagcacagggaguaua

SEQ ID NO: 1052922 - RNA, 19 nt, Homo sapiens
  misc_RNA (1)...(19): siRNA sense strand
aaucaagguucuuauagug

SEQ ID NO: 1052923 - RNA, 19 nt, Homo sapiens
  misc_RNA (1)...(19): siRNA sense strand
ugauguagcuucaagugau

SEQ ID NO: 1052924 - RNA, 19 nt, Homo sapiens
  misc_RNA (1)...(19): siRNA sense strand
gaaacuggacuacaacucu

SEQ ID NO: 1052925 - RNA, 19 nt, Homo sapiens
  misc_RNA (1)...(19): siRNA sense strand
cuaaagcacaucagauuga

SEQ ID NO: 1052926 - RNA, 19 nt, Homo sapiens
  misc_RNA (1)...(19): siRNA sense strand
ugucagacuuagcucauuu

SEQ ID NO: 1052927 - RNA, 19 nt, Homo sapiens
  misc_RNA (1)...(19): siRNA sense strand
gcuggaaggauaugguaua

SEQ ID NO: 1052928 - RNA, 19 nt, Homo sapiens
  misc_RNA (1)...(19): siRNA sense strand
guagaaacauuggcucagu

SEQ ID NO: 1052929 - RNA, 19 nt, Homo sapiens
  misc_RNA (1)...(19): siRNA sense strand
ggaacagaauuuuacguaa

SEQ ID NO: 1052930 - RNA, 19 nt, Homo sapiens
  misc_RNA (1)...(19): siRNA sense strand
uaacauguaugcuauaacc

SEQ ID NO: 1052931 - RNA, 19 nt, Homo sapiens
  misc_RNA (1)...(19): siRNA sense strand
uaagaaagagauugcaaug

SEQ ID NO: 1052932 - RNA, 19 nt, Homo sapiens
  misc_RNA (1)...(19): siRNA sense strand
ugccacaaaucuaauacua

SEQ ID NO: 1052933 - RNA, 19 nt, Homo sapiens
  misc_RNA (1)...(19): siRNA sense strand
caaggacaguuccaaugau

SEQ ID NO: 1052934 - RNA, 19 nt, Homo sapiens
  misc_RNA (1)...(19): siRNA sense strand
gaacuugcccgauaaugac

SEQ ID NO: 1052935 - RNA, 19 nt, Homo sapiens
  misc_RNA (1)...(19): siRNA sense strand
gaaaguccaauccaaccuu

SEQ ID NO: 1052936 - RNA, 19 nt, Homo sapiens
  misc_RNA (1)...(19): siRNA sense strand
gaugaagauagcuauguaa

SEQ ID NO: 1052937 - RNA, 19 nt, Homo sapiens
  misc_RNA (1)...(19): siRNA sense strand
gauguagcuucaagugaug

SEQ ID NO: 1052938 - RNA, 19 nt, Homo sapiens
  misc_RNA (1)...(19): siRNA sense strand
cacugcagcuggaaggaua

SEQ ID NO: 1052939 - RNA, 19 nt, Homo sapiens
  misc_RNA (1)...(19): siRNA sense strand
ggacuuagcccagcagaac

SEQ ID NO: 1052940 - RNA, 19 nt, Homo sapiens
  misc_RNA (1)...(19): siRNA sense strand
gugcggaggugcugguguu

SEQ ID NO: 1052941 - RNA, 19 nt, Homo sapiens
  misc_RNA (1)...(19): siRNA sense strand
gcagaauccaccacuguau

SEQ ID NO: 1052942 - RNA, 19 nt, Homo sapiens
  misc_RNA (1)...(19): siRNA sense strand
gcgaguuccugccacaaau

SEQ ID NO: 1052943 - RNA, 19 nt, Homo sapiens
  misc_RNA (1)...(19): siRNA sense strand
aaacagcacagcaugauuc

SEQ ID NO: 1052944 - RNA, 19 nt, Homo sapiens
  misc_RNA (1)...(19): siRNA sense strand
aagggaacauuaccucuug

SEQ ID NO: 1052945 - RNA, 19 nt, Homo sapiens
  misc_RNA (1)...(19): siRNA sense strand
agaaacauuggcucaguua

SEQ ID NO: 1052946 - RNA, 19 nt, Homo sapiens
  misc_RNA (1)...(19): siRNA sense strand
guacugcagugauacuucu

SEQ ID NO: 1052947 - RNA, 19 nt, Homo sapiens
  misc_RNA (1)...(19): siRNA sense strand
uggcuaacauguaugcuau

SEQ ID NO: 1052948 - RNA, 19 nt, Homo sapiens
  misc_RNA (1)...(19): siRNA sense strand
aauaaggccuuugucaguu

SEQ ID NO: 1052949 - RNA, 19 nt, Homo sapiens
  misc_RNA (1)...(19): siRNA sense strand
uaauaaggccuuugucagu

SEQ ID NO: 1052950 - RNA, 19 nt, Homo sapiens
  misc_RNA (1)...(19): siRNA sense strand
gcaccagacacagggaaua

SEQ ID NO: 1052951 - RNA, 19 nt, Homo sapiens
  misc_RNA (1)...(19): siRNA sense strand
gaaaaccuuuagugauuga

SEQ ID NO: 1052952 - RNA, 19 nt, Homo sapiens
  misc_RNA (1)...(19): siRNA sense strand
ccagaagggcuuucaaaca

SEQ ID NO: 1052953 - RNA, 19 nt, Homo sapiens
  misc_RNA (1)...(19): siRNA sense strand
uagaaacauuggcucaguu

SEQ ID NO: 1052954 - RNA, 19 nt, Homo sapiens
  misc_RNA (1)...(19): siRNA sense strand
gaauuuaaaguccagaaag

SEQ ID NO: 1052955 - RNA, 19 nt, Homo sapiens
  misc_RNA (1)...(19): siRNA sense strand
gaaguucaucuuucagcaa

SEQ ID NO: 1052956 - RNA, 19 nt, Homo sapiens
  misc_RNA (1)...(19): siRNA sense strand
gaagguaggggauuugaaa

SEQ ID NO: 1052957 - RNA, 19 nt, Homo sapiens
  misc_RNA (1)...(19): siRNA sense strand
ccaccagguucacuucuuc

SEQ ID NO: 1052958 - RNA, 19 nt, Homo sapiens
  misc_RNA (1)...(19): siRNA sense strand
ggaaaggucaggaaguucu

SEQ ID NO: 1052959 - RNA, 19 nt, Homo sapiens
  misc_RNA (1)...(19): siRNA sense strand
gaacaugugcagggucgaa

SEQ ID NO: 1052960 - RNA, 19 nt, Homo sapiens
  misc_RNA (1)...(19): siRNA sense strand
auaaggccuuugucaguuu

SEQ ID NO: 1052961 - RNA, 19 nt, Homo sapiens
  misc_RNA (1)...(19): siRNA sense strand
ucggaaaggucaggaaguu

SEQ ID NO: 1052962 - RNA, 19 nt, Homo sapiens
  misc_RNA (1)...(19): siRNA sense strand
uaccacagauugauacuac

SEQ ID NO: 1052963 - RNA, 19 nt, Homo sapiens
  misc_RNA (1)...(19): siRNA sense strand
gaacguucagccauauaug

SEQ ID NO: 1052964 - RNA, 19 nt, Homo sapiens
  misc_RNA (1)...(19): siRNA sense strand
gauuagcgcugauucacau

SEQ ID NO: 1052965 - RNA, 19 nt, Homo sapiens
  misc_RNA (1)...(19): siRNA sense strand
agucuuggcucucaugauu

SEQ ID NO: 1052966 - RNA, 19 nt, Homo sapiens
  misc_RNA (1)...(19): siRNA sense strand
ugucuuugcuuuagucuug

SEQ ID NO: 1052967 - RNA, 19 nt, Homo sapiens
  misc_RNA (1)...(19): siRNA sense strand
gggacuauggaucaaauua

SEQ ID NO: 1052968 - RNA, 19 nt, Homo sapiens
  misc_RNA (1)...(19): siRNA sense strand
ggacuauggaucaaauuau

SEQ ID NO: 1052969 - RNA, 19 nt, Homo sapiens
  misc_RNA (1)...(19): siRNA sense strand
gacuauggaucaaauuauc

SEQ ID NO: 1052970 - RNA, 19 nt, Homo sapiens
  misc_RNA (1)...(19): siRNA sense strand
caucgagaauuuccauuuu

SEQ ID NO: 1052971 - RNA, 19 nt, Homo sapiens
  misc_RNA (1)...(19): siRNA sense strand
gcuuuagucuuggcucuca

SEQ ID NO: 1052972 - RNA, 19 nt, Homo sapiens
  misc_RNA (1)...(19): siRNA sense strand
gaaaauuccaugaaaagca

SEQ ID NO: 1052973 - RNA, 19 nt, Homo sapiens
  misc_RNA (1)...(19): siRNA sense strand
acaucgagaauuuccauuu

SEQ ID NO: 1052974 - RNA, 19 nt, Homo sapiens
  misc_RNA (1)...(19): siRNA sense strand
ucuuggcucucaugauuuc

SEQ ID NO: 1052975 - RNA, 19 nt, Homo sapiens
  misc_RNA (1)...(19): siRNA sense strand
gaacagaacugcuaauuca

SEQ ID NO: 1052976 - RNA, 19 nt, Homo sapiens
  misc_RNA (1)...(19): siRNA sense strand
gaacaugguuuggauauug

SEQ ID NO: 1052977 - RNA, 19 nt, Homo sapiens
  misc_RNA (1)...(19): siRNA sense strand
ggagaaggcucugaaagaa

SEQ ID NO: 1052978 - RNA, 19 nt, Homo sapiens
  misc_RNA (1)...(19): siRNA sense strand
cgaaugaccuaucagagua

SEQ ID NO: 1052979 - RNA, 19 nt, Homo sapiens
  misc_RNA (1)...(19): siRNA sense strand
caaaggaucaagagaaaua

SEQ ID NO: 1052980 - RNA, 19 nt, Homo sapiens
  misc_RNA (1)...(19): siRNA sense strand
agaaggcucugaaagaaua

SEQ ID NO: 1052981 - RNA, 19 nt, Homo sapiens
  misc_RNA (1)...(19): siRNA sense strand
ggacuugaaugacaguaaa

SEQ ID NO: 1052982 - RNA, 19 nt, Homo sapiens
  misc_RNA (1)...(19): siRNA sense strand
ggacagaaagauugugaua

SEQ ID NO: 1052983 - RNA, 19 nt, Homo sapiens
  misc_RNA (1)...(19): siRNA sense strand
cgacaucucagaagaguua

SEQ ID NO: 1052984 - RNA, 19 nt, Homo sapiens
  misc_RNA (1)...(19): siRNA sense strand
uagcuggucugccaaauaa

SEQ ID NO: 1052985 - RNA, 19 nt, Homo sapiens
  misc_RNA (1)...(19): siRNA sense strand
gaugggauauacagaguaa

SEQ ID NO: 1052986 - RNA, 19 nt, Homo sapiens
  misc_RNA (1)...(19): siRNA sense strand
gcaaaggacagaaagauug

SEQ ID NO: 1052987 - RNA, 19 nt, Homo sapiens
  misc_RNA (1)...(19): siRNA sense strand
gcagugauccagaaacuaa

SEQ ID NO: 1052988 - RNA, 19 nt, Homo sapiens
  misc_RNA (1)...(19): siRNA sense strand
gagagagaauggcacagua

SEQ ID NO: 1052989 - RNA, 19 nt, Homo sapiens
  misc_RNA (1)...(19): siRNA sense strand
gggcauaccuuauauacca

SEQ ID NO: 1052990 - RNA, 19 nt, Homo sapiens
  misc_RNA (1)...(19): siRNA sense strand
gacaguaaaugggaagaua

SEQ ID NO: 1052991 - RNA, 19 nt, Homo sapiens
  misc_RNA (1)...(19): siRNA sense strand
gaaaauggcugacagaagu

SEQ ID NO: 1052992 - RNA, 19 nt, Homo sapiens
  misc_RNA (1)...(19): siRNA sense strand
gauccaaucucgcuaaucu

SEQ ID NO: 1052993 - RNA, 19 nt, Homo sapiens
  misc_RNA (1)...(19): siRNA sense strand
ccaaauaacuccacgaaaa

SEQ ID NO: 1052994 - RNA, 19 nt, Homo sapiens
  misc_RNA (1)...(19): siRNA sense strand
gaauaggacacgcucauuu

SEQ ID NO: 1052995 - RNA, 19 nt, Homo sapiens
  misc_RNA (1)...(19): siRNA sense strand
cuucagagaucaacagaaa

SEQ ID NO: 1052996 - RNA, 19 nt, Homo sapiens
  misc_RNA (1)...(19): siRNA sense strand
gacaaugacacuguuauua

SEQ ID NO: 1052997 - RNA, 19 nt, Homo sapiens
  misc_RNA (1)...(19): siRNA sense strand
gcucagggcguugcuauua

SEQ ID NO: 1052998 - RNA, 19 nt, Homo sapiens
  misc_RNA (1)...(19): siRNA sense strand
ugccugagcuuucaaguuu

SEQ ID NO: 1052999 - RNA, 19 nt, Homo sapiens
  misc_RNA (1)...(19): siRNA sense strand
gggaauugccaaaguauaa

SEQ ID NO: 1053000 - RNA, 19 nt, Homo sapiens
  misc_RNA (1)...(19): siRNA sense strand
gagauggcuucaaaggaua

SEQ ID NO: 1053001 - RNA, 19 nt, Homo sapiens
  misc_RNA (1)...(19): siRNA sense strand
gauaaggaaucuccaacug

SEQ ID NO: 1053002 - RNA, 19 nt, Homo sapiens
  misc_RNA (1)...(19): siRNA sense strand
ggaagauauucaugucauu

SEQ ID NO: 1053003 - RNA, 19 nt, Homo sapiens
  misc_RNA (1)...(19): siRNA sense strand
cagcuccacugaacagaua

SEQ ID NO: 1053004 - RNA, 19 nt, Homo sapiens
  misc_RNA (1)...(19): siRNA sense strand
gaugagaaauuggacuuga

SEQ ID NO: 1053005 - RNA, 19 nt, Homo sapiens
  misc_RNA (1)...(19): siRNA sense strand
gaauguauuugagcugaaa

SEQ ID NO: 1053006 - RNA, 19 nt, Homo sapiens
  misc_RNA (1)...(19): siRNA sense strand
gguggaauaugauuaugaa

SEQ ID NO: 1053007 - RNA, 19 nt, Homo sapiens
  misc_RNA (1)...(19): siRNA sense strand
ggacacuaaugauaaggaa

SEQ ID NO: 1053008 - RNA, 19 nt, Homo sapiens
  misc_RNA (1)...(19): siRNA sense strand
uuaacaaaguggagacaua

SEQ ID NO: 1053009 - RNA, 19 nt, Homo sapiens
  misc_RNA (1)...(19): siRNA sense strand
gggcguugcuauuacuaua

SEQ ID NO: 1053010 - RNA, 19 nt, Homo sapiens
  misc_RNA (1)...(19): siRNA sense strand
ggaaagaacuuggaaaccu

SEQ ID NO: 1053011 - RNA, 19 nt, Homo sapiens
  misc_RNA (1)...(19): siRNA sense strand
caaauugccugagcuuuca

SEQ ID NO: 1053012 - RNA, 19 nt, Homo sapiens
  misc_RNA (1)...(19): siRNA sense strand
ugagauggcuucaaaggau

SEQ ID NO: 1053013 - RNA, 19 nt, Homo sapiens
  misc_RNA (1)...(19): siRNA sense strand
ugacagaagugggaagauu

SEQ ID NO: 1053014 - RNA, 19 nt, Homo sapiens
  misc_RNA (1)...(19): siRNA sense strand
agacauagcaccauuguau

SEQ ID NO: 1053015 - RNA, 19 nt, Homo sapiens
  misc_RNA (1)...(19): siRNA sense strand
ggaaagccaucgucaucug

SEQ ID NO: 1053016 - RNA, 19 nt, Homo sapiens
  misc_RNA (1)...(19): siRNA sense strand
gacagaagugggaagauua

SEQ ID NO: 1053017 - RNA, 19 nt, Homo sapiens
  misc_RNA (1)...(19): siRNA sense strand
gagaaugggaaacucauaa

SEQ ID NO: 1053018 - RNA, 19 nt, Homo sapiens
  misc_RNA (1)...(19): siRNA sense strand
gaagaacaugguuuggaua

SEQ ID NO: 1053019 - RNA, 19 nt, Homo sapiens
  misc_RNA (1)...(19): siRNA sense strand
gaaugggaauugccaaagu

SEQ ID NO: 1053020 - RNA, 19 nt, Homo sapiens
  misc_RNA (1)...(19): siRNA sense strand
caaguugguuuggcaguaa

SEQ ID NO: 1053021 - RNA, 19 nt, Homo sapiens
  misc_RNA (1)...(19): siRNA sense strand
caggacaaguguauauuga

SEQ ID NO: 1053022 - RNA, 19 nt, Homo sapiens
  misc_RNA (1)...(19): siRNA sense strand
acggaaaguuuaacaauga

SEQ ID NO: 1053023 - RNA, 19 nt, Homo sapiens
  misc_RNA (1)...(19): siRNA sense strand
gaagauuauuccaggacaa

SEQ ID NO: 1053024 - RNA, 19 nt, Homo sapiens
  misc_RNA (1)...(19): siRNA sense strand
gaacaaauugccugagcuu

SEQ ID NO: 1053025 - RNA, 19 nt, Homo sapiens
  misc_RNA (1)...(19): siRNA sense strand
gcagcaaagagaaauaauu

SEQ ID NO: 1053026 - RNA, 19 nt, Homo sapiens
  misc_RNA (1)...(19): siRNA sense strand
gguaauauagcaguucaua

SEQ ID NO: 1053027 - RNA, 19 nt, Homo sapiens
  misc_RNA (1)...(19): siRNA sense strand
ggaaguagcacaaguuggu

SEQ ID NO: 1053028 - RNA, 19 nt, Homo sapiens
  misc_RNA (1)...(19): siRNA sense strand
gcucucaugccaccuguua

SEQ ID NO: 1053029 - RNA, 19 nt, Homo sapiens
  misc_RNA (1)...(19): siRNA sense strand
ugaagaacaugguuuggau

SEQ ID NO: 1053030 - RNA, 19 nt, Homo sapiens
  misc_RNA (1)...(19): siRNA sense strand
gaucaagguagacaauauu

SEQ ID NO: 1053031 - RNA, 19 nt, Homo sapiens
  misc_RNA (1)...(19): siRNA sense strand
gaacgugggcauaccuuau

SEQ ID NO: 1053032 - RNA, 19 nt, Homo sapiens
  misc_RNA (1)...(19): siRNA sense strand
ugacucacauucuccuaaa

SEQ ID NO: 1053033 - RNA, 19 nt, Homo sapiens
  misc_RNA (1)...(19): siRNA sense strand
gccuggaccugacccauaa

SEQ ID NO: 1053034 - RNA, 19 nt, Homo sapiens
  misc_RNA (1)...(19): siRNA sense strand
ucaaggaacaggucuuauu

SEQ ID NO: 1053035 - RNA, 19 nt, Homo sapiens
  misc_RNA (1)...(19): siRNA sense strand
gggaagauauucaugucau

SEQ ID NO: 1053036 - RNA, 19 nt, Homo sapiens
  misc_RNA (1)...(19): siRNA sense strand
agaaacugaugaaggaauu

SEQ ID NO: 1053037 - RNA, 19 nt, Homo sapiens
  misc_RNA (1)...(19): siRNA sense strand
aguagaaacugaugaagga

SEQ ID NO: 1053038 - RNA, 19 nt, Homo sapiens
  misc_RNA (1)...(19): siRNA sense strand
guugcaggguucaucuuua

SEQ ID NO: 1053039 - RNA, 19 nt, Homo sapiens
  misc_RNA (1)...(19): siRNA sense strand
caaccacaccuccaaauca

SEQ ID NO: 1053040 - RNA, 19 nt, Homo sapiens
  misc_RNA (1)...(19): siRNA sense strand
cagaguauagcaauuguuu

SEQ ID NO: 1053041 - RNA, 19 nt, Homo sapiens
  misc_RNA (1)...(19): siRNA sense strand
gaagaggagauaccggauu

SEQ ID NO: 1053042 - RNA, 19 nt, Homo sapiens
  misc_RNA (1)...(19): siRNA sense strand
gguuuaaaguucuuaguag

SEQ ID NO: 1053043 - RNA, 19 nt, Homo sapiens
  misc_RNA (1)...(19): siRNA sense strand
ggaacagaacugcuaauuc

SEQ ID NO: 1053044 - RNA, 19 nt, Homo sapiens
  misc_RNA (1)...(19): siRNA sense strand
uccaaaggaucaagagaaa

SEQ ID NO: 1053045 - RNA, 19 nt, Homo sapiens
  misc_RNA (1)...(19): siRNA sense strand
guauuggacacuaaugaua

SEQ ID NO: 1053046 - RNA, 19 nt, Homo sapiens
  misc_RNA (1)...(19): siRNA sense strand
ggucagaagaguuggauga

SEQ ID NO: 1053047 - RNA, 19 nt, Homo sapiens
  misc_RNA (1)...(19): siRNA sense strand
ggagaaugggaaacucaua

SEQ ID NO: 1053048 - RNA, 19 nt, Homo sapiens
  misc_RNA (1)...(19): siRNA sense strand
aaugggaauugccaaagua

SEQ ID NO: 1053049 - RNA, 19 nt, Homo sapiens
  misc_RNA (1)...(19): siRNA sense strand
ucaaggaacagaacugcua

SEQ ID NO: 1053050 - RNA, 19 nt, Homo sapiens
  misc_RNA (1)...(19): siRNA sense strand
caaggaacaggucuuauuc

SEQ ID NO: 1053051 - RNA, 19 nt, Homo sapiens
  misc_RNA (1)...(19): siRNA sense strand
caaaguauaaugcuucauc

SEQ ID NO: 1053052 - RNA, 19 nt, Homo sapiens
  misc_RNA (1)...(19): siRNA sense strand
agacggaucucggucagaa

SEQ ID NO: 1053053 - RNA, 19 nt, Homo sapiens
  misc_RNA (1)...(19): siRNA sense strand
ugaucaagguagacaauau

SEQ ID NO: 1053054 - RNA, 19 nt, Homo sapiens
  misc_RNA (1)...(19): siRNA sense strand
uaacagagggacacaggaa

SEQ ID NO: 1053055 - RNA, 19 nt, Homo sapiens
  misc_RNA (1)...(19): siRNA sense strand
gaguuugcaucuucagaga

SEQ ID NO: 1053056 - RNA, 19 nt, Homo sapiens
  misc_RNA (1)...(19): siRNA sense strand
uuaaggaccuaaucagaca

SEQ ID NO: 1053057 - RNA, 19 nt, Homo sapiens
  misc_RNA (1)...(19): siRNA sense strand
caaggaaguagcacaaguu

SEQ ID NO: 1053058 - RNA, 19 nt, Homo sapiens
  misc_RNA (1)...(19): siRNA sense strand
guagcuggucugccaaaua

SEQ ID NO: 1053059 - RNA, 19 nt, Homo sapiens
  misc_RNA (1)...(19): siRNA sense strand
guaaaugggaagauauuca

SEQ ID NO: 1053060 - RNA, 19 nt, Homo sapiens
  misc_RNA (1)...(19): siRNA sense strand
gguuugcagucaaucauga

SEQ ID NO: 1053061 - RNA, 19 nt, Homo sapiens
  misc_RNA (1)...(19): siRNA sense strand
caaucucgcuaaucugugu

SEQ ID NO: 1053062 - RNA, 19 nt, Homo sapiens
  misc_RNA (1)...(19): siRNA sense strand
gcugcaagaaccaauagua

SEQ ID NO: 1053063 - RNA, 19 nt, Homo sapiens
  misc_RNA (1)...(19): siRNA sense strand
gccagauucuccugucuau

SEQ ID NO: 1053064 - RNA, 19 nt, Homo sapiens
  misc_RNA (1)...(19): siRNA sense strand
aaauuggacuugaaugaca

SEQ ID NO: 1053065 - RNA, 19 nt, Homo sapiens
  misc_RNA (1)...(19): siRNA sense strand
guauugaacauguugaaga

SEQ ID NO: 1053066 - RNA, 19 nt, Homo sapiens
  misc_RNA (1)...(19): siRNA sense strand
gcugaaaacucgucaagga

SEQ ID NO: 1053067 - RNA, 19 nt, Homo sapiens
  misc_RNA (1)...(19): siRNA sense strand
caggguucaucuuuacuuu

SEQ ID NO: 1053068 - RNA, 19 nt, Homo sapiens
  misc_RNA (1)...(19): siRNA sense strand
cgaaaauaaugcagaguuu

SEQ ID NO: 1053069 - RNA, 19 nt, Homo sapiens
  misc_RNA (1)...(19): siRNA sense strand
gcaagucaagccagaugaa

SEQ ID NO: 1053070 - RNA, 19 nt, Homo sapiens
  misc_RNA (1)...(19): siRNA sense strand
gaagcaaaggacagaaaga

SEQ ID NO: 1053071 - RNA, 19 nt, Homo sapiens
  misc_RNA (1)...(19): siRNA sense strand
ccagucagauagucagugu

SEQ ID NO: 1053072 - RNA, 19 nt, Homo sapiens
  misc_RNA (1)...(19): siRNA sense strand
ggacccaguuauaaucaag

SEQ ID NO: 1053073 - RNA, 19 nt, Homo sapiens
  misc_RNA (1)...(19): siRNA sense strand
agaaauuggacuugaauga

SEQ ID NO: 1053074 - RNA, 19 nt, Homo sapiens
  misc_RNA (1)...(19): siRNA sense strand
gaauuaccagaaccucuuu

SEQ ID NO: 1053075 - RNA, 19 nt, Homo sapiens
  misc_RNA (1)...(19): siRNA sense strand
ccagggaucuagugaauaa

SEQ ID NO: 1053076 - RNA, 19 nt, Homo sapiens
  misc_RNA (1)...(19): siRNA sense strand
ggagggaaaugaccaaaga

SEQ ID NO: 1053077 - RNA, 19 nt, Homo sapiens
  misc_RNA (1)...(19): siRNA sense strand
ggaaaugaccaaagaagaa

SEQ ID NO: 1053078 - RNA, 19 nt, Homo sapiens
  misc_RNA (1)...(19): siRNA sense strand
gagaugugauccugguaua

SEQ ID NO: 1053079 - RNA, 19 nt, Homo sapiens
  misc_RNA (1)...(19): siRNA sense strand
caagagcagugaccaguga

SEQ ID NO: 1053080 - RNA, 19 nt, Homo sapiens
  misc_RNA (1)...(19): siRNA sense strand
cugaugaucugcaauguaa

SEQ ID NO: 1053081 - RNA, 19 nt, Homo sapiens
  misc_RNA (1)...(19): siRNA sense strand
ccagagaacugccagaauc

SEQ ID NO: 1053082 - RNA, 19 nt, Homo sapiens
  misc_RNA (1)...(19): siRNA sense strand
gcacaacgccaucaaguuc

SEQ ID NO: 1053083 - RNA, 19 nt, Homo sapiens
  misc_RNA (1)...(19): siRNA sense strand
gauuauggauccaaaguca

SEQ ID NO: 1053084 - RNA, 19 nt, Homo sapiens
  misc_RNA (1)...(19): siRNA sense strand
gaagaucaguaauggagau

SEQ ID NO: 1053085 - RNA, 19 nt, Homo sapiens
  misc_RNA (1)...(19): siRNA sense strand
gaaaugaccaaagaagaaa

SEQ ID NO: 1053086 - RNA, 19 nt, Homo sapiens
  misc_RNA (1)...(19): siRNA sense strand
caacaccgccuaaugaaga

SEQ ID NO: 1053087 - RNA, 19 nt, Homo sapiens
  misc_RNA (1)...(19): siRNA sense strand
gcuagcagcucaggcaauu

SEQ ID NO: 1053088 - RNA, 19 nt, Homo sapiens
  misc_RNA (1)...(19): siRNA sense strand
ugaagcgucucccugagua

SEQ ID NO: 1053089 - RNA, 19 nt, Homo sapiens
  misc_RNA (1)...(19): siRNA sense strand
aaacauacaaguucuguga

SEQ ID NO: 1053090 - RNA, 19 nt, Homo sapiens
  misc_RNA (1)...(19): siRNA sense strand
gagacuggcucugcuguau

SEQ ID NO: 1053091 - RNA, 19 nt, Homo sapiens
  misc_RNA (1)...(19): siRNA sense strand
gguagggacagcacaguua

SEQ ID NO: 1053092 - RNA, 19 nt, Homo sapiens
  misc_RNA (1)...(19): siRNA sense strand
acacaacaccgccuaauga

SEQ ID NO: 1053093 - RNA, 19 nt, Homo sapiens
  misc_RNA (1)...(19): siRNA sense strand
agaaacagcagaagaagaa

SEQ ID NO: 1053094 - RNA, 19 nt, Homo sapiens
  misc_RNA (1)...(19): siRNA sense strand
caaagucagucucuucucu

SEQ ID NO: 1053095 - RNA, 19 nt, Homo sapiens
  misc_RNA (1)...(19): siRNA sense strand
ggaaggaaggcacacacua

SEQ ID NO: 1053096 - RNA, 19 nt, Homo sapiens
  misc_RNA (1)...(19): siRNA sense strand
caauuucacgcuuugcuua

SEQ ID NO: 1053097 - RNA, 19 nt, Homo sapiens
  misc_RNA (1)...(19): siRNA sense strand
acaaggaaaucaccagugu

SEQ ID NO: 1053098 - RNA, 19 nt, Homo sapiens
  misc_RNA (1)...(19): siRNA sense strand
gaugaucccuugcaguucu

SEQ ID NO: 1053099 - RNA, 19 nt, Homo sapiens
  misc_RNA (1)...(19): siRNA sense strand
gaucaguaauggagaugug

SEQ ID NO: 1053100 - RNA, 19 nt, Homo sapiens
  misc_RNA (1)...(19): siRNA sense strand
gaacuucgagcagccauug

SEQ ID NO: 1053101 - RNA, 19 nt, Homo sapiens
  misc_RNA (1)...(19): siRNA sense strand
ggaaggcacacacuacguu

SEQ ID NO: 1053102 - RNA, 19 nt, Homo sapiens
  misc_RNA (1)...(19): siRNA sense strand
gaagaaacggaaggaagaa

SEQ ID NO: 1053103 - RNA, 19 nt, Homo sapiens
  misc_RNA (1)...(19): siRNA sense strand
gaaggaaggcacacacuac

SEQ ID NO: 1053104 - RNA, 19 nt, Homo sapiens
  misc_RNA (1)...(19): siRNA sense strand
ggaagaggaggccaaguca

SEQ ID NO: 1053105 - RNA, 19 nt, Homo sapiens
  misc_RNA (1)...(19): siRNA sense strand
guugaugaccuacuucuga

SEQ ID NO: 1053106 - RNA, 19 nt, Homo sapiens
  misc_RNA (1)...(19): siRNA sense strand
gaaaagaaacagcagaaga

SEQ ID NO: 1053107 - RNA, 19 nt, Homo sapiens
  misc_RNA (1)...(19): siRNA sense strand
caacagguuccuacacgaa

SEQ ID NO: 1053108 - RNA, 19 nt, Homo sapiens
  misc_RNA (1)...(19): siRNA sense strand
gccaucaaguuccuuaaca

SEQ ID NO: 1053109 - RNA, 19 nt, Homo sapiens
  misc_RNA (1)...(19): siRNA sense strand
ccaucaaguuccuuaacaa

SEQ ID NO: 1053110 - RNA, 19 nt, Homo sapiens
  misc_RNA (1)...(19): siRNA sense strand
gggaaaugaccaaagaaga

SEQ ID NO: 1053111 - RNA, 19 nt, Homo sapiens
  misc_RNA (1)...(19): siRNA sense strand
gcaguucuguaccuguugu

SEQ ID NO: 1053112 - RNA, 19 nt, Homo sapiens
  misc_RNA (1)...(19): siRNA sense strand
gaugugauccugguauaug

SEQ ID NO: 1053113 - RNA, 19 nt, Homo sapiens
  misc_RNA (1)...(19): siRNA sense strand
ucaggcaauuucacgcuuu

SEQ ID NO: 1053114 - RNA, 19 nt, Homo sapiens
  misc_RNA (1)...(19): siRNA sense strand
agaagaaacggaaggaaga

SEQ ID NO: 1053115 - RNA, 19 nt, Homo sapiens
  misc_RNA (1)...(19): siRNA sense strand
gcagacugaugccuuuguc

SEQ ID NO: 1053116 - RNA, 19 nt, Homo sapiens
  misc_RNA (1)...(19): siRNA sense strand
gcaagagaagauugugcua

SEQ ID NO: 1053117 - RNA, 19 nt, Homo sapiens
  misc_RNA (1)...(19): siRNA sense strand
gaagaagaaacggaaggaa

SEQ ID NO: 1053118 - RNA, 19 nt, Homo sapiens
  misc_RNA (1)...(19): siRNA sense strand
ucucugacccaguuuauga

SEQ ID NO: 1053119 - RNA, 19 nt, Homo sapiens
  misc_RNA (1)...(19): siRNA sense strand
gugcugguuugcugugaaa

SEQ ID NO: 1053120 - RNA, 19 nt, Homo sapiens
  misc_RNA (1)...(19): siRNA sense strand
ucucugguaucacgaauuc

SEQ ID NO: 1053121 - RNA, 19 nt, Homo sapiens
  misc_RNA (1)...(19): siRNA sense strand
ggagaugugauccugguau

SEQ ID NO: 1053122 - RNA, 19 nt, Homo sapiens
  misc_RNA (1)...(19): siRNA sense strand
gauucaggauuacacaaca

SEQ ID NO: 1053123 - RNA, 19 nt, Homo sapiens
  misc_RNA (1)...(19): siRNA sense strand
agcaggugauucaggauua

SEQ ID NO: 1053124 - RNA, 19 nt, Homo sapiens
  misc_RNA (1)...(19): siRNA sense strand
gcacacacuacguucucua

SEQ ID NO: 1053125 - RNA, 19 nt, Homo sapiens
  misc_RNA (1)...(19): siRNA sense strand
gcugugaaacauacaaguu

SEQ ID NO: 1053126 - RNA, 19 nt, Homo sapiens
  misc_RNA (1)...(19): siRNA sense strand
gauccaaagucagucucuu

SEQ ID NO: 1053127 - RNA, 19 nt, Homo sapiens
  misc_RNA (1)...(19): siRNA sense strand
gggaagaggaggccaaguc

SEQ ID NO: 1053128 - RNA, 19 nt, Homo sapiens
  misc_RNA (1)...(19): siRNA sense strand
gacuggcucugcuguaucu

SEQ ID NO: 1053129 - RNA, 19 nt, Homo sapiens
  misc_RNA (1)...(19): siRNA sense strand
cugaugccuuugucucuaa

SEQ ID NO: 1053130 - RNA, 19 nt, Homo sapiens
  misc_RNA (1)...(19): siRNA sense strand
ucccagagguuuccaaggu

SEQ ID NO: 1053131 - RNA, 19 nt, Homo sapiens
  misc_RNA (1)...(19): siRNA sense strand
gugagcgugugcagacuga

SEQ ID NO: 1053132 - RNA, 19 nt, Homo sapiens
  misc_RNA (1)...(19): siRNA sense strand
ugagcuagaugacccugau

SEQ ID NO: 1053133 - RNA, 19 nt, Homo sapiens
  misc_RNA (1)...(19): siRNA sense strand
gggagcucaugcacucuug

SEQ ID NO: 1053134 - RNA, 19 nt, Homo sapiens
  misc_RNA (1)...(19): siRNA sense strand
aagaggaggccaagucaga

SEQ ID NO: 1053135 - RNA, 19 nt, Homo sapiens
  misc_RNA (1)...(19): siRNA sense strand
ugugcagacugaugccuuu

SEQ ID NO: 1053136 - RNA, 19 nt, Homo sapiens
  misc_RNA (1)...(19): siRNA sense strand
gaaacagcagaagaagaaa

SEQ ID NO: 1053137 - RNA, 19 nt, Homo sapiens
  misc_RNA (1)...(19): siRNA sense strand
uaccagaagaucaguaaug

SEQ ID NO: 1053138 - RNA, 19 nt, Homo sapiens
  misc_RNA (1)...(19): siRNA sense strand
cuccagggaucuagugaau

SEQ ID NO: 1053139 - RNA, 19 nt, Homo sapiens
  misc_RNA (1)...(19): siRNA sense strand
aaaagaaacagcagaagaa

SEQ ID NO: 1053140 - RNA, 19 nt, Homo sapiens
  misc_RNA (1)...(19): siRNA sense strand
gcaggugauucaggauuac

SEQ ID NO: 1053141 - RNA, 19 nt, Homo sapiens
  misc_RNA (1)...(19): siRNA sense strand
caggcaauuucacgcuuug

SEQ ID NO: 1053142 - RNA, 19 nt, Homo sapiens
  misc_RNA (1)...(19): siRNA sense strand
uagcagcucaggcaauuuc

SEQ ID NO: 1053143 - RNA, 19 nt, Homo sapiens
  misc_RNA (1)...(19): siRNA sense strand
aaacuaaaacccuacauga

SEQ ID NO: 1053144 - RNA, 19 nt, Homo sapiens
  misc_RNA (1)...(19): siRNA sense strand
cacaacaccgccuaaugaa

SEQ ID NO: 1053145 - RNA, 19 nt, Homo sapiens
  misc_RNA (1)...(19): siRNA sense strand
gagggaaaugaccaaagaa

SEQ ID NO: 1053146 - RNA, 19 nt, Homo sapiens
  misc_RNA (1)...(19): siRNA sense strand
ucugagaaggcuuguuaaa

SEQ ID NO: 1053147 - RNA, 19 nt, Homo sapiens
  misc_RNA (1)...(19): siRNA sense strand
gagcgugugcagacugaug

SEQ ID NO: 1053148 - RNA, 19 nt, Homo sapiens
  misc_RNA (1)...(19): siRNA sense strand
cagcaggugauucaggauu

SEQ ID NO: 1053149 - RNA, 19 nt, Homo sapiens
  misc_RNA (1)...(19): siRNA sense strand
gggaucuagugaauaaacu

SEQ ID NO: 1053150 - RNA, 19 nt, Homo sapiens
  misc_RNA (1)...(19): siRNA sense strand
acgcuuugcuuaccagaag

SEQ ID NO: 1053151 - RNA, 19 nt, Homo sapiens
  misc_RNA (1)...(19): siRNA sense strand
uugcaguucuguaccuguu

SEQ ID NO: 1053152 - RNA, 19 nt, Homo sapiens
  misc_RNA (1)...(19): siRNA sense strand
ccugaugaucugcaaugua

SEQ ID NO: 1053153 - RNA, 19 nt, Homo sapiens
  misc_RNA (1)...(19): siRNA sense strand
caucaaguuccuuaacaag

SEQ ID NO: 1053154 - RNA, 19 nt, Homo sapiens
  misc_RNA (1)...(19): siRNA sense strand
uucuguaccuguuguucua

SEQ ID NO: 1053155 - RNA, 19 nt, Homo sapiens
  misc_RNA (1)...(19): siRNA sense strand
acugaugccuuugucucua

SEQ ID NO: 1053156 - RNA, 19 nt, Homo sapiens
  misc_RNA (1)...(19): siRNA sense strand
gcucgagcccauaauguac

SEQ ID NO: 1053157 - RNA, 19 nt, Homo sapiens
  misc_RNA (1)...(19): siRNA sense strand
guagggacagcacaguuag

SEQ ID NO: 1053158 - RNA, 19 nt, Homo sapiens
  misc_RNA (1)...(19): siRNA sense strand
gguaugugcaagagaagau

SEQ ID NO: 1053159 - RNA, 19 nt, Homo sapiens
  misc_RNA (1)...(19): siRNA sense strand
ugugaaacauacaaguucu

SEQ ID NO: 1053160 - RNA, 19 nt, Homo sapiens
  misc_RNA (1)...(19): siRNA sense strand
gaacucuccagggaucuag

SEQ ID NO: 1053161 - RNA, 19 nt, Homo sapiens
  misc_RNA (1)...(19): siRNA sense strand
ugacccugaugaucugcaa

SEQ ID NO: 1053162 - RNA, 19 nt, Homo sapiens
  misc_RNA (1)...(19): siRNA sense strand
gcuagaugacccugaugau

SEQ ID NO: 1053163 - RNA, 19 nt, Homo sapiens
  misc_RNA (1)...(19): siRNA sense strand
cuuugucucuaaugagcua

SEQ ID NO: 1053164 - RNA, 19 nt, Homo sapiens
  misc_RNA (1)...(19): siRNA sense strand
ugaaacauacaaguucugu

SEQ ID NO: 1053165 - RNA, 19 nt, Homo sapiens
  misc_RNA (1)...(19): siRNA sense strand
accagaagaucaguaaugg

SEQ ID NO: 1053166 - RNA, 19 nt, Homo sapiens
  misc_RNA (1)...(19): siRNA sense strand
gcaggaagaugucgaguuu

SEQ ID NO: 1053167 - RNA, 19 nt, Homo sapiens
  misc_RNA (1)...(19): siRNA sense strand
ucaaguggcugaacugaau

SEQ ID NO: 1053168 - RNA, 19 nt, Homo sapiens
  misc_RNA (1)...(19): siRNA sense strand
gaagaugucgaguuucaaa

SEQ ID NO: 1053169 - RNA, 19 nt, Homo sapiens
  misc_RNA (1)...(19): siRNA sense strand
uggcugaacugaaugauga

SEQ ID NO: 1053170 - RNA, 19 nt, Homo sapiens
  misc_RNA (1)...(19): siRNA sense strand
ucaaacaccuacacauuca

SEQ ID NO: 1053171 - RNA, 19 nt, Homo sapiens
  misc_RNA (1)...(19): siRNA sense strand
caaaauaguugcugaaaca

SEQ ID NO: 1053172 - RNA, 19 nt, Homo sapiens
  misc_RNA (1)...(19): siRNA sense strand
gaaauacaagagacucaaa

SEQ ID NO: 1053173 - RNA, 19 nt, Homo sapiens
  misc_RNA (1)...(19): siRNA sense strand
gggccaauccugucgcuua

SEQ ID NO: 1053174 - RNA, 19 nt, Homo sapiens
  misc_RNA (1)...(19): siRNA sense strand
ccaccuaccuaaccuacuu

SEQ ID NO: 1053175 - RNA, 19 nt, Homo sapiens
  misc_RNA (1)...(19): siRNA sense strand
gaaacgguauaaucggaau

SEQ ID NO: 1053176 - RNA, 19 nt, Homo sapiens
  misc_RNA (1)...(19): siRNA sense strand
gaacugaaugaugaugaua

SEQ ID NO: 1053177 - RNA, 19 nt, Homo sapiens
  misc_RNA (1)...(19): siRNA sense strand
gaaagauuacucaggaaga

SEQ ID NO: 1053178 - RNA, 19 nt, Homo sapiens
  misc_RNA (1)...(19): siRNA sense strand
cugaaacaaugaacaacua

SEQ ID NO: 1053179 - RNA, 19 nt, Homo sapiens
  misc_RNA (1)...(19): siRNA sense strand
ggccaauccugucgcuuaa

SEQ ID NO: 1053180 - RNA, 19 nt, Homo sapiens
  misc_RNA (1)...(19): siRNA sense strand
ugacgaaacccagaucuuu

SEQ ID NO: 1053181 - RNA, 19 nt, Homo sapiens
  misc_RNA (1)...(19): siRNA sense strand
cauuuaagcagccaucaua

SEQ ID NO: 1053182 - RNA, 19 nt, Homo sapiens
  misc_RNA (1)...(19): siRNA sense strand
aaagauuacucaggaagaa

SEQ ID NO: 1053183 - RNA, 19 nt, Homo sapiens
  misc_RNA (1)...(19): siRNA sense strand
aauaguugcugaaacaaug

SEQ ID NO: 1053184 - RNA, 19 nt, Homo sapiens
  misc_RNA (1)...(19): siRNA sense strand
cagcccauauccuguguaa

SEQ ID NO: 1053185 - RNA, 19 nt, Homo sapiens
  misc_RNA (1)...(19): siRNA sense strand
cgaagaagcagcaaucagu

SEQ ID NO: 1053186 - RNA, 19 nt, Homo sapiens
  misc_RNA (1)...(19): siRNA sense strand
gcuaugcauuuguggaguu

SEQ ID NO: 1053187 - RNA, 19 nt, Homo sapiens
  misc_RNA (1)...(19): siRNA sense strand
aaacccagaucuuuucaua

SEQ ID NO: 1053188 - RNA, 19 nt, Homo sapiens
  misc_RNA (1)...(19): siRNA sense strand
ccaauccugucgcuuaauc

SEQ ID NO: 1053189 - RNA, 19 nt, Homo sapiens
  misc_RNA (1)...(19): siRNA sense strand
ucauauuucucccaguuug

SEQ ID NO: 1053190 - RNA, 19 nt, Homo sapiens
  misc_RNA (1)...(19): siRNA sense strand
gauggaggagcgauuuaaa

SEQ ID NO: 1053191 - RNA, 19 nt, Homo sapiens
  misc_RNA (1)...(19): siRNA sense strand
gcagccaucauaucaauca

SEQ ID NO: 1053192 - RNA, 19 nt, Homo sapiens
  misc_RNA (1)...(19): siRNA sense strand
aggaagaugucgaguuuca

SEQ ID NO: 1053193 - RNA, 19 nt, Homo sapiens
  misc_RNA (1)...(19): siRNA sense strand
aagcagccaucauaucaau

SEQ ID NO: 1053194 - RNA, 19 nt, Homo sapiens
  misc_RNA (1)...(19): siRNA sense strand
caagagacucaaacaccua

SEQ ID NO: 1053195 - RNA, 19 nt, Homo sapiens
  misc_RNA (1)...(19): siRNA sense strand
ggauggaggagcgauuuaa

SEQ ID NO: 1053196 - RNA, 19 nt, Homo sapiens
  misc_RNA (1)...(19): siRNA sense strand
uuaagcagccaucauauca

SEQ ID NO: 1053197 - RNA, 19 nt, Homo sapiens
  misc_RNA (1)...(19): siRNA sense strand
caucauaucaaucagugaa

SEQ ID NO: 1053198 - RNA, 19 nt, Homo sapiens
  misc_RNA (1)...(19): siRNA sense strand
ucaggaagaaauuagcuaa

SEQ ID NO: 1053199 - RNA, 19 nt, Homo sapiens
  misc_RNA (1)...(19): siRNA sense strand
gcccauauccuguguaaaa

SEQ ID NO: 1053200 - RNA, 19 nt, Homo sapiens
  misc_RNA (1)...(19): siRNA sense strand
uuucauauuucucccaguu

SEQ ID NO: 1053201 - RNA, 19 nt, Homo sapiens
  misc_RNA (1)...(19): siRNA sense strand
ucagugaaacgguauaauc

SEQ ID NO: 1053202 - RNA, 19 nt, Homo sapiens
  misc_RNA (1)...(19): siRNA sense strand
ugaacugaaugaugaugau

SEQ ID NO: 1053203 - RNA, 19 nt, Homo sapiens
  misc_RNA (1)...(19): siRNA sense strand
aaucggacacuaacacaaa

SEQ ID NO: 1053204 - RNA, 19 nt, Homo sapiens
  misc_RNA (1)...(19): siRNA sense strand
cuaccuguuuggugaaaga

SEQ ID NO: 1053205 - RNA, 19 nt, Homo sapiens
  misc_RNA (1)...(19): siRNA sense strand
acucaaacaccuacacauu

SEQ ID NO: 1053206 - RNA, 19 nt, Homo sapiens
  misc_RNA (1)...(19): siRNA sense strand
ggaauugacuaugauuuuc

SEQ ID NO: 1053207 - RNA, 19 nt, Homo sapiens
  misc_RNA (1)...(19): siRNA sense strand
ggaaucggacacuaacaca

SEQ ID NO: 1053208 - RNA, 19 nt, Homo sapiens
  misc_RNA (1)...(19): siRNA sense strand
aaucggaaucggacacuaa

SEQ ID NO: 1053209 - RNA, 19 nt, Homo sapiens
  misc_RNA (1)...(19): siRNA sense strand
aagaaagauuacucaggaa

SEQ ID NO: 1053210 - RNA, 19 nt, Homo sapiens
  misc_RNA (1)...(19): siRNA sense strand
gaaguaaaaggacuggaaa

SEQ ID NO: 1053211 - RNA, 19 nt, Homo sapiens
  misc_RNA (1)...(19): siRNA sense strand
cagguucgcaagcgcauaa

SEQ ID NO: 1053212 - RNA, 19 nt, Homo sapiens
  misc_RNA (1)...(19): siRNA sense strand
gaaucggacacuaacacaa

SEQ ID NO: 1053213 - RNA, 19 nt, Homo sapiens
  misc_RNA (1)...(19): siRNA sense strand
gguucaggcuguccagaag

SEQ ID NO: 1053214 - RNA, 19 nt, Homo sapiens
  misc_RNA (1)...(19): siRNA sense strand
acccagaucuuuucauauu

SEQ ID NO: 1053215 - RNA, 19 nt, Homo sapiens
  misc_RNA (1)...(19): siRNA sense strand
ugaggauguugccaaaaua

SEQ ID NO: 1053216 - RNA, 19 nt, Homo sapiens
  misc_RNA (1)...(19): siRNA sense strand
uaaaaggacuggaaauagc

SEQ ID NO: 1053217 - RNA, 19 nt, Homo sapiens
  misc_RNA (1)...(19): siRNA sense strand
uucaggcuguccagaagua

SEQ ID NO: 1053218 - RNA, 19 nt, Homo sapiens
  misc_RNA (1)...(19): siRNA sense strand
agacgaagaagcagcaauc

SEQ ID NO: 1053219 - RNA, 19 nt, Homo sapiens
  misc_RNA (1)...(19): siRNA sense strand
caggaagaaauuagcuaaa

SEQ ID NO: 1053220 - RNA, 19 nt, Homo sapiens
  misc_RNA (1)...(19): siRNA sense strand
caacuaccuguuuggugaa

SEQ ID NO: 1053221 - RNA, 19 nt, Homo sapiens
  misc_RNA (1)...(19): siRNA sense strand
aaacaagaacaacuuacuc

SEQ ID NO: 1053222 - RNA, 19 nt, Homo sapiens
  misc_RNA (1)...(19): siRNA sense strand
cagaaaacggaaaguauuu

SEQ ID NO: 1053223 - RNA, 19 nt, Homo sapiens
  misc_RNA (1)...(19): siRNA sense strand
uaaccuacuugacgaaacc

SEQ ID NO: 1053224 - RNA, 19 nt, Homo sapiens
  misc_RNA (1)...(19): siRNA sense strand
ccagaucuuuucauauuuc

SEQ ID NO: 1053225 - RNA, 19 nt, Homo sapiens
  misc_RNA (1)...(19): siRNA sense strand
gucugaggauguugccaaa

SEQ ID NO: 1053226 - RNA, 19 nt, Homo sapiens
  misc_RNA (1)...(19): siRNA sense strand
cugagaagacuguggauag

SEQ ID NO: 1053227 - RNA, 19 nt, Homo sapiens
  misc_RNA (1)...(19): siRNA sense strand
guaaaaggacuggaaauag

SEQ ID NO: 1053228 - RNA, 19 nt, Homo sapiens
  misc_RNA (1)...(19): siRNA sense strand
aagaagcagcaaucaguga

SEQ ID NO: 1053229 - RNA, 19 nt, Homo sapiens
  misc_RNA (1)...(19): siRNA sense strand
gcgcauaacccagcgaaaa

SEQ ID NO: 1053230 - RNA, 19 nt, Homo sapiens
  misc_RNA (1)...(19): siRNA sense strand
gauuacucaggaagaaauu

SEQ ID NO: 1053231 - RNA, 19 nt, Homo sapiens
  misc_RNA (1)...(19): siRNA sense strand
uaugugcgccaccuaccua

SEQ ID NO: 1053232 - RNA, 19 nt, Homo sapiens
  misc_RNA (1)...(19): siRNA sense strand
guuugagucugaggauguu

SEQ ID NO: 1053233 - RNA, 19 nt, Homo sapiens
  misc_RNA (1)...(19): siRNA sense strand
ggaguuugagucugaggau

SEQ ID NO: 1053234 - RNA, 19 nt, Homo sapiens
  misc_RNA (1)...(19): siRNA sense strand
uuguggaguuugagucuga

SEQ ID NO: 1053235 - RNA, 19 nt, Homo sapiens
  misc_RNA (1)...(19): siRNA sense strand
augcauuuguggaguuuga

SEQ ID NO: 1053236 - RNA, 19 nt, Homo sapiens
  misc_RNA (1)...(19): siRNA sense strand
cuaugcauuuguggaguuu

SEQ ID NO: 1053237 - RNA, 19 nt, Homo sapiens
  misc_RNA (1)...(19): siRNA sense strand
gcugaaacaaugaacaacu

SEQ ID NO: 1053238 - RNA, 19 nt, Homo sapiens
  misc_RNA (1)...(19): siRNA sense strand
gacgaaacccagaucuuuu

SEQ ID NO: 1053239 - RNA, 19 nt, Homo sapiens
  misc_RNA (1)...(19): siRNA sense strand
ggaagaugucgaguuucaa

SEQ ID NO: 1053240 - RNA, 19 nt, Homo sapiens
  misc_RNA (1)...(19): siRNA sense strand
cauauccuguguaaaagaa

SEQ ID NO: 1053241 - RNA, 19 nt, Homo sapiens
  misc_RNA (1)...(19): siRNA sense strand
ugagaagacuguggauagc

SEQ ID NO: 1053242 - RNA, 19 nt, Homo sapiens
  misc_RNA (1)...(19): siRNA sense strand
uaaucggaaucggacacua

SEQ ID NO: 1053243 - RNA, 19 nt, Homo sapiens
  misc_RNA (1)...(19): siRNA sense strand
uaagcagccaucauaucaa

SEQ ID NO: 1053244 - RNA, 19 nt, Homo sapiens
  misc_RNA (1)...(19): siRNA sense strand
acaccaguuuguacaccaa

SEQ ID NO: 1053245 - RNA, 19 nt, Homo sapiens
  misc_RNA (1)...(19): siRNA sense strand
cggauggaggagcgauuua

SEQ ID NO: 1053246 - RNA, 19 nt, Homo sapiens
  misc_RNA (1)...(19): siRNA sense strand
uuaauccgcaggaagaugu

SEQ ID NO: 1053247 - RNA, 19 nt, Homo sapiens
  misc_RNA (1)...(19): siRNA sense strand
cucaaacaccuacacauuc

SEQ ID NO: 1053248 - RNA, 19 nt, Homo sapiens
  misc_RNA (1)...(19): siRNA sense strand
gaagacuuaugcucuaauu

SEQ ID NO: 1053249 - RNA, 19 nt, Homo sapiens
  misc_RNA (1)...(19): siRNA sense strand
caaagauaguaaaggcuua

SEQ ID NO: 1053250 - RNA, 19 nt, Homo sapiens
  misc_RNA (1)...(19): siRNA sense strand
gauaguaaaggcuuagaaa

SEQ ID NO: 1053251 - RNA, 19 nt, Homo sapiens
  misc_RNA (1)...(19): siRNA sense strand
aaagauggcuguuguaucc

SEQ ID NO: 1053252 - RNA, 19 nt, Homo sapiens
  misc_RNA (1)...(19): siRNA sense strand
gauggcuguuguauccuua

SEQ ID NO: 1053253 - RNA, 19 nt, Homo sapiens
  misc_RNA (1)...(19): siRNA sense strand
agacuuaugcucuaauuug

SEQ ID NO: 1053254 - RNA, 19 nt, Homo sapiens
  misc_RNA (1)...(19): siRNA sense strand
gcuguuguauccuuauugu

SEQ ID NO: 1053255 - RNA, 19 nt, Homo sapiens
  misc_RNA (1)...(19): siRNA sense strand
aaggaagacuuaugcucua

SEQ ID NO: 1053256 - RNA, 19 nt, Homo sapiens
  misc_RNA (1)...(19): siRNA sense strand
ggacauuuaaggaagacuu

SEQ ID NO: 1053257 - RNA, 19 nt, Homo sapiens
  misc_RNA (1)...(19): siRNA sense strand
cuuaugcucuaauuuggaa

SEQ ID NO: 1053258 - RNA, 19 nt, Homo sapiens
  misc_RNA (1)...(19): siRNA sense strand
gacuuaugcucuaauuugg

SEQ ID NO: 1053259 - RNA, 19 nt, Homo sapiens
  misc_RNA (1)...(19): siRNA sense strand
cuaggacauuuaaggaaga

SEQ ID NO: 1053260 - RNA, 19 nt, Homo sapiens
  misc_RNA (1)...(19): siRNA sense strand
acacuaggacauuuaagga

SEQ ID NO: 1053261 - RNA, 19 nt, Homo sapiens
  misc_RNA (1)...(19): siRNA sense strand
aggaagacuuaugcucuaa

SEQ ID NO: 1053262 - RNA, 19 nt, Homo sapiens
  misc_RNA (1)...(19): siRNA sense strand
ggaagacuuaugcucuaau

SEQ ID NO: 1053263 - RNA, 19 nt, Homo sapiens
  misc_RNA (1)...(19): siRNA sense strand
uguuguauccuuauuguca

SEQ ID NO: 1053264 - RNA, 19 nt, Homo sapiens
  misc_RNA (1)...(19): siRNA sense strand
uucagacccuggaaggaaa

SEQ ID NO: 1053265 - RNA, 19 nt, Homo sapiens
  misc_RNA (1)...(19): siRNA sense strand
uauccuuauugucacacua

SEQ ID NO: 1053266 - RNA, 19 nt, Homo sapiens
  misc_RNA (1)...(19): siRNA sense strand
agauggcuguuguauccuu

SEQ ID NO: 1053267 - RNA, 19 nt, Homo sapiens
  misc_RNA (1)...(19): siRNA sense strand
uggcuguuguauccuuauu

SEQ ID NO: 1053268 - RNA, 19 nt, Homo sapiens
  misc_RNA (1)...(19): siRNA sense strand
gcuggaagcucccuauaaa

SEQ ID NO: 1053269 - RNA, 19 nt, Homo sapiens
  misc_RNA (1)...(19): siRNA sense strand
gaucggaacucacgucguu

SEQ ID NO: 1053270 - RNA, 19 nt, Homo sapiens
  misc_RNA (1)...(19): siRNA sense strand
caacaaaggaaagaaguua

SEQ ID NO: 1053271 - RNA, 19 nt, Homo sapiens
  misc_RNA (1)...(19): siRNA sense strand
caauaucacugaagacaug

SEQ ID NO: 1053272 - RNA, 19 nt, Homo sapiens
  misc_RNA (1)...(19): siRNA sense strand
gggagugccuaucauugua

SEQ ID NO: 1053273 - RNA, 19 nt, Homo sapiens
  misc_RNA (1)...(19): siRNA sense strand
uaagaguccucauuucaga

SEQ ID NO: 1053274 - RNA, 19 nt, Homo sapiens
  misc_RNA (1)...(19): siRNA sense strand
gugaggaucgugugcauua

SEQ ID NO: 1053275 - RNA, 19 nt, Homo sapiens
  misc_RNA (1)...(19): siRNA sense strand
gauaauauuguccugauga

SEQ ID NO: 1053276 - RNA, 19 nt, Homo sapiens
  misc_RNA (1)...(19): siRNA sense strand
ucagggagccaguugauaa

SEQ ID NO: 1053277 - RNA, 19 nt, Homo sapiens
  misc_RNA (1)...(19): siRNA sense strand
cgguauagacggagaaaua

SEQ ID NO: 1053278 - RNA, 19 nt, Homo sapiens
  misc_RNA (1)...(19): siRNA sense strand
gcucuaaagguuaugguuu

SEQ ID NO: 1053279 - RNA, 19 nt, Homo sapiens
  misc_RNA (1)...(19): siRNA sense strand
gaaccuugccucccagugu

SEQ ID NO: 1053280 - RNA, 19 nt, Homo sapiens
  misc_RNA (1)...(19): siRNA sense strand
gcugcugccuugcaacuga

SEQ ID NO: 1053281 - RNA, 19 nt, Homo sapiens
  misc_RNA (1)...(19): siRNA sense strand
uaaagguuaugguuucauc

SEQ ID NO: 1053282 - RNA, 19 nt, Homo sapiens
  misc_RNA (1)...(19): siRNA sense strand
gcaacaaaggaaagaaguu

SEQ ID NO: 1053283 - RNA, 19 nt, Homo sapiens
  misc_RNA (1)...(19): siRNA sense strand
acaguaagaguccucauuu

SEQ ID NO: 1053284 - RNA, 19 nt, Homo sapiens
  misc_RNA (1)...(19): siRNA sense strand
gaugaaggacucagauaca

SEQ ID NO: 1053285 - RNA, 19 nt, Homo sapiens
  misc_RNA (1)...(19): siRNA sense strand
gauacaggccgcucuaaag

SEQ ID NO: 1053286 - RNA, 19 nt, Homo sapiens
  misc_RNA (1)...(19): siRNA sense strand
gaagaggaugagcaacaaa

SEQ ID NO: 1053287 - RNA, 19 nt, Homo sapiens
  misc_RNA (1)...(19): siRNA sense strand
acaggccgcucuaaagguu

SEQ ID NO: 1053288 - RNA, 19 nt, Homo sapiens
  misc_RNA (1)...(19): siRNA sense strand
agaagaggaugagcaacaa

SEQ ID NO: 1053289 - RNA, 19 nt, Homo sapiens
  misc_RNA (1)...(19): siRNA sense strand
ccacuugccacugguuaua

SEQ ID NO: 1053290 - RNA, 19 nt, Homo sapiens
  misc_RNA (1)...(19): siRNA sense strand
gguagugagucgcgaaguc

SEQ ID NO: 1053291 - RNA, 19 nt, Homo sapiens
  misc_RNA (1)...(19): siRNA sense strand
ucccugcacuucaauauca

SEQ ID NO: 1053292 - RNA, 19 nt, Homo sapiens
  misc_RNA (1)...(19): siRNA sense strand
gaccaaugcgccucuaugu

SEQ ID NO: 1053293 - RNA, 19 nt, Homo sapiens
  misc_RNA (1)...(19): siRNA sense strand
aggcaagguucgcgaugua

SEQ ID NO: 1053294 - RNA, 19 nt, Homo sapiens
  misc_RNA (1)...(19): siRNA sense strand
ggagccaguugauaaucug

SEQ ID NO: 1053295 - RNA, 19 nt, Homo sapiens
  misc_RNA (1)...(19): siRNA sense strand
guuaugguuucaucacguu

SEQ ID NO: 1053296 - RNA, 19 nt, Homo sapiens
  misc_RNA (1)...(19): siRNA sense strand
ggaccaaugcgccucuaug

SEQ ID NO: 1053297 - RNA, 19 nt, Homo sapiens
  misc_RNA (1)...(19): siRNA sense strand
caguaagaguccucauuuc

SEQ ID NO: 1053298 - RNA, 19 nt, Homo sapiens
  misc_RNA (1)...(19): siRNA sense strand
uuauagauauggacacagu

SEQ ID NO: 1053299 - RNA, 19 nt, Homo sapiens
  misc_RNA (1)...(19): siRNA sense strand
cgugaugcccgcacaguuu

SEQ ID NO: 1053300 - RNA, 19 nt, Homo sapiens
  misc_RNA (1)...(19): siRNA sense strand
gggagccaguugauaaucu

SEQ ID NO: 1053301 - RNA, 19 nt, Homo sapiens
  misc_RNA (1)...(19): siRNA sense strand
gagacaagcaaucguaguc

SEQ ID NO: 1053302 - RNA, 19 nt, Homo sapiens
  misc_RNA (1)...(19): siRNA sense strand
gguuauagauauggacaca

SEQ ID NO: 1053303 - RNA, 19 nt, Homo sapiens
  misc_RNA (1)...(19): siRNA sense strand
ucuuugagcccuuugguaa

SEQ ID NO: 1053304 - RNA, 19 nt, Homo sapiens
  misc_RNA (1)...(19): siRNA sense strand
cagcaacaguggcaaugag

SEQ ID NO: 1053305 - RNA, 19 nt, Homo sapiens
  misc_RNA (1)...(19): siRNA sense strand
uacguggaauucugugaaa

SEQ ID NO: 1053306 - RNA, 19 nt, Homo sapiens
  misc_RNA (1)...(19): siRNA sense strand
gagcaacaaaggaaagaag

SEQ ID NO: 1053307 - RNA, 19 nt, Homo sapiens
  misc_RNA (1)...(19): siRNA sense strand
ggaccaucgucgugaggau

SEQ ID NO: 1053308 - RNA, 19 nt, Homo sapiens
  misc_RNA (1)...(19): siRNA sense strand
gcacagacaucacuuuucc

SEQ ID NO: 1053309 - RNA, 19 nt, Homo sapiens
  misc_RNA (1)...(19): siRNA sense strand
ucugugaaauccagucugu

SEQ ID NO: 1053310 - RNA, 19 nt, Homo sapiens
  misc_RNA (1)...(19): siRNA sense strand
gaggaugagcaacaaagga

SEQ ID NO: 1053311 - RNA, 19 nt, Homo sapiens
  misc_RNA (1)...(19): siRNA sense strand
cgaauucggccucgagauc

SEQ ID NO: 1053312 - RNA, 19 nt, Homo sapiens
  misc_RNA (1)...(19): siRNA sense strand
ugacuuugacauagugauu

SEQ ID NO: 1053313 - RNA, 19 nt, Homo sapiens
  misc_RNA (1)...(19): siRNA sense strand
gaucagcagguggacguuu

SEQ ID NO: 1053314 - RNA, 19 nt, Homo sapiens
  misc_RNA (1)...(19): siRNA sense strand
guaagaguccucauuucag

SEQ ID NO: 1053315 - RNA, 19 nt, Homo sapiens
  misc_RNA (1)...(19): siRNA sense strand
ggaauccaacugccaagca

SEQ ID NO: 1053316 - RNA, 19 nt, Homo sapiens
  misc_RNA (1)...(19): siRNA sense strand
gcugggagugccuaucauu

SEQ ID NO: 1053317 - RNA, 19 nt, Homo sapiens
  misc_RNA (1)...(19): siRNA sense strand
ucugaugacuuugacauag

SEQ ID NO: 1053318 - RNA, 19 nt, Homo sapiens
  misc_RNA (1)...(19): siRNA sense strand
gguauagacggagaaauag

SEQ ID NO: 1053319 - RNA, 19 nt, Homo sapiens
  misc_RNA (1)...(19): siRNA sense strand
uaugaggguuggccaugug

SEQ ID NO: 1053320 - RNA, 19 nt, Homo sapiens
  misc_RNA (1)...(19): siRNA sense strand
guucucugauucugagugu

SEQ ID NO: 1053321 - RNA, 19 nt, Homo sapiens
  misc_RNA (1)...(19): siRNA sense strand
ggaugagcaacaaaggaaa

SEQ ID NO: 1053322 - RNA, 19 nt, Homo sapiens
  misc_RNA (1)...(19): siRNA sense strand
uagcugggaucgucgacau

SEQ ID NO: 1053323 - RNA, 19 nt, Homo sapiens
  misc_RNA (1)...(19): siRNA sense strand
ugaugacuuugacauagug

SEQ ID NO: 1053324 - RNA, 19 nt, Homo sapiens
  misc_RNA (1)...(19): siRNA sense strand
cucgagaucuggaggacuu

SEQ ID NO: 1053325 - RNA, 19 nt, Homo sapiens
  misc_RNA (1)...(19): siRNA sense strand
aguaagaguccucauuuca

SEQ ID NO: 1053326 - RNA, 19 nt, Homo sapiens
  misc_RNA (1)...(19): siRNA sense strand
auagauauggacacaguaa

SEQ ID NO: 1053327 - RNA, 19 nt, Homo sapiens
  misc_RNA (1)...(19): siRNA sense strand
cacaguaagaguccucauu

SEQ ID NO: 1053328 - RNA, 19 nt, Homo sapiens
  misc_RNA (1)...(19): siRNA sense strand
ggcagaaggcgcuggaauc

SEQ ID NO: 1053329 - RNA, 19 nt, Homo sapiens
  misc_RNA (1)...(19): siRNA sense strand
aagaagaggaugagcaaca

SEQ ID NO: 1053330 - RNA, 19 nt, Homo sapiens
  misc_RNA (1)...(19): siRNA sense strand
ugauaauauuguccugaug

SEQ ID NO: 1053331 - RNA, 19 nt, Homo sapiens
  misc_RNA (1)...(19): siRNA sense strand
agauauggacacaguaaga

SEQ ID NO: 1053332 - RNA, 19 nt, Homo sapiens
  misc_RNA (1)...(19): siRNA sense strand
gaacaguugaauggguuug

SEQ ID NO: 1053333 - RNA, 19 nt, Homo sapiens
  misc_RNA (1)...(19): siRNA sense strand
ucagauacaggccgcucua

SEQ ID NO: 1053334 - RNA, 19 nt, Homo sapiens
  misc_RNA (1)...(19): siRNA sense strand
gaggaucgugugcauuaca

SEQ ID NO: 1053335 - RNA, 19 nt, Homo sapiens
  misc_RNA (1)...(19): siRNA sense strand
ggaacaguugaauggguuu

SEQ ID NO: 1053336 - RNA, 19 nt, Homo sapiens
  misc_RNA (1)...(19): siRNA sense strand
cucuaaagguuaugguuuc

SEQ ID NO: 1053337 - RNA, 19 nt, Homo sapiens
  misc_RNA (1)...(19): siRNA sense strand
gaugagcaacaaaggaaag

SEQ ID NO: 1053338 - RNA, 19 nt, Homo sapiens
  misc_RNA (1)...(19): siRNA sense strand
ggagacaagcaaucguagu

SEQ ID NO: 1053339 - RNA, 19 nt, Homo sapiens
  misc_RNA (1)...(19): siRNA sense strand
gccacugguuauagauaug

SEQ ID NO: 1053340 - RNA, 19 nt, Homo sapiens
  misc_RNA (1)...(19): siRNA sense strand
ugccacugguuauagauau

SEQ ID NO: 1053341 - RNA, 19 nt, Homo sapiens
  misc_RNA (1)...(19): siRNA sense strand
gaucgucgacaugguagug

SEQ ID NO: 1053342 - RNA, 19 nt, Homo sapiens
  misc_RNA (1)...(19): siRNA sense strand
aaccuugccucccaguguu

SEQ ID NO: 1053343 - RNA, 19 nt, Homo sapiens
  misc_RNA (1)...(19): siRNA sense strand
uggguucccugcacuucaa

SEQ ID NO: 1053344 - RNA, 19 nt, Homo sapiens
  misc_RNA (1)...(19): siRNA sense strand
cugaugacuuugacauagu

SEQ ID NO: 1053345 - RNA, 19 nt, Homo sapiens
  misc_RNA (1)...(19): siRNA sense strand
gagcuugcuggucgaccua

SEQ ID NO: 1053346 - RNA, 19 nt, Homo sapiens
  misc_RNA (1)...(19): siRNA sense strand
agauacaggccgcucuaaa

SEQ ID NO: 1053347 - RNA, 19 nt, Homo sapiens
  misc_RNA (1)...(19): siRNA sense strand
cuacguggaauucugugaa

SEQ ID NO: 1053348 - RNA, 19 nt, Homo sapiens
  misc_RNA (1)...(19): siRNA sense strand
gaauucggccucgagaucu

SEQ ID NO: 1053349 - RNA, 19 nt, Homo sapiens
  misc_RNA (1)...(19): siRNA sense strand
gccaguugauaaucugagu

SEQ ID NO: 1053350 - RNA, 19 nt, Homo sapiens
  misc_RNA (1)...(19): siRNA sense strand
acuuugacauagugauuga

SEQ ID NO: 1053351 - RNA, 19 nt, Homo sapiens
  misc_RNA (1)...(19): siRNA sense strand
gauauggacacaguaagag

SEQ ID NO: 1053352 - RNA, 19 nt, Homo sapiens
  misc_RNA (1)...(19): siRNA sense strand
gcauugccuacguggaauu

SEQ ID NO: 1053353 - RNA, 19 nt, Homo sapiens
  misc_RNA (1)...(19): siRNA sense strand
gcagaaggcgcuggaaucc

SEQ ID NO: 1053354 - RNA, 19 nt, Homo sapiens
  misc_RNA (1)...(19): siRNA sense strand
ucuaaagguuaugguuuca

SEQ ID NO: 1053355 - RNA, 19 nt, Homo sapiens
  misc_RNA (1)...(19): siRNA sense strand
agagagaagagcccaguca

SEQ ID NO: 1053356 - RNA, 19 nt, Homo sapiens
  misc_RNA (1)...(19): siRNA sense strand
cagcucuccagccucuuua

SEQ ID NO: 1053357 - RNA, 19 nt, Homo sapiens
  misc_RNA (1)...(19): siRNA sense strand
gaauccagcagcucugacu

SEQ ID NO: 1053358 - RNA, 19 nt, Homo sapiens
  misc_RNA (1)...(19): siRNA sense strand
ggcaaugagaccaguggaa

SEQ ID NO: 1053359 - RNA, 19 nt, Homo sapiens
  misc_RNA (1)...(19): siRNA sense strand
gagugccuaucauuguaca

SEQ ID NO: 1053360 - RNA, 19 nt, Homo sapiens
  misc_RNA (1)...(19): siRNA sense strand
aggaugagcaacaaaggaa

SEQ ID NO: 1053361 - RNA, 19 nt, Homo sapiens
  misc_RNA (1)...(19): siRNA sense strand
cagcagcaccagcaacagu

SEQ ID NO: 1053362 - RNA, 19 nt, Homo sapiens
  misc_RNA (1)...(19): siRNA sense strand
ggguuggccaugugacuga

SEQ ID NO: 1053363 - RNA, 19 nt, Homo sapiens
  misc_RNA (1)...(19): siRNA sense strand
ucacguucucugauucuga

SEQ ID NO: 1053364 - RNA, 19 nt, Homo sapiens
  misc_RNA (1)...(19): siRNA sense strand
ugggaucgucgacauggua

SEQ ID NO: 1053365 - RNA, 19 nt, Homo sapiens
  misc_RNA (1)...(19): siRNA sense strand
uaggcaagguucgcgaugu

SEQ ID NO: 1053366 - RNA, 19 nt, Homo sapiens
  misc_RNA (1)...(19): siRNA sense strand
cauacacagugaucacaua

SEQ ID NO: 1053367 - RNA, 19 nt, Homo sapiens
  misc_RNA (1)...(19): siRNA sense strand
gaugauuacagcauacaca

SEQ ID NO: 1053368 - RNA, 19 nt, Homo sapiens
  misc_RNA (1)...(19): siRNA sense strand
auacacagugaucacauaa

SEQ ID NO: 1053369 - RNA, 19 nt, Homo sapiens
  misc_RNA (1)...(19): siRNA sense strand
gccaaugguuuucaugaug

SEQ ID NO: 1053370 - RNA, 19 nt, Homo sapiens
  misc_RNA (1)...(19): siRNA sense strand
uggucuggcugccgucauu

SEQ ID NO: 1053371 - RNA, 19 nt, Homo sapiens
  misc_RNA (1)...(19): siRNA sense strand
caugaugauuacagcauac

SEQ ID NO: 1053372 - RNA, 19 nt, Homo sapiens
  misc_RNA (1)...(19): siRNA sense strand
ggacaugggaagacuugac

SEQ ID NO: 1053373 - RNA, 19 nt, Homo sapiens
  misc_RNA (1)...(19): siRNA sense strand
gcauacacagugaucacau

SEQ ID NO: 1053374 - RNA, 19 nt, Homo sapiens
  misc_RNA (1)...(19): siRNA sense strand
ggacagguauuucaaagug

SEQ ID NO: 1053375 - RNA, 19 nt, Homo sapiens
  misc_RNA (1)...(19): siRNA sense strand
cggaagagaugccaauuuc

SEQ ID NO: 1053376 - RNA, 19 nt, Homo sapiens
  misc_RNA (1)...(19): siRNA sense strand
gaagagaugccaauuucga

SEQ ID NO: 1053377 - RNA, 19 nt, Homo sapiens
  misc_RNA (1)...(19): siRNA sense strand
gacagacuauuaccucaga

SEQ ID NO: 1053378 - RNA, 19 nt, Homo sapiens
  misc_RNA (1)...(19): siRNA sense strand
gcccagcacuguuuaccuu

SEQ ID NO: 1053379 - RNA, 19 nt, Homo sapiens
  misc_RNA (1)...(19): siRNA sense strand
gggagcaucguguuccuua

SEQ ID NO: 1053380 - RNA, 19 nt, Homo sapiens
  misc_RNA (1)...(19): siRNA sense strand
gcugauuuccuccuuauga

SEQ ID NO: 1053381 - RNA, 19 nt, Homo sapiens
  misc_RNA (1)...(19): siRNA sense strand
ggaagcccagcacuguuua

SEQ ID NO: 1053382 - RNA, 19 nt, Homo sapiens
  misc_RNA (1)...(19): siRNA sense strand
gcaucaguguggcaaauag

SEQ ID NO: 1053383 - RNA, 19 nt, Homo sapiens
  misc_RNA (1)...(19): siRNA sense strand
gcggacagguauuucaaag

SEQ ID NO: 1053384 - RNA, 19 nt, Homo sapiens
  misc_RNA (1)...(19): siRNA sense strand
gguuucugcuuccacauga

SEQ ID NO: 1053385 - RNA, 19 nt, Homo sapiens
  misc_RNA (1)...(19): siRNA sense strand
gacaggcucggaugaagaa

SEQ ID NO: 1053386 - RNA, 19 nt, Homo sapiens
  misc_RNA (1)...(19): siRNA sense strand
cagcuggaguucuuuaugc

SEQ ID NO: 1053387 - RNA, 19 nt, Homo sapiens
  misc_RNA (1)...(19): siRNA sense strand
gacuauuaccucagacgua

SEQ ID NO: 1053388 - RNA, 19 nt, Homo sapiens
  misc_RNA (1)...(19): siRNA sense strand
acacaaaggccggaagaga

SEQ ID NO: 1053389 - RNA, 19 nt, Homo sapiens
  misc_RNA (1)...(19): siRNA sense strand
ucaccuacaugaacagcau

SEQ ID NO: 1053390 - RNA, 19 nt, Homo sapiens
  misc_RNA (1)...(19): siRNA sense strand
guggcugauuuccuccuua

SEQ ID NO: 1053391 - RNA, 19 nt, Homo sapiens
  misc_RNA (1)...(19): siRNA sense strand
aaacacaaaggccggaaga

SEQ ID NO: 1053392 - RNA, 19 nt, Homo sapiens
  misc_RNA (1)...(19): siRNA sense strand
uggaagcccagcacuguuu

SEQ ID NO: 1053393 - RNA, 19 nt, Homo sapiens
  misc_RNA (1)...(19): siRNA sense strand
acaaaggccggaagagaug

SEQ ID NO: 1053394 - RNA, 19 nt, Homo sapiens
  misc_RNA (1)...(19): siRNA sense strand
cacaaaggccggaagagau

SEQ ID NO: 1053395 - RNA, 19 nt, Homo sapiens
  misc_RNA (1)...(19): siRNA sense strand
uggauccccugguguauua

SEQ ID NO: 1053396 - RNA, 19 nt, Homo sapiens
  misc_RNA (1)...(19): siRNA sense strand
uggcugauuuccuccuuau

SEQ ID NO: 1053397 - RNA, 19 nt, Homo sapiens
  misc_RNA (1)...(19): siRNA sense strand
cacauaacccucagcuuca

SEQ ID NO: 1053398 - RNA, 19 nt, Homo sapiens
  misc_RNA (1)...(19): siRNA sense strand
ccggaagagaugccaauuu

SEQ ID NO: 1053399 - RNA, 19 nt, Homo sapiens
  misc_RNA (1)...(19): siRNA sense strand
ucaguguggcaaauaguuu

SEQ ID NO: 1053400 - RNA, 19 nt, Homo sapiens
  misc_RNA (1)...(19): siRNA sense strand
gaguggggcucuucacguu

SEQ ID NO: 1053401 - RNA, 19 nt, Homo sapiens
  misc_RNA (1)...(19): siRNA sense strand
ggucgcaggaguugcauca

SEQ ID NO: 1053402 - RNA, 19 nt, Homo sapiens
  misc_RNA (1)...(19): siRNA sense strand
cucaaaaucugcagucuga

SEQ ID NO: 1053403 - RNA, 19 nt, Homo sapiens
  misc_RNA (1)...(19): siRNA sense strand
gugagagcuucaucaugga

SEQ ID NO: 1053404 - RNA, 19 nt, Homo sapiens
  misc_RNA (1)...(19): siRNA sense strand
ccagacaggcucggaugaa

SEQ ID NO: 1053405 - RNA, 19 nt, Homo sapiens
  misc_RNA (1)...(19): siRNA sense strand
ucgcaggaguugcaucagu

SEQ ID NO: 1053406 - RNA, 19 nt, Homo sapiens
  misc_RNA (1)...(19): siRNA sense strand
caaaaucugcagucugaaa

SEQ ID NO: 1053407 - RNA, 19 nt, Homo sapiens
  misc_RNA (1)...(19): siRNA sense strand
cagacaggcucggaugaag

SEQ ID NO: 1053408 - RNA, 19 nt, Homo sapiens
  misc_RNA (1)...(19): siRNA sense strand
acaacaagcucaaaaucug

SEQ ID NO: 1053409 - RNA, 19 nt, Homo sapiens
  misc_RNA (1)...(19): siRNA sense strand
ggcaaauaguuuccaaagc

SEQ ID NO: 1053410 - RNA, 19 nt, Homo sapiens
  misc_RNA (1)...(19): siRNA sense strand
ucauggugguggcaauugu

SEQ ID NO: 1053411 - RNA, 19 nt, Homo sapiens
  misc_RNA (1)...(19): siRNA sense strand
ggugguggcaauuguguuc

SEQ ID NO: 1053412 - RNA, 19 nt, Homo sapiens
  misc_RNA (1)...(19): siRNA sense strand
gaaggcgacccgguucauc

SEQ ID NO: 1053413 - RNA, 19 nt, Homo sapiens
  misc_RNA (1)...(19): siRNA sense strand
ccucggcaucaucuuauuu

SEQ ID NO: 1053414 - RNA, 19 nt, Homo sapiens
  misc_RNA (1)...(19): siRNA sense strand
caagcagccaggacacuca

SEQ ID NO: 1053415 - RNA, 19 nt, Homo sapiens
  misc_RNA (1)...(19): siRNA sense strand
ggagcaucguguuccuuac

SEQ ID NO: 1053416 - RNA, 19 nt, Homo sapiens
  misc_RNA (1)...(19): siRNA sense strand
gcaggaguugcaucagugu

SEQ ID NO: 1053417 - RNA, 19 nt, Homo sapiens
  misc_RNA (1)...(19): siRNA sense strand
cugauuuccuccuuaugau

SEQ ID NO: 1053418 - RNA, 19 nt, Homo sapiens
  misc_RNA (1)...(19): siRNA sense strand
agacaggcucggaugaaga

SEQ ID NO: 1053419 - RNA, 19 nt, Homo sapiens
  misc_RNA (1)...(19): siRNA sense strand
gaaccaucucugcgugcaa

SEQ ID NO: 1053420 - RNA, 19 nt, Homo sapiens
  misc_RNA (1)...(19): siRNA sense strand
gggucgcccugugugguuu

SEQ ID NO: 1053421 - RNA, 19 nt, Homo sapiens
  misc_RNA (1)...(19): siRNA sense strand
ggaaaaggcugcagcauuu

SEQ ID NO: 1053422 - RNA, 19 nt, Homo sapiens
  misc_RNA (1)...(19): siRNA sense strand
aaacaaggcuggaggaaug

SEQ ID NO: 1053423 - RNA, 19 nt, Homo sapiens
  misc_RNA (1)...(19): siRNA sense strand
gcaucgagguggauaauau

SEQ ID NO: 1053424 - RNA, 19 nt, Homo sapiens
  misc_RNA (1)...(19): siRNA sense strand
aagaagauccgcagucuaa

SEQ ID NO: 1053425 - RNA, 19 nt, Homo sapiens
  misc_RNA (1)...(19): siRNA sense strand
ccauagcagugccagauuu

SEQ ID NO: 1053426 - RNA, 19 nt, Homo sapiens
  misc_RNA (1)...(19): siRNA sense strand
ggaacugcuucauccauug

SEQ ID NO: 1053427 - RNA, 19 nt, Homo sapiens
  misc_RNA (1)...(19): siRNA sense strand
gaaccugggucgacucaac

SEQ ID NO: 1053428 - RNA, 19 nt, Homo sapiens
  misc_RNA (1)...(19): siRNA sense strand
caucacagcccuuggauca

SEQ ID NO: 1053429 - RNA, 19 nt, Homo sapiens
  misc_RNA (1)...(19): siRNA sense strand
cgagguggauaauauuaau

SEQ ID NO: 1053430 - RNA, 19 nt, Homo sapiens
  misc_RNA (1)...(19): siRNA sense strand
acucaaccauguagccaua

SEQ ID NO: 1053431 - RNA, 19 nt, Homo sapiens
  misc_RNA (1)...(19): siRNA sense strand
cagcugugauggauuugaa

SEQ ID NO: 1053432 - RNA, 19 nt, Homo sapiens
  misc_RNA (1)...(19): siRNA sense strand
gaagauccgcagucuaagu

SEQ ID NO: 1053433 - RNA, 19 nt, Homo sapiens
  misc_RNA (1)...(19): siRNA sense strand
gauccgcagucuaagugaa

SEQ ID NO: 1053434 - RNA, 19 nt, Homo sapiens
  misc_RNA (1)...(19): siRNA sense strand
cauggaguaucuguuguuu

SEQ ID NO: 1053435 - RNA, 19 nt, Homo sapiens
  misc_RNA (1)...(19): siRNA sense strand
ggaacuggagcaagcuuga

SEQ ID NO: 1053436 - RNA, 19 nt, Homo sapiens
  misc_RNA (1)...(19): siRNA sense strand
gaaauaccaagauggaacu

SEQ ID NO: 1053437 - RNA, 19 nt, Homo sapiens
  misc_RNA (1)...(19): siRNA sense strand
augcagcugugauggauuu

SEQ ID NO: 1053438 - RNA, 19 nt, Homo sapiens
  misc_RNA (1)...(19): siRNA sense strand
uaaugcagcugugauggau

SEQ ID NO: 1053439 - RNA, 19 nt, Homo sapiens
  misc_RNA (1)...(19): siRNA sense strand
ccacaucacagcccuugga

SEQ ID NO: 1053440 - RNA, 19 nt, Homo sapiens
  misc_RNA (1)...(19): siRNA sense strand
acaguccaauugcagguuu

SEQ ID NO: 1053441 - RNA, 19 nt, Homo sapiens
  misc_RNA (1)...(19): siRNA sense strand
gcgaaugccguagggcuuu

SEQ ID NO: 1053442 - RNA, 19 nt, Homo sapiens
  misc_RNA (1)...(19): siRNA sense strand
ggaggaaugcaucacaucu

SEQ ID NO: 1053443 - RNA, 19 nt, Homo sapiens
  misc_RNA (1)...(19): siRNA sense strand
gaacugcuucauccauugg

SEQ ID NO: 1053444 - RNA, 19 nt, Homo sapiens
  misc_RNA (1)...(19): siRNA sense strand
ccugggaaauaccaagaug

SEQ ID NO: 1053445 - RNA, 19 nt, Homo sapiens
  misc_RNA (1)...(19): siRNA sense strand
caaaauaggagcacaugga

SEQ ID NO: 1053446 - RNA, 19 nt, Homo sapiens
  misc_RNA (1)...(19): siRNA sense strand
caucgagguggauaauauu

SEQ ID NO: 1053447 - RNA, 19 nt, Homo sapiens
  misc_RNA (1)...(19): siRNA sense strand
gcucccauuccaacaguaa

SEQ ID NO: 1053448 - RNA, 19 nt, Homo sapiens
  misc_RNA (1)...(19): siRNA sense strand
cuucauccauugggacuug

SEQ ID NO: 1053449 - RNA, 19 nt, Homo sapiens
  misc_RNA (1)...(19): siRNA sense strand
gcacauggaaaaccaguga

SEQ ID NO: 1053450 - RNA, 19 nt, Homo sapiens
  misc_RNA (1)...(19): siRNA sense strand
gcagugccagauuuggaaa

SEQ ID NO: 1053451 - RNA, 19 nt, Homo sapiens
  misc_RNA (1)...(19): siRNA sense strand
gaggaaugcaucacaucug

SEQ ID NO: 1053452 - RNA, 19 nt, Homo sapiens
  misc_RNA (1)...(19): siRNA sense strand
cauagcagugccagauuug

SEQ ID NO: 1053453 - RNA, 19 nt, Homo sapiens
  misc_RNA (1)...(19): siRNA sense strand
gugaagaggucaaaauagg

SEQ ID NO: 1053454 - RNA, 19 nt, Homo sapiens
  misc_RNA (1)...(19): siRNA sense strand
gagcuucuuccacaucaca

SEQ ID NO: 1053455 - RNA, 19 nt, Homo sapiens
  misc_RNA (1)...(19): siRNA sense strand
aaagaagauccgcagucua

SEQ ID NO: 1053456 - RNA, 19 nt, Homo sapiens
  misc_RNA (1)...(19): siRNA sense strand
ucgagguggauaauauuaa

SEQ ID NO: 1053457 - RNA, 19 nt, Homo sapiens
  misc_RNA (1)...(19): siRNA sense strand
gggaaauaccaagauggaa

SEQ ID NO: 1053458 - RNA, 19 nt, Homo sapiens
  misc_RNA (1)...(19): siRNA sense strand
gagguggauaauauuaaug

SEQ ID NO: 1053459 - RNA, 19 nt, Homo sapiens
  misc_RNA (1)...(19): siRNA sense strand
ggucgacucaaccauguag

SEQ ID NO: 1053460 - RNA, 19 nt, Homo sapiens
  misc_RNA (1)...(19): siRNA sense strand
uagcagugccagauuugga

SEQ ID NO: 1053461 - RNA, 19 nt, Homo sapiens
  misc_RNA (1)...(19): siRNA sense strand
gagaaagacuggaauaauc

SEQ ID NO: 1053462 - RNA, 19 nt, Homo sapiens
  misc_RNA (1)...(19): siRNA sense strand
ccaaggagcuccagaaaca

SEQ ID NO: 1053463 - RNA, 19 nt, Homo sapiens
  misc_RNA (1)...(19): siRNA sense strand
gacaagaagugcuggaauu

SEQ ID NO: 1053464 - RNA, 19 nt, Homo sapiens
  misc_RNA (1)...(19): siRNA sense strand
gcucgucccugauggauaa

SEQ ID NO: 1053465 - RNA, 19 nt, Homo sapiens
  misc_RNA (1)...(19): siRNA sense strand
cagaagaaguucagaggaa

SEQ ID NO: 1053466 - RNA, 19 nt, Homo sapiens
  misc_RNA (1)...(19): siRNA sense strand
gaaacagcgucaaaucauc

SEQ ID NO: 1053467 - RNA, 19 nt, Homo sapiens
  misc_RNA (1)...(19): siRNA sense strand
uaaagagugugucuacuuc

SEQ ID NO: 1053468 - RNA, 19 nt, Homo sapiens
  misc_RNA (1)...(19): siRNA sense strand
gaggaacaccuaagacaaa

SEQ ID NO: 1053469 - RNA, 19 nt, Homo sapiens
  misc_RNA (1)...(19): siRNA sense strand
ggaauaaucauaagaaagg

SEQ ID NO: 1053470 - RNA, 19 nt, Homo sapiens
  misc_RNA (1)...(19): siRNA sense strand
agaauuuacuucccacaaa

SEQ ID NO: 1053471 - RNA, 19 nt, Homo sapiens
  misc_RNA (1)...(19): siRNA sense strand
gagaaacagcgucaaauca

SEQ ID NO: 1053472 - RNA, 19 nt, Homo sapiens
  misc_RNA (1)...(19): siRNA sense strand
ggagaaagacuggaauaau

SEQ ID NO: 1053473 - RNA, 19 nt, Homo sapiens
  misc_RNA (1)...(19): siRNA sense strand
gaauuuacuucccacaaag

SEQ ID NO: 1053474 - RNA, 19 nt, Homo sapiens
  misc_RNA (1)...(19): siRNA sense strand
agagagccuuggagaauuu

SEQ ID NO: 1053475 - RNA, 19 nt, Homo sapiens
  misc_RNA (1)...(19): siRNA sense strand
cugaagacauuauggagaa

SEQ ID NO: 1053476 - RNA, 19 nt, Homo sapiens
  misc_RNA (1)...(19): siRNA sense strand
ggauaaagagugugucuac

SEQ ID NO: 1053477 - RNA, 19 nt, Homo sapiens
  misc_RNA (1)...(19): siRNA sense strand
uccagaaacagcagucuua

SEQ ID NO: 1053478 - RNA, 19 nt, Homo sapiens
  misc_RNA (1)...(19): siRNA sense strand
ggacaucauuugggucaac

SEQ ID NO: 1053479 - RNA, 19 nt, Homo sapiens
  misc_RNA (1)...(19): siRNA sense strand
guguauuuaucagcaguua

SEQ ID NO: 1053480 - RNA, 19 nt, Homo sapiens
  misc_RNA (1)...(19): siRNA sense strand
agaaagacuggaauaauca

SEQ ID NO: 1053481 - RNA, 19 nt, Homo sapiens
  misc_RNA (1)...(19): siRNA sense strand
aagagagccuuggagaauu

SEQ ID NO: 1053482 - RNA, 19 nt, Homo sapiens
  misc_RNA (1)...(19): siRNA sense strand
gagaauuuacuucccacaa

SEQ ID NO: 1053483 - RNA, 19 nt, Homo sapiens
  misc_RNA (1)...(19): siRNA sense strand
ccugauggauaaagagugu

SEQ ID NO: 1053484 - RNA, 19 nt, Homo sapiens
  misc_RNA (1)...(19): siRNA sense strand
caugagaaacagcgucaaa

SEQ ID NO: 1053485 - RNA, 19 nt, Homo sapiens
  misc_RNA (1)...(19): siRNA sense strand
gaacaccuaagacaaacca

SEQ ID NO: 1053486 - RNA, 19 nt, Homo sapiens
  misc_RNA (1)...(19): siRNA sense strand
gcaguuagugagaggaaga

SEQ ID NO: 1053487 - RNA, 19 nt, Homo sapiens
  misc_RNA (1)...(19): siRNA sense strand
acaagaagugcuggaauuu

SEQ ID NO: 1053488 - RNA, 19 nt, Homo sapiens
  misc_RNA (1)...(19): siRNA sense strand
gcacguuguuccguaugga

SEQ ID NO: 1053489 - RNA, 19 nt, Homo sapiens
  misc_RNA (1)...(19): siRNA sense strand
ggacuuggaagcccuaggu

SEQ ID NO: 1053490 - RNA, 19 nt, Homo sapiens
  misc_RNA (1)...(19): siRNA sense strand
gauaaagagugugucuacu

SEQ ID NO: 1053491 - RNA, 19 nt, Homo sapiens
  misc_RNA (1)...(19): siRNA sense strand
ugagaaacagcgucaaauc

SEQ ID NO: 1053492 - RNA, 19 nt, Homo sapiens
  misc_RNA (1)...(19): siRNA sense strand
gaaagacuggaauaaucau

SEQ ID NO: 1053493 - RNA, 19 nt, Homo sapiens
  misc_RNA (1)...(19): siRNA sense strand
guauuuaucagcaguuagu

SEQ ID NO: 1053494 - RNA, 19 nt, Homo sapiens
  misc_RNA (1)...(19): siRNA sense strand
cgagcacguuguuccguau

SEQ ID NO: 1053495 - RNA, 19 nt, Homo sapiens
  misc_RNA (1)...(19): siRNA sense strand
agaaacagcgucaaaucau

SEQ ID NO: 1053496 - RNA, 19 nt, Homo sapiens
  misc_RNA (1)...(19): siRNA sense strand
ugaagacauuauggagaaa

SEQ ID NO: 1053497 - RNA, 19 nt, Homo sapiens
  misc_RNA (1)...(19): siRNA sense strand
auaaagagugugucuacuu

SEQ ID NO: 1053498 - RNA, 19 nt, Homo sapiens
  misc_RNA (1)...(19): siRNA sense strand
cagaggaacaccuaagaca

SEQ ID NO: 1053499 - RNA, 19 nt, Homo sapiens
  misc_RNA (1)...(19): siRNA sense strand
agacuggaauaaucauaag

SEQ ID NO: 1053500 - RNA, 19 nt, Homo sapiens
  misc_RNA (1)...(19): siRNA sense strand
gggcugaagacauuaugga

SEQ ID NO: 1053501 - RNA, 19 nt, Homo sapiens
  misc_RNA (1)...(19): siRNA sense strand
gauuuucucucugcuguuu

SEQ ID NO: 1053502 - RNA, 19 nt, Homo sapiens
  misc_RNA (1)...(19): siRNA sense strand
gagagccuuggagaauuua

SEQ ID NO: 1053503 - RNA, 19 nt, Homo sapiens
  misc_RNA (1)...(19): siRNA sense strand
aagacauuauggagaaaga

SEQ ID NO: 1053504 - RNA, 19 nt, Homo sapiens
  misc_RNA (1)...(19): siRNA sense strand
uggagaaagacuggaauaa

SEQ ID NO: 1053505 - RNA, 19 nt, Homo sapiens
  misc_RNA (1)...(19): siRNA sense strand
gaagacauuauggagaaag

SEQ ID NO: 1053506 - RNA, 19 nt, Homo sapiens
  misc_RNA (1)...(19): siRNA sense strand
aaacagcgucaaaucaucu

SEQ ID NO: 1053507 - RNA, 19 nt, Homo sapiens
  misc_RNA (1)...(19): siRNA sense strand
gacaucauuugggucaaca

SEQ ID NO: 1053508 - RNA, 19 nt, Homo sapiens
  misc_RNA (1)...(19): siRNA sense strand
agaggaacaccuaagacaa

SEQ ID NO: 1053509 - RNA, 19 nt, Homo sapiens
  misc_RNA (1)...(19): siRNA sense strand
caacacucccgagcacguu

SEQ ID NO: 1053510 - RNA, 19 nt, Homo sapiens
  misc_RNA (1)...(19): siRNA sense strand
ucggagaccaugagaaaca

SEQ ID NO: 1053511 - RNA, 19 nt, Homo sapiens
  misc_RNA (1)...(19): siRNA sense strand
aagagugugucuacuucug

SEQ ID NO: 1053512 - RNA, 19 nt, Homo sapiens
  misc_RNA (1)...(19): siRNA sense strand
aauagaugccaaugugcua

SEQ ID NO: 1053513 - RNA, 19 nt, Homo sapiens
  misc_RNA (1)...(19): siRNA sense strand
cgucccugauggauaaaga

SEQ ID NO: 1053514 - RNA, 19 nt, Homo sapiens
  misc_RNA (1)...(19): siRNA sense strand
ggauuauuugcucaugauu

SEQ ID NO: 1053515 - RNA, 19 nt, Homo sapiens
  misc_RNA (1)...(19): siRNA sense strand
ccacaaccgagcacauugg

SEQ ID NO: 1053516 - RNA, 19 nt, Homo sapiens
  misc_RNA (1)...(19): siRNA sense strand
aaaagacuguuccaagcuu

SEQ ID NO: 1053517 - RNA, 19 nt, Homo sapiens
  misc_RNA (1)...(19): siRNA sense strand
ggagaaacuucaagagaua

SEQ ID NO: 1053518 - RNA, 19 nt, Homo sapiens
  misc_RNA (1)...(19): siRNA sense strand
gaaauggccuuacagaaga

SEQ ID NO: 1053519 - RNA, 19 nt, Homo sapiens
  misc_RNA (1)...(19): siRNA sense strand
ucacagagguaauuaaaug

SEQ ID NO: 1053520 - RNA, 19 nt, Homo sapiens
  misc_RNA (1)...(19): siRNA sense strand
caacagaaauggagaugug

SEQ ID NO: 1053521 - RNA, 19 nt, Homo sapiens
  misc_RNA (1)...(19): siRNA sense strand
gaaaugcaguuacuaaagg

SEQ ID NO: 1053522 - RNA, 19 nt, Homo sapiens
  misc_RNA (1)...(19): siRNA sense strand
ccaagucaaugaaauagaa

SEQ ID NO: 1053523 - RNA, 19 nt, Homo sapiens
  misc_RNA (1)...(19): siRNA sense strand
gcaguauacuccagaauag

SEQ ID NO: 1053524 - RNA, 19 nt, Homo sapiens
  misc_RNA (1)...(19): siRNA sense strand
gaaagucacagagguaauu

SEQ ID NO: 1053525 - RNA, 19 nt, Homo sapiens
  misc_RNA (1)...(19): siRNA sense strand
cuacguggcuucgagauuu

SEQ ID NO: 1053526 - RNA, 19 nt, Homo sapiens
  misc_RNA (1)...(19): siRNA sense strand
ggugugcgcugaauggaaa

SEQ ID NO: 1053527 - RNA, 19 nt, Homo sapiens
  misc_RNA (1)...(19): siRNA sense strand
gagccaagucaaugaaaua

SEQ ID NO: 1053528 - RNA, 19 nt, Homo sapiens
  misc_RNA (1)...(19): siRNA sense strand
caaugaggaucuuagaaau

SEQ ID NO: 1053529 - RNA, 19 nt, Homo sapiens
  misc_RNA (1)...(19): siRNA sense strand
ugacugggcuguucacauc

SEQ ID NO: 1053530 - RNA, 19 nt, Homo sapiens
  misc_RNA (1)...(19): siRNA sense strand
ugaggaaugugaugcaguu

SEQ ID NO: 1053531 - RNA, 19 nt, Homo sapiens
  misc_RNA (1)...(19): siRNA sense strand
gcucucaaaucgacuggaa

SEQ ID NO: 1053532 - RNA, 19 nt, Homo sapiens
  misc_RNA (1)...(19): siRNA sense strand
aaugugaaaugggaacuua

SEQ ID NO: 1053533 - RNA, 19 nt, Homo sapiens
  misc_RNA (1)...(19): siRNA sense strand
ggcaguauacuccagaaua

SEQ ID NO: 1053534 - RNA, 19 nt, Homo sapiens
  misc_RNA (1)...(19): siRNA sense strand
acaaggaccugaggaaugu

SEQ ID NO: 1053535 - RNA, 19 nt, Homo sapiens
  misc_RNA (1)...(19): siRNA sense strand
gagaaacaaugaggaucuu

SEQ ID NO: 1053536 - RNA, 19 nt, Homo sapiens
  misc_RNA (1)...(19): siRNA sense strand
cugaagagcucucaaaucg

SEQ ID NO: 1053537 - RNA, 19 nt, Homo sapiens
  misc_RNA (1)...(19): siRNA sense strand
ucaagaacaucccagagau

SEQ ID NO: 1053538 - RNA, 19 nt, Homo sapiens
  misc_RNA (1)...(19): siRNA sense strand
gaucuuagaaauggccuua

SEQ ID NO: 1053539 - RNA, 19 nt, Homo sapiens
  misc_RNA (1)...(19): siRNA sense strand
caagagguguugccugaag

SEQ ID NO: 1053540 - RNA, 19 nt, Homo sapiens
  misc_RNA (1)...(19): siRNA sense strand
gauauaucuucaagcagaa

SEQ ID NO: 1053541 - RNA, 19 nt, Homo sapiens
  misc_RNA (1)...(19): siRNA sense strand
acaaugaggaucuuagaaa

SEQ ID NO: 1053542 - RNA, 19 nt, Homo sapiens
  misc_RNA (1)...(19): siRNA sense strand
aaagaaagucacagaggua

SEQ ID NO: 1053543 - RNA, 19 nt, Homo sapiens
  misc_RNA (1)...(19): siRNA sense strand
gaacaucccagagauugug

SEQ ID NO: 1053544 - RNA, 19 nt, Homo sapiens
  misc_RNA (1)...(19): siRNA sense strand
uaaaggagaaacuucaaga

SEQ ID NO: 1053545 - RNA, 19 nt, Homo sapiens
  misc_RNA (1)...(19): siRNA sense strand
cagaagauaugcagaagcu

SEQ ID NO: 1053546 - RNA, 19 nt, Homo sapiens
  misc_RNA (1)...(19): siRNA sense strand
cagagauuguggcaguaua

SEQ ID NO: 1053547 - RNA, 19 nt, Homo sapiens
  misc_RNA (1)...(19): siRNA sense strand
gaaacaaugaggaucuuag

SEQ ID NO: 1053548 - RNA, 19 nt, Homo sapiens
  misc_RNA (1)...(19): siRNA sense strand
caaacaaggaccugaggaa

SEQ ID NO: 1053549 - RNA, 19 nt, Homo sapiens
  misc_RNA (1)...(19): siRNA sense strand
caagaacaucccagagauu

SEQ ID NO: 1053550 - RNA, 19 nt, Homo sapiens
  misc_RNA (1)...(19): siRNA sense strand
agaaauggccuuacagaag

SEQ ID NO: 1053551 - RNA, 19 nt, Homo sapiens
  misc_RNA (1)...(19): siRNA sense strand
uggaaguggugaaggaauu

SEQ ID NO: 1053552 - RNA, 19 nt, Homo sapiens
  misc_RNA (1)...(19): siRNA sense strand
gaaauagaaaugcaguuac

SEQ ID NO: 1053553 - RNA, 19 nt, Homo sapiens
  misc_RNA (1)...(19): siRNA sense strand
ggaaugugaugcaguugcu

SEQ ID NO: 1053554 - RNA, 19 nt, Homo sapiens
  misc_RNA (1)...(19): siRNA sense strand
ggaaguggugaaggaauuu

SEQ ID NO: 1053555 - RNA, 19 nt, Homo sapiens
  misc_RNA (1)...(19): siRNA sense strand
aggagaaacuucaagagau

SEQ ID NO: 1053556 - RNA, 19 nt, Homo sapiens
  misc_RNA (1)...(19): siRNA sense strand
ggaacuuaccugagugaga

SEQ ID NO: 1053557 - RNA, 19 nt, Homo sapiens
  misc_RNA (1)...(19): siRNA sense strand
gagaugggugugaauguga

SEQ ID NO: 1053558 - RNA, 19 nt, Homo sapiens
  misc_RNA (1)...(19): siRNA sense strand
gcgaucacuucgugguuga

SEQ ID NO: 1053559 - RNA, 19 nt, Homo sapiens
  misc_RNA (1)...(19): siRNA sense strand
cgagaugggugugaaugug

SEQ ID NO: 1053560 - RNA, 19 nt, Homo sapiens
  misc_RNA (1)...(19): siRNA sense strand
gacuggaaguggugaagga

SEQ ID NO: 1053561 - RNA, 19 nt, Homo sapiens
  misc_RNA (1)...(19): siRNA sense strand
cgaggaagaucagcgagau

SEQ ID NO: 1053562 - RNA, 19 nt, Homo sapiens
  misc_RNA (1)...(19): siRNA sense strand
caucaugucaacagaaaug

SEQ ID NO: 1053563 - RNA, 19 nt, Homo sapiens
  misc_RNA (1)...(19): siRNA sense strand
aaugggaacuuaccugagu

SEQ ID NO: 1053564 - RNA, 19 nt, Homo sapiens
  misc_RNA (1)...(19): siRNA sense strand
ggugaaggaauuucugaga

SEQ ID NO: 1053565 - RNA, 19 nt, Homo sapiens
  misc_RNA (1)...(19): siRNA sense strand
uuacagaagauaugcagaa

SEQ ID NO: 1053566 - RNA, 19 nt, Homo sapiens
  misc_RNA (1)...(19): siRNA sense strand
aaacaaugaggaucuuaga

SEQ ID NO: 1053567 - RNA, 19 nt, Homo sapiens
  misc_RNA (1)...(19): siRNA sense strand
cgugguugaucgaaagaaa

SEQ ID NO: 1053568 - RNA, 19 nt, Homo sapiens
  misc_RNA (1)...(19): siRNA sense strand
uaaaugucguaaugagauc

SEQ ID NO: 1053569 - RNA, 19 nt, Homo sapiens
  misc_RNA (1)...(19): siRNA sense strand
gagguaauuaaaugucgua

SEQ ID NO: 1053570 - RNA, 19 nt, Homo sapiens
  misc_RNA (1)...(19): siRNA sense strand
caacugcgccgaguacaag

SEQ ID NO: 1053571 - RNA, 19 nt, Homo sapiens
  misc_RNA (1)...(19): siRNA sense strand
gagagccaagucaaugaaa

SEQ ID NO: 1053572 - RNA, 19 nt, Homo sapiens
  misc_RNA (1)...(19): siRNA sense strand
aaaugcaguuacuaaagga

SEQ ID NO: 1053573 - RNA, 19 nt, Homo sapiens
  misc_RNA (1)...(19): siRNA sense strand
caacuccugcgaucacuuc

SEQ ID NO: 1053574 - RNA, 19 nt, Homo sapiens
  misc_RNA (1)...(19): siRNA sense strand
uagaaauggccuuacagaa

SEQ ID NO: 1053575 - RNA, 19 nt, Homo sapiens
  misc_RNA (1)...(19): siRNA sense strand
aaagucacagagguaauua

SEQ ID NO: 1053576 - RNA, 19 nt, Homo sapiens
  misc_RNA (1)...(19): siRNA sense strand
aaggagaaacuucaagaga

SEQ ID NO: 1053577 - RNA, 19 nt, Homo sapiens
  misc_RNA (1)...(19): siRNA sense strand
ugaugcaguugcucuuuua

SEQ ID NO: 1053578 - RNA, 19 nt, Homo sapiens
  misc_RNA (1)...(19): siRNA sense strand
gcgaggugcucuccuucca

SEQ ID NO: 1053579 - RNA, 19 nt, Homo sapiens
  misc_RNA (1)...(19): siRNA sense strand
aaagggagauuuugagaca

SEQ ID NO: 1053580 - RNA, 19 nt, Homo sapiens
  misc_RNA (1)...(19): siRNA sense strand
agucacagagguaauuaaa

SEQ ID NO: 1053581 - RNA, 19 nt, Homo sapiens
  misc_RNA (1)...(19): siRNA sense strand
aagaacaucccagagauug

SEQ ID NO: 1053582 - RNA, 19 nt, Homo sapiens
  misc_RNA (1)...(19): siRNA sense strand
cagccucugucuacaucaa

SEQ ID NO: 1053583 - RNA, 19 nt, Homo sapiens
  misc_RNA (1)...(19): siRNA sense strand
gagaaacuucaagagauau

SEQ ID NO: 1053584 - RNA, 19 nt, Homo sapiens
  misc_RNA (1)...(19): siRNA sense strand
agaaaugcaguuacuaaag

SEQ ID NO: 1053585 - RNA, 19 nt, Homo sapiens
  misc_RNA (1)...(19): siRNA sense strand
gugagagccaagucaauga

SEQ ID NO: 1053586 - RNA, 19 nt, Homo sapiens
  misc_RNA (1)...(19): siRNA sense strand
aaacaaggaccugaggaau

SEQ ID NO: 1053587 - RNA, 19 nt, Homo sapiens
  misc_RNA (1)...(19): siRNA sense strand
uuagaaauggccuuacaga

SEQ ID NO: 1053588 - RNA, 19 nt, Homo sapiens
  misc_RNA (1)...(19): siRNA sense strand
ucuuagaaauggccuuaca

SEQ ID NO: 1053589 - RNA, 19 nt, Homo sapiens
  misc_RNA (1)...(19): siRNA sense strand
ucagcgagaugggugugaa

SEQ ID NO: 1053590 - RNA, 19 nt, Homo sapiens
  misc_RNA (1)...(19): siRNA sense strand
aaaacuggauucacaggaa

SEQ ID NO: 1053591 - RNA, 19 nt, Homo sapiens
  misc_RNA (1)...(19): siRNA sense strand
agagccaagucaaugaaau

SEQ ID NO: 1053592 - RNA, 19 nt, Homo sapiens
  misc_RNA (1)...(19): siRNA sense strand
gcaguuacuaaaggagaaa

SEQ ID NO: 1053593 - RNA, 19 nt, Homo sapiens
  misc_RNA (1)...(19): siRNA sense strand
guacaagaacugggugaag

SEQ ID NO: 1053594 - RNA, 19 nt, Homo sapiens
  misc_RNA (1)...(19): siRNA sense strand
ugagaaacaaugaggaucu

SEQ ID NO: 1053595 - RNA, 19 nt, Homo sapiens
  misc_RNA (1)...(19): siRNA sense strand
ggacuagcagacaaacaag

SEQ ID NO: 1053596 - RNA, 19 nt, Homo sapiens
  misc_RNA (1)...(19): siRNA sense strand
augaggaucuuagaaaugg

SEQ ID NO: 1053597 - RNA, 19 nt, Homo sapiens
  misc_RNA (1)...(19): siRNA sense strand
agaaacaaugaggaucuua

SEQ ID NO: 1053598 - RNA, 19 nt, Homo sapiens
  misc_RNA (1)...(19): siRNA sense strand
ugagagccaagucaaugaa

SEQ ID NO: 1053599 - RNA, 19 nt, Homo sapiens
  misc_RNA (1)...(19): siRNA sense strand
gaaugugaaaugggaacuu

SEQ ID NO: 1053600 - RNA, 19 nt, Homo sapiens
  misc_RNA (1)...(19): siRNA sense strand
aagaaagucacagagguaa

SEQ ID NO: 1053601 - RNA, 19 nt, Homo sapiens
  misc_RNA (1)...(19): siRNA sense strand
aguauacuccagaauagaa

SEQ ID NO: 1053602 - RNA, 19 nt, Homo sapiens
  misc_RNA (1)...(19): siRNA sense strand
gaaccugggagacaaacac

SEQ ID NO: 1053603 - RNA, 19 nt, Homo sapiens
  misc_RNA (1)...(19): siRNA sense strand
ucaagcagaagaacaagag

SEQ ID NO: 1053604 - RNA, 19 nt, Homo sapiens
  misc_RNA (1)...(19): siRNA sense strand
aacaaggaccugaggaaug

SEQ ID NO: 1053605 - RNA, 19 nt, Homo sapiens
  misc_RNA (1)...(19): siRNA sense strand
gcgagaugggugugaaugu

SEQ ID NO: 1053606 - RNA, 19 nt, Homo sapiens
  misc_RNA (1)...(19): siRNA sense strand
agaugggugugaaugugaa

SEQ ID NO: 1053607 - RNA, 19 nt, Homo sapiens
  misc_RNA (1)...(19): siRNA sense strand
aagagguguugccugaaga

SEQ ID NO: 1053608 - RNA, 19 nt, Homo sapiens
  misc_RNA (1)...(19): siRNA sense strand
ggaccugaggaaugugaug

SEQ ID NO: 1053609 - RNA, 19 nt, Homo sapiens
  misc_RNA (1)...(19): siRNA sense strand
gaaguggugaaggaauuuc

SEQ ID NO: 1053610 - RNA, 19 nt, Homo sapiens
  misc_RNA (1)...(19): siRNA sense strand
gugaugcaguugcucuuuu

SEQ ID NO: 1053611 - RNA, 19 nt, Homo sapiens
  misc_RNA (1)...(19): siRNA sense strand
gaggaagaucagcgagaug

SEQ ID NO: 1053612 - RNA, 19 nt, Homo sapiens
  misc_RNA (1)...(19): siRNA sense strand
uacagaagauaugcagaag

SEQ ID NO: 1053613 - RNA, 19 nt, Homo sapiens
  misc_RNA (1)...(19): siRNA sense strand
aaugaggaucuuagaaaug

SEQ ID NO: 1053614 - RNA, 19 nt, Homo sapiens
  misc_RNA (1)...(19): siRNA sense strand
uuacuaaaggagaaacuuc

SEQ ID NO: 1053615 - RNA, 19 nt, Homo sapiens
  misc_RNA (1)...(19): siRNA sense strand
gagugagagccaagucaau

SEQ ID NO: 1053616 - RNA, 19 nt, Homo sapiens
  misc_RNA (1)...(19): siRNA sense strand
ugagugagagccaagucaa

SEQ ID NO: 1053617 - RNA, 19 nt, Homo sapiens
  misc_RNA (1)...(19): siRNA sense strand
aaacugaugcugacacuua

SEQ ID NO: 1053618 - RNA, 19 nt, Homo sapiens
  misc_RNA (1)...(19): siRNA sense strand
gaaccgaccuacugcaaca

SEQ ID NO: 1053619 - RNA, 19 nt, Homo sapiens
  misc_RNA (1)...(19): siRNA sense strand
gcaguguguuuacagauca

SEQ ID NO: 1053620 - RNA, 19 nt, Homo sapiens
  misc_RNA (1)...(19): siRNA sense strand
ggucagagcaggaggugaa

SEQ ID NO: 1053621 - RNA, 19 nt, Homo sapiens
  misc_RNA (1)...(19): siRNA sense strand
ggacauuuccuaugcaucu

SEQ ID NO: 1053622 - RNA, 19 nt, Homo sapiens
  misc_RNA (1)...(19): siRNA sense strand
cugaggagcccacggaaua

SEQ ID NO: 1053623 - RNA, 19 nt, Homo sapiens
  misc_RNA (1)...(19): siRNA sense strand
caaaucaccgguccaacaa

SEQ ID NO: 1053624 - RNA, 19 nt, Homo sapiens
  misc_RNA (1)...(19): siRNA sense strand
cuuggaggaugaugaagua

SEQ ID NO: 1053625 - RNA, 19 nt, Homo sapiens
  misc_RNA (1)...(19): siRNA sense strand
caucaaggacaaucagaaa

SEQ ID NO: 1053626 - RNA, 19 nt, Homo sapiens
  misc_RNA (1)...(19): siRNA sense strand
caacaugggccaccucagu

SEQ ID NO: 1053627 - RNA, 19 nt, Homo sapiens
  misc_RNA (1)...(19): siRNA sense strand
ggaggaugaugaaguacca

SEQ ID NO: 1053628 - RNA, 19 nt, Homo sapiens
  misc_RNA (1)...(19): siRNA sense strand
gaccuugggugcugaggau

SEQ ID NO: 1053629 - RNA, 19 nt, Homo sapiens
  misc_RNA (1)...(19): siRNA sense strand
gcuacuccauugucacuca

SEQ ID NO: 1053630 - RNA, 19 nt, Homo sapiens
  misc_RNA (1)...(19): siRNA sense strand
gcugggagaccuacuugaa

SEQ ID NO: 1053631 - RNA, 19 nt, Homo sapiens
  misc_RNA (1)...(19): siRNA sense strand
ucaaaucaccgguccaaca

SEQ ID NO: 1053632 - RNA, 19 nt, Homo sapiens
  misc_RNA (1)...(19): siRNA sense strand
gcucucaggcuacuccauu

SEQ ID NO: 1053633 - RNA, 19 nt, Homo sapiens
  misc_RNA (1)...(19): siRNA sense strand
cagcaccagucacccaaga

SEQ ID NO: 1053634 - RNA, 19 nt, Homo sapiens
  misc_RNA (1)...(19): siRNA sense strand
gaugaaguaccagcagaaa

SEQ ID NO: 1053635 - RNA, 19 nt, Homo sapiens
  misc_RNA (1)...(19): siRNA sense strand
ccauauugcugcugcuuuu

SEQ ID NO: 1053636 - RNA, 19 nt, Homo sapiens
  misc_RNA (1)...(19): siRNA sense strand
aaucaccgguccaacaaca

SEQ ID NO: 1053637 - RNA, 19 nt, Homo sapiens
  misc_RNA (1)...(19): siRNA sense strand
ggagcuauuuggcgugacu

SEQ ID NO: 1053638 - RNA, 19 nt, Homo sapiens
  misc_RNA (1)...(19): siRNA sense strand
gaucaggcugggagaccua

SEQ ID NO: 1053639 - RNA, 19 nt, Homo sapiens
  misc_RNA (1)...(19): siRNA sense strand
gcuuuccucugcccagguu

SEQ ID NO: 1053640 - RNA, 19 nt, Homo sapiens
  misc_RNA (1)...(19): siRNA sense strand
ucaggcuacuccauuguca

SEQ ID NO: 1053641 - RNA, 19 nt, Homo sapiens
  misc_RNA (1)...(19): siRNA sense strand
gaaaacugaugcugacacu

SEQ ID NO: 1053642 - RNA, 19 nt, Homo sapiens
  misc_RNA (1)...(19): siRNA sense strand
gcaccagucacccaagaag

SEQ ID NO: 1053643 - RNA, 19 nt, Homo sapiens
  misc_RNA (1)...(19): siRNA sense strand
ugaaguaccagcagaaagc

SEQ ID NO: 1053644 - RNA, 19 nt, Homo sapiens
  misc_RNA (1)...(19): siRNA sense strand
uuacugguguggaauugag

SEQ ID NO: 1053645 - RNA, 19 nt, Homo sapiens
  misc_RNA (1)...(19): siRNA sense strand
ccagguggaaguggaauau

SEQ ID NO: 1053646 - RNA, 19 nt, Homo sapiens
  misc_RNA (1)...(19): siRNA sense strand
ccucaucuucaccauauug

SEQ ID NO: 1053647 - RNA, 19 nt, Homo sapiens
  misc_RNA (1)...(19): siRNA sense strand
ggccaccacuuggacaaca

SEQ ID NO: 1053648 - RNA, 19 nt, Homo sapiens
  misc_RNA (1)...(19): siRNA sense strand
ccaucaaggacaaucagaa

SEQ ID NO: 1053649 - RNA, 19 nt, Homo sapiens
  misc_RNA (1)...(19): siRNA sense strand
agguggaaguggaauaugu

SEQ ID NO: 1053650 - RNA, 19 nt, Homo sapiens
  misc_RNA (1)...(19): siRNA sense strand
ccagucacccaagaagaaa

SEQ ID NO: 1053651 - RNA, 19 nt, Homo sapiens
  misc_RNA (1)...(19): siRNA sense strand
ugaccgugcaguguguuua

SEQ ID NO: 1053652 - RNA, 19 nt, Homo sapiens
  misc_RNA (1)...(19): siRNA sense strand
aacaugggccaccucagua

SEQ ID NO: 1053653 - RNA, 19 nt, Homo sapiens
  misc_RNA (1)...(19): siRNA sense strand
gaaguaccagcagaaagca

SEQ ID NO: 1053654 - RNA, 19 nt, Homo sapiens
  misc_RNA (1)...(19): siRNA sense strand
ugagaaaacuggaaaugac

SEQ ID NO: 1053655 - RNA, 19 nt, Homo sapiens
  misc_RNA (1)...(19): siRNA sense strand
gaauugagaaaacuggaaa

SEQ ID NO: 1053656 - RNA, 19 nt, Homo sapiens
  misc_RNA (1)...(19): siRNA sense strand
cgugcaguguguuuacaga

SEQ ID NO: 1053657 - RNA, 19 nt, Homo sapiens
  misc_RNA (1)...(19): siRNA sense strand
gaucaggaaccgaccuacu

SEQ ID NO: 1053658 - RNA, 19 nt, Homo sapiens
  misc_RNA (1)...(19): siRNA sense strand
caacagugaauggcuugga

SEQ ID NO: 1053659 - RNA, 19 nt, Homo sapiens
  misc_RNA (1)...(19): siRNA sense strand
gcaccaucagcaggccuua

SEQ ID NO: 1053660 - RNA, 19 nt, Homo sapiens
  misc_RNA (1)...(19): siRNA sense strand
gcaaagaggcuacugauaa

SEQ ID NO: 1053661 - RNA, 19 nt, Homo sapiens
  misc_RNA (1)...(19): siRNA sense strand
ggacagucauccucuauaa

SEQ ID NO: 1053662 - RNA, 19 nt, Homo sapiens
  misc_RNA (1)...(19): siRNA sense strand
aaagaaagauguacaguug

SEQ ID NO: 1053663 - RNA, 19 nt, Homo sapiens
  misc_RNA (1)...(19): siRNA sense strand
caaagaggcuacugauaaa

SEQ ID NO: 1053664 - RNA, 19 nt, Homo sapiens
  misc_RNA (1)...(19): siRNA sense strand
aaacgcaugugcuuucuua

SEQ ID NO: 1053665 - RNA, 19 nt, Homo sapiens
  misc_RNA (1)...(19): siRNA sense strand
ggagacaccucaaggaugu

SEQ ID NO: 1053666 - RNA, 19 nt, Homo sapiens
  misc_RNA (1)...(19): siRNA sense strand
ucacguaucuuaaccaaau

SEQ ID NO: 1053667 - RNA, 19 nt, Homo sapiens
  misc_RNA (1)...(19): siRNA sense strand
gcucaaggcuguuguaucu

SEQ ID NO: 1053668 - RNA, 19 nt, Homo sapiens
  misc_RNA (1)...(19): siRNA sense strand
ggucaacucugguauuaug

SEQ ID NO: 1053669 - RNA, 19 nt, Homo sapiens
  misc_RNA (1)...(19): siRNA sense strand
ggaaagguguaaagcagaa

SEQ ID NO: 1053670 - RNA, 19 nt, Homo sapiens
  misc_RNA (1)...(19): siRNA sense strand
uaauggagauugccuuaaa

SEQ ID NO: 1053671 - RNA, 19 nt, Homo sapiens
  misc_RNA (1)...(19): siRNA sense strand
gaaauuacuuugcuuacgu

SEQ ID NO: 1053672 - RNA, 19 nt, Homo sapiens
  misc_RNA (1)...(19): siRNA sense strand
uaacaggacuucuggaaag

SEQ ID NO: 1053673 - RNA, 19 nt, Homo sapiens
  misc_RNA (1)...(19): siRNA sense strand
caacaagauugaaguaagu

SEQ ID NO: 1053674 - RNA, 19 nt, Homo sapiens
  misc_RNA (1)...(19): siRNA sense strand
ggaaauucaucucuuugau

SEQ ID NO: 1053675 - RNA, 19 nt, Homo sapiens
  misc_RNA (1)...(19): siRNA sense strand
guggucaacucugguauua

SEQ ID NO: 1053676 - RNA, 19 nt, Homo sapiens
  misc_RNA (1)...(19): siRNA sense strand
gcagacaccugacuuucau

SEQ ID NO: 1053677 - RNA, 19 nt, Homo sapiens
  misc_RNA (1)...(19): siRNA sense strand
gaucggaaauucaucucuu

SEQ ID NO: 1053678 - RNA, 19 nt, Homo sapiens
  misc_RNA (1)...(19): siRNA sense strand
uaacugugauuccauacaa

SEQ ID NO: 1053679 - RNA, 19 nt, Homo sapiens
  misc_RNA (1)...(19): siRNA sense strand
uaugaaaccuugauaccaa

SEQ ID NO: 1053680 - RNA, 19 nt, Homo sapiens
  misc_RNA (1)...(19): siRNA sense strand
gugaaacaaggucaaauua

SEQ ID NO: 1053681 - RNA, 19 nt, Homo sapiens
  misc_RNA (1)...(19): siRNA sense strand
gagaguauguuguuguaca

SEQ ID NO: 1053682 - RNA, 19 nt, Homo sapiens
  misc_RNA (1)...(19): siRNA sense strand
ugaaccagauuauggauug

SEQ ID NO: 1053683 - RNA, 19 nt, Homo sapiens
  misc_RNA (1)...(19): siRNA sense strand
uaaagcagaaccaucauuu

SEQ ID NO: 1053684 - RNA, 19 nt, Homo sapiens
  misc_RNA (1)...(19): siRNA sense strand
ucagagcagucaagaagaa

SEQ ID NO: 1053685 - RNA, 19 nt, Homo sapiens
  misc_RNA (1)...(19): siRNA sense strand
gauuggauaugucuacuuc

SEQ ID NO: 1053686 - RNA, 19 nt, Homo sapiens
  misc_RNA (1)...(19): siRNA sense strand
agaaagauguacaguuguu

SEQ ID NO: 1053687 - RNA, 19 nt, Homo sapiens
  misc_RNA (1)...(19): siRNA sense strand
ucuauaagguuucugauca

SEQ ID NO: 1053688 - RNA, 19 nt, Homo sapiens
  misc_RNA (1)...(19): siRNA sense strand
gauuauggauuggauaugu

SEQ ID NO: 1053689 - RNA, 19 nt, Homo sapiens
  misc_RNA (1)...(19): siRNA sense strand
gaaagauguacaguuguua

SEQ ID NO: 1053690 - RNA, 19 nt, Homo sapiens
  misc_RNA (1)...(19): siRNA sense strand
gaagauguaaaccuggaua

SEQ ID NO: 1053691 - RNA, 19 nt, Homo sapiens
  misc_RNA (1)...(19): siRNA sense strand
gugauuaaauggacaaagu

SEQ ID NO: 1053692 - RNA, 19 nt, Homo sapiens
  misc_RNA (1)...(19): siRNA sense strand
cauaucacgcuguuucuua

SEQ ID NO: 1053693 - RNA, 19 nt, Homo sapiens
  misc_RNA (1)...(19): siRNA sense strand
gaagcagacaccugacuuu

SEQ ID NO: 1053694 - RNA, 19 nt, Homo sapiens
  misc_RNA (1)...(19): siRNA sense strand
gacgaaaacucuguuauaa

SEQ ID NO: 1053695 - RNA, 19 nt, Homo sapiens
  misc_RNA (1)...(19): siRNA sense strand
aaacuguuaucucugauga

SEQ ID NO: 1053696 - RNA, 19 nt, Homo sapiens
  misc_RNA (1)...(19): siRNA sense strand
gcauauagcgagacauuuc

SEQ ID NO: 1053697 - RNA, 19 nt, Homo sapiens
  misc_RNA (1)...(19): siRNA sense strand
caaaggagagcacuucaug

SEQ ID NO: 1053698 - RNA, 19 nt, Homo sapiens
  misc_RNA (1)...(19): siRNA sense strand
gagcauuggugaugacagu

SEQ ID NO: 1053699 - RNA, 19 nt, Homo sapiens
  misc_RNA (1)...(19): siRNA sense strand
gaagaagugauuaaaugga

SEQ ID NO: 1053700 - RNA, 19 nt, Homo sapiens
  misc_RNA (1)...(19): siRNA sense strand
gagcagucaagaagaauuu

SEQ ID NO: 1053701 - RNA, 19 nt, Homo sapiens
  misc_RNA (1)...(19): siRNA sense strand
gaggaagaauucacguugu

SEQ ID NO: 1053702 - RNA, 19 nt, Homo sapiens
  misc_RNA (1)...(19): siRNA sense strand
ucauuaagcucugaugguu

SEQ ID NO: 1053703 - RNA, 19 nt, Homo sapiens
  misc_RNA (1)...(19): siRNA sense strand
gcaauaacugugaucaaga

SEQ ID NO: 1053704 - RNA, 19 nt, Homo sapiens
  misc_RNA (1)...(19): siRNA sense strand
caaccauaaugaaagauuc

SEQ ID NO: 1053705 - RNA, 19 nt, Homo sapiens
  misc_RNA (1)...(19): siRNA sense strand
gaagcaaagaggcuacuga

SEQ ID NO: 1053706 - RNA, 19 nt, Homo sapiens
  misc_RNA (1)...(19): siRNA sense strand
ggaagagcaaacugaaauu

SEQ ID NO: 1053707 - RNA, 19 nt, Homo sapiens
  misc_RNA (1)...(19): siRNA sense strand
cagcagaaguauauaggau

SEQ ID NO: 1053708 - RNA, 19 nt, Homo sapiens
  misc_RNA (1)...(19): siRNA sense strand
ucacgcuguuucuuaagua

SEQ ID NO: 1053709 - RNA, 19 nt, Homo sapiens
  misc_RNA (1)...(19): siRNA sense strand
caauaacugugaucaagag

SEQ ID NO: 1053710 - RNA, 19 nt, Homo sapiens
  misc_RNA (1)...(19): siRNA sense strand
gaaaaucucuaacugugau

SEQ ID NO: 1053711 - RNA, 19 nt, Homo sapiens
  misc_RNA (1)...(19): siRNA sense strand
uuaaaucacugcugcucaa

SEQ ID NO: 1053712 - RNA, 19 nt, Homo sapiens
  misc_RNA (1)...(19): siRNA sense strand
cgaaaacucuguuauaaag

SEQ ID NO: 1053713 - RNA, 19 nt, Homo sapiens
  misc_RNA (1)...(19): siRNA sense strand
acuagcagcuucuaaggaa

SEQ ID NO: 1053714 - RNA, 19 nt, Homo sapiens
  misc_RNA (1)...(19): siRNA sense strand
gaagagcaaacugaaauuc

SEQ ID NO: 1053715 - RNA, 19 nt, Homo sapiens
  misc_RNA (1)...(19): siRNA sense strand
caaggaaggugcuguucgu

SEQ ID NO: 1053716 - RNA, 19 nt, Homo sapiens
  misc_RNA (1)...(19): siRNA sense strand
gaacucagagcagucaaga

SEQ ID NO: 1053717 - RNA, 19 nt, Homo sapiens
  misc_RNA (1)...(19): siRNA sense strand
gguauuauggagaacauuu

SEQ ID NO: 1053718 - RNA, 19 nt, Homo sapiens
  misc_RNA (1)...(19): siRNA sense strand
guuuaacucacguaucuua

SEQ ID NO: 1053719 - RNA, 19 nt, Homo sapiens
  misc_RNA (1)...(19): siRNA sense strand
uguuaucucugaugaagaa

SEQ ID NO: 1053720 - RNA, 19 nt, Homo sapiens
  misc_RNA (1)...(19): siRNA sense strand
uggagaguauguuguugua

SEQ ID NO: 1053721 - RNA, 19 nt, Homo sapiens
  misc_RNA (1)...(19): siRNA sense strand
agagcaaacugaaauucuu

SEQ ID NO: 1053722 - RNA, 19 nt, Homo sapiens
  misc_RNA (1)...(19): siRNA sense strand
ugaaguagaaguacggaaa

SEQ ID NO: 1053723 - RNA, 19 nt, Homo sapiens
  misc_RNA (1)...(19): siRNA sense strand
uaaggaaugccucucugua

SEQ ID NO: 1053724 - RNA, 19 nt, Homo sapiens
  misc_RNA (1)...(19): siRNA sense strand
acacauugaaguagaagua

SEQ ID NO: 1053725 - RNA, 19 nt, Homo sapiens
  misc_RNA (1)...(19): siRNA sense strand
auucugagcucaacaagau

SEQ ID NO: 1053726 - RNA, 19 nt, Homo sapiens
  misc_RNA (1)...(19): siRNA sense strand
cagcauauagcgagacauu

SEQ ID NO: 1053727 - RNA, 19 nt, Homo sapiens
  misc_RNA (1)...(19): siRNA sense strand
gaaguagaaguacggaaau

SEQ ID NO: 1053728 - RNA, 19 nt, Homo sapiens
  misc_RNA (1)...(19): siRNA sense strand
uugaaacuguuaucucuga

SEQ ID NO: 1053729 - RNA, 19 nt, Homo sapiens
  misc_RNA (1)...(19): siRNA sense strand
guuaauauggagucaguuu

SEQ ID NO: 1053730 - RNA, 19 nt, Homo sapiens
  misc_RNA (1)...(19): siRNA sense strand
ugucaaccauaaugaaaga

SEQ ID NO: 1053731 - RNA, 19 nt, Homo sapiens
  misc_RNA (1)...(19): siRNA sense strand
caacuuuugucaaccauaa

SEQ ID NO: 1053732 - RNA, 19 nt, Homo sapiens
  misc_RNA (1)...(19): siRNA sense strand
gcagaaaauugaaacuguu

SEQ ID NO: 1053733 - RNA, 19 nt, Homo sapiens
  misc_RNA (1)...(19): siRNA sense strand
gaauacacccaccuaccuu

SEQ ID NO: 1053734 - RNA, 19 nt, Homo sapiens
  misc_RNA (1)...(19): siRNA sense strand
guaacaggacuucuggaaa

SEQ ID NO: 1053735 - RNA, 19 nt, Homo sapiens
  misc_RNA (1)...(19): siRNA sense strand
acagaccaguuucuaguga

SEQ ID NO: 1053736 - RNA, 19 nt, Homo sapiens
  misc_RNA (1)...(19): siRNA sense strand
gcucugaugguuguauaua

SEQ ID NO: 1053737 - RNA, 19 nt, Homo sapiens
  misc_RNA (1)...(19): siRNA sense strand
ggaaauuacuuugcuuacg

SEQ ID NO: 1053738 - RNA, 19 nt, Homo sapiens
  misc_RNA (1)...(19): siRNA sense strand
gauguaaaccuggauaaag

SEQ ID NO: 1053739 - RNA, 19 nt, Homo sapiens
  misc_RNA (1)...(19): siRNA sense strand
uaccugaaguguagcgaaa

SEQ ID NO: 1053740 - RNA, 19 nt, Homo sapiens
  misc_RNA (1)...(19): siRNA sense strand
gaaugccucucuguaugga

SEQ ID NO: 1053741 - RNA, 19 nt, Homo sapiens
  misc_RNA (1)...(19): siRNA sense strand
cuacagcaguucccugaca

SEQ ID NO: 1053742 - RNA, 19 nt, Homo sapiens
  misc_RNA (1)...(19): siRNA sense strand
guaaagcagaaccaucauu

SEQ ID NO: 1053743 - RNA, 19 nt, Homo sapiens
  misc_RNA (1)...(19): siRNA sense strand
guauucagacauccuguuu

SEQ ID NO: 1053744 - RNA, 19 nt, Homo sapiens
  misc_RNA (1)...(19): siRNA sense strand
guauuuguauuuccuguac

SEQ ID NO: 1053745 - RNA, 19 nt, Homo sapiens
  misc_RNA (1)...(19): siRNA sense strand
agucaccugugcuugcuua

SEQ ID NO: 1053746 - RNA, 19 nt, Homo sapiens
  misc_RNA (1)...(19): siRNA sense strand
uaggauacuuucagugcaa

SEQ ID NO: 1053747 - RNA, 19 nt, Homo sapiens
  misc_RNA (1)...(19): siRNA sense strand
auaucacgcuguuucuuaa

SEQ ID NO: 1053748 - RNA, 19 nt, Homo sapiens
  misc_RNA (1)...(19): siRNA sense strand
acaccugacuuucauacug

SEQ ID NO: 1053749 - RNA, 19 nt, Homo sapiens
  misc_RNA (1)...(19): siRNA sense strand
ucugaugguuguauauaug

SEQ ID NO: 1053750 - RNA, 19 nt, Homo sapiens
  misc_RNA (1)...(19): siRNA sense strand
aaacaaaggagagcacuuc

SEQ ID NO: 1053751 - RNA, 19 nt, Homo sapiens
  misc_RNA (1)...(19): siRNA sense strand
gagcaaacugaaauucuuc

SEQ ID NO: 1053752 - RNA, 19 nt, Homo sapiens
  misc_RNA (1)...(19): siRNA sense strand
gcagaaccaucauuuuauc

SEQ ID NO: 1053753 - RNA, 19 nt, Homo sapiens
  misc_RNA (1)...(19): siRNA sense strand
gaaacuguuaucucugaug

SEQ ID NO: 1053754 - RNA, 19 nt, Homo sapiens
  misc_RNA (1)...(19): siRNA sense strand
gaaacaaaggagagcacuu

SEQ ID NO: 1053755 - RNA, 19 nt, Homo sapiens
  misc_RNA (1)...(19): siRNA sense strand
gcaguucccugacauuccu

SEQ ID NO: 1053756 - RNA, 19 nt, Homo sapiens
  misc_RNA (1)...(19): siRNA sense strand
ggacuucuggaaaggugua

SEQ ID NO: 1053757 - RNA, 19 nt, Homo sapiens
  misc_RNA (1)...(19): siRNA sense strand
cgcuguuucuuaaguauuu

SEQ ID NO: 1053758 - RNA, 19 nt, Homo sapiens
  misc_RNA (1)...(19): siRNA sense strand
ggagcuacagaaauuaaau

SEQ ID NO: 1053759 - RNA, 19 nt, Homo sapiens
  misc_RNA (1)...(19): siRNA sense strand
uucgggagcuacagaaauu

SEQ ID NO: 1053760 - RNA, 19 nt, Homo sapiens
  misc_RNA (1)...(19): siRNA sense strand
uaagacagaugcccagaga

SEQ ID NO: 1053761 - RNA, 19 nt, Homo sapiens
  misc_RNA (1)...(19): siRNA sense strand
acauuuaccugguguuuga

SEQ ID NO: 1053762 - RNA, 19 nt, Homo sapiens
  misc_RNA (1)...(19): siRNA sense strand
ggacauuuaccugguguuu

SEQ ID NO: 1053763 - RNA, 19 nt, Homo sapiens
  misc_RNA (1)...(19): siRNA sense strand
ggucguggccaucaagaaa

SEQ ID NO: 1053764 - RNA, 19 nt, Homo sapiens
  misc_RNA (1)...(19): siRNA sense strand
guaguggacccucgcauug

SEQ ID NO: 1053765 - RNA, 19 nt, Homo sapiens
  misc_RNA (1)...(19): siRNA sense strand
gaccagaagccguccaaug

SEQ ID NO: 1053766 - RNA, 19 nt, Homo sapiens
  misc_RNA (1)...(19): siRNA sense strand
agaacgacagggacauuua

SEQ ID NO: 1053767 - RNA, 19 nt, Homo sapiens
  misc_RNA (1)...(19): siRNA sense strand
gagaacgacagggacauuu

SEQ ID NO: 1053768 - RNA, 19 nt, Homo sapiens
  misc_RNA (1)...(19): siRNA sense strand
gaacgacagggacauuuac

SEQ ID NO: 1053769 - RNA, 19 nt, Homo sapiens
  misc_RNA (1)...(19): siRNA sense strand
ccuauggcauuguguggaa

SEQ ID NO: 1053770 - RNA, 19 nt, Homo sapiens
  misc_RNA (1)...(19): siRNA sense strand
uaccugguguuugaguuua

SEQ ID NO: 1053771 - RNA, 19 nt, Homo sapiens
  misc_RNA (1)...(19): siRNA sense strand
guccggagauaccuacuca

SEQ ID NO: 1053772 - RNA, 19 nt, Homo sapiens
  misc_RNA (1)...(19): siRNA sense strand
cggaggugcugcucucuuc

SEQ ID NO: 1053773 - RNA, 19 nt, Homo sapiens
  misc_RNA (1)...(19): siRNA sense strand
cagugaagcugugugacuu

SEQ ID NO: 1053774 - RNA, 19 nt, Homo sapiens
  misc_RNA (1)...(19): siRNA sense strand
gugaagcugugugacuuug

SEQ ID NO: 1053775 - RNA, 19 nt, Homo sapiens
  misc_RNA (1)...(19): siRNA sense strand
gaccaucccaacaucauca

SEQ ID NO: 1053776 - RNA, 19 nt, Homo sapiens
  misc_RNA (1)...(19): siRNA sense strand
ccacgugcgcuccaucuuc

SEQ ID NO: 1053777 - RNA, 19 nt, Homo sapiens
  misc_RNA (1)...(19): siRNA sense strand
caacaucaucagccuccuu

SEQ ID NO: 1053778 - RNA, 19 nt, Homo sapiens
  misc_RNA (1)...(19): siRNA sense strand
ccagaagccguccaaugug

SEQ ID NO: 1053779 - RNA, 19 nt, Homo sapiens
  misc_RNA (1)...(19): siRNA sense strand
accagaagccguccaaugu

SEQ ID NO: 1053780 - RNA, 19 nt, Homo sapiens
  misc_RNA (1)...(19): siRNA sense strand
gaccaggccgugacagagu

SEQ ID NO: 1053781 - RNA, 19 nt, Homo sapiens
  misc_RNA (1)...(19): siRNA sense strand
gacgugauccgggcagaga

SEQ ID NO: 1053782 - RNA, 19 nt, Homo sapiens
  misc_RNA (1)...(19): siRNA sense strand
cacgugcgcuccaucuucu

SEQ ID NO: 1053783 - RNA, 19 nt, Homo sapiens
  misc_RNA (1)...(19): siRNA sense strand
cguaguggacccucgcauu

SEQ ID NO: 1053784 - RNA, 19 nt, Homo sapiens
  misc_RNA (1)...(19): siRNA sense strand
agacagaugcccagagaac

SEQ ID NO: 1053785 - RNA, 19 nt, Homo sapiens
  misc_RNA (1)...(19): siRNA sense strand
cagaugcccagagaacauu

SEQ ID NO: 1053786 - RNA, 19 nt, Homo sapiens
  misc_RNA (1)...(19): siRNA sense strand
ggaccaucccaacaucauc

SEQ ID NO: 1053787 - RNA, 19 nt, Homo sapiens
  misc_RNA (1)...(19): siRNA sense strand
gacauuuaccugguguuug

SEQ ID NO: 1053788 - RNA, 19 nt, Homo sapiens
  misc_RNA (1)...(19): siRNA sense strand
uguggagucugggcuguau

SEQ ID NO: 1053789 - RNA, 19 nt, Homo sapiens
  misc_RNA (1)...(19): siRNA sense strand
accaggccgugacagagua

SEQ ID NO: 1053790 - RNA, 19 nt, Homo sapiens
  misc_RNA (1)...(19): siRNA sense strand
uuaccugguguuugaguuu

SEQ ID NO: 1053791 - RNA, 19 nt, Homo sapiens
  misc_RNA (1)...(19): siRNA sense strand
ggaauucgcucagaagaaa

SEQ ID NO: 1053792 - RNA, 19 nt, Homo sapiens
  misc_RNA (1)...(19): siRNA sense strand
gcaaagagaagauacagaa

SEQ ID NO: 1053793 - RNA, 19 nt, Homo sapiens
  misc_RNA (1)...(19): siRNA sense strand
aaagggaugugaauuauug

SEQ ID NO: 1053794 - RNA, 19 nt, Homo sapiens
  misc_RNA (1)...(19): siRNA sense strand
gaaaacaucuauaccauug

SEQ ID NO: 1053795 - RNA, 19 nt, Homo sapiens
  misc_RNA (1)...(19): siRNA sense strand
gaagagaacguauaugaag

SEQ ID NO: 1053796 - RNA, 19 nt, Homo sapiens
  misc_RNA (1)...(19): siRNA sense strand
gagccucccugauauaaau

SEQ ID NO: 1053797 - RNA, 19 nt, Homo sapiens
  misc_RNA (1)...(19): siRNA sense strand
ugaaagggaugugaauuau

SEQ ID NO: 1053798 - RNA, 19 nt, Homo sapiens
  misc_RNA (1)...(19): siRNA sense strand
agacuucacugcagccuuu

SEQ ID NO: 1053799 - RNA, 19 nt, Homo sapiens
  misc_RNA (1)...(19): siRNA sense strand
gagcggaggucggucagaa

SEQ ID NO: 1053800 - RNA, 19 nt, Homo sapiens
  misc_RNA (1)...(19): siRNA sense strand
ggacauggcccagcagaga

SEQ ID NO: 1053801 - RNA, 19 nt, Homo sapiens
  misc_RNA (1)...(19): siRNA sense strand
gaaagggaugugaauuauu

SEQ ID NO: 1053802 - RNA, 19 nt, Homo sapiens
  misc_RNA (1)...(19): siRNA sense strand
acacaaauauccacauugg

SEQ ID NO: 1053803 - RNA, 19 nt, Homo sapiens
  misc_RNA (1)...(19): siRNA sense strand
cagcaacccucacaaccuu

SEQ ID NO: 1053804 - RNA, 19 nt, Homo sapiens
  misc_RNA (1)...(19): siRNA sense strand
gaccauagagaaugugauu

SEQ ID NO: 1053805 - RNA, 19 nt, Homo sapiens
  misc_RNA (1)...(19): siRNA sense strand
ccaaaucccaggcauaaug

SEQ ID NO: 1053806 - RNA, 19 nt, Homo sapiens
  misc_RNA (1)...(19): siRNA sense strand
uuucacaucuucccuuuga

SEQ ID NO: 1053807 - RNA, 19 nt, Homo sapiens
  misc_RNA (1)...(19): siRNA sense strand
uggaggagcccaaugagua

SEQ ID NO: 1053808 - RNA, 19 nt, Homo sapiens
  misc_RNA (1)...(19): siRNA sense strand
ggagcaaccaucagaauag

SEQ ID NO: 1053809 - RNA, 19 nt, Homo sapiens
  misc_RNA (1)...(19): siRNA sense strand
gagccuguccuguguuuga

SEQ ID NO: 1053810 - RNA, 19 nt, Homo sapiens
  misc_RNA (1)...(19): siRNA sense strand
uaucuucggcgcuuuaauu

SEQ ID NO: 1053811 - RNA, 19 nt, Homo sapiens
  misc_RNA (1)...(19): siRNA sense strand
caaaugguauucucauagc

SEQ ID NO: 1053812 - RNA, 19 nt, Homo sapiens
  misc_RNA (1)...(19): siRNA sense strand
gaauuuaagccucaucucu

SEQ ID NO: 1053813 - RNA, 19 nt, Homo sapiens
  misc_RNA (1)...(19): siRNA sense strand
ggaggagcccaaugaguau

SEQ ID NO: 1053814 - RNA, 19 nt, Homo sapiens
  misc_RNA (1)...(19): siRNA sense strand
gauccaaaucccaggcaua

SEQ ID NO: 1053815 - RNA, 19 nt, Homo sapiens
  misc_RNA (1)...(19): siRNA sense strand
gaagauacagaauuuaagc

SEQ ID NO: 1053816 - RNA, 19 nt, Homo sapiens
  misc_RNA (1)...(19): siRNA sense strand
caaaucccaggcauaauga

SEQ ID NO: 1053817 - RNA, 19 nt, Homo sapiens
  misc_RNA (1)...(19): siRNA sense strand
augaaagggaugugaauua

SEQ ID NO: 1053818 - RNA, 19 nt, Homo sapiens
  misc_RNA (1)...(19): siRNA sense strand
uugaagagaacguauauga

SEQ ID NO: 1053819 - RNA, 19 nt, Homo sapiens
  misc_RNA (1)...(19): siRNA sense strand
gaugaaagggaugugaauu

SEQ ID NO: 1053820 - RNA, 19 nt, Homo sapiens
  misc_RNA (1)...(19): siRNA sense strand
ucuauaccauugaagagaa

SEQ ID NO: 1053821 - RNA, 19 nt, Homo sapiens
  misc_RNA (1)...(19): siRNA sense strand
cagaauaggcaucuacauc

SEQ ID NO: 1053822 - RNA, 19 nt, Homo sapiens
  misc_RNA (1)...(19): siRNA sense strand
ccucagaaguggaauacag

SEQ ID NO: 1053823 - RNA, 19 nt, Homo sapiens
  misc_RNA (1)...(19): siRNA sense strand
ugaagagaacguauaugaa

SEQ ID NO: 1053824 - RNA, 19 nt, Homo sapiens
  misc_RNA (1)...(19): siRNA sense strand
uuacgggacucuagauugg

SEQ ID NO: 1053825 - RNA, 19 nt, Homo sapiens
  misc_RNA (1)...(19): siRNA sense strand
gagcaaccaucagaauagg

SEQ ID NO: 1053826 - RNA, 19 nt, Homo sapiens
  misc_RNA (1)...(19): siRNA sense strand
gaguauuauugcuauguca

SEQ ID NO: 1053827 - RNA, 19 nt, Homo sapiens
  misc_RNA (1)...(19): siRNA sense strand
auuuaagccucaucucuuu

SEQ ID NO: 1053828 - RNA, 19 nt, Homo sapiens
  misc_RNA (1)...(19): siRNA sense strand
gggaauucgcucagaagaa

SEQ ID NO: 1053829 - RNA, 19 nt, Homo sapiens
  misc_RNA (1)...(19): siRNA sense strand
agagggaauucgcucagaa

SEQ ID NO: 1053830 - RNA, 19 nt, Homo sapiens
  misc_RNA (1)...(19): siRNA sense strand
ucccaggcauaaugaauga

SEQ ID NO: 1053831 - RNA, 19 nt, Homo sapiens
  misc_RNA (1)...(19): siRNA sense strand
ccauugaagagaacguaua

SEQ ID NO: 1053832 - RNA, 19 nt, Homo sapiens
  misc_RNA (1)...(19): siRNA sense strand
gaagaaaacaucuauacca

SEQ ID NO: 1053833 - RNA, 19 nt, Homo sapiens
  misc_RNA (1)...(19): siRNA sense strand
uaucugcccugcuucuaca

SEQ ID NO: 1053834 - RNA, 19 nt, Homo sapiens
  misc_RNA (1)...(19): siRNA sense strand
gguauucucauagcaaaga

SEQ ID NO: 1053835 - RNA, 19 nt, Homo sapiens
  misc_RNA (1)...(19): siRNA sense strand
ucaaaugguauucucauag

SEQ ID NO: 1053836 - RNA, 19 nt, Homo sapiens
  misc_RNA (1)...(19): siRNA sense strand
ggagcccaaugaguauuau

SEQ ID NO: 1053837 - RNA, 19 nt, Homo sapiens
  misc_RNA (1)...(19): siRNA sense strand
uggagcaaccaucagaaua

SEQ ID NO: 1053838 - RNA, 19 nt, Homo sapiens
  misc_RNA (1)...(19): siRNA sense strand
cugcugcugcuacuacuua

SEQ ID NO: 1053839 - RNA, 19 nt, Homo sapiens
  misc_RNA (1)...(19): siRNA sense strand
aagagaacguauaugaagu

SEQ ID NO: 1053840 - RNA, 19 nt, Homo sapiens
  misc_RNA (1)...(19): siRNA sense strand
caaagagaagauacagaau

SEQ ID NO: 1053841 - RNA, 19 nt, Homo sapiens
  misc_RNA (1)...(19): siRNA sense strand
ggcucuggcucuuaucuuc

SEQ ID NO: 1053842 - RNA, 19 nt, Homo sapiens
  misc_RNA (1)...(19): siRNA sense strand
gcaacccucacaaccuuug

SEQ ID NO: 1053843 - RNA, 19 nt, Homo sapiens
  misc_RNA (1)...(19): siRNA sense strand
caggcauaaugaaugauga

SEQ ID NO: 1053844 - RNA, 19 nt, Homo sapiens
  misc_RNA (1)...(19): siRNA sense strand
cagagggaauucgcucaga

SEQ ID NO: 1053845 - RNA, 19 nt, Homo sapiens
  misc_RNA (1)...(19): siRNA sense strand
guuacgggacucuagauug

SEQ ID NO: 1053846 - RNA, 19 nt, Homo sapiens
  misc_RNA (1)...(19): siRNA sense strand
uacaagguccucagaagug

SEQ ID NO: 1053847 - RNA, 19 nt, Homo sapiens
  misc_RNA (1)...(19): siRNA sense strand
aauuuaaccugaaguuggu

SEQ ID NO: 1053848 - RNA, 19 nt, Homo sapiens
  misc_RNA (1)...(19): siRNA sense strand
gguugucgcuuugcaaugc

SEQ ID NO: 1053849 - RNA, 19 nt, Homo sapiens
  misc_RNA (1)...(19): siRNA sense strand
gcaggcagcaacccucaca

SEQ ID NO: 1053850 - RNA, 19 nt, Homo sapiens
  misc_RNA (1)...(19): siRNA sense strand
gcggaggucggucagaaug

SEQ ID NO: 1053851 - RNA, 19 nt, Homo sapiens
  misc_RNA (1)...(19): siRNA sense strand
gaaguggaggagcccaaug

SEQ ID NO: 1053852 - RNA, 19 nt, Homo sapiens
  misc_RNA (1)...(19): siRNA sense strand
cauugaagagaacguauau

SEQ ID NO: 1053853 - RNA, 19 nt, Homo sapiens
  misc_RNA (1)...(19): siRNA sense strand
gaugugucccugaccauag

SEQ ID NO: 1053854 - RNA, 19 nt, Homo sapiens
  misc_RNA (1)...(19): siRNA sense strand
uuacgggacucuggagcaa

SEQ ID NO: 1053855 - RNA, 19 nt, Homo sapiens
  misc_RNA (1)...(19): siRNA sense strand
ggacugaugaaagggaugu

SEQ ID NO: 1053856 - RNA, 19 nt, Homo sapiens
  misc_RNA (1)...(19): siRNA sense strand
cuuacaagguccucagaag

SEQ ID NO: 1053857 - RNA, 19 nt, Homo sapiens
  misc_RNA (1)...(19): siRNA sense strand
ggcuggcucuggcucuuau

SEQ ID NO: 1053858 - RNA, 19 nt, Homo sapiens
  misc_RNA (1)...(19): siRNA sense strand
gggcuggcucuggcucuua

SEQ ID NO: 1053859 - RNA, 19 nt, Homo sapiens
  misc_RNA (1)...(19): siRNA sense strand
caucggagcagggaucugu

SEQ ID NO: 1053860 - RNA, 19 nt, Homo sapiens
  misc_RNA (1)...(19): siRNA sense strand
ccucaggauuggcaaaugc

SEQ ID NO: 1053861 - RNA, 19 nt, Homo sapiens
  misc_RNA (1)...(19): siRNA sense strand
ugaguauuauugcuauguc

SEQ ID NO: 1053862 - RNA, 19 nt, Homo sapiens
  misc_RNA (1)...(19): siRNA sense strand
ccaggcauaaugaaugaug

SEQ ID NO: 1053863 - RNA, 19 nt, Homo sapiens
  misc_RNA (1)...(19): siRNA sense strand
gcagcaacccucacaaccu

SEQ ID NO: 1053864 - RNA, 19 nt, Homo sapiens
  misc_RNA (1)...(19): siRNA sense strand
ucauagcaaagagaagaua

SEQ ID NO: 1053865 - RNA, 19 nt, Homo sapiens
  misc_RNA (1)...(19): siRNA sense strand
ugaaguuggucaucaaacc

SEQ ID NO: 1053866 - RNA, 19 nt, Homo sapiens
  misc_RNA (1)...(19): siRNA sense strand
cagcagagacacagacacu

SEQ ID NO: 1053867 - RNA, 19 nt, Homo sapiens
  misc_RNA (1)...(19): siRNA sense strand
gguccucagaaguggaaua

SEQ ID NO: 1053868 - RNA, 19 nt, Homo sapiens
  misc_RNA (1)...(19): siRNA sense strand
gagggaauucgcucagaag

SEQ ID NO: 1053869 - RNA, 19 nt, Homo sapiens
  misc_RNA (1)...(19): siRNA sense strand
aaccugaaguuggucauca

SEQ ID NO: 1053870 - RNA, 19 nt, Homo sapiens
  misc_RNA (1)...(19): siRNA sense strand
agagaacguauaugaagug

SEQ ID NO: 1053871 - RNA, 19 nt, Homo sapiens
  misc_RNA (1)...(19): siRNA sense strand
aggauuggcaaaugcagua

SEQ ID NO: 1053872 - RNA, 19 nt, Homo sapiens
  misc_RNA (1)...(19): siRNA sense strand
aauuuaagccucaucucuu

SEQ ID NO: 1053873 - RNA, 19 nt, Homo sapiens
  misc_RNA (1)...(19): siRNA sense strand
ccuguccuguguuugaaug

SEQ ID NO: 1053874 - RNA, 19 nt, Homo sapiens
  misc_RNA (1)...(19): siRNA sense strand
aggagcccaaugaguauua

SEQ ID NO: 1053875 - RNA, 19 nt, Homo sapiens
  misc_RNA (1)...(19): siRNA sense strand
uuacaagguccucagaagu

SEQ ID NO: 1053876 - RNA, 19 nt, Homo sapiens
  misc_RNA (1)...(19): siRNA sense strand
caucagaauaggcaucuac

SEQ ID NO: 1053877 - RNA, 19 nt, Homo sapiens
  misc_RNA (1)...(19): siRNA sense strand
ggaagcuguucgacuauuu

SEQ ID NO: 1053878 - RNA, 19 nt, Homo sapiens
  misc_RNA (1)...(19): siRNA sense strand
cagggaagcuguucgacua

SEQ ID NO: 1053879 - RNA, 19 nt, Homo sapiens
  misc_RNA (1)...(19): siRNA sense strand
acacagaugucuuagaguu

SEQ ID NO: 1053880 - RNA, 19 nt, Homo sapiens
  misc_RNA (1)...(19): siRNA sense strand
cuacacagaugucuuagag

SEQ ID NO: 1053881 - RNA, 19 nt, Homo sapiens
  misc_RNA (1)...(19): siRNA sense strand
gggaagcuguucgacuauu

SEQ ID NO: 1053882 - RNA, 19 nt, Homo sapiens
  misc_RNA (1)...(19): siRNA sense strand
ccauaaagcggcacaagug

SEQ ID NO: 1053883 - RNA, 19 nt, Homo sapiens
  misc_RNA (1)...(19): siRNA sense strand
acagaugucuuagaguuug

SEQ ID NO: 1053884 - RNA, 19 nt, Homo sapiens
  misc_RNA (1)...(19): siRNA sense strand
acacggaggaugaagcuaa

SEQ ID NO: 1053885 - RNA, 19 nt, Homo sapiens
  misc_RNA (1)...(19): siRNA sense strand
gcauggggcucaagauguu

SEQ ID NO: 1053886 - RNA, 19 nt, Homo sapiens
  misc_RNA (1)...(19): siRNA sense strand
gcuaccaugucccagauag

SEQ ID NO: 1053887 - RNA, 19 nt, Homo sapiens
  misc_RNA (1)...(19): siRNA sense strand
gucggaagcuggcauaucg

SEQ ID NO: 1053888 - RNA, 19 nt, Homo sapiens
  misc_RNA (1)...(19): siRNA sense strand
gaagcuguucgacuauuuc

SEQ ID NO: 1053889 - RNA, 19 nt, Homo sapiens
  misc_RNA (1)...(19): siRNA sense strand
cagcuaccaugucccagau

SEQ ID NO: 1053890 - RNA, 19 nt, Homo sapiens
  misc_RNA (1)...(19): siRNA sense strand
ccagauagccaaggaugug

SEQ ID NO: 1053891 - RNA, 19 nt, Homo sapiens
  misc_RNA (1)...(19): siRNA sense strand
gcucugcauucggcuguga

SEQ ID NO: 1053892 - RNA, 19 nt, Homo sapiens
  misc_RNA (1)...(19): siRNA sense strand
ggagggguuuccagguaua

SEQ ID NO: 1053893 - RNA, 19 nt, Homo sapiens
  misc_RNA (1)...(19): siRNA sense strand
cugcggagguggagguuca

SEQ ID NO: 1053894 - RNA, 19 nt, Homo sapiens
  misc_RNA (1)...(19): siRNA sense strand
cagaugucuuagaguuuga

SEQ ID NO: 1053895 - RNA, 19 nt, Homo sapiens
  misc_RNA (1)...(19): siRNA sense strand
guucgacuauuucccaaaa

SEQ ID NO: 1053896 - RNA, 19 nt, Homo sapiens
  misc_RNA (1)...(19): siRNA sense strand
ccagagcacgaccaucgaa

SEQ ID NO: 1053897 - RNA, 19 nt, Homo sapiens
  misc_RNA (1)...(19): siRNA sense strand
cacagaugucuuagaguuu

SEQ ID NO: 1053898 - RNA, 19 nt, Homo sapiens
  misc_RNA (1)...(19): siRNA sense strand
ggagguggagguucaagac

SEQ ID NO: 1053899 - RNA, 19 nt, Homo sapiens
  misc_RNA (1)...(19): siRNA sense strand
ucccgaggccggaaaguga

SEQ ID NO: 1053900 - RNA, 19 nt, Homo sapiens
  misc_RNA (1)...(19): siRNA sense strand
caaugaagauggggagaug

SEQ ID NO: 1053901 - RNA, 19 nt, Homo sapiens
  misc_RNA (1)...(19): siRNA sense strand
ucacaggucuuaaauguaa

SEQ ID NO: 1053902 - RNA, 19 nt, Homo sapiens
  misc_RNA (1)...(19): siRNA sense strand
gaaaugagcaacuuacuga

SEQ ID NO: 1053903 - RNA, 19 nt, Homo sapiens
  misc_RNA (1)...(19): siRNA sense strand
gcucagcucuuaacagaaa

SEQ ID NO: 1053904 - RNA, 19 nt, Homo sapiens
  misc_RNA (1)...(19): siRNA sense strand
cgacacccaucaauuauuu

SEQ ID NO: 1053905 - RNA, 19 nt, Homo sapiens
  misc_RNA (1)...(19): siRNA sense strand
uaaaggaguucuucucuau

SEQ ID NO: 1053906 - RNA, 19 nt, Homo sapiens
  misc_RNA (1)...(19): siRNA sense strand
gaagagagacugcuaaagu

SEQ ID NO: 1053907 - RNA, 19 nt, Homo sapiens
  misc_RNA (1)...(19): siRNA sense strand
gaagcaaaguuacgucaga

SEQ ID NO: 1053908 - RNA, 19 nt, Homo sapiens
  misc_RNA (1)...(19): siRNA sense strand
caagaaguacuccuuauaa

SEQ ID NO: 1053909 - RNA, 19 nt, Homo sapiens
  misc_RNA (1)...(19): siRNA sense strand
ggaguuauccuuacagcua

SEQ ID NO: 1053910 - RNA, 19 nt, Homo sapiens
  misc_RNA (1)...(19): siRNA sense strand
gacaaccaauucaaaguaa

SEQ ID NO: 1053911 - RNA, 19 nt, Homo sapiens
  misc_RNA (1)...(19): siRNA sense strand
gcaaagugcaauacugaua

SEQ ID NO: 1053912 - RNA, 19 nt, Homo sapiens
  misc_RNA (1)...(19): siRNA sense strand
ggagauggcaguggacuua

SEQ ID NO: 1053913 - RNA, 19 nt, Homo sapiens
  misc_RNA (1)...(19): siRNA sense strand
cuacgacacccaucaauua

SEQ ID NO: 1053914 - RNA, 19 nt, Homo sapiens
  misc_RNA (1)...(19): siRNA sense strand
gaaguuggagccuauguuu

SEQ ID NO: 1053915 - RNA, 19 nt, Homo sapiens
  misc_RNA (1)...(19): siRNA sense strand
gcaguggacuuaugcuaga

SEQ ID NO: 1053916 - RNA, 19 nt, Homo sapiens
  misc_RNA (1)...(19): siRNA sense strand
cuagaggaguguuacuuua

SEQ ID NO: 1053917 - RNA, 19 nt, Homo sapiens
  misc_RNA (1)...(19): siRNA sense strand
gggccugaauuaaugaaua

SEQ ID NO: 1053918 - RNA, 19 nt, Homo sapiens
  misc_RNA (1)...(19): siRNA sense strand
gaaggaaaugagcaacuua

SEQ ID NO: 1053919 - RNA, 19 nt, Homo sapiens
  misc_RNA (1)...(19): siRNA sense strand
gaauguagccgaucguguu

SEQ ID NO: 1053920 - RNA, 19 nt, Homo sapiens
  misc_RNA (1)...(19): siRNA sense strand
caauugaugucccaaaugu

SEQ ID NO: 1053921 - RNA, 19 nt, Homo sapiens
  misc_RNA (1)...(19): siRNA sense strand
gcaagacaaccaauucaaa

SEQ ID NO: 1053922 - RNA, 19 nt, Homo sapiens
  misc_RNA (1)...(19): siRNA sense strand
gcucaggaccggcuagaua

SEQ ID NO: 1053923 - RNA, 19 nt, Homo sapiens
  misc_RNA (1)...(19): siRNA sense strand
gaagaagaacugacugguu

SEQ ID NO: 1053924 - RNA, 19 nt, Homo sapiens
  misc_RNA (1)...(19): siRNA sense strand
ggccugaauuaaugaauaa

SEQ ID NO: 1053925 - RNA, 19 nt, Homo sapiens
  misc_RNA (1)...(19): siRNA sense strand
ggaaauagcaauugauguc

SEQ ID NO: 1053926 - RNA, 19 nt, Homo sapiens
  misc_RNA (1)...(19): siRNA sense strand
caacaacaagagucaauuu

SEQ ID NO: 1053927 - RNA, 19 nt, Homo sapiens
  misc_RNA (1)...(19): siRNA sense strand
gagcaaagugcaauacuga

SEQ ID NO: 1053928 - RNA, 19 nt, Homo sapiens
  misc_RNA (1)...(19): siRNA sense strand
ggaagucacaggucuuaaa

SEQ ID NO: 1053929 - RNA, 19 nt, Homo sapiens
  misc_RNA (1)...(19): siRNA sense strand
gaagaagagagacugcuaa

SEQ ID NO: 1053930 - RNA, 19 nt, Homo sapiens
  misc_RNA (1)...(19): siRNA sense strand
gcuacuaaccguccagaua

SEQ ID NO: 1053931 - RNA, 19 nt, Homo sapiens
  misc_RNA (1)...(19): siRNA sense strand
gcaguggcgccuuccauua

SEQ ID NO: 1053932 - RNA, 19 nt, Homo sapiens
  misc_RNA (1)...(19): siRNA sense strand
caaauagugcucauggaua

SEQ ID NO: 1053933 - RNA, 19 nt, Homo sapiens
  misc_RNA (1)...(19): siRNA sense strand
ccaggcaacuuucuguauu

SEQ ID NO: 1053934 - RNA, 19 nt, Homo sapiens
  misc_RNA (1)...(19): siRNA sense strand
gaagggaaauauuuaagcu

SEQ ID NO: 1053935 - RNA, 19 nt, Homo sapiens
  misc_RNA (1)...(19): siRNA sense strand
gaaaguaucaaacugaagu

SEQ ID NO: 1053936 - RNA, 19 nt, Homo sapiens
  misc_RNA (1)...(19): siRNA sense strand
cguacaagcugcaaguauu

SEQ ID NO: 1053937 - RNA, 19 nt, Homo sapiens
  misc_RNA (1)...(19): siRNA sense strand
gaagauuacucugaaggau

SEQ ID NO: 1053938 - RNA, 19 nt, Homo sapiens
  misc_RNA (1)...(19): siRNA sense strand
ccgaagaccugggcgauuu

SEQ ID NO: 1053939 - RNA, 19 nt, Homo sapiens
  misc_RNA (1)...(19): siRNA sense strand
ccagggcuguugcuaauga

SEQ ID NO: 1053940 - RNA, 19 nt, Homo sapiens
  misc_RNA (1)...(19): siRNA sense strand
caacaagaagggaaauauu

SEQ ID NO: 1053941 - RNA, 19 nt, Homo sapiens
  misc_RNA (1)...(19): siRNA sense strand
gcuaaaggaugugaccauu

SEQ ID NO: 1053942 - RNA, 19 nt, Homo sapiens
  misc_RNA (1)...(19): siRNA sense strand
gugaccaacuuauuagaaa

SEQ ID NO: 1053943 - RNA, 19 nt, Homo sapiens
  misc_RNA (1)...(19): siRNA sense strand
gacggugaccaacuuauua

SEQ ID NO: 1053944 - RNA, 19 nt, Homo sapiens
  misc_RNA (1)...(19): siRNA sense strand
uaaaggaugugaccauuuu

SEQ ID NO: 1053945 - RNA, 19 nt, Homo sapiens
  misc_RNA (1)...(19): siRNA sense strand
ggcaaugaaugauaucaga

SEQ ID NO: 1053946 - RNA, 19 nt, Homo sapiens
  misc_RNA (1)...(19): siRNA sense strand
agauuacucugaaggauuu

SEQ ID NO: 1053947 - RNA, 19 nt, Homo sapiens
  misc_RNA (1)...(19): siRNA sense strand
auaaagagauugagauugg

SEQ ID NO: 1053948 - RNA, 19 nt, Homo sapiens
  misc_RNA (1)...(19): siRNA sense strand
gcaaaguuacgucagauau

SEQ ID NO: 1053949 - RNA, 19 nt, Homo sapiens
  misc_RNA (1)...(19): siRNA sense strand
gaugcggccuggaagaauu

SEQ ID NO: 1053950 - RNA, 19 nt, Homo sapiens
  misc_RNA (1)...(19): siRNA sense strand
cgaccaguguugcuuacua

SEQ ID NO: 1053951 - RNA, 19 nt, Homo sapiens
  misc_RNA (1)...(19): siRNA sense strand
gaaagagcaguuagagaga

SEQ ID NO: 1053952 - RNA, 19 nt, Homo sapiens
  misc_RNA (1)...(19): siRNA sense strand
cuaaaggaguucuucucua

SEQ ID NO: 1053953 - RNA, 19 nt, Homo sapiens
  misc_RNA (1)...(19): siRNA sense strand
uaggaggacuggaaaguau

SEQ ID NO: 1053954 - RNA, 19 nt, Homo sapiens
  misc_RNA (1)...(19): siRNA sense strand
uggcauugguucagaagua

SEQ ID NO: 1053955 - RNA, 19 nt, Homo sapiens
  misc_RNA (1)...(19): siRNA sense strand
gagccuauguuucuguaau

SEQ ID NO: 1053956 - RNA, 19 nt, Homo sapiens
  misc_RNA (1)...(19): siRNA sense strand
ggagcaaagugcaauacug

SEQ ID NO: 1053957 - RNA, 19 nt, Homo sapiens
  misc_RNA (1)...(19): siRNA sense strand
aagagagacugcuaaaguu

SEQ ID NO: 1053958 - RNA, 19 nt, Homo sapiens
  misc_RNA (1)...(19): siRNA sense strand
ucaagaaguacuccuuaua

SEQ ID NO: 1053959 - RNA, 19 nt, Homo sapiens
  misc_RNA (1)...(19): siRNA sense strand
gaguuauccuuacagcuaa

SEQ ID NO: 1053960 - RNA, 19 nt, Homo sapiens
  misc_RNA (1)...(19): siRNA sense strand
gcaacuuucuguauuguac

SEQ ID NO: 1053961 - RNA, 19 nt, Homo sapiens
  misc_RNA (1)...(19): siRNA sense strand
caguguugcuuacuaguuu

SEQ ID NO: 1053962 - RNA, 19 nt, Homo sapiens
  misc_RNA (1)...(19): siRNA sense strand
gcaaauagugcucauggau

SEQ ID NO: 1053963 - RNA, 19 nt, Homo sapiens
  misc_RNA (1)...(19): siRNA sense strand
gcgauuugauaaagagauu

SEQ ID NO: 1053964 - RNA, 19 nt, Homo sapiens
  misc_RNA (1)...(19): siRNA sense strand
ugagugaaauggcacagaa

SEQ ID NO: 1053965 - RNA, 19 nt, Homo sapiens
  misc_RNA (1)...(19): siRNA sense strand
gaggaagucacaggucuua

SEQ ID NO: 1053966 - RNA, 19 nt, Homo sapiens
  misc_RNA (1)...(19): siRNA sense strand
ugagggaaauagcaauuga

SEQ ID NO: 1053967 - RNA, 19 nt, Homo sapiens
  misc_RNA (1)...(19): siRNA sense strand
uugaaagucuuguguaaug

SEQ ID NO: 1053968 - RNA, 19 nt, Homo sapiens
  misc_RNA (1)...(19): siRNA sense strand
aguuguggcuucacucuua

SEQ ID NO: 1053969 - RNA, 19 nt, Homo sapiens
  misc_RNA (1)...(19): siRNA sense strand
gcagauggcaugauauugg

SEQ ID NO: 1053970 - RNA, 19 nt, Homo sapiens
  misc_RNA (1)...(19): siRNA sense strand
gcaacaagaagggaaauau

SEQ ID NO: 1053971 - RNA, 19 nt, Homo sapiens
  misc_RNA (1)...(19): siRNA sense strand
acuaugaagucugcaaaua

SEQ ID NO: 1053972 - RNA, 19 nt, Homo sapiens
  misc_RNA (1)...(19): siRNA sense strand
aaucaucuaugugccuuua

SEQ ID NO: 1053973 - RNA, 19 nt, Homo sapiens
  misc_RNA (1)...(19): siRNA sense strand
agaaguaagugaaggacaa

SEQ ID NO: 1053974 - RNA, 19 nt, Homo sapiens
  misc_RNA (1)...(19): siRNA sense strand
gcaacuuacugaagaagag

SEQ ID NO: 1053975 - RNA, 19 nt, Homo sapiens
  misc_RNA (1)...(19): siRNA sense strand
gcuacaggcugaggaaaug

SEQ ID NO: 1053976 - RNA, 19 nt, Homo sapiens
  misc_RNA (1)...(19): siRNA sense strand
agaaauggaugggauugaa

SEQ ID NO: 1053977 - RNA, 19 nt, Homo sapiens
  misc_RNA (1)...(19): siRNA sense strand
uggcucagcucuuaacaga

SEQ ID NO: 1053978 - RNA, 19 nt, Homo sapiens
  misc_RNA (1)...(19): siRNA sense strand
ggacugaauuuucuagcua

SEQ ID NO: 1053979 - RNA, 19 nt, Homo sapiens
  misc_RNA (1)...(19): siRNA sense strand
gaaagucuuguguaaugaa

SEQ ID NO: 1053980 - RNA, 19 nt, Homo sapiens
  misc_RNA (1)...(19): siRNA sense strand
uaaugaaguuggagccuau

SEQ ID NO: 1053981 - RNA, 19 nt, Homo sapiens
  misc_RNA (1)...(19): siRNA sense strand
gcugaaagcaauuagagaa

SEQ ID NO: 1053982 - RNA, 19 nt, Homo sapiens
  misc_RNA (1)...(19): siRNA sense strand
guagccagcugaaagcaau

SEQ ID NO: 1053983 - RNA, 19 nt, Homo sapiens
  misc_RNA (1)...(19): siRNA sense strand
gaagucacaggucuuaaau

SEQ ID NO: 1053984 - RNA, 19 nt, Homo sapiens
  misc_RNA (1)...(19): siRNA sense strand
ugacacugaugcccaaaga

SEQ ID NO: 1053985 - RNA, 19 nt, Homo sapiens
  misc_RNA (1)...(19): siRNA sense strand
caaauucuauggugagacu

SEQ ID NO: 1053986 - RNA, 19 nt, Homo sapiens
  misc_RNA (1)...(19): siRNA sense strand
agucacaggucuuaaaugu

SEQ ID NO: 1053987 - RNA, 19 nt, Homo sapiens
  misc_RNA (1)...(19): siRNA sense strand
caucaagaaguacuccuua

SEQ ID NO: 1053988 - RNA, 19 nt, Homo sapiens
  misc_RNA (1)...(19): siRNA sense strand
gaaagcaagagguguauac

SEQ ID NO: 1053989 - RNA, 19 nt, Homo sapiens
  misc_RNA (1)...(19): siRNA sense strand
ggauugaacagcuaaagga

SEQ ID NO: 1053990 - RNA, 19 nt, Homo sapiens
  misc_RNA (1)...(19): siRNA sense strand
caaaguuacgucagauauu

SEQ ID NO: 1053991 - RNA, 19 nt, Homo sapiens
  misc_RNA (1)...(19): siRNA sense strand
guaauuaaugguccugaaa

SEQ ID NO: 1053992 - RNA, 19 nt, Homo sapiens
  misc_RNA (1)...(19): siRNA sense strand
ugacaugauaggaggauua

SEQ ID NO: 1053993 - RNA, 19 nt, Homo sapiens
  misc_RNA (1)...(19): siRNA sense strand
aaauaaagccagugauguu

SEQ ID NO: 1053994 - RNA, 19 nt, Homo sapiens
  misc_RNA (1)...(19): siRNA sense strand
gaagaacugacugguugua

SEQ ID NO: 1053995 - RNA, 19 nt, Homo sapiens
  misc_RNA (1)...(19): siRNA sense strand
gggcagauggcaugauauu

SEQ ID NO: 1053996 - RNA, 19 nt, Homo sapiens
  misc_RNA (1)...(19): siRNA sense strand
gcuguggaauggcccuuaa

SEQ ID NO: 1053997 - RNA, 19 nt, Homo sapiens
  misc_RNA (1)...(19): siRNA sense strand
gccuauguuucuguaauua

SEQ ID NO: 1053998 - RNA, 19 nt, Homo sapiens
  misc_RNA (1)...(19): siRNA sense strand
agacaaccaauucaaagua

SEQ ID NO: 1053999 - RNA, 19 nt, Homo sapiens
  misc_RNA (1)...(19): siRNA sense strand
uaaccucccugaugucaag

SEQ ID NO: 1054000 - RNA, 19 nt, Homo sapiens
  misc_RNA (1)...(19): siRNA sense strand
ggaugggauugaacagcua

SEQ ID NO: 1054001 - RNA, 19 nt, Homo sapiens
  misc_RNA (1)...(19): siRNA sense strand
ccacuggccucgcugacua

SEQ ID NO: 1054002 - RNA, 19 nt, Homo sapiens
  misc_RNA (1)...(19): siRNA sense strand
gcgacuaccugcucaaaca

SEQ ID NO: 1054003 - RNA, 19 nt, Homo sapiens
  misc_RNA (1)...(19): siRNA sense strand
ugacgaggaugacgaggaa

SEQ ID NO: 1054004 - RNA, 19 nt, Homo sapiens
  misc_RNA (1)...(19): siRNA sense strand
gacgaaugcacgcagauua

SEQ ID NO: 1054005 - RNA, 19 nt, Homo sapiens
  misc_RNA (1)...(19): siRNA sense strand
gugcugagccaccuacgua

SEQ ID NO: 1054006 - RNA, 19 nt, Homo sapiens
  misc_RNA (1)...(19): siRNA sense strand
acauacaccugcagaacuu

SEQ ID NO: 1054007 - RNA, 19 nt, Homo sapiens
  misc_RNA (1)...(19): siRNA sense strand
ugacgugacugugcgcauu

SEQ ID NO: 1054008 - RNA, 19 nt, Homo sapiens
  misc_RNA (1)...(19): siRNA sense strand
gaggacguauuuccagaca

SEQ ID NO: 1054009 - RNA, 19 nt, Homo sapiens
  misc_RNA (1)...(19): siRNA sense strand
agacaguuaucgacgaaug

SEQ ID NO: 1054010 - RNA, 19 nt, Homo sapiens
  misc_RNA (1)...(19): siRNA sense strand
ugaccgaggugacgaggau

SEQ ID NO: 1054011 - RNA, 19 nt, Homo sapiens
  misc_RNA (1)...(19): siRNA sense strand
ugcgacagcugguagaguu

SEQ ID NO: 1054012 - RNA, 19 nt, Homo sapiens
  misc_RNA (1)...(19): siRNA sense strand
cgaggaaagugacgaugag

SEQ ID NO: 1054013 - RNA, 19 nt, Homo sapiens
  misc_RNA (1)...(19): siRNA sense strand
acagacaguuaucgacgaa

SEQ ID NO: 1054014 - RNA, 19 nt, Homo sapiens
  misc_RNA (1)...(19): siRNA sense strand
acagcuauguauccacuug

SEQ ID NO: 1054015 - RNA, 19 nt, Homo sapiens
  misc_RNA (1)...(19): siRNA sense strand
ugggucagcugaggacgua

SEQ ID NO: 1054016 - RNA, 19 nt, Homo sapiens
  misc_RNA (1)...(19): siRNA sense strand
ccaagcacauguucaucca

SEQ ID NO: 1054017 - RNA, 19 nt, Homo sapiens
  misc_RNA (1)...(19): siRNA sense strand
ugagaccgauggcgaggau

SEQ ID NO: 1054018 - RNA, 19 nt, Homo sapiens
  misc_RNA (1)...(19): siRNA sense strand
ccaagcgcuucacgcagaa

SEQ ID NO: 1054019 - RNA, 19 nt, Homo sapiens
  misc_RNA (1)...(19): siRNA sense strand
gcauacagacaguuaucga

SEQ ID NO: 1054020 - RNA, 19 nt, Homo sapiens
  misc_RNA (1)...(19): siRNA sense strand
ccagacagcuauguaucca

SEQ ID NO: 1054021 - RNA, 19 nt, Homo sapiens
  misc_RNA (1)...(19): siRNA sense strand
ggucagcugaggacguauu

SEQ ID NO: 1054022 - RNA, 19 nt, Homo sapiens
  misc_RNA (1)...(19): siRNA sense strand
cgucagugcuucgcauaca

SEQ ID NO: 1054023 - RNA, 19 nt, Homo sapiens
  misc_RNA (1)...(19): siRNA sense strand
cagcccgacugcauacugu

SEQ ID NO: 1054024 - RNA, 19 nt, Homo sapiens
  misc_RNA (1)...(19): siRNA sense strand
cgacgaaugcacgcagauu

SEQ ID NO: 1054025 - RNA, 19 nt, Homo sapiens
  misc_RNA (1)...(19): siRNA sense strand
cuucgcauacagacaguua

SEQ ID NO: 1054026 - RNA, 19 nt, Homo sapiens
  misc_RNA (1)...(19): siRNA sense strand
gaaggcugucccacugaga

SEQ ID NO: 1054027 - RNA, 19 nt, Homo sapiens
  misc_RNA (1)...(19): siRNA sense strand
uggccucgcugacuacagu

SEQ ID NO: 1054028 - RNA, 19 nt, Homo sapiens
  misc_RNA (1)...(19): siRNA sense strand
gcugguagaguuccuguac

SEQ ID NO: 1054029 - RNA, 19 nt, Homo sapiens
  misc_RNA (1)...(19): siRNA sense strand
acacuucugugacgugacu

SEQ ID NO: 1054030 - RNA, 19 nt, Homo sapiens
  misc_RNA (1)...(19): siRNA sense strand
aaacuacaccaagcacaug

SEQ ID NO: 1054031 - RNA, 19 nt, Homo sapiens
  misc_RNA (1)...(19): siRNA sense strand
gaggaaagugacgaugaga

SEQ ID NO: 1054032 - RNA, 19 nt, Homo sapiens
  misc_RNA (1)...(19): siRNA sense strand
gcugagccaccuacguaug

SEQ ID NO: 1054033 - RNA, 19 nt, Homo sapiens
  misc_RNA (1)...(19): siRNA sense strand
uggcgaggauggcgaaggu

SEQ ID NO: 1054034 - RNA, 19 nt, Homo sapiens
  misc_RNA (1)...(19): siRNA sense strand
gaaugcacgcagauuaucg

SEQ ID NO: 1054035 - RNA, 19 nt, Homo sapiens
  misc_RNA (1)...(19): siRNA sense strand
acaccaagcacauguucau

SEQ ID NO: 1054036 - RNA, 19 nt, Homo sapiens
  misc_RNA (1)...(19): siRNA sense strand
cugagccaccuacguauga

SEQ ID NO: 1054037 - RNA, 19 nt, Homo sapiens
  misc_RNA (1)...(19): siRNA sense strand
gguaacagcuaucagauga

SEQ ID NO: 1054038 - RNA, 19 nt, Homo sapiens
  misc_RNA (1)...(19): siRNA sense strand
ggagauaacauuacuguga

SEQ ID NO: 1054039 - RNA, 19 nt, Homo sapiens
  misc_RNA (1)...(19): siRNA sense strand
ggacagcucuuccaaguac

SEQ ID NO: 1054040 - RNA, 19 nt, Homo sapiens
  misc_RNA (1)...(19): siRNA sense strand
ccucaugccuguuucaaua

SEQ ID NO: 1054041 - RNA, 19 nt, Homo sapiens
  misc_RNA (1)...(19): siRNA sense strand
gcuauuggcaugauacuua

SEQ ID NO: 1054042 - RNA, 19 nt, Homo sapiens
  misc_RNA (1)...(19): siRNA sense strand
gagauaacauuacugugaa

SEQ ID NO: 1054043 - RNA, 19 nt, Homo sapiens
  misc_RNA (1)...(19): siRNA sense strand
ggaguggacuaguugaauu

SEQ ID NO: 1054044 - RNA, 19 nt, Homo sapiens
  misc_RNA (1)...(19): siRNA sense strand
gagcaaagcaguugugguu

SEQ ID NO: 1054045 - RNA, 19 nt, Homo sapiens
  misc_RNA (1)...(19): siRNA sense strand
gaaccagacucuaggagau

SEQ ID NO: 1054046 - RNA, 19 nt, Homo sapiens
  misc_RNA (1)...(19): siRNA sense strand
guggucaucugcuguguua

SEQ ID NO: 1054047 - RNA, 19 nt, Homo sapiens
  misc_RNA (1)...(19): siRNA sense strand
gguguucacuguggcauua

SEQ ID NO: 1054048 - RNA, 19 nt, Homo sapiens
  misc_RNA (1)...(19): siRNA sense strand
guaccuugcacacuuauua

SEQ ID NO: 1054049 - RNA, 19 nt, Homo sapiens
  misc_RNA (1)...(19): siRNA sense strand
gaucugaauuuccugaugu

SEQ ID NO: 1054050 - RNA, 19 nt, Homo sapiens
  misc_RNA (1)...(19): siRNA sense strand
ggucuuacuuuauuucuuc

SEQ ID NO: 1054051 - RNA, 19 nt, Homo sapiens
  misc_RNA (1)...(19): siRNA sense strand
acaaaugguugguuuaugu

SEQ ID NO: 1054052 - RNA, 19 nt, Homo sapiens
  misc_RNA (1)...(19): siRNA sense strand
gaagcaauguuaguuguca

SEQ ID NO: 1054053 - RNA, 19 nt, Homo sapiens
  misc_RNA (1)...(19): siRNA sense strand
uaacaccauucaucacaaa

SEQ ID NO: 1054054 - RNA, 19 nt, Homo sapiens
  misc_RNA (1)...(19): siRNA sense strand
gaagacaggugggcuugga

SEQ ID NO: 1054055 - RNA, 19 nt, Homo sapiens
  misc_RNA (1)...(19): siRNA sense strand
uaacagaucugaauuuccu

SEQ ID NO: 1054056 - RNA, 19 nt, Homo sapiens
  misc_RNA (1)...(19): siRNA sense strand
gguaacagaucugaauuuc

SEQ ID NO: 1054057 - RNA, 19 nt, Homo sapiens
  misc_RNA (1)...(19): siRNA sense strand
gcaaccugcucuccucuau

SEQ ID NO: 1054058 - RNA, 19 nt, Homo sapiens
  misc_RNA (1)...(19): siRNA sense strand
gcaugauacuuacauuugu

SEQ ID NO: 1054059 - RNA, 19 nt, Homo sapiens
  misc_RNA (1)...(19): siRNA sense strand
caaagaauggugagaguau

SEQ ID NO: 1054060 - RNA, 19 nt, Homo sapiens
  misc_RNA (1)...(19): siRNA sense strand
aaccugcucuccucuauuu

SEQ ID NO: 1054061 - RNA, 19 nt, Homo sapiens
  misc_RNA (1)...(19): siRNA sense strand
guaccaggccuguugauug

SEQ ID NO: 1054062 - RNA, 19 nt, Homo sapiens
  misc_RNA (1)...(19): siRNA sense strand
gacugguucuucuuacaua

SEQ ID NO: 1054063 - RNA, 19 nt, Homo sapiens
  misc_RNA (1)...(19): siRNA sense strand
uaugcaaccuuucugauau

SEQ ID NO: 1054064 - RNA, 19 nt, Homo sapiens
  misc_RNA (1)...(19): siRNA sense strand
caucguggccuaacuuuga

SEQ ID NO: 1054065 - RNA, 19 nt, Homo sapiens
  misc_RNA (1)...(19): siRNA sense strand
gauaugaaccagacucuag

SEQ ID NO: 1054066 - RNA, 19 nt, Homo sapiens
  misc_RNA (1)...(19): siRNA sense strand
guuguugccuggagacgua

SEQ ID NO: 1054067 - RNA, 19 nt, Homo sapiens
  misc_RNA (1)...(19): siRNA sense strand
ccuccucuaugauguauuu

SEQ ID NO: 1054068 - RNA, 19 nt, Homo sapiens
  misc_RNA (1)...(19): siRNA sense strand
uaagauaccauauggacaa

SEQ ID NO: 1054069 - RNA, 19 nt, Homo sapiens
  misc_RNA (1)...(19): siRNA sense strand
caaugagucuguacaacug

SEQ ID NO: 1054070 - RNA, 19 nt, Homo sapiens
  misc_RNA (1)...(19): siRNA sense strand
uggccuaacuuugauuaua

SEQ ID NO: 1054071 - RNA, 19 nt, Homo sapiens
  misc_RNA (1)...(19): siRNA sense strand
gggauugcuuucugucuga

SEQ ID NO: 1054072 - RNA, 19 nt, Homo sapiens
  misc_RNA (1)...(19): siRNA sense strand
guagaagauuugauguuca

SEQ ID NO: 1054073 - RNA, 19 nt, Homo sapiens
  misc_RNA (1)...(19): siRNA sense strand
gaaauggcacaaccaagga

SEQ ID NO: 1054074 - RNA, 19 nt, Homo sapiens
  misc_RNA (1)...(19): siRNA sense strand
uuaguaccuugcacacuua

SEQ ID NO: 1054075 - RNA, 19 nt, Homo sapiens
  misc_RNA (1)...(19): siRNA sense strand
uaauugcgguguucacugu

SEQ ID NO: 1054076 - RNA, 19 nt, Homo sapiens
  misc_RNA (1)...(19): siRNA sense strand
guuaugauggucuuacuuu

SEQ ID NO: 1054077 - RNA, 19 nt, Homo sapiens
  misc_RNA (1)...(19): siRNA sense strand
caacugucuugcugcacua

SEQ ID NO: 1054078 - RNA, 19 nt, Homo sapiens
  misc_RNA (1)...(19): siRNA sense strand
caucagcaaugagucugua

SEQ ID NO: 1054079 - RNA, 19 nt, Homo sapiens
  misc_RNA (1)...(19): siRNA sense strand
ggccuaacuuugauuauac

SEQ ID NO: 1054080 - RNA, 19 nt, Homo sapiens
  misc_RNA (1)...(19): siRNA sense strand
gaagaaaacccugugauau

SEQ ID NO: 1054081 - RNA, 19 nt, Homo sapiens
  misc_RNA (1)...(19): siRNA sense strand
ggcaugauacuuacauuug

SEQ ID NO: 1054082 - RNA, 19 nt, Homo sapiens
  misc_RNA (1)...(19): siRNA sense strand
gugagaguaucaugguuga

SEQ ID NO: 1054083 - RNA, 19 nt, Homo sapiens
  misc_RNA (1)...(19): siRNA sense strand
gcaaugagucuguacaacu

SEQ ID NO: 1054084 - RNA, 19 nt, Homo sapiens
  misc_RNA (1)...(19): siRNA sense strand
gugcauagcaguagcuguu

SEQ ID NO: 1054085 - RNA, 19 nt, Homo sapiens
  misc_RNA (1)...(19): siRNA sense strand
ggaaagguaacagcuauca

SEQ ID NO: 1054086 - RNA, 19 nt, Homo sapiens
  misc_RNA (1)...(19): siRNA sense strand
uguagaagauuugauguuc

SEQ ID NO: 1054087 - RNA, 19 nt, Homo sapiens
  misc_RNA (1)...(19): siRNA sense strand
caccauucaucacaaagaa

SEQ ID NO: 1054088 - RNA, 19 nt, Homo sapiens
  misc_RNA (1)...(19): siRNA sense strand
gcaauguuaguugucaaua

SEQ ID NO: 1054089 - RNA, 19 nt, Homo sapiens
  misc_RNA (1)...(19): siRNA sense strand
gauaccauauggacaaugc

SEQ ID NO: 1054090 - RNA, 19 nt, Homo sapiens
  misc_RNA (1)...(19): siRNA sense strand
acuacugcaugcuuuauaa

SEQ ID NO: 1054091 - RNA, 19 nt, Homo sapiens
  misc_RNA (1)...(19): siRNA sense strand
uugcugcacuaauucauaa

SEQ ID NO: 1054092 - RNA, 19 nt, Homo sapiens
  misc_RNA (1)...(19): siRNA sense strand
acaccacuaugcaaccuuu

SEQ ID NO: 1054093 - RNA, 19 nt, Homo sapiens
  misc_RNA (1)...(19): siRNA sense strand
aaagguaacagcuaucaga

SEQ ID NO: 1054094 - RNA, 19 nt, Homo sapiens
  misc_RNA (1)...(19): siRNA sense strand
cuaugcaaccuuucugaua

SEQ ID NO: 1054095 - RNA, 19 nt, Homo sapiens
  misc_RNA (1)...(19): siRNA sense strand
ccauuuggauugugcaaca

SEQ ID NO: 1054096 - RNA, 19 nt, Homo sapiens
  misc_RNA (1)...(19): siRNA sense strand
gcacuaauucauaagauac

SEQ ID NO: 1054097 - RNA, 19 nt, Homo sapiens
  misc_RNA (1)...(19): siRNA sense strand
gauagcaauuuucugcaua

SEQ ID NO: 1054098 - RNA, 19 nt, Homo sapiens
  misc_RNA (1)...(19): siRNA sense strand
agugacaacugaagauaga

SEQ ID NO: 1054099 - RNA, 19 nt, Homo sapiens
  misc_RNA (1)...(19): siRNA sense strand
auacuggaguggacuaguu

SEQ ID NO: 1054100 - RNA, 19 nt, Homo sapiens
  misc_RNA (1)...(19): siRNA sense strand
gcacaaccaaggacuacug

SEQ ID NO: 1054101 - RNA, 19 nt, Homo sapiens
  misc_RNA (1)...(19): siRNA sense strand
cuucaagucaugugugaua

SEQ ID NO: 1054102 - RNA, 19 nt, Homo sapiens
  misc_RNA (1)...(19): siRNA sense strand
gggcuguguuucgaaauga

SEQ ID NO: 1054103 - RNA, 19 nt, Homo sapiens
  misc_RNA (1)...(19): siRNA sense strand
gcauagcaguagcuguugu

SEQ ID NO: 1054104 - RNA, 19 nt, Homo sapiens
  misc_RNA (1)...(19): siRNA sense strand
ggucaucugcuguguuaug

SEQ ID NO: 1054105 - RNA, 19 nt, Homo sapiens
  misc_RNA (1)...(19): siRNA sense strand
uuuaguaccuugcacacuu

SEQ ID NO: 1054106 - RNA, 19 nt, Homo sapiens
  misc_RNA (1)...(19): siRNA sense strand
uggacuaguugaauuggaa

SEQ ID NO: 1054107 - RNA, 19 nt, Homo sapiens
  misc_RNA (1)...(19): siRNA sense strand
ugugauaucuggugaacag

SEQ ID NO: 1054108 - RNA, 19 nt, Homo sapiens
  misc_RNA (1)...(19): siRNA sense strand
acaguugccuaugcuauug

SEQ ID NO: 1054109 - RNA, 19 nt, Homo sapiens
  misc_RNA (1)...(19): siRNA sense strand
uauacuauguuucgucuac

SEQ ID NO: 1054110 - RNA, 19 nt, Homo sapiens
  misc_RNA (1)...(19): siRNA sense strand
gauuauacuauggugguua

SEQ ID NO: 1054111 - RNA, 19 nt, Homo sapiens
  misc_RNA (1)...(19): siRNA sense strand
gcucuccucuauuuaguac

SEQ ID NO: 1054112 - RNA, 19 nt, Homo sapiens
  misc_RNA (1)...(19): siRNA sense strand
cacaaagaauggugagagu

SEQ ID NO: 1054113 - RNA, 19 nt, Homo sapiens
  misc_RNA (1)...(19): siRNA sense strand
caggugggcuuggauuuua

SEQ ID NO: 1054114 - RNA, 19 nt, Homo sapiens
  misc_RNA (1)...(19): siRNA sense strand
cugcauagcaucagcaaug

SEQ ID NO: 1054115 - RNA, 19 nt, Homo sapiens
  misc_RNA (1)...(19): siRNA sense strand
caacugaagauagagaaau

SEQ ID NO: 1054116 - RNA, 19 nt, Homo sapiens
  misc_RNA (1)...(19): siRNA sense strand
caaaugguugguuuauguu

SEQ ID NO: 1054117 - RNA, 19 nt, Homo sapiens
  misc_RNA (1)...(19): siRNA sense strand
cuggaaagguaacagcuau

SEQ ID NO: 1054118 - RNA, 19 nt, Homo sapiens
  misc_RNA (1)...(19): siRNA sense strand
ggagacguaaggaaaugaa

SEQ ID NO: 1054119 - RNA, 19 nt, Homo sapiens
  misc_RNA (1)...(19): siRNA sense strand
gaucuauuucucaguaaug

SEQ ID NO: 1054120 - RNA, 19 nt, Homo sapiens
  misc_RNA (1)...(19): siRNA sense strand
gcugaagcaauguuaguug

SEQ ID NO: 1054121 - RNA, 19 nt, Homo sapiens
  misc_RNA (1)...(19): siRNA sense strand
ucaugccuguuucaauauu

SEQ ID NO: 1054122 - RNA, 19 nt, Homo sapiens
  misc_RNA (1)...(19): siRNA sense strand
gccaguagucaucagagua

SEQ ID NO: 1054123 - RNA, 19 nt, Homo sapiens
  misc_RNA (1)...(19): siRNA sense strand
cauaacaccauucaucaca

SEQ ID NO: 1054124 - RNA, 19 nt, Homo sapiens
  misc_RNA (1)...(19): siRNA sense strand
agcaguagcuguuguuugg

SEQ ID NO: 1054125 - RNA, 19 nt, Homo sapiens
  misc_RNA (1)...(19): siRNA sense strand
agccagaauugcacagaaa

SEQ ID NO: 1054126 - RNA, 19 nt, Homo sapiens
  misc_RNA (1)...(19): siRNA sense strand
gcauuuauaagcuacaaag

SEQ ID NO: 1054127 - RNA, 19 nt, Homo sapiens
  misc_RNA (1)...(19): siRNA sense strand
cuacaaaugguugguuuau

SEQ ID NO: 1054128 - RNA, 19 nt, Homo sapiens
  misc_RNA (1)...(19): siRNA sense strand
ugaagaaaacccugugaua

SEQ ID NO: 1054129 - RNA, 19 nt, Homo sapiens
  misc_RNA (1)...(19): siRNA sense strand
ggacuacugcaugcuuuau

SEQ ID NO: 1054130 - RNA, 19 nt, Homo sapiens
  misc_RNA (1)...(19): siRNA sense strand
uagaagauuugauguucag

SEQ ID NO: 1054131 - RNA, 19 nt, Homo sapiens
  misc_RNA (1)...(19): siRNA sense strand
ugcauacuguagaagauuu

SEQ ID NO: 1054132 - RNA, 19 nt, Homo sapiens
  misc_RNA (1)...(19): siRNA sense strand
gacuacugcaugcuuuaua

SEQ ID NO: 1054133 - RNA, 19 nt, Homo sapiens
  misc_RNA (1)...(19): siRNA sense strand
uccauuaguuugaugaauc

SEQ ID NO: 1054134 - RNA, 19 nt, Homo sapiens
  misc_RNA (1)...(19): siRNA sense strand
gaguggacuaguugaauug

SEQ ID NO: 1054135 - RNA, 19 nt, Homo sapiens
  misc_RNA (1)...(19): siRNA sense strand
uauguuucgucuacaguug

SEQ ID NO: 1054136 - RNA, 19 nt, Homo sapiens
  misc_RNA (1)...(19): siRNA sense strand
ggacuaguugaauuggaaa

SEQ ID NO: 1054137 - RNA, 19 nt, Homo sapiens
  misc_RNA (1)...(19): siRNA sense strand
gaagugauguuuccaaaga

SEQ ID NO: 1054138 - RNA, 19 nt, Homo sapiens
  misc_RNA (1)...(19): siRNA sense strand
gugcauggauugcuucauu

SEQ ID NO: 1054139 - RNA, 19 nt, Homo sapiens
  misc_RNA (1)...(19): siRNA sense strand
ggagcaaccuucaagagau

SEQ ID NO: 1054140 - RNA, 19 nt, Homo sapiens
  misc_RNA (1)...(19): siRNA sense strand
gaaccaauccuggcauuau

SEQ ID NO: 1054141 - RNA, 19 nt, Homo sapiens
  misc_RNA (1)...(19): siRNA sense strand
gacacggucuuucuuauuc

SEQ ID NO: 1054142 - RNA, 19 nt, Homo sapiens
  misc_RNA (1)...(19): siRNA sense strand
gggaggagcacagauauuu

SEQ ID NO: 1054143 - RNA, 19 nt, Homo sapiens
  misc_RNA (1)...(19): siRNA sense strand
gugcucuacuugugauuua

SEQ ID NO: 1054144 - RNA, 19 nt, Homo sapiens
  misc_RNA (1)...(19): siRNA sense strand
ggacacggucuuucuuauu

SEQ ID NO: 1054145 - RNA, 19 nt, Homo sapiens
  misc_RNA (1)...(19): siRNA sense strand
ugaauuugaugaagugaug

SEQ ID NO: 1054146 - RNA, 19 nt, Homo sapiens
  misc_RNA (1)...(19): siRNA sense strand
gcugaugggucuuguucuu

SEQ ID NO: 1054147 - RNA, 19 nt, Homo sapiens
  misc_RNA (1)...(19): siRNA sense strand
guacaccugggaaguauuu

SEQ ID NO: 1054148 - RNA, 19 nt, Homo sapiens
  misc_RNA (1)...(19): siRNA sense strand
gaggaagaaacaagaauga

SEQ ID NO: 1054149 - RNA, 19 nt, Homo sapiens
  misc_RNA (1)...(19): siRNA sense strand
gagcaaccuucaagagauc

SEQ ID NO: 1054150 - RNA, 19 nt, Homo sapiens
  misc_RNA (1)...(19): siRNA sense strand
ccaccaaccagacuacuaa

SEQ ID NO: 1054151 - RNA, 19 nt, Homo sapiens
  misc_RNA (1)...(19): siRNA sense strand
aaccaauccuggcauuaua

SEQ ID NO: 1054152 - RNA, 19 nt, Homo sapiens
  misc_RNA (1)...(19): siRNA sense strand
uuacaucgaugaccuugga

SEQ ID NO: 1054153 - RNA, 19 nt, Homo sapiens
  misc_RNA (1)...(19): siRNA sense strand
gaguacaccugggaaguau

SEQ ID NO: 1054154 - RNA, 19 nt, Homo sapiens
  misc_RNA (1)...(19): siRNA sense strand
gaaaacccauagcuugaaa

SEQ ID NO: 1054155 - RNA, 19 nt, Homo sapiens
  misc_RNA (1)...(19): siRNA sense strand
gagaaaccacaccuucauu

SEQ ID NO: 1054156 - RNA, 19 nt, Homo sapiens
  misc_RNA (1)...(19): siRNA sense strand
ccaggagacuuacaucgau

SEQ ID NO: 1054157 - RNA, 19 nt, Homo sapiens
  misc_RNA (1)...(19): siRNA sense strand
gaaaccacaccuucauugu

SEQ ID NO: 1054158 - RNA, 19 nt, Homo sapiens
  misc_RNA (1)...(19): siRNA sense strand
ucagguacuuccucaucua

SEQ ID NO: 1054159 - RNA, 19 nt, Homo sapiens
  misc_RNA (1)...(19): siRNA sense strand
ugaugggucuuguucuuau

SEQ ID NO: 1054160 - RNA, 19 nt, Homo sapiens
  misc_RNA (1)...(19): siRNA sense strand
ggaaccaauccuggcauua

SEQ ID NO: 1054161 - RNA, 19 nt, Homo sapiens
  misc_RNA (1)...(19): siRNA sense strand
ugcauggauugcuucauua

SEQ ID NO: 1054162 - RNA, 19 nt, Homo sapiens
  misc_RNA (1)...(19): siRNA sense strand
gucaggagcuggaguuguc

SEQ ID NO: 1054163 - RNA, 19 nt, Homo sapiens
  misc_RNA (1)...(19): siRNA sense strand
guggcuaccuguuguuugu

SEQ ID NO: 1054164 - RNA, 19 nt, Homo sapiens
  misc_RNA (1)...(19): siRNA sense strand
agagagccgugcauggauu

SEQ ID NO: 1054165 - RNA, 19 nt, Homo sapiens
  misc_RNA (1)...(19): siRNA sense strand
gugaggugcucuacuugug

SEQ ID NO: 1054166 - RNA, 19 nt, Homo sapiens
  misc_RNA (1)...(19): siRNA sense strand
guggugaugucagauuuau

SEQ ID NO: 1054167 - RNA, 19 nt, Homo sapiens
  misc_RNA (1)...(19): siRNA sense strand
ggugaugucagauuuauac

SEQ ID NO: 1054168 - RNA, 19 nt, Homo sapiens
  misc_RNA (1)...(19): siRNA sense strand
ugcaagggaugguuuauac

SEQ ID NO: 1054169 - RNA, 19 nt, Homo sapiens
  misc_RNA (1)...(19): siRNA sense strand
gaggugcucuacuugugau

SEQ ID NO: 1054170 - RNA, 19 nt, Homo sapiens
  misc_RNA (1)...(19): siRNA sense strand
aagggaugguuuauacuga

SEQ ID NO: 1054171 - RNA, 19 nt, Homo sapiens
  misc_RNA (1)...(19): siRNA sense strand
ugaguacaccugggaagua

SEQ ID NO: 1054172 - RNA, 19 nt, Homo sapiens
  misc_RNA (1)...(19): siRNA sense strand
uccagaaugucuucagaga

SEQ ID NO: 1054173 - RNA, 19 nt, Homo sapiens
  misc_RNA (1)...(19): siRNA sense strand
gagaggaagaaacaagaau

SEQ ID NO: 1054174 - RNA, 19 nt, Homo sapiens
  misc_RNA (1)...(19): siRNA sense strand
caaguccaccggaacauuc

SEQ ID NO: 1054175 - RNA, 19 nt, Homo sapiens
  misc_RNA (1)...(19): siRNA sense strand
gguggugaugucagauuua

SEQ ID NO: 1054176 - RNA, 19 nt, Homo sapiens
  misc_RNA (1)...(19): siRNA sense strand
caagggaugguuuauacug

SEQ ID NO: 1054177 - RNA, 19 nt, Homo sapiens
  misc_RNA (1)...(19): siRNA sense strand
ucagagagccgugcaugga

SEQ ID NO: 1054178 - RNA, 19 nt, Homo sapiens
  misc_RNA (1)...(19): siRNA sense strand
agaaaccacaccuucauug

SEQ ID NO: 1054179 - RNA, 19 nt, Homo sapiens
  misc_RNA (1)...(19): siRNA sense strand
gaugaagugauguuuccaa

SEQ ID NO: 1054180 - RNA, 19 nt, Homo sapiens
  misc_RNA (1)...(19): siRNA sense strand
aacgugaggugcucuacuu

SEQ ID NO: 1054181 - RNA, 19 nt, Homo sapiens
  misc_RNA (1)...(19): siRNA sense strand
cgagaaaccacaccuucau

SEQ ID NO: 1054182 - RNA, 19 nt, Homo sapiens
  misc_RNA (1)...(19): siRNA sense strand
ggaguuguccuugcauuac

SEQ ID NO: 1054183 - RNA, 19 nt, Homo sapiens
  misc_RNA (1)...(19): siRNA sense strand
ccaaccagacuacuaacga

SEQ ID NO: 1054184 - RNA, 19 nt, Homo sapiens
  misc_RNA (1)...(19): siRNA sense strand
gcugggcuuugucgugguu

SEQ ID NO: 1054185 - RNA, 19 nt, Homo sapiens
  misc_RNA (1)...(19): siRNA sense strand
auuuauaccaggagacuua

SEQ ID NO: 1054186 - RNA, 19 nt, Homo sapiens
  misc_RNA (1)...(19): siRNA sense strand
uggaaccaauccuggcauu

SEQ ID NO: 1054187 - RNA, 19 nt, Homo sapiens
  misc_RNA (1)...(19): siRNA sense strand
cuaccugccuuuccauguc

SEQ ID NO: 1054188 - RNA, 19 nt, Homo sapiens
  misc_RNA (1)...(19): siRNA sense strand
agacuacuaacgaguggua

SEQ ID NO: 1054189 - RNA, 19 nt, Homo sapiens
  misc_RNA (1)...(19): siRNA sense strand
uggacacggucuuucuuau

SEQ ID NO: 1054190 - RNA, 19 nt, Homo sapiens
  misc_RNA (1)...(19): siRNA sense strand
augaagugauguuuccaaa

SEQ ID NO: 1054191 - RNA, 19 nt, Homo sapiens
  misc_RNA (1)...(19): siRNA sense strand
ggauugcuucauuaccuuu

SEQ ID NO: 1054192 - RNA, 19 nt, Homo sapiens
  misc_RNA (1)...(19): siRNA sense strand
cggagcaaccuucaagaga

SEQ ID NO: 1054193 - RNA, 19 nt, Homo sapiens
  misc_RNA (1)...(19): siRNA sense strand
caucagguacuuccucauc

SEQ ID NO: 1054194 - RNA, 19 nt, Homo sapiens
  misc_RNA (1)...(19): siRNA sense strand
gggaugguuuauacugagu

SEQ ID NO: 1054195 - RNA, 19 nt, Homo sapiens
  misc_RNA (1)...(19): siRNA sense strand
ccuguuguuuguccuguau

SEQ ID NO: 1054196 - RNA, 19 nt, Homo sapiens
  misc_RNA (1)...(19): siRNA sense strand
ucaucuacgucuugaccuu

SEQ ID NO: 1054197 - RNA, 19 nt, Homo sapiens
  misc_RNA (1)...(19): siRNA sense strand
gaugggucuuguucuuauc

SEQ ID NO: 1054198 - RNA, 19 nt, Homo sapiens
  misc_RNA (1)...(19): siRNA sense strand
ggaaaccagcucgauccaa

SEQ ID NO: 1054199 - RNA, 19 nt, Homo sapiens
  misc_RNA (1)...(19): siRNA sense strand
cuacuugugauuuaaggaa

SEQ ID NO: 1054200 - RNA, 19 nt, Homo sapiens
  misc_RNA (1)...(19): siRNA sense strand
guccuugcauuaccuucuu

SEQ ID NO: 1054201 - RNA, 19 nt, Homo sapiens
  misc_RNA (1)...(19): siRNA sense strand
uggaguuguccuugcauua

SEQ ID NO: 1054202 - RNA, 19 nt, Homo sapiens
  misc_RNA (1)...(19): siRNA sense strand
ugguggugaugucagauuu

SEQ ID NO: 1054203 - RNA, 19 nt, Homo sapiens
  misc_RNA (1)...(19): siRNA sense strand
ccaaguccaccggaacauu

SEQ ID NO: 1054204 - RNA, 19 nt, Homo sapiens
  misc_RNA (1)...(19): siRNA sense strand
cggucuuucuuauucagua

SEQ ID NO: 1054205 - RNA, 19 nt, Homo sapiens
  misc_RNA (1)...(19): siRNA sense strand
acacggucuuucuuauuca

SEQ ID NO: 1054206 - RNA, 19 nt, Homo sapiens
  misc_RNA (1)...(19): siRNA sense strand
gagagccgugcauggauug

SEQ ID NO: 1054207 - RNA, 19 nt, Homo sapiens
  misc_RNA (1)...(19): siRNA sense strand
ugagaggaagaaacaagaa

SEQ ID NO: 1054208 - RNA, 19 nt, Homo sapiens
  misc_RNA (1)...(19): siRNA sense strand
gucaugagaggaagaaaca

SEQ ID NO: 1054209 - RNA, 19 nt, Homo sapiens
  misc_RNA (1)...(19): siRNA sense strand
gguacuuccucaucuacgu

SEQ ID NO: 1054210 - RNA, 19 nt, Homo sapiens
  misc_RNA (1)...(19): siRNA sense strand
aauccuggcauuauaacaa

SEQ ID NO: 1054211 - RNA, 19 nt, Homo sapiens
  misc_RNA (1)...(19): siRNA sense strand
uaucugcugcuagguguaa

SEQ ID NO: 1054212 - RNA, 19 nt, Homo sapiens
  misc_RNA (1)...(19): siRNA sense strand
gaacgugaggugcucuacu

SEQ ID NO: 1054213 - RNA, 19 nt, Homo sapiens
  misc_RNA (1)...(19): siRNA sense strand
aaaccacaccuucauuguc

SEQ ID NO: 1054214 - RNA, 19 nt, Homo sapiens
  misc_RNA (1)...(19): siRNA sense strand
agaggaagaaacaagaaug

SEQ ID NO: 1054215 - RNA, 19 nt, Homo sapiens
  misc_RNA (1)...(19): siRNA sense strand
gaucuuucuaccugccuuu

SEQ ID NO: 1054216 - RNA, 19 nt, Homo sapiens
  misc_RNA (1)...(19): siRNA sense strand
gccaccaaccagacuacua

SEQ ID NO: 1054217 - RNA, 19 nt, Homo sapiens
  misc_RNA (1)...(19): siRNA sense strand
gugcugaugggucuuguuc

SEQ ID NO: 1054218 - RNA, 19 nt, Homo sapiens
  misc_RNA (1)...(19): siRNA sense strand
uaucugcgucugcucgaaa

SEQ ID NO: 1054219 - RNA, 19 nt, Homo sapiens
  misc_RNA (1)...(19): siRNA sense strand
uggauugcuucauuaccuu

SEQ ID NO: 1054220 - RNA, 19 nt, Homo sapiens
  misc_RNA (1)...(19): siRNA sense strand
ccauugugagcaccacuuu

SEQ ID NO: 1054221 - RNA, 19 nt, Homo sapiens
  misc_RNA (1)...(19): siRNA sense strand
ugaggugcucuacuuguga

SEQ ID NO: 1054222 - RNA, 19 nt, Homo sapiens
  misc_RNA (1)...(19): siRNA sense strand
cugaugggucuuguucuua

SEQ ID NO: 1054223 - RNA, 19 nt, Homo sapiens
  misc_RNA (1)...(19): siRNA sense strand
auccuggcauuauaacaaa

SEQ ID NO: 1054224 - RNA, 19 nt, Homo sapiens
  misc_RNA (1)...(19): siRNA sense strand
caugagaggaagaaacaag

SEQ ID NO: 1054225 - RNA, 19 nt, Homo sapiens
  misc_RNA (1)...(19): siRNA sense strand
gaagagagccuaacugaaa

SEQ ID NO: 1054226 - RNA, 19 nt, Homo sapiens
  misc_RNA (1)...(19): siRNA sense strand
gaaacaacccgcaaauaaa

SEQ ID NO: 1054227 - RNA, 19 nt, Homo sapiens
  misc_RNA (1)...(19): siRNA sense strand
gaacaguggugcaaacuca

SEQ ID NO: 1054228 - RNA, 19 nt, Homo sapiens
  misc_RNA (1)...(19): siRNA sense strand
agaagaaggugcuacuaua

SEQ ID NO: 1054229 - RNA, 19 nt, Homo sapiens
  misc_RNA (1)...(19): siRNA sense strand
ugaaacaacccgcaaauaa

SEQ ID NO: 1054230 - RNA, 19 nt, Homo sapiens
  misc_RNA (1)...(19): siRNA sense strand
caagaaauuuggaccuaaa

SEQ ID NO: 1054231 - RNA, 19 nt, Homo sapiens
  misc_RNA (1)...(19): siRNA sense strand
agaaauugcuucccaagaa

SEQ ID NO: 1054232 - RNA, 19 nt, Homo sapiens
  misc_RNA (1)...(19): siRNA sense strand
ugaaagggcuaaagaacuu

SEQ ID NO: 1054233 - RNA, 19 nt, Homo sapiens
  misc_RNA (1)...(19): siRNA sense strand
gaaagggagagcauuagua

SEQ ID NO: 1054234 - RNA, 19 nt, Homo sapiens
  misc_RNA (1)...(19): siRNA sense strand
ggaaauaugacuuugauuc

SEQ ID NO: 1054235 - RNA, 19 nt, Homo sapiens
  misc_RNA (1)...(19): siRNA sense strand
uaagaagcguugcuaaugu

SEQ ID NO: 1054236 - RNA, 19 nt, Homo sapiens
  misc_RNA (1)...(19): siRNA sense strand
caagagggauugauuuuaa

SEQ ID NO: 1054237 - RNA, 19 nt, Homo sapiens
  misc_RNA (1)...(19): siRNA sense strand
uaaacuaacuuccggaaag

SEQ ID NO: 1054238 - RNA, 19 nt, Homo sapiens
  misc_RNA (1)...(19): siRNA sense strand
gaacacaacaacagagaga

SEQ ID NO: 1054239 - RNA, 19 nt, Homo sapiens
  misc_RNA (1)...(19): siRNA sense strand
aagcaaagauugaagacaa

SEQ ID NO: 1054240 - RNA, 19 nt, Homo sapiens
  misc_RNA (1)...(19): siRNA sense strand
ggaccuaaaucaucuaaaa

SEQ ID NO: 1054241 - RNA, 19 nt, Homo sapiens
  misc_RNA (1)...(19): siRNA sense strand
ggacguccacgaucucuuu

SEQ ID NO: 1054242 - RNA, 19 nt, Homo sapiens
  misc_RNA (1)...(19): siRNA sense strand
ccaaaucgacuaaucuauu

SEQ ID NO: 1054243 - RNA, 19 nt, Homo sapiens
  misc_RNA (1)...(19): siRNA sense strand
ggaacaggauucaggauac

SEQ ID NO: 1054244 - RNA, 19 nt, Homo sapiens
  misc_RNA (1)...(19): siRNA sense strand
gaacuugccagccagauuc

SEQ ID NO: 1054245 - RNA, 19 nt, Homo sapiens
  misc_RNA (1)...(19): siRNA sense strand
gaacagcaagaagaaagua

SEQ ID NO: 1054246 - RNA, 19 nt, Homo sapiens
  misc_RNA (1)...(19): siRNA sense strand
gaaucgaccuagcaagugu

SEQ ID NO: 1054247 - RNA, 19 nt, Homo sapiens
  misc_RNA (1)...(19): siRNA sense strand
gaacaggauucaggauaca

SEQ ID NO: 1054248 - RNA, 19 nt, Homo sapiens
  misc_RNA (1)...(19): siRNA sense strand
gagagaaaguaaacuaacu

SEQ ID NO: 1054249 - RNA, 19 nt, Homo sapiens
  misc_RNA (1)...(19): siRNA sense strand
gcagcucgauuccagauag

SEQ ID NO: 1054250 - RNA, 19 nt, Homo sapiens
  misc_RNA (1)...(19): siRNA sense strand
aagcguugcuaauguuaua

SEQ ID NO: 1054251 - RNA, 19 nt, Homo sapiens
  misc_RNA (1)...(19): siRNA sense strand
auaaacuucuugcggaaua

SEQ ID NO: 1054252 - RNA, 19 nt, Homo sapiens
  misc_RNA (1)...(19): siRNA sense strand
ggucagaacagcaagaaga

SEQ ID NO: 1054253 - RNA, 19 nt, Homo sapiens
  misc_RNA (1)...(19): siRNA sense strand
aguagaaacuguagaacaa

SEQ ID NO: 1054254 - RNA, 19 nt, Homo sapiens
  misc_RNA (1)...(19): siRNA sense strand
gcaaggaauucugcaguag

SEQ ID NO: 1054255 - RNA, 19 nt, Homo sapiens
  misc_RNA (1)...(19): siRNA sense strand
caacuugaccaggaauaua

SEQ ID NO: 1054256 - RNA, 19 nt, Homo sapiens
  misc_RNA (1)...(19): siRNA sense strand
gggaacaggauucaggaua

SEQ ID NO: 1054257 - RNA, 19 nt, Homo sapiens
  misc_RNA (1)...(19): siRNA sense strand
gaucaacuaugacuuucca

SEQ ID NO: 1054258 - RNA, 19 nt, Homo sapiens
  misc_RNA (1)...(19): siRNA sense strand
ggugaucaacuaugacuuu

SEQ ID NO: 1054259 - RNA, 19 nt, Homo sapiens
  misc_RNA (1)...(19): siRNA sense strand
gccaugagagaacuuguua

SEQ ID NO: 1054260 - RNA, 19 nt, Homo sapiens
  misc_RNA (1)...(19): siRNA sense strand
ccaacuagcucaguggaau

SEQ ID NO: 1054261 - RNA, 19 nt, Homo sapiens
  misc_RNA (1)...(19): siRNA sense strand
ugaacuuggugaucaacua

SEQ ID NO: 1054262 - RNA, 19 nt, Homo sapiens
  misc_RNA (1)...(19): siRNA sense strand
caugagagaacuuguuaaa

SEQ ID NO: 1054263 - RNA, 19 nt, Homo sapiens
  misc_RNA (1)...(19): siRNA sense strand
gaagaaggugcuacuauac

SEQ ID NO: 1054264 - RNA, 19 nt, Homo sapiens
  misc_RNA (1)...(19): siRNA sense strand
gagcagggaauaagggaaa

SEQ ID NO: 1054265 - RNA, 19 nt, Homo sapiens
  misc_RNA (1)...(19): siRNA sense strand
gaacuuggugaucaacuau

SEQ ID NO: 1054266 - RNA, 19 nt, Homo sapiens
  misc_RNA (1)...(19): siRNA sense strand
ggugugaacuuggugauca

SEQ ID NO: 1054267 - RNA, 19 nt, Homo sapiens
  misc_RNA (1)...(19): siRNA sense strand
gagcuucucuuuguuggau

SEQ ID NO: 1054268 - RNA, 19 nt, Homo sapiens
  misc_RNA (1)...(19): siRNA sense strand
ucagagagaaaguaaacua

SEQ ID NO: 1054269 - RNA, 19 nt, Homo sapiens
  misc_RNA (1)...(19): siRNA sense strand
caauccaccuguucuuguu

SEQ ID NO: 1054270 - RNA, 19 nt, Homo sapiens
  misc_RNA (1)...(19): siRNA sense strand
guaguagacgaaucagaua

SEQ ID NO: 1054271 - RNA, 19 nt, Homo sapiens
  misc_RNA (1)...(19): siRNA sense strand
ugacccaauugcuacauuu

SEQ ID NO: 1054272 - RNA, 19 nt, Homo sapiens
  misc_RNA (1)...(19): siRNA sense strand
aaucaauucucgacuacuu

SEQ ID NO: 1054273 - RNA, 19 nt, Homo sapiens
  misc_RNA (1)...(19): siRNA sense strand
gagaccagcuggcuuccau

SEQ ID NO: 1054274 - RNA, 19 nt, Homo sapiens
  misc_RNA (1)...(19): siRNA sense strand
uagaaacuguagaacaaga

SEQ ID NO: 1054275 - RNA, 19 nt, Homo sapiens
  misc_RNA (1)...(19): siRNA sense strand
gguauuaauguggauguua

SEQ ID NO: 1054276 - RNA, 19 nt, Homo sapiens
  misc_RNA (1)...(19): siRNA sense strand
aagaagcguugcuaauguu

SEQ ID NO: 1054277 - RNA, 19 nt, Homo sapiens
  misc_RNA (1)...(19): siRNA sense strand
caacuagcucaguggaaua

SEQ ID NO: 1054278 - RNA, 19 nt, Homo sapiens
  misc_RNA (1)...(19): siRNA sense strand
gagagaacacaacaacaga

SEQ ID NO: 1054279 - RNA, 19 nt, Homo sapiens
  misc_RNA (1)...(19): siRNA sense strand
aaacaacccgcaaauaaag

SEQ ID NO: 1054280 - RNA, 19 nt, Homo sapiens
  misc_RNA (1)...(19): siRNA sense strand
gggaaaagcaauuacauuu

SEQ ID NO: 1054281 - RNA, 19 nt, Homo sapiens
  misc_RNA (1)...(19): siRNA sense strand
gauaacacaguccacaguu

SEQ ID NO: 1054282 - RNA, 19 nt, Homo sapiens
  misc_RNA (1)...(19): siRNA sense strand
acacaacaacagagagaua

SEQ ID NO: 1054283 - RNA, 19 nt, Homo sapiens
  misc_RNA (1)...(19): siRNA sense strand
gagaacacaacaacagaga

SEQ ID NO: 1054284 - RNA, 19 nt, Homo sapiens
  misc_RNA (1)...(19): siRNA sense strand
gcagagagaacacaacaac

SEQ ID NO: 1054285 - RNA, 19 nt, Homo sapiens
  misc_RNA (1)...(19): siRNA sense strand
ggauucaggauacacauga

SEQ ID NO: 1054286 - RNA, 19 nt, Homo sapiens
  misc_RNA (1)...(19): siRNA sense strand
ccagccagauucacagaga

SEQ ID NO: 1054287 - RNA, 19 nt, Homo sapiens
  misc_RNA (1)...(19): siRNA sense strand
aagaagagagccuaacuga

SEQ ID NO: 1054288 - RNA, 19 nt, Homo sapiens
  misc_RNA (1)...(19): siRNA sense strand
ugaggaugauaagccauua

SEQ ID NO: 1054289 - RNA, 19 nt, Homo sapiens
  misc_RNA (1)...(19): siRNA sense strand
gagcaucacaaacacauca

SEQ ID NO: 1054290 - RNA, 19 nt, Homo sapiens
  misc_RNA (1)...(19): siRNA sense strand
agaugcagguuuccaaaug

SEQ ID NO: 1054291 - RNA, 19 nt, Homo sapiens
  misc_RNA (1)...(19): siRNA sense strand
aacuaugacuuuccaacua

SEQ ID NO: 1054292 - RNA, 19 nt, Homo sapiens
  misc_RNA (1)...(19): siRNA sense strand
ccggaaaguuggagaaucu

SEQ ID NO: 1054293 - RNA, 19 nt, Homo sapiens
  misc_RNA (1)...(19): siRNA sense strand
guacaacuccaaaauguuu

SEQ ID NO: 1054294 - RNA, 19 nt, Homo sapiens
  misc_RNA (1)...(19): siRNA sense strand
gguguccuguaccagaaua

SEQ ID NO: 1054295 - RNA, 19 nt, Homo sapiens
  misc_RNA (1)...(19): siRNA sense strand
cuagcucaguggaauauau

SEQ ID NO: 1054296 - RNA, 19 nt, Homo sapiens
  misc_RNA (1)...(19): siRNA sense strand
uaacacaguccacaguuuc

SEQ ID NO: 1054297 - RNA, 19 nt, Homo sapiens
  misc_RNA (1)...(19): siRNA sense strand
ccgaagagcuauguucagu

SEQ ID NO: 1054298 - RNA, 19 nt, Homo sapiens
  misc_RNA (1)...(19): siRNA sense strand
gaccagcuggcuuccauuu

SEQ ID NO: 1054299 - RNA, 19 nt, Homo sapiens
  misc_RNA (1)...(19): siRNA sense strand
ccagauucacagagaguua

SEQ ID NO: 1054300 - RNA, 19 nt, Homo sapiens
  misc_RNA (1)...(19): siRNA sense strand
cagagagaaaguaaacuaa

SEQ ID NO: 1054301 - RNA, 19 nt, Homo sapiens
  misc_RNA (1)...(19): siRNA sense strand
gaaacuacuaagcaaacaa

SEQ ID NO: 1054302 - RNA, 19 nt, Homo sapiens
  misc_RNA (1)...(19): siRNA sense strand
auaacacaguccacaguuu

SEQ ID NO: 1054303 - RNA, 19 nt, Homo sapiens
  misc_RNA (1)...(19): siRNA sense strand
ccaaaugccuacgccaauc

SEQ ID NO: 1054304 - RNA, 19 nt, Homo sapiens
  misc_RNA (1)...(19): siRNA sense strand
uaaacuucuugcggaauaa

SEQ ID NO: 1054305 - RNA, 19 nt, Homo sapiens
  misc_RNA (1)...(19): siRNA sense strand
ggaagagggagcagagcaa

SEQ ID NO: 1054306 - RNA, 19 nt, Homo sapiens
  misc_RNA (1)...(19): siRNA sense strand
ggaaagggagagcauuagu

SEQ ID NO: 1054307 - RNA, 19 nt, Homo sapiens
  misc_RNA (1)...(19): siRNA sense strand
uagcaagagggauugauuu

SEQ ID NO: 1054308 - RNA, 19 nt, Homo sapiens
  misc_RNA (1)...(19): siRNA sense strand
uuaagaagcguugcuaaug

SEQ ID NO: 1054309 - RNA, 19 nt, Homo sapiens
  misc_RNA (1)...(19): siRNA sense strand
gcaacuugaccaggaauau

SEQ ID NO: 1054310 - RNA, 19 nt, Homo sapiens
  misc_RNA (1)...(19): siRNA sense strand
aaaggucacuggucagaac

SEQ ID NO: 1054311 - RNA, 19 nt, Homo sapiens
  misc_RNA (1)...(19): siRNA sense strand
gcaagagggauugauuuua

SEQ ID NO: 1054312 - RNA, 19 nt, Homo sapiens
  misc_RNA (1)...(19): siRNA sense strand
agcaaggaauucugcagua

SEQ ID NO: 1054313 - RNA, 19 nt, Homo sapiens
  misc_RNA (1)...(19): siRNA sense strand
cacaagguccgaagagcua

SEQ ID NO: 1054314 - RNA, 19 nt, Homo sapiens
  misc_RNA (1)...(19): siRNA sense strand
uugaguggcuuguaguaga

SEQ ID NO: 1054315 - RNA, 19 nt, Homo sapiens
  misc_RNA (1)...(19): siRNA sense strand
ggaaucgaccuagcaagug

SEQ ID NO: 1054316 - RNA, 19 nt, Homo sapiens
  misc_RNA (1)...(19): siRNA sense strand
caagaagaaggugcuacua

SEQ ID NO: 1054317 - RNA, 19 nt, Homo sapiens
  misc_RNA (1)...(19): siRNA sense strand
ggagagcauuaguacaacu

SEQ ID NO: 1054318 - RNA, 19 nt, Homo sapiens
  misc_RNA (1)...(19): siRNA sense strand
ugucaucuguagaagcaaa

SEQ ID NO: 1054319 - RNA, 19 nt, Homo sapiens
  misc_RNA (1)...(19): siRNA sense strand
gcuuuuagcauuccuauuu

SEQ ID NO: 1054320 - RNA, 19 nt, Homo sapiens
  misc_RNA (1)...(19): siRNA sense strand
uuaaaggugugaacuuggu

SEQ ID NO: 1054321 - RNA, 19 nt, Homo sapiens
  misc_RNA (1)...(19): siRNA sense strand
caaggaauucugcaguaga

SEQ ID NO: 1054322 - RNA, 19 nt, Homo sapiens
  misc_RNA (1)...(19): siRNA sense strand
agacgaaucagauaaacug

SEQ ID NO: 1054323 - RNA, 19 nt, Homo sapiens
  misc_RNA (1)...(19): siRNA sense strand
caacaacagagagauaaca

SEQ ID NO: 1054324 - RNA, 19 nt, Homo sapiens
  misc_RNA (1)...(19): siRNA sense strand
aagcuaaggauaaacagaa

SEQ ID NO: 1054325 - RNA, 19 nt, Homo sapiens
  misc_RNA (1)...(19): siRNA sense strand
gaaacaacccgcaaauaaa

SEQ ID NO: 1054326 - RNA, 19 nt, Homo sapiens
  misc_RNA (1)...(19): siRNA sense strand
gaacaguggugcaaacuca

SEQ ID NO: 1054327 - RNA, 19 nt, Homo sapiens
  misc_RNA (1)...(19): siRNA sense strand
ugaaacaacccgcaaauaa

SEQ ID NO: 1054328 - RNA, 19 nt, Homo sapiens
  misc_RNA (1)...(19): siRNA sense strand
caagaaauuuggaccuaaa

SEQ ID NO: 1054329 - RNA, 19 nt, Homo sapiens
  misc_RNA (1)...(19): siRNA sense strand
ugaaagggcuaaagaacuu

SEQ ID NO: 1054330 - RNA, 19 nt, Homo sapiens
  misc_RNA (1)...(19): siRNA sense strand
gaaagggagagcauuagua

SEQ ID NO: 1054331 - RNA, 19 nt, Homo sapiens
  misc_RNA (1)...(19): siRNA sense strand
uaagaagcguugcuaaugu

SEQ ID NO: 1054332 - RNA, 19 nt, Homo sapiens
  misc_RNA (1)...(19): siRNA sense strand
caagagggauugauuuuaa

SEQ ID NO: 1054333 - RNA, 19 nt, Homo sapiens
  misc_RNA (1)...(19): siRNA sense strand
uaaacuaacuuccggaaag

SEQ ID NO: 1054334 - RNA, 19 nt, Homo sapiens
  misc_RNA (1)...(19): siRNA sense strand
gaacacaacaacagagaga

SEQ ID NO: 1054335 - RNA, 19 nt, Homo sapiens
  misc_RNA (1)...(19): siRNA sense strand
aagcaaagauugaagacaa

SEQ ID NO: 1054336 - RNA, 19 nt, Homo sapiens
  misc_RNA (1)...(19): siRNA sense strand
ggaccuaaaucaucuaaaa

SEQ ID NO: 1054337 - RNA, 19 nt, Homo sapiens
  misc_RNA (1)...(19): siRNA sense strand
ccaaaucgacuaaucuauu

SEQ ID NO: 1054338 - RNA, 19 nt, Homo sapiens
  misc_RNA (1)...(19): siRNA sense strand
ggaacaggauucaggauac

SEQ ID NO: 1054339 - RNA, 19 nt, Homo sapiens
  misc_RNA (1)...(19): siRNA sense strand
gaacuugccagccagauuc

SEQ ID NO: 1054340 - RNA, 19 nt, Homo sapiens
  misc_RNA (1)...(19): siRNA sense strand
gaacagcaagaagaaagua

SEQ ID NO: 1054341 - RNA, 19 nt, Homo sapiens
  misc_RNA (1)...(19): siRNA sense strand
gaaucgaccuagcaagugu

SEQ ID NO: 1054342 - RNA, 19 nt, Homo sapiens
  misc_RNA (1)...(19): siRNA sense strand
gaacaggauucaggauaca

SEQ ID NO: 1054343 - RNA, 19 nt, Homo sapiens
  misc_RNA (1)...(19): siRNA sense strand
gagagaaaguaaacuaacu

SEQ ID NO: 1054344 - RNA, 19 nt, Homo sapiens
  misc_RNA (1)...(19): siRNA sense strand
aagcguugcuaauguuaua

SEQ ID NO: 1054345 - RNA, 19 nt, Homo sapiens
  misc_RNA (1)...(19): siRNA sense strand
auaaacuucuugcggaaua

SEQ ID NO: 1054346 - RNA, 19 nt, Homo sapiens
  misc_RNA (1)...(19): siRNA sense strand
ggucagaacagcaagaaga

SEQ ID NO: 1054347 - RNA, 19 nt, Homo sapiens
  misc_RNA (1)...(19): siRNA sense strand
aguagaaacuguagaacaa

SEQ ID NO: 1054348 - RNA, 19 nt, Homo sapiens
  misc_RNA (1)...(19): siRNA sense strand
gcaaggaauucugcaguag

SEQ ID NO: 1054349 - RNA, 19 nt, Homo sapiens
  misc_RNA (1)...(19): siRNA sense strand
caacuugaccaggaauaua

SEQ ID NO: 1054350 - RNA, 19 nt, Homo sapiens
  misc_RNA (1)...(19): siRNA sense strand
gggaacaggauucaggaua

SEQ ID NO: 1054351 - RNA, 19 nt, Homo sapiens
  misc_RNA (1)...(19): siRNA sense strand
gaucaacuaugacuuucca

SEQ ID NO: 1054352 - RNA, 19 nt, Homo sapiens
  misc_RNA (1)...(19): siRNA sense strand
ggugaucaacuaugacuuu

SEQ ID NO: 1054353 - RNA, 19 nt, Homo sapiens
  misc_RNA (1)...(19): siRNA sense strand
gccaugagagaacuuguua

SEQ ID NO: 1054354 - RNA, 19 nt, Homo sapiens
  misc_RNA (1)...(19): siRNA sense strand
ccaacuagcucaguggaau

SEQ ID NO: 1054355 - RNA, 19 nt, Homo sapiens
  misc_RNA (1)...(19): siRNA sense strand
ugaacuuggugaucaacua

SEQ ID NO: 1054356 - RNA, 19 nt, Homo sapiens
  misc_RNA (1)...(19): siRNA sense strand
caugagagaacuuguuaaa

SEQ ID NO: 1054357 - RNA, 19 nt, Homo sapiens
  misc_RNA (1)...(19): siRNA sense strand
gagcuucucuuuguuggau

SEQ ID NO: 1054358 - RNA, 19 nt, Homo sapiens
  misc_RNA (1)...(19): siRNA sense strand
gagcagggaauaagggaaa

SEQ ID NO: 1054359 - RNA, 19 nt, Homo sapiens
  misc_RNA (1)...(19): siRNA sense strand
gaacuuggugaucaacuau

SEQ ID NO: 1054360 - RNA, 19 nt, Homo sapiens
  misc_RNA (1)...(19): siRNA sense strand
ggugugaacuuggugauca

SEQ ID NO: 1054361 - RNA, 19 nt, Homo sapiens
  misc_RNA (1)...(19): siRNA sense strand
ugacccaauugcuacauuu

SEQ ID NO: 1054362 - RNA, 19 nt, Homo sapiens
  misc_RNA (1)...(19): siRNA sense strand
caauccaccuguucuuguu

SEQ ID NO: 1054363 - RNA, 19 nt, Homo sapiens
  misc_RNA (1)...(19): siRNA sense strand
ucagagagaaaguaaacua

SEQ ID NO: 1054364 - RNA, 19 nt, Homo sapiens
  misc_RNA (1)...(19): siRNA sense strand
guaguagacgaaucagaua

SEQ ID NO: 1054365 - RNA, 19 nt, Homo sapiens
  misc_RNA (1)...(19): siRNA sense strand
aaucaauucucgacuacuu

SEQ ID NO: 1054366 - RNA, 19 nt, Homo sapiens
  misc_RNA (1)...(19): siRNA sense strand
gagaccagcuggcuuccau

SEQ ID NO: 1054367 - RNA, 19 nt, Homo sapiens
  misc_RNA (1)...(19): siRNA sense strand
uagaaacuguagaacaaga

SEQ ID NO: 1054368 - RNA, 19 nt, Homo sapiens
  misc_RNA (1)...(19): siRNA sense strand
gguauuaauguggauguua

SEQ ID NO: 1054369 - RNA, 19 nt, Homo sapiens
  misc_RNA (1)...(19): siRNA sense strand
aagaagcguugcuaauguu

SEQ ID NO: 1054370 - RNA, 19 nt, Homo sapiens
  misc_RNA (1)...(19): siRNA sense strand
caacuagcucaguggaaua

SEQ ID NO: 1054371 - RNA, 19 nt, Homo sapiens
  misc_RNA (1)...(19): siRNA sense strand
gagagaacacaacaacaga

SEQ ID NO: 1054372 - RNA, 19 nt, Homo sapiens
  misc_RNA (1)...(19): siRNA sense strand
aaacaacccgcaaauaaag

SEQ ID NO: 1054373 - RNA, 19 nt, Homo sapiens
  misc_RNA (1)...(19): siRNA sense strand
gggaaaagcaauuacauuu

SEQ ID NO: 1054374 - RNA, 19 nt, Homo sapiens
  misc_RNA (1)...(19): siRNA sense strand
gauaacacaguccacaguu

SEQ ID NO: 1054375 - RNA, 19 nt, Homo sapiens
  misc_RNA (1)...(19): siRNA sense strand
acacaacaacagagagaua

SEQ ID NO: 1054376 - RNA, 19 nt, Homo sapiens
  misc_RNA (1)...(19): siRNA sense strand
gagaacacaacaacagaga

SEQ ID NO: 1054377 - RNA, 19 nt, Homo sapiens
  misc_RNA (1)...(19): siRNA sense strand
gcagagagaacacaacaac

SEQ ID NO: 1054378 - RNA, 19 nt, Homo sapiens
  misc_RNA (1)...(19): siRNA sense strand
ggauucaggauacacauga

SEQ ID NO: 1054379 - RNA, 19 nt, Homo sapiens
  misc_RNA (1)...(19): siRNA sense strand
ccagccagauucacagaga

SEQ ID NO: 1054380 - RNA, 19 nt, Homo sapiens
  misc_RNA (1)...(19): siRNA sense strand
ugaggaugauaagccauua

SEQ ID NO: 1054381 - RNA, 19 nt, Homo sapiens
  misc_RNA (1)...(19): siRNA sense strand
agaugcagguuuccaaaug

SEQ ID NO: 1054382 - RNA, 19 nt, Homo sapiens
  misc_RNA (1)...(19): siRNA sense strand
aacuaugacuuuccaacua

SEQ ID NO: 1054383 - RNA, 19 nt, Homo sapiens
  misc_RNA (1)...(19): siRNA sense strand
ccagauucacagagaguua

SEQ ID NO: 1054384 - RNA, 19 nt, Homo sapiens
  misc_RNA (1)...(19): siRNA sense strand
guacaacuccaaaauguuu

SEQ ID NO: 1054385 - RNA, 19 nt, Homo sapiens
  misc_RNA (1)...(19): siRNA sense strand
gguguccuguaccagaaua

SEQ ID NO: 1054386 - RNA, 19 nt, Homo sapiens
  misc_RNA (1)...(19): siRNA sense strand
cuagcucaguggaauauau

SEQ ID NO: 1054387 - RNA, 19 nt, Homo sapiens
  misc_RNA (1)...(19): siRNA sense strand
uaacacaguccacaguuuc

SEQ ID NO: 1054388 - RNA, 19 nt, Homo sapiens
  misc_RNA (1)...(19): siRNA sense strand
ccgaagagcuauguucagu

SEQ ID NO: 1054389 - RNA, 19 nt, Homo sapiens
  misc_RNA (1)...(19): siRNA sense strand
gaccagcuggcuuccauuu

SEQ ID NO: 1054390 - RNA, 19 nt, Homo sapiens
  misc_RNA (1)...(19): siRNA sense strand
ccggaaaguuggagaaucu

SEQ ID NO: 1054391 - RNA, 19 nt, Homo sapiens
  misc_RNA (1)...(19): siRNA sense strand
ccaaaugccuacgccaauc

SEQ ID NO: 1054392 - RNA, 19 nt, Homo sapiens
  misc_RNA (1)...(19): siRNA sense strand
gaaacuacuaagcaaacaa

SEQ ID NO: 1054393 - RNA, 19 nt, Homo sapiens
  misc_RNA (1)...(19): siRNA sense strand
cagagagaaaguaaacuaa

SEQ ID NO: 1054394 - RNA, 19 nt, Homo sapiens
  misc_RNA (1)...(19): siRNA sense strand
auaacacaguccacaguuu

SEQ ID NO: 1054395 - RNA, 19 nt, Homo sapiens
  misc_RNA (1)...(19): siRNA sense strand
uaaacuucuugcggaauaa

SEQ ID NO: 1054396 - RNA, 19 nt, Homo sapiens
  misc_RNA (1)...(19): siRNA sense strand
ggaaagggagagcauuagu

SEQ ID NO: 1054397 - RNA, 19 nt, Homo sapiens
  misc_RNA (1)...(19): siRNA sense strand
uagcaagagggauugauuu

SEQ ID NO: 1054398 - RNA, 19 nt, Homo sapiens
  misc_RNA (1)...(19): siRNA sense strand
uuaagaagcguugcuaaug

SEQ ID NO: 1054399 - RNA, 19 nt, Homo sapiens
  misc_RNA (1)...(19): siRNA sense strand
uugaguggcuuguaguaga

SEQ ID NO: 1054400 - RNA, 19 nt, Homo sapiens
  misc_RNA (1)...(19): siRNA sense strand
aaaggucacuggucagaac

SEQ ID NO: 1054401 - RNA, 19 nt, Homo sapiens
  misc_RNA (1)...(19): siRNA sense strand
gcaacuugaccaggaauau

SEQ ID NO: 1054402 - RNA, 19 nt, Homo sapiens
  misc_RNA (1)...(19): siRNA sense strand
gcaagagggauugauuuua

SEQ ID NO: 1054403 - RNA, 19 nt, Homo sapiens
  misc_RNA (1)...(19): siRNA sense strand
agcaaggaauucugcagua

SEQ ID NO: 1054404 - RNA, 19 nt, Homo sapiens
  misc_RNA (1)...(19): siRNA sense strand
cacaagguccgaagagcua

SEQ ID NO: 1054405 - RNA, 19 nt, Homo sapiens
  misc_RNA (1)...(19): siRNA sense strand
ggaaucgaccuagcaagug

SEQ ID NO: 1054406 - RNA, 19 nt, Homo sapiens
  misc_RNA (1)...(19): siRNA sense strand
ggagagcauuaguacaacu

SEQ ID NO: 1054407 - RNA, 19 nt, Homo sapiens
  misc_RNA (1)...(19): siRNA sense strand
gcuuuuagcauuccuauuu

SEQ ID NO: 1054408 - RNA, 19 nt, Homo sapiens
  misc_RNA (1)...(19): siRNA sense strand
uuaaaggugugaacuuggu

SEQ ID NO: 1054409 - RNA, 19 nt, Homo sapiens
  misc_RNA (1)...(19): siRNA sense strand
caaggaauucugcaguaga

SEQ ID NO: 1054410 - RNA, 19 nt, Homo sapiens
  misc_RNA (1)...(19): siRNA sense strand
agacgaaucagauaaacug

SEQ ID NO: 1054411 - RNA, 19 nt, Homo sapiens
  misc_RNA (1)...(19): siRNA sense strand
guaaacuaacuuccggaaa

SEQ ID NO: 1054412 - RNA, 19 nt, Homo sapiens
  misc_RNA (1)...(19): siRNA sense strand
aagcuaaggauaaacagaa

SEQ ID NO: 1054413 - RNA, 19 nt, Homo sapiens
  misc_RNA (1)...(19): siRNA sense strand
caacaacagagagauaaca

SEQ ID NO: 1054414 - RNA, 19 nt, Homo sapiens
  misc_RNA (1)...(19): siRNA sense strand
gaugcagguuuccaaaugc

SEQ ID NO: 1054415 - RNA, 19 nt, Homo sapiens
  misc_RNA (1)...(19): siRNA sense strand
gauuaagaaaccauuggaa

SEQ ID NO: 1054416 - RNA, 19 nt, Homo sapiens
  misc_RNA (1)...(19): siRNA sense strand
gaccaggaauauaaaauca

SEQ ID NO: 1054417 - RNA, 19 nt, Homo sapiens
  misc_RNA (1)...(19): siRNA sense strand
cauucuagaugcagguuuc

SEQ ID NO: 1054418 - RNA, 19 nt, Homo sapiens
  misc_RNA (1)...(19): siRNA sense strand
cacaacaacagagagauaa

SEQ ID NO: 1054419 - RNA, 19 nt, Homo sapiens
  misc_RNA (1)...(19): siRNA sense strand
cgaucuuccugacccaauu

SEQ ID NO: 1054420 - RNA, 19 nt, Homo sapiens
  misc_RNA (1)...(19): siRNA sense strand
ucagcaacuugaccaggaa

SEQ ID NO: 1054421 - RNA, 19 nt, Homo sapiens
  misc_RNA (1)...(19): siRNA sense strand
aaacucaaccuggacaaug

SEQ ID NO: 1054422 - RNA, 19 nt, Homo sapiens
  misc_RNA (1)...(19): siRNA sense strand
uaagaaaccauuggaaagg

SEQ ID NO: 1054423 - RNA, 19 nt, Homo sapiens
  misc_RNA (1)...(19): siRNA sense strand
ucagaaacuacuaagcaaa

SEQ ID NO: 1054424 - RNA, 19 nt, Homo sapiens
  misc_RNA (1)...(19): siRNA sense strand
gaagcguugcuaauguuau

SEQ ID NO: 1054425 - RNA, 19 nt, Homo sapiens
  misc_RNA (1)...(19): siRNA sense strand
gaacaacuaugcccugaau

SEQ ID NO: 1054426 - RNA, 19 nt, Homo sapiens
  misc_RNA (1)...(19): siRNA sense strand
gaaggaagccaccagcuau

SEQ ID NO: 1054427 - RNA, 19 nt, Homo sapiens
  misc_RNA (1)...(19): siRNA sense strand
ggaaggaagccaccagcua

SEQ ID NO: 1054428 - RNA, 19 nt, Homo sapiens
  misc_RNA (1)...(19): siRNA sense strand
cuucuuggcuucugauauu

SEQ ID NO: 1054429 - RNA, 19 nt, Homo sapiens
  misc_RNA (1)...(19): siRNA sense strand
gccaccagcuaucccaaua

SEQ ID NO: 1054430 - RNA, 19 nt, Homo sapiens
  misc_RNA (1)...(19): siRNA sense strand
ggagugacccugcccauca

SEQ ID NO: 1054431 - RNA, 19 nt, Homo sapiens
  misc_RNA (1)...(19): siRNA sense strand
gugggaacauugugacauu

SEQ ID NO: 1054432 - RNA, 19 nt, Homo sapiens
  misc_RNA (1)...(19): siRNA sense strand
ggaccuuaauguacacaga

SEQ ID NO: 1054433 - RNA, 19 nt, Homo sapiens
  misc_RNA (1)...(19): siRNA sense strand
cagcaaagcaggugacuuc

SEQ ID NO: 1054434 - RNA, 19 nt, Homo sapiens
  misc_RNA (1)...(19): siRNA sense strand
ccaaggaggcuuuguuuua

SEQ ID NO: 1054435 - RNA, 19 nt, Homo sapiens
  misc_RNA (1)...(19): siRNA sense strand
gguucuaccuccucaugaa

SEQ ID NO: 1054436 - RNA, 19 nt, Homo sapiens
  misc_RNA (1)...(19): siRNA sense strand
guaacgugaucuuccuaga

SEQ ID NO: 1054437 - RNA, 19 nt, Homo sapiens
  misc_RNA (1)...(19): siRNA sense strand
ugaacaucaucacucagua

SEQ ID NO: 1054438 - RNA, 19 nt, Homo sapiens
  misc_RNA (1)...(19): siRNA sense strand
gaacaucaucacucaguac

SEQ ID NO: 1054439 - RNA, 19 nt, Homo sapiens
  misc_RNA (1)...(19): siRNA sense strand
ccauugcccuggugucugu

SEQ ID NO: 1054440 - RNA, 19 nt, Homo sapiens
  misc_RNA (1)...(19): siRNA sense strand
ccaugcaguucuauucaau

SEQ ID NO: 1054441 - RNA, 19 nt, Homo sapiens
  misc_RNA (1)...(19): siRNA sense strand
gcaguaacgugaucuuccu

SEQ ID NO: 1054442 - RNA, 19 nt, Homo sapiens
  misc_RNA (1)...(19): siRNA sense strand
caaggaggcuuuguuuuau

SEQ ID NO: 1054443 - RNA, 19 nt, Homo sapiens
  misc_RNA (1)...(19): siRNA sense strand
gaagcugauuugggaagga

SEQ ID NO: 1054444 - RNA, 19 nt, Homo sapiens
  misc_RNA (1)...(19): siRNA sense strand
caccuuguuugucuucauu

SEQ ID NO: 1054445 - RNA, 19 nt, Homo sapiens
  misc_RNA (1)...(19): siRNA sense strand
ugagcguggugaacaacua

SEQ ID NO: 1054446 - RNA, 19 nt, Homo sapiens
  misc_RNA (1)...(19): siRNA sense strand
cagaaggacagcaagaaga

SEQ ID NO: 1054447 - RNA, 19 nt, Homo sapiens
  misc_RNA (1)...(19): siRNA sense strand
ugagugagaaugauggauu

SEQ ID NO: 1054448 - RNA, 19 nt, Homo sapiens
  misc_RNA (1)...(19): siRNA sense strand
ucaaauauaccuccauugc

SEQ ID NO: 1054449 - RNA, 19 nt, Homo sapiens
  misc_RNA (1)...(19): siRNA sense strand
gcacuuuuaugucagcaaa

SEQ ID NO: 1054450 - RNA, 19 nt, Homo sapiens
  misc_RNA (1)...(19): siRNA sense strand
ggacagcaagaagaacuga

SEQ ID NO: 1054451 - RNA, 19 nt, Homo sapiens
  misc_RNA (1)...(19): siRNA sense strand
agaaggacagcaagaagaa

SEQ ID NO: 1054452 - RNA, 19 nt, Homo sapiens
  misc_RNA (1)...(19): siRNA sense strand
gcauuuguguggugguuac

SEQ ID NO: 1054453 - RNA, 19 nt, Homo sapiens
  misc_RNA (1)...(19): siRNA sense strand
caguccagcuugagugaga

SEQ ID NO: 1054454 - RNA, 19 nt, Homo sapiens
  misc_RNA (1)...(19): siRNA sense strand
ggaacauugugacauuugc

SEQ ID NO: 1054455 - RNA, 19 nt, Homo sapiens
  misc_RNA (1)...(19): siRNA sense strand
gggaacauugugacauuug

SEQ ID NO: 1054456 - RNA, 19 nt, Homo sapiens
  misc_RNA (1)...(19): siRNA sense strand
gcaccuuguuugucuucau

SEQ ID NO: 1054457 - RNA, 19 nt, Homo sapiens
  misc_RNA (1)...(19): siRNA sense strand
ucuaauugccaacaugauu

SEQ ID NO: 1054458 - RNA, 19 nt, Homo sapiens
  misc_RNA (1)...(19): siRNA sense strand
gaccaugcaguucuauuca

SEQ ID NO: 1054459 - RNA, 19 nt, Homo sapiens
  misc_RNA (1)...(19): siRNA sense strand
caccagcuaucccaauaag

SEQ ID NO: 1054460 - RNA, 19 nt, Homo sapiens
  misc_RNA (1)...(19): siRNA sense strand
gcccugaaucucaacauug

SEQ ID NO: 1054461 - RNA, 19 nt, Homo sapiens
  misc_RNA (1)...(19): siRNA sense strand
guguggugguuacuaggua

SEQ ID NO: 1054462 - RNA, 19 nt, Homo sapiens
  misc_RNA (1)...(19): siRNA sense strand
gagugacccugcccaucau

SEQ ID NO: 1054463 - RNA, 19 nt, Homo sapiens
  misc_RNA (1)...(19): siRNA sense strand
cagcuaucccaauaaggua

SEQ ID NO: 1054464 - RNA, 19 nt, Homo sapiens
  misc_RNA (1)...(19): siRNA sense strand
ccagcuaucccaauaaggu

SEQ ID NO: 1054465 - RNA, 19 nt, Homo sapiens
  misc_RNA (1)...(19): siRNA sense strand
ccaccagcuaucccaauaa

SEQ ID NO: 1054466 - RNA, 19 nt, Homo sapiens
  misc_RNA (1)...(19): siRNA sense strand
ugucuucauugggaccuua

SEQ ID NO: 1054467 - RNA, 19 nt, Homo sapiens
  misc_RNA (1)...(19): siRNA sense strand
gaacauugugacauuugca

SEQ ID NO: 1054468 - RNA, 19 nt, Homo sapiens
  misc_RNA (1)...(19): siRNA sense strand
uuaugaccaugcaguucua

SEQ ID NO: 1054469 - RNA, 19 nt, Homo sapiens
  misc_RNA (1)...(19): siRNA sense strand
ugaccaugcaguucuauuc

SEQ ID NO: 1054470 - RNA, 19 nt, Homo sapiens
  misc_RNA (1)...(19): siRNA sense strand
gccaacaugauucuaggaa

SEQ ID NO: 1054471 - RNA, 19 nt, Homo sapiens
  misc_RNA (1)...(19): siRNA sense strand
gagcguggugaacaacuau

SEQ ID NO: 1054472 - RNA, 19 nt, Homo sapiens
  misc_RNA (1)...(19): siRNA sense strand
ugggaacauugugacauuu

SEQ ID NO: 1054473 - RNA, 19 nt, Homo sapiens
  misc_RNA (1)...(19): siRNA sense strand
acuaugcccugaaucucaa

SEQ ID NO: 1054474 - RNA, 19 nt, Homo sapiens
  misc_RNA (1)...(19): siRNA sense strand
uggcuucugauauuuauga

SEQ ID NO: 1054475 - RNA, 19 nt, Homo sapiens
  misc_RNA (1)...(19): siRNA sense strand
cgucgugacccuacgcaaa

SEQ ID NO: 1054476 - RNA, 19 nt, Homo sapiens
  misc_RNA (1)...(19): siRNA sense strand
cuaauugccaacaugauuc

SEQ ID NO: 1054477 - RNA, 19 nt, Homo sapiens
  misc_RNA (1)...(19): siRNA sense strand
aagcugauuugggaaggaa

SEQ ID NO: 1054478 - RNA, 19 nt, Homo sapiens
  misc_RNA (1)...(19): siRNA sense strand
cagcaaggauggggauauu

SEQ ID NO: 1054479 - RNA, 19 nt, Homo sapiens
  misc_RNA (1)...(19): siRNA sense strand
cagcuugagugagaaugau

SEQ ID NO: 1054480 - RNA, 19 nt, Homo sapiens
  misc_RNA (1)...(19): siRNA sense strand
ggauggggauauuccaaga

SEQ ID NO: 1054481 - RNA, 19 nt, Homo sapiens
  misc_RNA (1)...(19): siRNA sense strand
uaaucacgcccuuccacuu

SEQ ID NO: 1054482 - RNA, 19 nt, Homo sapiens
  misc_RNA (1)...(19): siRNA sense strand
ccagcuugagugagaauga

SEQ ID NO: 1054483 - RNA, 19 nt, Homo sapiens
  misc_RNA (1)...(19): siRNA sense strand
uaacgugaucuuccuagag

SEQ ID NO: 1054484 - RNA, 19 nt, Homo sapiens
  misc_RNA (1)...(19): siRNA sense strand
agauccgguucucuaauug

SEQ ID NO: 1054485 - RNA, 19 nt, Homo sapiens
  misc_RNA (1)...(19): siRNA sense strand
ugauauuuaugaccaugca

SEQ ID NO: 1054486 - RNA, 19 nt, Homo sapiens
  misc_RNA (1)...(19): siRNA sense strand
acaacuaugcccugaaucu

SEQ ID NO: 1054487 - RNA, 19 nt, Homo sapiens
  misc_RNA (1)...(19): siRNA sense strand
ugcccugaaucucaacauu

SEQ ID NO: 1054488 - RNA, 19 nt, Homo sapiens
  misc_RNA (1)...(19): siRNA sense strand
aaucacgcccuuccacuuc

SEQ ID NO: 1054489 - RNA, 19 nt, Homo sapiens
  misc_RNA (1)...(19): siRNA sense strand
ggaagaacuuagugauuaa

SEQ ID NO: 1054490 - RNA, 19 nt, Homo sapiens
  misc_RNA (1)...(19): siRNA sense strand
gcacauauuucagugauga

SEQ ID NO: 1054491 - RNA, 19 nt, Homo sapiens
  misc_RNA (1)...(19): siRNA sense strand
gauaaagacucugcacaaa

SEQ ID NO: 1054492 - RNA, 19 nt, Homo sapiens
  misc_RNA (1)...(19): siRNA sense strand
aggaagaacuuagugauua

SEQ ID NO: 1054493 - RNA, 19 nt, Homo sapiens
  misc_RNA (1)...(19): siRNA sense strand
aaagaaagcuccugaacca

SEQ ID NO: 1054494 - RNA, 19 nt, Homo sapiens
  misc_RNA (1)...(19): siRNA sense strand
gaaagcuccugaaccagaa

SEQ ID NO: 1054495 - RNA, 19 nt, Homo sapiens
  misc_RNA (1)...(19): siRNA sense strand
ucaagacgcccaaggauaa

SEQ ID NO: 1054496 - RNA, 19 nt, Homo sapiens
  misc_RNA (1)...(19): siRNA sense strand
ggaaguagaagaaagugaa

SEQ ID NO: 1054497 - RNA, 19 nt, Homo sapiens
  misc_RNA (1)...(19): siRNA sense strand
agaagaaagugaagaugaa

SEQ ID NO: 1054498 - RNA, 19 nt, Homo sapiens
  misc_RNA (1)...(19): siRNA sense strand
aaagauaccaggaagagua

SEQ ID NO: 1054499 - RNA, 19 nt, Homo sapiens
  misc_RNA (1)...(19): siRNA sense strand
aggcgaaacuacuuugaua

SEQ ID NO: 1054500 - RNA, 19 nt, Homo sapiens
  misc_RNA (1)...(19): siRNA sense strand
ggauaaagacucugcacaa

SEQ ID NO: 1054501 - RNA, 19 nt, Homo sapiens
  misc_RNA (1)...(19): siRNA sense strand
gcgaaacuacuuugauaaa

SEQ ID NO: 1054502 - RNA, 19 nt, Homo sapiens
  misc_RNA (1)...(19): siRNA sense strand
agaagaaauugaggaagua

SEQ ID NO: 1054503 - RNA, 19 nt, Homo sapiens
  misc_RNA (1)...(19): siRNA sense strand
uggcaaaguuguaaagguu

SEQ ID NO: 1054504 - RNA, 19 nt, Homo sapiens
  misc_RNA (1)...(19): siRNA sense strand
guuauuugguagagugaua

SEQ ID NO: 1054505 - RNA, 19 nt, Homo sapiens
  misc_RNA (1)...(19): siRNA sense strand
caaguaagagcacagugua

SEQ ID NO: 1054506 - RNA, 19 nt, Homo sapiens
  misc_RNA (1)...(19): siRNA sense strand
gaggaagaacuuagugauu

SEQ ID NO: 1054507 - RNA, 19 nt, Homo sapiens
  misc_RNA (1)...(19): siRNA sense strand
gcaauaaacaacaaacagu

SEQ ID NO: 1054508 - RNA, 19 nt, Homo sapiens
  misc_RNA (1)...(19): siRNA sense strand
aagaagaaauugaggaagu

SEQ ID NO: 1054509 - RNA, 19 nt, Homo sapiens
  misc_RNA (1)...(19): siRNA sense strand
gggaggauccugcucuuga

SEQ ID NO: 1054510 - RNA, 19 nt, Homo sapiens
  misc_RNA (1)...(19): siRNA sense strand
uagaagaaagugaagauga

SEQ ID NO: 1054511 - RNA, 19 nt, Homo sapiens
  misc_RNA (1)...(19): siRNA sense strand
ggccauagcauuccagcaa

SEQ ID NO: 1054512 - RNA, 19 nt, Homo sapiens
  misc_RNA (1)...(19): siRNA sense strand
gaaggcgaaacuacuuuga

SEQ ID NO: 1054513 - RNA, 19 nt, Homo sapiens
  misc_RNA (1)...(19): siRNA sense strand
gaagagcagcugaguucau

SEQ ID NO: 1054514 - RNA, 19 nt, Homo sapiens
  misc_RNA (1)...(19): siRNA sense strand
uaagagcacaguguaugua

SEQ ID NO: 1054515 - RNA, 19 nt, Homo sapiens
  misc_RNA (1)...(19): siRNA sense strand
guuaccaucaugaaagaua

SEQ ID NO: 1054516 - RNA, 19 nt, Homo sapiens
  misc_RNA (1)...(19): siRNA sense strand
ugaaccagaagaagaaauu

SEQ ID NO: 1054517 - RNA, 19 nt, Homo sapiens
  misc_RNA (1)...(19): siRNA sense strand
ugacuuguaccggauauuu

SEQ ID NO: 1054518 - RNA, 19 nt, Homo sapiens
  misc_RNA (1)...(19): siRNA sense strand
ccagggcaauaaacaacaa

SEQ ID NO: 1054519 - RNA, 19 nt, Homo sapiens
  misc_RNA (1)...(19): siRNA sense strand
caaguauggcaaaguugua

SEQ ID NO: 1054520 - RNA, 19 nt, Homo sapiens
  misc_RNA (1)...(19): siRNA sense strand
ggcaaaguuguaaagguua

SEQ ID NO: 1054521 - RNA, 19 nt, Homo sapiens
  misc_RNA (1)...(19): siRNA sense strand
gauaaagauaccaggaaga

SEQ ID NO: 1054522 - RNA, 19 nt, Homo sapiens
  misc_RNA (1)...(19): siRNA sense strand
uggaagagcagcugaguuc

SEQ ID NO: 1054523 - RNA, 19 nt, Homo sapiens
  misc_RNA (1)...(19): siRNA sense strand
guaagagcacaguguaugu

SEQ ID NO: 1054524 - RNA, 19 nt, Homo sapiens
  misc_RNA (1)...(19): siRNA sense strand
agaaauugaggaaguagaa

SEQ ID NO: 1054525 - RNA, 19 nt, Homo sapiens
  misc_RNA (1)...(19): siRNA sense strand
gaaccagaagaagaaauug

SEQ ID NO: 1054526 - RNA, 19 nt, Homo sapiens
  misc_RNA (1)...(19): siRNA sense strand
gcacaguguauguauccaa

SEQ ID NO: 1054527 - RNA, 19 nt, Homo sapiens
  misc_RNA (1)...(19): siRNA sense strand
ggcgaaacuacuuugauaa

SEQ ID NO: 1054528 - RNA, 19 nt, Homo sapiens
  misc_RNA (1)...(19): siRNA sense strand
uaaagguuaccaucaugaa

SEQ ID NO: 1054529 - RNA, 19 nt, Homo sapiens
  misc_RNA (1)...(19): siRNA sense strand
ccaaguaagagcacagugu

SEQ ID NO: 1054530 - RNA, 19 nt, Homo sapiens
  misc_RNA (1)...(19): siRNA sense strand
agaagaagaaauugaggaa

SEQ ID NO: 1054531 - RNA, 19 nt, Homo sapiens
  misc_RNA (1)...(19): siRNA sense strand
gaagaaagugaagaugaag

SEQ ID NO: 1054532 - RNA, 19 nt, Homo sapiens
  misc_RNA (1)...(19): siRNA sense strand
uaaagacucugcacaaaac

SEQ ID NO: 1054533 - RNA, 19 nt, Homo sapiens
  misc_RNA (1)...(19): siRNA sense strand
aagcacauauuucagugau

SEQ ID NO: 1054534 - RNA, 19 nt, Homo sapiens
  misc_RNA (1)...(19): siRNA sense strand
caguguauguauccaacuu

SEQ ID NO: 1054535 - RNA, 19 nt, Homo sapiens
  misc_RNA (1)...(19): siRNA sense strand
guaccagggcaauaaacaa

SEQ ID NO: 1054536 - RNA, 19 nt, Homo sapiens
  misc_RNA (1)...(19): siRNA sense strand
aaacaguuauuugguagag

SEQ ID NO: 1054537 - RNA, 19 nt, Homo sapiens
  misc_RNA (1)...(19): siRNA sense strand
ggaggauccugcucuugac

SEQ ID NO: 1054538 - RNA, 19 nt, Homo sapiens
  misc_RNA (1)...(19): siRNA sense strand
gaagaaauugaggaaguag

SEQ ID NO: 1054539 - RNA, 19 nt, Homo sapiens
  misc_RNA (1)...(19): siRNA sense strand
ccaaguauggcaaaguugu

SEQ ID NO: 1054540 - RNA, 19 nt, Homo sapiens
  misc_RNA (1)...(19): siRNA sense strand
aagagcagcugaguucauc

SEQ ID NO: 1054541 - RNA, 19 nt, Homo sapiens
  misc_RNA (1)...(19): siRNA sense strand
caugaaagauaaagauacc

SEQ ID NO: 1054542 - RNA, 19 nt, Homo sapiens
  misc_RNA (1)...(19): siRNA sense strand
gauucaagacgcccaagga

SEQ ID NO: 1054543 - RNA, 19 nt, Homo sapiens
  misc_RNA (1)...(19): siRNA sense strand
ucagucaggccauagcauu

SEQ ID NO: 1054544 - RNA, 19 nt, Homo sapiens
  misc_RNA (1)...(19): siRNA sense strand
uuccaaguauggcaaaguu

SEQ ID NO: 1054545 - RNA, 19 nt, Homo sapiens
  misc_RNA (1)...(19): siRNA sense strand
gaaguagaagaaagugaag

SEQ ID NO: 1054546 - RNA, 19 nt, Homo sapiens
  misc_RNA (1)...(19): siRNA sense strand
gaguaaagggguugcauuu

SEQ ID NO: 1054547 - RNA, 19 nt, Homo sapiens
  misc_RNA (1)...(19): siRNA sense strand
aaagguuaccaucaugaaa

SEQ ID NO: 1054548 - RNA, 19 nt, Homo sapiens
  misc_RNA (1)...(19): siRNA sense strand
caagacgcccaaggauaaa

SEQ ID NO: 1054549 - RNA, 19 nt, Homo sapiens
  misc_RNA (1)...(19): siRNA sense strand
aaacuguaccagggcaaua

SEQ ID NO: 1054550 - RNA, 19 nt, Homo sapiens
  misc_RNA (1)...(19): siRNA sense strand
gaugaggaagaacuuagug

SEQ ID NO: 1054551 - RNA, 19 nt, Homo sapiens
  misc_RNA (1)...(19): siRNA sense strand
cgaaggcgaaacuacuuug

SEQ ID NO: 1054552 - RNA, 19 nt, Homo sapiens
  misc_RNA (1)...(19): siRNA sense strand
aagauaccaggaagaguaa

SEQ ID NO: 1054553 - RNA, 19 nt, Homo sapiens
  misc_RNA (1)...(19): siRNA sense strand
gggguugcauuuauuuuau

SEQ ID NO: 1054554 - RNA, 19 nt, Homo sapiens
  misc_RNA (1)...(19): siRNA sense strand
gggcaauaaacaacaaaca

SEQ ID NO: 1054555 - RNA, 19 nt, Homo sapiens
  misc_RNA (1)...(19): siRNA sense strand
aagauaaagauaccaggaa

SEQ ID NO: 1054556 - RNA, 19 nt, Homo sapiens
  misc_RNA (1)...(19): siRNA sense strand
ugaggaaguagaagaaagu

SEQ ID NO: 1054557 - RNA, 19 nt, Homo sapiens
  misc_RNA (1)...(19): siRNA sense strand
caaugacuuguaccggaua

SEQ ID NO: 1054558 - RNA, 19 nt, Homo sapiens
  misc_RNA (1)...(19): siRNA sense strand
uuucagugaugaggaagaa

SEQ ID NO: 1054559 - RNA, 19 nt, Homo sapiens
  misc_RNA (1)...(19): siRNA sense strand
auauuucagugaugaggaa

SEQ ID NO: 1054560 - RNA, 19 nt, Homo sapiens
  misc_RNA (1)...(19): siRNA sense strand
ggauaaagaaaagcacaua

SEQ ID NO: 1054561 - RNA, 19 nt, Homo sapiens
  misc_RNA (1)...(19): siRNA sense strand
guagaagaaagugaagaug

SEQ ID NO: 1054562 - RNA, 19 nt, Homo sapiens
  misc_RNA (1)...(19): siRNA sense strand
aaauugaggaaguagaaga

SEQ ID NO: 1054563 - RNA, 19 nt, Homo sapiens
  misc_RNA (1)...(19): siRNA sense strand
gaaauugaggaaguagaag

SEQ ID NO: 1054564 - RNA, 19 nt, Homo sapiens
  misc_RNA (1)...(19): siRNA sense strand
gagcacaguguauguaucc

SEQ ID NO: 1054565 - RNA, 19 nt, Homo sapiens
  misc_RNA (1)...(19): siRNA sense strand
gauaccaggaagaguaaag

SEQ ID NO: 1054566 - RNA, 19 nt, Homo sapiens
  misc_RNA (1)...(19): siRNA sense strand
ugaggaagaacuuagugau

SEQ ID NO: 1054567 - RNA, 19 nt, Homo sapiens
  misc_RNA (1)...(19): siRNA sense strand
ccgaaggcgaaacuacuuu

SEQ ID NO: 1054568 - RNA, 19 nt, Homo sapiens
  misc_RNA (1)...(19): siRNA sense strand
ggcaauaaacaacaaacag

SEQ ID NO: 1054569 - RNA, 19 nt, Homo sapiens
  misc_RNA (1)...(19): siRNA sense strand
uucaagacgcccaaggaua

SEQ ID NO: 1054570 - RNA, 19 nt, Homo sapiens
  misc_RNA (1)...(19): siRNA sense strand
agguuaccaucaugaaaga

SEQ ID NO: 1054571 - RNA, 19 nt, Homo sapiens
  misc_RNA (1)...(19): siRNA sense strand
gaacccagcuggaaucuua

SEQ ID NO: 1054572 - RNA, 19 nt, Homo sapiens
  misc_RNA (1)...(19): siRNA sense strand
gagaguggcucccaaacua

SEQ ID NO: 1054573 - RNA, 19 nt, Homo sapiens
  misc_RNA (1)...(19): siRNA sense strand
gcaaauacguccucugugu

SEQ ID NO: 1054574 - RNA, 19 nt, Homo sapiens
  misc_RNA (1)...(19): siRNA sense strand
gaacaccagucuaccauuc

SEQ ID NO: 1054575 - RNA, 19 nt, Homo sapiens
  misc_RNA (1)...(19): siRNA sense strand
gaagaaaugucagguuugu

SEQ ID NO: 1054576 - RNA, 19 nt, Homo sapiens
  misc_RNA (1)...(19): siRNA sense strand
ccacaucgcuuccuuggau

SEQ ID NO: 1054577 - RNA, 19 nt, Homo sapiens
  misc_RNA (1)...(19): siRNA sense strand
aagaagaaaugucagguuu

SEQ ID NO: 1054578 - RNA, 19 nt, Homo sapiens
  misc_RNA (1)...(19): siRNA sense strand
gggagaaaguacuguugua

SEQ ID NO: 1054579 - RNA, 19 nt, Homo sapiens
  misc_RNA (1)...(19): siRNA sense strand
gauugauacuccaagguua

SEQ ID NO: 1054580 - RNA, 19 nt, Homo sapiens
  misc_RNA (1)...(19): siRNA sense strand
ggucuccguucacgacuua

SEQ ID NO: 1054581 - RNA, 19 nt, Homo sapiens
  misc_RNA (1)...(19): siRNA sense strand
aggcauauguucaguguaa

SEQ ID NO: 1054582 - RNA, 19 nt, Homo sapiens
  misc_RNA (1)...(19): siRNA sense strand
uaagaccagugaaaguuaa

SEQ ID NO: 1054583 - RNA, 19 nt, Homo sapiens
  misc_RNA (1)...(19): siRNA sense strand
agacaucgcagguucaaua

SEQ ID NO: 1054584 - RNA, 19 nt, Homo sapiens
  misc_RNA (1)...(19): siRNA sense strand
cgaagauaauguugaaaga

SEQ ID NO: 1054585 - RNA, 19 nt, Homo sapiens
  misc_RNA (1)...(19): siRNA sense strand
gugacagucuuucccauaa

SEQ ID NO: 1054586 - RNA, 19 nt, Homo sapiens
  misc_RNA (1)...(19): siRNA sense strand
gcaggcauauguucagugu

SEQ ID NO: 1054587 - RNA, 19 nt, Homo sapiens
  misc_RNA (1)...(19): siRNA sense strand
guaguuaugccaaagauug

SEQ ID NO: 1054588 - RNA, 19 nt, Homo sapiens
  misc_RNA (1)...(19): siRNA sense strand
cauaagccauggcacaaga

SEQ ID NO: 1054589 - RNA, 19 nt, Homo sapiens
  misc_RNA (1)...(19): siRNA sense strand
caucgcagguucaauaagu

SEQ ID NO: 1054590 - RNA, 19 nt, Homo sapiens
  misc_RNA (1)...(19): siRNA sense strand
ucagcaacaugguauaaga

SEQ ID NO: 1054591 - RNA, 19 nt, Homo sapiens
  misc_RNA (1)...(19): siRNA sense strand
agaaaguacuguuguaucu

SEQ ID NO: 1054592 - RNA, 19 nt, Homo sapiens
  misc_RNA (1)...(19): siRNA sense strand
gggucaagcugguacauag

SEQ ID NO: 1054593 - RNA, 19 nt, Homo sapiens
  misc_RNA (1)...(19): siRNA sense strand
ggagaaaguacuguuguau

SEQ ID NO: 1054594 - RNA, 19 nt, Homo sapiens
  misc_RNA (1)...(19): siRNA sense strand
ugacagucuuucccauaaa

SEQ ID NO: 1054595 - RNA, 19 nt, Homo sapiens
  misc_RNA (1)...(19): siRNA sense strand
uaucagaaacuuugggaaa

SEQ ID NO: 1054596 - RNA, 19 nt, Homo sapiens
  misc_RNA (1)...(19): siRNA sense strand
gaacagcgcacggcucagu

SEQ ID NO: 1054597 - RNA, 19 nt, Homo sapiens
  misc_RNA (1)...(19): siRNA sense strand
gcagagcuuugugcuuuca

SEQ ID NO: 1054598 - RNA, 19 nt, Homo sapiens
  misc_RNA (1)...(19): siRNA sense strand
ggugacagucuuucccaua

SEQ ID NO: 1054599 - RNA, 19 nt, Homo sapiens
  misc_RNA (1)...(19): siRNA sense strand
ggacgacacauccaacauc

SEQ ID NO: 1054600 - RNA, 19 nt, Homo sapiens
  misc_RNA (1)...(19): siRNA sense strand
gagaaaguacuguuguauc

SEQ ID NO: 1054601 - RNA, 19 nt, Homo sapiens
  misc_RNA (1)...(19): siRNA sense strand
guaacgaagauaauguuga

SEQ ID NO: 1054602 - RNA, 19 nt, Homo sapiens
  misc_RNA (1)...(19): siRNA sense strand
augggugguuguugaauua

SEQ ID NO: 1054603 - RNA, 19 nt, Homo sapiens
  misc_RNA (1)...(19): siRNA sense strand
caagaagaaaugucagguu

SEQ ID NO: 1054604 - RNA, 19 nt, Homo sapiens
  misc_RNA (1)...(19): siRNA sense strand
cagcaaauacguccucugu

SEQ ID NO: 1054605 - RNA, 19 nt, Homo sapiens
  misc_RNA (1)...(19): siRNA sense strand
agauaccucugaugcugua

SEQ ID NO: 1054606 - RNA, 19 nt, Homo sapiens
  misc_RNA (1)...(19): siRNA sense strand
uauaagaccagugaaaguu

SEQ ID NO: 1054607 - RNA, 19 nt, Homo sapiens
  misc_RNA (1)...(19): siRNA sense strand
gcacuacacaaacacugaa

SEQ ID NO: 1054608 - RNA, 19 nt, Homo sapiens
  misc_RNA (1)...(19): siRNA sense strand
ccaagguuauguagcuuuc

SEQ ID NO: 1054609 - RNA, 19 nt, Homo sapiens
  misc_RNA (1)...(19): siRNA sense strand
ccaguugggugacagucuu

SEQ ID NO: 1054610 - RNA, 19 nt, Homo sapiens
  misc_RNA (1)...(19): siRNA sense strand
uaugggugguuguugaauu

SEQ ID NO: 1054611 - RNA, 19 nt, Homo sapiens
  misc_RNA (1)...(19): siRNA sense strand
gauacuccaagguuaugua

SEQ ID NO: 1054612 - RNA, 19 nt, Homo sapiens
  misc_RNA (1)...(19): siRNA sense strand
gacgacacauccaacaucu

SEQ ID NO: 1054613 - RNA, 19 nt, Homo sapiens
  misc_RNA (1)...(19): siRNA sense strand
caaccaggccugccguguu

SEQ ID NO: 1054614 - RNA, 19 nt, Homo sapiens
  misc_RNA (1)...(19): siRNA sense strand
acucaaggcugcauuacuc

SEQ ID NO: 1054615 - RNA, 19 nt, Homo sapiens
  misc_RNA (1)...(19): siRNA sense strand
uggaggcagugaacaaaga

SEQ ID NO: 1054616 - RNA, 19 nt, Homo sapiens
  misc_RNA (1)...(19): siRNA sense strand
auaagaccagugaaaguua

SEQ ID NO: 1054617 - RNA, 19 nt, Homo sapiens
  misc_RNA (1)...(19): siRNA sense strand
gcacaagacaagauuugag

SEQ ID NO: 1054618 - RNA, 19 nt, Homo sapiens
  misc_RNA (1)...(19): siRNA sense strand
auagugcucugauccaguu

SEQ ID NO: 1054619 - RNA, 19 nt, Homo sapiens
  misc_RNA (1)...(19): siRNA sense strand
gaagauaauguugaaagag

SEQ ID NO: 1054620 - RNA, 19 nt, Homo sapiens
  misc_RNA (1)...(19): siRNA sense strand
agucuaccauuccuucaaa

SEQ ID NO: 1054621 - RNA, 19 nt, Homo sapiens
  misc_RNA (1)...(19): siRNA sense strand
gacaucgcagguucaauaa

SEQ ID NO: 1054622 - RNA, 19 nt, Homo sapiens
  misc_RNA (1)...(19): siRNA sense strand
cagguucaauaagugauuu

SEQ ID NO: 1054623 - RNA, 19 nt, Homo sapiens
  misc_RNA (1)...(19): siRNA sense strand
agggaaaacugcacaagua

SEQ ID NO: 1054624 - RNA, 19 nt, Homo sapiens
  misc_RNA (1)...(19): siRNA sense strand
cgacacauccaacaucuac

SEQ ID NO: 1054625 - RNA, 19 nt, Homo sapiens
  misc_RNA (1)...(19): siRNA sense strand
ccagugaaaguuaauguca

SEQ ID NO: 1054626 - RNA, 19 nt, Homo sapiens
  misc_RNA (1)...(19): siRNA sense strand
cuucagauccuaaucacuu

SEQ ID NO: 1054627 - RNA, 19 nt, Homo sapiens
  misc_RNA (1)...(19): siRNA sense strand
gcagguucaauaagugauu

SEQ ID NO: 1054628 - RNA, 19 nt, Homo sapiens
  misc_RNA (1)...(19): siRNA sense strand
cauccaacaucuacaucug

SEQ ID NO: 1054629 - RNA, 19 nt, Homo sapiens
  misc_RNA (1)...(19): siRNA sense strand
ggcagugaacaaagagaua

SEQ ID NO: 1054630 - RNA, 19 nt, Homo sapiens
  misc_RNA (1)...(19): siRNA sense strand
guauaagaccagugaaagu

SEQ ID NO: 1054631 - RNA, 19 nt, Homo sapiens
  misc_RNA (1)...(19): siRNA sense strand
gaguggcucccaaacuauu

SEQ ID NO: 1054632 - RNA, 19 nt, Homo sapiens
  misc_RNA (1)...(19): siRNA sense strand
gcaguagaaccuaucucaa

SEQ ID NO: 1054633 - RNA, 19 nt, Homo sapiens
  misc_RNA (1)...(19): siRNA sense strand
uggaauccuuaccucagua

SEQ ID NO: 1054634 - RNA, 19 nt, Homo sapiens
  misc_RNA (1)...(19): siRNA sense strand
cgucugggauuugagagaa

SEQ ID NO: 1054635 - RNA, 19 nt, Homo sapiens
  misc_RNA (1)...(19): siRNA sense strand
uugcacaccucccgaguuc

SEQ ID NO: 1054636 - RNA, 19 nt, Homo sapiens
  misc_RNA (1)...(19): siRNA sense strand
aaccaggccugccguguuc

SEQ ID NO: 1054637 - RNA, 19 nt, Homo sapiens
  misc_RNA (1)...(19): siRNA sense strand
cacaagacaagauuugaga

SEQ ID NO: 1054638 - RNA, 19 nt, Homo sapiens
  misc_RNA (1)...(19): siRNA sense strand
cuacacaaacacugaaugu

SEQ ID NO: 1054639 - RNA, 19 nt, Homo sapiens
  misc_RNA (1)...(19): siRNA sense strand
caagacaagauuugagagu

SEQ ID NO: 1054640 - RNA, 19 nt, Homo sapiens
  misc_RNA (1)...(19): siRNA sense strand
gguauaagaccagugaaag

SEQ ID NO: 1054641 - RNA, 19 nt, Homo sapiens
  misc_RNA (1)...(19): siRNA sense strand
gcagacaucgcagguucaa

SEQ ID NO: 1054642 - RNA, 19 nt, Homo sapiens
  misc_RNA (1)...(19): siRNA sense strand
gaaaguacuguuguaucug

SEQ ID NO: 1054643 - RNA, 19 nt, Homo sapiens
  misc_RNA (1)...(19): siRNA sense strand
guuaugccaaagauugaua

SEQ ID NO: 1054644 - RNA, 19 nt, Homo sapiens
  misc_RNA (1)...(19): siRNA sense strand
guuguugaauuaccaaagg

SEQ ID NO: 1054645 - RNA, 19 nt, Homo sapiens
  misc_RNA (1)...(19): siRNA sense strand
auaccaagcaggcauaugu

SEQ ID NO: 1054646 - RNA, 19 nt, Homo sapiens
  misc_RNA (1)...(19): siRNA sense strand
gaagacucaaggcugcauu

SEQ ID NO: 1054647 - RNA, 19 nt, Homo sapiens
  misc_RNA (1)...(19): siRNA sense strand
ccaaagauugauacuccaa

SEQ ID NO: 1054648 - RNA, 19 nt, Homo sapiens
  misc_RNA (1)...(19): siRNA sense strand
ccaagcaggcauauguuca

SEQ ID NO: 1054649 - RNA, 19 nt, Homo sapiens
  misc_RNA (1)...(19): siRNA sense strand
ucagauccuaaucacuuua

SEQ ID NO: 1054650 - RNA, 19 nt, Homo sapiens
  misc_RNA (1)...(19): siRNA sense strand
guugucgucugggauuuga

SEQ ID NO: 1054651 - RNA, 19 nt, Homo sapiens
  misc_RNA (1)...(19): siRNA sense strand
ccucugaugcuguaguuau

SEQ ID NO: 1054652 - RNA, 19 nt, Homo sapiens
  misc_RNA (1)...(19): siRNA sense strand
gcacaccucccgaguucag

SEQ ID NO: 1054653 - RNA, 19 nt, Homo sapiens
  misc_RNA (1)...(19): siRNA sense strand
cauucaaacggaggaaaua

SEQ ID NO: 1054654 - RNA, 19 nt, Homo sapiens
  misc_RNA (1)...(19): siRNA sense strand
gaccagugaaaguuaaugu

SEQ ID NO: 1054655 - RNA, 19 nt, Homo sapiens
  misc_RNA (1)...(19): siRNA sense strand
cagcugaacaccagucuac

SEQ ID NO: 1054656 - RNA, 19 nt, Homo sapiens
  misc_RNA (1)...(19): siRNA sense strand
ccucagcaacaugguauaa

SEQ ID NO: 1054657 - RNA, 19 nt, Homo sapiens
  misc_RNA (1)...(19): siRNA sense strand
aaaccucagcaacauggua

SEQ ID NO: 1054658 - RNA, 19 nt, Homo sapiens
  misc_RNA (1)...(19): siRNA sense strand
cccauaaagguaaugaauu

SEQ ID NO: 1054659 - RNA, 19 nt, Homo sapiens
  misc_RNA (1)...(19): siRNA sense strand
auaagugauuuaggucuga

SEQ ID NO: 1054660 - RNA, 19 nt, Homo sapiens
  misc_RNA (1)...(19): siRNA sense strand
agucccaggucacguguug

SEQ ID NO: 1054661 - RNA, 19 nt, Homo sapiens
  misc_RNA (1)...(19): siRNA sense strand
uaccucugaugcuguaguu

SEQ ID NO: 1054662 - RNA, 19 nt, Homo sapiens
  misc_RNA (1)...(19): siRNA sense strand
gcagugaacaaagagauac

SEQ ID NO: 1054663 - RNA, 19 nt, Homo sapiens
  misc_RNA (1)...(19): siRNA sense strand
ucaguugucgucugggauu

SEQ ID NO: 1054664 - RNA, 19 nt, Homo sapiens
  misc_RNA (1)...(19): siRNA sense strand
gcgauggcuucuggacguu

SEQ ID NO: 1054665 - RNA, 19 nt, Homo sapiens
  misc_RNA (1)...(19): siRNA sense strand
auucaaaccucagcaacau

SEQ ID NO: 1054666 - RNA, 19 nt, Homo sapiens
  misc_RNA (1)...(19): siRNA sense strand
gguacauagugcucugauc

SEQ ID NO: 1054667 - RNA, 19 nt, Homo sapiens
  misc_RNA (1)...(19): siRNA sense strand
gauaauguugaaagagaca

SEQ ID NO: 1054668 - RNA, 19 nt, Homo sapiens
  misc_RNA (1)...(19): siRNA sense strand
caguagaaccuaucucaac

SEQ ID NO: 1054669 - RNA, 19 nt, Homo sapiens
  misc_RNA (1)...(19): siRNA sense strand
cagugaaaguuaaugucau

SEQ ID NO: 1054670 - RNA, 19 nt, Homo sapiens
  misc_RNA (1)...(19): siRNA sense strand
caacaggcugcgucugcuu

SEQ ID NO: 1054671 - RNA, 19 nt, Homo sapiens
  misc_RNA (1)...(19): siRNA sense strand
gagcauagcuacauacaaa

SEQ ID NO: 1054672 - RNA, 19 nt, Homo sapiens
  misc_RNA (1)...(19): siRNA sense strand
gagcagacuuugaucauua

SEQ ID NO: 1054673 - RNA, 19 nt, Homo sapiens
  misc_RNA (1)...(19): siRNA sense strand
gaaaauagcugaacuggaa

SEQ ID NO: 1054674 - RNA, 19 nt, Homo sapiens
  misc_RNA (1)...(19): siRNA sense strand
caacugaacuuaugaagga

SEQ ID NO: 1054675 - RNA, 19 nt, Homo sapiens
  misc_RNA (1)...(19): siRNA sense strand
aaauauagcucaaggcaua

SEQ ID NO: 1054676 - RNA, 19 nt, Homo sapiens
  misc_RNA (1)...(19): siRNA sense strand
gaagcaagcaguucucuua

SEQ ID NO: 1054677 - RNA, 19 nt, Homo sapiens
  misc_RNA (1)...(19): siRNA sense strand
gugaugaccugauggauua

SEQ ID NO: 1054678 - RNA, 19 nt, Homo sapiens
  misc_RNA (1)...(19): siRNA sense strand
gcaagcaguucucuuauga

SEQ ID NO: 1054679 - RNA, 19 nt, Homo sapiens
  misc_RNA (1)...(19): siRNA sense strand
gaaggaagacuuugauuug

SEQ ID NO: 1054680 - RNA, 19 nt, Homo sapiens
  misc_RNA (1)...(19): siRNA sense strand
gaagaagucuauuaugauc

SEQ ID NO: 1054681 - RNA, 19 nt, Homo sapiens
  misc_RNA (1)...(19): siRNA sense strand
ggaagagcauagcuacaua

SEQ ID NO: 1054682 - RNA, 19 nt, Homo sapiens
  misc_RNA (1)...(19): siRNA sense strand
ggaguuggcugcaauggaa

SEQ ID NO: 1054683 - RNA, 19 nt, Homo sapiens
  misc_RNA (1)...(19): siRNA sense strand
gaacuucucuuguggaucu

SEQ ID NO: 1054684 - RNA, 19 nt, Homo sapiens
  misc_RNA (1)...(19): siRNA sense strand
gaagaaacccggauaguca

SEQ ID NO: 1054685 - RNA, 19 nt, Homo sapiens
  misc_RNA (1)...(19): siRNA sense strand
gaagcaggcucaugcagaa

SEQ ID NO: 1054686 - RNA, 19 nt, Homo sapiens
  misc_RNA (1)...(19): siRNA sense strand
gaacaaaacuuggggaaaa

SEQ ID NO: 1054687 - RNA, 19 nt, Homo sapiens
  misc_RNA (1)...(19): siRNA sense strand
ugaaacaacugaacuuaug

SEQ ID NO: 1054688 - RNA, 19 nt, Homo sapiens
  misc_RNA (1)...(19): siRNA sense strand
gagaagaccugccgaggau

SEQ ID NO: 1054689 - RNA, 19 nt, Homo sapiens
  misc_RNA (1)...(19): siRNA sense strand
gaaacucucugggcaauuc

SEQ ID NO: 1054690 - RNA, 19 nt, Homo sapiens
  misc_RNA (1)...(19): siRNA sense strand
ggaaggaagacuuugauuu

SEQ ID NO: 1054691 - RNA, 19 nt, Homo sapiens
  misc_RNA (1)...(19): siRNA sense strand
ggaggaugcucagagguua

SEQ ID NO: 1054692 - RNA, 19 nt, Homo sapiens
  misc_RNA (1)...(19): siRNA sense strand
gcaguucucuuaugaugga

SEQ ID NO: 1054693 - RNA, 19 nt, Homo sapiens
  misc_RNA (1)...(19): siRNA sense strand
gaagaaauggagagacuuu

SEQ ID NO: 1054694 - RNA, 19 nt, Homo sapiens
  misc_RNA (1)...(19): siRNA sense strand
agacauaaaugaucagaug

SEQ ID NO: 1054695 - RNA, 19 nt, Homo sapiens
  misc_RNA (1)...(19): siRNA sense strand
uaagaguccuaauccguua

SEQ ID NO: 1054696 - RNA, 19 nt, Homo sapiens
  misc_RNA (1)...(19): siRNA sense strand
caaggaugcugaccuguug

SEQ ID NO: 1054697 - RNA, 19 nt, Homo sapiens
  misc_RNA (1)...(19): siRNA sense strand
gacagaaucuauuauaugg

SEQ ID NO: 1054698 - RNA, 19 nt, Homo sapiens
  misc_RNA (1)...(19): siRNA sense strand
gaacggaaaagcaguauua

SEQ ID NO: 1054699 - RNA, 19 nt, Homo sapiens
  misc_RNA (1)...(19): siRNA sense strand
uaaaugaucagauggauga

SEQ ID NO: 1054700 - RNA, 19 nt, Homo sapiens
  misc_RNA (1)...(19): siRNA sense strand
gauauggaaugugcucuuu

SEQ ID NO: 1054701 - RNA, 19 nt, Homo sapiens
  misc_RNA (1)...(19): siRNA sense strand
ggagaaucuuuguaauuug

SEQ ID NO: 1054702 - RNA, 19 nt, Homo sapiens
  misc_RNA (1)...(19): siRNA sense strand
ugaaucaaaugucuacuug

SEQ ID NO: 1054703 - RNA, 19 nt, Homo sapiens
  misc_RNA (1)...(19): siRNA sense strand
ggacaaacccgagucauuc

SEQ ID NO: 1054704 - RNA, 19 nt, Homo sapiens
  misc_RNA (1)...(19): siRNA sense strand
caaguuaacuagacacaag

SEQ ID NO: 1054705 - RNA, 19 nt, Homo sapiens
  misc_RNA (1)...(19): siRNA sense strand
aaagaaggccucuaucuga

SEQ ID NO: 1054706 - RNA, 19 nt, Homo sapiens
  misc_RNA (1)...(19): siRNA sense strand
gcacagcaucugaaucaaa

SEQ ID NO: 1054707 - RNA, 19 nt, Homo sapiens
  misc_RNA (1)...(19): siRNA sense strand
caagaaugcuaauaagagu

SEQ ID NO: 1054708 - RNA, 19 nt, Homo sapiens
  misc_RNA (1)...(19): siRNA sense strand
cagagaagccucccuauuc

SEQ ID NO: 1054709 - RNA, 19 nt, Homo sapiens
  misc_RNA (1)...(19): siRNA sense strand
agacaagcaugaaacuaaa

SEQ ID NO: 1054710 - RNA, 19 nt, Homo sapiens
  misc_RNA (1)...(19): siRNA sense strand
ugacaccuguuaccaugua

SEQ ID NO: 1054711 - RNA, 19 nt, Homo sapiens
  misc_RNA (1)...(19): siRNA sense strand
cuaaguauccuaccaaaga

SEQ ID NO: 1054712 - RNA, 19 nt, Homo sapiens
  misc_RNA (1)...(19): siRNA sense strand
gacaaugacaauuaccuua

SEQ ID NO: 1054713 - RNA, 19 nt, Homo sapiens
  misc_RNA (1)...(19): siRNA sense strand
aggcagaaguuaauagaaa

SEQ ID NO: 1054714 - RNA, 19 nt, Homo sapiens
  misc_RNA (1)...(19): siRNA sense strand
gagaaucuuuguaauuugg

SEQ ID NO: 1054715 - RNA, 19 nt, Homo sapiens
  misc_RNA (1)...(19): siRNA sense strand
ugaaguugcugaauaucaa

SEQ ID NO: 1054716 - RNA, 19 nt, Homo sapiens
  misc_RNA (1)...(19): siRNA sense strand
gagcagugccagcuucuuu

SEQ ID NO: 1054717 - RNA, 19 nt, Homo sapiens
  misc_RNA (1)...(19): siRNA sense strand
cagacaagcaugaaacuaa

SEQ ID NO: 1054718 - RNA, 19 nt, Homo sapiens
  misc_RNA (1)...(19): siRNA sense strand
gcauaaagaaggccucuau

SEQ ID NO: 1054719 - RNA, 19 nt, Homo sapiens
  misc_RNA (1)...(19): siRNA sense strand
gcauaaaucgcaugacaau

SEQ ID NO: 1054720 - RNA, 19 nt, Homo sapiens
  misc_RNA (1)...(19): siRNA sense strand
aagcgaacauucucuuauu

SEQ ID NO: 1054721 - RNA, 19 nt, Homo sapiens
  misc_RNA (1)...(19): siRNA sense strand
gcgugaaguugcugaauau

SEQ ID NO: 1054722 - RNA, 19 nt, Homo sapiens
  misc_RNA (1)...(19): siRNA sense strand
acagagaucucaggaguug

SEQ ID NO: 1054723 - RNA, 19 nt, Homo sapiens
  misc_RNA (1)...(19): siRNA sense strand
caccaggaaugaugaacua

SEQ ID NO: 1054724 - RNA, 19 nt, Homo sapiens
  misc_RNA (1)...(19): siRNA sense strand
uaaagccaauggagacuau

SEQ ID NO: 1054725 - RNA, 19 nt, Homo sapiens
  misc_RNA (1)...(19): siRNA sense strand
gaaacaacugaacuuauga

SEQ ID NO: 1054726 - RNA, 19 nt, Homo sapiens
  misc_RNA (1)...(19): siRNA sense strand
ucagagaguuggauaugga

SEQ ID NO: 1054727 - RNA, 19 nt, Homo sapiens
  misc_RNA (1)...(19): siRNA sense strand
caugagcccugacacaaga

SEQ ID NO: 1054728 - RNA, 19 nt, Homo sapiens
  misc_RNA (1)...(19): siRNA sense strand
caaaaugggugggaaaauu

SEQ ID NO: 1054729 - RNA, 19 nt, Homo sapiens
  misc_RNA (1)...(19): siRNA sense strand
ggauagucauucugaacaa

SEQ ID NO: 1054730 - RNA, 19 nt, Homo sapiens
  misc_RNA (1)...(19): siRNA sense strand
caugagagccgucuagaug

SEQ ID NO: 1054731 - RNA, 19 nt, Homo sapiens
  misc_RNA (1)...(19): siRNA sense strand
agagagagcaagaucauuu

SEQ ID NO: 1054732 - RNA, 19 nt, Homo sapiens
  misc_RNA (1)...(19): siRNA sense strand
uauucuggcuccuauuuaa

SEQ ID NO: 1054733 - RNA, 19 nt, Homo sapiens
  misc_RNA (1)...(19): siRNA sense strand
cgaacauucucuuauuaug

SEQ ID NO: 1054734 - RNA, 19 nt, Homo sapiens
  misc_RNA (1)...(19): siRNA sense strand
gaacaugagagccgucuag

SEQ ID NO: 1054735 - RNA, 19 nt, Homo sapiens
  misc_RNA (1)...(19): siRNA sense strand
gaagagcagacuuugauca

SEQ ID NO: 1054736 - RNA, 19 nt, Homo sapiens
  misc_RNA (1)...(19): siRNA sense strand
gaaaaggaucuaccucaua

SEQ ID NO: 1054737 - RNA, 19 nt, Homo sapiens
  misc_RNA (1)...(19): siRNA sense strand
ggauggauguuauaguuac

SEQ ID NO: 1054738 - RNA, 19 nt, Homo sapiens
  misc_RNA (1)...(19): siRNA sense strand
gcacaggcucguccuuuga

SEQ ID NO: 1054739 - RNA, 19 nt, Homo sapiens
  misc_RNA (1)...(19): siRNA sense strand
gcucagagguuauaaucac

SEQ ID NO: 1054740 - RNA, 19 nt, Homo sapiens
  misc_RNA (1)...(19): siRNA sense strand
guggaucuguggaauuuga

SEQ ID NO: 1054741 - RNA, 19 nt, Homo sapiens
  misc_RNA (1)...(19): siRNA sense strand
gaaagacucccucccugau

SEQ ID NO: 1054742 - RNA, 19 nt, Homo sapiens
  misc_RNA (1)...(19): siRNA sense strand
ggaucuggauggauguuau

SEQ ID NO: 1054743 - RNA, 19 nt, Homo sapiens
  misc_RNA (1)...(19): siRNA sense strand
ugccagcacuucaaauauu

SEQ ID NO: 1054744 - RNA, 19 nt, Homo sapiens
  misc_RNA (1)...(19): siRNA sense strand
gaaggacacaggcagaaau

SEQ ID NO: 1054745 - RNA, 19 nt, Homo sapiens
  misc_RNA (1)...(19): siRNA sense strand
acacucacuucuuguugua

SEQ ID NO: 1054746 - RNA, 19 nt, Homo sapiens
  misc_RNA (1)...(19): siRNA sense strand
gccagcacuucaaauauug

SEQ ID NO: 1054747 - RNA, 19 nt, Homo sapiens
  misc_RNA (1)...(19): siRNA sense strand
guacagagccacagagaac

SEQ ID NO: 1054748 - RNA, 19 nt, Homo sapiens
  misc_RNA (1)...(19): siRNA sense strand
ccauugaagaagucuauua

SEQ ID NO: 1054749 - RNA, 19 nt, Homo sapiens
  misc_RNA (1)...(19): siRNA sense strand
cacagcaucugaaucaaau

SEQ ID NO: 1054750 - RNA, 19 nt, Homo sapiens
  misc_RNA (1)...(19): siRNA sense strand
gaaauacuccagccucucu

SEQ ID NO: 1054751 - RNA, 19 nt, Homo sapiens
  misc_RNA (1)...(19): siRNA sense strand
ugagagccgucuagaugaa

SEQ ID NO: 1054752 - RNA, 19 nt, Homo sapiens
  misc_RNA (1)...(19): siRNA sense strand
uccagcagcuugaacauga

SEQ ID NO: 1054753 - RNA, 19 nt, Homo sapiens
  misc_RNA (1)...(19): siRNA sense strand
ggaagaaacccggauaguc

SEQ ID NO: 1054754 - RNA, 19 nt, Homo sapiens
  misc_RNA (1)...(19): siRNA sense strand
gccgaucacuucccagguu

SEQ ID NO: 1054755 - RNA, 19 nt, Homo sapiens
  misc_RNA (1)...(19): siRNA sense strand
cuggauggauguuauaguu

SEQ ID NO: 1054756 - RNA, 19 nt, Homo sapiens
  misc_RNA (1)...(19): siRNA sense strand
gcuaauaagaguccuaauc

SEQ ID NO: 1054757 - RNA, 19 nt, Homo sapiens
  misc_RNA (1)...(19): siRNA sense strand
caacagcuccugcgugaag

SEQ ID NO: 1054758 - RNA, 19 nt, Homo sapiens
  misc_RNA (1)...(19): siRNA sense strand
ggaagacucuguggugcau

SEQ ID NO: 1054759 - RNA, 19 nt, Homo sapiens
  misc_RNA (1)...(19): siRNA sense strand
gggacaaacccgagucauu

SEQ ID NO: 1054760 - RNA, 19 nt, Homo sapiens
  misc_RNA (1)...(19): siRNA sense strand
ggaauuugaugaggcagau

SEQ ID NO: 1054761 - RNA, 19 nt, Homo sapiens
  misc_RNA (1)...(19): siRNA sense strand
gaucuggauggauguuaua

SEQ ID NO: 1054762 - RNA, 19 nt, Homo sapiens
  misc_RNA (1)...(19): siRNA sense strand
gaugaggagucuguguuug

SEQ ID NO: 1054763 - RNA, 19 nt, Homo sapiens
  misc_RNA (1)...(19): siRNA sense strand
aagcaguucucuuaugaug

SEQ ID NO: 1054764 - RNA, 19 nt, Homo sapiens
  misc_RNA (1)...(19): siRNA sense strand
gaacauucucuuauuaugc

SEQ ID NO: 1054765 - RNA, 19 nt, Homo sapiens
  misc_RNA (1)...(19): siRNA sense strand
uauaaucaccaacagauga

SEQ ID NO: 1054766 - RNA, 19 nt, Homo sapiens
  misc_RNA (1)...(19): siRNA sense strand
uaaagaaggccucuaucug

SEQ ID NO: 1054767 - RNA, 19 nt, Homo sapiens
  misc_RNA (1)...(19): siRNA sense strand
aaagcaagccaaucacauu

SEQ ID NO: 1054768 - RNA, 19 nt, Homo sapiens
  misc_RNA (1)...(19): siRNA sense strand
ccucucagcuugccuccaa

SEQ ID NO: 1054769 - RNA, 19 nt, Homo sapiens
  misc_RNA (1)...(19): siRNA sense strand
ggccaaagacucagaaucu

SEQ ID NO: 1054770 - RNA, 19 nt, Homo sapiens
  misc_RNA (1)...(19): siRNA sense strand
agcgaacauucucuuauua

SEQ ID NO: 1054771 - RNA, 19 nt, Homo sapiens
  misc_RNA (1)...(19): siRNA sense strand
gaaacaaguucuucuguaa

SEQ ID NO: 1054772 - RNA, 19 nt, Homo sapiens
  misc_RNA (1)...(19): siRNA sense strand
ggaaauaucuuuaccaacu

SEQ ID NO: 1054773 - RNA, 19 nt, Homo sapiens
  misc_RNA (1)...(19): siRNA sense strand
gcaaauagauaucgcaaac

SEQ ID NO: 1054774 - RNA, 19 nt, Homo sapiens
  misc_RNA (1)...(19): siRNA sense strand
ccaaagaagucaucaucaa

SEQ ID NO: 1054775 - RNA, 19 nt, Homo sapiens
  misc_RNA (1)...(19): siRNA sense strand
aaaggauccuggucaaaua

SEQ ID NO: 1054776 - RNA, 19 nt, Homo sapiens
  misc_RNA (1)...(19): siRNA sense strand
ggccagaccgugaaacuua

SEQ ID NO: 1054777 - RNA, 19 nt, Homo sapiens
  misc_RNA (1)...(19): siRNA sense strand
gaaauaucuuuaccaacug

SEQ ID NO: 1054778 - RNA, 19 nt, Homo sapiens
  misc_RNA (1)...(19): siRNA sense strand
gcacaugggccaccaguuc

SEQ ID NO: 1054779 - RNA, 19 nt, Homo sapiens
  misc_RNA (1)...(19): siRNA sense strand
caaagaagucaucaucaau

SEQ ID NO: 1054780 - RNA, 19 nt, Homo sapiens
  misc_RNA (1)...(19): siRNA sense strand
gccagaccgugaaacuuaa

SEQ ID NO: 1054781 - RNA, 19 nt, Homo sapiens
  misc_RNA (1)...(19): siRNA sense strand
cauugcagccuuugugaua

SEQ ID NO: 1054782 - RNA, 19 nt, Homo sapiens
  misc_RNA (1)...(19): siRNA sense strand
uaaaggauccuggucaaau

SEQ ID NO: 1054783 - RNA, 19 nt, Homo sapiens
  misc_RNA (1)...(19): siRNA sense strand
aaagaagucaucaucaaug

SEQ ID NO: 1054784 - RNA, 19 nt, Homo sapiens
  misc_RNA (1)...(19): siRNA sense strand
ccaaccagacaacaaauga

SEQ ID NO: 1054785 - RNA, 19 nt, Homo sapiens
  misc_RNA (1)...(19): siRNA sense strand
gcuccaaccagacaacaaa

SEQ ID NO: 1054786 - RNA, 19 nt, Homo sapiens
  misc_RNA (1)...(19): siRNA sense strand
cugacagucuuuauauuug

SEQ ID NO: 1054787 - RNA, 19 nt, Homo sapiens
  misc_RNA (1)...(19): siRNA sense strand
uguuucaccugcaagauuu

SEQ ID NO: 1054788 - RNA, 19 nt, Homo sapiens
  misc_RNA (1)...(19): siRNA sense strand
cuggaaaggcaaauagaua

SEQ ID NO: 1054789 - RNA, 19 nt, Homo sapiens
  misc_RNA (1)...(19): siRNA sense strand
ccggaaagaugagcacaug

SEQ ID NO: 1054790 - RNA, 19 nt, Homo sapiens
  misc_RNA (1)...(19): siRNA sense strand
gaucagcuccaaccagaca

SEQ ID NO: 1054791 - RNA, 19 nt, Homo sapiens
  misc_RNA (1)...(19): siRNA sense strand
ccgugaaacuuaaauacug

SEQ ID NO: 1054792 - RNA, 19 nt, Homo sapiens
  misc_RNA (1)...(19): siRNA sense strand
gaucuggaaaggcaaauag

SEQ ID NO: 1054793 - RNA, 19 nt, Homo sapiens
  misc_RNA (1)...(19): siRNA sense strand
ccacgucauucuucguuca

SEQ ID NO: 1054794 - RNA, 19 nt, Homo sapiens
  misc_RNA (1)...(19): siRNA sense strand
uaacugcguagaacgguuu

SEQ ID NO: 1054795 - RNA, 19 nt, Homo sapiens
  misc_RNA (1)...(19): siRNA sense strand
ggaaaggcaaauagauauc

SEQ ID NO: 1054796 - RNA, 19 nt, Homo sapiens
  misc_RNA (1)...(19): siRNA sense strand
guccguaccuggcggugaa

SEQ ID NO: 1054797 - RNA, 19 nt, Homo sapiens
  misc_RNA (1)...(19): siRNA sense strand
acggaaauaucuuuaccaa

SEQ ID NO: 1054798 - RNA, 19 nt, Homo sapiens
  misc_RNA (1)...(19): siRNA sense strand
cccuacagcuacggaaaua

SEQ ID NO: 1054799 - RNA, 19 nt, Homo sapiens
  misc_RNA (1)...(19): siRNA sense strand
gcguagaacgguuugauca

SEQ ID NO: 1054800 - RNA, 19 nt, Homo sapiens
  misc_RNA (1)...(19): siRNA sense strand
caugaaagacugcgaguac

SEQ ID NO: 1054801 - RNA, 19 nt, Homo sapiens
  misc_RNA (1)...(19): siRNA sense strand
cagcuacggaaauaucuuu

SEQ ID NO: 1054802 - RNA, 19 nt, Homo sapiens
  misc_RNA (1)...(19): siRNA sense strand
ggaaaagaaacuacagauu

SEQ ID NO: 1054803 - RNA, 19 nt, Homo sapiens
  misc_RNA (1)...(19): siRNA sense strand
cgugaaacuuaaauacugu

SEQ ID NO: 1054804 - RNA, 19 nt, Homo sapiens
  misc_RNA (1)...(19): siRNA sense strand
guucacagcaaacaggauu

SEQ ID NO: 1054805 - RNA, 19 nt, Homo sapiens
  misc_RNA (1)...(19): siRNA sense strand
ucucaggauuccacaccua

SEQ ID NO: 1054806 - RNA, 19 nt, Homo sapiens
  misc_RNA (1)...(19): siRNA sense strand
cagcagcacccuccaaugg

SEQ ID NO: 1054807 - RNA, 19 nt, Homo sapiens
  misc_RNA (1)...(19): siRNA sense strand
ggcauccuguucuucuuug

SEQ ID NO: 1054808 - RNA, 19 nt, Homo sapiens
  misc_RNA (1)...(19): siRNA sense strand
guccaucguuggccucuca

SEQ ID NO: 1054809 - RNA, 19 nt, Homo sapiens
  misc_RNA (1)...(19): siRNA sense strand
uggaaaggcaaauagauau

SEQ ID NO: 1054810 - RNA, 19 nt, Homo sapiens
  misc_RNA (1)...(19): siRNA sense strand
aagaagucaucaucaaugg

SEQ ID NO: 1054811 - RNA, 19 nt, Homo sapiens
  misc_RNA (1)...(19): siRNA sense strand
gaaaggcaaauagauaucg

SEQ ID NO: 1054812 - RNA, 19 nt, Homo sapiens
  misc_RNA (1)...(19): siRNA sense strand
gcaaacggcaccaguucag

SEQ ID NO: 1054813 - RNA, 19 nt, Homo sapiens
  misc_RNA (1)...(19): siRNA sense strand
gaaccaaagaagucaucau

SEQ ID NO: 1054814 - RNA, 19 nt, Homo sapiens
  misc_RNA (1)...(19): siRNA sense strand
cuacagcuacggaaauauc

SEQ ID NO: 1054815 - RNA, 19 nt, Homo sapiens
  misc_RNA (1)...(19): siRNA sense strand
ugacagucuuuauauuugc

SEQ ID NO: 1054816 - RNA, 19 nt, Homo sapiens
  misc_RNA (1)...(19): siRNA sense strand
gaggaaaugggagguguuc

SEQ ID NO: 1054817 - RNA, 19 nt, Homo sapiens
  misc_RNA (1)...(19): siRNA sense strand
ggauuccacaccuacuuga

SEQ ID NO: 1054818 - RNA, 19 nt, Homo sapiens
  misc_RNA (1)...(19): siRNA sense strand
ggaggaaaugggagguguu

SEQ ID NO: 1054819 - RNA, 19 nt, Homo sapiens
  misc_RNA (1)...(19): siRNA sense strand
gacagucuuuauauuugca

SEQ ID NO: 1054820 - RNA, 19 nt, Homo sapiens
  misc_RNA (1)...(19): siRNA sense strand
cguuaucacccacgucauu

SEQ ID NO: 1054821 - RNA, 19 nt, Homo sapiens
  misc_RNA (1)...(19): siRNA sense strand
gaccgugaaacuuaaauac

SEQ ID NO: 1054822 - RNA, 19 nt, Homo sapiens
  misc_RNA (1)...(19): siRNA sense strand
agaccgugaaacuuaaaua

SEQ ID NO: 1054823 - RNA, 19 nt, Homo sapiens
  misc_RNA (1)...(19): siRNA sense strand
auuaaaggauccuggucaa

SEQ ID NO: 1054824 - RNA, 19 nt, Homo sapiens
  misc_RNA (1)...(19): siRNA sense strand
ugugauaacugcguagaac

SEQ ID NO: 1054825 - RNA, 19 nt, Homo sapiens
  misc_RNA (1)...(19): siRNA sense strand
ucaauggccagaccgugaa

SEQ ID NO: 1054826 - RNA, 19 nt, Homo sapiens
  misc_RNA (1)...(19): siRNA sense strand
aaggauccuggucaaauaa

SEQ ID NO: 1054827 - RNA, 19 nt, Homo sapiens
  misc_RNA (1)...(19): siRNA sense strand
gcuguggugugcuucuucu

SEQ ID NO: 1054828 - RNA, 19 nt, Homo sapiens
  misc_RNA (1)...(19): siRNA sense strand
cuucuucgccuucgacugu

SEQ ID NO: 1054829 - RNA, 19 nt, Homo sapiens
  misc_RNA (1)...(19): siRNA sense strand
cgacagaagaggguacauc

SEQ ID NO: 1054830 - RNA, 19 nt, Homo sapiens
  misc_RNA (1)...(19): siRNA sense strand
aaccaaagaagucaucauc

SEQ ID NO: 1054831 - RNA, 19 nt, Homo sapiens
  misc_RNA (1)...(19): siRNA sense strand
uuccacaccuacuugauca

SEQ ID NO: 1054832 - RNA, 19 nt, Homo sapiens
  misc_RNA (1)...(19): siRNA sense strand
guaacgggaggaucaugau

SEQ ID NO: 1054833 - RNA, 19 nt, Homo sapiens
  misc_RNA (1)...(19): siRNA sense strand
ucguuggccucucaggauu

SEQ ID NO: 1054834 - RNA, 19 nt, Homo sapiens
  misc_RNA (1)...(19): siRNA sense strand
auucuucguucacagcaaa

SEQ ID NO: 1054835 - RNA, 19 nt, Homo sapiens
  misc_RNA (1)...(19): siRNA sense strand
uaacgggaggaucaugaug

SEQ ID NO: 1054836 - RNA, 19 nt, Homo sapiens
  misc_RNA (1)...(19): siRNA sense strand
caagccugaucgacagaag

SEQ ID NO: 1054837 - RNA, 19 nt, Homo sapiens
  misc_RNA (1)...(19): siRNA sense strand
ucgcuggcauccuguucuu

SEQ ID NO: 1054838 - RNA, 19 nt, Homo sapiens
  misc_RNA (1)...(19): siRNA sense strand
gcauccuguucuucuuugu

SEQ ID NO: 1054839 - RNA, 19 nt, Homo sapiens
  misc_RNA (1)...(19): siRNA sense strand
gaaacaaguucuucuguaa

SEQ ID NO: 1054840 - RNA, 19 nt, Homo sapiens
  misc_RNA (1)...(19): siRNA sense strand
ggaaauaucuuuaccaacu

SEQ ID NO: 1054841 - RNA, 19 nt, Homo sapiens
  misc_RNA (1)...(19): siRNA sense strand
gcaaauagauaucgcaaac

SEQ ID NO: 1054842 - RNA, 19 nt, Homo sapiens
  misc_RNA (1)...(19): siRNA sense strand
ccaaagaagucaucaucaa

SEQ ID NO: 1054843 - RNA, 19 nt, Homo sapiens
  misc_RNA (1)...(19): siRNA sense strand
aaaggauccuggucaaaua

SEQ ID NO: 1054844 - RNA, 19 nt, Homo sapiens
  misc_RNA (1)...(19): siRNA sense strand
ggccagaccgugaaacuua

SEQ ID NO: 1054845 - RNA, 19 nt, Homo sapiens
  misc_RNA (1)...(19): siRNA sense strand
gaaauaucuuuaccaacug

SEQ ID NO: 1054846 - RNA, 19 nt, Homo sapiens
  misc_RNA (1)...(19): siRNA sense strand
gcacaugggccaccaguuc

SEQ ID NO: 1054847 - RNA, 19 nt, Homo sapiens
  misc_RNA (1)...(19): siRNA sense strand
caaagaagucaucaucaau

SEQ ID NO: 1054848 - RNA, 19 nt, Homo sapiens
  misc_RNA (1)...(19): siRNA sense strand
gccagaccgugaaacuuaa

SEQ ID NO: 1054849 - RNA, 19 nt, Homo sapiens
  misc_RNA (1)...(19): siRNA sense strand
cauugcagccuuugugaua

SEQ ID NO: 1054850 - RNA, 19 nt, Homo sapiens
  misc_RNA (1)...(19): siRNA sense strand
uaaaggauccuggucaaau

SEQ ID NO: 1054851 - RNA, 19 nt, Homo sapiens
  misc_RNA (1)...(19): siRNA sense strand
aaagaagucaucaucaaug

SEQ ID NO: 1054852 - RNA, 19 nt, Homo sapiens
  misc_RNA (1)...(19): siRNA sense strand
ccaaccagacaacaaauga

SEQ ID NO: 1054853 - RNA, 19 nt, Homo sapiens
  misc_RNA (1)...(19): siRNA sense strand
gcuccaaccagacaacaaa

SEQ ID NO: 1054854 - RNA, 19 nt, Homo sapiens
  misc_RNA (1)...(19): siRNA sense strand
cugacagucuuuauauuug

SEQ ID NO: 1054855 - RNA, 19 nt, Homo sapiens
  misc_RNA (1)...(19): siRNA sense strand
uguuucaccugcaagauuu

SEQ ID NO: 1054856 - RNA, 19 nt, Homo sapiens
  misc_RNA (1)...(19): siRNA sense strand
cuggaaaggcaaauagaua

SEQ ID NO: 1054857 - RNA, 19 nt, Homo sapiens
  misc_RNA (1)...(19): siRNA sense strand
ccggaaagaugagcacaug

SEQ ID NO: 1054858 - RNA, 19 nt, Homo sapiens
  misc_RNA (1)...(19): siRNA sense strand
gaucagcuccaaccagaca

SEQ ID NO: 1054859 - RNA, 19 nt, Homo sapiens
  misc_RNA (1)...(19): siRNA sense strand
ccgugaaacuuaaauacug

SEQ ID NO: 1054860 - RNA, 19 nt, Homo sapiens
  misc_RNA (1)...(19): siRNA sense strand
gaucuggaaaggcaaauag

SEQ ID NO: 1054861 - RNA, 19 nt, Homo sapiens
  misc_RNA (1)...(19): siRNA sense strand
ccacgucauucuucguuca

SEQ ID NO: 1054862 - RNA, 19 nt, Homo sapiens
  misc_RNA (1)...(19): siRNA sense strand
uaacugcguagaacgguuu

SEQ ID NO: 1054863 - RNA, 19 nt, Homo sapiens
  misc_RNA (1)...(19): siRNA sense strand
ggaaaggcaaauagauauc

SEQ ID NO: 1054864 - RNA, 19 nt, Homo sapiens
  misc_RNA (1)...(19): siRNA sense strand
guccguaccuggcggugaa

SEQ ID NO: 1054865 - RNA, 19 nt, Homo sapiens
  misc_RNA (1)...(19): siRNA sense strand
acggaaauaucuuuaccaa

SEQ ID NO: 1054866 - RNA, 19 nt, Homo sapiens
  misc_RNA (1)...(19): siRNA sense strand
cccuacagcuacggaaaua

SEQ ID NO: 1054867 - RNA, 19 nt, Homo sapiens
  misc_RNA (1)...(19): siRNA sense strand
gcguagaacgguuugauca

SEQ ID NO: 1054868 - RNA, 19 nt, Homo sapiens
  misc_RNA (1)...(19): siRNA sense strand
caugaaagacugcgaguac

SEQ ID NO: 1054869 - RNA, 19 nt, Homo sapiens
  misc_RNA (1)...(19): siRNA sense strand
cagcuacggaaauaucuuu

SEQ ID NO: 1054870 - RNA, 19 nt, Homo sapiens
  misc_RNA (1)...(19): siRNA sense strand
ggaaaagaaacuacagauu

SEQ ID NO: 1054871 - RNA, 19 nt, Homo sapiens
  misc_RNA (1)...(19): siRNA sense strand
cgugaaacuuaaauacugu

SEQ ID NO: 1054872 - RNA, 19 nt, Homo sapiens
  misc_RNA (1)...(19): siRNA sense strand
guucacagcaaacaggauu

SEQ ID NO: 1054873 - RNA, 19 nt, Homo sapiens
  misc_RNA (1)...(19): siRNA sense strand
ucucaggauuccacaccua

SEQ ID NO: 1054874 - RNA, 19 nt, Homo sapiens
  misc_RNA (1)...(19): siRNA sense strand
cagcagcacccuccaaugg

SEQ ID NO: 1054875 - RNA, 19 nt, Homo sapiens
  misc_RNA (1)...(19): siRNA sense strand
ggcauccuguucuucuuug

SEQ ID NO: 1054876 - RNA, 19 nt, Homo sapiens
  misc_RNA (1)...(19): siRNA sense strand
guccaucguuggccucuca

SEQ ID NO: 1054877 - RNA, 19 nt, Homo sapiens
  misc_RNA (1)...(19): siRNA sense strand
uggaaaggcaaauagauau

SEQ ID NO: 1054878 - RNA, 19 nt, Homo sapiens
  misc_RNA (1)...(19): siRNA sense strand
aagaagucaucaucaaugg

SEQ ID NO: 1054879 - RNA, 19 nt, Homo sapiens
  misc_RNA (1)...(19): siRNA sense strand
gaaaggcaaauagauaucg

SEQ ID NO: 1054880 - RNA, 19 nt, Homo sapiens
  misc_RNA (1)...(19): siRNA sense strand
gcaaacggcaccaguucag

SEQ ID NO: 1054881 - RNA, 19 nt, Homo sapiens
  misc_RNA (1)...(19): siRNA sense strand
gaaccaaagaagucaucau

SEQ ID NO: 1054882 - RNA, 19 nt, Homo sapiens
  misc_RNA (1)...(19): siRNA sense strand
cuacagcuacggaaauauc

SEQ ID NO: 1054883 - RNA, 19 nt, Homo sapiens
  misc_RNA (1)...(19): siRNA sense strand
ugacagucuuuauauuugc

SEQ ID NO: 1054884 - RNA, 19 nt, Homo sapiens
  misc_RNA (1)...(19): siRNA sense strand
gaggaaaugggagguguuc

SEQ ID NO: 1054885 - RNA, 19 nt, Homo sapiens
  misc_RNA (1)...(19): siRNA sense strand
ggauuccacaccuacuuga

SEQ ID NO: 1054886 - RNA, 19 nt, Homo sapiens
  misc_RNA (1)...(19): siRNA sense strand
ggaggaaaugggagguguu

SEQ ID NO: 1054887 - RNA, 19 nt, Homo sapiens
  misc_RNA (1)...(19): siRNA sense strand
gacagucuuuauauuugca

SEQ ID NO: 1054888 - RNA, 19 nt, Homo sapiens
  misc_RNA (1)...(19): siRNA sense strand
cguuaucacccacgucauu

SEQ ID NO: 1054889 - RNA, 19 nt, Homo sapiens
  misc_RNA (1)...(19): siRNA sense strand
gaccgugaaacuuaaauac

SEQ ID NO: 1054890 - RNA, 19 nt, Homo sapiens
  misc_RNA (1)...(19): siRNA sense strand
agaccgugaaacuuaaaua

SEQ ID NO: 1054891 - RNA, 19 nt, Homo sapiens
  misc_RNA (1)...(19): siRNA sense strand
auuaaaggauccuggucaa

SEQ ID NO: 1054892 - RNA, 19 nt, Homo sapiens
  misc_RNA (1)...(19): siRNA sense strand
ugugauaacugcguagaac

SEQ ID NO: 1054893 - RNA, 19 nt, Homo sapiens
  misc_RNA (1)...(19): siRNA sense strand
ucaauggccagaccgugaa

SEQ ID NO: 1054894 - RNA, 19 nt, Homo sapiens
  misc_RNA (1)...(19): siRNA sense strand
aaggauccuggucaaauaa

SEQ ID NO: 1054895 - RNA, 19 nt, Homo sapiens
  misc_RNA (1)...(19): siRNA sense strand
gcuguggugugcuucuucu

SEQ ID NO: 1054896 - RNA, 19 nt, Homo sapiens
  misc_RNA (1)...(19): siRNA sense strand
cuucuucgccuucgacugu

SEQ ID NO: 1054897 - RNA, 19 nt, Homo sapiens
  misc_RNA (1)...(19): siRNA sense strand
cgacagaagaggguacauc

SEQ ID NO: 1054898 - RNA, 19 nt, Homo sapiens
  misc_RNA (1)...(19): siRNA sense strand
aaccaaagaagucaucauc

SEQ ID NO: 1054899 - RNA, 19 nt, Homo sapiens
  misc_RNA (1)...(19): siRNA sense strand
uuccacaccuacuugauca

SEQ ID NO: 1054900 - RNA, 19 nt, Homo sapiens
  misc_RNA (1)...(19): siRNA sense strand
guaacgggaggaucaugau

SEQ ID NO: 1054901 - RNA, 19 nt, Homo sapiens
  misc_RNA (1)...(19): siRNA sense strand
ucguuggccucucaggauu

SEQ ID NO: 1054902 - RNA, 19 nt, Homo sapiens
  misc_RNA (1)...(19): siRNA sense strand
auucuucguucacagcaaa

SEQ ID NO: 1054903 - RNA, 19 nt, Homo sapiens
  misc_RNA (1)...(19): siRNA sense strand
uaacgggaggaucaugaug

SEQ ID NO: 1054904 - RNA, 19 nt, Homo sapiens
  misc_RNA (1)...(19): siRNA sense strand
caagccugaucgacagaag

SEQ ID NO: 1054905 - RNA, 19 nt, Homo sapiens
  misc_RNA (1)...(19): siRNA sense strand
ucgcuggcauccuguucuu

SEQ ID NO: 1054906 - RNA, 19 nt, Homo sapiens
  misc_RNA (1)...(19): siRNA sense strand
gcauccuguucuucuuugu

SEQ ID NO: 1054907 - RNA, 19 nt, Homo sapiens
  misc_RNA (1)...(19): siRNA sense strand
gaaacaaguucuucuguaa

SEQ ID NO: 1054908 - RNA, 19 nt, Homo sapiens
  misc_RNA (1)...(19): siRNA sense strand
ggaaauaucuuuaccaacu

SEQ ID NO: 1054909 - RNA, 19 nt, Homo sapiens
  misc_RNA (1)...(19): siRNA sense strand
gcaaauagauaucgcaaac

SEQ ID NO: 1054910 - RNA, 19 nt, Homo sapiens
  misc_RNA (1)...(19): siRNA sense strand
ccaaagaagucaucaucaa

SEQ ID NO: 1054911 - RNA, 19 nt, Homo sapiens
  misc_RNA (1)...(19): siRNA sense strand
aaaggauccuggucaaaua

SEQ ID NO: 1054912 - RNA, 19 nt, Homo sapiens
  misc_RNA (1)...(19): siRNA sense strand
ggccagaccgugaaacuua

SEQ ID NO: 1054913 - RNA, 19 nt, Homo sapiens
  misc_RNA (1)...(19): siRNA sense strand
gaaauaucuuuaccaacug

SEQ ID NO: 1054914 - RNA, 19 nt, Homo sapiens
  misc_RNA (1)...(19): siRNA sense strand
gcacaugggccaccaguuc

SEQ ID NO: 1054915 - RNA, 19 nt, Homo sapiens
  misc_RNA (1)...(19): siRNA sense strand
caaagaagucaucaucaau

SEQ ID NO: 1054916 - RNA, 19 nt, Homo sapiens
  misc_RNA (1)...(19): siRNA sense strand
gccagaccgugaaacuuaa

SEQ ID NO: 1054917 - RNA, 19 nt, Homo sapiens
  misc_RNA (1)...(19): siRNA sense strand
cauugcagccuuugugaua

SEQ ID NO: 1054918 - RNA, 19 nt, Homo sapiens
  misc_RNA (1)...(19): siRNA sense strand
uaaaggauccuggucaaau

SEQ ID NO: 1054919 - RNA, 19 nt, Homo sapiens
  misc_RNA (1)...(19): siRNA sense strand
aaagaagucaucaucaaug

SEQ ID NO: 1054920 - RNA, 19 nt, Homo sapiens
  misc_RNA (1)...(19): siRNA sense strand
ccaaccagacaacaaauga

SEQ ID NO: 1054921 - RNA, 19 nt, Homo sapiens
  misc_RNA (1)...(19): siRNA sense strand
gcuccaaccagacaacaaa

SEQ ID NO: 1054922 - RNA, 19 nt, Homo sapiens
  misc_RNA (1)...(19): siRNA sense strand
cugacagucuuuauauuug

SEQ ID NO: 1054923 - RNA, 19 nt, Homo sapiens
  misc_RNA (1)...(19): siRNA sense strand
uguuucaccugcaagauuu

SEQ ID NO: 1054924 - RNA, 19 nt, Homo sapiens
  misc_RNA (1)...(19): siRNA sense strand
cuggaaaggcaaauagaua

SEQ ID NO: 1054925 - RNA, 19 nt, Homo sapiens
  misc_RNA (1)...(19): siRNA sense strand
ccggaaagaugagcacaug

SEQ ID NO: 1054926 - RNA, 19 nt, Homo sapiens
  misc_RNA (1)...(19): siRNA sense strand
gaucagcuccaaccagaca

SEQ ID NO: 1054927 - RNA, 19 nt, Homo sapiens
  misc_RNA (1)...(19): siRNA sense strand
ccgugaaacuuaaauacug

SEQ ID NO: 1054928 - RNA, 19 nt, Homo sapiens
  misc_RNA (1)...(19): siRNA sense strand
gaucuggaaaggcaaauag

SEQ ID NO: 1054929 - RNA, 19 nt, Homo sapiens
  misc_RNA (1)...(19): siRNA sense strand
ccacgucauucuucguuca

SEQ ID NO: 1054930 - RNA, 19 nt, Homo sapiens
  misc_RNA (1)...(19): siRNA sense strand
uaacugcguagaacgguuu

SEQ ID NO: 1054931 - RNA, 19 nt, Homo sapiens
  misc_RNA (1)...(19): siRNA sense strand
ggaaaggcaaauagauauc

SEQ ID NO: 1054932 - RNA, 19 nt, Homo sapiens
  misc_RNA (1)...(19): siRNA sense strand
guccguaccuggcggugaa

SEQ ID NO: 1054933 - RNA, 19 nt, Homo sapiens
  misc_RNA (1)...(19): siRNA sense strand
acggaaauaucuuuaccaa

SEQ ID NO: 1054934 - RNA, 19 nt, Homo sapiens
  misc_RNA (1)...(19): siRNA sense strand
cccuacagcuacggaaaua

SEQ ID NO: 1054935 - RNA, 19 nt, Homo sapiens
  misc_RNA (1)...(19): siRNA sense strand
gcguagaacgguuugauca

SEQ ID NO: 1054936 - RNA, 19 nt, Homo sapiens
  misc_RNA (1)...(19): siRNA sense strand
caugaaagacugcgaguac

SEQ ID NO: 1054937 - RNA, 19 nt, Homo sapiens
  misc_RNA (1)...(19): siRNA sense strand
cagcuacggaaauaucuuu

SEQ ID NO: 1054938 - RNA, 19 nt, Homo sapiens
  misc_RNA (1)...(19): siRNA sense strand
ggaaaagaaacuacagauu

SEQ ID NO: 1054939 - RNA, 19 nt, Homo sapiens
  misc_RNA (1)...(19): siRNA sense strand
cgugaaacuuaaauacugu

SEQ ID NO: 1054940 - RNA, 19 nt, Homo sapiens
  misc_RNA (1)...(19): siRNA sense strand
guucacagcaaacaggauu

SEQ ID NO: 1054941 - RNA, 19 nt, Homo sapiens
  misc_RNA (1)...(19): siRNA sense strand
ucucaggauuccacaccua

SEQ ID NO: 1054942 - RNA, 19 nt, Homo sapiens
  misc_RNA (1)...(19): siRNA sense strand
cagcagcacccuccaaugg

SEQ ID NO: 1054943 - RNA, 19 nt, Homo sapiens
  misc_RNA (1)...(19): siRNA sense strand
ggcauccuguucuucuuug

SEQ ID NO: 1054944 - RNA, 19 nt, Homo sapiens
  misc_RNA (1)...(19): siRNA sense strand
guccaucguuggccucuca

SEQ ID NO: 1054945 - RNA, 19 nt, Homo sapiens
  misc_RNA (1)...(19): siRNA sense strand
uggaaaggcaaauagauau

SEQ ID NO: 1054946 - RNA, 19 nt, Homo sapiens
  misc_RNA (1)...(19): siRNA sense strand
aagaagucaucaucaaugg

SEQ ID NO: 1054947 - RNA, 19 nt, Homo sapiens
  misc_RNA (1)...(19): siRNA sense strand
gaaaggcaaauagauaucg

SEQ ID NO: 1054948 - RNA, 19 nt, Homo sapiens
  misc_RNA (1)...(19): siRNA sense strand
gcaaacggcaccaguucag

SEQ ID NO: 1054949 - RNA, 19 nt, Homo sapiens
  misc_RNA (1)...(19): siRNA sense strand
gaaccaaagaagucaucau

SEQ ID NO: 1054950 - RNA, 19 nt, Homo sapiens
  misc_RNA (1)...(19): siRNA sense strand
cuacagcuacggaaauauc

SEQ ID NO: 1054951 - RNA, 19 nt, Homo sapiens
  misc_RNA (1)...(19): siRNA sense strand
ugacagucuuuauauuugc

SEQ ID NO: 1054952 - RNA, 19 nt, Homo sapiens
  misc_RNA (1)...(19): siRNA sense strand
gaggaaaugggagguguuc

SEQ ID NO: 1054953 - RNA, 19 nt, Homo sapiens
  misc_RNA (1)...(19): siRNA sense strand
ggauuccacaccuacuuga

SEQ ID NO: 1054954 - RNA, 19 nt, Homo sapiens
  misc_RNA (1)...(19): siRNA sense strand
ggaggaaaugggagguguu

SEQ ID NO: 1054955 - RNA, 19 nt, Homo sapiens
  misc_RNA (1)...(19): siRNA sense strand
gacagucuuuauauuugca

SEQ ID NO: 1054956 - RNA, 19 nt, Homo sapiens
  misc_RNA (1)...(19): siRNA sense strand
cguuaucacccacgucauu

SEQ ID NO: 1054957 - RNA, 19 nt, Homo sapiens
  misc_RNA (1)...(19): siRNA sense strand
gaccgugaaacuuaaauac

SEQ ID NO: 1054958 - RNA, 19 nt, Homo sapiens
  misc_RNA (1)...(19): siRNA sense strand
agaccgugaaacuuaaaua

SEQ ID NO: 1054959 - RNA, 19 nt, Homo sapiens
  misc_RNA (1)...(19): siRNA sense strand
auuaaaggauccuggucaa

SEQ ID NO: 1054960 - RNA, 19 nt, Homo sapiens
  misc_RNA (1)...(19): siRNA sense strand
ugugauaacugcguagaac

SEQ ID NO: 1054961 - RNA, 19 nt, Homo sapiens
  misc_RNA (1)...(19): siRNA sense strand
ucaauggccagaccgugaa

SEQ ID NO: 1054962 - RNA, 19 nt, Homo sapiens
  misc_RNA (1)...(19): siRNA sense strand
aaggauccuggucaaauaa

SEQ ID NO: 1054963 - RNA, 19 nt, Homo sapiens
  misc_RNA (1)...(19): siRNA sense strand
gcuguggugugcuucuucu

SEQ ID NO: 1054964 - RNA, 19 nt, Homo sapiens
  misc_RNA (1)...(19): siRNA sense strand
cuucuucgccuucgacugu

SEQ ID NO: 1054965 - RNA, 19 nt, Homo sapiens
  misc_RNA (1)...(19): siRNA sense strand
cgacagaagaggguacauc

SEQ ID NO: 1054966 - RNA, 19 nt, Homo sapiens
  misc_RNA (1)...(19): siRNA sense strand
aaccaaagaagucaucauc

SEQ ID NO: 1054967 - RNA, 19 nt, Homo sapiens
  misc_RNA (1)...(19): siRNA sense strand
uuccacaccuacuugauca

SEQ ID NO: 1054968 - RNA, 19 nt, Homo sapiens
  misc_RNA (1)...(19): siRNA sense strand
guaacgggaggaucaugau

SEQ ID NO: 1054969 - RNA, 19 nt, Homo sapiens
  misc_RNA (1)...(19): siRNA sense strand
ucguuggccucucaggauu

SEQ ID NO: 1054970 - RNA, 19 nt, Homo sapiens
  misc_RNA (1)...(19): siRNA sense strand
auucuucguucacagcaaa

SEQ ID NO: 1054971 - RNA, 19 nt, Homo sapiens
  misc_RNA (1)...(19): siRNA sense strand
uaacgggaggaucaugaug

SEQ ID NO: 1054972 - RNA, 19 nt, Homo sapiens
  misc_RNA (1)...(19): siRNA sense strand
caagccugaucgacagaag

SEQ ID NO: 1054973 - RNA, 19 nt, Homo sapiens
  misc_RNA (1)...(19): siRNA sense strand
ucgcuggcauccuguucuu

SEQ ID NO: 1054974 - RNA, 19 nt, Homo sapiens
  misc_RNA (1)...(19): siRNA sense strand
gcauccuguucuucuuugu

SEQ ID NO: 1054975 - RNA, 19 nt, Homo sapiens
  misc_RNA (1)...(19): siRNA sense strand
gaaacaaguucuucuguaa

SEQ ID NO: 1054976 - RNA, 19 nt, Homo sapiens
  misc_RNA (1)...(19): siRNA sense strand
ggaaauaucuuuaccaacu

SEQ ID NO: 1054977 - RNA, 19 nt, Homo sapiens
  misc_RNA (1)...(19): siRNA sense strand
gcaaauagauaucgcaaac

SEQ ID NO: 1054978 - RNA, 19 nt, Homo sapiens
  misc_RNA (1)...(19): siRNA sense strand
ccaaagaagucaucaucaa

SEQ ID NO: 1054979 - RNA, 19 nt, Homo sapiens
  misc_RNA (1)...(19): siRNA sense strand
aaaggauccuggucaaaua

SEQ ID NO: 1054980 - RNA, 19 nt, Homo sapiens
  misc_RNA (1)...(19): siRNA sense strand
ggccagaccgugaaacuua

SEQ ID NO: 1054981 - RNA, 19 nt, Homo sapiens
  misc_RNA (1)...(19): siRNA sense strand
gaaauaucuuuaccaacug

SEQ ID NO: 1054982 - RNA, 19 nt, Homo sapiens
  misc_RNA (1)...(19): siRNA sense strand
gcacaugggccaccaguuc

SEQ ID NO: 1054983 - RNA, 19 nt, Homo sapiens
  misc_RNA (1)...(19): siRNA sense strand
caaagaagucaucaucaau

SEQ ID NO: 1054984 - RNA, 19 nt, Homo sapiens
  misc_RNA (1)...(19): siRNA sense strand
gccagaccgugaaacuuaa

SEQ ID NO: 1054985 - RNA, 19 nt, Homo sapiens
  misc_RNA (1)...(19): siRNA sense strand
cauugcagccuuugugaua

SEQ ID NO: 1054986 - RNA, 19 nt, Homo sapiens
  misc_RNA (1)...(19): siRNA sense strand
uaaaggauccuggucaaau

SEQ ID NO: 1054987 - RNA, 19 nt, Homo sapiens
  misc_RNA (1)...(19): siRNA sense strand
aaagaagucaucaucaaug

SEQ ID NO: 1054988 - RNA, 19 nt, Homo sapiens
  misc_RNA (1)...(19): siRNA sense strand
ccaaccagacaacaaauga

SEQ ID NO: 1054989 - RNA, 19 nt, Homo sapiens
  misc_RNA (1)...(19): siRNA sense strand
gcuccaaccagacaacaaa

SEQ ID NO: 1054990 - RNA, 19 nt, Homo sapiens
  misc_RNA (1)...(19): siRNA sense strand
cugacagucuuuauauuug

SEQ ID NO: 1054991 - RNA, 19 nt, Homo sapiens
  misc_RNA (1)...(19): siRNA sense strand
uguuucaccugcaagauuu

SEQ ID NO: 1054992 - RNA, 19 nt, Homo sapiens
  misc_RNA (1)...(19): siRNA sense strand
cuggaaaggcaaauagaua

SEQ ID NO: 1054993 - RNA, 19 nt, Homo sapiens
  misc_RNA (1)...(19): siRNA sense strand
ccggaaagaugagcacaug

SEQ ID NO: 1054994 - RNA, 19 nt, Homo sapiens
  misc_RNA (1)...(19): siRNA sense strand
gaucagcuccaaccagaca

SEQ ID NO: 1054995 - RNA, 19 nt, Homo sapiens
  misc_RNA (1)...(19): siRNA sense strand
ccgugaaacuuaaauacug

SEQ ID NO: 1054996 - RNA, 19 nt, Homo sapiens
  misc_RNA (1)...(19): siRNA sense strand
gaucuggaaaggcaaauag

SEQ ID NO: 1054997 - RNA, 19 nt, Homo sapiens
  misc_RNA (1)...(19): siRNA sense strand
ccacgucauucuucguuca

SEQ ID NO: 1054998 - RNA, 19 nt, Homo sapiens
  misc_RNA (1)...(19): siRNA sense strand
uaacugcguagaacgguuu

SEQ ID NO: 1054999 - RNA, 19 nt, Homo sapiens
  misc_RNA (1)...(19): siRNA sense strand
ggaaaggcaaauagauauc

SEQ ID NO: 1055000 - RNA, 19 nt, Homo sapiens
  misc_RNA (1)...(19): siRNA sense strand
guccguaccuggcggugaa

SEQ ID NO: 1055001 - RNA, 19 nt, Homo sapiens
  misc_RNA (1)...(19): siRNA sense strand
acggaaauaucuuuaccaa

SEQ ID NO: 1055002 - RNA, 19 nt, Homo sapiens
  misc_RNA (1)...(19): siRNA sense strand
cccuacagcuacggaaaua

SEQ ID NO: 1055003 - RNA, 19 nt, Homo sapiens
  misc_RNA (1)...(19): siRNA sense strand
gcguagaacgguuugauca

SEQ ID NO: 1055004 - RNA, 19 nt, Homo sapiens
  misc_RNA (1)...(19): siRNA sense strand
caugaaagacugcgaguac

SEQ ID NO: 1055005 - RNA, 19 nt, Homo sapiens
  misc_RNA (1)...(19): siRNA sense strand
cagcuacggaaauaucuuu

SEQ ID NO: 1055006 - RNA, 19 nt, Homo sapiens
  misc_RNA (1)...(19): siRNA sense strand
ggaaaagaaacuacagauu

SEQ ID NO: 1055007 - RNA, 19 nt, Homo sapiens
  misc_RNA (1)...(19): siRNA sense strand
cgugaaacuuaaauacugu

SEQ ID NO: 1055008 - RNA, 19 nt, Homo sapiens
  misc_RNA (1)...(19): siRNA sense strand
guucacagcaaacaggauu

SEQ ID NO: 1055009 - RNA, 19 nt, Homo sapiens
  misc_RNA (1)...(19): siRNA sense strand
ucucaggauuccacaccua

SEQ ID NO: 1055010 - RNA, 19 nt, Homo sapiens
  misc_RNA (1)...(19): siRNA sense strand
cagcagcacccuccaaugg

SEQ ID NO: 1055011 - RNA, 19 nt, Homo sapiens
  misc_RNA (1)...(19): siRNA sense strand
ggcauccuguucuucuuug

SEQ ID NO: 1055012 - RNA, 19 nt, Homo sapiens
  misc_RNA (1)...(19): siRNA sense strand
guccaucguuggccucuca

SEQ ID NO: 1055013 - RNA, 19 nt, Homo sapiens
  misc_RNA (1)...(19): siRNA sense strand
uggaaaggcaaauagauau

SEQ ID NO: 1055014 - RNA, 19 nt, Homo sapiens
  misc_RNA (1)...(19): siRNA sense strand
aagaagucaucaucaaugg

SEQ ID NO: 1055015 - RNA, 19 nt, Homo sapiens
  misc_RNA (1)...(19): siRNA sense strand
gaaaggcaaauagauaucg

SEQ ID NO: 1055016 - RNA, 19 nt, Homo sapiens
  misc_RNA (1)...(19): siRNA sense strand
gcaaacggcaccaguucag

SEQ ID NO: 1055017 - RNA, 19 nt, Homo sapiens
  misc_RNA (1)...(19): siRNA sense strand
gaaccaaagaagucaucau

SEQ ID NO: 1055018 - RNA, 19 nt, Homo sapiens
  misc_RNA (1)...(19): siRNA sense strand
cuacagcuacggaaauauc

SEQ ID NO: 1055019 - RNA, 19 nt, Homo sapiens
  misc_RNA (1)...(19): siRNA sense strand
ugacagucuuuauauuugc

SEQ ID NO: 1055020 - RNA, 19 nt, Homo sapiens
  misc_RNA (1)...(19): siRNA sense strand
gaggaaaugggagguguuc

SEQ ID NO: 1055021 - RNA, 19 nt, Homo sapiens
  misc_RNA (1)...(19): siRNA sense strand
ggauuccacaccuacuuga

SEQ ID NO: 1055022 - RNA, 19 nt, Homo sapiens
  misc_RNA (1)...(19): siRNA sense strand
ggaggaaaugggagguguu

SEQ ID NO: 1055023 - RNA, 19 nt, Homo sapiens
  misc_RNA (1)...(19): siRNA sense strand
gacagucuuuauauuugca

SEQ ID NO: 1055024 - RNA, 19 nt, Homo sapiens
  misc_RNA (1)...(19): siRNA sense strand
cguuaucacccacgucauu

SEQ ID NO: 1055025 - RNA, 19 nt, Homo sapiens
  misc_RNA (1)...(19): siRNA sense strand
gaccgugaaacuuaaauac

SEQ ID NO: 1055026 - RNA, 19 nt, Homo sapiens
  misc_RNA (1)...(19): siRNA sense strand
agaccgugaaacuuaaaua

SEQ ID NO: 1055027 - RNA, 19 nt, Homo sapiens
  misc_RNA (1)...(19): siRNA sense strand
auuaaaggauccuggucaa

SEQ ID NO: 1055028 - RNA, 19 nt, Homo sapiens
  misc_RNA (1)...(19): siRNA sense strand
ugugauaacugcguagaac

SEQ ID NO: 1055029 - RNA, 19 nt, Homo sapiens
  misc_RNA (1)...(19): siRNA sense strand
ucaauggccagaccgugaa

SEQ ID NO: 1055030 - RNA, 19 nt, Homo sapiens
  misc_RNA (1)...(19): siRNA sense strand
aaggauccuggucaaauaa

SEQ ID NO: 1055031 - RNA, 19 nt, Homo sapiens
  misc_RNA (1)...(19): siRNA sense strand
gcuguggugugcuucuucu

SEQ ID NO: 1055032 - RNA, 19 nt, Homo sapiens
  misc_RNA (1)...(19): siRNA sense strand
cuucuucgccuucgacugu

SEQ ID NO: 1055033 - RNA, 19 nt, Homo sapiens
  misc_RNA (1)...(19): siRNA sense strand
cgacagaagaggguacauc

SEQ ID NO: 1055034 - RNA, 19 nt, Homo sapiens
  misc_RNA (1)...(19): siRNA sense strand
aaccaaagaagucaucauc

SEQ ID NO: 1055035 - RNA, 19 nt, Homo sapiens
  misc_RNA (1)...(19): siRNA sense strand
uuccacaccuacuugauca

SEQ ID NO: 1055036 - RNA, 19 nt, Homo sapiens
  misc_RNA (1)...(19): siRNA sense strand
guaacgggaggaucaugau

SEQ ID NO: 1055037 - RNA, 19 nt, Homo sapiens
  misc_RNA (1)...(19): siRNA sense strand
ucguuggccucucaggauu

SEQ ID NO: 1055038 - RNA, 19 nt, Homo sapiens
  misc_RNA (1)...(19): siRNA sense strand
auucuucguucacagcaaa

SEQ ID NO: 1055039 - RNA, 19 nt, Homo sapiens
  misc_RNA (1)...(19): siRNA sense strand
uaacgggaggaucaugaug

SEQ ID NO: 1055040 - RNA, 19 nt, Homo sapiens
  misc_RNA (1)...(19): siRNA sense strand
caagccugaucgacagaag

SEQ ID NO: 1055041 - RNA, 19 nt, Homo sapiens
  misc_RNA (1)...(19): siRNA sense strand
ucgcuggcauccuguucuu

SEQ ID NO: 1055042 - RNA, 19 nt, Homo sapiens
  misc_RNA (1)...(19): siRNA sense strand
gcauccuguucuucuuugu

SEQ ID NO: 1055043 - RNA, 19 nt, Homo sapiens
  misc_RNA (1)...(19): siRNA sense strand
gaacuuugcugcucuacuu

SEQ ID NO: 1055044 - RNA, 19 nt, Homo sapiens
  misc_RNA (1)...(19): siRNA sense strand
gaggaaagauggcgauguc

SEQ ID NO: 1055045 - RNA, 19 nt, Homo sapiens
  misc_RNA (1)...(19): siRNA sense strand
gggccuagcuugaggaaag

SEQ ID NO: 1055046 - RNA, 19 nt, Homo sapiens
  misc_RNA (1)...(19): siRNA sense strand
caagaacuuugcugcucua

SEQ ID NO: 1055047 - RNA, 19 nt, Homo sapiens
  misc_RNA (1)...(19): siRNA sense strand
ggacacucauuagcaagaa

SEQ ID NO: 1055048 - RNA, 19 nt, Homo sapiens
  misc_RNA (1)...(19): siRNA sense strand
ugaugaugaugaugacuaa

SEQ ID NO: 1055049 - RNA, 19 nt, Homo sapiens
  misc_RNA (1)...(19): siRNA sense strand
gcggcucgcuggcuaguau

SEQ ID NO: 1055050 - RNA, 19 nt, Homo sapiens
  misc_RNA (1)...(19): siRNA sense strand
cagaggaugaugaugauga

SEQ ID NO: 1055051 - RNA, 19 nt, Homo sapiens
  misc_RNA (1)...(19): siRNA sense strand
cguguguucuccauuguga

SEQ ID NO: 1055052 - RNA, 19 nt, Homo sapiens
  misc_RNA (1)...(19): siRNA sense strand
cugcguguguucuccauug

SEQ ID NO: 1055053 - RNA, 19 nt, Homo sapiens
  misc_RNA (1)...(19): siRNA sense strand
ggaugaugaugaugaugac

SEQ ID NO: 1055054 - RNA, 19 nt, Homo sapiens
  misc_RNA (1)...(19): siRNA sense strand
ucgggacacucauuagcaa

SEQ ID NO: 1055055 - RNA, 19 nt, Homo sapiens
  misc_RNA (1)...(19): siRNA sense strand
gggacacucauuagcaaga

SEQ ID NO: 1055056 - RNA, 19 nt, Homo sapiens
  misc_RNA (1)...(19): siRNA sense strand
agaggaugaugaugaugau

SEQ ID NO: 1055057 - RNA, 19 nt, Homo sapiens
  misc_RNA (1)...(19): siRNA sense strand
ggccuagcuugaggaaaga

SEQ ID NO: 1055058 - RNA, 19 nt, Homo sapiens
  misc_RNA (1)...(19): siRNA sense strand
uccagaggaugaugaugau

SEQ ID NO: 1055059 - RNA, 19 nt, Homo sapiens
  misc_RNA (1)...(19): siRNA sense strand
aggaugaugaugaugauga

SEQ ID NO: 1055060 - RNA, 19 nt, Homo sapiens
  misc_RNA (1)...(19): siRNA sense strand
uuccagaggaugaugauga

SEQ ID NO: 1055061 - RNA, 19 nt, Homo sapiens
  misc_RNA (1)...(19): siRNA sense strand
gaauguaccacguguauua

SEQ ID NO: 1055062 - RNA, 19 nt, Homo sapiens
  misc_RNA (1)...(19): siRNA sense strand
gaaaacagcuuccuaauag

SEQ ID NO: 1055063 - RNA, 19 nt, Homo sapiens
  misc_RNA (1)...(19): siRNA sense strand
gcacaaagaaggaagagua

SEQ ID NO: 1055064 - RNA, 19 nt, Homo sapiens
  misc_RNA (1)...(19): siRNA sense strand
ugaagaagaugaugaagaa

SEQ ID NO: 1055065 - RNA, 19 nt, Homo sapiens
  misc_RNA (1)...(19): siRNA sense strand
uuacagagccuggaaauua

SEQ ID NO: 1055066 - RNA, 19 nt, Homo sapiens
  misc_RNA (1)...(19): siRNA sense strand
ggagauagcaacccgauuu

SEQ ID NO: 1055067 - RNA, 19 nt, Homo sapiens
  misc_RNA (1)...(19): siRNA sense strand
ggaaacuacuccugugaug

SEQ ID NO: 1055068 - RNA, 19 nt, Homo sapiens
  misc_RNA (1)...(19): siRNA sense strand
gaacuuacaguccucuauu

SEQ ID NO: 1055069 - RNA, 19 nt, Homo sapiens
  misc_RNA (1)...(19): siRNA sense strand
gcaauucucccucuucaga

SEQ ID NO: 1055070 - RNA, 19 nt, Homo sapiens
  misc_RNA (1)...(19): siRNA sense strand
gauagcaacccgauuuauu

SEQ ID NO: 1055071 - RNA, 19 nt, Homo sapiens
  misc_RNA (1)...(19): siRNA sense strand
uaagaagccuggguagaaa

SEQ ID NO: 1055072 - RNA, 19 nt, Homo sapiens
  misc_RNA (1)...(19): siRNA sense strand
guaagaagccuggguagaa

SEQ ID NO: 1055073 - RNA, 19 nt, Homo sapiens
  misc_RNA (1)...(19): siRNA sense strand
ucagauacguguacagaga

SEQ ID NO: 1055074 - RNA, 19 nt, Homo sapiens
  misc_RNA (1)...(19): siRNA sense strand
caauggagcuggagccaau

SEQ ID NO: 1055075 - RNA, 19 nt, Homo sapiens
  misc_RNA (1)...(19): siRNA sense strand
caagagcuguuucuacauc

SEQ ID NO: 1055076 - RNA, 19 nt, Homo sapiens
  misc_RNA (1)...(19): siRNA sense strand
gauccugacuccuggaaga

SEQ ID NO: 1055077 - RNA, 19 nt, Homo sapiens
  misc_RNA (1)...(19): siRNA sense strand
cugcugcucugcugcauua

SEQ ID NO: 1055078 - RNA, 19 nt, Homo sapiens
  misc_RNA (1)...(19): siRNA sense strand
gagauagcaacccgauuua

SEQ ID NO: 1055079 - RNA, 19 nt, Homo sapiens
  misc_RNA (1)...(19): siRNA sense strand
caaagaaggaagaguaaga

SEQ ID NO: 1055080 - RNA, 19 nt, Homo sapiens
  misc_RNA (1)...(19): siRNA sense strand
gaugagaaguuguugaaaa

SEQ ID NO: 1055081 - RNA, 19 nt, Homo sapiens
  misc_RNA (1)...(19): siRNA sense strand
caugacaagauccaaauua

SEQ ID NO: 1055082 - RNA, 19 nt, Homo sapiens
  misc_RNA (1)...(19): siRNA sense strand
guccaggccuuccaggaua

SEQ ID NO: 1055083 - RNA, 19 nt, Homo sapiens
  misc_RNA (1)...(19): siRNA sense strand
gagaauguaccacguguau

SEQ ID NO: 1055084 - RNA, 19 nt, Homo sapiens
  misc_RNA (1)...(19): siRNA sense strand
gaagaaaacuaugagaaug

SEQ ID NO: 1055085 - RNA, 19 nt, Homo sapiens
  misc_RNA (1)...(19): siRNA sense strand
gagaaaauaugguccuuau

SEQ ID NO: 1055086 - RNA, 19 nt, Homo sapiens
  misc_RNA (1)...(19): siRNA sense strand
gcacagucauggagugagu

SEQ ID NO: 1055087 - RNA, 19 nt, Homo sapiens
  misc_RNA (1)...(19): siRNA sense strand
gaacaucucggcccacucu

SEQ ID NO: 1055088 - RNA, 19 nt, Homo sapiens
  misc_RNA (1)...(19): siRNA sense strand
guggugacacucaauguua

SEQ ID NO: 1055089 - RNA, 19 nt, Homo sapiens
  misc_RNA (1)...(19): siRNA sense strand
uuacaguccucuauucaga

SEQ ID NO: 1055090 - RNA, 19 nt, Homo sapiens
  misc_RNA (1)...(19): siRNA sense strand
caauguaaauccuggagau

SEQ ID NO: 1055091 - RNA, 19 nt, Homo sapiens
  misc_RNA (1)...(19): siRNA sense strand
ggcuuuacauccugucuuu

SEQ ID NO: 1055092 - RNA, 19 nt, Homo sapiens
  misc_RNA (1)...(19): siRNA sense strand
gagccaauguacagcaaug

SEQ ID NO: 1055093 - RNA, 19 nt, Homo sapiens
  misc_RNA (1)...(19): siRNA sense strand
ccaugacccugaccuguga

SEQ ID NO: 1055094 - RNA, 19 nt, Homo sapiens
  misc_RNA (1)...(19): siRNA sense strand
ggagacacauauugguauc

SEQ ID NO: 1055095 - RNA, 19 nt, Homo sapiens
  misc_RNA (1)...(19): siRNA sense strand
cauguggacugaagacuca

SEQ ID NO: 1055096 - RNA, 19 nt, Homo sapiens
  misc_RNA (1)...(19): siRNA sense strand
ggugugagguggagacagu

SEQ ID NO: 1055097 - RNA, 19 nt, Homo sapiens
  misc_RNA (1)...(19): siRNA sense strand
gagagucccugugucuaau

SEQ ID NO: 1055098 - RNA, 19 nt, Homo sapiens
  misc_RNA (1)...(19): siRNA sense strand
aaacagcuuccuaauaguu

SEQ ID NO: 1055099 - RNA, 19 nt, Homo sapiens
  misc_RNA (1)...(19): siRNA sense strand
guucagggacugucacauu

SEQ ID NO: 1055100 - RNA, 19 nt, Homo sapiens
  misc_RNA (1)...(19): siRNA sense strand
ccagggauaauagcaaaua

SEQ ID NO: 1055101 - RNA, 19 nt, Homo sapiens
  misc_RNA (1)...(19): siRNA sense strand
gcagcugauugaaggagaa

SEQ ID NO: 1055102 - RNA, 19 nt, Homo sapiens
  misc_RNA (1)...(19): siRNA sense strand
gaacagaacaggccuuacc

SEQ ID NO: 1055103 - RNA, 19 nt, Homo sapiens
  misc_RNA (1)...(19): siRNA sense strand
gcagcagcauaucacauuc

SEQ ID NO: 1055104 - RNA, 19 nt, Homo sapiens
  misc_RNA (1)...(19): siRNA sense strand
aaacaugacaagauccaaa

SEQ ID NO: 1055105 - RNA, 19 nt, Homo sapiens
  misc_RNA (1)...(19): siRNA sense strand
caaauuacagagccuggaa

SEQ ID NO: 1055106 - RNA, 19 nt, Homo sapiens
  misc_RNA (1)...(19): siRNA sense strand
gcagggcccaugaagaaga

SEQ ID NO: 1055107 - RNA, 19 nt, Homo sapiens
  misc_RNA (1)...(19): siRNA sense strand
caaaagaaaacucagcuaa

SEQ ID NO: 1055108 - RNA, 19 nt, Homo sapiens
  misc_RNA (1)...(19): siRNA sense strand
gccuggaaauuaccaaugu

SEQ ID NO: 1055109 - RNA, 19 nt, Homo sapiens
  misc_RNA (1)...(19): siRNA sense strand
gacaagauccaaauuacag

SEQ ID NO: 1055110 - RNA, 19 nt, Homo sapiens
  misc_RNA (1)...(19): siRNA sense strand
uucaagagcuguuucuaca

SEQ ID NO: 1055111 - RNA, 19 nt, Homo sapiens
  misc_RNA (1)...(19): siRNA sense strand
gacccagcguucccuguug

SEQ ID NO: 1055112 - RNA, 19 nt, Homo sapiens
  misc_RNA (1)...(19): siRNA sense strand
ggaacuuacaguccucuau

SEQ ID NO: 1055113 - RNA, 19 nt, Homo sapiens
  misc_RNA (1)...(19): siRNA sense strand
guaucacgaugagaaguug

SEQ ID NO: 1055114 - RNA, 19 nt, Homo sapiens
  misc_RNA (1)...(19): siRNA sense strand
ucaagagcaugaggaacuu

SEQ ID NO: 1055115 - RNA, 19 nt, Homo sapiens
  misc_RNA (1)...(19): siRNA sense strand
cacaaagaaggaagaguaa

SEQ ID NO: 1055116 - RNA, 19 nt, Homo sapiens
  misc_RNA (1)...(19): siRNA sense strand
agagagucccugugucuaa

SEQ ID NO: 1055117 - RNA, 19 nt, Homo sapiens
  misc_RNA (1)...(19): siRNA sense strand
ccuggaaauuaccaaugua

SEQ ID NO: 1055118 - RNA, 19 nt, Homo sapiens
  misc_RNA (1)...(19): siRNA sense strand
gggagacacauauugguau

SEQ ID NO: 1055119 - RNA, 19 nt, Homo sapiens
  misc_RNA (1)...(19): siRNA sense strand
gcaucaagagcaugaggaa

SEQ ID NO: 1055120 - RNA, 19 nt, Homo sapiens
  misc_RNA (1)...(19): siRNA sense strand
caaccucucucugacuaca

SEQ ID NO: 1055121 - RNA, 19 nt, Homo sapiens
  misc_RNA (1)...(19): siRNA sense strand
gguccuuauuugcucagua

SEQ ID NO: 1055122 - RNA, 19 nt, Homo sapiens
  misc_RNA (1)...(19): siRNA sense strand
aggcagggcccaugaagaa

SEQ ID NO: 1055123 - RNA, 19 nt, Homo sapiens
  misc_RNA (1)...(19): siRNA sense strand
gaagaagaugaugaagaaa

SEQ ID NO: 1055124 - RNA, 19 nt, Homo sapiens
  misc_RNA (1)...(19): siRNA sense strand
ccaugaagaagaugaugaa

SEQ ID NO: 1055125 - RNA, 19 nt, Homo sapiens
  misc_RNA (1)...(19): siRNA sense strand
cagggauaauagcaaauau

SEQ ID NO: 1055126 - RNA, 19 nt, Homo sapiens
  misc_RNA (1)...(19): siRNA sense strand
aaagaaggaagaguaagaa

SEQ ID NO: 1055127 - RNA, 19 nt, Homo sapiens
  misc_RNA (1)...(19): siRNA sense strand
gguaucacgaugagaaguu

SEQ ID NO: 1055128 - RNA, 19 nt, Homo sapiens
  misc_RNA (1)...(19): siRNA sense strand
aaaaguggcucucauaugc

SEQ ID NO: 1055129 - RNA, 19 nt, Homo sapiens
  misc_RNA (1)...(19): siRNA sense strand
guccuuauuugcucaguag

SEQ ID NO: 1055130 - RNA, 19 nt, Homo sapiens
  misc_RNA (1)...(19): siRNA sense strand
caggauagacccucaagag

SEQ ID NO: 1055131 - RNA, 19 nt, Homo sapiens
  misc_RNA (1)...(19): siRNA sense strand
uggaacaucuagucacagu

SEQ ID NO: 1055132 - RNA, 19 nt, Homo sapiens
  misc_RNA (1)...(19): siRNA sense strand
uacagagccuggaaauuac

SEQ ID NO: 1055133 - RNA, 19 nt, Homo sapiens
  misc_RNA (1)...(19): siRNA sense strand
guguauuacuggccucaga

SEQ ID NO: 1055134 - RNA, 19 nt, Homo sapiens
  misc_RNA (1)...(19): siRNA sense strand
caugugaggcugacaaugg

SEQ ID NO: 1055135 - RNA, 19 nt, Homo sapiens
  misc_RNA (1)...(19): siRNA sense strand
cauauugguaucacgauga

SEQ ID NO: 1055136 - RNA, 19 nt, Homo sapiens
  misc_RNA (1)...(19): siRNA sense strand
aaacuacuccugugaugca

SEQ ID NO: 1055137 - RNA, 19 nt, Homo sapiens
  misc_RNA (1)...(19): siRNA sense strand
caagagcaugaggaacuua

SEQ ID NO: 1055138 - RNA, 19 nt, Homo sapiens
  misc_RNA (1)...(19): siRNA sense strand
ggagcauccagcauacaaa

SEQ ID NO: 1055139 - RNA, 19 nt, Homo sapiens
  misc_RNA (1)...(19): siRNA sense strand
aauucagucuccagggaua

SEQ ID NO: 1055140 - RNA, 19 nt, Homo sapiens
  misc_RNA (1)...(19): siRNA sense strand
ucuggaaacuacucaugug

SEQ ID NO: 1055141 - RNA, 19 nt, Homo sapiens
  misc_RNA (1)...(19): siRNA sense strand
gucccugugucuaauguga

SEQ ID NO: 1055142 - RNA, 19 nt, Homo sapiens
  misc_RNA (1)...(19): siRNA sense strand
cuaaauauccaaguucaag

SEQ ID NO: 1055143 - RNA, 19 nt, Homo sapiens
  misc_RNA (1)...(19): siRNA sense strand
acccagcucucuccacaga

SEQ ID NO: 1055144 - RNA, 19 nt, Homo sapiens
  misc_RNA (1)...(19): siRNA sense strand
ugacaagauccaaauuaca

SEQ ID NO: 1055145 - RNA, 19 nt, Homo sapiens
  misc_RNA (1)...(19): siRNA sense strand
ggucacaguuccggugucu

SEQ ID NO: 1055146 - RNA, 19 nt, Homo sapiens
  misc_RNA (1)...(19): siRNA sense strand
cugugcagcugauaacguu

SEQ ID NO: 1055147 - RNA, 19 nt, Homo sapiens
  misc_RNA (1)...(19): siRNA sense strand
cuccagggauaauagcaaa

SEQ ID NO: 1055148 - RNA, 19 nt, Homo sapiens
  misc_RNA (1)...(19): siRNA sense strand
auagcaacccgauuuauuc

SEQ ID NO: 1055149 - RNA, 19 nt, Homo sapiens
  misc_RNA (1)...(19): siRNA sense strand
ggagggcagcugauugaag

SEQ ID NO: 1055150 - RNA, 19 nt, Homo sapiens
  misc_RNA (1)...(19): siRNA sense strand
ccggagggcagcugauuga

SEQ ID NO: 1055151 - RNA, 19 nt, Homo sapiens
  misc_RNA (1)...(19): siRNA sense strand
gcucuuccacgcccauaga

SEQ ID NO: 1055152 - RNA, 19 nt, Homo sapiens
  misc_RNA (1)...(19): siRNA sense strand
ucaaaagguuuacuacaag

SEQ ID NO: 1055153 - RNA, 19 nt, Homo sapiens
  misc_RNA (1)...(19): siRNA sense strand
ccacuggaacaucuaguca

SEQ ID NO: 1055154 - RNA, 19 nt, Homo sapiens
  misc_RNA (1)...(19): siRNA sense strand
uucaaccucucucugacua

SEQ ID NO: 1055155 - RNA, 19 nt, Homo sapiens
  misc_RNA (1)...(19): siRNA sense strand
gagucccugugucuaaugu

SEQ ID NO: 1055156 - RNA, 19 nt, Homo sapiens
  misc_RNA (1)...(19): siRNA sense strand
cugcaauucucccucuuca

SEQ ID NO: 1055157 - RNA, 19 nt, Homo sapiens
  misc_RNA (1)...(19): siRNA sense strand
cccuaaauauccaaguuca

SEQ ID NO: 1055158 - RNA, 19 nt, Homo sapiens
  misc_RNA (1)...(19): siRNA sense strand
ugccgugcauguggaauuu

SEQ ID NO: 1055159 - RNA, 19 nt, Homo sapiens
  misc_RNA (1)...(19): siRNA sense strand
aacagcuuccuaauaguua

SEQ ID NO: 1055160 - RNA, 19 nt, Homo sapiens
  misc_RNA (1)...(19): siRNA sense strand
gaggcagggcccaugaaga

SEQ ID NO: 1055161 - RNA, 19 nt, Homo sapiens
  misc_RNA (1)...(19): siRNA sense strand
ggauuacacuucaagauua

SEQ ID NO: 1055162 - RNA, 19 nt, Homo sapiens
  misc_RNA (1)...(19): siRNA sense strand
gcacaagaguguaauggaa

SEQ ID NO: 1055163 - RNA, 19 nt, Homo sapiens
  misc_RNA (1)...(19): siRNA sense strand
gaacugaagagaauuauug

SEQ ID NO: 1055164 - RNA, 19 nt, Homo sapiens
  misc_RNA (1)...(19): siRNA sense strand
gaagaacugaagagaauua

SEQ ID NO: 1055165 - RNA, 19 nt, Homo sapiens
  misc_RNA (1)...(19): siRNA sense strand
gacaggagcuugaaauugu

SEQ ID NO: 1055166 - RNA, 19 nt, Homo sapiens
  misc_RNA (1)...(19): siRNA sense strand
uggaagaacugaagagaau

SEQ ID NO: 1055167 - RNA, 19 nt, Homo sapiens
  misc_RNA (1)...(19): siRNA sense strand
ggacggaaagcuuagauau

SEQ ID NO: 1055168 - RNA, 19 nt, Homo sapiens
  misc_RNA (1)...(19): siRNA sense strand
caacaacagcaauuacaaa

SEQ ID NO: 1055169 - RNA, 19 nt, Homo sapiens
  misc_RNA (1)...(19): siRNA sense strand
gaagagaauuauugaugac

SEQ ID NO: 1055170 - RNA, 19 nt, Homo sapiens
  misc_RNA (1)...(19): siRNA sense strand
uagguucucuuauugaugu

SEQ ID NO: 1055171 - RNA, 19 nt, Homo sapiens
  misc_RNA (1)...(19): siRNA sense strand
gagaauuauugaugacagu

SEQ ID NO: 1055172 - RNA, 19 nt, Homo sapiens
  misc_RNA (1)...(19): siRNA sense strand
gaugagcacauaucuuuua

SEQ ID NO: 1055173 - RNA, 19 nt, Homo sapiens
  misc_RNA (1)...(19): siRNA sense strand
gcacgaguuucuggaguuc

SEQ ID NO: 1055174 - RNA, 19 nt, Homo sapiens
  misc_RNA (1)...(19): siRNA sense strand
cgacaggagcuugaaauug

SEQ ID NO: 1055175 - RNA, 19 nt, Homo sapiens
  misc_RNA (1)...(19): siRNA sense strand
aauuggagaugagcacaua

SEQ ID NO: 1055176 - RNA, 19 nt, Homo sapiens
  misc_RNA (1)...(19): siRNA sense strand
acaggagcuugaaauugua

SEQ ID NO: 1055177 - RNA, 19 nt, Homo sapiens
  misc_RNA (1)...(19): siRNA sense strand
ggcacgaguuucuggaguu

SEQ ID NO: 1055178 - RNA, 19 nt, Homo sapiens
  misc_RNA (1)...(19): siRNA sense strand
acaagaguguaauggaaga

SEQ ID NO: 1055179 - RNA, 19 nt, Homo sapiens
  misc_RNA (1)...(19): siRNA sense strand
gcuuagauaugccaacaac

SEQ ID NO: 1055180 - RNA, 19 nt, Homo sapiens
  misc_RNA (1)...(19): siRNA sense strand
caaguuugggcacgaguuu

SEQ ID NO: 1055181 - RNA, 19 nt, Homo sapiens
  misc_RNA (1)...(19): siRNA sense strand
gaauuauugaugacaguga

SEQ ID NO: 1055182 - RNA, 19 nt, Homo sapiens
  misc_RNA (1)...(19): siRNA sense strand
cuuauuggauuacacuuca

SEQ ID NO: 1055183 - RNA, 19 nt, Homo sapiens
  misc_RNA (1)...(19): siRNA sense strand
uggauuacacuucaagauu

SEQ ID NO: 1055184 - RNA, 19 nt, Homo sapiens
  misc_RNA (1)...(19): siRNA sense strand
gacggaaagcuuagauaug

SEQ ID NO: 1055185 - RNA, 19 nt, Homo sapiens
  misc_RNA (1)...(19): siRNA sense strand
ccaacaacagcaauuacaa

SEQ ID NO: 1055186 - RNA, 19 nt, Homo sapiens
  misc_RNA (1)...(19): siRNA sense strand
cugaagagaauuauugaug

SEQ ID NO: 1055187 - RNA, 19 nt, Homo sapiens
  misc_RNA (1)...(19): siRNA sense strand
acggaaagcuuagauaugc

SEQ ID NO: 1055188 - RNA, 19 nt, Homo sapiens
  misc_RNA (1)...(19): siRNA sense strand
ggaagaacugaagagaauu

SEQ ID NO: 1055189 - RNA, 19 nt, Homo sapiens
  misc_RNA (1)...(19): siRNA sense strand
gaugacagugaaauuacaa

SEQ ID NO: 1055190 - RNA, 19 nt, Homo sapiens
  misc_RNA (1)...(19): siRNA sense strand
ugaugacagugaaauuaca

SEQ ID NO: 1055191 - RNA, 19 nt, Homo sapiens
  misc_RNA (1)...(19): siRNA sense strand
gauaugccaacaacagcaa

SEQ ID NO: 1055192 - RNA, 19 nt, Homo sapiens
  misc_RNA (1)...(19): siRNA sense strand
gagcacauaucuuuuacca

SEQ ID NO: 1055193 - RNA, 19 nt, Homo sapiens
  misc_RNA (1)...(19): siRNA sense strand
guaauggaagaacugaaga

SEQ ID NO: 1055194 - RNA, 19 nt, Homo sapiens
  misc_RNA (1)...(19): siRNA sense strand
gcaaguuugggcacgaguu

SEQ ID NO: 1055195 - RNA, 19 nt, Homo sapiens
  misc_RNA (1)...(19): siRNA sense strand
gccaacaacagcaauuaca

SEQ ID NO: 1055196 - RNA, 19 nt, Homo sapiens
  misc_RNA (1)...(19): siRNA sense strand
ggcuguggcuagcgauuuc

SEQ ID NO: 1055197 - RNA, 19 nt, Homo sapiens
  misc_RNA (1)...(19): siRNA sense strand
gggcacaagggcaaguuug

SEQ ID NO: 1055198 - RNA, 19 nt, Homo sapiens
  misc_RNA (1)...(19): siRNA sense strand
aagcuuagauaugccaaca

SEQ ID NO: 1055199 - RNA, 19 nt, Homo sapiens
  misc_RNA (1)...(19): siRNA sense strand
aggcuuaugugcacaagag

SEQ ID NO: 1055200 - RNA, 19 nt, Homo sapiens
  misc_RNA (1)...(19): siRNA sense strand
uaugugcacaagaguguaa

SEQ ID NO: 1055201 - RNA, 19 nt, Homo sapiens
  misc_RNA (1)...(19): siRNA sense strand
cuaccugcgcuacuacgua

SEQ ID NO: 1055202 - RNA, 19 nt, Homo sapiens
  misc_RNA (1)...(19): siRNA sense strand
aagaagaugaugcuuugug

SEQ ID NO: 1055203 - RNA, 19 nt, Homo sapiens
  misc_RNA (1)...(19): siRNA sense strand
ccgacaggagcuugaaauu

SEQ ID NO: 1055204 - RNA, 19 nt, Homo sapiens
  misc_RNA (1)...(19): siRNA sense strand
gauguaaaucagucaaagg

SEQ ID NO: 1055205 - RNA, 19 nt, Homo sapiens
  misc_RNA (1)...(19): siRNA sense strand
guuucuggaguucgaauuu

SEQ ID NO: 1055206 - RNA, 19 nt, Homo sapiens
  misc_RNA (1)...(19): siRNA sense strand
caggagcuugaaauuguaa

SEQ ID NO: 1055207 - RNA, 19 nt, Homo sapiens
  misc_RNA (1)...(19): siRNA sense strand
gcaaugauauucuccugua

SEQ ID NO: 1055208 - RNA, 19 nt, Homo sapiens
  misc_RNA (1)...(19): siRNA sense strand
gagggcagccuucucauua

SEQ ID NO: 1055209 - RNA, 19 nt, Homo sapiens
  misc_RNA (1)...(19): siRNA sense strand
gcacugguacuauuuauuc

SEQ ID NO: 1055210 - RNA, 19 nt, Homo sapiens
  misc_RNA (1)...(19): siRNA sense strand
gaacgagacccugcauuug

SEQ ID NO: 1055211 - RNA, 19 nt, Homo sapiens
  misc_RNA (1)...(19): siRNA sense strand
ucaccagccucaccaauau

SEQ ID NO: 1055212 - RNA, 19 nt, Homo sapiens
  misc_RNA (1)...(19): siRNA sense strand
gccaaguggugcaguauga

SEQ ID NO: 1055213 - RNA, 19 nt, Homo sapiens
  misc_RNA (1)...(19): siRNA sense strand
gggcagccuucucauuaaa

SEQ ID NO: 1055214 - RNA, 19 nt, Homo sapiens
  misc_RNA (1)...(19): siRNA sense strand
gcacugggguucuacuuuu

SEQ ID NO: 1055215 - RNA, 19 nt, Homo sapiens
  misc_RNA (1)...(19): siRNA sense strand
gcagccuucucauuaaaga

SEQ ID NO: 1055216 - RNA, 19 nt, Homo sapiens
  misc_RNA (1)...(19): siRNA sense strand
gcucgacugucccuuagga

SEQ ID NO: 1055217 - RNA, 19 nt, Homo sapiens
  misc_RNA (1)...(19): siRNA sense strand
agaacgagacccugcauuu

SEQ ID NO: 1055218 - RNA, 19 nt, Homo sapiens
  misc_RNA (1)...(19): siRNA sense strand
gcaccaauaacacacaguu

SEQ ID NO: 1055219 - RNA, 19 nt, Homo sapiens
  misc_RNA (1)...(19): siRNA sense strand
gagaagacagaauuugugu

SEQ ID NO: 1055220 - RNA, 19 nt, Homo sapiens
  misc_RNA (1)...(19): siRNA sense strand
gauauucuccuguauugca

SEQ ID NO: 1055221 - RNA, 19 nt, Homo sapiens
  misc_RNA (1)...(19): siRNA sense strand
gaugucaccacccugcaua

SEQ ID NO: 1055222 - RNA, 19 nt, Homo sapiens
  misc_RNA (1)...(19): siRNA sense strand
gcaguaugaaauugacuuu

SEQ ID NO: 1055223 - RNA, 19 nt, Homo sapiens
  misc_RNA (1)...(19): siRNA sense strand
gcgcacugguacuauuuau

SEQ ID NO: 1055224 - RNA, 19 nt, Homo sapiens
  misc_RNA (1)...(19): siRNA sense strand
aaggguggauuacgucauu

SEQ ID NO: 1055225 - RNA, 19 nt, Homo sapiens
  misc_RNA (1)...(19): siRNA sense strand
gaugagaagacagaauuug

SEQ ID NO: 1055226 - RNA, 19 nt, Homo sapiens
  misc_RNA (1)...(19): siRNA sense strand
gcucguggcccaguucaaa

SEQ ID NO: 1055227 - RNA, 19 nt, Homo sapiens
  misc_RNA (1)...(19): siRNA sense strand
ccaacaggcccuacucuca

SEQ ID NO: 1055228 - RNA, 19 nt, Homo sapiens
  misc_RNA (1)...(19): siRNA sense strand
aaauugacuuucaggaugu

SEQ ID NO: 1055229 - RNA, 19 nt, Homo sapiens
  misc_RNA (1)...(19): siRNA sense strand
gaggcucaguggagagaga

SEQ ID NO: 1055230 - RNA, 19 nt, Homo sapiens
  misc_RNA (1)...(19): siRNA sense strand
caaugauauucuccuguau

SEQ ID NO: 1055231 - RNA, 19 nt, Homo sapiens
  misc_RNA (1)...(19): siRNA sense strand
caaguggugcaguaugaaa

SEQ ID NO: 1055232 - RNA, 19 nt, Homo sapiens
  misc_RNA (1)...(19): siRNA sense strand
uaccacugcuggaacaaga

SEQ ID NO: 1055233 - RNA, 19 nt, Homo sapiens
  misc_RNA (1)...(19): siRNA sense strand
ggacuucaccaccuuucug

SEQ ID NO: 1055234 - RNA, 19 nt, Homo sapiens
  misc_RNA (1)...(19): siRNA sense strand
augauauucuccuguauug

SEQ ID NO: 1055235 - RNA, 19 nt, Homo sapiens
  misc_RNA (1)...(19): siRNA sense strand
gguacuauuuauucacaca

SEQ ID NO: 1055236 - RNA, 19 nt, Homo sapiens
  misc_RNA (1)...(19): siRNA sense strand
gucaccacccugcauauaa

SEQ ID NO: 1055237 - RNA, 19 nt, Homo sapiens
  misc_RNA (1)...(19): siRNA sense strand
gcccuacucucaggcaaug

SEQ ID NO: 1055238 - RNA, 19 nt, Homo sapiens
  misc_RNA (1)...(19): siRNA sense strand
ucgaugagaagacagaauu

SEQ ID NO: 1055239 - RNA, 19 nt, Homo sapiens
  misc_RNA (1)...(19): siRNA sense strand
gggcgcacugguacuauuu

SEQ ID NO: 1055240 - RNA, 19 nt, Homo sapiens
  misc_RNA (1)...(19): siRNA sense strand
ucaccacccugcauauaac

SEQ ID NO: 1055241 - RNA, 19 nt, Homo sapiens
  misc_RNA (1)...(19): siRNA sense strand
cacaggugcugguggugaa

SEQ ID NO: 1055242 - RNA, 19 nt, Homo sapiens
  misc_RNA (1)...(19): siRNA sense strand
cacguccagugcaccaaua

SEQ ID NO: 1055243 - RNA, 19 nt, Homo sapiens
  misc_RNA (1)...(19): siRNA sense strand
agggcagccuucucauuaa

SEQ ID NO: 1055244 - RNA, 19 nt, Homo sapiens
  misc_RNA (1)...(19): siRNA sense strand
gccaggacuucaccaccuu

SEQ ID NO: 1055245 - RNA, 19 nt, Homo sapiens
  misc_RNA (1)...(19): siRNA sense strand
ugagaagacagaauuugug

SEQ ID NO: 1055246 - RNA, 19 nt, Homo sapiens
  misc_RNA (1)...(19): siRNA sense strand
gcagcaaacagcucauuuu

SEQ ID NO: 1055247 - RNA, 19 nt, Homo sapiens
  misc_RNA (1)...(19): siRNA sense strand
cgagggcagccuucucauu

SEQ ID NO: 1055248 - RNA, 19 nt, Homo sapiens
  misc_RNA (1)...(19): siRNA sense strand
gccgccaaguggugcagua

SEQ ID NO: 1055249 - RNA, 19 nt, Homo sapiens
  misc_RNA (1)...(19): siRNA sense strand
ggcagcaaacagcucauuu

SEQ ID NO: 1055250 - RNA, 19 nt, Homo sapiens
  misc_RNA (1)...(19): siRNA sense strand
guggugcaguaugaaauug

SEQ ID NO: 1055251 - RNA, 19 nt, Homo sapiens
  misc_RNA (1)...(19): siRNA sense strand
guggcucgacugucccuua

SEQ ID NO: 1055252 - RNA, 19 nt, Homo sapiens
  misc_RNA (1)...(19): siRNA sense strand
cgaugagaagacagaauuu

SEQ ID NO: 1055253 - RNA, 19 nt, Homo sapiens
  misc_RNA (1)...(19): siRNA sense strand
gggcgcugcucaagugcau

SEQ ID NO: 1055254 - RNA, 19 nt, Homo sapiens
  misc_RNA (1)...(19): siRNA sense strand
cacaguuaaggguggauua

SEQ ID NO: 1055255 - RNA, 19 nt, Homo sapiens
  misc_RNA (1)...(19): siRNA sense strand
ugucaccacccugcauaua

SEQ ID NO: 1055256 - RNA, 19 nt, Homo sapiens
  misc_RNA (1)...(19): siRNA sense strand
cucaccagccucaccaaua

SEQ ID NO: 1055257 - RNA, 19 nt, Homo sapiens
  misc_RNA (1)...(19): siRNA sense strand
ccagugcaccaauaacaca

SEQ ID NO: 1055258 - RNA, 19 nt, Homo sapiens
  misc_RNA (1)...(19): siRNA sense strand
gggcagcaaacagcucauu

SEQ ID NO: 1055259 - RNA, 19 nt, Homo sapiens
  misc_RNA (1)...(19): siRNA sense strand
ccucaccaauauuuccaau

SEQ ID NO: 1055260 - RNA, 19 nt, Homo sapiens
  misc_RNA (1)...(19): siRNA sense strand
ggcgcacugguacuauuua

SEQ ID NO: 1055261 - RNA, 19 nt, Homo sapiens
  misc_RNA (1)...(19): siRNA sense strand
cugguacuauuuauucaca

SEQ ID NO: 1055262 - RNA, 19 nt, Homo sapiens
  misc_RNA (1)...(19): siRNA sense strand
ccaguucccuucaggauga

SEQ ID NO: 1055263 - RNA, 19 nt, Homo sapiens
  misc_RNA (1)...(19): siRNA sense strand
guucauccgucgucucauu

SEQ ID NO: 1055264 - RNA, 19 nt, Homo sapiens
  misc_RNA (1)...(19): siRNA sense strand
ggcagaggauccaguguuc

SEQ ID NO: 1055265 - RNA, 19 nt, Homo sapiens
  misc_RNA (1)...(19): siRNA sense strand
ucucauucaugccgaguug

SEQ ID NO: 1055266 - RNA, 19 nt, Homo sapiens
  misc_RNA (1)...(19): siRNA sense strand
cggcagaggauccaguguu

SEQ ID NO: 1055267 - RNA, 19 nt, Homo sapiens
  misc_RNA (1)...(19): siRNA sense strand
ggauagagauggugaauuu

SEQ ID NO: 1055268 - RNA, 19 nt, Homo sapiens
  misc_RNA (1)...(19): siRNA sense strand
ggccauggcucuuugauag

SEQ ID NO: 1055269 - RNA, 19 nt, Homo sapiens
  misc_RNA (1)...(19): siRNA sense strand
ucaagucucuacuggaauu

SEQ ID NO: 1055270 - RNA, 19 nt, Homo sapiens
  misc_RNA (1)...(19): siRNA sense strand
gaagagcugguuccgaauu

SEQ ID NO: 1055271 - RNA, 19 nt, Homo sapiens
  misc_RNA (1)...(19): siRNA sense strand
ggaauuggauagagauggu

SEQ ID NO: 1055272 - RNA, 19 nt, Homo sapiens
  misc_RNA (1)...(19): siRNA sense strand
ucucaagucucuacuggaa

SEQ ID NO: 1055273 - RNA, 19 nt, Homo sapiens
  misc_RNA (1)...(19): siRNA sense strand
ggagacgacugggaacuuc

SEQ ID NO: 1055274 - RNA, 19 nt, Homo sapiens
  misc_RNA (1)...(19): siRNA sense strand
gguaaacagugcugcaucu

SEQ ID NO: 1055275 - RNA, 19 nt, Homo sapiens
  misc_RNA (1)...(19): siRNA sense strand
gcaccagcuugcaggagaa

SEQ ID NO: 1055276 - RNA, 19 nt, Homo sapiens
  misc_RNA (1)...(19): siRNA sense strand
ccaauucaacacuccauuu

SEQ ID NO: 1055277 - RNA, 19 nt, Homo sapiens
  misc_RNA (1)...(19): siRNA sense strand
ccguagaaauuauccuuga

SEQ ID NO: 1055278 - RNA, 19 nt, Homo sapiens
  misc_RNA (1)...(19): siRNA sense strand
cguagaaauuauccuugaa

SEQ ID NO: 1055279 - RNA, 19 nt, Homo sapiens
  misc_RNA (1)...(19): siRNA sense strand
ggacguggcauugcaccaa

SEQ ID NO: 1055280 - RNA, 19 nt, Homo sapiens
  misc_RNA (1)...(19): siRNA sense strand
ucugugaucucaagucucu

SEQ ID NO: 1055281 - RNA, 19 nt, Homo sapiens
  misc_RNA (1)...(19): siRNA sense strand
caucugugaucucaagucu

SEQ ID NO: 1055282 - RNA, 19 nt, Homo sapiens
  misc_RNA (1)...(19): siRNA sense strand
ccagagcgcccaaagaacu

SEQ ID NO: 1055283 - RNA, 19 nt, Homo sapiens
  misc_RNA (1)...(19): siRNA sense strand
gcucuuugauagcaauuuu

SEQ ID NO: 1055284 - RNA, 19 nt, Homo sapiens
  misc_RNA (1)...(19): siRNA sense strand
cgacugggaacuucacuag

SEQ ID NO: 1055285 - RNA, 19 nt, Homo sapiens
  misc_RNA (1)...(19): siRNA sense strand
agccagagcgcccaaagaa

SEQ ID NO: 1055286 - RNA, 19 nt, Homo sapiens
  misc_RNA (1)...(19): siRNA sense strand
ccauggcucuuugauagca

SEQ ID NO: 1055287 - RNA, 19 nt, Homo sapiens
  misc_RNA (1)...(19): siRNA sense strand
aagagcugguuccgaauuc

SEQ ID NO: 1055288 - RNA, 19 nt, Homo sapiens
  misc_RNA (1)...(19): siRNA sense strand
cugcaucugugaucucaag

SEQ ID NO: 1055289 - RNA, 19 nt, Homo sapiens
  misc_RNA (1)...(19): siRNA sense strand
uggcucaucccgcaaauca

SEQ ID NO: 1055290 - RNA, 19 nt, Homo sapiens
  misc_RNA (1)...(19): siRNA sense strand
guagaaauuauccuugaac

SEQ ID NO: 1055291 - RNA, 19 nt, Homo sapiens
  misc_RNA (1)...(19): siRNA sense strand
cuacuggaauuggauagag

SEQ ID NO: 1055292 - RNA, 19 nt, Homo sapiens
  misc_RNA (1)...(19): siRNA sense strand
aauuauccuugaaccagaa

SEQ ID NO: 1055293 - RNA, 19 nt, Homo sapiens
  misc_RNA (1)...(19): siRNA sense strand
acugggaacuucacuagac

SEQ ID NO: 1055294 - RNA, 19 nt, Homo sapiens
  misc_RNA (1)...(19): siRNA sense strand
caauucaacacuccauuuu

SEQ ID NO: 1055295 - RNA, 19 nt, Homo sapiens
  misc_RNA (1)...(19): siRNA sense strand
uggaggacguggcauugca

SEQ ID NO: 1055296 - RNA, 19 nt, Homo sapiens
  misc_RNA (1)...(19): siRNA sense strand
gguaauagcucaucccauu

SEQ ID NO: 1055297 - RNA, 19 nt, Homo sapiens
  misc_RNA (1)...(19): siRNA sense strand
ucucaaaucucaucucuua

SEQ ID NO: 1055298 - RNA, 19 nt, Homo sapiens
  misc_RNA (1)...(19): siRNA sense strand
ggagaaaccuuaugcaugu

SEQ ID NO: 1055299 - RNA, 19 nt, Homo sapiens
  misc_RNA (1)...(19): siRNA sense strand
ucaaagaacuucccuuauu

SEQ ID NO: 1055300 - RNA, 19 nt, Homo sapiens
  misc_RNA (1)...(19): siRNA sense strand
gaaaggagcauugugaaua

SEQ ID NO: 1055301 - RNA, 19 nt, Homo sapiens
  misc_RNA (1)...(19): siRNA sense strand
ugaaaugccuuaugagaaa

SEQ ID NO: 1055302 - RNA, 19 nt, Homo sapiens
  misc_RNA (1)...(19): siRNA sense strand
caaagaacuucccuuauug

SEQ ID NO: 1055303 - RNA, 19 nt, Homo sapiens
  misc_RNA (1)...(19): siRNA sense strand
gguaaagccuucucucaaa

SEQ ID NO: 1055304 - RNA, 19 nt, Homo sapiens
  misc_RNA (1)...(19): siRNA sense strand
gacacaaucucuaugagua

SEQ ID NO: 1055305 - RNA, 19 nt, Homo sapiens
  misc_RNA (1)...(19): siRNA sense strand
gggaaagccuucucucaaa

SEQ ID NO: 1055306 - RNA, 19 nt, Homo sapiens
  misc_RNA (1)...(19): siRNA sense strand
ucccaaagcucaucccuua

SEQ ID NO: 1055307 - RNA, 19 nt, Homo sapiens
  misc_RNA (1)...(19): siRNA sense strand
gagacaaguugaaguuaaa

SEQ ID NO: 1055308 - RNA, 19 nt, Homo sapiens
  misc_RNA (1)...(19): siRNA sense strand
gagagaaaccuuaugauug

SEQ ID NO: 1055309 - RNA, 19 nt, Homo sapiens
  misc_RNA (1)...(19): siRNA sense strand
agagaaaccuuaugaaugu

SEQ ID NO: 1055310 - RNA, 19 nt, Homo sapiens
  misc_RNA (1)...(19): siRNA sense strand
caccaaaccugaugugauu

SEQ ID NO: 1055311 - RNA, 19 nt, Homo sapiens
  misc_RNA (1)...(19): siRNA sense strand
gagaagcccuaucacugua

SEQ ID NO: 1055312 - RNA, 19 nt, Homo sapiens
  misc_RNA (1)...(19): siRNA sense strand
ggagagaaaccuuaugauu

SEQ ID NO: 1055313 - RNA, 19 nt, Homo sapiens
  misc_RNA (1)...(19): siRNA sense strand
ggaaaaggcuucaaucaga

SEQ ID NO: 1055314 - RNA, 19 nt, Homo sapiens
  misc_RNA (1)...(19): siRNA sense strand
gguaaagccuucagccaaa

SEQ ID NO: 1055315 - RNA, 19 nt, Homo sapiens
  misc_RNA (1)...(19): siRNA sense strand
ucucaaagcucagcccuua

SEQ ID NO: 1055316 - RNA, 19 nt, Homo sapiens
  misc_RNA (1)...(19): siRNA sense strand
gaguaugacuuauuuggaa

SEQ ID NO: 1055317 - RNA, 19 nt, Homo sapiens
  misc_RNA (1)...(19): siRNA sense strand
gagaaacccuaugaaugua

SEQ ID NO: 1055318 - RNA, 19 nt, Homo sapiens
  misc_RNA (1)...(19): siRNA sense strand
gagagaagcccuaugaaug

SEQ ID NO: 1055319 - RNA, 19 nt, Homo sapiens
  misc_RNA (1)...(19): siRNA sense strand
gauggaggaagaaguauua

SEQ ID NO: 1055320 - RNA, 19 nt, Homo sapiens
  misc_RNA (1)...(19): siRNA sense strand
ggaaaagccuucucucaaa

SEQ ID NO: 1055321 - RNA, 19 nt, Homo sapiens
  misc_RNA (1)...(19): siRNA sense strand
gagaaacccuucgacugua

SEQ ID NO: 1055322 - RNA, 19 nt, Homo sapiens
  misc_RNA (1)...(19): siRNA sense strand
ggaaaagccuucucucaaa

SEQ ID NO: 1055323 - RNA, 19 nt, Homo sapiens
  misc_RNA (1)...(19): siRNA sense strand
gguaaagccuucccucgaa

SEQ ID NO: 1055324 - RNA, 19 nt, Homo sapiens
  misc_RNA (1)...(19): siRNA sense strand
ggagcagucuuacaaaugu

SEQ ID NO: 1055325 - RNA, 19 nt, Homo sapiens
  misc_RNA (1)...(19): siRNA sense strand
gagaagcccuaugaaugua

SEQ ID NO: 1055326 - RNA, 19 nt, Homo sapiens
  misc_RNA (1)...(19): siRNA sense strand
gagaagcccuauguaugua

SEQ ID NO: 1055327 - RNA, 19 nt, Homo sapiens
  misc_RNA (1)...(19): siRNA sense strand
ggaaaagccuuaugaaugu

SEQ ID NO: 1055328 - RNA, 19 nt, Homo sapiens
  misc_RNA (1)...(19): siRNA sense strand
agagaaaccuuaugauugu

SEQ ID NO: 1055329 - RNA, 19 nt, Homo sapiens
  misc_RNA (1)...(19): siRNA sense strand
gagagaaaccuuaugaaug

SEQ ID NO: 1055330 - RNA, 19 nt, Homo sapiens
  misc_RNA (1)...(19): siRNA sense strand
agagaaaccuuaugagugu

SEQ ID NO: 1055331 - RNA, 19 nt, Homo sapiens
  misc_RNA (1)...(19): siRNA sense strand
gagaagcccuaugcaugua

SEQ ID NO: 1055332 - RNA, 19 nt, Homo sapiens
  misc_RNA (1)...(19): siRNA sense strand
gcucaucccuuacuauaca

SEQ ID NO: 1055333 - RNA, 19 nt, Homo sapiens
  misc_RNA (1)...(19): siRNA sense strand
gagagaaacccuaugaaug

SEQ ID NO: 1055334 - RNA, 19 nt, Homo sapiens
  misc_RNA (1)...(19): siRNA sense strand
agccagaaaucaaaucuua

SEQ ID NO: 1055335 - RNA, 19 nt, Homo sapiens
  misc_RNA (1)...(19): siRNA sense strand
ugagacaaguugaaguuaa

SEQ ID NO: 1055336 - RNA, 19 nt, Homo sapiens
  misc_RNA (1)...(19): siRNA sense strand
gaaaucauaugguaauagc

SEQ ID NO: 1055337 - RNA, 19 nt, Homo sapiens
  misc_RNA (1)...(19): siRNA sense strand
ggagagaaaccuuaugaau

SEQ ID NO: 1055338 - RNA, 19 nt, Homo sapiens
  misc_RNA (1)...(19): siRNA sense strand
gaacaguaacauucaaaga

SEQ ID NO: 1055339 - RNA, 19 nt, Homo sapiens
  misc_RNA (1)...(19): siRNA sense strand
gguaaagccuucucucagu

SEQ ID NO: 1055340 - RNA, 19 nt, Homo sapiens
  misc_RNA (1)...(19): siRNA sense strand
gaaaucaaaucucauugcu

SEQ ID NO: 1055341 - RNA, 19 nt, Homo sapiens
  misc_RNA (1)...(19): siRNA sense strand
gaugucaaaucuuguuaga

SEQ ID NO: 1055342 - RNA, 19 nt, Homo sapiens
  misc_RNA (1)...(19): siRNA sense strand
guaaagccuucucucaguu

SEQ ID NO: 1055343 - RNA, 19 nt, Homo sapiens
  misc_RNA (1)...(19): siRNA sense strand
gguaaagccuucucucagu

SEQ ID NO: 1055344 - RNA, 19 nt, Homo sapiens
  misc_RNA (1)...(19): siRNA sense strand
aaaggagcauugugaauau

SEQ ID NO: 1055345 - RNA, 19 nt, Homo sapiens
  misc_RNA (1)...(19): siRNA sense strand
ggaaaagccuucucccaaa

SEQ ID NO: 1055346 - RNA, 19 nt, Homo sapiens
  misc_RNA (1)...(19): siRNA sense strand
guaaagccuucucucaaau

SEQ ID NO: 1055347 - RNA, 19 nt, Homo sapiens
  misc_RNA (1)...(19): siRNA sense strand
ggagagaaacccuaugaau

SEQ ID NO: 1055348 - RNA, 19 nt, Homo sapiens
  misc_RNA (1)...(19): siRNA sense strand
uaaugaaccugugaaauca

SEQ ID NO: 1055349 - RNA, 19 nt, Homo sapiens
  misc_RNA (1)...(19): siRNA sense strand
ggaaagccuucucucaaag

SEQ ID NO: 1055350 - RNA, 19 nt, Homo sapiens
  misc_RNA (1)...(19): siRNA sense strand
ugagaaacccuaugaaugu

SEQ ID NO: 1055351 - RNA, 19 nt, Homo sapiens
  misc_RNA (1)...(19): siRNA sense strand
caaauuggagcaagaagaa

SEQ ID NO: 1055352 - RNA, 19 nt, Homo sapiens
  misc_RNA (1)...(19): siRNA sense strand
aaugugaaaugccuuauga

SEQ ID NO: 1055353 - RNA, 19 nt, Homo sapiens
  misc_RNA (1)...(19): siRNA sense strand
ggagagaagcccuaugaau

SEQ ID NO: 1055354 - RNA, 19 nt, Homo sapiens
  misc_RNA (1)...(19): siRNA sense strand
ccugugaaaucauauggua

SEQ ID NO: 1055355 - RNA, 19 nt, Homo sapiens
  misc_RNA (1)...(19): siRNA sense strand
ucaaagauguggcuaucga

SEQ ID NO: 1055356 - RNA, 19 nt, Homo sapiens
  misc_RNA (1)...(19): siRNA sense strand
gcucacugcuuaauuuaca

SEQ ID NO: 1055357 - RNA, 19 nt, Homo sapiens
  misc_RNA (1)...(19): siRNA sense strand
gagaaaccuuaugaaugua

SEQ ID NO: 1055358 - RNA, 19 nt, Homo sapiens
  misc_RNA (1)...(19): siRNA sense strand
caaagcucaucccuuacua

SEQ ID NO: 1055359 - RNA, 19 nt, Homo sapiens
  misc_RNA (1)...(19): siRNA sense strand
gagaaaccuuaugauugua

SEQ ID NO: 1055360 - RNA, 19 nt, Homo sapiens
  misc_RNA (1)...(19): siRNA sense strand
gaaacccuaugaaugcaau

SEQ ID NO: 1055361 - RNA, 19 nt, Homo sapiens
  misc_RNA (1)...(19): siRNA sense strand
guagggagcagucuuacaa

SEQ ID NO: 1055362 - RNA, 19 nt, Homo sapiens
  misc_RNA (1)...(19): siRNA sense strand
ucucaaagaacuucccuua

SEQ ID NO: 1055363 - RNA, 19 nt, Homo sapiens
  misc_RNA (1)...(19): siRNA sense strand
acaguaacauucaaagaug

SEQ ID NO: 1055364 - RNA, 19 nt, Homo sapiens
  misc_RNA (1)...(19): siRNA sense strand
ccagaaaucaaaucucauu

SEQ ID NO: 1055365 - RNA, 19 nt, Homo sapiens
  misc_RNA (1)...(19): siRNA sense strand
gcucagcccuuacuguaca

SEQ ID NO: 1055366 - RNA, 19 nt, Homo sapiens
  misc_RNA (1)...(19): siRNA sense strand
ucucuuacccuucauauga

SEQ ID NO: 1055367 - RNA, 19 nt, Homo sapiens
  misc_RNA (1)...(19): siRNA sense strand
gaagcccuaucacuguauu

SEQ ID NO: 1055368 - RNA, 19 nt, Homo sapiens
  misc_RNA (1)...(19): siRNA sense strand
ggugauggaggaagaagua

SEQ ID NO: 1055369 - RNA, 19 nt, Homo sapiens
  misc_RNA (1)...(19): siRNA sense strand
gagaauucauacucauuag

SEQ ID NO: 1055370 - RNA, 19 nt, Homo sapiens
  misc_RNA (1)...(19): siRNA sense strand
gagaaaccuuaugcaugua

SEQ ID NO: 1055371 - RNA, 19 nt, Homo sapiens
  misc_RNA (1)...(19): siRNA sense strand
ugagaaaggagcauuguga

SEQ ID NO: 1055372 - RNA, 19 nt, Homo sapiens
  misc_RNA (1)...(19): siRNA sense strand
gaaagccuucucucaaaga

SEQ ID NO: 1055373 - RNA, 19 nt, Homo sapiens
  misc_RNA (1)...(19): siRNA sense strand
ggaaugugaugcuagaaaa

SEQ ID NO: 1055374 - RNA, 19 nt, Homo sapiens
  misc_RNA (1)...(19): siRNA sense strand
gagaagucauacaggagaa

SEQ ID NO: 1055375 - RNA, 19 nt, Homo sapiens
  misc_RNA (1)...(19): siRNA sense strand
gaauauaaugaaccuguga

SEQ ID NO: 1055376 - RNA, 19 nt, Homo sapiens
  misc_RNA (1)...(19): siRNA sense strand
gaaaagccuucucucaaau

SEQ ID NO: 1055377 - RNA, 19 nt, Homo sapiens
  misc_RNA (1)...(19): siRNA sense strand
gcacaucagaaaguucaua

SEQ ID NO: 1055378 - RNA, 19 nt, Homo sapiens
  misc_RNA (1)...(19): siRNA sense strand
agacaucugagaauucaua

SEQ ID NO: 1055379 - RNA, 19 nt, Homo sapiens
  misc_RNA (1)...(19): siRNA sense strand
guaaagccuucccucgaau

SEQ ID NO: 1055380 - RNA, 19 nt, Homo sapiens
  misc_RNA (1)...(19): siRNA sense strand
gaauguaguaacuguagaa

SEQ ID NO: 1055381 - RNA, 19 nt, Homo sapiens
  misc_RNA (1)...(19): siRNA sense strand
gagaaaggagcauugugaa

SEQ ID NO: 1055382 - RNA, 19 nt, Homo sapiens
  misc_RNA (1)...(19): siRNA sense strand
ugagaaacccuucgacugu

SEQ ID NO: 1055383 - RNA, 19 nt, Homo sapiens
  misc_RNA (1)...(19): siRNA sense strand
gaaacccuaugaauguaag

SEQ ID NO: 1055384 - RNA, 19 nt, Homo sapiens
  misc_RNA (1)...(19): siRNA sense strand
guacauaugagaagucaca

SEQ ID NO: 1055385 - RNA, 19 nt, Homo sapiens
  misc_RNA (1)...(19): siRNA sense strand
ggaggaagaaguauuaagg

SEQ ID NO: 1055386 - RNA, 19 nt, Homo sapiens
  misc_RNA (1)...(19): siRNA sense strand
ugagaagcccuauguaugu

SEQ ID NO: 1055387 - RNA, 19 nt, Homo sapiens
  misc_RNA (1)...(19): siRNA sense strand
ggugagaagcccuauguau

SEQ ID NO: 1055388 - RNA, 19 nt, Homo sapiens
  misc_RNA (1)...(19): siRNA sense strand
gugagaaacccuaugaaug

SEQ ID NO: 1055389 - RNA, 19 nt, Homo sapiens
  misc_RNA (1)...(19): siRNA sense strand
caucaaagaauucauacug

SEQ ID NO: 1055390 - RNA, 19 nt, Homo sapiens
  misc_RNA (1)...(19): siRNA sense strand
gugguaaagcuuucauuaa

SEQ ID NO: 1055391 - RNA, 19 nt, Homo sapiens
  misc_RNA (1)...(19): siRNA sense strand
gugaaaugccuuaugagaa

SEQ ID NO: 1055392 - RNA, 19 nt, Homo sapiens
  misc_RNA (1)...(19): siRNA sense strand
gaagcccuauguauguaau

SEQ ID NO: 1055393 - RNA, 19 nt, Homo sapiens
  misc_RNA (1)...(19): siRNA sense strand
gugagaagcccuauguaug

SEQ ID NO: 1055394 - RNA, 19 nt, Homo sapiens
  misc_RNA (1)...(19): siRNA sense strand
gagaaaccuuaugagugua

SEQ ID NO: 1055395 - RNA, 19 nt, Homo sapiens
  misc_RNA (1)...(19): siRNA sense strand
cuagagagaaaccuuauga

SEQ ID NO: 1055396 - RNA, 19 nt, Homo sapiens
  misc_RNA (1)...(19): siRNA sense strand
gagcgaggccagcaccuuu

SEQ ID NO: 1055397 - RNA, 19 nt, Homo sapiens
  misc_RNA (1)...(19): siRNA sense strand
ccaaguggaccguggauga

SEQ ID NO: 1055398 - RNA, 19 nt, Homo sapiens
  misc_RNA (1)...(19): siRNA sense strand
gaccuuggcucuacuucca

SEQ ID NO: 1055399 - RNA, 19 nt, Homo sapiens
  misc_RNA (1)...(19): siRNA sense strand
gacccacccuggcaugauc

SEQ ID NO: 1055400 - RNA, 19 nt, Homo sapiens
  misc_RNA (1)...(19): siRNA sense strand
gaaugggaccuuggcucua

SEQ ID NO: 1055401 - RNA, 19 nt, Homo sapiens
  misc_RNA (1)...(19): siRNA sense strand
gcuaggcucugggcacaag

SEQ ID NO: 1055402 - RNA, 19 nt, Homo sapiens
  misc_RNA (1)...(19): siRNA sense strand
cugaggacgucaccaagug

SEQ ID NO: 1055403 - RNA, 19 nt, Homo sapiens
  misc_RNA (1)...(19): siRNA sense strand
cacaagauggcucggaaga

SEQ ID NO: 1055404 - RNA, 19 nt, Homo sapiens
  misc_RNA (1)...(19): siRNA sense strand
caggagagcagcccuuguc

SEQ ID NO: 1055405 - RNA, 19 nt, Homo sapiens
  misc_RNA (1)...(19): siRNA sense strand
gcgaggccagcaccuuuga

SEQ ID NO: 1055406 - RNA, 19 nt, Homo sapiens
  misc_RNA (1)...(19): siRNA sense strand
gcccuugccggucaaacuu

SEQ ID NO: 1055407 - RNA, 19 nt, Homo sapiens
  misc_RNA (1)...(19): siRNA sense strand
gaaagugauuggugacaaa

SEQ ID NO: 1055408 - RNA, 19 nt, Homo sapiens
  misc_RNA (1)...(19): siRNA sense strand
gaacagaacccuacauaag

SEQ ID NO: 1055409 - RNA, 19 nt, Homo sapiens
  misc_RNA (1)...(19): siRNA sense strand
cauuauggcuucauguauu

SEQ ID NO: 1055410 - RNA, 19 nt, Homo sapiens
  misc_RNA (1)...(19): siRNA sense strand
gugcgucccuguaugcaua

SEQ ID NO: 1055411 - RNA, 19 nt, Homo sapiens
  misc_RNA (1)...(19): siRNA sense strand
uggcauacauugggaauuu

SEQ ID NO: 1055412 - RNA, 19 nt, Homo sapiens
  misc_RNA (1)...(19): siRNA sense strand
ggaaagugauuggugacaa

SEQ ID NO: 1055413 - RNA, 19 nt, Homo sapiens
  misc_RNA (1)...(19): siRNA sense strand
aaagucaucucucacauca

SEQ ID NO: 1055414 - RNA, 19 nt, Homo sapiens
  misc_RNA (1)...(19): siRNA sense strand
ggaacagaacccuacauaa

SEQ ID NO: 1055415 - RNA, 19 nt, Homo sapiens
  misc_RNA (1)...(19): siRNA sense strand
caggcuaccucauuucuga

SEQ ID NO: 1055416 - RNA, 19 nt, Homo sapiens
  misc_RNA (1)...(19): siRNA sense strand
cauacuaccuuguacugaa

SEQ ID NO: 1055417 - RNA, 19 nt, Homo sapiens
  misc_RNA (1)...(19): siRNA sense strand
cuaaagcuaucguuaucaa

SEQ ID NO: 1055418 - RNA, 19 nt, Homo sapiens
  misc_RNA (1)...(19): siRNA sense strand
gcaucaaagucaucucuca

SEQ ID NO: 1055419 - RNA, 19 nt, Homo sapiens
  misc_RNA (1)...(19): siRNA sense strand
ggucauuaguuguguuguu

SEQ ID NO: 1055420 - RNA, 19 nt, Homo sapiens
  misc_RNA (1)...(19): siRNA sense strand
agugauuggugacaaauuu

SEQ ID NO: 1055421 - RNA, 19 nt, Homo sapiens
  misc_RNA (1)...(19): siRNA sense strand
gucauuaguuguguuguuu

SEQ ID NO: 1055422 - RNA, 19 nt, Homo sapiens
  misc_RNA (1)...(19): siRNA sense strand
ucugaaguaucccaaguuu

SEQ ID NO: 1055423 - RNA, 19 nt, Homo sapiens
  misc_RNA (1)...(19): siRNA sense strand
aaucagcggugguucuuug

SEQ ID NO: 1055424 - RNA, 19 nt, Homo sapiens
  misc_RNA (1)...(19): siRNA sense strand
uacuaaagcugauccacuu

SEQ ID NO: 1055425 - RNA, 19 nt, Homo sapiens
  misc_RNA (1)...(19): siRNA sense strand
agucaucucucacaucaga

SEQ ID NO: 1055426 - RNA, 19 nt, Homo sapiens
  misc_RNA (1)...(19): siRNA sense strand
uauccugggucauuaguug

SEQ ID NO: 1055427 - RNA, 19 nt, Homo sapiens
  misc_RNA (1)...(19): siRNA sense strand
ucaauagucucagcuucaa

SEQ ID NO: 1055428 - RNA, 19 nt, Homo sapiens
  misc_RNA (1)...(19): siRNA sense strand
cuucauguauuccguguau

SEQ ID NO: 1055429 - RNA, 19 nt, Homo sapiens
  misc_RNA (1)...(19): siRNA sense strand
cauaaggcuuggaguuuua

SEQ ID NO: 1055430 - RNA, 19 nt, Homo sapiens
  misc_RNA (1)...(19): siRNA sense strand
gcucugaaguaucccaagu

SEQ ID NO: 1055431 - RNA, 19 nt, Homo sapiens
  misc_RNA (1)...(19): siRNA sense strand
ucacaucagacaagagaaa

SEQ ID NO: 1055432 - RNA, 19 nt, Homo sapiens
  misc_RNA (1)...(19): siRNA sense strand
gcaaaaguuuccccagguu

SEQ ID NO: 1055433 - RNA, 19 nt, Homo sapiens
  misc_RNA (1)...(19): siRNA sense strand
caguuauccugggucauua

SEQ ID NO: 1055434 - RNA, 19 nt, Homo sapiens
  misc_RNA (1)...(19): siRNA sense strand
uggaacagaacccuacaua

SEQ ID NO: 1055435 - RNA, 19 nt, Homo sapiens
  misc_RNA (1)...(19): siRNA sense strand
ggagugcuggcauacauug

SEQ ID NO: 1055436 - RNA, 19 nt, Homo sapiens
  misc_RNA (1)...(19): siRNA sense strand
gcuaccucauuucugauuu

SEQ ID NO: 1055437 - RNA, 19 nt, Homo sapiens
  misc_RNA (1)...(19): siRNA sense strand
gaagauugaauggaacuca

SEQ ID NO: 1055438 - RNA, 19 nt, Homo sapiens
  misc_RNA (1)...(19): siRNA sense strand
cuacauaaggcuuggaguu

SEQ ID NO: 1055439 - RNA, 19 nt, Homo sapiens
  misc_RNA (1)...(19): siRNA sense strand
auacuaccuuguacugaaa

SEQ ID NO: 1055440 - RNA, 19 nt, Homo sapiens
  misc_RNA (1)...(19): siRNA sense strand
cuaccucauuucugauuug

SEQ ID NO: 1055441 - RNA, 19 nt, Homo sapiens
  misc_RNA (1)...(19): siRNA sense strand
aaaauagucuucagaaugg

SEQ ID NO: 1055442 - RNA, 19 nt, Homo sapiens
  misc_RNA (1)...(19): siRNA sense strand
ggugguccaucacuugcaa

SEQ ID NO: 1055443 - RNA, 19 nt, Homo sapiens
  misc_RNA (1)...(19): siRNA sense strand
aaagcuaucguuaucaaug

SEQ ID NO: 1055444 - RNA, 19 nt, Homo sapiens
  misc_RNA (1)...(19): siRNA sense strand
aaaauggagugcuggcaua

SEQ ID NO: 1055445 - RNA, 19 nt, Homo sapiens
  misc_RNA (1)...(19): siRNA sense strand
caaggguaguauccacaug

SEQ ID NO: 1055446 - RNA, 19 nt, Homo sapiens
  misc_RNA (1)...(19): siRNA sense strand
ucaaagucaucucucacau

SEQ ID NO: 1055447 - RNA, 19 nt, Homo sapiens
  misc_RNA (1)...(19): siRNA sense strand
uacauaaggcuuggaguuu

SEQ ID NO: 1055448 - RNA, 19 nt, Homo sapiens
  misc_RNA (1)...(19): siRNA sense strand
cuuugaagcucugaaguau

SEQ ID NO: 1055449 - RNA, 19 nt, Homo sapiens
  misc_RNA (1)...(19): siRNA sense strand
guccaucacuugcaaacgu

SEQ ID NO: 1055450 - RNA, 19 nt, Homo sapiens
  misc_RNA (1)...(19): siRNA sense strand
gaacucaaggguaguaucc

SEQ ID NO: 1055451 - RNA, 19 nt, Homo sapiens
  misc_RNA (1)...(19): siRNA sense strand
gacaguaguauucuucauc

SEQ ID NO: 1055452 - RNA, 19 nt, Homo sapiens
  misc_RNA (1)...(19): siRNA sense strand
caaagucaucucucacauc

SEQ ID NO: 1055453 - RNA, 19 nt, Homo sapiens
  misc_RNA (1)...(19): siRNA sense strand
ccacaugccauucuuuggu

SEQ ID NO: 1055454 - RNA, 19 nt, Homo sapiens
  misc_RNA (1)...(19): siRNA sense strand
cagcggugguucuuugaag

SEQ ID NO: 1055455 - RNA, 19 nt, Homo sapiens
  misc_RNA (1)...(19): siRNA sense strand
ccagcccguuugugaauca

SEQ ID NO: 1055456 - RNA, 19 nt, Homo sapiens
  misc_RNA (1)...(19): siRNA sense strand
ucaucaguguuaccuguau

SEQ ID NO: 1055457 - RNA, 19 nt, Homo sapiens
  misc_RNA (1)...(19): siRNA sense strand
cgaugaggcuacuaaagcu

SEQ ID NO: 1055458 - RNA, 19 nt, Homo sapiens
  misc_RNA (1)...(19): siRNA sense strand
caaacgugaauauugcuau

SEQ ID NO: 1055459 - RNA, 19 nt, Homo sapiens
  misc_RNA (1)...(19): siRNA sense strand
gcauacuaccuuguacuga

SEQ ID NO: 1055460 - RNA, 19 nt, Homo sapiens
  misc_RNA (1)...(19): siRNA sense strand
aaagguugcaucaaaguca

SEQ ID NO: 1055461 - RNA, 19 nt, Homo sapiens
  misc_RNA (1)...(19): siRNA sense strand
acucaugacaguaguauuc

SEQ ID NO: 1055462 - RNA, 19 nt, Homo sapiens
  misc_RNA (1)...(19): siRNA sense strand
guauccacaugccauucuu

SEQ ID NO: 1055463 - RNA, 19 nt, Homo sapiens
  misc_RNA (1)...(19): siRNA sense strand
ucuuugaagcucugaagua

SEQ ID NO: 1055464 - RNA, 19 nt, Homo sapiens
  misc_RNA (1)...(19): siRNA sense strand
gagcuuuccagcccguuug

SEQ ID NO: 1055465 - RNA, 19 nt, Homo sapiens
  misc_RNA (1)...(19): siRNA sense strand
ugacaguaguauucuucau

SEQ ID NO: 1055466 - RNA, 19 nt, Homo sapiens
  misc_RNA (1)...(19): siRNA sense strand
ugaaguaucccaaguuuuc

SEQ ID NO: 1055467 - RNA, 19 nt, Homo sapiens
  misc_RNA (1)...(19): siRNA sense strand
guaguauccacaugccauu

SEQ ID NO: 1055468 - RNA, 19 nt, Homo sapiens
  misc_RNA (1)...(19): siRNA sense strand
aagcuaucguuaucaaugg

SEQ ID NO: 1055469 - RNA, 19 nt, Homo sapiens
  misc_RNA (1)...(19): siRNA sense strand
caugacaguaguauucuuc

SEQ ID NO: 1055470 - RNA, 19 nt, Homo sapiens
  misc_RNA (1)...(19): siRNA sense strand
gaaucagcggugguucuuu

SEQ ID NO: 1055471 - RNA, 19 nt, Homo sapiens
  misc_RNA (1)...(19): siRNA sense strand
ucaaaagguugcaucaaag

SEQ ID NO: 1055472 - RNA, 19 nt, Homo sapiens
  misc_RNA (1)...(19): siRNA sense strand
uucaaaagguugcaucaaa

SEQ ID NO: 1055473 - RNA, 19 nt, Homo sapiens
  misc_RNA (1)...(19): siRNA sense strand
uugaagcucugaaguaucc

SEQ ID NO: 1055474 - RNA, 19 nt, Homo sapiens
  misc_RNA (1)...(19): siRNA sense strand
cuugcaaacgugaauauug

SEQ ID NO: 1055475 - RNA, 19 nt, Homo sapiens
  misc_RNA (1)...(19): siRNA sense strand
cagacaagagaaagccaaa

SEQ ID NO: 1055476 - RNA, 19 nt, Homo sapiens
  misc_RNA (1)...(19): siRNA sense strand
ucaugacaguaguauucuu

SEQ ID NO: 1055477 - RNA, 19 nt, Homo sapiens
  misc_RNA (1)...(19): siRNA sense strand
caucaguguuaccuguauc

SEQ ID NO: 1055478 - RNA, 19 nt, Homo sapiens
  misc_RNA (1)...(19): siRNA sense strand
ucucucacaucagacaaga

SEQ ID NO: 1055479 - RNA, 19 nt, Homo sapiens
  misc_RNA (1)...(19): siRNA sense strand
acauaaggcuuggaguuuu

SEQ ID NO: 1055480 - RNA, 19 nt, Homo sapiens
  misc_RNA (1)...(19): siRNA sense strand
ucauuauggcuucauguau

SEQ ID NO: 1055481 - RNA, 19 nt, Homo sapiens
  misc_RNA (1)...(19): siRNA sense strand
ucaauggaauacucaugac

SEQ ID NO: 1055482 - RNA, 19 nt, Homo sapiens
  misc_RNA (1)...(19): siRNA sense strand
uucuaaagcuaucguuauc

SEQ ID NO: 1055483 - RNA, 19 nt, Homo sapiens
  misc_RNA (1)...(19): siRNA sense strand
acacaaaacugcucaucag

SEQ ID NO: 1055484 - RNA, 19 nt, Homo sapiens
  misc_RNA (1)...(19): siRNA sense strand
ugaaucagcggugguucuu

SEQ ID NO: 1055485 - RNA, 19 nt, Homo sapiens
  misc_RNA (1)...(19): siRNA sense strand
auuauggcuucauguauuc

SEQ ID NO: 1055486 - RNA, 19 nt, Homo sapiens
  misc_RNA (1)...(19): siRNA sense strand
ggaacucaaggguaguauc

SEQ ID NO: 1055487 - RNA, 19 nt, Homo sapiens
  misc_RNA (1)...(19): siRNA sense strand
cguuaucaauggaauacuc

SEQ ID NO: 1055488 - RNA, 19 nt, Homo sapiens
  misc_RNA (1)...(19): siRNA sense strand
ccaaccagcugaagaaaua

SEQ ID NO: 1055489 - RNA, 19 nt, Homo sapiens
  misc_RNA (1)...(19): siRNA sense strand
ggaaugugcugucacuugu

SEQ ID NO: 1055490 - RNA, 19 nt, Homo sapiens
  misc_RNA (1)...(19): siRNA sense strand
gcugucacuuguucaaaua

SEQ ID NO: 1055491 - RNA, 19 nt, Homo sapiens
  misc_RNA (1)...(19): siRNA sense strand
ccagagaggugcagaagac

SEQ ID NO: 1055492 - RNA, 19 nt, Homo sapiens
  misc_RNA (1)...(19): siRNA sense strand
gcagaagacugaagaaaag

SEQ ID NO: 1055493 - RNA, 19 nt, Homo sapiens
  misc_RNA (1)...(19): siRNA sense strand
ggaggaaugugcugucacu

SEQ ID NO: 1055494 - RNA, 19 nt, Homo sapiens
  misc_RNA (1)...(19): siRNA sense strand
gaagaaauacaagugugaa

SEQ ID NO: 1055495 - RNA, 19 nt, Homo sapiens
  misc_RNA (1)...(19): siRNA sense strand
gaaauacaagugugaagag

SEQ ID NO: 1055496 - RNA, 19 nt, Homo sapiens
  misc_RNA (1)...(19): siRNA sense strand
cgacucugcucugguugua

SEQ ID NO: 1055497 - RNA, 19 nt, Homo sapiens
  misc_RNA (1)...(19): siRNA sense strand
gagaggugcagaagacuga

SEQ ID NO: 1055498 - RNA, 19 nt, Homo sapiens
  misc_RNA (1)...(19): siRNA sense strand
gagaaauuccuuauaacuc

SEQ ID NO: 1055499 - RNA, 19 nt, Homo sapiens
  misc_RNA (1)...(19): siRNA sense strand
uccgagaccucaaagagaa

SEQ ID NO: 1055500 - RNA, 19 nt, Homo sapiens
  misc_RNA (1)...(19): siRNA sense strand
gaacauccuagaaaucaac

SEQ ID NO: 1055501 - RNA, 19 nt, Homo sapiens
  misc_RNA (1)...(19): siRNA sense strand
ugaagaaauacaaguguga

SEQ ID NO: 1055502 - RNA, 19 nt, Homo sapiens
  misc_RNA (1)...(19): siRNA sense strand
gcaguuccgagaccucaaa

SEQ ID NO: 1055503 - RNA, 19 nt, Homo sapiens
  misc_RNA (1)...(19): siRNA sense strand
agaaaucaaccaggaauug

SEQ ID NO: 1055504 - RNA, 19 nt, Homo sapiens
  misc_RNA (1)...(19): siRNA sense strand
auacaagugugaagaguac

SEQ ID NO: 1055505 - RNA, 19 nt, Homo sapiens
  misc_RNA (1)...(19): siRNA sense strand
gaaaucaaccaggaauugc

SEQ ID NO: 1055506 - RNA, 19 nt, Homo sapiens
  misc_RNA (1)...(19): siRNA sense strand
agucgacucugcucugguu

SEQ ID NO: 1055507 - RNA, 19 nt, Homo sapiens
  misc_RNA (1)...(19): siRNA sense strand
ugaacauccuagaaaucaa

SEQ ID NO: 1055508 - RNA, 19 nt, Homo sapiens
  misc_RNA (1)...(19): siRNA sense strand
agagagcaaucagcaguuc

SEQ ID NO: 1055509 - RNA, 19 nt, Homo sapiens
  misc_RNA (1)...(19): siRNA sense strand
agaaauacaagugugaaga

SEQ ID NO: 1055510 - RNA, 19 nt, Homo sapiens
  misc_RNA (1)...(19): siRNA sense strand
ccuuauaacucaagcuacu

SEQ ID NO: 1055511 - RNA, 19 nt, Homo sapiens
  misc_RNA (1)...(19): siRNA sense strand
gcugaagaaauacaagugu

SEQ ID NO: 1055512 - RNA, 19 nt, Homo sapiens
  misc_RNA (1)...(19): siRNA sense strand
aaugugcugucacuuguuc

SEQ ID NO: 1055513 - RNA, 19 nt, Homo sapiens
  misc_RNA (1)...(19): siRNA sense strand
gugcagaagacugaagaaa

SEQ ID NO: 1055514 - RNA, 19 nt, Homo sapiens
  misc_RNA (1)...(19): siRNA sense strand
ccucaaagagaaauuccuu

SEQ ID NO: 1055515 - RNA, 19 nt, Homo sapiens
  misc_RNA (1)...(19): siRNA sense strand
gcgagagggcagagaugaa

SEQ ID NO: 1055516 - RNA, 19 nt, Homo sapiens
  misc_RNA (1)...(19): siRNA sense strand
ggaacacgaagucgacucu

SEQ ID NO: 1055517 - RNA, 19 nt, Homo sapiens
  misc_RNA (1)...(19): siRNA sense strand
gaaugugcugucacuuguu

SEQ ID NO: 1055518 - RNA, 19 nt, Homo sapiens
  misc_RNA (1)...(19): siRNA sense strand
aaauacaagugugaagagu

SEQ ID NO: 1055519 - RNA, 19 nt, Homo sapiens
  misc_RNA (1)...(19): siRNA sense strand
gguaucugccgacccuuug

SEQ ID NO: 1055520 - RNA, 19 nt, Homo sapiens
  misc_RNA (1)...(19): siRNA sense strand
gugaagaguacaggaauca

SEQ ID NO: 1055521 - RNA, 19 nt, Homo sapiens
  misc_RNA (1)...(19): siRNA sense strand
aauacaagugugaagagua

SEQ ID NO: 1055522 - RNA, 19 nt, Homo sapiens
  misc_RNA (1)...(19): siRNA sense strand
cuagaaaucaaccaggaau

SEQ ID NO: 1055523 - RNA, 19 nt, Homo sapiens
  misc_RNA (1)...(19): siRNA sense strand
aggacucacuggaggaaug

SEQ ID NO: 1055524 - RNA, 19 nt, Homo sapiens
  misc_RNA (1)...(19): siRNA sense strand
uagaaaucaaccaggaauu

SEQ ID NO: 1055525 - RNA, 19 nt, Homo sapiens
  misc_RNA (1)...(19): siRNA sense strand
ggacucacuggaggaaugu

SEQ ID NO: 1055526 - RNA, 19 nt, Homo sapiens
  misc_RNA (1)...(19): siRNA sense strand
aggaaugugcugucacuug

SEQ ID NO: 1055527 - RNA, 19 nt, Homo sapiens
  misc_RNA (1)...(19): siRNA sense strand
gaacugaaauaggcaaaua

SEQ ID NO: 1055528 - RNA, 19 nt, Homo sapiens
  misc_RNA (1)...(19): siRNA sense strand
gaacagcaaugaccucaaa

SEQ ID NO: 1055529 - RNA, 19 nt, Homo sapiens
  misc_RNA (1)...(19): siRNA sense strand
ugagauaucuggaacaauu

SEQ ID NO: 1055530 - RNA, 19 nt, Homo sapiens
  misc_RNA (1)...(19): siRNA sense strand
ccaaaucaguguuguaauu

SEQ ID NO: 1055531 - RNA, 19 nt, Homo sapiens
  misc_RNA (1)...(19): siRNA sense strand
gaacaauuccucauggaua

SEQ ID NO: 1055532 - RNA, 19 nt, Homo sapiens
  misc_RNA (1)...(19): siRNA sense strand
ggaaaggaaugaagcaguu

SEQ ID NO: 1055533 - RNA, 19 nt, Homo sapiens
  misc_RNA (1)...(19): siRNA sense strand
caucaaauuuggugacuuu

SEQ ID NO: 1055534 - RNA, 19 nt, Homo sapiens
  misc_RNA (1)...(19): siRNA sense strand
gaaaucacauugcuguuca

SEQ ID NO: 1055535 - RNA, 19 nt, Homo sapiens
  misc_RNA (1)...(19): siRNA sense strand
ggagcaagauaagauauuu

SEQ ID NO: 1055536 - RNA, 19 nt, Homo sapiens
  misc_RNA (1)...(19): siRNA sense strand
guaaagguauccccuauua

SEQ ID NO: 1055537 - RNA, 19 nt, Homo sapiens
  misc_RNA (1)...(19): siRNA sense strand
ggagauccguguaaagaug

SEQ ID NO: 1055538 - RNA, 19 nt, Homo sapiens
  misc_RNA (1)...(19): siRNA sense strand
gaugucaguuuauuccuaa

SEQ ID NO: 1055539 - RNA, 19 nt, Homo sapiens
  misc_RNA (1)...(19): siRNA sense strand
ugaaggcaccuaugacuua

SEQ ID NO: 1055540 - RNA, 19 nt, Homo sapiens
  misc_RNA (1)...(19): siRNA sense strand
uaccguaacuccaaaugua

SEQ ID NO: 1055541 - RNA, 19 nt, Homo sapiens
  misc_RNA (1)...(19): siRNA sense strand
gggcagaaauggacugugu

SEQ ID NO: 1055542 - RNA, 19 nt, Homo sapiens
  misc_RNA (1)...(19): siRNA sense strand
ccacagaccuaucccaaca

SEQ ID NO: 1055543 - RNA, 19 nt, Homo sapiens
  misc_RNA (1)...(19): siRNA sense strand
gcugaaccacucccaauua

SEQ ID NO: 1055544 - RNA, 19 nt, Homo sapiens
  misc_RNA (1)...(19): siRNA sense strand
caagagaagucaccacagu

SEQ ID NO: 1055545 - RNA, 19 nt, Homo sapiens
  misc_RNA (1)...(19): siRNA sense strand
gcaccuaugacuuaccuua

SEQ ID NO: 1055546 - RNA, 19 nt, Homo sapiens
  misc_RNA (1)...(19): siRNA sense strand
agagagaguucgcaucaaa

SEQ ID NO: 1055547 - RNA, 19 nt, Homo sapiens
  misc_RNA (1)...(19): siRNA sense strand
ggaugucaguuuauuccua

SEQ ID NO: 1055548 - RNA, 19 nt, Homo sapiens
  misc_RNA (1)...(19): siRNA sense strand
uaagacaaguggauguuau

SEQ ID NO: 1055549 - RNA, 19 nt, Homo sapiens
  misc_RNA (1)...(19): siRNA sense strand
ggaaguuuaucaugccuau

SEQ ID NO: 1055550 - RNA, 19 nt, Homo sapiens
  misc_RNA (1)...(19): siRNA sense strand
ggaugugcguaauaacuuu

SEQ ID NO: 1055551 - RNA, 19 nt, Homo sapiens
  misc_RNA (1)...(19): siRNA sense strand
ggagagagaguucgcauca

SEQ ID NO: 1055552 - RNA, 19 nt, Homo sapiens
  misc_RNA (1)...(19): siRNA sense strand
acaaguggauguuauggaa

SEQ ID NO: 1055553 - RNA, 19 nt, Homo sapiens
  misc_RNA (1)...(19): siRNA sense strand
gcagguugguggaaaggaa

SEQ ID NO: 1055554 - RNA, 19 nt, Homo sapiens
  misc_RNA (1)...(19): siRNA sense strand
ccucauggauauagagauu

SEQ ID NO: 1055555 - RNA, 19 nt, Homo sapiens
  misc_RNA (1)...(19): siRNA sense strand
gcucggaugucaguuuauu

SEQ ID NO: 1055556 - RNA, 19 nt, Homo sapiens
  misc_RNA (1)...(19): siRNA sense strand
gcagaaaauugccaugaaa

SEQ ID NO: 1055557 - RNA, 19 nt, Homo sapiens
  misc_RNA (1)...(19): siRNA sense strand
gcacagacagaacaaacaa

SEQ ID NO: 1055558 - RNA, 19 nt, Homo sapiens
  misc_RNA (1)...(19): siRNA sense strand
ggaauuggagucagcagaa

SEQ ID NO: 1055559 - RNA, 19 nt, Homo sapiens
  misc_RNA (1)...(19): siRNA sense strand
augcagaccuagauccuua

SEQ ID NO: 1055560 - RNA, 19 nt, Homo sapiens
  misc_RNA (1)...(19): siRNA sense strand
gauggagucuggugugauc

SEQ ID NO: 1055561 - RNA, 19 nt, Homo sapiens
  misc_RNA (1)...(19): siRNA sense strand
ugaaauaggcaaauacugu

SEQ ID NO: 1055562 - RNA, 19 nt, Homo sapiens
  misc_RNA (1)...(19): siRNA sense strand
ccacagagcacacaagaag

SEQ ID NO: 1055563 - RNA, 19 nt, Homo sapiens
  misc_RNA (1)...(19): siRNA sense strand
gcugagauaucuggaacaa

SEQ ID NO: 1055564 - RNA, 19 nt, Homo sapiens
  misc_RNA (1)...(19): siRNA sense strand
ucacauugcuguucaugag

SEQ ID NO: 1055565 - RNA, 19 nt, Homo sapiens
  misc_RNA (1)...(19): siRNA sense strand
gaacuuacaauacacuucu

SEQ ID NO: 1055566 - RNA, 19 nt, Homo sapiens
  misc_RNA (1)...(19): siRNA sense strand
aaacugaaggcaccuauga

SEQ ID NO: 1055567 - RNA, 19 nt, Homo sapiens
  misc_RNA (1)...(19): siRNA sense strand
ccagcaaggugauggaugu

SEQ ID NO: 1055568 - RNA, 19 nt, Homo sapiens
  misc_RNA (1)...(19): siRNA sense strand
gguccucacuacucucauu

SEQ ID NO: 1055569 - RNA, 19 nt, Homo sapiens
  misc_RNA (1)...(19): siRNA sense strand
caccagggcaggaaguuua

SEQ ID NO: 1055570 - RNA, 19 nt, Homo sapiens
  misc_RNA (1)...(19): siRNA sense strand
caaaagcaguggaccauga

SEQ ID NO: 1055571 - RNA, 19 nt, Homo sapiens
  misc_RNA (1)...(19): siRNA sense strand
gagcacacaagaaguauca

SEQ ID NO: 1055572 - RNA, 19 nt, Homo sapiens
  misc_RNA (1)...(19): siRNA sense strand
gugggacacuuaucuacaa

SEQ ID NO: 1055573 - RNA, 19 nt, Homo sapiens
  misc_RNA (1)...(19): siRNA sense strand
gaaaggaaugaagcaguuu

SEQ ID NO: 1055574 - RNA, 19 nt, Homo sapiens
  misc_RNA (1)...(19): siRNA sense strand
caaagauuaucaccaggau

SEQ ID NO: 1055575 - RNA, 19 nt, Homo sapiens
  misc_RNA (1)...(19): siRNA sense strand
gaaugggagauccguguaa

SEQ ID NO: 1055576 - RNA, 19 nt, Homo sapiens
  misc_RNA (1)...(19): siRNA sense strand
ucaaauaacagcaucaucu

SEQ ID NO: 1055577 - RNA, 19 nt, Homo sapiens
  misc_RNA (1)...(19): siRNA sense strand
ggccaaaucaguguuguaa

SEQ ID NO: 1055578 - RNA, 19 nt, Homo sapiens
  misc_RNA (1)...(19): siRNA sense strand
gcaagagaacaguuggaaa

SEQ ID NO: 1055579 - RNA, 19 nt, Homo sapiens
  misc_RNA (1)...(19): siRNA sense strand
acagagcacacaagaagua

SEQ ID NO: 1055580 - RNA, 19 nt, Homo sapiens
  misc_RNA (1)...(19): siRNA sense strand
uaaacuacccacagaccua

SEQ ID NO: 1055581 - RNA, 19 nt, Homo sapiens
  misc_RNA (1)...(19): siRNA sense strand
gagaguucgcaucaaauuu

SEQ ID NO: 1055582 - RNA, 19 nt, Homo sapiens
  misc_RNA (1)...(19): siRNA sense strand
ccacuacaaccucgcagua

SEQ ID NO: 1055583 - RNA, 19 nt, Homo sapiens
  misc_RNA (1)...(19): siRNA sense strand
gagugaauccuacccaaug

SEQ ID NO: 1055584 - RNA, 19 nt, Homo sapiens
  misc_RNA (1)...(19): siRNA sense strand
cuaacaacgucacaucugu

SEQ ID NO: 1055585 - RNA, 19 nt, Homo sapiens
  misc_RNA (1)...(19): siRNA sense strand
uauagcagcagcgaaguua

SEQ ID NO: 1055586 - RNA, 19 nt, Homo sapiens
  misc_RNA (1)...(19): siRNA sense strand
gcccaggcccaguaugaua

SEQ ID NO: 1055587 - RNA, 19 nt, Homo sapiens
  misc_RNA (1)...(19): siRNA sense strand
cauugaagauucugauucu

SEQ ID NO: 1055588 - RNA, 19 nt, Homo sapiens
  misc_RNA (1)...(19): siRNA sense strand
ugaauuuccugcacagaca

SEQ ID NO: 1055589 - RNA, 19 nt, Homo sapiens
  misc_RNA (1)...(19): siRNA sense strand
caaccucgcaguagcaaug

SEQ ID NO: 1055590 - RNA, 19 nt, Homo sapiens
  misc_RNA (1)...(19): siRNA sense strand
cugcucggaugucaguuua

SEQ ID NO: 1055591 - RNA, 19 nt, Homo sapiens
  misc_RNA (1)...(19): siRNA sense strand
caagagaacaguuggaaac

SEQ ID NO: 1055592 - RNA, 19 nt, Homo sapiens
  misc_RNA (1)...(19): siRNA sense strand
ggccucauacucuguuaua

SEQ ID NO: 1055593 - RNA, 19 nt, Homo sapiens
  misc_RNA (1)...(19): siRNA sense strand
ggucugggguugcaaauga

SEQ ID NO: 1055594 - RNA, 19 nt, Homo sapiens
  misc_RNA (1)...(19): siRNA sense strand
aacaauuccucauggauau

SEQ ID NO: 1055595 - RNA, 19 nt, Homo sapiens
  misc_RNA (1)...(19): siRNA sense strand
ucacuacucucauucucau

SEQ ID NO: 1055596 - RNA, 19 nt, Homo sapiens
  misc_RNA (1)...(19): siRNA sense strand
ccaaauguaaccaaagaug

SEQ ID NO: 1055597 - RNA, 19 nt, Homo sapiens
  misc_RNA (1)...(19): siRNA sense strand
gggauggagucugguguga

SEQ ID NO: 1055598 - RNA, 19 nt, Homo sapiens
  misc_RNA (1)...(19): siRNA sense strand
cuagugggaacuuacaaua

SEQ ID NO: 1055599 - RNA, 19 nt, Homo sapiens
  misc_RNA (1)...(19): siRNA sense strand
ggucagcccuccacaucca

SEQ ID NO: 1055600 - RNA, 19 nt, Homo sapiens
  misc_RNA (1)...(19): siRNA sense strand
gaaggcaccuaugacuuac

SEQ ID NO: 1055601 - RNA, 19 nt, Homo sapiens
  misc_RNA (1)...(19): siRNA sense strand
gcuuggcacuggagaaaca

SEQ ID NO: 1055602 - RNA, 19 nt, Homo sapiens
  misc_RNA (1)...(19): siRNA sense strand
gagagagaguucgcaucaa

SEQ ID NO: 1055603 - RNA, 19 nt, Homo sapiens
  misc_RNA (1)...(19): siRNA sense strand
ucaccugaguccaagagaa

SEQ ID NO: 1055604 - RNA, 19 nt, Homo sapiens
  misc_RNA (1)...(19): siRNA sense strand
agaguucgcaucaaauuug

SEQ ID NO: 1055605 - RNA, 19 nt, Homo sapiens
  misc_RNA (1)...(19): siRNA sense strand
ccuagauccuuacaacuca

SEQ ID NO: 1055606 - RNA, 19 nt, Homo sapiens
  misc_RNA (1)...(19): siRNA sense strand
guuaaucaccugaguccaa

SEQ ID NO: 1055607 - RNA, 19 nt, Homo sapiens
  misc_RNA (1)...(19): siRNA sense strand
caaauguaaccaaagaugu

SEQ ID NO: 1055608 - RNA, 19 nt, Homo sapiens
  misc_RNA (1)...(19): siRNA sense strand
caaauaacagcaucaucug

SEQ ID NO: 1055609 - RNA, 19 nt, Homo sapiens
  misc_RNA (1)...(19): siRNA sense strand
agagauuccucgccauugu

SEQ ID NO: 1055610 - RNA, 19 nt, Homo sapiens
  misc_RNA (1)...(19): siRNA sense strand
agaccuagauccuuacaac

SEQ ID NO: 1055611 - RNA, 19 nt, Homo sapiens
  misc_RNA (1)...(19): siRNA sense strand
guugguacacuucaucaaa

SEQ ID NO: 1055612 - RNA, 19 nt, Homo sapiens
  misc_RNA (1)...(19): siRNA sense strand
ggaauuguugguacacuuc

SEQ ID NO: 1055613 - RNA, 19 nt, Homo sapiens
  misc_RNA (1)...(19): siRNA sense strand
cuccaaauguaaccaaaga

SEQ ID NO: 1055614 - RNA, 19 nt, Homo sapiens
  misc_RNA (1)...(19): siRNA sense strand
ggucgugccccaaaauuua

SEQ ID NO: 1055615 - RNA, 19 nt, Homo sapiens
  misc_RNA (1)...(19): siRNA sense strand
cuaaaggucguccuccaaa

SEQ ID NO: 1055616 - RNA, 19 nt, Homo sapiens
  misc_RNA (1)...(19): siRNA sense strand
cugguugucugcuuccuuu

SEQ ID NO: 1055617 - RNA, 19 nt, Homo sapiens
  misc_RNA (1)...(19): siRNA sense strand
cgaaguuaaucaccugagu

SEQ ID NO: 1055618 - RNA, 19 nt, Homo sapiens
  misc_RNA (1)...(19): siRNA sense strand
cuacucucauucucauauu

SEQ ID NO: 1055619 - RNA, 19 nt, Homo sapiens
  misc_RNA (1)...(19): siRNA sense strand
gaaaauugccaugaaaaug

SEQ ID NO: 1055620 - RNA, 19 nt, Homo sapiens
  misc_RNA (1)...(19): siRNA sense strand
ccaugguggagcacaauua

SEQ ID NO: 1055621 - RNA, 19 nt, Homo sapiens
  misc_RNA (1)...(19): siRNA sense strand
ucugauucuugucacuuua

SEQ ID NO: 1055622 - RNA, 19 nt, Homo sapiens
  misc_RNA (1)...(19): siRNA sense strand
uccauaaacuacccacaga

SEQ ID NO: 1055623 - RNA, 19 nt, Homo sapiens
  misc_RNA (1)...(19): siRNA sense strand
cagaaauacuaccguaacu

SEQ ID NO: 1055624 - RNA, 19 nt, Homo sapiens
  misc_RNA (1)...(19): siRNA sense strand
ccugagaguggaacccuua

SEQ ID NO: 1055625 - RNA, 19 nt, Homo sapiens
  misc_RNA (1)...(19): siRNA sense strand
gaugaugggcagaaaugga

SEQ ID NO: 1055626 - RNA, 19 nt, Homo sapiens
  misc_RNA (1)...(19): siRNA sense strand
agugggaacuuacaauaca

SEQ ID NO: 1055627 - RNA, 19 nt, Homo sapiens
  misc_RNA (1)...(19): siRNA sense strand
gguaacaacuucuccagua

SEQ ID NO: 1055628 - RNA, 19 nt, Homo sapiens
  misc_RNA (1)...(19): siRNA sense strand
guaacaacuucuccaguau

SEQ ID NO: 1055629 - RNA, 19 nt, Homo sapiens
  misc_RNA (1)...(19): siRNA sense strand
ggcugaagaucaccaagaa

SEQ ID NO: 1055630 - RNA, 19 nt, Homo sapiens
  misc_RNA (1)...(19): siRNA sense strand
cugaggaguuugccaauga

SEQ ID NO: 1055631 - RNA, 19 nt, Homo sapiens
  misc_RNA (1)...(19): siRNA sense strand
cugacucgcugcccaagua

SEQ ID NO: 1055632 - RNA, 19 nt, Homo sapiens
  misc_RNA (1)...(19): siRNA sense strand
ccgcagaacucacucaacu

SEQ ID NO: 1055633 - RNA, 19 nt, Homo sapiens
  misc_RNA (1)...(19): siRNA sense strand
caacgacucggcuguuaug

SEQ ID NO: 1055634 - RNA, 19 nt, Homo sapiens
  misc_RNA (1)...(19): siRNA sense strand
gcucccagauccucaugga

SEQ ID NO: 1055635 - RNA, 19 nt, Homo sapiens
  misc_RNA (1)...(19): siRNA sense strand
gcgaugagugcaccauuug

SEQ ID NO: 1055636 - RNA, 19 nt, Homo sapiens
  misc_RNA (1)...(19): siRNA sense strand
gcguccagcugcuugauag

SEQ ID NO: 1055637 - RNA, 19 nt, Homo sapiens
  misc_RNA (1)...(19): siRNA sense strand
gcaacaucaucgcauucug

SEQ ID NO: 1055638 - RNA, 19 nt, Homo sapiens
  misc_RNA (1)...(19): siRNA sense strand
gugcaccauuugcuaugaa

SEQ ID NO: 1055639 - RNA, 19 nt, Homo sapiens
  misc_RNA (1)...(19): siRNA sense strand
ucaagggcaucaucaagac

SEQ ID NO: 1055640 - RNA, 19 nt, Homo sapiens
  misc_RNA (1)...(19): siRNA sense strand
gcaacgccaucaccuucag

SEQ ID NO: 1055641 - RNA, 19 nt, Homo sapiens
  misc_RNA (1)...(19): siRNA sense strand
acacggucaucuacacaug

SEQ ID NO: 1055642 - RNA, 19 nt, Homo sapiens
  misc_RNA (1)...(19): siRNA sense strand
gcuguuaugcuguucuuca

SEQ ID NO: 1055643 - RNA, 19 nt, Homo sapiens
  misc_RNA (1)...(19): siRNA sense strand
ucauggaccucagccacaa

SEQ ID NO: 1055644 - RNA, 19 nt, Homo sapiens
  misc_RNA (1)...(19): siRNA sense strand
ggacacggucaucuacaca

SEQ ID NO: 1055645 - RNA, 19 nt, Homo sapiens
  misc_RNA (1)...(19): siRNA sense strand
uaacaacuucuccaguauc

SEQ ID NO: 1055646 - RNA, 19 nt, Homo sapiens
  misc_RNA (1)...(19): siRNA sense strand
ucaagaggcaggccagcuu

SEQ ID NO: 1055647 - RNA, 19 nt, Homo sapiens
  misc_RNA (1)...(19): siRNA sense strand
agcgaugagugcaccauuu

SEQ ID NO: 1055648 - RNA, 19 nt, Homo sapiens
  misc_RNA (1)...(19): siRNA sense strand
gagcgaugagugcaccauu

SEQ ID NO: 1055649 - RNA, 19 nt, Homo sapiens
  misc_RNA (1)...(19): siRNA sense strand
gcccgguccucaucuacga

SEQ ID NO: 1055650 - RNA, 19 nt, Homo sapiens
  misc_RNA (1)...(19): siRNA sense strand
ggcgcugccugaggaguuu

SEQ ID NO: 1055651 - RNA, 19 nt, Homo sapiens
  misc_RNA (1)...(19): siRNA sense strand
gaugccaccacaagcagaa

SEQ ID NO: 1055652 - RNA, 19 nt, Homo sapiens
  misc_RNA (1)...(19): siRNA sense strand
caucaagggcaucaucaag

SEQ ID NO: 1055653 - RNA, 19 nt, Homo sapiens
  misc_RNA (1)...(19): siRNA sense strand
aucaacgacucggcuguua

SEQ ID NO: 1055654 - RNA, 19 nt, Homo sapiens
  misc_RNA (1)...(19): siRNA sense strand
ugagugcaccauuugcuau

SEQ ID NO: 1055655 - RNA, 19 nt, Homo sapiens
  misc_RNA (1)...(19): siRNA sense strand
ccgagaccaucuucgucaa

SEQ ID NO: 1055656 - RNA, 19 nt, Homo sapiens
  misc_RNA (1)...(19): siRNA sense strand
ccugaggaguuugccaaug

SEQ ID NO: 1055657 - RNA, 19 nt, Homo sapiens
  misc_RNA (1)...(19): siRNA sense strand
gccaaugagggcaacauca

SEQ ID NO: 1055658 - RNA, 19 nt, Homo sapiens
  misc_RNA (1)...(19): siRNA sense strand
ccucgcagccgcuuuggau

SEQ ID NO: 1055659 - RNA, 19 nt, Homo sapiens
  misc_RNA (1)...(19): siRNA sense strand
caucaacgacucggcuguu

SEQ ID NO: 1055660 - RNA, 19 nt, Homo sapiens
  misc_RNA (1)...(19): siRNA sense strand
gggcaacaucaucgcauuc

SEQ ID NO: 1055661 - RNA, 19 nt, Homo sapiens
  misc_RNA (1)...(19): siRNA sense strand
gaagacaucaucaacauua

SEQ ID NO: 1055662 - RNA, 19 nt, Homo sapiens
  misc_RNA (1)...(19): siRNA sense strand
gaaagcuccuggcgucuaa

SEQ ID NO: 1055663 - RNA, 19 nt, Homo sapiens
  misc_RNA (1)...(19): siRNA sense strand
gaaaguagaagaucaagga

SEQ ID NO: 1055664 - RNA, 19 nt, Homo sapiens
  misc_RNA (1)...(19): siRNA sense strand
ggaauaaggagaaccguuu

SEQ ID NO: 1055665 - RNA, 19 nt, Homo sapiens
  misc_RNA (1)...(19): siRNA sense strand
ggaggaagcucggaacugu

SEQ ID NO: 1055666 - RNA, 19 nt, Homo sapiens
  misc_RNA (1)...(19): siRNA sense strand
gaccggagguauaaaguau

SEQ ID NO: 1055667 - RNA, 19 nt, Homo sapiens
  misc_RNA (1)...(19): siRNA sense strand
gcagauggcuuugaaucau

SEQ ID NO: 1055668 - RNA, 19 nt, Homo sapiens
  misc_RNA (1)...(19): siRNA sense strand
gauaucugcucauggaaau

SEQ ID NO: 1055669 - RNA, 19 nt, Homo sapiens
  misc_RNA (1)...(19): siRNA sense strand
uaaaugagcgucacuaugg

SEQ ID NO: 1055670 - RNA, 19 nt, Homo sapiens
  misc_RNA (1)...(19): siRNA sense strand
gggagcagauggcuuugaa

SEQ ID NO: 1055671 - RNA, 19 nt, Homo sapiens
  misc_RNA (1)...(19): siRNA sense strand
ggagagggugcuuggaaua

SEQ ID NO: 1055672 - RNA, 19 nt, Homo sapiens
  misc_RNA (1)...(19): siRNA sense strand
aaggauugcucccgaagua

SEQ ID NO: 1055673 - RNA, 19 nt, Homo sapiens
  misc_RNA (1)...(19): siRNA sense strand
gugaggcucuggagaagaa

SEQ ID NO: 1055674 - RNA, 19 nt, Homo sapiens
  misc_RNA (1)...(19): siRNA sense strand
ccaagcagccauuaagaaa

SEQ ID NO: 1055675 - RNA, 19 nt, Homo sapiens
  misc_RNA (1)...(19): siRNA sense strand
gaagcaacucaaagcguua

SEQ ID NO: 1055676 - RNA, 19 nt, Homo sapiens
  misc_RNA (1)...(19): siRNA sense strand
caagugaggcucuggagaa

SEQ ID NO: 1055677 - RNA, 19 nt, Homo sapiens
  misc_RNA (1)...(19): siRNA sense strand
gaaucauggugaagaacaa

SEQ ID NO: 1055678 - RNA, 19 nt, Homo sapiens
  misc_RNA (1)...(19): siRNA sense strand
ugaguuugaucuuguauuc

SEQ ID NO: 1055679 - RNA, 19 nt, Homo sapiens
  misc_RNA (1)...(19): siRNA sense strand
gaucuuguauucacaucug

SEQ ID NO: 1055680 - RNA, 19 nt, Homo sapiens
  misc_RNA (1)...(19): siRNA sense strand
guauucacaucuguccuua

SEQ ID NO: 1055681 - RNA, 19 nt, Homo sapiens
  misc_RNA (1)...(19): siRNA sense strand
gagagacuccuucccuauu

SEQ ID NO: 1055682 - RNA, 19 nt, Homo sapiens
  misc_RNA (1)...(19): siRNA sense strand
caacauuacucuuccuacu

SEQ ID NO: 1055683 - RNA, 19 nt, Homo sapiens
  misc_RNA (1)...(19): siRNA sense strand
ggagaagaagcuacaaugu

SEQ ID NO: 1055684 - RNA, 19 nt, Homo sapiens
  misc_RNA (1)...(19): siRNA sense strand
guagcuggguggaucagaa

SEQ ID NO: 1055685 - RNA, 19 nt, Homo sapiens
  misc_RNA (1)...(19): siRNA sense strand
ucugauaucugcucaugga

SEQ ID NO: 1055686 - RNA, 19 nt, Homo sapiens
  misc_RNA (1)...(19): siRNA sense strand
ucacaucuguccuuaaucg

SEQ ID NO: 1055687 - RNA, 19 nt, Homo sapiens
  misc_RNA (1)...(19): siRNA sense strand
gagagggugcuuggaauaa

SEQ ID NO: 1055688 - RNA, 19 nt, Homo sapiens
  misc_RNA (1)...(19): siRNA sense strand
ggaaagcuccuggcgucua

SEQ ID NO: 1055689 - RNA, 19 nt, Homo sapiens
  misc_RNA (1)...(19): siRNA sense strand
gcuccuggcgucuaaauga

SEQ ID NO: 1055690 - RNA, 19 nt, Homo sapiens
  misc_RNA (1)...(19): siRNA sense strand
gcaaaaccauucugauauc

SEQ ID NO: 1055691 - RNA, 19 nt, Homo sapiens
  misc_RNA (1)...(19): siRNA sense strand
gauugcucccgaaguauua

SEQ ID NO: 1055692 - RNA, 19 nt, Homo sapiens
  misc_RNA (1)...(19): siRNA sense strand
gcucauggaaauagcagua

SEQ ID NO: 1055693 - RNA, 19 nt, Homo sapiens
  misc_RNA (1)...(19): siRNA sense strand
gagcagauggcuuugaauc

SEQ ID NO: 1055694 - RNA, 19 nt, Homo sapiens
  misc_RNA (1)...(19): siRNA sense strand
agagacuccuucccuauug

SEQ ID NO: 1055695 - RNA, 19 nt, Homo sapiens
  misc_RNA (1)...(19): siRNA sense strand
ggauugcucccgaaguauu

SEQ ID NO: 1055696 - RNA, 19 nt, Homo sapiens
  misc_RNA (1)...(19): siRNA sense strand
aagcagccauuaagaaagu

SEQ ID NO: 1055697 - RNA, 19 nt, Homo sapiens
  misc_RNA (1)...(19): siRNA sense strand
gguauaaaguaugcgaugu

SEQ ID NO: 1055698 - RNA, 19 nt, Homo sapiens
  misc_RNA (1)...(19): siRNA sense strand
gauccaagcagccauuaag

SEQ ID NO: 1055699 - RNA, 19 nt, Homo sapiens
  misc_RNA (1)...(19): siRNA sense strand
gaaacucaacagcgaagga

SEQ ID NO: 1055700 - RNA, 19 nt, Homo sapiens
  misc_RNA (1)...(19): siRNA sense strand
acagggagcagauggcuuu

SEQ ID NO: 1055701 - RNA, 19 nt, Homo sapiens
  misc_RNA (1)...(19): siRNA sense strand
cagauggcuuugaaucaug

SEQ ID NO: 1055702 - RNA, 19 nt, Homo sapiens
  misc_RNA (1)...(19): siRNA sense strand
caacugccacggucggaaa

SEQ ID NO: 1055703 - RNA, 19 nt, Homo sapiens
  misc_RNA (1)...(19): siRNA sense strand
cuuaaucgguccauucaca

SEQ ID NO: 1055704 - RNA, 19 nt, Homo sapiens
  misc_RNA (1)...(19): siRNA sense strand
ggaaugggugccuguggaa

SEQ ID NO: 1055705 - RNA, 19 nt, Homo sapiens
  misc_RNA (1)...(19): siRNA sense strand
gaagagcuaggccaggaau

SEQ ID NO: 1055706 - RNA, 19 nt, Homo sapiens
  misc_RNA (1)...(19): siRNA sense strand
cauccuuacuaccaagaaa

SEQ ID NO: 1055707 - RNA, 19 nt, Homo sapiens
  misc_RNA (1)...(19): siRNA sense strand
auucacaucuguccuuaau

SEQ ID NO: 1055708 - RNA, 19 nt, Homo sapiens
  misc_RNA (1)...(19): siRNA sense strand
ggucggaaagcuuaaagga

SEQ ID NO: 1055709 - RNA, 19 nt, Homo sapiens
  misc_RNA (1)...(19): siRNA sense strand
cgaccggagguauaaagua

SEQ ID NO: 1055710 - RNA, 19 nt, Homo sapiens
  misc_RNA (1)...(19): siRNA sense strand
gaagaucaaggaaaaguga

SEQ ID NO: 1055711 - RNA, 19 nt, Homo sapiens
  misc_RNA (1)...(19): siRNA sense strand
cuauuggaaugaaaggauu

SEQ ID NO: 1055712 - RNA, 19 nt, Homo sapiens
  misc_RNA (1)...(19): siRNA sense strand
gcgaugugcccuuggauca

SEQ ID NO: 1055713 - RNA, 19 nt, Homo sapiens
  misc_RNA (1)...(19): siRNA sense strand
accaagaaaucuacaacga

SEQ ID NO: 1055714 - RNA, 19 nt, Homo sapiens
  misc_RNA (1)...(19): siRNA sense strand
gaaaagugaaacaagcuaa

SEQ ID NO: 1055715 - RNA, 19 nt, Homo sapiens
  misc_RNA (1)...(19): siRNA sense strand
cgaaguauuacguggcaaa

SEQ ID NO: 1055716 - RNA, 19 nt, Homo sapiens
  misc_RNA (1)...(19): siRNA sense strand
acaacgaccggagguauaa

SEQ ID NO: 1055717 - RNA, 19 nt, Homo sapiens
  misc_RNA (1)...(19): siRNA sense strand
ggagucucauccuuacuac

SEQ ID NO: 1055718 - RNA, 19 nt, Homo sapiens
  misc_RNA (1)...(19): siRNA sense strand
gagggugcuuggaauaagg

SEQ ID NO: 1055719 - RNA, 19 nt, Homo sapiens
  misc_RNA (1)...(19): siRNA sense strand
guauaaaguaugcgaugug

SEQ ID NO: 1055720 - RNA, 19 nt, Homo sapiens
  misc_RNA (1)...(19): siRNA sense strand
cuaaaugagcgucacuaug

SEQ ID NO: 1055721 - RNA, 19 nt, Homo sapiens
  misc_RNA (1)...(19): siRNA sense strand
aguagaagaucaaggaaaa

SEQ ID NO: 1055722 - RNA, 19 nt, Homo sapiens
  misc_RNA (1)...(19): siRNA sense strand
gaugugcccuuggaucaac

SEQ ID NO: 1055723 - RNA, 19 nt, Homo sapiens
  misc_RNA (1)...(19): siRNA sense strand
caacucaaagcguuaaacu

SEQ ID NO: 1055724 - RNA, 19 nt, Homo sapiens
  misc_RNA (1)...(19): siRNA sense strand
ggaagagcuaggccaggaa

SEQ ID NO: 1055725 - RNA, 19 nt, Homo sapiens
  misc_RNA (1)...(19): siRNA sense strand
ccauuaagaaaguagaaga

SEQ ID NO: 1055726 - RNA, 19 nt, Homo sapiens
  misc_RNA (1)...(19): siRNA sense strand
gagacuccuucccuauugg

SEQ ID NO: 1055727 - RNA, 19 nt, Homo sapiens
  misc_RNA (1)...(19): siRNA sense strand
gccacggucggaaagcuua

SEQ ID NO: 1055728 - RNA, 19 nt, Homo sapiens
  misc_RNA (1)...(19): siRNA sense strand
uacaacgaccggagguaua

SEQ ID NO: 1055729 - RNA, 19 nt, Homo sapiens
  misc_RNA (1)...(19): siRNA sense strand
gugcuuggaauaaggagaa

SEQ ID NO: 1055730 - RNA, 19 nt, Homo sapiens
  misc_RNA (1)...(19): siRNA sense strand
uggagagggugcuuggaau

SEQ ID NO: 1055731 - RNA, 19 nt, Homo sapiens
  misc_RNA (1)...(19): siRNA sense strand
ugauaucugcucauggaaa

SEQ ID NO: 1055732 - RNA, 19 nt, Homo sapiens
  misc_RNA (1)...(19): siRNA sense strand
cggaaagcuuaaaggaugu

SEQ ID NO: 1055733 - RNA, 19 nt, Homo sapiens
  misc_RNA (1)...(19): siRNA sense strand
gaaugggugccuguggaaa

SEQ ID NO: 1055734 - RNA, 19 nt, Homo sapiens
  misc_RNA (1)...(19): siRNA sense strand
cuucuggaauuggaugaaa

SEQ ID NO: 1055735 - RNA, 19 nt, Homo sapiens
  misc_RNA (1)...(19): siRNA sense strand
ugaagacaucaucaacauu

SEQ ID NO: 1055736 - RNA, 19 nt, Homo sapiens
  misc_RNA (1)...(19): siRNA sense strand
uggagaagaagcuacaaug

SEQ ID NO: 1055737 - RNA, 19 nt, Homo sapiens
  misc_RNA (1)...(19): siRNA sense strand
ccaagaggcgauccaagca

SEQ ID NO: 1055738 - RNA, 19 nt, Homo sapiens
  misc_RNA (1)...(19): siRNA sense strand
guuccugggugaccaagag

SEQ ID NO: 1055739 - RNA, 19 nt, Homo sapiens
  misc_RNA (1)...(19): siRNA sense strand
uuugaaucauggugaagaa

SEQ ID NO: 1055740 - RNA, 19 nt, Homo sapiens
  misc_RNA (1)...(19): siRNA sense strand
uggcaaaaccauucugaua

SEQ ID NO: 1055741 - RNA, 19 nt, Homo sapiens
  misc_RNA (1)...(19): siRNA sense strand
aaacucaacagcgaaggaa

SEQ ID NO: 1055742 - RNA, 19 nt, Homo sapiens
  misc_RNA (1)...(19): siRNA sense strand
cuacaacgaccggagguau

SEQ ID NO: 1055743 - RNA, 19 nt, Homo sapiens
  misc_RNA (1)...(19): siRNA sense strand
gaauaaggagaaccguuuu

SEQ ID NO: 1055744 - RNA, 19 nt, Homo sapiens
  misc_RNA (1)...(19): siRNA sense strand
gcgauccaagcagccauua

SEQ ID NO: 1055745 - RNA, 19 nt, Homo sapiens
  misc_RNA (1)...(19): siRNA sense strand
ggcaaaaccauucugauau

SEQ ID NO: 1055746 - RNA, 19 nt, Homo sapiens
  misc_RNA (1)...(19): siRNA sense strand
ggaaagcuuaaaggauguu

SEQ ID NO: 1055747 - RNA, 19 nt, Homo sapiens
  misc_RNA (1)...(19): siRNA sense strand
ggcuuugaaucauggugaa

SEQ ID NO: 1055748 - RNA, 19 nt, Homo sapiens
  misc_RNA (1)...(19): siRNA sense strand
caagcagccauuaagaaag

SEQ ID NO: 1055749 - RNA, 19 nt, Homo sapiens
  misc_RNA (1)...(19): siRNA sense strand
uaugcgaugugcccuugga

SEQ ID NO: 1055750 - RNA, 19 nt, Homo sapiens
  misc_RNA (1)...(19): siRNA sense strand
aaaggauguucuggagaga

SEQ ID NO: 1055751 - RNA, 19 nt, Homo sapiens
  misc_RNA (1)...(19): siRNA sense strand
ggaaaagugaaacaagcua

SEQ ID NO: 1055752 - RNA, 19 nt, Homo sapiens
  misc_RNA (1)...(19): siRNA sense strand
uguugggccucaucaguuc

SEQ ID NO: 1055753 - RNA, 19 nt, Homo sapiens
  misc_RNA (1)...(19): siRNA sense strand
ugaaucauggugaagaaca

SEQ ID NO: 1055754 - RNA, 19 nt, Homo sapiens
  misc_RNA (1)...(19): siRNA sense strand
uccaagcagccauuaagaa

SEQ ID NO: 1055755 - RNA, 19 nt, Homo sapiens
  misc_RNA (1)...(19): siRNA sense strand
caucaucaacauuacucuu

SEQ ID NO: 1055756 - RNA, 19 nt, Homo sapiens
  misc_RNA (1)...(19): siRNA sense strand
cgaaauguauccaucuuua

SEQ ID NO: 1055757 - RNA, 19 nt, Homo sapiens
  misc_RNA (1)...(19): siRNA sense strand
caguggauaucuuaacuua

SEQ ID NO: 1055758 - RNA, 19 nt, Homo sapiens
  misc_RNA (1)...(19): siRNA sense strand
guggauaucuuaacuuaug

SEQ ID NO: 1055759 - RNA, 19 nt, Homo sapiens
  misc_RNA (1)...(19): siRNA sense strand
gagaaacacgccuugauuu

SEQ ID NO: 1055760 - RNA, 19 nt, Homo sapiens
  misc_RNA (1)...(19): siRNA sense strand
aauaagaucuccauuguag

SEQ ID NO: 1055761 - RNA, 19 nt, Homo sapiens
  misc_RNA (1)...(19): siRNA sense strand
ggagaaacacgccuugauu

SEQ ID NO: 1055762 - RNA, 19 nt, Homo sapiens
  misc_RNA (1)...(19): siRNA sense strand
gcuaucagcaucuuauuaa

SEQ ID NO: 1055763 - RNA, 19 nt, Homo sapiens
  misc_RNA (1)...(19): siRNA sense strand
gcaaacugcuuauuguuac

SEQ ID NO: 1055764 - RNA, 19 nt, Homo sapiens
  misc_RNA (1)...(19): siRNA sense strand
uaacuuauguagccuggaa

SEQ ID NO: 1055765 - RNA, 19 nt, Homo sapiens
  misc_RNA (1)...(19): siRNA sense strand
gacaauggaucuucaacau

SEQ ID NO: 1055766 - RNA, 19 nt, Homo sapiens
  misc_RNA (1)...(19): siRNA sense strand
ccagauauaggaacugaua

SEQ ID NO: 1055767 - RNA, 19 nt, Homo sapiens
  misc_RNA (1)...(19): siRNA sense strand
agaaacacgccuugauuua

SEQ ID NO: 1055768 - RNA, 19 nt, Homo sapiens
  misc_RNA (1)...(19): siRNA sense strand
uauaggaacugauaaggau

SEQ ID NO: 1055769 - RNA, 19 nt, Homo sapiens
  misc_RNA (1)...(19): siRNA sense strand
caacauggcagcccuuuua

SEQ ID NO: 1055770 - RNA, 19 nt, Homo sapiens
  misc_RNA (1)...(19): siRNA sense strand
gugaugaacuuguccuugu

SEQ ID NO: 1055771 - RNA, 19 nt, Homo sapiens
  misc_RNA (1)...(19): siRNA sense strand
gaaacacgccuugauuuag

SEQ ID NO: 1055772 - RNA, 19 nt, Homo sapiens
  misc_RNA (1)...(19): siRNA sense strand
aaacacgccuugauuuagu

SEQ ID NO: 1055773 - RNA, 19 nt, Homo sapiens
  misc_RNA (1)...(19): siRNA sense strand
ggauguugaugaaggcaaa

SEQ ID NO: 1055774 - RNA, 19 nt, Homo sapiens
  misc_RNA (1)...(19): siRNA sense strand
caaauauugucuccagcaa

SEQ ID NO: 1055775 - RNA, 19 nt, Homo sapiens
  misc_RNA (1)...(19): siRNA sense strand
gaacccagauauaggaacu

SEQ ID NO: 1055776 - RNA, 19 nt, Homo sapiens
  misc_RNA (1)...(19): siRNA sense strand
uaagaucuccauuguagga

SEQ ID NO: 1055777 - RNA, 19 nt, Homo sapiens
  misc_RNA (1)...(19): siRNA sense strand
gagcauggcgacucaagug

SEQ ID NO: 1055778 - RNA, 19 nt, Homo sapiens
  misc_RNA (1)...(19): siRNA sense strand
uauguagccuggaaguuga

SEQ ID NO: 1055779 - RNA, 19 nt, Homo sapiens
  misc_RNA (1)...(19): siRNA sense strand
uuaagaauuucgcggaaga

SEQ ID NO: 1055780 - RNA, 19 nt, Homo sapiens
  misc_RNA (1)...(19): siRNA sense strand
ugcaaacugcuuauuguua

SEQ ID NO: 1055781 - RNA, 19 nt, Homo sapiens
  misc_RNA (1)...(19): siRNA sense strand
ggaguggugugaacauugc

SEQ ID NO: 1055782 - RNA, 19 nt, Homo sapiens
  misc_RNA (1)...(19): siRNA sense strand
gaagaggaggccauucauc

SEQ ID NO: 1055783 - RNA, 19 nt, Homo sapiens
  misc_RNA (1)...(19): siRNA sense strand
gcaaacuccaaucuaguga

SEQ ID NO: 1055784 - RNA, 19 nt, Homo sapiens
  misc_RNA (1)...(19): siRNA sense strand
ggaggccauucaucacaau

SEQ ID NO: 1055785 - RNA, 19 nt, Homo sapiens
  misc_RNA (1)...(19): siRNA sense strand
gcgaaauguauccaucuuu

SEQ ID NO: 1055786 - RNA, 19 nt, Homo sapiens
  misc_RNA (1)...(19): siRNA sense strand
aauauugucuccagcaaag

SEQ ID NO: 1055787 - RNA, 19 nt, Homo sapiens
  misc_RNA (1)...(19): siRNA sense strand
gugagacaauggaucuuca

SEQ ID NO: 1055788 - RNA, 19 nt, Homo sapiens
  misc_RNA (1)...(19): siRNA sense strand
uuccgaauauuacccagua

SEQ ID NO: 1055789 - RNA, 19 nt, Homo sapiens
  misc_RNA (1)...(19): siRNA sense strand
cauggcgacucaaguguuc

SEQ ID NO: 1055790 - RNA, 19 nt, Homo sapiens
  misc_RNA (1)...(19): siRNA sense strand
gaggaggccauucaucaca

SEQ ID NO: 1055791 - RNA, 19 nt, Homo sapiens
  misc_RNA (1)...(19): siRNA sense strand
gcauggcgacucaaguguu

SEQ ID NO: 1055792 - RNA, 19 nt, Homo sapiens
  misc_RNA (1)...(19): siRNA sense strand
ccuuguggauguugaugaa

SEQ ID NO: 1055793 - RNA, 19 nt, Homo sapiens
  misc_RNA (1)...(19): siRNA sense strand
ggaagaggaggccauucau

SEQ ID NO: 1055794 - RNA, 19 nt, Homo sapiens
  misc_RNA (1)...(19): siRNA sense strand
aagaggaggccauucauca

SEQ ID NO: 1055795 - RNA, 19 nt, Homo sapiens
  misc_RNA (1)...(19): siRNA sense strand
gaauauuacccaguacagu

SEQ ID NO: 1055796 - RNA, 19 nt, Homo sapiens
  misc_RNA (1)...(19): siRNA sense strand
guggaguggugugaacauu

SEQ ID NO: 1055797 - RNA, 19 nt, Homo sapiens
  misc_RNA (1)...(19): siRNA sense strand
ggccauucaucacaauaag

SEQ ID NO: 1055798 - RNA, 19 nt, Homo sapiens
  misc_RNA (1)...(19): siRNA sense strand
uggcagcccuuuuaugaaa

SEQ ID NO: 1055799 - RNA, 19 nt, Homo sapiens
  misc_RNA (1)...(19): siRNA sense strand
aaucuggacucugcucguu

SEQ ID NO: 1055800 - RNA, 19 nt, Homo sapiens
  misc_RNA (1)...(19): siRNA sense strand
gcaacuaucaagagugaac

SEQ ID NO: 1055801 - RNA, 19 nt, Homo sapiens
  misc_RNA (1)...(19): siRNA sense strand
acugcaaacugcuuauugu

SEQ ID NO: 1055802 - RNA, 19 nt, Homo sapiens
  misc_RNA (1)...(19): siRNA sense strand
uaaaagguuugagugauga

SEQ ID NO: 1055803 - RNA, 19 nt, Homo sapiens
  misc_RNA (1)...(19): siRNA sense strand
cggaagaggaggccauuca

SEQ ID NO: 1055804 - RNA, 19 nt, Homo sapiens
  misc_RNA (1)...(19): siRNA sense strand
ggcaaaggcuuggcaucca

SEQ ID NO: 1055805 - RNA, 19 nt, Homo sapiens
  misc_RNA (1)...(19): siRNA sense strand
uauuggaagugguuguaau

SEQ ID NO: 1055806 - RNA, 19 nt, Homo sapiens
  misc_RNA (1)...(19): siRNA sense strand
ugaugaacuuguccuugug

SEQ ID NO: 1055807 - RNA, 19 nt, Homo sapiens
  misc_RNA (1)...(19): siRNA sense strand
acugcaaacuccaaucuag

SEQ ID NO: 1055808 - RNA, 19 nt, Homo sapiens
  misc_RNA (1)...(19): siRNA sense strand
uuauguagccuggaaguug

SEQ ID NO: 1055809 - RNA, 19 nt, Homo sapiens
  misc_RNA (1)...(19): siRNA sense strand
ggcuuggcauccacucuga

SEQ ID NO: 1055810 - RNA, 19 nt, Homo sapiens
  misc_RNA (1)...(19): siRNA sense strand
gaucuccauuguaggaacu

SEQ ID NO: 1055811 - RNA, 19 nt, Homo sapiens
  misc_RNA (1)...(19): siRNA sense strand
ccauucaucacaauaagau

SEQ ID NO: 1055812 - RNA, 19 nt, Homo sapiens
  misc_RNA (1)...(19): siRNA sense strand
ccuggaaguugaguggauu

SEQ ID NO: 1055813 - RNA, 19 nt, Homo sapiens
  misc_RNA (1)...(19): siRNA sense strand
guugaugaaggcaaacuga

SEQ ID NO: 1055814 - RNA, 19 nt, Homo sapiens
  misc_RNA (1)...(19): siRNA sense strand
gaaaaugccaaauauuguc

SEQ ID NO: 1055815 - RNA, 19 nt, Homo sapiens
  misc_RNA (1)...(19): siRNA sense strand
gaggccauucaucacaaua

SEQ ID NO: 1055816 - RNA, 19 nt, Homo sapiens
  misc_RNA (1)...(19): siRNA sense strand
uggaagugguuguaaucug

SEQ ID NO: 1055817 - RNA, 19 nt, Homo sapiens
  misc_RNA (1)...(19): siRNA sense strand
guuauuggaagugguugua

SEQ ID NO: 1055818 - RNA, 19 nt, Homo sapiens
  misc_RNA (1)...(19): siRNA sense strand
uuaaaagguuugagugaug

SEQ ID NO: 1055819 - RNA, 19 nt, Homo sapiens
  misc_RNA (1)...(19): siRNA sense strand
ccucacugcaaacugcuua

SEQ ID NO: 1055820 - RNA, 19 nt, Homo sapiens
  misc_RNA (1)...(19): siRNA sense strand
gauauaggaacugauaagg

SEQ ID NO: 1055821 - RNA, 19 nt, Homo sapiens
  misc_RNA (1)...(19): siRNA sense strand
gguguggcuugugcuauca

SEQ ID NO: 1055822 - RNA, 19 nt, Homo sapiens
  misc_RNA (1)...(19): siRNA sense strand
uggagagcauggcgacuca

SEQ ID NO: 1055823 - RNA, 19 nt, Homo sapiens
  misc_RNA (1)...(19): siRNA sense strand
gcugauccuuggagagcau

SEQ ID NO: 1055824 - RNA, 19 nt, Homo sapiens
  misc_RNA (1)...(19): siRNA sense strand
caaacugcuuauuguuacu

SEQ ID NO: 1055825 - RNA, 19 nt, Homo sapiens
  misc_RNA (1)...(19): siRNA sense strand
cauggcagcccuuuuauga

SEQ ID NO: 1055826 - RNA, 19 nt, Homo sapiens
  misc_RNA (1)...(19): siRNA sense strand
gccuggaaguugaguggau

SEQ ID NO: 1055827 - RNA, 19 nt, Homo sapiens
  misc_RNA (1)...(19): siRNA sense strand
gaagggugagacaauggau

SEQ ID NO: 1055828 - RNA, 19 nt, Homo sapiens
  misc_RNA (1)...(19): siRNA sense strand
acaauggaucuucaacaug

SEQ ID NO: 1055829 - RNA, 19 nt, Homo sapiens
  misc_RNA (1)...(19): siRNA sense strand
ggugagacaauggaucuuc

SEQ ID NO: 1055830 - RNA, 19 nt, Homo sapiens
  misc_RNA (1)...(19): siRNA sense strand
aaauauugucuccagcaaa

SEQ ID NO: 1055831 - RNA, 19 nt, Homo sapiens
  misc_RNA (1)...(19): siRNA sense strand
gauccugagcagugggaaa

SEQ ID NO: 1055832 - RNA, 19 nt, Homo sapiens
  misc_RNA (1)...(19): siRNA sense strand
cagauauaggaacugauaa

SEQ ID NO: 1055833 - RNA, 19 nt, Homo sapiens
  misc_RNA (1)...(19): siRNA sense strand
acccagauauaggaacuga

SEQ ID NO: 1055834 - RNA, 19 nt, Homo sapiens
  misc_RNA (1)...(19): siRNA sense strand
acugaagggugagacaaug

SEQ ID NO: 1055835 - RNA, 19 nt, Homo sapiens
  misc_RNA (1)...(19): siRNA sense strand
ggaaacagaugcuaauuug

SEQ ID NO: 1055836 - RNA, 19 nt, Homo sapiens
  misc_RNA (1)...(19): siRNA sense strand
gggcacaucugcucgauaa

SEQ ID NO: 1055837 - RNA, 19 nt, Homo sapiens
  misc_RNA (1)...(19): siRNA sense strand
cgaaagaacugcuugaaca

SEQ ID NO: 1055838 - RNA, 19 nt, Homo sapiens
  misc_RNA (1)...(19): siRNA sense strand
agaaacagaugguugcaaa

SEQ ID NO: 1055839 - RNA, 19 nt, Homo sapiens
  misc_RNA (1)...(19): siRNA sense strand
ggagaaacagcuugaagaa

SEQ ID NO: 1055840 - RNA, 19 nt, Homo sapiens
  misc_RNA (1)...(19): siRNA sense strand
gcagagaucaccagcaaga

SEQ ID NO: 1055841 - RNA, 19 nt, Homo sapiens
  misc_RNA (1)...(19): siRNA sense strand
gcaaauuggucaggagaug

SEQ ID NO: 1055842 - RNA, 19 nt, Homo sapiens
  misc_RNA (1)...(19): siRNA sense strand
gggaaacagaugcuaauuu

SEQ ID NO: 1055843 - RNA, 19 nt, Homo sapiens
  misc_RNA (1)...(19): siRNA sense strand
gaugggaauuccucagaga

SEQ ID NO: 1055844 - RNA, 19 nt, Homo sapiens
  misc_RNA (1)...(19): siRNA sense strand
gcaacagaaugagaagcua

SEQ ID NO: 1055845 - RNA, 19 nt, Homo sapiens
  misc_RNA (1)...(19): siRNA sense strand
gagaagcuacaaacaagaa

SEQ ID NO: 1055846 - RNA, 19 nt, Homo sapiens
  misc_RNA (1)...(19): siRNA sense strand
gagaucaccagcaagauug

SEQ ID NO: 1055847 - RNA, 19 nt, Homo sapiens
  misc_RNA (1)...(19): siRNA sense strand
cugcagagaucaccagcaa

SEQ ID NO: 1055848 - RNA, 19 nt, Homo sapiens
  misc_RNA (1)...(19): siRNA sense strand
ugaaagacuucgggaaaca

SEQ ID NO: 1055849 - RNA, 19 nt, Homo sapiens
  misc_RNA (1)...(19): siRNA sense strand
gaggcuggauaccaaauag

SEQ ID NO: 1055850 - RNA, 19 nt, Homo sapiens
  misc_RNA (1)...(19): siRNA sense strand
cguccgacuucgaagguua

SEQ ID NO: 1055851 - RNA, 19 nt, Homo sapiens
  misc_RNA (1)...(19): siRNA sense strand
gcacaucugcucgauaaca

SEQ ID NO: 1055852 - RNA, 19 nt, Homo sapiens
  misc_RNA (1)...(19): siRNA sense strand
guacagcaacagaaugaga

SEQ ID NO: 1055853 - RNA, 19 nt, Homo sapiens
  misc_RNA (1)...(19): siRNA sense strand
gcgagcacgugaaagacuu

SEQ ID NO: 1055854 - RNA, 19 nt, Homo sapiens
  misc_RNA (1)...(19): siRNA sense strand
uugcaaauguggagaaaca

SEQ ID NO: 1055855 - RNA, 19 nt, Homo sapiens
  misc_RNA (1)...(19): siRNA sense strand
cgccuacagugacgaagua

SEQ ID NO: 1055856 - RNA, 19 nt, Homo sapiens
  misc_RNA (1)...(19): siRNA sense strand
cgaaacagauuuuaaaagg

SEQ ID NO: 1055857 - RNA, 19 nt, Homo sapiens
  misc_RNA (1)...(19): siRNA sense strand
aaacagaugguugcaaaug

SEQ ID NO: 1055858 - RNA, 19 nt, Homo sapiens
  misc_RNA (1)...(19): siRNA sense strand
acagaugguugcaaaugug

SEQ ID NO: 1055859 - RNA, 19 nt, Homo sapiens
  misc_RNA (1)...(19): siRNA sense strand
cgugaaagacuucgggaaa

SEQ ID NO: 1055860 - RNA, 19 nt, Homo sapiens
  misc_RNA (1)...(19): siRNA sense strand
guggaaaccgagcaaauug

SEQ ID NO: 1055861 - RNA, 19 nt, Homo sapiens
  misc_RNA (1)...(19): siRNA sense strand
acuagaggcuggauaccaa

SEQ ID NO: 1055862 - RNA, 19 nt, Homo sapiens
  misc_RNA (1)...(19): siRNA sense strand
gaaagaacugcuugaacag

SEQ ID NO: 1055863 - RNA, 19 nt, Homo sapiens
  misc_RNA (1)...(19): siRNA sense strand
ugaagaagcgaaagaacug

SEQ ID NO: 1055864 - RNA, 19 nt, Homo sapiens
  misc_RNA (1)...(19): siRNA sense strand
gaagcuacaaacaagaaau

SEQ ID NO: 1055865 - RNA, 19 nt, Homo sapiens
  misc_RNA (1)...(19): siRNA sense strand
gaaugagaagcuacaaaca

SEQ ID NO: 1055866 - RNA, 19 nt, Homo sapiens
  misc_RNA (1)...(19): siRNA sense strand
uugaacagauggauuugga

SEQ ID NO: 1055867 - RNA, 19 nt, Homo sapiens
  misc_RNA (1)...(19): siRNA sense strand
cgagggauguacagcaaca

SEQ ID NO: 1055868 - RNA, 19 nt, Homo sapiens
  misc_RNA (1)...(19): siRNA sense strand
aaaccuuagucaugacaga

SEQ ID NO: 1055869 - RNA, 19 nt, Homo sapiens
  misc_RNA (1)...(19): siRNA sense strand
gaaacagaugguugcaaau

SEQ ID NO: 1055870 - RNA, 19 nt, Homo sapiens
  misc_RNA (1)...(19): siRNA sense strand
ggaaaacucgaaacagauu

SEQ ID NO: 1055871 - RNA, 19 nt, Homo sapiens
  misc_RNA (1)...(19): siRNA sense strand
ggauguacagcaacagaau

SEQ ID NO: 1055872 - RNA, 19 nt, Homo sapiens
  misc_RNA (1)...(19): siRNA sense strand
aagaacugcuugaacagau

SEQ ID NO: 1055873 - RNA, 19 nt, Homo sapiens
  misc_RNA (1)...(19): siRNA sense strand
acagauggauuuggaaguc

SEQ ID NO: 1055874 - RNA, 19 nt, Homo sapiens
  misc_RNA (1)...(19): siRNA sense strand
ggucaggagauguuggaaa

SEQ ID NO: 1055875 - RNA, 19 nt, Homo sapiens
  misc_RNA (1)...(19): siRNA sense strand
ggaaaccgagcaaauuggu

SEQ ID NO: 1055876 - RNA, 19 nt, Homo sapiens
  misc_RNA (1)...(19): siRNA sense strand
agagaucaccagcaagauu

SEQ ID NO: 1055877 - RNA, 19 nt, Homo sapiens
  misc_RNA (1)...(19): siRNA sense strand
ggucacggaucgccuacag

SEQ ID NO: 1055878 - RNA, 19 nt, Homo sapiens
  misc_RNA (1)...(19): siRNA sense strand
aaugagaagcuacaaacaa

SEQ ID NO: 1055879 - RNA, 19 nt, Homo sapiens
  misc_RNA (1)...(19): siRNA sense strand
ggugcucacugcagagauc

SEQ ID NO: 1055880 - RNA, 19 nt, Homo sapiens
  misc_RNA (1)...(19): siRNA sense strand
gucgagggauguacagcaa

SEQ ID NO: 1055881 - RNA, 19 nt, Homo sapiens
  misc_RNA (1)...(19): siRNA sense strand
gugacgaaguacggaauga

SEQ ID NO: 1055882 - RNA, 19 nt, Homo sapiens
  misc_RNA (1)...(19): siRNA sense strand
gguugcaaauguggagaaa

SEQ ID NO: 1055883 - RNA, 19 nt, Homo sapiens
  misc_RNA (1)...(19): siRNA sense strand
cgaagggguuguucuguga

SEQ ID NO: 1055884 - RNA, 19 nt, Homo sapiens
  misc_RNA (1)...(19): siRNA sense strand
acagcgagcacgugaaaga

SEQ ID NO: 1055885 - RNA, 19 nt, Homo sapiens
  misc_RNA (1)...(19): siRNA sense strand
gucaggagauguuggaaaa

SEQ ID NO: 1055886 - RNA, 19 nt, Homo sapiens
  misc_RNA (1)...(19): siRNA sense strand
caaagucgagggauguaca

SEQ ID NO: 1055887 - RNA, 19 nt, Homo sapiens
  misc_RNA (1)...(19): siRNA sense strand
augagaagcuacaaacaag

SEQ ID NO: 1055888 - RNA, 19 nt, Homo sapiens
  misc_RNA (1)...(19): siRNA sense strand
gugaaagacuucgggaaac

SEQ ID NO: 1055889 - RNA, 19 nt, Homo sapiens
  misc_RNA (1)...(19): siRNA sense strand
uggaaaaccuuagucauga

SEQ ID NO: 1055890 - RNA, 19 nt, Homo sapiens
  misc_RNA (1)...(19): siRNA sense strand
gagacuagaggcuggauac

SEQ ID NO: 1055891 - RNA, 19 nt, Homo sapiens
  misc_RNA (1)...(19): siRNA sense strand
acacagagaggcuggaaag

SEQ ID NO: 1055892 - RNA, 19 nt, Homo sapiens
  misc_RNA (1)...(19): siRNA sense strand
cagaaugagaagcuacaaa

SEQ ID NO: 1055893 - RNA, 19 nt, Homo sapiens
  misc_RNA (1)...(19): siRNA sense strand
gaaacagaugcuaauuugg

SEQ ID NO: 1055894 - RNA, 19 nt, Homo sapiens
  misc_RNA (1)...(19): siRNA sense strand
gagaaacagcuugaagaag

SEQ ID NO: 1055895 - RNA, 19 nt, Homo sapiens
  misc_RNA (1)...(19): siRNA sense strand
auacagcgagcacgugaaa

SEQ ID NO: 1055896 - RNA, 19 nt, Homo sapiens
  misc_RNA (1)...(19): siRNA sense strand
aacagaugguugcaaaugu

SEQ ID NO: 1055897 - RNA, 19 nt, Homo sapiens
  misc_RNA (1)...(19): siRNA sense strand
ggagacuagaggcuggaua

SEQ ID NO: 1055898 - RNA, 19 nt, Homo sapiens
  misc_RNA (1)...(19): siRNA sense strand
uggagaaacagcuugaaga

SEQ ID NO: 1055899 - RNA, 19 nt, Homo sapiens
  misc_RNA (1)...(19): siRNA sense strand
gauguacagcaacagaaug

SEQ ID NO: 1055900 - RNA, 19 nt, Homo sapiens
  misc_RNA (1)...(19): siRNA sense strand
gaaaugggaaaacucgaaa

SEQ ID NO: 1055901 - RNA, 19 nt, Homo sapiens
  misc_RNA (1)...(19): siRNA sense strand
agaacugcuugaacagaug

SEQ ID NO: 1055902 - RNA, 19 nt, Homo sapiens
  misc_RNA (1)...(19): siRNA sense strand
ugggaaaacucgaaacaga

SEQ ID NO: 1055903 - RNA, 19 nt, Homo sapiens
  misc_RNA (1)...(19): siRNA sense strand
ccaaauagcaguggaaacc

SEQ ID NO: 1055904 - RNA, 19 nt, Homo sapiens
  misc_RNA (1)...(19): siRNA sense strand
gggauguacagcaacagaa

SEQ ID NO: 1055905 - RNA, 19 nt, Homo sapiens
  misc_RNA (1)...(19): siRNA sense strand
cagaugcuaauuugggaaa

SEQ ID NO: 1055906 - RNA, 19 nt, Homo sapiens
  misc_RNA (1)...(19): siRNA sense strand
gcgaaagaacugcuugaac

SEQ ID NO: 1055907 - RNA, 19 nt, Homo sapiens
  misc_RNA (1)...(19): siRNA sense strand
aaagaacugcuugaacaga

SEQ ID NO: 1055908 - RNA, 19 nt, Homo sapiens
  misc_RNA (1)...(19): siRNA sense strand
uaacacagagaggcuggaa

SEQ ID NO: 1055909 - RNA, 19 nt, Homo sapiens
  misc_RNA (1)...(19): siRNA sense strand
agaaugagaagcuacaaac

SEQ ID NO: 1055910 - RNA, 19 nt, Homo sapiens
  misc_RNA (1)...(19): siRNA sense strand
gagggcacaucugcucgau

SEQ ID NO: 1055911 - RNA, 19 nt, Homo sapiens
  misc_RNA (1)...(19): siRNA sense strand
acaaacaagaaaugggaaa

SEQ ID NO: 1055912 - RNA, 19 nt, Homo sapiens
  misc_RNA (1)...(19): siRNA sense strand
uuuggaaguccgagagaua

SEQ ID NO: 1055913 - RNA, 19 nt, Homo sapiens
  misc_RNA (1)...(19): siRNA sense strand
ggacuucgcggugcucacu

SEQ ID NO: 1055914 - RNA, 19 nt, Homo sapiens
  misc_RNA (1)...(19): siRNA sense strand
caaauuggucaggagaugu

SEQ ID NO: 1055915 - RNA, 19 nt, Homo sapiens
  misc_RNA (1)...(19): siRNA sense strand
aaauuggucaggagauguu

SEQ ID NO: 1055916 - RNA, 19 nt, Homo sapiens
  misc_RNA (1)...(19): siRNA sense strand
aagcuacaaacaagaaaug

SEQ ID NO: 1055917 - RNA, 19 nt, Homo sapiens
  misc_RNA (1)...(19): siRNA sense strand
gaaagacuucgggaaacag

SEQ ID NO: 1055918 - RNA, 19 nt, Homo sapiens
  misc_RNA (1)...(19): siRNA sense strand
ccuuagucaugacagagaa

SEQ ID NO: 1055919 - RNA, 19 nt, Homo sapiens
  misc_RNA (1)...(19): siRNA sense strand
aguggaaaccgagcaaauu

SEQ ID NO: 1055920 - RNA, 19 nt, Homo sapiens
  misc_RNA (1)...(19): siRNA sense strand
agaggcuggauaccaaaua

SEQ ID NO: 1055921 - RNA, 19 nt, Homo sapiens
  misc_RNA (1)...(19): siRNA sense strand
gaucgccuacagugacgaa

SEQ ID NO: 1055922 - RNA, 19 nt, Homo sapiens
  misc_RNA (1)...(19): siRNA sense strand
gaacguggcugcagacauu

SEQ ID NO: 1055923 - RNA, 19 nt, Homo sapiens
  misc_RNA (1)...(19): siRNA sense strand
acaaagaaguguuggauua

SEQ ID NO: 1055924 - RNA, 19 nt, Homo sapiens
  misc_RNA (1)...(19): siRNA sense strand
ccacuaccaugaagaaauu

SEQ ID NO: 1055925 - RNA, 19 nt, Homo sapiens
  misc_RNA (1)...(19): siRNA sense strand
gaaggaagguucugauggu

SEQ ID NO: 1055926 - RNA, 19 nt, Homo sapiens
  misc_RNA (1)...(19): siRNA sense strand
gcauuguucuuaccaaauu

SEQ ID NO: 1055927 - RNA, 19 nt, Homo sapiens
  misc_RNA (1)...(19): siRNA sense strand
gaagucagaugcuccaaag

SEQ ID NO: 1055928 - RNA, 19 nt, Homo sapiens
  misc_RNA (1)...(19): siRNA sense strand
guagacaaauugauagaug

SEQ ID NO: 1055929 - RNA, 19 nt, Homo sapiens
  misc_RNA (1)...(19): siRNA sense strand
gugaucaucucauugcuaa

SEQ ID NO: 1055930 - RNA, 19 nt, Homo sapiens
  misc_RNA (1)...(19): siRNA sense strand
cagaagauccugacacuga

SEQ ID NO: 1055931 - RNA, 19 nt, Homo sapiens
  misc_RNA (1)...(19): siRNA sense strand
gcgaggaguucauucagaa

SEQ ID NO: 1055932 - RNA, 19 nt, Homo sapiens
  misc_RNA (1)...(19): siRNA sense strand
cagcagcucugaugacgaa

SEQ ID NO: 1055933 - RNA, 19 nt, Homo sapiens
  misc_RNA (1)...(19): siRNA sense strand
gugaagacauggaaucugu

SEQ ID NO: 1055934 - RNA, 19 nt, Homo sapiens
  misc_RNA (1)...(19): siRNA sense strand
gcucauugauggcauuguu

SEQ ID NO: 1055935 - RNA, 19 nt, Homo sapiens
  misc_RNA (1)...(19): siRNA sense strand
gcaggaagcgcgaggaguu

SEQ ID NO: 1055936 - RNA, 19 nt, Homo sapiens
  misc_RNA (1)...(19): siRNA sense strand
ugacguacaucacaagcaa

SEQ ID NO: 1055937 - RNA, 19 nt, Homo sapiens
  misc_RNA (1)...(19): siRNA sense strand
ccugugagguccaugauug

SEQ ID NO: 1055938 - RNA, 19 nt, Homo sapiens
  misc_RNA (1)...(19): siRNA sense strand
gaucaucucauugcuaaga

SEQ ID NO: 1055939 - RNA, 19 nt, Homo sapiens
  misc_RNA (1)...(19): siRNA sense strand
gaacuggguggcugugcua

SEQ ID NO: 1055940 - RNA, 19 nt, Homo sapiens
  misc_RNA (1)...(19): siRNA sense strand
gggaaaagcccaaggaaaa

SEQ ID NO: 1055941 - RNA, 19 nt, Homo sapiens
  misc_RNA (1)...(19): siRNA sense strand
aagcaaacccaucgucuuu

SEQ ID NO: 1055942 - RNA, 19 nt, Homo sapiens
  misc_RNA (1)...(19): siRNA sense strand
ucagacaccucggcucauu

SEQ ID NO: 1055943 - RNA, 19 nt, Homo sapiens
  misc_RNA (1)...(19): siRNA sense strand
gcagaggagagcaguaaga

SEQ ID NO: 1055944 - RNA, 19 nt, Homo sapiens
  misc_RNA (1)...(19): siRNA sense strand
cacggugacuuccacagua

SEQ ID NO: 1055945 - RNA, 19 nt, Homo sapiens
  misc_RNA (1)...(19): siRNA sense strand
gcacguaaccaaggcuuug

SEQ ID NO: 1055946 - RNA, 19 nt, Homo sapiens
  misc_RNA (1)...(19): siRNA sense strand
ugacgugcaucggcuguuu

SEQ ID NO: 1055947 - RNA, 19 nt, Homo sapiens
  misc_RNA (1)...(19): siRNA sense strand
gagaacggaguagaacuuu

SEQ ID NO: 1055948 - RNA, 19 nt, Homo sapiens
  misc_RNA (1)...(19): siRNA sense strand
gcccuuaugucgucaccuu

SEQ ID NO: 1055949 - RNA, 19 nt, Homo sapiens
  misc_RNA (1)...(19): siRNA sense strand
uggccaaacucauuacugu

SEQ ID NO: 1055950 - RNA, 19 nt, Homo sapiens
  misc_RNA (1)...(19): siRNA sense strand
uguaggagaagccuuagua

SEQ ID NO: 1055951 - RNA, 19 nt, Homo sapiens
  misc_RNA (1)...(19): siRNA sense strand
acugacauauguagacaaa

SEQ ID NO: 1055952 - RNA, 19 nt, Homo sapiens
  misc_RNA (1)...(19): siRNA sense strand
ugacugcccuggccaaacu

SEQ ID NO: 1055953 - RNA, 19 nt, Homo sapiens
  misc_RNA (1)...(19): siRNA sense strand
gagcuugagucgugaagac

SEQ ID NO: 1055954 - RNA, 19 nt, Homo sapiens
  misc_RNA (1)...(19): siRNA sense strand
caaacucauuacugucaau

SEQ ID NO: 1055955 - RNA, 19 nt, Homo sapiens
  misc_RNA (1)...(19): siRNA sense strand
ccaaauuugauaccauuga

SEQ ID NO: 1055956 - RNA, 19 nt, Homo sapiens
  misc_RNA (1)...(19): siRNA sense strand
acagagauccaacagcaaa

SEQ ID NO: 1055957 - RNA, 19 nt, Homo sapiens
  misc_RNA (1)...(19): siRNA sense strand
gaaguguuggauuacagua

SEQ ID NO: 1055958 - RNA, 19 nt, Homo sapiens
  misc_RNA (1)...(19): siRNA sense strand
uggcugugcuaacaaagaa

SEQ ID NO: 1055959 - RNA, 19 nt, Homo sapiens
  misc_RNA (1)...(19): siRNA sense strand
ggguggcugugcuaacaaa

SEQ ID NO: 1055960 - RNA, 19 nt, Homo sapiens
  misc_RNA (1)...(19): siRNA sense strand
caacaaguccacgaaguca

SEQ ID NO: 1055961 - RNA, 19 nt, Homo sapiens
  misc_RNA (1)...(19): siRNA sense strand
gcucaaaacucuaccaaac

SEQ ID NO: 1055962 - RNA, 19 nt, Homo sapiens
  misc_RNA (1)...(19): siRNA sense strand
gacaaguaccgcacagaga

SEQ ID NO: 1055963 - RNA, 19 nt, Homo sapiens
  misc_RNA (1)...(19): siRNA sense strand
gaccuacgcagccucaaug

SEQ ID NO: 1055964 - RNA, 19 nt, Homo sapiens
  misc_RNA (1)...(19): siRNA sense strand
gcccuggccaaacucauua

SEQ ID NO: 1055965 - RNA, 19 nt, Homo sapiens
  misc_RNA (1)...(19): siRNA sense strand
uggcuucaguguccucauu

SEQ ID NO: 1055966 - RNA, 19 nt, Homo sapiens
  misc_RNA (1)...(19): siRNA sense strand
aguauaaacuggacaacca

SEQ ID NO: 1055967 - RNA, 19 nt, Homo sapiens
  misc_RNA (1)...(19): siRNA sense strand
aaagaaguguuggauuaca

SEQ ID NO: 1055968 - RNA, 19 nt, Homo sapiens
  misc_RNA (1)...(19): siRNA sense strand
gcagaaaagucaggucuuc

SEQ ID NO: 1055969 - RNA, 19 nt, Homo sapiens
  misc_RNA (1)...(19): siRNA sense strand
gagcagcugcguacacaca

SEQ ID NO: 1055970 - RNA, 19 nt, Homo sapiens
  misc_RNA (1)...(19): siRNA sense strand
guuuguaggagaagccuua

SEQ ID NO: 1055971 - RNA, 19 nt, Homo sapiens
  misc_RNA (1)...(19): siRNA sense strand
gccaaacucauuacuguca

SEQ ID NO: 1055972 - RNA, 19 nt, Homo sapiens
  misc_RNA (1)...(19): siRNA sense strand
aguuugagcugguguuugu

SEQ ID NO: 1055973 - RNA, 19 nt, Homo sapiens
  misc_RNA (1)...(19): siRNA sense strand
gaacggaguagaacuuucc

SEQ ID NO: 1055974 - RNA, 19 nt, Homo sapiens
  misc_RNA (1)...(19): siRNA sense strand
ccaaacucauuacugucaa

SEQ ID NO: 1055975 - RNA, 19 nt, Homo sapiens
  misc_RNA (1)...(19): siRNA sense strand
guuagagaauggcuucagu

SEQ ID NO: 1055976 - RNA, 19 nt, Homo sapiens
  misc_RNA (1)...(19): siRNA sense strand
ccucauugcugccugugau

SEQ ID NO: 1055977 - RNA, 19 nt, Homo sapiens
  misc_RNA (1)...(19): siRNA sense strand
ugugguggcugcccucaug

SEQ ID NO: 1055978 - RNA, 19 nt, Homo sapiens
  misc_RNA (1)...(19): siRNA sense strand
caagcaaacccaucgucuu

SEQ ID NO: 1055979 - RNA, 19 nt, Homo sapiens
  misc_RNA (1)...(19): siRNA sense strand
uggcauuguucuuaccaaa

SEQ ID NO: 1055980 - RNA, 19 nt, Homo sapiens
  misc_RNA (1)...(19): siRNA sense strand
gacauauguagacaaauug

SEQ ID NO: 1055981 - RNA, 19 nt, Homo sapiens
  misc_RNA (1)...(19): siRNA sense strand
aaagggcuauggcaaggau

SEQ ID NO: 1055982 - RNA, 19 nt, Homo sapiens
  misc_RNA (1)...(19): siRNA sense strand
gcacggugacuuccacagu

SEQ ID NO: 1055983 - RNA, 19 nt, Homo sapiens
  misc_RNA (1)...(19): siRNA sense strand
uggaaucugugcuggacaa

SEQ ID NO: 1055984 - RNA, 19 nt, Homo sapiens
  misc_RNA (1)...(19): siRNA sense strand
cggaguagaacuuuccaaa

SEQ ID NO: 1055985 - RNA, 19 nt, Homo sapiens
  misc_RNA (1)...(19): siRNA sense strand
caaaccagucccugcagaa

SEQ ID NO: 1055986 - RNA, 19 nt, Homo sapiens
  misc_RNA (1)...(19): siRNA sense strand
gaagcagaggagagcagua

SEQ ID NO: 1055987 - RNA, 19 nt, Homo sapiens
  misc_RNA (1)...(19): siRNA sense strand
acucauuacugucaauaca

SEQ ID NO: 1055988 - RNA, 19 nt, Homo sapiens
  misc_RNA (1)...(19): siRNA sense strand
ggggaaaucuacuaaucuu

SEQ ID NO: 1055989 - RNA, 19 nt, Homo sapiens
  misc_RNA (1)...(19): siRNA sense strand
acggugacuuccacaguaa

SEQ ID NO: 1055990 - RNA, 19 nt, Homo sapiens
  misc_RNA (1)...(19): siRNA sense strand
acaacuccuucacccauga

SEQ ID NO: 1055991 - RNA, 19 nt, Homo sapiens
  misc_RNA (1)...(19): siRNA sense strand
gaagcgcgaggaguucauu

SEQ ID NO: 1055992 - RNA, 19 nt, Homo sapiens
  misc_RNA (1)...(19): siRNA sense strand
ugagaacggaguagaacuu

SEQ ID NO: 1055993 - RNA, 19 nt, Homo sapiens
  misc_RNA (1)...(19): siRNA sense strand
aagcagaggagagcaguaa

SEQ ID NO: 1055994 - RNA, 19 nt, Homo sapiens
  misc_RNA (1)...(19): siRNA sense strand
ccagcucugugaaucuguu

SEQ ID NO: 1055995 - RNA, 19 nt, Homo sapiens
  misc_RNA (1)...(19): siRNA sense strand
ucuaugacguacaucacaa

SEQ ID NO: 1055996 - RNA, 19 nt, Homo sapiens
  misc_RNA (1)...(19): siRNA sense strand
ucaauacaccugauuuggu

SEQ ID NO: 1055997 - RNA, 19 nt, Homo sapiens
  misc_RNA (1)...(19): siRNA sense strand
ccaugaagaaauuugaaga

SEQ ID NO: 1055998 - RNA, 19 nt, Homo sapiens
  misc_RNA (1)...(19): siRNA sense strand
agacaccucggcucauuga

SEQ ID NO: 1055999 - RNA, 19 nt, Homo sapiens
  misc_RNA (1)...(19): siRNA sense strand
cgaaggggcugcucaaaac

SEQ ID NO: 1056000 - RNA, 19 nt, Homo sapiens
  misc_RNA (1)...(19): siRNA sense strand
cgaagucagaugcuccaaa

SEQ ID NO: 1056001 - RNA, 19 nt, Homo sapiens
  misc_RNA (1)...(19): siRNA sense strand
caaagaaguguuggauuac

SEQ ID NO: 1056002 - RNA, 19 nt, Homo sapiens
  misc_RNA (1)...(19): siRNA sense strand
ccagaccuacugugaccua

SEQ ID NO: 1056003 - RNA, 19 nt, Homo sapiens
  misc_RNA (1)...(19): siRNA sense strand
gcaggccgcaugcaagaca

SEQ ID NO: 1056004 - RNA, 19 nt, Homo sapiens
  misc_RNA (1)...(19): siRNA sense strand
aagauuuccuucugguugu

SEQ ID NO: 1056005 - RNA, 19 nt, Homo sapiens
  misc_RNA (1)...(19): siRNA sense strand
ccagggcguuagcgacuca

SEQ ID NO: 1056006 - RNA, 19 nt, Homo sapiens
  misc_RNA (1)...(19): siRNA sense strand
acaaguaccgcacagagau

SEQ ID NO: 1056007 - RNA, 19 nt, Homo sapiens
  misc_RNA (1)...(19): siRNA sense strand
ggugcuguuuguaggagaa

SEQ ID NO: 1056008 - RNA, 19 nt, Homo sapiens
  misc_RNA (1)...(19): siRNA sense strand
gcccuacacccuccagaga

SEQ ID NO: 1056009 - RNA, 19 nt, Homo sapiens
  misc_RNA (1)...(19): siRNA sense strand
ucaugcaccggacccguua

SEQ ID NO: 1056010 - RNA, 19 nt, Homo sapiens
  misc_RNA (1)...(19): siRNA sense strand
ccaacaaguccacgaaguc

SEQ ID NO: 1056011 - RNA, 19 nt, Homo sapiens
  misc_RNA (1)...(19): siRNA sense strand
acacugacauauguagaca

SEQ ID NO: 1056012 - RNA, 19 nt, Homo sapiens
  misc_RNA (1)...(19): siRNA sense strand
gauccugacacugacauau

SEQ ID NO: 1056013 - RNA, 19 nt, Homo sapiens
  misc_RNA (1)...(19): siRNA sense strand
gacaaugccccucugauga

SEQ ID NO: 1056014 - RNA, 19 nt, Homo sapiens
  misc_RNA (1)...(19): siRNA sense strand
ggaguucauucagaagcau

SEQ ID NO: 1056015 - RNA, 19 nt, Homo sapiens
  misc_RNA (1)...(19): siRNA sense strand
cgcgaggaguucauucaga

SEQ ID NO: 1056016 - RNA, 19 nt, Homo sapiens
  misc_RNA (1)...(19): siRNA sense strand
aaaccagucccugcagaaa

SEQ ID NO: 1056017 - RNA, 19 nt, Homo sapiens
  misc_RNA (1)...(19): siRNA sense strand
gcucgacuucuucaccauu

SEQ ID NO: 1056018 - RNA, 19 nt, Homo sapiens
  misc_RNA (1)...(19): siRNA sense strand
auugauggcauuguucuua

SEQ ID NO: 1056019 - RNA, 19 nt, Homo sapiens
  misc_RNA (1)...(19): siRNA sense strand
ccauggugcaguuguuuga

SEQ ID NO: 1056020 - RNA, 19 nt, Homo sapiens
  misc_RNA (1)...(19): siRNA sense strand
gggaaaucuacuaaucuug

SEQ ID NO: 1056021 - RNA, 19 nt, Homo sapiens
  misc_RNA (1)...(19): siRNA sense strand
gaagauccugacacugaca

SEQ ID NO: 1056022 - RNA, 19 nt, Homo sapiens
  misc_RNA (1)...(19): siRNA sense strand
ggacaugaaccuagaguaa

SEQ ID NO: 1056023 - RNA, 19 nt, Homo sapiens
  misc_RNA (1)...(19): siRNA sense strand
gaaccuagaguaaauaugu

SEQ ID NO: 1056024 - RNA, 19 nt, Homo sapiens
  misc_RNA (1)...(19): siRNA sense strand
gaguauugcagcauuauua

SEQ ID NO: 1056025 - RNA, 19 nt, Homo sapiens
  misc_RNA (1)...(19): siRNA sense strand
gcaagaagcuuugggacau

SEQ ID NO: 1056026 - RNA, 19 nt, Homo sapiens
  misc_RNA (1)...(19): siRNA sense strand
uaaagugacuggagaaagu

SEQ ID NO: 1056027 - RNA, 19 nt, Homo sapiens
  misc_RNA (1)...(19): siRNA sense strand
gaaguaaugcaacagagua

SEQ ID NO: 1056028 - RNA, 19 nt, Homo sapiens
  misc_RNA (1)...(19): siRNA sense strand
gaacagcuuuucagcauuu

SEQ ID NO: 1056029 - RNA, 19 nt, Homo sapiens
  misc_RNA (1)...(19): siRNA sense strand
caucagcuauuuaugcaaa

SEQ ID NO: 1056030 - RNA, 19 nt, Homo sapiens
  misc_RNA (1)...(19): siRNA sense strand
ucaacgagauccuuauuca

SEQ ID NO: 1056031 - RNA, 19 nt, Homo sapiens
  misc_RNA (1)...(19): siRNA sense strand
guauggagauaucgaguau

SEQ ID NO: 1056032 - RNA, 19 nt, Homo sapiens
  misc_RNA (1)...(19): siRNA sense strand
ccucugaacaagauuauua

SEQ ID NO: 1056033 - RNA, 19 nt, Homo sapiens
  misc_RNA (1)...(19): siRNA sense strand
aaucuuggcugaaccuaaa

SEQ ID NO: 1056034 - RNA, 19 nt, Homo sapiens
  misc_RNA (1)...(19): siRNA sense strand
gaugaagaacuuacaagaa

SEQ ID NO: 1056035 - RNA, 19 nt, Homo sapiens
  misc_RNA (1)...(19): siRNA sense strand
cgagauccuuauucaaauu

SEQ ID NO: 1056036 - RNA, 19 nt, Homo sapiens
  misc_RNA (1)...(19): siRNA sense strand
ucaccgagauguugaagau

SEQ ID NO: 1056037 - RNA, 19 nt, Homo sapiens
  misc_RNA (1)...(19): siRNA sense strand
gaauagguguuuccuucau

SEQ ID NO: 1056038 - RNA, 19 nt, Homo sapiens
  misc_RNA (1)...(19): siRNA sense strand
gggcauugcuuucgucaag

SEQ ID NO: 1056039 - RNA, 19 nt, Homo sapiens
  misc_RNA (1)...(19): siRNA sense strand
guaccaggauuggaauauu

SEQ ID NO: 1056040 - RNA, 19 nt, Homo sapiens
  misc_RNA (1)...(19): siRNA sense strand
uccaaacgcuugucaguug

SEQ ID NO: 1056041 - RNA, 19 nt, Homo sapiens
  misc_RNA (1)...(19): siRNA sense strand
caagaguuccuuucacuga

SEQ ID NO: 1056042 - RNA, 19 nt, Homo sapiens
  misc_RNA (1)...(19): siRNA sense strand
gcauugcuuucgucaaguu

SEQ ID NO: 1056043 - RNA, 19 nt, Homo sapiens
  misc_RNA (1)...(19): siRNA sense strand
ggaagucaccgagauguug

SEQ ID NO: 1056044 - RNA, 19 nt, Homo sapiens
  misc_RNA (1)...(19): siRNA sense strand
gaagaagaucugcgggaaa

SEQ ID NO: 1056045 - RNA, 19 nt, Homo sapiens
  misc_RNA (1)...(19): siRNA sense strand
ugaauccucugaacaagau

SEQ ID NO: 1056046 - RNA, 19 nt, Homo sapiens
  misc_RNA (1)...(19): siRNA sense strand
gaagaugaagaacuuacaa

SEQ ID NO: 1056047 - RNA, 19 nt, Homo sapiens
  misc_RNA (1)...(19): siRNA sense strand
gaauaaagugacuggagaa

SEQ ID NO: 1056048 - RNA, 19 nt, Homo sapiens
  misc_RNA (1)...(19): siRNA sense strand
gggcuacguacgauacuua

SEQ ID NO: 1056049 - RNA, 19 nt, Homo sapiens
  misc_RNA (1)...(19): siRNA sense strand
uaagguguauggagauauc

SEQ ID NO: 1056050 - RNA, 19 nt, Homo sapiens
  misc_RNA (1)...(19): siRNA sense strand
gguguuuccuucauugaug

SEQ ID NO: 1056051 - RNA, 19 nt, Homo sapiens
  misc_RNA (1)...(19): siRNA sense strand
uaccaggauuggaauauug

SEQ ID NO: 1056052 - RNA, 19 nt, Homo sapiens
  misc_RNA (1)...(19): siRNA sense strand
ucaguuguaucaagaguuc

SEQ ID NO: 1056053 - RNA, 19 nt, Homo sapiens
  misc_RNA (1)...(19): siRNA sense strand
acaugaaccuagaguaaau

SEQ ID NO: 1056054 - RNA, 19 nt, Homo sapiens
  misc_RNA (1)...(19): siRNA sense strand
gaagucaccgagauguuga

SEQ ID NO: 1056055 - RNA, 19 nt, Homo sapiens
  misc_RNA (1)...(19): siRNA sense strand
gaagaacuuacaagaaucu

SEQ ID NO: 1056056 - RNA, 19 nt, Homo sapiens
  misc_RNA (1)...(19): siRNA sense strand
gacaugaaccuagaguaaa

SEQ ID NO: 1056057 - RNA, 19 nt, Homo sapiens
  misc_RNA (1)...(19): siRNA sense strand
uaucgaguauugcagcauu

SEQ ID NO: 1056058 - RNA, 19 nt, Homo sapiens
  misc_RNA (1)...(19): siRNA sense strand
gcagggccauggaggagau

SEQ ID NO: 1056059 - RNA, 19 nt, Homo sapiens
  misc_RNA (1)...(19): siRNA sense strand
ccaaaguccuacacagaag

SEQ ID NO: 1056060 - RNA, 19 nt, Homo sapiens
  misc_RNA (1)...(19): siRNA sense strand
gucauggagugguucagua

SEQ ID NO: 1056061 - RNA, 19 nt, Homo sapiens
  misc_RNA (1)...(19): siRNA sense strand
ggagauaucgaguauugca

SEQ ID NO: 1056062 - RNA, 19 nt, Homo sapiens
  misc_RNA (1)...(19): siRNA sense strand
auggagauaucgaguauug

SEQ ID NO: 1056063 - RNA, 19 nt, Homo sapiens
  misc_RNA (1)...(19): siRNA sense strand
ugaagaacuuacaagaauc

SEQ ID NO: 1056064 - RNA, 19 nt, Homo sapiens
  misc_RNA (1)...(19): siRNA sense strand
gaugauggaaguaaugcaa

SEQ ID NO: 1056065 - RNA, 19 nt, Homo sapiens
  misc_RNA (1)...(19): siRNA sense strand
gaucgaaguuuuagagcaa

SEQ ID NO: 1056066 - RNA, 19 nt, Homo sapiens
  misc_RNA (1)...(19): siRNA sense strand
aacgagauccuuauucaaa

SEQ ID NO: 1056067 - RNA, 19 nt, Homo sapiens
  misc_RNA (1)...(19): siRNA sense strand
ccaggaagcaaucuccaaa

SEQ ID NO: 1056068 - RNA, 19 nt, Homo sapiens
  misc_RNA (1)...(19): siRNA sense strand
caagaagcuuugggacaug

SEQ ID NO: 1056069 - RNA, 19 nt, Homo sapiens
  misc_RNA (1)...(19): siRNA sense strand
uguugaagaugaagaacuu

SEQ ID NO: 1056070 - RNA, 19 nt, Homo sapiens
  misc_RNA (1)...(19): siRNA sense strand
gggacaagcacaccaagga

SEQ ID NO: 1056071 - RNA, 19 nt, Homo sapiens
  misc_RNA (1)...(19): siRNA sense strand
acaagcugcccaagcaaua

SEQ ID NO: 1056072 - RNA, 19 nt, Homo sapiens
  misc_RNA (1)...(19): siRNA sense strand
ggauuggaauauugugaag

SEQ ID NO: 1056073 - RNA, 19 nt, Homo sapiens
  misc_RNA (1)...(19): siRNA sense strand
uauaguaccaggauuggaa

SEQ ID NO: 1056074 - RNA, 19 nt, Homo sapiens
  misc_RNA (1)...(19): siRNA sense strand
ggaaguaaugcaacagagu

SEQ ID NO: 1056075 - RNA, 19 nt, Homo sapiens
  misc_RNA (1)...(19): siRNA sense strand
uggagaaaguaaagguuug

SEQ ID NO: 1056076 - RNA, 19 nt, Homo sapiens
  misc_RNA (1)...(19): siRNA sense strand
accgagauguugaagauga

SEQ ID NO: 1056077 - RNA, 19 nt, Homo sapiens
  misc_RNA (1)...(19): siRNA sense strand
aauagguguuuccuucauu

SEQ ID NO: 1056078 - RNA, 19 nt, Homo sapiens
  misc_RNA (1)...(19): siRNA sense strand
auggagugguucaguauuu

SEQ ID NO: 1056079 - RNA, 19 nt, Homo sapiens
  misc_RNA (1)...(19): siRNA sense strand
ccaaacgcuugucaguugu

SEQ ID NO: 1056080 - RNA, 19 nt, Homo sapiens
  misc_RNA (1)...(19): siRNA sense strand
caacgagauccuuauucaa

SEQ ID NO: 1056081 - RNA, 19 nt, Homo sapiens
  misc_RNA (1)...(19): siRNA sense strand
ugauauaguaccaggauug

SEQ ID NO: 1056082 - RNA, 19 nt, Homo sapiens
  misc_RNA (1)...(19): siRNA sense strand
gaaguucaacgagauccuu

SEQ ID NO: 1056083 - RNA, 19 nt, Homo sapiens
  misc_RNA (1)...(19): siRNA sense strand
aaauaaagcaucugaaucc

SEQ ID NO: 1056084 - RNA, 19 nt, Homo sapiens
  misc_RNA (1)...(19): siRNA sense strand
guucaacgagauccuuauu

SEQ ID NO: 1056085 - RNA, 19 nt, Homo sapiens
  misc_RNA (1)...(19): siRNA sense strand
caacagccgcaucuuccuu

SEQ ID NO: 1056086 - RNA, 19 nt, Homo sapiens
  misc_RNA (1)...(19): siRNA sense strand
uaccaaaguccuacacaga

SEQ ID NO: 1056087 - RNA, 19 nt, Homo sapiens
  misc_RNA (1)...(19): siRNA sense strand
gggagcgcuucucgccuuu

SEQ ID NO: 1056088 - RNA, 19 nt, Homo sapiens
  misc_RNA (1)...(19): siRNA sense strand
caaaguccuacacagaaga

SEQ ID NO: 1056089 - RNA, 19 nt, Homo sapiens
  misc_RNA (1)...(19): siRNA sense strand
acaccaagcccaucaaggu

SEQ ID NO: 1056090 - RNA, 19 nt, Homo sapiens
  misc_RNA (1)...(19): siRNA sense strand
gggaaccgaauagguguuu

SEQ ID NO: 1056091 - RNA, 19 nt, Homo sapiens
  misc_RNA (1)...(19): siRNA sense strand
caaacgcuugucaguugua

SEQ ID NO: 1056092 - RNA, 19 nt, Homo sapiens
  misc_RNA (1)...(19): siRNA sense strand
agccgcaucuuccuuguga

SEQ ID NO: 1056093 - RNA, 19 nt, Homo sapiens
  misc_RNA (1)...(19): siRNA sense strand
uuuaagguguauggagaua

SEQ ID NO: 1056094 - RNA, 19 nt, Homo sapiens
  misc_RNA (1)...(19): siRNA sense strand
auaguaauaugaggcaaga

SEQ ID NO: 1056095 - RNA, 19 nt, Homo sapiens
  misc_RNA (1)...(19): siRNA sense strand
ccgagauguugaagaugaa

SEQ ID NO: 1056096 - RNA, 19 nt, Homo sapiens
  misc_RNA (1)...(19): siRNA sense strand
ugauggaaguaaugcaaca

SEQ ID NO: 1056097 - RNA, 19 nt, Homo sapiens
  misc_RNA (1)...(19): siRNA sense strand
acgagauccuuauucaaau

SEQ ID NO: 1056098 - RNA, 19 nt, Homo sapiens
  misc_RNA (1)...(19): siRNA sense strand
aagaagcuuugggacauga

SEQ ID NO: 1056099 - RNA, 19 nt, Homo sapiens
  misc_RNA (1)...(19): siRNA sense strand
ccaagggcauugcuuucgu

SEQ ID NO: 1056100 - RNA, 19 nt, Homo sapiens
  misc_RNA (1)...(19): siRNA sense strand
aagaagaucugcgggaaaa

SEQ ID NO: 1056101 - RNA, 19 nt, Homo sapiens
  misc_RNA (1)...(19): siRNA sense strand
auagguguuuccuucauug

SEQ ID NO: 1056102 - RNA, 19 nt, Homo sapiens
  misc_RNA (1)...(19): siRNA sense strand
guaucaagaguuccuuuca

SEQ ID NO: 1056103 - RNA, 19 nt, Homo sapiens
  misc_RNA (1)...(19): siRNA sense strand
cauuugaacaacaaucuga

SEQ ID NO: 1056104 - RNA, 19 nt, Homo sapiens
  misc_RNA (1)...(19): siRNA sense strand
guaaagguuugggcuacgu

SEQ ID NO: 1056105 - RNA, 19 nt, Homo sapiens
  misc_RNA (1)...(19): siRNA sense strand
caugaaccuagaguaaaua

SEQ ID NO: 1056106 - RNA, 19 nt, Homo sapiens
  misc_RNA (1)...(19): siRNA sense strand
agaugaagaacuuacaaga

SEQ ID NO: 1056107 - RNA, 19 nt, Homo sapiens
  misc_RNA (1)...(19): siRNA sense strand
gcaucugaauccucugaac

SEQ ID NO: 1056108 - RNA, 19 nt, Homo sapiens
  misc_RNA (1)...(19): siRNA sense strand
aaagugacuggagaaagua

SEQ ID NO: 1056109 - RNA, 19 nt, Homo sapiens
  misc_RNA (1)...(19): siRNA sense strand
caaucuuggcugaaccuaa

SEQ ID NO: 1056110 - RNA, 19 nt, Homo sapiens
  misc_RNA (1)...(19): siRNA sense strand
aaacgcuugucaguuguau

SEQ ID NO: 1056111 - RNA, 19 nt, Homo sapiens
  misc_RNA (1)...(19): siRNA sense strand
cgaauagguguuuccuuca

SEQ ID NO: 1056112 - RNA, 19 nt, Homo sapiens
  misc_RNA (1)...(19): siRNA sense strand
ggagugguucaguauuuua

SEQ ID NO: 1056113 - RNA, 19 nt, Homo sapiens
  misc_RNA (1)...(19): siRNA sense strand
gcccaacagccgcaucuuc

SEQ ID NO: 1056114 - RNA, 19 nt, Homo sapiens
  misc_RNA (1)...(19): siRNA sense strand
cauugaugauggaaguaau

SEQ ID NO: 1056115 - RNA, 19 nt, Homo sapiens
  misc_RNA (1)...(19): siRNA sense strand
gggacaugaaccuagagua

SEQ ID NO: 1056116 - RNA, 19 nt, Homo sapiens
  misc_RNA (1)...(19): siRNA sense strand
caucugaauccucugaaca

SEQ ID NO: 1056117 - RNA, 19 nt, Homo sapiens
  misc_RNA (1)...(19): siRNA sense strand
uaaagguuugggcuacgua

SEQ ID NO: 1056118 - RNA, 19 nt, Homo sapiens
  misc_RNA (1)...(19): siRNA sense strand
caccaagcccaucaagguu

SEQ ID NO: 1056119 - RNA, 19 nt, Homo sapiens
  misc_RNA (1)...(19): siRNA sense strand
cuggagaaaguaaagguuu

SEQ ID NO: 1056120 - RNA, 19 nt, Homo sapiens
  misc_RNA (1)...(19): siRNA sense strand
uaucaagaguuccuuucac

SEQ ID NO: 1056121 - RNA, 19 nt, Homo sapiens
  misc_RNA (1)...(19): siRNA sense strand
ccaagcccaucaagguuuu

SEQ ID NO: 1056122 - RNA, 19 nt, Homo sapiens
  misc_RNA (1)...(19): siRNA sense strand
gaugauggauuguggauaa

SEQ ID NO: 1056123 - RNA, 19 nt, Homo sapiens
  misc_RNA (1)...(19): siRNA sense strand
ggauauaccucuggaauug

SEQ ID NO: 1056124 - RNA, 19 nt, Homo sapiens
  misc_RNA (1)...(19): siRNA sense strand
gagcaaagacuaaauaugu

SEQ ID NO: 1056125 - RNA, 19 nt, Homo sapiens
  misc_RNA (1)...(19): siRNA sense strand
gcauuuagaucacaugaga

SEQ ID NO: 1056126 - RNA, 19 nt, Homo sapiens
  misc_RNA (1)...(19): siRNA sense strand
ggauaacucuuuugcauuu

SEQ ID NO: 1056127 - RNA, 19 nt, Homo sapiens
  misc_RNA (1)...(19): siRNA sense strand
cacaaaagcugaaggauuu

SEQ ID NO: 1056128 - RNA, 19 nt, Homo sapiens
  misc_RNA (1)...(19): siRNA sense strand
guaucucgauuaacucuga

SEQ ID NO: 1056129 - RNA, 19 nt, Homo sapiens
  misc_RNA (1)...(19): siRNA sense strand
ugagagcaaagacuaaaua

SEQ ID NO: 1056130 - RNA, 19 nt, Homo sapiens
  misc_RNA (1)...(19): siRNA sense strand
caauuauccuucaugucua

SEQ ID NO: 1056131 - RNA, 19 nt, Homo sapiens
  misc_RNA (1)...(19): siRNA sense strand
gcaaagacuaaauauguca

SEQ ID NO: 1056132 - RNA, 19 nt, Homo sapiens
  misc_RNA (1)...(19): siRNA sense strand
ucaauuauccuucaugucu

SEQ ID NO: 1056133 - RNA, 19 nt, Homo sapiens
  misc_RNA (1)...(19): siRNA sense strand
gaauugguguuccauuugc

SEQ ID NO: 1056134 - RNA, 19 nt, Homo sapiens
  misc_RNA (1)...(19): siRNA sense strand
gauuuaaggcugacaggaa

SEQ ID NO: 1056135 - RNA, 19 nt, Homo sapiens
  misc_RNA (1)...(19): siRNA sense strand
cagcagaaucucaggcaua

SEQ ID NO: 1056136 - RNA, 19 nt, Homo sapiens
  misc_RNA (1)...(19): siRNA sense strand
gaugggaccguguucagaa

SEQ ID NO: 1056137 - RNA, 19 nt, Homo sapiens
  misc_RNA (1)...(19): siRNA sense strand
caacaagcacgaccaugga

SEQ ID NO: 1056138 - RNA, 19 nt, Homo sapiens
  misc_RNA (1)...(19): siRNA sense strand
gagagcaaagacuaaauau

SEQ ID NO: 1056139 - RNA, 19 nt, Homo sapiens
  misc_RNA (1)...(19): siRNA sense strand
caggaagacugauguucau

SEQ ID NO: 1056140 - RNA, 19 nt, Homo sapiens
  misc_RNA (1)...(19): siRNA sense strand
ccugguaucucgauuaacu

SEQ ID NO: 1056141 - RNA, 19 nt, Homo sapiens
  misc_RNA (1)...(19): siRNA sense strand
ggauuguggauaacucuuu

SEQ ID NO: 1056142 - RNA, 19 nt, Homo sapiens
  misc_RNA (1)...(19): siRNA sense strand
caagcacgaccauggauga

SEQ ID NO: 1056143 - RNA, 19 nt, Homo sapiens
  misc_RNA (1)...(19): siRNA sense strand
gccagucaauuauccuuca

SEQ ID NO: 1056144 - RNA, 19 nt, Homo sapiens
  misc_RNA (1)...(19): siRNA sense strand
guucagaauucacacaaaa

SEQ ID NO: 1056145 - RNA, 19 nt, Homo sapiens
  misc_RNA (1)...(19): siRNA sense strand
gaucacaugagagcaaaga

SEQ ID NO: 1056146 - RNA, 19 nt, Homo sapiens
  misc_RNA (1)...(19): siRNA sense strand
uccauuugccagucaauua

SEQ ID NO: 1056147 - RNA, 19 nt, Homo sapiens
  misc_RNA (1)...(19): siRNA sense strand
gggaccguguucagaauuc

SEQ ID NO: 1056148 - RNA, 19 nt, Homo sapiens
  misc_RNA (1)...(19): siRNA sense strand
gagcaagcagagagccuuu

SEQ ID NO: 1056149 - RNA, 19 nt, Homo sapiens
  misc_RNA (1)...(19): siRNA sense strand
cacaugagagcaaagacua

SEQ ID NO: 1056150 - RNA, 19 nt, Homo sapiens
  misc_RNA (1)...(19): siRNA sense strand
ucgauuaacucugaacagu

SEQ ID NO: 1056151 - RNA, 19 nt, Homo sapiens
  misc_RNA (1)...(19): siRNA sense strand
ggaccguguucagaauuca

SEQ ID NO: 1056152 - RNA, 19 nt, Homo sapiens
  misc_RNA (1)...(19): siRNA sense strand
cggagccuaugguucauga

SEQ ID NO: 1056153 - RNA, 19 nt, Homo sapiens
  misc_RNA (1)...(19): siRNA sense strand
uagaucacaugagagcaaa

SEQ ID NO: 1056154 - RNA, 19 nt, Homo sapiens
  misc_RNA (1)...(19): siRNA sense strand
gacugauguucauggguaa

SEQ ID NO: 1056155 - RNA, 19 nt, Homo sapiens
  misc_RNA (1)...(19): siRNA sense strand
ugucggagccuaugguuca

SEQ ID NO: 1056156 - RNA, 19 nt, Homo sapiens
  misc_RNA (1)...(19): siRNA sense strand
ugagcugguucucuggauu

SEQ ID NO: 1056157 - RNA, 19 nt, Homo sapiens
  misc_RNA (1)...(19): siRNA sense strand
gagcugguucucuggauuc

SEQ ID NO: 1056158 - RNA, 19 nt, Homo sapiens
  misc_RNA (1)...(19): siRNA sense strand
acaggaagacugauguuca

SEQ ID NO: 1056159 - RNA, 19 nt, Homo sapiens
  misc_RNA (1)...(19): siRNA sense strand
caugagagcaaagacuaaa

SEQ ID NO: 1056160 - RNA, 19 nt, Homo sapiens
  misc_RNA (1)...(19): siRNA sense strand
gauggauuguggauaacuc

SEQ ID NO: 1056161 - RNA, 19 nt, Homo sapiens
  misc_RNA (1)...(19): siRNA sense strand
ccauuugccagucaauuau

SEQ ID NO: 1056162 - RNA, 19 nt, Homo sapiens
  misc_RNA (1)...(19): siRNA sense strand
gugugacugugaaagagaa

SEQ ID NO: 1056163 - RNA, 19 nt, Homo sapiens
  misc_RNA (1)...(19): siRNA sense strand
agcagaaucucaggcauau

SEQ ID NO: 1056164 - RNA, 19 nt, Homo sapiens
  misc_RNA (1)...(19): siRNA sense strand
agucaauuauccuucaugu

SEQ ID NO: 1056165 - RNA, 19 nt, Homo sapiens
  misc_RNA (1)...(19): siRNA sense strand
gauuguggauaacucuuuu

SEQ ID NO: 1056166 - RNA, 19 nt, Homo sapiens
  misc_RNA (1)...(19): siRNA sense strand
agacagaaacaaccucaag

SEQ ID NO: 1056167 - RNA, 19 nt, Homo sapiens
  misc_RNA (1)...(19): siRNA sense strand
agacagaugggaccguguu

SEQ ID NO: 1056168 - RNA, 19 nt, Homo sapiens
  misc_RNA (1)...(19): siRNA sense strand
cuacagggagacagaaaca

SEQ ID NO: 1056169 - RNA, 19 nt, Homo sapiens
  misc_RNA (1)...(19): siRNA sense strand
ggaugauggauuguggaua

SEQ ID NO: 1056170 - RNA, 19 nt, Homo sapiens
  misc_RNA (1)...(19): siRNA sense strand
ugacaggaagacugauguu

SEQ ID NO: 1056171 - RNA, 19 nt, Homo sapiens
  misc_RNA (1)...(19): siRNA sense strand
guggauaacucuuuugcau

SEQ ID NO: 1056172 - RNA, 19 nt, Homo sapiens
  misc_RNA (1)...(19): siRNA sense strand
uuagaucacaugagagcaa

SEQ ID NO: 1056173 - RNA, 19 nt, Homo sapiens
  misc_RNA (1)...(19): siRNA sense strand
gcugacaggaagacugaug

SEQ ID NO: 1056174 - RNA, 19 nt, Homo sapiens
  misc_RNA (1)...(19): siRNA sense strand
ucaaaauuguggagaagug

SEQ ID NO: 1056175 - RNA, 19 nt, Homo sapiens
  misc_RNA (1)...(19): siRNA sense strand
aagaggaguucgugugcaa

SEQ ID NO: 1056176 - RNA, 19 nt, Homo sapiens
  misc_RNA (1)...(19): siRNA sense strand
ucuucgugcucuucuauuu

SEQ ID NO: 1056177 - RNA, 19 nt, Homo sapiens
  misc_RNA (1)...(19): siRNA sense strand
gcuucuggcucuuccacau

SEQ ID NO: 1056178 - RNA, 19 nt, Homo sapiens
  misc_RNA (1)...(19): siRNA sense strand
ggacgagcaagaggaguuc

SEQ ID NO: 1056179 - RNA, 19 nt, Homo sapiens
  misc_RNA (1)...(19): siRNA sense strand
gaggaguucgugugcaaca

SEQ ID NO: 1056180 - RNA, 19 nt, Homo sapiens
  misc_RNA (1)...(19): siRNA sense strand
gaauaaggccgaccaagug

SEQ ID NO: 1056181 - RNA, 19 nt, Homo sapiens
  misc_RNA (1)...(19): siRNA sense strand
ggagaugccaaguguauuu

SEQ ID NO: 1056182 - RNA, 19 nt, Homo sapiens
  misc_RNA (1)...(19): siRNA sense strand
aggaacagcuugagaacua

SEQ ID NO: 1056183 - RNA, 19 nt, Homo sapiens
  misc_RNA (1)...(19): siRNA sense strand
gaacuaugacuucaccaaa

SEQ ID NO: 1056184 - RNA, 19 nt, Homo sapiens
  misc_RNA (1)...(19): siRNA sense strand
ccaagcaccucaucaagau

SEQ ID NO: 1056185 - RNA, 19 nt, Homo sapiens
  misc_RNA (1)...(19): siRNA sense strand
ggaaaucuacauucagcua

SEQ ID NO: 1056186 - RNA, 19 nt, Homo sapiens
  misc_RNA (1)...(19): siRNA sense strand
agaaggagaugccaagugu

SEQ ID NO: 1056187 - RNA, 19 nt, Homo sapiens
  misc_RNA (1)...(19): siRNA sense strand
guacugcgcgucuacauug

SEQ ID NO: 1056188 - RNA, 19 nt, Homo sapiens
  misc_RNA (1)...(19): siRNA sense strand
ggucaaggcuaugcaggaa

SEQ ID NO: 1056189 - RNA, 19 nt, Homo sapiens
  misc_RNA (1)...(19): siRNA sense strand
cagcgagaauaccagauuu

SEQ ID NO: 1056190 - RNA, 19 nt, Homo sapiens
  misc_RNA (1)...(19): siRNA sense strand
ggacuucccugaggucaag

SEQ ID NO: 1056191 - RNA, 19 nt, Homo sapiens
  misc_RNA (1)...(19): siRNA sense strand
gcucacagcuccccaauca

SEQ ID NO: 1056192 - RNA, 19 nt, Homo sapiens
  misc_RNA (1)...(19): siRNA sense strand
gugcaugccuacaucauca

SEQ ID NO: 1056193 - RNA, 19 nt, Homo sapiens
  misc_RNA (1)...(19): siRNA sense strand
caagaccaccuucaucaga

SEQ ID NO: 1056194 - RNA, 19 nt, Homo sapiens
  misc_RNA (1)...(19): siRNA sense strand
acuaugacuucaccaaauu

SEQ ID NO: 1056195 - RNA, 19 nt, Homo sapiens
  misc_RNA (1)...(19): siRNA sense strand
caaggugcaugccuacauc

SEQ ID NO: 1056196 - RNA, 19 nt, Homo sapiens
  misc_RNA (1)...(19): siRNA sense strand
ggcaagauaucagguguca

SEQ ID NO: 1056197 - RNA, 19 nt, Homo sapiens
  misc_RNA (1)...(19): siRNA sense strand
gcgacggcaugcuugauga

SEQ ID NO: 1056198 - RNA, 19 nt, Homo sapiens
  misc_RNA (1)...(19): siRNA sense strand
agaccaccuucaucagaua

SEQ ID NO: 1056199 - RNA, 19 nt, Homo sapiens
  misc_RNA (1)...(19): siRNA sense strand
ggaacagcuugagaacuau

SEQ ID NO: 1056200 - RNA, 19 nt, Homo sapiens
  misc_RNA (1)...(19): siRNA sense strand
caucaacacgcccgaggua

SEQ ID NO: 1056201 - RNA, 19 nt, Homo sapiens
  misc_RNA (1)...(19): siRNA sense strand
caagauaucaggugucaac

SEQ ID NO: 1056202 - RNA, 19 nt, Homo sapiens
  misc_RNA (1)...(19): siRNA sense strand
uaccggaaaucuacauuca

SEQ ID NO: 1056203 - RNA, 19 nt, Homo sapiens
  misc_RNA (1)...(19): siRNA sense strand
ucaaggcuaugcaggaaca

SEQ ID NO: 1056204 - RNA, 19 nt, Homo sapiens
  misc_RNA (1)...(19): siRNA sense strand
gccaagcaccucaucaaga

SEQ ID NO: 1056205 - RNA, 19 nt, Homo sapiens
  misc_RNA (1)...(19): siRNA sense strand
ggcaagaccaccuucauca

SEQ ID NO: 1056206 - RNA, 19 nt, Homo sapiens
  misc_RNA (1)...(19): siRNA sense strand
ugaauaaggccgaccaagu

SEQ ID NO: 1056207 - RNA, 19 nt, Homo sapiens
  misc_RNA (1)...(19): siRNA sense strand
gaaggagaugccaagugua

SEQ ID NO: 1056208 - RNA, 19 nt, Homo sapiens
  misc_RNA (1)...(19): siRNA sense strand
gcucaacgaccucaucaag

SEQ ID NO: 1056209 - RNA, 19 nt, Homo sapiens
  misc_RNA (1)...(19): siRNA sense strand
gaacagcuugagaacuaug

SEQ ID NO: 1056210 - RNA, 19 nt, Homo sapiens
  misc_RNA (1)...(19): siRNA sense strand
gagcucuucuacacucugu

SEQ ID NO: 1056211 - RNA, 19 nt, Homo sapiens
  misc_RNA (1)...(19): siRNA sense strand
aagaagagagagcuuauca

SEQ ID NO: 1056212 - RNA, 19 nt, Homo sapiens
  misc_RNA (1)...(19): siRNA sense strand
ucccugaggucaaggcuau

SEQ ID NO: 1056213 - RNA, 19 nt, Homo sapiens
  misc_RNA (1)...(19): siRNA sense strand
ucagcaggcuaccggaaau

SEQ ID NO: 1056214 - RNA, 19 nt, Homo sapiens
  misc_RNA (1)...(19): siRNA sense strand
gcaggcuaccggaaaucua

SEQ ID NO: 1056215 - RNA, 19 nt, Homo sapiens
  misc_RNA (1)...(19): siRNA sense strand
ccuccaagcugcccaacag

SEQ ID NO: 1056216 - RNA, 19 nt, Homo sapiens
  misc_RNA (1)...(19): siRNA sense strand
gaagagcaucagcgucauc

SEQ ID NO: 1056217 - RNA, 19 nt, Homo sapiens
  misc_RNA (1)...(19): siRNA sense strand
aaggagaugccaaguguau

SEQ ID NO: 1056218 - RNA, 19 nt, Homo sapiens
  misc_RNA (1)...(19): siRNA sense strand
cgacugcgacggcaugcuu

SEQ ID NO: 1056219 - RNA, 19 nt, Homo sapiens
  misc_RNA (1)...(19): siRNA sense strand
aacuaugacuucaccaaau

SEQ ID NO: 1056220 - RNA, 19 nt, Homo sapiens
  misc_RNA (1)...(19): siRNA sense strand
ccaaauuccacucgcugaa

SEQ ID NO: 1056221 - RNA, 19 nt, Homo sapiens
  misc_RNA (1)...(19): siRNA sense strand
ccgagaggguggacaggau

SEQ ID NO: 1056222 - RNA, 19 nt, Homo sapiens
  misc_RNA (1)...(19): siRNA sense strand
ggucguggccaaagacaag

SEQ ID NO: 1056223 - RNA, 19 nt, Homo sapiens
  misc_RNA (1)...(19): siRNA sense strand
caaguguauuuggaaagga

SEQ ID NO: 1056224 - RNA, 19 nt, Homo sapiens
  misc_RNA (1)...(19): siRNA sense strand
gagaugccaaguguauuug

SEQ ID NO: 1056225 - RNA, 19 nt, Homo sapiens
  misc_RNA (1)...(19): siRNA sense strand
acgcuuuccugaaucgauu

SEQ ID NO: 1056226 - RNA, 19 nt, Homo sapiens
  misc_RNA (1)...(19): siRNA sense strand
aagaccaccuucaucagau

SEQ ID NO: 1056227 - RNA, 19 nt, Homo sapiens
  misc_RNA (1)...(19): siRNA sense strand
aaaucuacauucagcuaca

SEQ ID NO: 1056228 - RNA, 19 nt, Homo sapiens
  misc_RNA (1)...(19): siRNA sense strand
acaagaagagagagcuuau

SEQ ID NO: 1056229 - RNA, 19 nt, Homo sapiens
  misc_RNA (1)...(19): siRNA sense strand
gaaaggaaaacaagaagag

SEQ ID NO: 1056230 - RNA, 19 nt, Homo sapiens
  misc_RNA (1)...(19): siRNA sense strand
gaagaaggagaugccaagu

SEQ ID NO: 1056231 - RNA, 19 nt, Homo sapiens
  misc_RNA (1)...(19): siRNA sense strand
gguacugcgcgucuacauu

SEQ ID NO: 1056232 - RNA, 19 nt, Homo sapiens
  misc_RNA (1)...(19): siRNA sense strand
aaguguauuuggaaaggaa

SEQ ID NO: 1056233 - RNA, 19 nt, Homo sapiens
  misc_RNA (1)...(19): siRNA sense strand
gcaggaacagcuugagaac

SEQ ID NO: 1056234 - RNA, 19 nt, Homo sapiens
  misc_RNA (1)...(19): siRNA sense strand
ggacgccgacuucgagaac

SEQ ID NO: 1056235 - RNA, 19 nt, Homo sapiens
  misc_RNA (1)...(19): siRNA sense strand
acagcgagaauaccagauu

SEQ ID NO: 1056236 - RNA, 19 nt, Homo sapiens
  misc_RNA (1)...(19): siRNA sense strand
gcaagaccaccuucaucag

SEQ ID NO: 1056237 - RNA, 19 nt, Homo sapiens
  misc_RNA (1)...(19): siRNA sense strand
caacacgcccgagguacug

SEQ ID NO: 1056238 - RNA, 19 nt, Homo sapiens
  misc_RNA (1)...(19): siRNA sense strand
caccacagacuccuucauc

SEQ ID NO: 1056239 - RNA, 19 nt, Homo sapiens
  misc_RNA (1)...(19): siRNA sense strand
aacaagaagagagagcuua

SEQ ID NO: 1056240 - RNA, 19 nt, Homo sapiens
  misc_RNA (1)...(19): siRNA sense strand
ccaaggugcaugccuacau

SEQ ID NO: 1056241 - RNA, 19 nt, Homo sapiens
  misc_RNA (1)...(19): siRNA sense strand
ggagugggucguggccaaa

SEQ ID NO: 1056242 - RNA, 19 nt, Homo sapiens
  misc_RNA (1)...(19): siRNA sense strand
cuugagaacuaugacuuca

SEQ ID NO: 1056243 - RNA, 19 nt, Homo sapiens
  misc_RNA (1)...(19): siRNA sense strand
uccgugucgugcugaauaa

SEQ ID NO: 1056244 - RNA, 19 nt, Homo sapiens
  misc_RNA (1)...(19): siRNA sense strand
caaauuccacucgcugaag

SEQ ID NO: 1056245 - RNA, 19 nt, Homo sapiens
  misc_RNA (1)...(19): siRNA sense strand
aaacaagaagagagagcuu

SEQ ID NO: 1056246 - RNA, 19 nt, Homo sapiens
  misc_RNA (1)...(19): siRNA sense strand
augccuacaucaucagcua

SEQ ID NO: 1056247 - RNA, 19 nt, Homo sapiens
  misc_RNA (1)...(19): siRNA sense strand
ucacaagcuggacaucuca

SEQ ID NO: 1056248 - RNA, 19 nt, Homo sapiens
  misc_RNA (1)...(19): siRNA sense strand
gcaggaagcuucagauaau

SEQ ID NO: 1056249 - RNA, 19 nt, Homo sapiens
  misc_RNA (1)...(19): siRNA sense strand
gaaagauccuggaaugugu

SEQ ID NO: 1056250 - RNA, 19 nt, Homo sapiens
  misc_RNA (1)...(19): siRNA sense strand
gagaauaucagcauuaaug

SEQ ID NO: 1056251 - RNA, 19 nt, Homo sapiens
  misc_RNA (1)...(19): siRNA sense strand
caagagaauaucagcauua

SEQ ID NO: 1056252 - RNA, 19 nt, Homo sapiens
  misc_RNA (1)...(19): siRNA sense strand
gaaaaccucugacguggua

SEQ ID NO: 1056253 - RNA, 19 nt, Homo sapiens
  misc_RNA (1)...(19): siRNA sense strand
gcaagagaauaucagcauu

SEQ ID NO: 1056254 - RNA, 19 nt, Homo sapiens
  misc_RNA (1)...(19): siRNA sense strand
guccuugccugcauuaauu

SEQ ID NO: 1056255 - RNA, 19 nt, Homo sapiens
  misc_RNA (1)...(19): siRNA sense strand
gaaaccagaugcuaaaccu

SEQ ID NO: 1056256 - RNA, 19 nt, Homo sapiens
  misc_RNA (1)...(19): siRNA sense strand
ccagaggauucaccaagaa

SEQ ID NO: 1056257 - RNA, 19 nt, Homo sapiens
  misc_RNA (1)...(19): siRNA sense strand
gcaguggacuuuugaauca

SEQ ID NO: 1056258 - RNA, 19 nt, Homo sapiens
  misc_RNA (1)...(19): siRNA sense strand
gggaaacaguagcaaagga

SEQ ID NO: 1056259 - RNA, 19 nt, Homo sapiens
  misc_RNA (1)...(19): siRNA sense strand
gcaguaccacccuguugua

SEQ ID NO: 1056260 - RNA, 19 nt, Homo sapiens
  misc_RNA (1)...(19): siRNA sense strand
gaaaccacaccaacagaga

SEQ ID NO: 1056261 - RNA, 19 nt, Homo sapiens
  misc_RNA (1)...(19): siRNA sense strand
ccuggaaugugucaucaaa

SEQ ID NO: 1056262 - RNA, 19 nt, Homo sapiens
  misc_RNA (1)...(19): siRNA sense strand
gagaugcgcaguggacuuu

SEQ ID NO: 1056263 - RNA, 19 nt, Homo sapiens
  misc_RNA (1)...(19): siRNA sense strand
gaaguccuugccugcauua

SEQ ID NO: 1056264 - RNA, 19 nt, Homo sapiens
  misc_RNA (1)...(19): siRNA sense strand
uagcaaaggagaucaguga

SEQ ID NO: 1056265 - RNA, 19 nt, Homo sapiens
  misc_RNA (1)...(19): siRNA sense strand
ggcaggaagcuucagauaa

SEQ ID NO: 1056266 - RNA, 19 nt, Homo sapiens
  misc_RNA (1)...(19): siRNA sense strand
gauagaaaccacaccaaca

SEQ ID NO: 1056267 - RNA, 19 nt, Homo sapiens
  misc_RNA (1)...(19): siRNA sense strand
caaaguacuugaagaucag

SEQ ID NO: 1056268 - RNA, 19 nt, Homo sapiens
  misc_RNA (1)...(19): siRNA sense strand
uauggauucugacaucaaa

SEQ ID NO: 1056269 - RNA, 19 nt, Homo sapiens
  misc_RNA (1)...(19): siRNA sense strand
ugaaucagcugugcaagag

SEQ ID NO: 1056270 - RNA, 19 nt, Homo sapiens
  misc_RNA (1)...(19): siRNA sense strand
uaguagauauagccacaaa

SEQ ID NO: 1056271 - RNA, 19 nt, Homo sapiens
  misc_RNA (1)...(19): siRNA sense strand
aaucagcugugcaagagaa

SEQ ID NO: 1056272 - RNA, 19 nt, Homo sapiens
  misc_RNA (1)...(19): siRNA sense strand
gugaagccaugaaguccuu

SEQ ID NO: 1056273 - RNA, 19 nt, Homo sapiens
  misc_RNA (1)...(19): siRNA sense strand
ccacaaaacguaagcagua

SEQ ID NO: 1056274 - RNA, 19 nt, Homo sapiens
  misc_RNA (1)...(19): siRNA sense strand
guaagcaguaucccagaaa

SEQ ID NO: 1056275 - RNA, 19 nt, Homo sapiens
  misc_RNA (1)...(19): siRNA sense strand
caggaagcuucagauaauu

SEQ ID NO: 1056276 - RNA, 19 nt, Homo sapiens
  misc_RNA (1)...(19): siRNA sense strand
ccugagaacuuuauaacac

SEQ ID NO: 1056277 - RNA, 19 nt, Homo sapiens
  misc_RNA (1)...(19): siRNA sense strand
gcaaaggagaucagugaag

SEQ ID NO: 1056278 - RNA, 19 nt, Homo sapiens
  misc_RNA (1)...(19): siRNA sense strand
ugaaguccuugccugcauu

SEQ ID NO: 1056279 - RNA, 19 nt, Homo sapiens
  misc_RNA (1)...(19): siRNA sense strand
ccucugacgugguacugaa

SEQ ID NO: 1056280 - RNA, 19 nt, Homo sapiens
  misc_RNA (1)...(19): siRNA sense strand
uaggaaaccagaugcuaaa

SEQ ID NO: 1056281 - RNA, 19 nt, Homo sapiens
  misc_RNA (1)...(19): siRNA sense strand
cguaagcaguaucccagaa

SEQ ID NO: 1056282 - RNA, 19 nt, Homo sapiens
  misc_RNA (1)...(19): siRNA sense strand
ugcuaaaccugagaacuuu

SEQ ID NO: 1056283 - RNA, 19 nt, Homo sapiens
  misc_RNA (1)...(19): siRNA sense strand
agaaagauccuggaaugug

SEQ ID NO: 1056284 - RNA, 19 nt, Homo sapiens
  misc_RNA (1)...(19): siRNA sense strand
ggaagcuucagauaauugu

SEQ ID NO: 1056285 - RNA, 19 nt, Homo sapiens
  misc_RNA (1)...(19): siRNA sense strand
ggauucugacaucaaagua

SEQ ID NO: 1056286 - RNA, 19 nt, Homo sapiens
  misc_RNA (1)...(19): siRNA sense strand
ugaccgaaaugcuacaacu

SEQ ID NO: 1056287 - RNA, 19 nt, Homo sapiens
  misc_RNA (1)...(19): siRNA sense strand
uaagcaguaucccagaaag

SEQ ID NO: 1056288 - RNA, 19 nt, Homo sapiens
  misc_RNA (1)...(19): siRNA sense strand
ugaacaaggagagggauuu

SEQ ID NO: 1056289 - RNA, 19 nt, Homo sapiens
  misc_RNA (1)...(19): siRNA sense strand
ugcauuaauugaacaagga

SEQ ID NO: 1056290 - RNA, 19 nt, Homo sapiens
  misc_RNA (1)...(19): siRNA sense strand
gaagcaguaccacccuguu

SEQ ID NO: 1056291 - RNA, 19 nt, Homo sapiens
  misc_RNA (1)...(19): siRNA sense strand
gauauagccacaaaacgua

SEQ ID NO: 1056292 - RNA, 19 nt, Homo sapiens
  misc_RNA (1)...(19): siRNA sense strand
uccagaggauucaccaaga

SEQ ID NO: 1056293 - RNA, 19 nt, Homo sapiens
  misc_RNA (1)...(19): siRNA sense strand
gaacaaggagagggauuuu

SEQ ID NO: 1056294 - RNA, 19 nt, Homo sapiens
  misc_RNA (1)...(19): siRNA sense strand
auaggaaaccagaugcuaa

SEQ ID NO: 1056295 - RNA, 19 nt, Homo sapiens
  misc_RNA (1)...(19): siRNA sense strand
cauaggaaaccagaugcua

SEQ ID NO: 1056296 - RNA, 19 nt, Homo sapiens
  misc_RNA (1)...(19): siRNA sense strand
uggcaggaagcuucagaua

SEQ ID NO: 1056297 - RNA, 19 nt, Homo sapiens
  misc_RNA (1)...(19): siRNA sense strand
cugagaacuuuauaacaca

SEQ ID NO: 1056298 - RNA, 19 nt, Homo sapiens
  misc_RNA (1)...(19): siRNA sense strand
guacuugaagaucaguuug

SEQ ID NO: 1056299 - RNA, 19 nt, Homo sapiens
  misc_RNA (1)...(19): siRNA sense strand
gaucagugaagccaugaag

SEQ ID NO: 1056300 - RNA, 19 nt, Homo sapiens
  misc_RNA (1)...(19): siRNA sense strand
cagcugugcaagagaauau

SEQ ID NO: 1056301 - RNA, 19 nt, Homo sapiens
  misc_RNA (1)...(19): siRNA sense strand
gcaguaucccagaaagauc

SEQ ID NO: 1056302 - RNA, 19 nt, Homo sapiens
  misc_RNA (1)...(19): siRNA sense strand
gauccuggaaugugucauc

SEQ ID NO: 1056303 - RNA, 19 nt, Homo sapiens
  misc_RNA (1)...(19): siRNA sense strand
ucagugaagccaugaaguc

SEQ ID NO: 1056304 - RNA, 19 nt, Homo sapiens
  misc_RNA (1)...(19): siRNA sense strand
ccccucauauggaaaauuu

SEQ ID NO: 1056305 - RNA, 19 nt, Homo sapiens
  misc_RNA (1)...(19): siRNA sense strand
ugucauaggaaaccagaug

SEQ ID NO: 1056306 - RNA, 19 nt, Homo sapiens
  misc_RNA (1)...(19): siRNA sense strand
gaggauucaccaagaaguc

SEQ ID NO: 1056307 - RNA, 19 nt, Homo sapiens
  misc_RNA (1)...(19): siRNA sense strand
cugaguuggugguccuuga

SEQ ID NO: 1056308 - RNA, 19 nt, Homo sapiens
  misc_RNA (1)...(19): siRNA sense strand
guacugaaaagaaagcaaa

SEQ ID NO: 1056309 - RNA, 19 nt, Homo sapiens
  misc_RNA (1)...(19): siRNA sense strand
uagaaaccacaccaacaga

SEQ ID NO: 1056310 - RNA, 19 nt, Homo sapiens
  misc_RNA (1)...(19): siRNA sense strand
augcuaaaccugagaacuu

SEQ ID NO: 1056311 - RNA, 19 nt, Homo sapiens
  misc_RNA (1)...(19): siRNA sense strand
gaagcuucagauaauuguu

SEQ ID NO: 1056312 - RNA, 19 nt, Homo sapiens
  misc_RNA (1)...(19): siRNA sense strand
gagaacuuuauaacacaga

SEQ ID NO: 1056313 - RNA, 19 nt, Homo sapiens
  misc_RNA (1)...(19): siRNA sense strand
cagcauuaaugggcaagca

SEQ ID NO: 1056314 - RNA, 19 nt, Homo sapiens
  misc_RNA (1)...(19): siRNA sense strand
ccacuggaccuaaaauaug

SEQ ID NO: 1056315 - RNA, 19 nt, Homo sapiens
  misc_RNA (1)...(19): siRNA sense strand
gcaggacgcuuacuucuga

SEQ ID NO: 1056316 - RNA, 19 nt, Homo sapiens
  misc_RNA (1)...(19): siRNA sense strand
gggcucagauucagagaua

SEQ ID NO: 1056317 - RNA, 19 nt, Homo sapiens
  misc_RNA (1)...(19): siRNA sense strand
ucaaauggcuggacauguu

SEQ ID NO: 1056318 - RNA, 19 nt, Homo sapiens
  misc_RNA (1)...(19): siRNA sense strand
ggacaaguauggcuuccuu

SEQ ID NO: 1056319 - RNA, 19 nt, Homo sapiens
  misc_RNA (1)...(19): siRNA sense strand
ggcaguaccugucuaauag

SEQ ID NO: 1056320 - RNA, 19 nt, Homo sapiens
  misc_RNA (1)...(19): siRNA sense strand
gcagaacccaggaaaguuu

SEQ ID NO: 1056321 - RNA, 19 nt, Homo sapiens
  misc_RNA (1)...(19): siRNA sense strand
gcucaaggccggaagcuuu

SEQ ID NO: 1056322 - RNA, 19 nt, Homo sapiens
  misc_RNA (1)...(19): siRNA sense strand
gcacaugccugcggagcaa

SEQ ID NO: 1056323 - RNA, 19 nt, Homo sapiens
  misc_RNA (1)...(19): siRNA sense strand
gagagaagcaggagaagga

SEQ ID NO: 1056324 - RNA, 19 nt, Homo sapiens
  misc_RNA (1)...(19): siRNA sense strand
gagagaagcaggagaagga

SEQ ID NO: 1056325 - RNA, 19 nt, Homo sapiens
  misc_RNA (1)...(19): siRNA sense strand
ccaaguggcuggaugugau

SEQ ID NO: 1056326 - RNA, 19 nt, Homo sapiens
  misc_RNA (1)...(19): siRNA sense strand
gagcagaacccaggaaagu

SEQ ID NO: 1056327 - RNA, 19 nt, Homo sapiens
  misc_RNA (1)...(19): siRNA sense strand
ggagaaagagcgagagaag

SEQ ID NO: 1056328 - RNA, 19 nt, Homo sapiens
  misc_RNA (1)...(19): siRNA sense strand
cagcccagcucaagaagug

SEQ ID NO: 1056329 - RNA, 19 nt, Homo sapiens
  misc_RNA (1)...(19): siRNA sense strand
ggcuggacauguucaguaa

SEQ ID NO: 1056330 - RNA, 19 nt, Homo sapiens
  misc_RNA (1)...(19): siRNA sense strand
ggcagaagcaggagaagaa

SEQ ID NO: 1056331 - RNA, 19 nt, Homo sapiens
  misc_RNA (1)...(19): siRNA sense strand
ggcagaagcaggagaaaga

SEQ ID NO: 1056332 - RNA, 19 nt, Homo sapiens
  misc_RNA (1)...(19): siRNA sense strand
gcauugacccugugcucua

SEQ ID NO: 1056333 - RNA, 19 nt, Homo sapiens
  misc_RNA (1)...(19): siRNA sense strand
ugacagaagcacugauuga

SEQ ID NO: 1056334 - RNA, 19 nt, Homo sapiens
  misc_RNA (1)...(19): siRNA sense strand
gcaagacggacaaguaugg

SEQ ID NO: 1056335 - RNA, 19 nt, Homo sapiens
  misc_RNA (1)...(19): siRNA sense strand
gcgcaagacggacaaguau

SEQ ID NO: 1056336 - RNA, 19 nt, Homo sapiens
  misc_RNA (1)...(19): siRNA sense strand
gcucagauucagagauaaa

SEQ ID NO: 1056337 - RNA, 19 nt, Homo sapiens
  misc_RNA (1)...(19): siRNA sense strand
uggcaguaccugucuaaua

SEQ ID NO: 1056338 - RNA, 19 nt, Homo sapiens
  misc_RNA (1)...(19): siRNA sense strand
ccauggagcagcugcguaa

SEQ ID NO: 1056339 - RNA, 19 nt, Homo sapiens
  misc_RNA (1)...(19): siRNA sense strand
agaaggagcggcagaaaca

SEQ ID NO: 1056340 - RNA, 19 nt, Homo sapiens
  misc_RNA (1)...(19): siRNA sense strand
agaaggagcgggagaagga

SEQ ID NO: 1056341 - RNA, 19 nt, Homo sapiens
  misc_RNA (1)...(19): siRNA sense strand
agaaggagcggcagaaaca

SEQ ID NO: 1056342 - RNA, 19 nt, Homo sapiens
  misc_RNA (1)...(19): siRNA sense strand
ggugacagaagcacugauu

SEQ ID NO: 1056343 - RNA, 19 nt, Homo sapiens
  misc_RNA (1)...(19): siRNA sense strand
ggagaaggagcggcagaaa

SEQ ID NO: 1056344 - RNA, 19 nt, Homo sapiens
  misc_RNA (1)...(19): siRNA sense strand
ggagaaggagcggcagaaa

SEQ ID NO: 1056345 - RNA, 19 nt, Homo sapiens
  misc_RNA (1)...(19): siRNA sense strand
gcaaggagacccggaagca

SEQ ID NO: 1056346 - RNA, 19 nt, Homo sapiens
  misc_RNA (1)...(19): siRNA sense strand
ggagaaggagcgagagaag

SEQ ID NO: 1056347 - RNA, 19 nt, Homo sapiens
  misc_RNA (1)...(19): siRNA sense strand
ggcuggaugugauugagaa

SEQ ID NO: 1056348 - RNA, 19 nt, Homo sapiens
  misc_RNA (1)...(19): siRNA sense strand
agaaagagcgagagaagca

SEQ ID NO: 1056349 - RNA, 19 nt, Homo sapiens
  misc_RNA (1)...(19): siRNA sense strand
gugaaggcguuaagaucau

SEQ ID NO: 1056350 - RNA, 19 nt, Homo sapiens
  misc_RNA (1)...(19): siRNA sense strand
ugcaugaggugaccaaucu

SEQ ID NO: 1056351 - RNA, 19 nt, Homo sapiens
  misc_RNA (1)...(19): siRNA sense strand
ggcagaaacaggagaagga

SEQ ID NO: 1056352 - RNA, 19 nt, Homo sapiens
  misc_RNA (1)...(19): siRNA sense strand
ggcagaaacaggagaagga

SEQ ID NO: 1056353 - RNA, 19 nt, Homo sapiens
  misc_RNA (1)...(19): siRNA sense strand
cucaagaaguggcgggaaa

SEQ ID NO: 1056354 - RNA, 19 nt, Homo sapiens
  misc_RNA (1)...(19): siRNA sense strand
uggaugugauugagaagga

SEQ ID NO: 1056355 - RNA, 19 nt, Homo sapiens
  misc_RNA (1)...(19): siRNA sense strand
agaaggagcggcagaagca

SEQ ID NO: 1056356 - RNA, 19 nt, Homo sapiens
  misc_RNA (1)...(19): siRNA sense strand
agaaggagcggcagaagca

SEQ ID NO: 1056357 - RNA, 19 nt, Homo sapiens
  misc_RNA (1)...(19): siRNA sense strand
gaaugcagcccagcucaag

SEQ ID NO: 1056358 - RNA, 19 nt, Homo sapiens
  misc_RNA (1)...(19): siRNA sense strand
aagacuuccuggugcauga

SEQ ID NO: 1056359 - RNA, 19 nt, Homo sapiens
  misc_RNA (1)...(19): siRNA sense strand
caaauggcuggacauguuc

SEQ ID NO: 1056360 - RNA, 19 nt, Homo sapiens
  misc_RNA (1)...(19): siRNA sense strand
gacccugugcucuacauga

SEQ ID NO: 1056361 - RNA, 19 nt, Homo sapiens
  misc_RNA (1)...(19): siRNA sense strand
gcucaaauggcuggacaug

SEQ ID NO: 1056362 - RNA, 19 nt, Homo sapiens
  misc_RNA (1)...(19): siRNA sense strand
gagaaggagcggcagaaac

SEQ ID NO: 1056363 - RNA, 19 nt, Homo sapiens
  misc_RNA (1)...(19): siRNA sense strand
gagaaggagcggcagaaac

SEQ ID NO: 1056364 - RNA, 19 nt, Homo sapiens
  misc_RNA (1)...(19): siRNA sense strand
caaguggcuggaugugauu

SEQ ID NO: 1056365 - RNA, 19 nt, Homo sapiens
  misc_RNA (1)...(19): siRNA sense strand
ugugaaggcguuaagauca

SEQ ID NO: 1056366 - RNA, 19 nt, Homo sapiens
  misc_RNA (1)...(19): siRNA sense strand
uggcuggacauguucagua

SEQ ID NO: 1056367 - RNA, 19 nt, Homo sapiens
  misc_RNA (1)...(19): siRNA sense strand
agaaggagcgagagaagca

SEQ ID NO: 1056368 - RNA, 19 nt, Homo sapiens
  misc_RNA (1)...(19): siRNA sense strand
ccucccagguuacuacagu

SEQ ID NO: 1056369 - RNA, 19 nt, Homo sapiens
  misc_RNA (1)...(19): siRNA sense strand
uggaguccuuggcggauga

SEQ ID NO: 1056370 - RNA, 19 nt, Homo sapiens
  misc_RNA (1)...(19): siRNA sense strand
ucuaauagcaaggaacuuc

SEQ ID NO: 1056371 - RNA, 19 nt, Homo sapiens
  misc_RNA (1)...(19): siRNA sense strand
gcagcgggagcucaaaugg

SEQ ID NO: 1056372 - RNA, 19 nt, Homo sapiens
  misc_RNA (1)...(19): siRNA sense strand
ugacggagugguucaugug

SEQ ID NO: 1056373 - RNA, 19 nt, Homo sapiens
  misc_RNA (1)...(19): siRNA sense strand
gggagaaggagcggcagaa

SEQ ID NO: 1056374 - RNA, 19 nt, Homo sapiens
  misc_RNA (1)...(19): siRNA sense strand
gacagaagcacugauugag

SEQ ID NO: 1056375 - RNA, 19 nt, Homo sapiens
  misc_RNA (1)...(19): siRNA sense strand
caguaccugucuaauagca

SEQ ID NO: 1056376 - RNA, 19 nt, Homo sapiens
  misc_RNA (1)...(19): siRNA sense strand
ugauugagcgggagaaugc

SEQ ID NO: 1056377 - RNA, 19 nt, Homo sapiens
  misc_RNA (1)...(19): siRNA sense strand
ugaaggcguuaagaucauc

SEQ ID NO: 1056378 - RNA, 19 nt, Homo sapiens
  misc_RNA (1)...(19): siRNA sense strand
cugaaggccuacaccaucu

SEQ ID NO: 1056379 - RNA, 19 nt, Homo sapiens
  misc_RNA (1)...(19): siRNA sense strand
gcugagggacugcauccau

SEQ ID NO: 1056380 - RNA, 19 nt, Homo sapiens
  misc_RNA (1)...(19): siRNA sense strand
ggagaaggagcggcagaag

SEQ ID NO: 1056381 - RNA, 19 nt, Homo sapiens
  misc_RNA (1)...(19): siRNA sense strand
ggagaaggagcggcagaag

SEQ ID NO: 1056382 - RNA, 19 nt, Homo sapiens
  misc_RNA (1)...(19): siRNA sense strand
ggagaaggagcgggagaag

SEQ ID NO: 1056383 - RNA, 19 nt, Homo sapiens
  misc_RNA (1)...(19): siRNA sense strand
gcaagcacugucacaccaa

SEQ ID NO: 1056384 - RNA, 19 nt, Homo sapiens
  misc_RNA (1)...(19): siRNA sense strand
gcagcuguuuaagagcaaa

SEQ ID NO: 1056385 - RNA, 19 nt, Homo sapiens
  misc_RNA (1)...(19): siRNA sense strand
uaagagcaaaggcaacuac

SEQ ID NO: 1056386 - RNA, 19 nt, Homo sapiens
  misc_RNA (1)...(19): siRNA sense strand
gaaggaaagcuaaagauua

SEQ ID NO: 1056387 - RNA, 19 nt, Homo sapiens
  misc_RNA (1)...(19): siRNA sense strand
gcagauaguuugcauuuca

SEQ ID NO: 1056388 - RNA, 19 nt, Homo sapiens
  misc_RNA (1)...(19): siRNA sense strand
caacaaagaugugccuuau

SEQ ID NO: 1056389 - RNA, 19 nt, Homo sapiens
  misc_RNA (1)...(19): siRNA sense strand
gcagauuggccauuucuua

SEQ ID NO: 1056390 - RNA, 19 nt, Homo sapiens
  misc_RNA (1)...(19): siRNA sense strand
gaaggacaaguacaaguua

SEQ ID NO: 1056391 - RNA, 19 nt, Homo sapiens
  misc_RNA (1)...(19): siRNA sense strand
gcagcuaucucaagucguu

SEQ ID NO: 1056392 - RNA, 19 nt, Homo sapiens
  misc_RNA (1)...(19): siRNA sense strand
gaagaaagcaaacacacaa

SEQ ID NO: 1056393 - RNA, 19 nt, Homo sapiens
  misc_RNA (1)...(19): siRNA sense strand
gaaagcaaacacacaaauu

SEQ ID NO: 1056394 - RNA, 19 nt, Homo sapiens
  misc_RNA (1)...(19): siRNA sense strand
gcagagaauuuccgaaugg

SEQ ID NO: 1056395 - RNA, 19 nt, Homo sapiens
  misc_RNA (1)...(19): siRNA sense strand
uaagucagaugaaugagaa

SEQ ID NO: 1056396 - RNA, 19 nt, Homo sapiens
  misc_RNA (1)...(19): siRNA sense strand
gaaagcagauaguuugcau

SEQ ID NO: 1056397 - RNA, 19 nt, Homo sapiens
  misc_RNA (1)...(19): siRNA sense strand
gaagucuauuuaccagaua

SEQ ID NO: 1056398 - RNA, 19 nt, Homo sapiens
  misc_RNA (1)...(19): siRNA sense strand
gguaauaaauggguuggaa

SEQ ID NO: 1056399 - RNA, 19 nt, Homo sapiens
  misc_RNA (1)...(19): siRNA sense strand
cagcuggaguggauguuua

SEQ ID NO: 1056400 - RNA, 19 nt, Homo sapiens
  misc_RNA (1)...(19): siRNA sense strand
gaauggaagaagucuauuu

SEQ ID NO: 1056401 - RNA, 19 nt, Homo sapiens
  misc_RNA (1)...(19): siRNA sense strand
ccucagaacugggcuuuga

SEQ ID NO: 1056402 - RNA, 19 nt, Homo sapiens
  misc_RNA (1)...(19): siRNA sense strand
ggauggaaauagccuugaa

SEQ ID NO: 1056403 - RNA, 19 nt, Homo sapiens
  misc_RNA (1)...(19): siRNA sense strand
gggcuuugaugcugcaauu

SEQ ID NO: 1056404 - RNA, 19 nt, Homo sapiens
  misc_RNA (1)...(19): siRNA sense strand
gauggacaccuuucauauu

SEQ ID NO: 1056405 - RNA, 19 nt, Homo sapiens
  misc_RNA (1)...(19): siRNA sense strand
ucauauaacugcuggaucu

SEQ ID NO: 1056406 - RNA, 19 nt, Homo sapiens
  misc_RNA (1)...(19): siRNA sense strand
gacaggagguaacauugga

SEQ ID NO: 1056407 - RNA, 19 nt, Homo sapiens
  misc_RNA (1)...(19): siRNA sense strand
ggaagaagucuauuuacca

SEQ ID NO: 1056408 - RNA, 19 nt, Homo sapiens
  misc_RNA (1)...(19): siRNA sense strand
ggucaaauuucucaguaca

SEQ ID NO: 1056409 - RNA, 19 nt, Homo sapiens
  misc_RNA (1)...(19): siRNA sense strand
gagaaaugcauccucuuga

SEQ ID NO: 1056410 - RNA, 19 nt, Homo sapiens
  misc_RNA (1)...(19): siRNA sense strand
auggacaccuuucauauuu

SEQ ID NO: 1056411 - RNA, 19 nt, Homo sapiens
  misc_RNA (1)...(19): siRNA sense strand
aaagagugguauugaauuc

SEQ ID NO: 1056412 - RNA, 19 nt, Homo sapiens
  misc_RNA (1)...(19): siRNA sense strand
caaagagugguauugaauu

SEQ ID NO: 1056413 - RNA, 19 nt, Homo sapiens
  misc_RNA (1)...(19): siRNA sense strand
gaaagaaagaaacaucaca

SEQ ID NO: 1056414 - RNA, 19 nt, Homo sapiens
  misc_RNA (1)...(19): siRNA sense strand
cacuggcacugauuauaua

SEQ ID NO: 1056415 - RNA, 19 nt, Homo sapiens
  misc_RNA (1)...(19): siRNA sense strand
gaugacaggagguaacauu

SEQ ID NO: 1056416 - RNA, 19 nt, Homo sapiens
  misc_RNA (1)...(19): siRNA sense strand
gcauuccaguccaugauga

SEQ ID NO: 1056417 - RNA, 19 nt, Homo sapiens
  misc_RNA (1)...(19): siRNA sense strand
guaauccaguggcagagaa

SEQ ID NO: 1056418 - RNA, 19 nt, Homo sapiens
  misc_RNA (1)...(19): siRNA sense strand
guggucaaauuucucagua

SEQ ID NO: 1056419 - RNA, 19 nt, Homo sapiens
  misc_RNA (1)...(19): siRNA sense strand
cauccuguguggucaaauu

SEQ ID NO: 1056420 - RNA, 19 nt, Homo sapiens
  misc_RNA (1)...(19): siRNA sense strand
acacaaauuugacuaaagg

SEQ ID NO: 1056421 - RNA, 19 nt, Homo sapiens
  misc_RNA (1)...(19): siRNA sense strand
uauaacaccuuggcagcua

SEQ ID NO: 1056422 - RNA, 19 nt, Homo sapiens
  misc_RNA (1)...(19): siRNA sense strand
ggauggacaccuuucauau

SEQ ID NO: 1056423 - RNA, 19 nt, Homo sapiens
  misc_RNA (1)...(19): siRNA sense strand
cagaacagcuccgugaauc

SEQ ID NO: 1056424 - RNA, 19 nt, Homo sapiens
  misc_RNA (1)...(19): siRNA sense strand
gaagacacuggcacugauu

SEQ ID NO: 1056425 - RNA, 19 nt, Homo sapiens
  misc_RNA (1)...(19): siRNA sense strand
aaagagacgguaauaaaug

SEQ ID NO: 1056426 - RNA, 19 nt, Homo sapiens
  misc_RNA (1)...(19): siRNA sense strand
uagaggcaauccagaaaga

SEQ ID NO: 1056427 - RNA, 19 nt, Homo sapiens
  misc_RNA (1)...(19): siRNA sense strand
uaacugcuggaucuaauaa

SEQ ID NO: 1056428 - RNA, 19 nt, Homo sapiens
  misc_RNA (1)...(19): siRNA sense strand
ggacaaguacaaguuagaa

SEQ ID NO: 1056429 - RNA, 19 nt, Homo sapiens
  misc_RNA (1)...(19): siRNA sense strand
gaacacaugagaaaugcau

SEQ ID NO: 1056430 - RNA, 19 nt, Homo sapiens
  misc_RNA (1)...(19): siRNA sense strand
gaacagcuccgugaaucau

SEQ ID NO: 1056431 - RNA, 19 nt, Homo sapiens
  misc_RNA (1)...(19): siRNA sense strand
gugauacagugauaaguca

SEQ ID NO: 1056432 - RNA, 19 nt, Homo sapiens
  misc_RNA (1)...(19): siRNA sense strand
ggagguauuggaauuauag

SEQ ID NO: 1056433 - RNA, 19 nt, Homo sapiens
  misc_RNA (1)...(19): siRNA sense strand
aagcagauaguuugcauuu

SEQ ID NO: 1056434 - RNA, 19 nt, Homo sapiens
  misc_RNA (1)...(19): siRNA sense strand
ggaaagcuaaagauuaaag

SEQ ID NO: 1056435 - RNA, 19 nt, Homo sapiens
  misc_RNA (1)...(19): siRNA sense strand
caucacaagggaaagauuu

SEQ ID NO: 1056436 - RNA, 19 nt, Homo sapiens
  misc_RNA (1)...(19): siRNA sense strand
gguuugacuuccuugauug

SEQ ID NO: 1056437 - RNA, 19 nt, Homo sapiens
  misc_RNA (1)...(19): siRNA sense strand
aaagguagacccacaacuu

SEQ ID NO: 1056438 - RNA, 19 nt, Homo sapiens
  misc_RNA (1)...(19): siRNA sense strand
gaggcaauccagaaagaaa

SEQ ID NO: 1056439 - RNA, 19 nt, Homo sapiens
  misc_RNA (1)...(19): siRNA sense strand
acaaagaugugccuuaucc

SEQ ID NO: 1056440 - RNA, 19 nt, Homo sapiens
  misc_RNA (1)...(19): siRNA sense strand
ugauaagucagaugaauga

SEQ ID NO: 1056441 - RNA, 19 nt, Homo sapiens
  misc_RNA (1)...(19): siRNA sense strand
gcagaacagcuccgugaau

SEQ ID NO: 1056442 - RNA, 19 nt, Homo sapiens
  misc_RNA (1)...(19): siRNA sense strand
gcuuugaugcugcaauuaa

SEQ ID NO: 1056443 - RNA, 19 nt, Homo sapiens
  misc_RNA (1)...(19): siRNA sense strand
cuauagguaugccugguuu

SEQ ID NO: 1056444 - RNA, 19 nt, Homo sapiens
  misc_RNA (1)...(19): siRNA sense strand
guaauaaauggguuggaaa

SEQ ID NO: 1056445 - RNA, 19 nt, Homo sapiens
  misc_RNA (1)...(19): siRNA sense strand
gagguaacauuggaaagca

SEQ ID NO: 1056446 - RNA, 19 nt, Homo sapiens
  misc_RNA (1)...(19): siRNA sense strand
guuguagaaugaaugaaga

SEQ ID NO: 1056447 - RNA, 19 nt, Homo sapiens
  misc_RNA (1)...(19): siRNA sense strand
ugaagacacuggcacugau

SEQ ID NO: 1056448 - RNA, 19 nt, Homo sapiens
  misc_RNA (1)...(19): siRNA sense strand
ggcagagaauuuccgaaug

SEQ ID NO: 1056449 - RNA, 19 nt, Homo sapiens
  misc_RNA (1)...(19): siRNA sense strand
ugaaggacaaguacaaguu

SEQ ID NO: 1056450 - RNA, 19 nt, Homo sapiens
  misc_RNA (1)...(19): siRNA sense strand
uauaacugcuggaucuaau

SEQ ID NO: 1056451 - RNA, 19 nt, Homo sapiens
  misc_RNA (1)...(19): siRNA sense strand
ccagaguggugggaauuug

SEQ ID NO: 1056452 - RNA, 19 nt, Homo sapiens
  misc_RNA (1)...(19): siRNA sense strand
agaagucuauuuaccagau

SEQ ID NO: 1056453 - RNA, 19 nt, Homo sapiens
  misc_RNA (1)...(19): siRNA sense strand
agaaacaucacaagggaaa

SEQ ID NO: 1056454 - RNA, 19 nt, Homo sapiens
  misc_RNA (1)...(19): siRNA sense strand
agaaggaaagcuaaagauu

SEQ ID NO: 1056455 - RNA, 19 nt, Homo sapiens
  misc_RNA (1)...(19): siRNA sense strand
ugagaaaugcauccucuug

SEQ ID NO: 1056456 - RNA, 19 nt, Homo sapiens
  misc_RNA (1)...(19): siRNA sense strand
aaacaugggagcugcauuc

SEQ ID NO: 1056457 - RNA, 19 nt, Homo sapiens
  misc_RNA (1)...(19): siRNA sense strand
uaaugaaggacaaguacaa

SEQ ID NO: 1056458 - RNA, 19 nt, Homo sapiens
  misc_RNA (1)...(19): siRNA sense strand
acacuggcacugauuauau

SEQ ID NO: 1056459 - RNA, 19 nt, Homo sapiens
  misc_RNA (1)...(19): siRNA sense strand
acaacaaagaugugccuua

SEQ ID NO: 1056460 - RNA, 19 nt, Homo sapiens
  misc_RNA (1)...(19): siRNA sense strand
gaguggauguuuauuuuga

SEQ ID NO: 1056461 - RNA, 19 nt, Homo sapiens
  misc_RNA (1)...(19): siRNA sense strand
gauggaaauagccuugaaa

SEQ ID NO: 1056462 - RNA, 19 nt, Homo sapiens
  misc_RNA (1)...(19): siRNA sense strand
ggccauuucuuagguuguu

SEQ ID NO: 1056463 - RNA, 19 nt, Homo sapiens
  misc_RNA (1)...(19): siRNA sense strand
gacacuggcacugauuaua

SEQ ID NO: 1056464 - RNA, 19 nt, Homo sapiens
  misc_RNA (1)...(19): siRNA sense strand
aaagaaggaaagcuaaaga

SEQ ID NO: 1056465 - RNA, 19 nt, Homo sapiens
  misc_RNA (1)...(19): siRNA sense strand
ggugggaauuuguggaaca

SEQ ID NO: 1056466 - RNA, 19 nt, Homo sapiens
  misc_RNA (1)...(19): siRNA sense strand
caaauuugagccuggcauu

SEQ ID NO: 1056467 - RNA, 19 nt, Homo sapiens
  misc_RNA (1)...(19): siRNA sense strand
uagaaugaaugaagacacu

SEQ ID NO: 1056468 - RNA, 19 nt, Homo sapiens
  misc_RNA (1)...(19): siRNA sense strand
gaugguggagguauuggaa

SEQ ID NO: 1056469 - RNA, 19 nt, Homo sapiens
  misc_RNA (1)...(19): siRNA sense strand
uaacauuggaaagcagaua

SEQ ID NO: 1056470 - RNA, 19 nt, Homo sapiens
  misc_RNA (1)...(19): siRNA sense strand
guuuaaagaaggaaagcua

SEQ ID NO: 1056471 - RNA, 19 nt, Homo sapiens
  misc_RNA (1)...(19): siRNA sense strand
ccagaaagaaagaaacauc

SEQ ID NO: 1056472 - RNA, 19 nt, Homo sapiens
  misc_RNA (1)...(19): siRNA sense strand
gauuggccauuucuuaggu

SEQ ID NO: 1056473 - RNA, 19 nt, Homo sapiens
  misc_RNA (1)...(19): siRNA sense strand
ugguuugacuuccuugauu

SEQ ID NO: 1056474 - RNA, 19 nt, Homo sapiens
  misc_RNA (1)...(19): siRNA sense strand
guggagguauuggaauuau

SEQ ID NO: 1056475 - RNA, 19 nt, Homo sapiens
  misc_RNA (1)...(19): siRNA sense strand
gguggagguauuggaauua

SEQ ID NO: 1056476 - RNA, 19 nt, Homo sapiens
  misc_RNA (1)...(19): siRNA sense strand
uggagguauuggaauuaua

SEQ ID NO: 1056477 - RNA, 19 nt, Homo sapiens
  misc_RNA (1)...(19): siRNA sense strand
aagagacgguaauaaaugg

SEQ ID NO: 1056478 - RNA, 19 nt, Homo sapiens
  misc_RNA (1)...(19): siRNA sense strand
gaucuaauaagacaauggu

SEQ ID NO: 1056479 - RNA, 19 nt, Homo sapiens
  misc_RNA (1)...(19): siRNA sense strand
ggacaccuuucauauuuuc

SEQ ID NO: 1056480 - RNA, 19 nt, Homo sapiens
  misc_RNA (1)...(19): siRNA sense strand
uggauggacaccuuucaua

SEQ ID NO: 1056481 - RNA, 19 nt, Homo sapiens
  misc_RNA (1)...(19): siRNA sense strand
cagaaagaaagaaacauca

SEQ ID NO: 1056482 - RNA, 19 nt, Homo sapiens
  misc_RNA (1)...(19): siRNA sense strand
uauagaggcaauccagaaa

SEQ ID NO: 1056483 - RNA, 19 nt, Homo sapiens
  misc_RNA (1)...(19): siRNA sense strand
ucaaauuucucaguacaac

SEQ ID NO: 1056484 - RNA, 19 nt, Homo sapiens
  misc_RNA (1)...(19): siRNA sense strand
guggaacacaugagaaaug

SEQ ID NO: 1056485 - RNA, 19 nt, Homo sapiens
  misc_RNA (1)...(19): siRNA sense strand
uggcacugauuauauaaca

SEQ ID NO: 1056486 - RNA, 19 nt, Homo sapiens
  misc_RNA (1)...(19): siRNA sense strand
gcauaggccucgucagcuu

SEQ ID NO: 1056487 - RNA, 19 nt, Homo sapiens
  misc_RNA (1)...(19): siRNA sense strand
ggccugggcuucaucuauu

SEQ ID NO: 1056488 - RNA, 19 nt, Homo sapiens
  misc_RNA (1)...(19): siRNA sense strand
guugguggcuuccucauug

SEQ ID NO: 1056489 - RNA, 19 nt, Homo sapiens
  misc_RNA (1)...(19): siRNA sense strand
gaccagcaguuccagaaga

SEQ ID NO: 1056490 - RNA, 19 nt, Homo sapiens
  misc_RNA (1)...(19): siRNA sense strand
gggcuucaucuauuuauuu

SEQ ID NO: 1056491 - RNA, 19 nt, Homo sapiens
  misc_RNA (1)...(19): siRNA sense strand
cagcuugacuuugggcuaa

SEQ ID NO: 1056492 - RNA, 19 nt, Homo sapiens
  misc_RNA (1)...(19): siRNA sense strand
ccaaagggagccaaucuug

SEQ ID NO: 1056493 - RNA, 19 nt, Homo sapiens
  misc_RNA (1)...(19): siRNA sense strand
ccgcagggcucuguugcua

SEQ ID NO: 1056494 - RNA, 19 nt, Homo sapiens
  misc_RNA (1)...(19): siRNA sense strand
ggccugaccuuugguuaug

SEQ ID NO: 1056495 - RNA, 19 nt, Homo sapiens
  misc_RNA (1)...(19): siRNA sense strand
gaccuuugguuaugaacug

SEQ ID NO: 1056496 - RNA, 19 nt, Homo sapiens
  misc_RNA (1)...(19): siRNA sense strand
ggcuucaucuauuuauuug

SEQ ID NO: 1056497 - RNA, 19 nt, Homo sapiens
  misc_RNA (1)...(19): siRNA sense strand
gucagugccuucuccuuug

SEQ ID NO: 1056498 - RNA, 19 nt, Homo sapiens
  misc_RNA (1)...(19): siRNA sense strand
cagaugagacugcaacaca

SEQ ID NO: 1056499 - RNA, 19 nt, Homo sapiens
  misc_RNA (1)...(19): siRNA sense strand
ccaaucuuguccacugcua

SEQ ID NO: 1056500 - RNA, 19 nt, Homo sapiens
  misc_RNA (1)...(19): siRNA sense strand
ccuaugcccucaacuaugc

SEQ ID NO: 1056501 - RNA, 19 nt, Homo sapiens
  misc_RNA (1)...(19): siRNA sense strand
caaagggagccaaucuugu

SEQ ID NO: 1056502 - RNA, 19 nt, Homo sapiens
  misc_RNA (1)...(19): siRNA sense strand
gccugggcuucaucuauuu

SEQ ID NO: 1056503 - RNA, 19 nt, Homo sapiens
  misc_RNA (1)...(19): siRNA sense strand
ugucagugccuucuccuuu

SEQ ID NO: 1056504 - RNA, 19 nt, Homo sapiens
  misc_RNA (1)...(19): siRNA sense strand
gaccaaagggagccaaucu

SEQ ID NO: 1056505 - RNA, 19 nt, Homo sapiens
  misc_RNA (1)...(19): siRNA sense strand
gcagugaagguggcagcua

SEQ ID NO: 1056506 - RNA, 19 nt, Homo sapiens
  misc_RNA (1)...(19): siRNA sense strand
ccacuggcaucccguacag

SEQ ID NO: 1056507 - RNA, 19 nt, Homo sapiens
  misc_RNA (1)...(19): siRNA sense strand
cuuguccacugcuaagaaa

SEQ ID NO: 1056508 - RNA, 19 nt, Homo sapiens
  misc_RNA (1)...(19): siRNA sense strand
aaagggagccaaucuuguc

SEQ ID NO: 1056509 - RNA, 19 nt, Homo sapiens
  misc_RNA (1)...(19): siRNA sense strand
ggaccaaugaggaccaaag

SEQ ID NO: 1056510 - RNA, 19 nt, Homo sapiens
  misc_RNA (1)...(19): siRNA sense strand
ccauuucccucuccuccau

SEQ ID NO: 1056511 - RNA, 19 nt, Homo sapiens
  misc_RNA (1)...(19): siRNA sense strand
agagauagaccagcaguuc

SEQ ID NO: 1056512 - RNA, 19 nt, Homo sapiens
  misc_RNA (1)...(19): siRNA sense strand
gugcuggugucccucuaug

SEQ ID NO: 1056513 - RNA, 19 nt, Homo sapiens
  misc_RNA (1)...(19): siRNA sense strand
ccaccuguccugccuuugu

SEQ ID NO: 1056514 - RNA, 19 nt, Homo sapiens
  misc_RNA (1)...(19): siRNA sense strand
cuccauggcuugcuguauc

SEQ ID NO: 1056515 - RNA, 19 nt, Homo sapiens
  misc_RNA (1)...(19): siRNA sense strand
gaugagacugcaacacaca

SEQ ID NO: 1056516 - RNA, 19 nt, Homo sapiens
  misc_RNA (1)...(19): siRNA sense strand
guacagccgcaucgagauc

SEQ ID NO: 1056517 - RNA, 19 nt, Homo sapiens
  misc_RNA (1)...(19): siRNA sense strand
cacugcagcuugacuuugg

SEQ ID NO: 1056518 - RNA, 19 nt, Homo sapiens
  misc_RNA (1)...(19): siRNA sense strand
gcucuuccagcaacuaaca

SEQ ID NO: 1056519 - RNA, 19 nt, Homo sapiens
  misc_RNA (1)...(19): siRNA sense strand
ccaacgugcugugcuaugc

SEQ ID NO: 1056520 - RNA, 19 nt, Homo sapiens
  misc_RNA (1)...(19): siRNA sense strand
caccugcuguccugcaauc

SEQ ID NO: 1056521 - RNA, 19 nt, Homo sapiens
  misc_RNA (1)...(19): siRNA sense strand
ucuccuaugcccucaacua

SEQ ID NO: 1056522 - RNA, 19 nt, Homo sapiens
  misc_RNA (1)...(19): siRNA sense strand
caccuguccugccuuugug

SEQ ID NO: 1056523 - RNA, 19 nt, Homo sapiens
  misc_RNA (1)...(19): siRNA sense strand
uagaccagcaguuccagaa

SEQ ID NO: 1056524 - RNA, 19 nt, Homo sapiens
  misc_RNA (1)...(19): siRNA sense strand
cauaggccucgucagcuuu

SEQ ID NO: 1056525 - RNA, 19 nt, Homo sapiens
  misc_RNA (1)...(19): siRNA sense strand
ccugaccuuugguuaugaa

SEQ ID NO: 1056526 - RNA, 19 nt, Homo sapiens
  misc_RNA (1)...(19): siRNA sense strand
gagugcuggugucccucua

SEQ ID NO: 1056527 - RNA, 19 nt, Homo sapiens
  misc_RNA (1)...(19): siRNA sense strand
gcucuccuaugcccucaac

SEQ ID NO: 1056528 - RNA, 19 nt, Homo sapiens
  misc_RNA (1)...(19): siRNA sense strand
gcggccaaccucuucauca

SEQ ID NO: 1056529 - RNA, 19 nt, Homo sapiens
  misc_RNA (1)...(19): siRNA sense strand
ugccuucuccuuuggguuu

SEQ ID NO: 1056530 - RNA, 19 nt, Homo sapiens
  misc_RNA (1)...(19): siRNA sense strand
gcuuugccgugcccaugga

SEQ ID NO: 1056531 - RNA, 19 nt, Homo sapiens
  misc_RNA (1)...(19): siRNA sense strand
caacacacaaggaccucau

SEQ ID NO: 1056532 - RNA, 19 nt, Homo sapiens
  misc_RNA (1)...(19): siRNA sense strand
ccacugcagcuugacuuug

SEQ ID NO: 1056533 - RNA, 19 nt, Homo sapiens
  misc_RNA (1)...(19): siRNA sense strand
gggauggaggcacauguuc

SEQ ID NO: 1056534 - RNA, 19 nt, Homo sapiens
  misc_RNA (1)...(19): siRNA sense strand
gaacaauacucugacuuua

SEQ ID NO: 1056535 - RNA, 19 nt, Homo sapiens
  misc_RNA (1)...(19): siRNA sense strand
caacauaagauucgaguua

SEQ ID NO: 1056536 - RNA, 19 nt, Homo sapiens
  misc_RNA (1)...(19): siRNA sense strand
caacugcacucuuauauca

SEQ ID NO: 1056537 - RNA, 19 nt, Homo sapiens
  misc_RNA (1)...(19): siRNA sense strand
ggaagagggagauauauuu

SEQ ID NO: 1056538 - RNA, 19 nt, Homo sapiens
  misc_RNA (1)...(19): siRNA sense strand
aaacaaagagccacuuaua

SEQ ID NO: 1056539 - RNA, 19 nt, Homo sapiens
  misc_RNA (1)...(19): siRNA sense strand
gaagaagaauuugugaaga

SEQ ID NO: 1056540 - RNA, 19 nt, Homo sapiens
  misc_RNA (1)...(19): siRNA sense strand
ucauggagguuacaguuua

SEQ ID NO: 1056541 - RNA, 19 nt, Homo sapiens
  misc_RNA (1)...(19): siRNA sense strand
gcuagaagagugcauguua

SEQ ID NO: 1056542 - RNA, 19 nt, Homo sapiens
  misc_RNA (1)...(19): siRNA sense strand
gagcccacaugccaaauaa

SEQ ID NO: 1056543 - RNA, 19 nt, Homo sapiens
  misc_RNA (1)...(19): siRNA sense strand
caucccaacugcacucuua

SEQ ID NO: 1056544 - RNA, 19 nt, Homo sapiens
  misc_RNA (1)...(19): siRNA sense strand
acaaugaccuuaaugguau

SEQ ID NO: 1056545 - RNA, 19 nt, Homo sapiens
  misc_RNA (1)...(19): siRNA sense strand
gcagcgauaucugucaaua

SEQ ID NO: 1056546 - RNA, 19 nt, Homo sapiens
  misc_RNA (1)...(19): siRNA sense strand
ucagccagguucaauaaua

SEQ ID NO: 1056547 - RNA, 19 nt, Homo sapiens
  misc_RNA (1)...(19): siRNA sense strand
gacaaugaccuuaauggua

SEQ ID NO: 1056548 - RNA, 19 nt, Homo sapiens
  misc_RNA (1)...(19): siRNA sense strand
gcugaugacuguaaaggaa

SEQ ID NO: 1056549 - RNA, 19 nt, Homo sapiens
  misc_RNA (1)...(19): siRNA sense strand
cgaguuaaaugucaaugaa

SEQ ID NO: 1056550 - RNA, 19 nt, Homo sapiens
  misc_RNA (1)...(19): siRNA sense strand
agacucaacuugcuucaaa

SEQ ID NO: 1056551 - RNA, 19 nt, Homo sapiens
  misc_RNA (1)...(19): siRNA sense strand
acaaggaauuucagaguuu

SEQ ID NO: 1056552 - RNA, 19 nt, Homo sapiens
  misc_RNA (1)...(19): siRNA sense strand
gagcaacacucauaaagac

SEQ ID NO: 1056553 - RNA, 19 nt, Homo sapiens
  misc_RNA (1)...(19): siRNA sense strand
gacaaggaauuucagaguu

SEQ ID NO: 1056554 - RNA, 19 nt, Homo sapiens
  misc_RNA (1)...(19): siRNA sense strand
ggcagaacaugaucucgua

SEQ ID NO: 1056555 - RNA, 19 nt, Homo sapiens
  misc_RNA (1)...(19): siRNA sense strand
caacuagaccuguguguga

SEQ ID NO: 1056556 - RNA, 19 nt, Homo sapiens
  misc_RNA (1)...(19): siRNA sense strand
ggaugaacauacuguguga

SEQ ID NO: 1056557 - RNA, 19 nt, Homo sapiens
  misc_RNA (1)...(19): siRNA sense strand
ccucagauguguuggguuu

SEQ ID NO: 1056558 - RNA, 19 nt, Homo sapiens
  misc_RNA (1)...(19): siRNA sense strand
guacguccauuucccuaaa

SEQ ID NO: 1056559 - RNA, 19 nt, Homo sapiens
  misc_RNA (1)...(19): siRNA sense strand
gaaaggauucugucuaaag

SEQ ID NO: 1056560 - RNA, 19 nt, Homo sapiens
  misc_RNA (1)...(19): siRNA sense strand
ugggauacaugaaacauuu

SEQ ID NO: 1056561 - RNA, 19 nt, Homo sapiens
  misc_RNA (1)...(19): siRNA sense strand
gcaaacaggagaaagauuc

SEQ ID NO: 1056562 - RNA, 19 nt, Homo sapiens
  misc_RNA (1)...(19): siRNA sense strand
uaaagaccguuacaaguuc

SEQ ID NO: 1056563 - RNA, 19 nt, Homo sapiens
  misc_RNA (1)...(19): siRNA sense strand
gaaacuuggucuuuaaagg

SEQ ID NO: 1056564 - RNA, 19 nt, Homo sapiens
  misc_RNA (1)...(19): siRNA sense strand
ggagagagagcaucuggaa

SEQ ID NO: 1056565 - RNA, 19 nt, Homo sapiens
  misc_RNA (1)...(19): siRNA sense strand
cuaaagcccuggagcauuc

SEQ ID NO: 1056566 - RNA, 19 nt, Homo sapiens
  misc_RNA (1)...(19): siRNA sense strand
ggacuuggacaacauaaga

SEQ ID NO: 1056567 - RNA, 19 nt, Homo sapiens
  misc_RNA (1)...(19): siRNA sense strand
gcagagaguauaaagagaa

SEQ ID NO: 1056568 - RNA, 19 nt, Homo sapiens
  misc_RNA (1)...(19): siRNA sense strand
gccaugagaacgucaaaua

SEQ ID NO: 1056569 - RNA, 19 nt, Homo sapiens
  misc_RNA (1)...(19): siRNA sense strand
uaacuggccugaacacaca

SEQ ID NO: 1056570 - RNA, 19 nt, Homo sapiens
  misc_RNA (1)...(19): siRNA sense strand
gaagaccucagauguguug

SEQ ID NO: 1056571 - RNA, 19 nt, Homo sapiens
  misc_RNA (1)...(19): siRNA sense strand
gcaggaggacuguuucuga

SEQ ID NO: 1056572 - RNA, 19 nt, Homo sapiens
  misc_RNA (1)...(19): siRNA sense strand
guaguugggcuuccauuaa

SEQ ID NO: 1056573 - RNA, 19 nt, Homo sapiens
  misc_RNA (1)...(19): siRNA sense strand
cuagaagagugcauguuaa

SEQ ID NO: 1056574 - RNA, 19 nt, Homo sapiens
  misc_RNA (1)...(19): siRNA sense strand
aauagaagaugcaggaaug

SEQ ID NO: 1056575 - RNA, 19 nt, Homo sapiens
  misc_RNA (1)...(19): siRNA sense strand
ggaagaagaauuugugaag

SEQ ID NO: 1056576 - RNA, 19 nt, Homo sapiens
  misc_RNA (1)...(19): siRNA sense strand
guacagccauugcauuucu

SEQ ID NO: 1056577 - RNA, 19 nt, Homo sapiens
  misc_RNA (1)...(19): siRNA sense strand
gaaucgggaagaagaauuu

SEQ ID NO: 1056578 - RNA, 19 nt, Homo sapiens
  misc_RNA (1)...(19): siRNA sense strand
ggacaguauauauggaaua

SEQ ID NO: 1056579 - RNA, 19 nt, Homo sapiens
  misc_RNA (1)...(19): siRNA sense strand
gaucagcccagauugugua

SEQ ID NO: 1056580 - RNA, 19 nt, Homo sapiens
  misc_RNA (1)...(19): siRNA sense strand
caguuuaccuucaaucaga

SEQ ID NO: 1056581 - RNA, 19 nt, Homo sapiens
  misc_RNA (1)...(19): siRNA sense strand
ucaauuagccuaugauucu

SEQ ID NO: 1056582 - RNA, 19 nt, Homo sapiens
  misc_RNA (1)...(19): siRNA sense strand
gaaucucagugacaaggaa

SEQ ID NO: 1056583 - RNA, 19 nt, Homo sapiens
  misc_RNA (1)...(19): siRNA sense strand
ucucuugccucuguucuua

SEQ ID NO: 1056584 - RNA, 19 nt, Homo sapiens
  misc_RNA (1)...(19): siRNA sense strand
gcaaacaaucucaaugugu

SEQ ID NO: 1056585 - RNA, 19 nt, Homo sapiens
  misc_RNA (1)...(19): siRNA sense strand
ucugaaacuuggucuuuaa

SEQ ID NO: 1056586 - RNA, 19 nt, Homo sapiens
  misc_RNA (1)...(19): siRNA sense strand
cauucuagcuguaaacuuc

SEQ ID NO: 1056587 - RNA, 19 nt, Homo sapiens
  misc_RNA (1)...(19): siRNA sense strand
gugaagaccucagaugugu

SEQ ID NO: 1056588 - RNA, 19 nt, Homo sapiens
  misc_RNA (1)...(19): siRNA sense strand
ugaagagccuugucuacug

SEQ ID NO: 1056589 - RNA, 19 nt, Homo sapiens
  misc_RNA (1)...(19): siRNA sense strand
ggugagauguggcagaaca

SEQ ID NO: 1056590 - RNA, 19 nt, Homo sapiens
  misc_RNA (1)...(19): siRNA sense strand
guucagcgcaucuuucaaa

SEQ ID NO: 1056591 - RNA, 19 nt, Homo sapiens
  misc_RNA (1)...(19): siRNA sense strand
gauuguggaugcucucaug

SEQ ID NO: 1056592 - RNA, 19 nt, Homo sapiens
  misc_RNA (1)...(19): siRNA sense strand
gaaaguucccauuccaguu

SEQ ID NO: 1056593 - RNA, 19 nt, Homo sapiens
  misc_RNA (1)...(19): siRNA sense strand
uaacagcacccagaaaguu

SEQ ID NO: 1056594 - RNA, 19 nt, Homo sapiens
  misc_RNA (1)...(19): siRNA sense strand
gaaaauucaugcugcaaug

SEQ ID NO: 1056595 - RNA, 19 nt, Homo sapiens
  misc_RNA (1)...(19): siRNA sense strand
aaaggaaggcagagaaauu

SEQ ID NO: 1056596 - RNA, 19 nt, Homo sapiens
  misc_RNA (1)...(19): siRNA sense strand
caacaaaacacuagaaaga

SEQ ID NO: 1056597 - RNA, 19 nt, Homo sapiens
  misc_RNA (1)...(19): siRNA sense strand
gcuauguggugguuugaga

SEQ ID NO: 1056598 - RNA, 19 nt, Homo sapiens
  misc_RNA (1)...(19): siRNA sense strand
gggaagagggagauauauu

SEQ ID NO: 1056599 - RNA, 19 nt, Homo sapiens
  misc_RNA (1)...(19): siRNA sense strand
uuauaaaucuggcuguguu

SEQ ID NO: 1056600 - RNA, 19 nt, Homo sapiens
  misc_RNA (1)...(19): siRNA sense strand
agaacuggcuaacguguug

SEQ ID NO: 1056601 - RNA, 19 nt, Homo sapiens
  misc_RNA (1)...(19): siRNA sense strand
ccaaacacccacugaucua

SEQ ID NO: 1056602 - RNA, 19 nt, Homo sapiens
  misc_RNA (1)...(19): siRNA sense strand
guaaucggagccugacaua

SEQ ID NO: 1056603 - RNA, 19 nt, Homo sapiens
  misc_RNA (1)...(19): siRNA sense strand
auaaagaccguuacaaguu

SEQ ID NO: 1056604 - RNA, 19 nt, Homo sapiens
  misc_RNA (1)...(19): siRNA sense strand
aagaagaacuggcuaacgu

SEQ ID NO: 1056605 - RNA, 19 nt, Homo sapiens
  misc_RNA (1)...(19): siRNA sense strand
ucaaggcuuuggcucguaa

SEQ ID NO: 1056606 - RNA, 19 nt, Homo sapiens
  misc_RNA (1)...(19): siRNA sense strand
cugcauaucuuugacaaug

SEQ ID NO: 1056607 - RNA, 19 nt, Homo sapiens
  misc_RNA (1)...(19): siRNA sense strand
aggaagaucuuuguaggaa

SEQ ID NO: 1056608 - RNA, 19 nt, Homo sapiens
  misc_RNA (1)...(19): siRNA sense strand
gguaguugggcuuccauua

SEQ ID NO: 1056609 - RNA, 19 nt, Homo sapiens
  misc_RNA (1)...(19): siRNA sense strand
gaagagugcauguuaacca

SEQ ID NO: 1056610 - RNA, 19 nt, Homo sapiens
  misc_RNA (1)...(19): siRNA sense strand
acaaagagccacuuauaag

SEQ ID NO: 1056611 - RNA, 19 nt, Homo sapiens
  misc_RNA (1)...(19): siRNA sense strand
ugaucuacaugcccacuuu

SEQ ID NO: 1056612 - RNA, 19 nt, Homo sapiens
  misc_RNA (1)...(19): siRNA sense strand
gaaauacucgugggucugu

SEQ ID NO: 1056613 - RNA, 19 nt, Homo sapiens
  misc_RNA (1)...(19): siRNA sense strand
agaacaauacucugacuuu

SEQ ID NO: 1056614 - RNA, 19 nt, Homo sapiens
  misc_RNA (1)...(19): siRNA sense strand
guaaggaagaucuuuguag

SEQ ID NO: 1056615 - RNA, 19 nt, Homo sapiens
  misc_RNA (1)...(19): siRNA sense strand
gaccugcugugguaucuag

SEQ ID NO: 1056616 - RNA, 19 nt, Homo sapiens
  misc_RNA (1)...(19): siRNA sense strand
ggagcauucuagcuguaaa

SEQ ID NO: 1056617 - RNA, 19 nt, Homo sapiens
  misc_RNA (1)...(19): siRNA sense strand
gccaacugcuagucaaaug

SEQ ID NO: 1056618 - RNA, 19 nt, Homo sapiens
  misc_RNA (1)...(19): siRNA sense strand
gcuaacguguugccaaucu

SEQ ID NO: 1056619 - RNA, 19 nt, Homo sapiens
  misc_RNA (1)...(19): siRNA sense strand
cagcaaacaaucucaaugu

SEQ ID NO: 1056620 - RNA, 19 nt, Homo sapiens
  misc_RNA (1)...(19): siRNA sense strand
caauuagccuaugauucua

SEQ ID NO: 1056621 - RNA, 19 nt, Homo sapiens
  misc_RNA (1)...(19): siRNA sense strand
ccagaaaguucccauucca

SEQ ID NO: 1056622 - RNA, 19 nt, Homo sapiens
  misc_RNA (1)...(19): siRNA sense strand
gucugaaacuuggucuuua

SEQ ID NO: 1056623 - RNA, 19 nt, Homo sapiens
  misc_RNA (1)...(19): siRNA sense strand
cagcccagauuguguacuu

SEQ ID NO: 1056624 - RNA, 19 nt, Homo sapiens
  misc_RNA (1)...(19): siRNA sense strand
gcugugguaucuagagaau

SEQ ID NO: 1056625 - RNA, 19 nt, Homo sapiens
  misc_RNA (1)...(19): siRNA sense strand
gcaguacccaacuaucuga

SEQ ID NO: 1056626 - RNA, 19 nt, Homo sapiens
  misc_RNA (1)...(19): siRNA sense strand
gcaaucaggaggcaugcaa

SEQ ID NO: 1056627 - RNA, 19 nt, Homo sapiens
  misc_RNA (1)...(19): siRNA sense strand
gcauguuggugaauauugg

SEQ ID NO: 1056628 - RNA, 19 nt, Homo sapiens
  misc_RNA (1)...(19): siRNA sense strand
caacugcuagucaaaugaa

SEQ ID NO: 1056629 - RNA, 19 nt, Homo sapiens
  misc_RNA (1)...(19): siRNA sense strand
cauuauacugucuggauua

SEQ ID NO: 1056630 - RNA, 19 nt, Homo sapiens
  misc_RNA (1)...(19): siRNA sense strand
gcugcuauguggugguuug

SEQ ID NO: 1056631 - RNA, 19 nt, Homo sapiens
  misc_RNA (1)...(19): siRNA sense strand
cagagaaauuggugugaca

SEQ ID NO: 1056632 - RNA, 19 nt, Homo sapiens
  misc_RNA (1)...(19): siRNA sense strand
aaacuuggucuuuaaagga

SEQ ID NO: 1056633 - RNA, 19 nt, Homo sapiens
  misc_RNA (1)...(19): siRNA sense strand
caaaaucacuugggcaaug

SEQ ID NO: 1056634 - RNA, 19 nt, Homo sapiens
  misc_RNA (1)...(19): siRNA sense strand
ggacugugcugaacgagaa

SEQ ID NO: 1056635 - RNA, 19 nt, Homo sapiens
  misc_RNA (1)...(19): siRNA sense strand
gaaauccauucucaugaag

SEQ ID NO: 1056636 - RNA, 19 nt, Homo sapiens
  misc_RNA (1)...(19): siRNA sense strand
gcaaggacaagaagaaauc

SEQ ID NO: 1056637 - RNA, 19 nt, Homo sapiens
  misc_RNA (1)...(19): siRNA sense strand
caguggaggugcagacgua

SEQ ID NO: 1056638 - RNA, 19 nt, Homo sapiens
  misc_RNA (1)...(19): siRNA sense strand
ggugaucauuccaagaaga

SEQ ID NO: 1056639 - RNA, 19 nt, Homo sapiens
  misc_RNA (1)...(19): siRNA sense strand
ggaccaacccgccuuccaa

SEQ ID NO: 1056640 - RNA, 19 nt, Homo sapiens
  misc_RNA (1)...(19): siRNA sense strand
ggacaagaagaaauccauu

SEQ ID NO: 1056641 - RNA, 19 nt, Homo sapiens
  misc_RNA (1)...(19): siRNA sense strand
agaagcagcugcacacucu

SEQ ID NO: 1056642 - RNA, 19 nt, Homo sapiens
  misc_RNA (1)...(19): siRNA sense strand
gcagcgaccuggugaugag

SEQ ID NO: 1056643 - RNA, 19 nt, Homo sapiens
  misc_RNA (1)...(19): siRNA sense strand
gcccgacgcucucaugaag

SEQ ID NO: 1056644 - RNA, 19 nt, Homo sapiens
  misc_RNA (1)...(19): siRNA sense strand
ucagauccacgaccaguuu

SEQ ID NO: 1056645 - RNA, 19 nt, Homo sapiens
  misc_RNA (1)...(19): siRNA sense strand
ggacagcguguaccacauc

SEQ ID NO: 1056646 - RNA, 19 nt, Homo sapiens
  misc_RNA (1)...(19): siRNA sense strand
uccaacagcuggucuccuu

SEQ ID NO: 1056647 - RNA, 19 nt, Homo sapiens
  misc_RNA (1)...(19): siRNA sense strand
gcagucccauccgccauga

SEQ ID NO: 1056648 - RNA, 19 nt, Homo sapiens
  misc_RNA (1)...(19): siRNA sense strand
gacaagaagaaauccauuc

SEQ ID NO: 1056649 - RNA, 19 nt, Homo sapiens
  misc_RNA (1)...(19): siRNA sense strand
ccgacgcucucaugaagga

SEQ ID NO: 1056650 - RNA, 19 nt, Homo sapiens
  misc_RNA (1)...(19): siRNA sense strand
ugagagacgggaagaccua

SEQ ID NO: 1056651 - RNA, 19 nt, Homo sapiens
  misc_RNA (1)...(19): siRNA sense strand
gcugcaaggacaagaagaa

SEQ ID NO: 1056652 - RNA, 19 nt, Homo sapiens
  misc_RNA (1)...(19): siRNA sense strand
gagcagcugguggagauga

SEQ ID NO: 1056653 - RNA, 19 nt, Homo sapiens
  misc_RNA (1)...(19): siRNA sense strand
aggagcagcugguggagau

SEQ ID NO: 1056654 - RNA, 19 nt, Homo sapiens
  misc_RNA (1)...(19): siRNA sense strand
cagauccacgaccaguuua

SEQ ID NO: 1056655 - RNA, 19 nt, Homo sapiens
  misc_RNA (1)...(19): siRNA sense strand
gugaucauuccaagaagaa

SEQ ID NO: 1056656 - RNA, 19 nt, Homo sapiens
  misc_RNA (1)...(19): siRNA sense strand
gggacuacgucaggcuguu

SEQ ID NO: 1056657 - RNA, 19 nt, Homo sapiens
  misc_RNA (1)...(19): siRNA sense strand
ugggugaucauuccaagaa

SEQ ID NO: 1056658 - RNA, 19 nt, Homo sapiens
  misc_RNA (1)...(19): siRNA sense strand
caacagcuggucuccuucu

SEQ ID NO: 1056659 - RNA, 19 nt, Homo sapiens
  misc_RNA (1)...(19): siRNA sense strand
ggacuacgucaggcuguuc

SEQ ID NO: 1056660 - RNA, 19 nt, Homo sapiens
  misc_RNA (1)...(19): siRNA sense strand
cagcagcgaccuggugaug

SEQ ID NO: 1056661 - RNA, 19 nt, Homo sapiens
  misc_RNA (1)...(19): siRNA sense strand
gcaucaagugcgccaagug

SEQ ID NO: 1056662 - RNA, 19 nt, Homo sapiens
  misc_RNA (1)...(19): siRNA sense strand
aauccauucucaugaagca

SEQ ID NO: 1056663 - RNA, 19 nt, Homo sapiens
  misc_RNA (1)...(19): siRNA sense strand
agaacaagcgcugcaagga

SEQ ID NO: 1056664 - RNA, 19 nt, Homo sapiens
  misc_RNA (1)...(19): siRNA sense strand
gggacagcguguaccacau

SEQ ID NO: 1056665 - RNA, 19 nt, Homo sapiens
  misc_RNA (1)...(19): siRNA sense strand
ggaaagaaucucuauacaa

SEQ ID NO: 1056666 - RNA, 19 nt, Homo sapiens
  misc_RNA (1)...(19): siRNA sense strand
cagaggagauggccacgua

SEQ ID NO: 1056667 - RNA, 19 nt, Homo sapiens
  misc_RNA (1)...(19): siRNA sense strand
gaaaccaaaugcugcuguu

SEQ ID NO: 1056668 - RNA, 19 nt, Homo sapiens
  misc_RNA (1)...(19): siRNA sense strand
auacguggcuaucaaauug

SEQ ID NO: 1056669 - RNA, 19 nt, Homo sapiens
  misc_RNA (1)...(19): siRNA sense strand
ccacguaccugcgcuaugu

SEQ ID NO: 1056670 - RNA, 19 nt, Homo sapiens
  misc_RNA (1)...(19): siRNA sense strand
ucgagaagcccgacuauga

SEQ ID NO: 1056671 - RNA, 19 nt, Homo sapiens
  misc_RNA (1)...(19): siRNA sense strand
ucaaggagcgguaccagaa

SEQ ID NO: 1056672 - RNA, 19 nt, Homo sapiens
  misc_RNA (1)...(19): siRNA sense strand
caaaugcugcuguuucuuc

SEQ ID NO: 1056673 - RNA, 19 nt, Homo sapiens
  misc_RNA (1)...(19): siRNA sense strand
ucaagacggugcugaugau

SEQ ID NO: 1056674 - RNA, 19 nt, Homo sapiens
  misc_RNA (1)...(19): siRNA sense strand
gaacuucccagaggagaug

SEQ ID NO: 1056675 - RNA, 19 nt, Homo sapiens
  misc_RNA (1)...(19): siRNA sense strand
gguggccgaugaaaccaaa

SEQ ID NO: 1056676 - RNA, 19 nt, Homo sapiens
  misc_RNA (1)...(19): siRNA sense strand
caaaugaauacguggcuau

SEQ ID NO: 1056677 - RNA, 19 nt, Homo sapiens
  misc_RNA (1)...(19): siRNA sense strand
gagcuccgccuaggaaaga

SEQ ID NO: 1056678 - RNA, 19 nt, Homo sapiens
  misc_RNA (1)...(19): siRNA sense strand
gcucuucaccgaccucuuc

SEQ ID NO: 1056679 - RNA, 19 nt, Homo sapiens
  misc_RNA (1)...(19): siRNA sense strand
ucacgcgcauggaguaugu

SEQ ID NO: 1056680 - RNA, 19 nt, Homo sapiens
  misc_RNA (1)...(19): siRNA sense strand
ggaauuacaacgccauggu

SEQ ID NO: 1056681 - RNA, 19 nt, Homo sapiens
  misc_RNA (1)...(19): siRNA sense strand
uaggaaagaaucucuauac

SEQ ID NO: 1056682 - RNA, 19 nt, Homo sapiens
  misc_RNA (1)...(19): siRNA sense strand
gcaguggcuucguguucga

SEQ ID NO: 1056683 - RNA, 19 nt, Homo sapiens
  misc_RNA (1)...(19): siRNA sense strand
uggaguaugugcacaccaa

SEQ ID NO: 1056684 - RNA, 19 nt, Homo sapiens
  misc_RNA (1)...(19): siRNA sense strand
ugaauacguggcuaucaaa

SEQ ID NO: 1056685 - RNA, 19 nt, Homo sapiens
  misc_RNA (1)...(19): siRNA sense strand
gaauacguggcuaucaaau

SEQ ID NO: 1056686 - RNA, 19 nt, Homo sapiens
  misc_RNA (1)...(19): siRNA sense strand
ucaagaggagaaagagaaa

SEQ ID NO: 1056687 - RNA, 19 nt, Homo sapiens
  misc_RNA (1)...(19): siRNA sense strand
aggaaagaaucucuauaca

SEQ ID NO: 1056688 - RNA, 19 nt, Homo sapiens
  misc_RNA (1)...(19): siRNA sense strand
cagcaugccauccacauca

SEQ ID NO: 1056689 - RNA, 19 nt, Homo sapiens
  misc_RNA (1)...(19): siRNA sense strand
gaucggcugcggcaacuuc

SEQ ID NO: 1056690 - RNA, 19 nt, Homo sapiens
  misc_RNA (1)...(19): siRNA sense strand
ugacaagaaaggagggaaa

SEQ ID NO: 1056691 - RNA, 19 nt, Homo sapiens
  misc_RNA (1)...(19): siRNA sense strand
acacgcaccugggcaagga

SEQ ID NO: 1056692 - RNA, 19 nt, Homo sapiens
  misc_RNA (1)...(19): siRNA sense strand
augaauacguggcuaucaa

SEQ ID NO: 1056693 - RNA, 19 nt, Homo sapiens
  misc_RNA (1)...(19): siRNA sense strand
acaccaagagccuaaucua

SEQ ID NO: 1056694 - RNA, 19 nt, Homo sapiens
  misc_RNA (1)...(19): siRNA sense strand
aaggagcgguaccagaaga

SEQ ID NO: 1056695 - RNA, 19 nt, Homo sapiens
  misc_RNA (1)...(19): siRNA sense strand
aaacccagccgcacagcaa

SEQ ID NO: 1056696 - RNA, 19 nt, Homo sapiens
  misc_RNA (1)...(19): siRNA sense strand
ucccucaggucuacuacuu

SEQ ID NO: 1056697 - RNA, 19 nt, Homo sapiens
  misc_RNA (1)...(19): siRNA sense strand
aaaugcugcuguuucuuca

SEQ ID NO: 1056698 - RNA, 19 nt, Homo sapiens
  misc_RNA (1)...(19): siRNA sense strand
ggagguggccgaugaaacc

SEQ ID NO: 1056699 - RNA, 19 nt, Homo sapiens
  misc_RNA (1)...(19): siRNA sense strand
gaagaucggggacaccaaa

SEQ ID NO: 1056700 - RNA, 19 nt, Homo sapiens
  misc_RNA (1)...(19): siRNA sense strand
gugcacaccaagagccuaa

SEQ ID NO: 1056701 - RNA, 19 nt, Homo sapiens
  misc_RNA (1)...(19): siRNA sense strand
cuaggaaagaaucucuaua

SEQ ID NO: 1056702 - RNA, 19 nt, Homo sapiens
  misc_RNA (1)...(19): siRNA sense strand
gaagcccgacuaugacuac

SEQ ID NO: 1056703 - RNA, 19 nt, Homo sapiens
  misc_RNA (1)...(19): siRNA sense strand
gcacaccaagagccuaauc

SEQ ID NO: 1056704 - RNA, 19 nt, Homo sapiens
  misc_RNA (1)...(19): siRNA sense strand
gcgcugggccacauguuca

SEQ ID NO: 1056705 - RNA, 19 nt, Homo sapiens
  misc_RNA (1)...(19): siRNA sense strand
gcuucguguucgacuauga

SEQ ID NO: 1056706 - RNA, 19 nt, Homo sapiens
  misc_RNA (1)...(19): siRNA sense strand
uggaguaccgguucuacaa

SEQ ID NO: 1056707 - RNA, 19 nt, Homo sapiens
  misc_RNA (1)...(19): siRNA sense strand
agguggagguggccgauga

SEQ ID NO: 1056708 - RNA, 19 nt, Homo sapiens
  misc_RNA (1)...(19): siRNA sense strand
gaggugcucugcgagaacu

SEQ ID NO: 1056709 - RNA, 19 nt, Homo sapiens
  misc_RNA (1)...(19): siRNA sense strand
gcucaagacggugcugaug

SEQ ID NO: 1056710 - RNA, 19 nt, Homo sapiens
  misc_RNA (1)...(19): siRNA sense strand
ggaguaccgguucuacaag

SEQ ID NO: 1056711 - RNA, 19 nt, Homo sapiens
  misc_RNA (1)...(19): siRNA sense strand
gaguaugugcacaccaaga

SEQ ID NO: 1056712 - RNA, 19 nt, Homo sapiens
  misc_RNA (1)...(19): siRNA sense strand
aauacguggcuaucaaauu

SEQ ID NO: 1056713 - RNA, 19 nt, Homo sapiens
  misc_RNA (1)...(19): siRNA sense strand
ucaaauuggagccgaucaa

SEQ ID NO: 1056714 - RNA, 19 nt, Homo sapiens
  misc_RNA (1)...(19): siRNA sense strand
caaauuggagccgaucaag

SEQ ID NO: 1056715 - RNA, 19 nt, Homo sapiens
  misc_RNA (1)...(19): siRNA sense strand
ugaucacgcgcauggagua

SEQ ID NO: 1056716 - RNA, 19 nt, Homo sapiens
  misc_RNA (1)...(19): siRNA sense strand
ccauccacaucaucgacuu

SEQ ID NO: 1056717 - RNA, 19 nt, Homo sapiens
  misc_RNA (1)...(19): siRNA sense strand
accaaaugcugcuguuucu

SEQ ID NO: 1056718 - RNA, 19 nt, Homo sapiens
  misc_RNA (1)...(19): siRNA sense strand
gagaagcccgacuaugacu

SEQ ID NO: 1056719 - RNA, 19 nt, Homo sapiens
  misc_RNA (1)...(19): siRNA sense strand
ccuaggaaagaaucucuau

SEQ ID NO: 1056720 - RNA, 19 nt, Homo sapiens
  misc_RNA (1)...(19): siRNA sense strand
ucgaggugcucugcgagaa

SEQ ID NO: 1056721 - RNA, 19 nt, Homo sapiens
  misc_RNA (1)...(19): siRNA sense strand
aaacaaaccuuuccuacua

SEQ ID NO: 1056722 - RNA, 19 nt, Homo sapiens
  misc_RNA (1)...(19): siRNA sense strand
gaaggagcauuuaugguua

SEQ ID NO: 1056723 - RNA, 19 nt, Homo sapiens
  misc_RNA (1)...(19): siRNA sense strand
gagaagagauuaccuuguu

SEQ ID NO: 1056724 - RNA, 19 nt, Homo sapiens
  misc_RNA (1)...(19): siRNA sense strand
gaacaaaguuuccagucaa

SEQ ID NO: 1056725 - RNA, 19 nt, Homo sapiens
  misc_RNA (1)...(19): siRNA sense strand
gaagauaccucgggcaguu

SEQ ID NO: 1056726 - RNA, 19 nt, Homo sapiens
  misc_RNA (1)...(19): siRNA sense strand
guaaggcugugaaugauaa

SEQ ID NO: 1056727 - RNA, 19 nt, Homo sapiens
  misc_RNA (1)...(19): siRNA sense strand
gaagagagccgaagucagu

SEQ ID NO: 1056728 - RNA, 19 nt, Homo sapiens
  misc_RNA (1)...(19): siRNA sense strand
gagcauuuaugguuagaaa

SEQ ID NO: 1056729 - RNA, 19 nt, Homo sapiens
  misc_RNA (1)...(19): siRNA sense strand
cuccagagguguuucauua

SEQ ID NO: 1056730 - RNA, 19 nt, Homo sapiens
  misc_RNA (1)...(19): siRNA sense strand
gaacaguuacucagacaaa

SEQ ID NO: 1056731 - RNA, 19 nt, Homo sapiens
  misc_RNA (1)...(19): siRNA sense strand
guaccacucuagcccaaua

SEQ ID NO: 1056732 - RNA, 19 nt, Homo sapiens
  misc_RNA (1)...(19): siRNA sense strand
guaccagucuagcgcaaua

SEQ ID NO: 1056733 - RNA, 19 nt, Homo sapiens
  misc_RNA (1)...(19): siRNA sense strand
gcagacgccuguagagaga

SEQ ID NO: 1056734 - RNA, 19 nt, Homo sapiens
  misc_RNA (1)...(19): siRNA sense strand
aaggaacugucaaacauua

SEQ ID NO: 1056735 - RNA, 19 nt, Homo sapiens
  misc_RNA (1)...(19): siRNA sense strand
gaagagaaacacagaguuc

SEQ ID NO: 1056736 - RNA, 19 nt, Homo sapiens
  misc_RNA (1)...(19): siRNA sense strand
uaaauucuauggagugugu

SEQ ID NO: 1056737 - RNA, 19 nt, Homo sapiens
  misc_RNA (1)...(19): siRNA sense strand
caacaaaggccaacaaggu

SEQ ID NO: 1056738 - RNA, 19 nt, Homo sapiens
  misc_RNA (1)...(19): siRNA sense strand
ggaagcagcccuaugacuu

SEQ ID NO: 1056739 - RNA, 19 nt, Homo sapiens
  misc_RNA (1)...(19): siRNA sense strand
ggacuuggcugcucguaac

SEQ ID NO: 1056740 - RNA, 19 nt, Homo sapiens
  misc_RNA (1)...(19): siRNA sense strand
caacuccugucuuccauug

SEQ ID NO: 1056741 - RNA, 19 nt, Homo sapiens
  misc_RNA (1)...(19): siRNA sense strand
acaguguccuuauuuagua

SEQ ID NO: 1056742 - RNA, 19 nt, Homo sapiens
  misc_RNA (1)...(19): siRNA sense strand
ggagagucaccaauucaua

SEQ ID NO: 1056743 - RNA, 19 nt, Homo sapiens
  misc_RNA (1)...(19): siRNA sense strand
ccauauacauagugacuga

SEQ ID NO: 1056744 - RNA, 19 nt, Homo sapiens
  misc_RNA (1)...(19): siRNA sense strand
aagaugggcuucucuaugu

SEQ ID NO: 1056745 - RNA, 19 nt, Homo sapiens
  misc_RNA (1)...(19): siRNA sense strand
gaagagauuaccuuguuga

SEQ ID NO: 1056746 - RNA, 19 nt, Homo sapiens
  misc_RNA (1)...(19): siRNA sense strand
ggaauucccugagucaagu

SEQ ID NO: 1056747 - RNA, 19 nt, Homo sapiens
  misc_RNA (1)...(19): siRNA sense strand
ugaauuaccugaggaguca

SEQ ID NO: 1056748 - RNA, 19 nt, Homo sapiens
  misc_RNA (1)...(19): siRNA sense strand
gaagauguugcaagcagua

SEQ ID NO: 1056749 - RNA, 19 nt, Homo sapiens
  misc_RNA (1)...(19): siRNA sense strand
gaagcagcccuaugacuug

SEQ ID NO: 1056750 - RNA, 19 nt, Homo sapiens
  misc_RNA (1)...(19): siRNA sense strand
caaaugcugagaacaaauu

SEQ ID NO: 1056751 - RNA, 19 nt, Homo sapiens
  misc_RNA (1)...(19): siRNA sense strand
ucaaagauuucaugggaau

SEQ ID NO: 1056752 - RNA, 19 nt, Homo sapiens
  misc_RNA (1)...(19): siRNA sense strand
cagauugucuauaaagaug

SEQ ID NO: 1056753 - RNA, 19 nt, Homo sapiens
  misc_RNA (1)...(19): siRNA sense strand
ggaaugacaagguauguuc

SEQ ID NO: 1056754 - RNA, 19 nt, Homo sapiens
  misc_RNA (1)...(19): siRNA sense strand
gcaguaugauguugcuguu

SEQ ID NO: 1056755 - RNA, 19 nt, Homo sapiens
  misc_RNA (1)...(19): siRNA sense strand
ugacaacgaaucaaagaaa

SEQ ID NO: 1056756 - RNA, 19 nt, Homo sapiens
  misc_RNA (1)...(19): siRNA sense strand
gaaaugugcuacgaugucu

SEQ ID NO: 1056757 - RNA, 19 nt, Homo sapiens
  misc_RNA (1)...(19): siRNA sense strand
ggaugauuaugacugguuu

SEQ ID NO: 1056758 - RNA, 19 nt, Homo sapiens
  misc_RNA (1)...(19): siRNA sense strand
aggaaaaccuggaugauua

SEQ ID NO: 1056759 - RNA, 19 nt, Homo sapiens
  misc_RNA (1)...(19): siRNA sense strand
cagccaccaucuucaagua

SEQ ID NO: 1056760 - RNA, 19 nt, Homo sapiens
  misc_RNA (1)...(19): siRNA sense strand
cacaccaccucaaagauuu

SEQ ID NO: 1056761 - RNA, 19 nt, Homo sapiens
  misc_RNA (1)...(19): siRNA sense strand
cagcagcagugaagauguu

SEQ ID NO: 1056762 - RNA, 19 nt, Homo sapiens
  misc_RNA (1)...(19): siRNA sense strand
ccaagcugguuaaauucua

SEQ ID NO: 1056763 - RNA, 19 nt, Homo sapiens
  misc_RNA (1)...(19): siRNA sense strand
ugacagcaacucaaagaaa

SEQ ID NO: 1056764 - RNA, 19 nt, Homo sapiens
  misc_RNA (1)...(19): siRNA sense strand
aguaugauguugcuguuaa

SEQ ID NO: 1056765 - RNA, 19 nt, Homo sapiens
  misc_RNA (1)...(19): siRNA sense strand
agaaggagcauuuaugguu

SEQ ID NO: 1056766 - RNA, 19 nt, Homo sapiens
  misc_RNA (1)...(19): siRNA sense strand
aaucagauguguggagaaa

SEQ ID NO: 1056767 - RNA, 19 nt, Homo sapiens
  misc_RNA (1)...(19): siRNA sense strand
uuaguaaggcugugaauga

SEQ ID NO: 1056768 - RNA, 19 nt, Homo sapiens
  misc_RNA (1)...(19): siRNA sense strand
gagagacaguacccauuuc

SEQ ID NO: 1056769 - RNA, 19 nt, Homo sapiens
  misc_RNA (1)...(19): siRNA sense strand
ggcaguuccuguucucaaa

SEQ ID NO: 1056770 - RNA, 19 nt, Homo sapiens
  misc_RNA (1)...(19): siRNA sense strand
gguguuucauuacuucaaa

SEQ ID NO: 1056771 - RNA, 19 nt, Homo sapiens
  misc_RNA (1)...(19): siRNA sense strand
guaucugacuuuggaauga

SEQ ID NO: 1056772 - RNA, 19 nt, Homo sapiens
  misc_RNA (1)...(19): siRNA sense strand
gaaauggaaucugggaacu

SEQ ID NO: 1056773 - RNA, 19 nt, Homo sapiens
  misc_RNA (1)...(19): siRNA sense strand
ucagauguguggagaaagu

SEQ ID NO: 1056774 - RNA, 19 nt, Homo sapiens
  misc_RNA (1)...(19): siRNA sense strand
caagcugguuaaauucuau

SEQ ID NO: 1056775 - RNA, 19 nt, Homo sapiens
  misc_RNA (1)...(19): siRNA sense strand
caaauuauaccuggcagaa

SEQ ID NO: 1056776 - RNA, 19 nt, Homo sapiens
  misc_RNA (1)...(19): siRNA sense strand
aucacaaucugaacaguua

SEQ ID NO: 1056777 - RNA, 19 nt, Homo sapiens
  misc_RNA (1)...(19): siRNA sense strand
ucacaccaccucaaagauu

SEQ ID NO: 1056778 - RNA, 19 nt, Homo sapiens
  misc_RNA (1)...(19): siRNA sense strand
gaucacaaucugaacaguu

SEQ ID NO: 1056779 - RNA, 19 nt, Homo sapiens
  misc_RNA (1)...(19): siRNA sense strand
uacaaaugcugagaacaaa

SEQ ID NO: 1056780 - RNA, 19 nt, Homo sapiens
  misc_RNA (1)...(19): siRNA sense strand
cgaagucagugguugaaag

SEQ ID NO: 1056781 - RNA, 19 nt, Homo sapiens
  misc_RNA (1)...(19): siRNA sense strand
gcagcccuaugacuuguau

SEQ ID NO: 1056782 - RNA, 19 nt, Homo sapiens
  misc_RNA (1)...(19): siRNA sense strand
ggaauaccccauauacaua

SEQ ID NO: 1056783 - RNA, 19 nt, Homo sapiens
  misc_RNA (1)...(19): siRNA sense strand
agaaaaggauccauugaaa

SEQ ID NO: 1056784 - RNA, 19 nt, Homo sapiens
  misc_RNA (1)...(19): siRNA sense strand
gacagcaacucaaagaaaa

SEQ ID NO: 1056785 - RNA, 19 nt, Homo sapiens
  misc_RNA (1)...(19): siRNA sense strand
gugcuacgaugucugugaa

SEQ ID NO: 1056786 - RNA, 19 nt, Homo sapiens
  misc_RNA (1)...(19): siRNA sense strand
ugauguugcuguuaagaug

SEQ ID NO: 1056787 - RNA, 19 nt, Homo sapiens
  misc_RNA (1)...(19): siRNA sense strand
gaaaaggggcagcagaaaa

SEQ ID NO: 1056788 - RNA, 19 nt, Homo sapiens
  misc_RNA (1)...(19): siRNA sense strand
ggaguguguucaaaggaau

SEQ ID NO: 1056789 - RNA, 19 nt, Homo sapiens
  misc_RNA (1)...(19): siRNA sense strand
aauggaaucugggaacuga

SEQ ID NO: 1056790 - RNA, 19 nt, Homo sapiens
  misc_RNA (1)...(19): siRNA sense strand
agagagacaguacccauuu

SEQ ID NO: 1056791 - RNA, 19 nt, Homo sapiens
  misc_RNA (1)...(19): siRNA sense strand
aucccaagcugguuaaauu

SEQ ID NO: 1056792 - RNA, 19 nt, Homo sapiens
  misc_RNA (1)...(19): siRNA sense strand
gcaauaugacagcaacuca

SEQ ID NO: 1056793 - RNA, 19 nt, Homo sapiens
  misc_RNA (1)...(19): siRNA sense strand
gagcagacgccuguagaga

SEQ ID NO: 1056794 - RNA, 19 nt, Homo sapiens
  misc_RNA (1)...(19): siRNA sense strand
gaaaagaaggagcauuuau

SEQ ID NO: 1056795 - RNA, 19 nt, Homo sapiens
  misc_RNA (1)...(19): siRNA sense strand
agacagagugcugaagaua

SEQ ID NO: 1056796 - RNA, 19 nt, Homo sapiens
  misc_RNA (1)...(19): siRNA sense strand
auacaaaugcugagaacaa

SEQ ID NO: 1056797 - RNA, 19 nt, Homo sapiens
  misc_RNA (1)...(19): siRNA sense strand
aaaaggaacugucaaacau

SEQ ID NO: 1056798 - RNA, 19 nt, Homo sapiens
  misc_RNA (1)...(19): siRNA sense strand
ugaaucacaccaccucaaa

SEQ ID NO: 1056799 - RNA, 19 nt, Homo sapiens
  misc_RNA (1)...(19): siRNA sense strand
auacugcagucaaugaaga

SEQ ID NO: 1056800 - RNA, 19 nt, Homo sapiens
  misc_RNA (1)...(19): siRNA sense strand
cagagguguuucauuacuu

SEQ ID NO: 1056801 - RNA, 19 nt, Homo sapiens
  misc_RNA (1)...(19): siRNA sense strand
ccagagguguuucauuacu

SEQ ID NO: 1056802 - RNA, 19 nt, Homo sapiens
  misc_RNA (1)...(19): siRNA sense strand
gggaaaagaaggagcauuu

SEQ ID NO: 1056803 - RNA, 19 nt, Homo sapiens
  misc_RNA (1)...(19): siRNA sense strand
aaagaugggcuucucuaug

SEQ ID NO: 1056804 - RNA, 19 nt, Homo sapiens
  misc_RNA (1)...(19): siRNA sense strand
agaaaagcgucccacauuu

SEQ ID NO: 1056805 - RNA, 19 nt, Homo sapiens
  misc_RNA (1)...(19): siRNA sense strand
ggcacgagcuuccagaaaa

SEQ ID NO: 1056806 - RNA, 19 nt, Homo sapiens
  misc_RNA (1)...(19): siRNA sense strand
caaauacagcagcaaguca

SEQ ID NO: 1056807 - RNA, 19 nt, Homo sapiens
  misc_RNA (1)...(19): siRNA sense strand
caaaguuuccagucaagug

SEQ ID NO: 1056808 - RNA, 19 nt, Homo sapiens
  misc_RNA (1)...(19): siRNA sense strand
agaagagauuaccuuguug

SEQ ID NO: 1056809 - RNA, 19 nt, Homo sapiens
  misc_RNA (1)...(19): siRNA sense strand
ggaaaagaaggagcauuua

SEQ ID NO: 1056810 - RNA, 19 nt, Homo sapiens
  misc_RNA (1)...(19): siRNA sense strand
ccagacagagugcugaaga

SEQ ID NO: 1056811 - RNA, 19 nt, Homo sapiens
  misc_RNA (1)...(19): siRNA sense strand
caguacccauuucagauug

SEQ ID NO: 1056812 - RNA, 19 nt, Homo sapiens
  misc_RNA (1)...(19): siRNA sense strand
gagagucaccaauucauac

SEQ ID NO: 1056813 - RNA, 19 nt, Homo sapiens
  misc_RNA (1)...(19): siRNA sense strand
cuucccagcucuuagaaau

SEQ ID NO: 1056814 - RNA, 19 nt, Homo sapiens
  misc_RNA (1)...(19): siRNA sense strand
uaaagaugggcuucucuau

SEQ ID NO: 1056815 - RNA, 19 nt, Homo sapiens
  misc_RNA (1)...(19): siRNA sense strand
caggaggcccagacuauga

SEQ ID NO: 1056816 - RNA, 19 nt, Homo sapiens
  misc_RNA (1)...(19): siRNA sense strand
aaagaaggagcauuuaugg

SEQ ID NO: 1056817 - RNA, 19 nt, Homo sapiens
  misc_RNA (1)...(19): siRNA sense strand
ccugacugguggcaaguaa

SEQ ID NO: 1056818 - RNA, 19 nt, Homo sapiens
  misc_RNA (1)...(19): siRNA sense strand
gacaguacccauuucagau

SEQ ID NO: 1056819 - RNA, 19 nt, Homo sapiens
  misc_RNA (1)...(19): siRNA sense strand
uggaguguguucaaaggaa

SEQ ID NO: 1056820 - RNA, 19 nt, Homo sapiens
  misc_RNA (1)...(19): siRNA sense strand
cagcagcaagucagacgua

SEQ ID NO: 1056821 - RNA, 19 nt, Homo sapiens
  misc_RNA (1)...(19): siRNA sense strand
gcagaaaguuuggaagcaa

SEQ ID NO: 1056822 - RNA, 19 nt, Homo sapiens
  misc_RNA (1)...(19): siRNA sense strand
gcaaguacuuaguggauca

SEQ ID NO: 1056823 - RNA, 19 nt, Homo sapiens
  misc_RNA (1)...(19): siRNA sense strand
uagaaggagucaaccagua

SEQ ID NO: 1056824 - RNA, 19 nt, Homo sapiens
  misc_RNA (1)...(19): siRNA sense strand
ccagaugcccuuccaguuu

SEQ ID NO: 1056825 - RNA, 19 nt, Homo sapiens
  misc_RNA (1)...(19): siRNA sense strand
ccagaacugucucagcaaa

SEQ ID NO: 1056826 - RNA, 19 nt, Homo sapiens
  misc_RNA (1)...(19): siRNA sense strand
gaagagcugugaggaugug

SEQ ID NO: 1056827 - RNA, 19 nt, Homo sapiens
  misc_RNA (1)...(19): siRNA sense strand
gaacgagugugagcucuac

SEQ ID NO: 1056828 - RNA, 19 nt, Homo sapiens
  misc_RNA (1)...(19): siRNA sense strand
gugaggauguggaugaaug

SEQ ID NO: 1056829 - RNA, 19 nt, Homo sapiens
  misc_RNA (1)...(19): siRNA sense strand
caaggucaccaucuuugua

SEQ ID NO: 1056830 - RNA, 19 nt, Homo sapiens
  misc_RNA (1)...(19): siRNA sense strand
gcagacggcagaaaguuug

SEQ ID NO: 1056831 - RNA, 19 nt, Homo sapiens
  misc_RNA (1)...(19): siRNA sense strand
guagagguaucagugaaug

SEQ ID NO: 1056832 - RNA, 19 nt, Homo sapiens
  misc_RNA (1)...(19): siRNA sense strand
cagaugcccuuccaguuuc

SEQ ID NO: 1056833 - RNA, 19 nt, Homo sapiens
  misc_RNA (1)...(19): siRNA sense strand
guacuuaguggaucacgaa

SEQ ID NO: 1056834 - RNA, 19 nt, Homo sapiens
  misc_RNA (1)...(19): siRNA sense strand
gagggcagcggcaauguga

SEQ ID NO: 1056835 - RNA, 19 nt, Homo sapiens
  misc_RNA (1)...(19): siRNA sense strand
gagggcauccgccacauga

SEQ ID NO: 1056836 - RNA, 19 nt, Homo sapiens
  misc_RNA (1)...(19): siRNA sense strand
ggagguggacgucgacaug

SEQ ID NO: 1056837 - RNA, 19 nt, Homo sapiens
  misc_RNA (1)...(19): siRNA sense strand
gcugugaggauguggauga

SEQ ID NO: 1056838 - RNA, 19 nt, Homo sapiens
  misc_RNA (1)...(19): siRNA sense strand
gaccaucuccuuccauuac

SEQ ID NO: 1056839 - RNA, 19 nt, Homo sapiens
  misc_RNA (1)...(19): siRNA sense strand
gaaaguuuggaagcaagua

SEQ ID NO: 1056840 - RNA, 19 nt, Homo sapiens
  misc_RNA (1)...(19): siRNA sense strand
aagaccaucuccuuccauu

SEQ ID NO: 1056841 - RNA, 19 nt, Homo sapiens
  misc_RNA (1)...(19): siRNA sense strand
ggagucaaccaguacagau

SEQ ID NO: 1056842 - RNA, 19 nt, Homo sapiens
  misc_RNA (1)...(19): siRNA sense strand
aaugugagcuacgugaaga

SEQ ID NO: 1056843 - RNA, 19 nt, Homo sapiens
  misc_RNA (1)...(19): siRNA sense strand
gcaaugugagcuacgugaa

SEQ ID NO: 1056844 - RNA, 19 nt, Homo sapiens
  misc_RNA (1)...(19): siRNA sense strand
caguacagaugcauuuguc

SEQ ID NO: 1056845 - RNA, 19 nt, Homo sapiens
  misc_RNA (1)...(19): siRNA sense strand
gggaccacaugcaucaaca

SEQ ID NO: 1056846 - RNA, 19 nt, Homo sapiens
  misc_RNA (1)...(19): siRNA sense strand
uguccaaggucaccaucuu

SEQ ID NO: 1056847 - RNA, 19 nt, Homo sapiens
  misc_RNA (1)...(19): siRNA sense strand
gaucacgaaguccauuuua

SEQ ID NO: 1056848 - RNA, 19 nt, Homo sapiens
  misc_RNA (1)...(19): siRNA sense strand
agaacugucucagcaaaca

SEQ ID NO: 1056849 - RNA, 19 nt, Homo sapiens
  misc_RNA (1)...(19): siRNA sense strand
ccaagaccaucuccuucca

SEQ ID NO: 1056850 - RNA, 19 nt, Homo sapiens
  misc_RNA (1)...(19): siRNA sense strand
gugaagacgucuccauucc

SEQ ID NO: 1056851 - RNA, 19 nt, Homo sapiens
  misc_RNA (1)...(19): siRNA sense strand
ggcagaaaguuuggaagca

SEQ ID NO: 1056852 - RNA, 19 nt, Homo sapiens
  misc_RNA (1)...(19): siRNA sense strand
ccaaccacguguccaaggu

SEQ ID NO: 1056853 - RNA, 19 nt, Homo sapiens
  misc_RNA (1)...(19): siRNA sense strand
cuuaguggaucacgaaguc

SEQ ID NO: 1056854 - RNA, 19 nt, Homo sapiens
  misc_RNA (1)...(19): siRNA sense strand
ggaagagcugugaggaugu

SEQ ID NO: 1056855 - RNA, 19 nt, Homo sapiens
  misc_RNA (1)...(19): siRNA sense strand
gaaggagucaaccaguaca

SEQ ID NO: 1056856 - RNA, 19 nt, Homo sapiens
  misc_RNA (1)...(19): siRNA sense strand
cauggugugucuucccaau

SEQ ID NO: 1056857 - RNA, 19 nt, Homo sapiens
  misc_RNA (1)...(19): siRNA sense strand
cccaacagccugcgguuug

SEQ ID NO: 1056858 - RNA, 19 nt, Homo sapiens
  misc_RNA (1)...(19): siRNA sense strand
ggacugggaaccgcuguca

SEQ ID NO: 1056859 - RNA, 19 nt, Homo sapiens
  misc_RNA (1)...(19): siRNA sense strand
caaccaguacagaugcauu

SEQ ID NO: 1056860 - RNA, 19 nt, Homo sapiens
  misc_RNA (1)...(19): siRNA sense strand
ucaaaauggugguacaugu

SEQ ID NO: 1056861 - RNA, 19 nt, Homo sapiens
  misc_RNA (1)...(19): siRNA sense strand
gagucaaccaguacagaug

SEQ ID NO: 1056862 - RNA, 19 nt, Homo sapiens
  misc_RNA (1)...(19): siRNA sense strand
cgucuccauuccaguguga

SEQ ID NO: 1056863 - RNA, 19 nt, Homo sapiens
  misc_RNA (1)...(19): siRNA sense strand
guccaaggucaccaucuuu

SEQ ID NO: 1056864 - RNA, 19 nt, Homo sapiens
  misc_RNA (1)...(19): siRNA sense strand
cuguagagguaucagugaa

SEQ ID NO: 1056865 - RNA, 19 nt, Homo sapiens
  misc_RNA (1)...(19): siRNA sense strand
gcagcggcaaugugagcua

SEQ ID NO: 1056866 - RNA, 19 nt, Homo sapiens
  misc_RNA (1)...(19): siRNA sense strand
gggcauccgccacaugaag

SEQ ID NO: 1056867 - RNA, 19 nt, Homo sapiens
  misc_RNA (1)...(19): siRNA sense strand
aaccaguacagaugcauuu

SEQ ID NO: 1056868 - RNA, 19 nt, Homo sapiens
  misc_RNA (1)...(19): siRNA sense strand
ccaaggucaccaucuuugu

SEQ ID NO: 1056869 - RNA, 19 nt, Homo sapiens
  misc_RNA (1)...(19): siRNA sense strand
guuuggaagcaaguacuua

SEQ ID NO: 1056870 - RNA, 19 nt, Homo sapiens
  misc_RNA (1)...(19): siRNA sense strand
ccagcagcauggugugucu

SEQ ID NO: 1056871 - RNA, 19 nt, Homo sapiens
  misc_RNA (1)...(19): siRNA sense strand
agaccaucuccuuccauua

SEQ ID NO: 1056872 - RNA, 19 nt, Homo sapiens
  misc_RNA (1)...(19): siRNA sense strand
gcugggaccucaucauaga

SEQ ID NO: 1056873 - RNA, 19 nt, Homo sapiens
  misc_RNA (1)...(19): siRNA sense strand
cagcugggaccucaucaua

SEQ ID NO: 1056874 - RNA, 19 nt, Homo sapiens
  misc_RNA (1)...(19): siRNA sense strand
ggaagcaguaccuggaauu

SEQ ID NO: 1056875 - RNA, 19 nt, Homo sapiens
  misc_RNA (1)...(19): siRNA sense strand
gaagcaguaccuggaauug

SEQ ID NO: 1056876 - RNA, 19 nt, Homo sapiens
  misc_RNA (1)...(19): siRNA sense strand
ggcuggaacuucugcucua

SEQ ID NO: 1056877 - RNA, 19 nt, Homo sapiens
  misc_RNA (1)...(19): siRNA sense strand
guaaaagcgugaccacaga

SEQ ID NO: 1056878 - RNA, 19 nt, Homo sapiens
  misc_RNA (1)...(19): siRNA sense strand
acagaugaguggaagaaag

SEQ ID NO: 1056879 - RNA, 19 nt, Homo sapiens
  misc_RNA (1)...(19): siRNA sense strand
gaucaucuaccugcaguuc

SEQ ID NO: 1056880 - RNA, 19 nt, Homo sapiens
  misc_RNA (1)...(19): siRNA sense strand
gcuggaacuucugcucuau

SEQ ID NO: 1056881 - RNA, 19 nt, Homo sapiens
  misc_RNA (1)...(19): siRNA sense strand
gaagauggaggaggcaaag

SEQ ID NO: 1056882 - RNA, 19 nt, Homo sapiens
  misc_RNA (1)...(19): siRNA sense strand
ggucauccucuuccacaug

SEQ ID NO: 1056883 - RNA, 19 nt, Homo sapiens
  misc_RNA (1)...(19): siRNA sense strand
gucauccucuuccacaugu

SEQ ID NO: 1056884 - RNA, 19 nt, Homo sapiens
  misc_RNA (1)...(19): siRNA sense strand
gcaugcgcgucuucaagca

SEQ ID NO: 1056885 - RNA, 19 nt, Homo sapiens
  misc_RNA (1)...(19): siRNA sense strand
ccacgguccugcugcugau

SEQ ID NO: 1056886 - RNA, 19 nt, Homo sapiens
  misc_RNA (1)...(19): siRNA sense strand
cagaugaguggaagaaagu

SEQ ID NO: 1056887 - RNA, 19 nt, Homo sapiens
  misc_RNA (1)...(19): siRNA sense strand
ucgagggccugguggacaa

SEQ ID NO: 1056888 - RNA, 19 nt, Homo sapiens
  misc_RNA (1)...(19): siRNA sense strand
uaccuggaauugcaugcuu

SEQ ID NO: 1056889 - RNA, 19 nt, Homo sapiens
  misc_RNA (1)...(19): siRNA sense strand
gugcugagcccugguugga

SEQ ID NO: 1056890 - RNA, 19 nt, Homo sapiens
  misc_RNA (1)...(19): siRNA sense strand
agcaguaccuggaauugca

SEQ ID NO: 1056891 - RNA, 19 nt, Homo sapiens
  misc_RNA (1)...(19): siRNA sense strand
ucaucuaccugcaguucuc

SEQ ID NO: 1056892 - RNA, 19 nt, Homo sapiens
  misc_RNA (1)...(19): siRNA sense strand
aggaggaggcgaccaccua

SEQ ID NO: 1056893 - RNA, 19 nt, Homo sapiens
  misc_RNA (1)...(19): siRNA sense strand
gggcucaggcuggaacuuc

SEQ ID NO: 1056894 - RNA, 19 nt, Homo sapiens
  misc_RNA (1)...(19): siRNA sense strand
ggaggagacacuacucaaa

SEQ ID NO: 1056895 - RNA, 19 nt, Homo sapiens
  misc_RNA (1)...(19): siRNA sense strand
ugagcgugcugcagaguga

SEQ ID NO: 1056896 - RNA, 19 nt, Homo sapiens
  misc_RNA (1)...(19): siRNA sense strand
caaccacgugcaugaggua

SEQ ID NO: 1056897 - RNA, 19 nt, Homo sapiens
  misc_RNA (1)...(19): siRNA sense strand
gaggagacacuacucaaac

SEQ ID NO: 1056898 - RNA, 19 nt, Homo sapiens
  misc_RNA (1)...(19): siRNA sense strand
caucagcgaccuacauagu

SEQ ID NO: 1056899 - RNA, 19 nt, Homo sapiens
  misc_RNA (1)...(19): siRNA sense strand
gaugagcugcugggcguuu

SEQ ID NO: 1056900 - RNA, 19 nt, Homo sapiens
  misc_RNA (1)...(19): siRNA sense strand
cugaggagacccaagaaga

SEQ ID NO: 1056901 - RNA, 19 nt, Homo sapiens
  misc_RNA (1)...(19): siRNA sense strand
gcacgcaggaggagacacu

SEQ ID NO: 1056902 - RNA, 19 nt, Homo sapiens
  misc_RNA (1)...(19): siRNA sense strand
uccaucagcgaccuacaua

SEQ ID NO: 1056903 - RNA, 19 nt, Homo sapiens
  misc_RNA (1)...(19): siRNA sense strand
ggagacacuacucaaacuc

SEQ ID NO: 1056904 - RNA, 19 nt, Homo sapiens
  misc_RNA (1)...(19): siRNA sense strand
gcaacuagcucauugauuu

SEQ ID NO: 1056905 - RNA, 19 nt, Homo sapiens
  misc_RNA (1)...(19): siRNA sense strand
ggacaucaaucaaggagaa

SEQ ID NO: 1056906 - RNA, 19 nt, Homo sapiens
  misc_RNA (1)...(19): siRNA sense strand
guacauggcuaacgucaga

SEQ ID NO: 1056907 - RNA, 19 nt, Homo sapiens
  misc_RNA (1)...(19): siRNA sense strand
aaacagacaucaacagcaa

SEQ ID NO: 1056908 - RNA, 19 nt, Homo sapiens
  misc_RNA (1)...(19): siRNA sense strand
gagcagcuaaugucuguua

SEQ ID NO: 1056909 - RNA, 19 nt, Homo sapiens
  misc_RNA (1)...(19): siRNA sense strand
ucagaaaucuugacuaugc

SEQ ID NO: 1056910 - RNA, 19 nt, Homo sapiens
  misc_RNA (1)...(19): siRNA sense strand
ccaagcaacuagcucauug

SEQ ID NO: 1056911 - RNA, 19 nt, Homo sapiens
  misc_RNA (1)...(19): siRNA sense strand
aaacaaagcccacuucgau

SEQ ID NO: 1056912 - RNA, 19 nt, Homo sapiens
  misc_RNA (1)...(19): siRNA sense strand
uuuccaggcucuauucuua

SEQ ID NO: 1056913 - RNA, 19 nt, Homo sapiens
  misc_RNA (1)...(19): siRNA sense strand
cuacagcuaugacaaacaa

SEQ ID NO: 1056914 - RNA, 19 nt, Homo sapiens
  misc_RNA (1)...(19): siRNA sense strand
ucaaacuacuacacaauug

SEQ ID NO: 1056915 - RNA, 19 nt, Homo sapiens
  misc_RNA (1)...(19): siRNA sense strand
cuacacaauugucagcuaa

SEQ ID NO: 1056916 - RNA, 19 nt, Homo sapiens
  misc_RNA (1)...(19): siRNA sense strand
gauaguacauggcuaacgu

SEQ ID NO: 1056917 - RNA, 19 nt, Homo sapiens
  misc_RNA (1)...(19): siRNA sense strand
aaaggugucuucguuacua

SEQ ID NO: 1056918 - RNA, 19 nt, Homo sapiens
  misc_RNA (1)...(19): siRNA sense strand
gaucgacucggcccuuuaa

SEQ ID NO: 1056919 - RNA, 19 nt, Homo sapiens
  misc_RNA (1)...(19): siRNA sense strand
gcaguaucuuccaaacauu

SEQ ID NO: 1056920 - RNA, 19 nt, Homo sapiens
  misc_RNA (1)...(19): siRNA sense strand
ugacuaugcuuccagaauc

SEQ ID NO: 1056921 - RNA, 19 nt, Homo sapiens
  misc_RNA (1)...(19): siRNA sense strand
cagcuaaugucuguuauca

SEQ ID NO: 1056922 - RNA, 19 nt, Homo sapiens
  misc_RNA (1)...(19): siRNA sense strand
ggaacauuacugaaaguuu

SEQ ID NO: 1056923 - RNA, 19 nt, Homo sapiens
  misc_RNA (1)...(19): siRNA sense strand
caguauaucagaaguauga

SEQ ID NO: 1056924 - RNA, 19 nt, Homo sapiens
  misc_RNA (1)...(19): siRNA sense strand
aaacauugccuacagcuau

SEQ ID NO: 1056925 - RNA, 19 nt, Homo sapiens
  misc_RNA (1)...(19): siRNA sense strand
ccacuucgauguguuguuc

SEQ ID NO: 1056926 - RNA, 19 nt, Homo sapiens
  misc_RNA (1)...(19): siRNA sense strand
gcgcagucguaucuaugua

SEQ ID NO: 1056927 - RNA, 19 nt, Homo sapiens
  misc_RNA (1)...(19): siRNA sense strand
uaaugucuguuaucaggaa

SEQ ID NO: 1056928 - RNA, 19 nt, Homo sapiens
  misc_RNA (1)...(19): siRNA sense strand
guaucuauguauccuggua

SEQ ID NO: 1056929 - RNA, 19 nt, Homo sapiens
  misc_RNA (1)...(19): siRNA sense strand
agaugaagauguccuagga

SEQ ID NO: 1056930 - RNA, 19 nt, Homo sapiens
  misc_RNA (1)...(19): siRNA sense strand
ccagaggaauccaaagaca

SEQ ID NO: 1056931 - RNA, 19 nt, Homo sapiens
  misc_RNA (1)...(19): siRNA sense strand
gaauccaaagacaaaguua

SEQ ID NO: 1056932 - RNA, 19 nt, Homo sapiens
  misc_RNA (1)...(19): siRNA sense strand
gcacuuagggacaucaauc

SEQ ID NO: 1056933 - RNA, 19 nt, Homo sapiens
  misc_RNA (1)...(19): siRNA sense strand
agacaucaacagcaaagua

SEQ ID NO: 1056934 - RNA, 19 nt, Homo sapiens
  misc_RNA (1)...(19): siRNA sense strand
ggaauccaaagacaaaguu

SEQ ID NO: 1056935 - RNA, 19 nt, Homo sapiens
  misc_RNA (1)...(19): siRNA sense strand
guacaguauaucagaagua

SEQ ID NO: 1056936 - RNA, 19 nt, Homo sapiens
  misc_RNA (1)...(19): siRNA sense strand
ccuaggaacauuacugaaa

SEQ ID NO: 1056937 - RNA, 19 nt, Homo sapiens
  misc_RNA (1)...(19): siRNA sense strand
caaagacaaaguuaucuca

SEQ ID NO: 1056938 - RNA, 19 nt, Homo sapiens
  misc_RNA (1)...(19): siRNA sense strand
guguacagaucuugcaaug

SEQ ID NO: 1056939 - RNA, 19 nt, Homo sapiens
  misc_RNA (1)...(19): siRNA sense strand
gaaacugcgugaaaacaga

SEQ ID NO: 1056940 - RNA, 19 nt, Homo sapiens
  misc_RNA (1)...(19): siRNA sense strand
aagacaaaguuaucucaga

SEQ ID NO: 1056941 - RNA, 19 nt, Homo sapiens
  misc_RNA (1)...(19): siRNA sense strand
gaaguaugagccgaucuuu

SEQ ID NO: 1056942 - RNA, 19 nt, Homo sapiens
  misc_RNA (1)...(19): siRNA sense strand
cuaggaacauuacugaaag

SEQ ID NO: 1056943 - RNA, 19 nt, Homo sapiens
  misc_RNA (1)...(19): siRNA sense strand
gaaaaggugucuucguuac

SEQ ID NO: 1056944 - RNA, 19 nt, Homo sapiens
  misc_RNA (1)...(19): siRNA sense strand
ggaaaaggugucuucguua

SEQ ID NO: 1056945 - RNA, 19 nt, Homo sapiens
  misc_RNA (1)...(19): siRNA sense strand
gcagucguaucuauguauc

SEQ ID NO: 1056946 - RNA, 19 nt, Homo sapiens
  misc_RNA (1)...(19): siRNA sense strand
caggcucuauucuuaaaug

SEQ ID NO: 1056947 - RNA, 19 nt, Homo sapiens
  misc_RNA (1)...(19): siRNA sense strand
agaggaauccaaagacaaa

SEQ ID NO: 1056948 - RNA, 19 nt, Homo sapiens
  misc_RNA (1)...(19): siRNA sense strand
aaagggauaucaaaaguug

SEQ ID NO: 1056949 - RNA, 19 nt, Homo sapiens
  misc_RNA (1)...(19): siRNA sense strand
cauuggaaauccguuuauu

SEQ ID NO: 1056950 - RNA, 19 nt, Homo sapiens
  misc_RNA (1)...(19): siRNA sense strand
gggaucgacucggcccuuu

SEQ ID NO: 1056951 - RNA, 19 nt, Homo sapiens
  misc_RNA (1)...(19): siRNA sense strand
ccaaugacagagcagcuaa

SEQ ID NO: 1056952 - RNA, 19 nt, Homo sapiens
  misc_RNA (1)...(19): siRNA sense strand
ggaucgacucggcccuuua

SEQ ID NO: 1056953 - RNA, 19 nt, Homo sapiens
  misc_RNA (1)...(19): siRNA sense strand
uggcuaacgucagaaauuc

SEQ ID NO: 1056954 - RNA, 19 nt, Homo sapiens
  misc_RNA (1)...(19): siRNA sense strand
aaaguuguguacagaucuu

SEQ ID NO: 1056955 - RNA, 19 nt, Homo sapiens
  misc_RNA (1)...(19): siRNA sense strand
ggaucgcacugaaccuaag

SEQ ID NO: 1056956 - RNA, 19 nt, Homo sapiens
  misc_RNA (1)...(19): siRNA sense strand
uccaggcucuauucuuaaa

SEQ ID NO: 1056957 - RNA, 19 nt, Homo sapiens
  misc_RNA (1)...(19): siRNA sense strand
ugucuguuaucaggaauuu

SEQ ID NO: 1056958 - RNA, 19 nt, Homo sapiens
  misc_RNA (1)...(19): siRNA sense strand
ucuguuaucaggaauuuga

SEQ ID NO: 1056959 - RNA, 19 nt, Homo sapiens
  misc_RNA (1)...(19): siRNA sense strand
caaacuacuacacaauugu

SEQ ID NO: 1056960 - RNA, 19 nt, Homo sapiens
  misc_RNA (1)...(19): siRNA sense strand
caaacaaagcccacuucga

SEQ ID NO: 1056961 - RNA, 19 nt, Homo sapiens
  misc_RNA (1)...(19): siRNA sense strand
caacuagcucauugauuuc

SEQ ID NO: 1056962 - RNA, 19 nt, Homo sapiens
  misc_RNA (1)...(19): siRNA sense strand
acaaagcccacuucgaugu

SEQ ID NO: 1056963 - RNA, 19 nt, Homo sapiens
  misc_RNA (1)...(19): siRNA sense strand
gacaaacaaagcccacuuc

SEQ ID NO: 1056964 - RNA, 19 nt, Homo sapiens
  misc_RNA (1)...(19): siRNA sense strand
agcaguaucuuccaaacau

SEQ ID NO: 1056965 - RNA, 19 nt, Homo sapiens
  misc_RNA (1)...(19): siRNA sense strand
uggaaaaggugucuucguu

SEQ ID NO: 1056966 - RNA, 19 nt, Homo sapiens
  misc_RNA (1)...(19): siRNA sense strand
gaaugacaaagggauauca

SEQ ID NO: 1056967 - RNA, 19 nt, Homo sapiens
  misc_RNA (1)...(19): siRNA sense strand
uuacaaguaccgcuucguu

SEQ ID NO: 1056968 - RNA, 19 nt, Homo sapiens
  misc_RNA (1)...(19): siRNA sense strand
caaacauugccuacagcua

SEQ ID NO: 1056969 - RNA, 19 nt, Homo sapiens
  misc_RNA (1)...(19): siRNA sense strand
caagcaacuagcucauuga

SEQ ID NO: 1056970 - RNA, 19 nt, Homo sapiens
  misc_RNA (1)...(19): siRNA sense strand
gacuaugcuuccagaaucu

SEQ ID NO: 1056971 - RNA, 19 nt, Homo sapiens
  misc_RNA (1)...(19): siRNA sense strand
caaaaguuguguacagauc

SEQ ID NO: 1056972 - RNA, 19 nt, Homo sapiens
  misc_RNA (1)...(19): siRNA sense strand
gaugaagauguccuaggaa

SEQ ID NO: 1056973 - RNA, 19 nt, Homo sapiens
  misc_RNA (1)...(19): siRNA sense strand
gguacaguauaucagaagu

SEQ ID NO: 1056974 - RNA, 19 nt, Homo sapiens
  misc_RNA (1)...(19): siRNA sense strand
cuucguuacuaaaggauug

SEQ ID NO: 1056975 - RNA, 19 nt, Homo sapiens
  misc_RNA (1)...(19): siRNA sense strand
ugucuucguuacuaaagga

SEQ ID NO: 1056976 - RNA, 19 nt, Homo sapiens
  misc_RNA (1)...(19): siRNA sense strand
gacaucaacagcaaaguac

SEQ ID NO: 1056977 - RNA, 19 nt, Homo sapiens
  misc_RNA (1)...(19): siRNA sense strand
gguacucauugaugggaau

SEQ ID NO: 1056978 - RNA, 19 nt, Homo sapiens
  misc_RNA (1)...(19): siRNA sense strand
gggaaugacaaagggauau

SEQ ID NO: 1056979 - RNA, 19 nt, Homo sapiens
  misc_RNA (1)...(19): siRNA sense strand
ucauugauuucugcuggaa

SEQ ID NO: 1056980 - RNA, 19 nt, Homo sapiens
  misc_RNA (1)...(19): siRNA sense strand
acuacacaauugucagcua

SEQ ID NO: 1056981 - RNA, 19 nt, Homo sapiens
  misc_RNA (1)...(19): siRNA sense strand
cagaggaauccaaagacaa

SEQ ID NO: 1056982 - RNA, 19 nt, Homo sapiens
  misc_RNA (1)...(19): siRNA sense strand
caaagcccacuucgaugug

SEQ ID NO: 1056983 - RNA, 19 nt, Homo sapiens
  misc_RNA (1)...(19): siRNA sense strand
ugacaaacaaagcccacuu

SEQ ID NO: 1056984 - RNA, 19 nt, Homo sapiens
  misc_RNA (1)...(19): siRNA sense strand
acaaagggauaucaaaagu

SEQ ID NO: 1056985 - RNA, 19 nt, Homo sapiens
  misc_RNA (1)...(19): siRNA sense strand
ugacaaagggauaucaaaa

SEQ ID NO: 1056986 - RNA, 19 nt, Homo sapiens
  misc_RNA (1)...(19): siRNA sense strand
uaggaacauuacugaaagu

SEQ ID NO: 1056987 - RNA, 19 nt, Homo sapiens
  misc_RNA (1)...(19): siRNA sense strand
aaggugucuucguuacuaa

SEQ ID NO: 1056988 - RNA, 19 nt, Homo sapiens
  misc_RNA (1)...(19): siRNA sense strand
guccuaggaacauuacuga

SEQ ID NO: 1056989 - RNA, 19 nt, Homo sapiens
  misc_RNA (1)...(19): siRNA sense strand
ggaaugacaaagggauauc

SEQ ID NO: 1056990 - RNA, 19 nt, Homo sapiens
  misc_RNA (1)...(19): siRNA sense strand
guauccugguacaguauau

SEQ ID NO: 1056991 - RNA, 19 nt, Homo sapiens
  misc_RNA (1)...(19): siRNA sense strand
caaucaaggagaagagcuu

SEQ ID NO: 1056992 - RNA, 19 nt, Homo sapiens
  misc_RNA (1)...(19): siRNA sense strand
gcuaacgucagaaauucau

SEQ ID NO: 1056993 - RNA, 19 nt, Homo sapiens
  misc_RNA (1)...(19): siRNA sense strand
gcagcuaaugucuguuauc

SEQ ID NO: 1056994 - RNA, 19 nt, Homo sapiens
  misc_RNA (1)...(19): siRNA sense strand
agugauaguacauggcuaa

SEQ ID NO: 1056995 - RNA, 19 nt, Homo sapiens
  misc_RNA (1)...(19): siRNA sense strand
caaucagaaaucuugacua

SEQ ID NO: 1056996 - RNA, 19 nt, Homo sapiens
  misc_RNA (1)...(19): siRNA sense strand
caguaucuuccaaacauug

SEQ ID NO: 1056997 - RNA, 19 nt, Homo sapiens
  misc_RNA (1)...(19): siRNA sense strand
ccaaagacaaaguuaucuc

SEQ ID NO: 1056998 - RNA, 19 nt, Homo sapiens
  misc_RNA (1)...(19): siRNA sense strand
agaaguaugagccgaucuu

SEQ ID NO: 1056999 - RNA, 19 nt, Homo sapiens
  misc_RNA (1)...(19): siRNA sense strand
aacauugccuacagcuaug

SEQ ID NO: 1057000 - RNA, 19 nt, Homo sapiens
  misc_RNA (1)...(19): siRNA sense strand
gaaacagccuggagaaauu

SEQ ID NO: 1057001 - RNA, 19 nt, Homo sapiens
  misc_RNA (1)...(19): siRNA sense strand
ggaaacagccuggagaaau

SEQ ID NO: 1057002 - RNA, 19 nt, Homo sapiens
  misc_RNA (1)...(19): siRNA sense strand
cagcaaaucagccacauug

SEQ ID NO: 1057003 - RNA, 19 nt, Homo sapiens
  misc_RNA (1)...(19): siRNA sense strand
gagaugauccugcaacagu

SEQ ID NO: 1057004 - RNA, 19 nt, Homo sapiens
  misc_RNA (1)...(19): siRNA sense strand
gcaauuggccaaggaguug

SEQ ID NO: 1057005 - RNA, 19 nt, Homo sapiens
  misc_RNA (1)...(19): siRNA sense strand
ggacaucucgggcauacug

SEQ ID NO: 1057006 - RNA, 19 nt, Homo sapiens
  misc_RNA (1)...(19): siRNA sense strand
gcagaaggaugugguucga

SEQ ID NO: 1057007 - RNA, 19 nt, Homo sapiens
  misc_RNA (1)...(19): siRNA sense strand
ccaaggaguugaggcagaa

SEQ ID NO: 1057008 - RNA, 19 nt, Homo sapiens
  misc_RNA (1)...(19): siRNA sense strand
guucgaguuugguucuaua

SEQ ID NO: 1057009 - RNA, 19 nt, Homo sapiens
  misc_RNA (1)...(19): siRNA sense strand
gcagucgaccaaccaauga

SEQ ID NO: 1057010 - RNA, 19 nt, Homo sapiens
  misc_RNA (1)...(19): siRNA sense strand
gaggacaucucgggcauac

SEQ ID NO: 1057011 - RNA, 19 nt, Homo sapiens
  misc_RNA (1)...(19): siRNA sense strand
ggaugugguucgaguuugg

SEQ ID NO: 1057012 - RNA, 19 nt, Homo sapiens
  misc_RNA (1)...(19): siRNA sense strand
gcaagcagagagcgacgaa

SEQ ID NO: 1057013 - RNA, 19 nt, Homo sapiens
  misc_RNA (1)...(19): siRNA sense strand
gcuaagcgucgccaacaug

SEQ ID NO: 1057014 - RNA, 19 nt, Homo sapiens
  misc_RNA (1)...(19): siRNA sense strand
aaaaguggcugaaggaagu

SEQ ID NO: 1057015 - RNA, 19 nt, Homo sapiens
  misc_RNA (1)...(19): siRNA sense strand
ggacacaggcccucaaacc

SEQ ID NO: 1057016 - RNA, 19 nt, Homo sapiens
  misc_RNA (1)...(19): siRNA sense strand
gggcauacugaaagaguug

SEQ ID NO: 1057017 - RNA, 19 nt, Homo sapiens
  misc_RNA (1)...(19): siRNA sense strand
gaaggaugugguucgaguu

SEQ ID NO: 1057018 - RNA, 19 nt, Homo sapiens
  misc_RNA (1)...(19): siRNA sense strand
ggaaguggaagcagagaac

SEQ ID NO: 1057019 - RNA, 19 nt, Homo sapiens
  misc_RNA (1)...(19): siRNA sense strand
ucucgggcauacugaaaga

SEQ ID NO: 1057020 - RNA, 19 nt, Homo sapiens
  misc_RNA (1)...(19): siRNA sense strand
cuucugggcuuaugcaaaa

SEQ ID NO: 1057021 - RNA, 19 nt, Homo sapiens
  misc_RNA (1)...(19): siRNA sense strand
ggcagucgaccaaccaaug

SEQ ID NO: 1057022 - RNA, 19 nt, Homo sapiens
  misc_RNA (1)...(19): siRNA sense strand
gguucgaguuugguucuau

SEQ ID NO: 1057023 - RNA, 19 nt, Homo sapiens
  misc_RNA (1)...(19): siRNA sense strand
gccuccagcugcagaagga

SEQ ID NO: 1057024 - RNA, 19 nt, Homo sapiens
  misc_RNA (1)...(19): siRNA sense strand
cuauacacgucucuacucu

SEQ ID NO: 1057025 - RNA, 19 nt, Homo sapiens
  misc_RNA (1)...(19): siRNA sense strand
caucucgggcauacugaaa

SEQ ID NO: 1057026 - RNA, 19 nt, Homo sapiens
  misc_RNA (1)...(19): siRNA sense strand
gagcgacgaaucggaaaca

SEQ ID NO: 1057027 - RNA, 19 nt, Homo sapiens
  misc_RNA (1)...(19): siRNA sense strand
gagagcgacgaaucggaaa

SEQ ID NO: 1057028 - RNA, 19 nt, Homo sapiens
  misc_RNA (1)...(19): siRNA sense strand
aagcagagagcgacgaauc

SEQ ID NO: 1057029 - RNA, 19 nt, Homo sapiens
  misc_RNA (1)...(19): siRNA sense strand
gguacucgcaggccgaugu

SEQ ID NO: 1057030 - RNA, 19 nt, Homo sapiens
  misc_RNA (1)...(19): siRNA sense strand
ccugacguguggaggauuc

SEQ ID NO: 1057031 - RNA, 19 nt, Homo sapiens
  misc_RNA (1)...(19): siRNA sense strand
aaggaugugguucgaguuu

SEQ ID NO: 1057032 - RNA, 19 nt, Homo sapiens
  misc_RNA (1)...(19): siRNA sense strand
gcugugggagcucuguuug

SEQ ID NO: 1057033 - RNA, 19 nt, Homo sapiens
  misc_RNA (1)...(19): siRNA sense strand
uugacacucugaccugguu

SEQ ID NO: 1057034 - RNA, 19 nt, Homo sapiens
  misc_RNA (1)...(19): siRNA sense strand
gacacaggcccucaaacca

SEQ ID NO: 1057035 - RNA, 19 nt, Homo sapiens
  misc_RNA (1)...(19): siRNA sense strand
cagcuaagcgucgccaaca

SEQ ID NO: 1057036 - RNA, 19 nt, Homo sapiens
  misc_RNA (1)...(19): siRNA sense strand
uggagaugauccugcaaca

SEQ ID NO: 1057037 - RNA, 19 nt, Homo sapiens
  misc_RNA (1)...(19): siRNA sense strand
gcccugacguguggaggau

SEQ ID NO: 1057038 - RNA, 19 nt, Homo sapiens
  misc_RNA (1)...(19): siRNA sense strand
caagauaacucugcauuug

SEQ ID NO: 1057039 - RNA, 19 nt, Homo sapiens
  misc_RNA (1)...(19): siRNA sense strand
ggaggaccaucauuuguuu

SEQ ID NO: 1057040 - RNA, 19 nt, Homo sapiens
  misc_RNA (1)...(19): siRNA sense strand
guacaucccuccuccuuau

SEQ ID NO: 1057041 - RNA, 19 nt, Homo sapiens
  misc_RNA (1)...(19): siRNA sense strand
ggacuucccugucaaugug

SEQ ID NO: 1057042 - RNA, 19 nt, Homo sapiens
  misc_RNA (1)...(19): siRNA sense strand
gaugagggcugccuuucuu

SEQ ID NO: 1057043 - RNA, 19 nt, Homo sapiens
  misc_RNA (1)...(19): siRNA sense strand
caaggugucucccacuuug

SEQ ID NO: 1057044 - RNA, 19 nt, Homo sapiens
  misc_RNA (1)...(19): siRNA sense strand
gcaaagaaagugaggaaag

SEQ ID NO: 1057045 - RNA, 19 nt, Homo sapiens
  misc_RNA (1)...(19): siRNA sense strand
caaagaaagugaggaaagg

SEQ ID NO: 1057046 - RNA, 19 nt, Homo sapiens
  misc_RNA (1)...(19): siRNA sense strand
gggaucacauucacuguca

SEQ ID NO: 1057047 - RNA, 19 nt, Homo sapiens
  misc_RNA (1)...(19): siRNA sense strand
ggaaaucacaggcccaauc

SEQ ID NO: 1057048 - RNA, 19 nt, Homo sapiens
  misc_RNA (1)...(19): siRNA sense strand
ugucaaguccuccucaaua

SEQ ID NO: 1057049 - RNA, 19 nt, Homo sapiens
  misc_RNA (1)...(19): siRNA sense strand
caaguccuccucaauacua

SEQ ID NO: 1057050 - RNA, 19 nt, Homo sapiens
  misc_RNA (1)...(19): siRNA sense strand
ccagcuaccugcagucugu

SEQ ID NO: 1057051 - RNA, 19 nt, Homo sapiens
  misc_RNA (1)...(19): siRNA sense strand
gcucuucucaggcaucuuu

SEQ ID NO: 1057052 - RNA, 19 nt, Homo sapiens
  misc_RNA (1)...(19): siRNA sense strand
gucaugggcuggaucaaau

SEQ ID NO: 1057053 - RNA, 19 nt, Homo sapiens
  misc_RNA (1)...(19): siRNA sense strand
agauaacucugcauuugug

SEQ ID NO: 1057054 - RNA, 19 nt, Homo sapiens
  misc_RNA (1)...(19): siRNA sense strand
ccaggaggaccaucauuug

SEQ ID NO: 1057055 - RNA, 19 nt, Homo sapiens
  misc_RNA (1)...(19): siRNA sense strand
ucaagauaacucugcauuu

SEQ ID NO: 1057056 - RNA, 19 nt, Homo sapiens
  misc_RNA (1)...(19): siRNA sense strand
ccaaggugucucccacuuu

SEQ ID NO: 1057057 - RNA, 19 nt, Homo sapiens
  misc_RNA (1)...(19): siRNA sense strand
gucaaguccuccucaauac

SEQ ID NO: 1057058 - RNA, 19 nt, Homo sapiens
  misc_RNA (1)...(19): siRNA sense strand
gugcaaagaaagugaggaa

SEQ ID NO: 1057059 - RNA, 19 nt, Homo sapiens
  misc_RNA (1)...(19): siRNA sense strand
gaucacauucacugucaug

SEQ ID NO: 1057060 - RNA, 19 nt, Homo sapiens
  misc_RNA (1)...(19): siRNA sense strand
cugcauuugugguugauga

SEQ ID NO: 1057061 - RNA, 19 nt, Homo sapiens
  misc_RNA (1)...(19): siRNA sense strand
uaacucugcauuugugguu

SEQ ID NO: 1057062 - RNA, 19 nt, Homo sapiens
  misc_RNA (1)...(19): siRNA sense strand
ggcccaauccugauguuga

SEQ ID NO: 1057063 - RNA, 19 nt, Homo sapiens
  misc_RNA (1)...(19): siRNA sense strand
ugacauucauccugauugc

SEQ ID NO: 1057064 - RNA, 19 nt, Homo sapiens
  misc_RNA (1)...(19): siRNA sense strand
gagccuauggggauaaaua

SEQ ID NO: 1057065 - RNA, 19 nt, Homo sapiens
  misc_RNA (1)...(19): siRNA sense strand
gaaaucacaggcccaaucc

SEQ ID NO: 1057066 - RNA, 19 nt, Homo sapiens
  misc_RNA (1)...(19): siRNA sense strand
ggaggacuucccugucaau

SEQ ID NO: 1057067 - RNA, 19 nt, Homo sapiens
  misc_RNA (1)...(19): siRNA sense strand
ugccaguugugcaaagaaa

SEQ ID NO: 1057068 - RNA, 19 nt, Homo sapiens
  misc_RNA (1)...(19): siRNA sense strand
gagggcugccuuucuuuca

SEQ ID NO: 1057069 - RNA, 19 nt, Homo sapiens
  misc_RNA (1)...(19): siRNA sense strand
uuggaggacuucccuguca

SEQ ID NO: 1057070 - RNA, 19 nt, Homo sapiens
  misc_RNA (1)...(19): siRNA sense strand
ccucaauacuacaccaucu

SEQ ID NO: 1057071 - RNA, 19 nt, Homo sapiens
  misc_RNA (1)...(19): siRNA sense strand
caugucaaguccuccucaa

SEQ ID NO: 1057072 - RNA, 19 nt, Homo sapiens
  misc_RNA (1)...(19): siRNA sense strand
gauguugaccagcuagaag

SEQ ID NO: 1057073 - RNA, 19 nt, Homo sapiens
  misc_RNA (1)...(19): siRNA sense strand
ggugacauucauccugauu

SEQ ID NO: 1057074 - RNA, 19 nt, Homo sapiens
  misc_RNA (1)...(19): siRNA sense strand
ucaaccaacccaucaccuu

SEQ ID NO: 1057075 - RNA, 19 nt, Homo sapiens
  misc_RNA (1)...(19): siRNA sense strand
caggaggaccaucauuugu

SEQ ID NO: 1057076 - RNA, 19 nt, Homo sapiens
  misc_RNA (1)...(19): siRNA sense strand
gcccaauccugauguugac

SEQ ID NO: 1057077 - RNA, 19 nt, Homo sapiens
  misc_RNA (1)...(19): siRNA sense strand
ugucaugggcuggaucaaa

SEQ ID NO: 1057078 - RNA, 19 nt, Homo sapiens
  misc_RNA (1)...(19): siRNA sense strand
ucaugggcuggaucaaaua

SEQ ID NO: 1057079 - RNA, 19 nt, Homo sapiens
  misc_RNA (1)...(19): siRNA sense strand
uguucuccgucacuccuua

SEQ ID NO: 1057080 - RNA, 19 nt, Homo sapiens
  misc_RNA (1)...(19): siRNA sense strand
ggcaucaaccaacccauca

SEQ ID NO: 1057081 - RNA, 19 nt, Homo sapiens
  misc_RNA (1)...(19): siRNA sense strand
aggaggaccaucauuuguu

SEQ ID NO: 1057082 - RNA, 19 nt, Homo sapiens
  misc_RNA (1)...(19): siRNA sense strand
ucacggacgguggaaauca

SEQ ID NO: 1057083 - RNA, 19 nt, Homo sapiens
  misc_RNA (1)...(19): siRNA sense strand
acucugcauuugugguuga

SEQ ID NO: 1057084 - RNA, 19 nt, Homo sapiens
  misc_RNA (1)...(19): siRNA sense strand
aagauaacucugcauuugu

SEQ ID NO: 1057085 - RNA, 19 nt, Homo sapiens
  misc_RNA (1)...(19): siRNA sense strand
aaauaucgcugguuucaua

SEQ ID NO: 1057086 - RNA, 19 nt, Homo sapiens
  misc_RNA (1)...(19): siRNA sense strand
cagaagaacuuucacauca

SEQ ID NO: 1057087 - RNA, 19 nt, Homo sapiens
  misc_RNA (1)...(19): siRNA sense strand
gaagaacuuucacaucaug

SEQ ID NO: 1057088 - RNA, 19 nt, Homo sapiens
  misc_RNA (1)...(19): siRNA sense strand
ucacugagcuguaacaaag

SEQ ID NO: 1057089 - RNA, 19 nt, Homo sapiens
  misc_RNA (1)...(19): siRNA sense strand
ugacauggcuuccagaauc

SEQ ID NO: 1057090 - RNA, 19 nt, Homo sapiens
  misc_RNA (1)...(19): siRNA sense strand
cagaaucacugagcuguaa

SEQ ID NO: 1057091 - RNA, 19 nt, Homo sapiens
  misc_RNA (1)...(19): siRNA sense strand
gagauacucaguugaauug

SEQ ID NO: 1057092 - RNA, 19 nt, Homo sapiens
  misc_RNA (1)...(19): siRNA sense strand
agaaggagauacucaguug

SEQ ID NO: 1057093 - RNA, 19 nt, Homo sapiens
  misc_RNA (1)...(19): siRNA sense strand
ggcaauugcuccugcugua

SEQ ID NO: 1057094 - RNA, 19 nt, Homo sapiens
  misc_RNA (1)...(19): siRNA sense strand
ugacacaccuccaacuuca

SEQ ID NO: 1057095 - RNA, 19 nt, Homo sapiens
  misc_RNA (1)...(19): siRNA sense strand
cagaauguauugacuaugg

SEQ ID NO: 1057096 - RNA, 19 nt, Homo sapiens
  misc_RNA (1)...(19): siRNA sense strand
gaaccgaucccuucucucu

SEQ ID NO: 1057097 - RNA, 19 nt, Homo sapiens
  misc_RNA (1)...(19): siRNA sense strand
ggagauacucaguugaauu

SEQ ID NO: 1057098 - RNA, 19 nt, Homo sapiens
  misc_RNA (1)...(19): siRNA sense strand
caugggagcauccaaauau

SEQ ID NO: 1057099 - RNA, 19 nt, Homo sapiens
  misc_RNA (1)...(19): siRNA sense strand
gauacucaguugaauugga

SEQ ID NO: 1057100 - RNA, 19 nt, Homo sapiens
  misc_RNA (1)...(19): siRNA sense strand
uguguacugugguuuauuu

SEQ ID NO: 1057101 - RNA, 19 nt, Homo sapiens
  misc_RNA (1)...(19): siRNA sense strand
ucaaauguaugaacugcau

SEQ ID NO: 1057102 - RNA, 19 nt, Homo sapiens
  misc_RNA (1)...(19): siRNA sense strand
gcagaagaacuuucacauc

SEQ ID NO: 1057103 - RNA, 19 nt, Homo sapiens
  misc_RNA (1)...(19): siRNA sense strand
gacauggcuuccagaauca

SEQ ID NO: 1057104 - RNA, 19 nt, Homo sapiens
  misc_RNA (1)...(19): siRNA sense strand
gaacuuucacaucaugaga

SEQ ID NO: 1057105 - RNA, 19 nt, Homo sapiens
  misc_RNA (1)...(19): siRNA sense strand
gaauguauugacuauggua

SEQ ID NO: 1057106 - RNA, 19 nt, Homo sapiens
  misc_RNA (1)...(19): siRNA sense strand
ccaaauaucgcugguuuca

SEQ ID NO: 1057107 - RNA, 19 nt, Homo sapiens
  misc_RNA (1)...(19): siRNA sense strand
gcaauugcuccugcuguaa

SEQ ID NO: 1057108 - RNA, 19 nt, Homo sapiens
  misc_RNA (1)...(19): siRNA sense strand
guacugugguuuauuuuga

SEQ ID NO: 1057109 - RNA, 19 nt, Homo sapiens
  misc_RNA (1)...(19): siRNA sense strand
ggacgagugcugugacugu

SEQ ID NO: 1057110 - RNA, 19 nt, Homo sapiens
  misc_RNA (1)...(19): siRNA sense strand
cuagugaugugagcaaaug

SEQ ID NO: 1057111 - RNA, 19 nt, Homo sapiens
  misc_RNA (1)...(19): siRNA sense strand
gaaguuacacuauguugcu

SEQ ID NO: 1057112 - RNA, 19 nt, Homo sapiens
  misc_RNA (1)...(19): siRNA sense strand
auacucaguugaauuggaa

SEQ ID NO: 1057113 - RNA, 19 nt, Homo sapiens
  misc_RNA (1)...(19): siRNA sense strand
caucguuucuuucccuguu

SEQ ID NO: 1057114 - RNA, 19 nt, Homo sapiens
  misc_RNA (1)...(19): siRNA sense strand
cgagugcugugacuguguu

SEQ ID NO: 1057115 - RNA, 19 nt, Homo sapiens
  misc_RNA (1)...(19): siRNA sense strand
uaucgcugguuucauaaug

SEQ ID NO: 1057116 - RNA, 19 nt, Homo sapiens
  misc_RNA (1)...(19): siRNA sense strand
auuggaacaucguuucuuu

SEQ ID NO: 1057117 - RNA, 19 nt, Homo sapiens
  misc_RNA (1)...(19): siRNA sense strand
gaaggagauacucaguuga

SEQ ID NO: 1057118 - RNA, 19 nt, Homo sapiens
  misc_RNA (1)...(19): siRNA sense strand
ugacuguguugguaugugu

SEQ ID NO: 1057119 - RNA, 19 nt, Homo sapiens
  misc_RNA (1)...(19): siRNA sense strand
uguaugaacugcauguuuu

SEQ ID NO: 1057120 - RNA, 19 nt, Homo sapiens
  misc_RNA (1)...(19): siRNA sense strand
cgagugcauugguccagaa

SEQ ID NO: 1057121 - RNA, 19 nt, Homo sapiens
  misc_RNA (1)...(19): siRNA sense strand
gcacucacagaaggagaua

SEQ ID NO: 1057122 - RNA, 19 nt, Homo sapiens
  misc_RNA (1)...(19): siRNA sense strand
agaagaacuuucacaucau

SEQ ID NO: 1057123 - RNA, 19 nt, Homo sapiens
  misc_RNA (1)...(19): siRNA sense strand
auccaaauaucgcugguuu

SEQ ID NO: 1057124 - RNA, 19 nt, Homo sapiens
  misc_RNA (1)...(19): siRNA sense strand
acacaccuccaacuucaaa

SEQ ID NO: 1057125 - RNA, 19 nt, Homo sapiens
  misc_RNA (1)...(19): siRNA sense strand
uccagaauguauugacuau

SEQ ID NO: 1057126 - RNA, 19 nt, Homo sapiens
  misc_RNA (1)...(19): siRNA sense strand
gagaaucugguuucauuuu

SEQ ID NO: 1057127 - RNA, 19 nt, Homo sapiens
  misc_RNA (1)...(19): siRNA sense strand
ucacagaaggagauacuca

SEQ ID NO: 1057128 - RNA, 19 nt, Homo sapiens
  misc_RNA (1)...(19): siRNA sense strand
ccaugggagcauccaaaua

SEQ ID NO: 1057129 - RNA, 19 nt, Homo sapiens
  misc_RNA (1)...(19): siRNA sense strand
cauguguacugugguuuau

SEQ ID NO: 1057130 - RNA, 19 nt, Homo sapiens
  misc_RNA (1)...(19): siRNA sense strand
aaggagauacucaguugaa

SEQ ID NO: 1057131 - RNA, 19 nt, Homo sapiens
  misc_RNA (1)...(19): siRNA sense strand
cagaaggagauacucaguu

SEQ ID NO: 1057132 - RNA, 19 nt, Homo sapiens
  misc_RNA (1)...(19): siRNA sense strand
ccagaaucacugagcugua

SEQ ID NO: 1057133 - RNA, 19 nt, Homo sapiens
  misc_RNA (1)...(19): siRNA sense strand
acauguguacugugguuua

SEQ ID NO: 1057134 - RNA, 19 nt, Homo sapiens
  misc_RNA (1)...(19): siRNA sense strand
caucaugagaaucugguuu

SEQ ID NO: 1057135 - RNA, 19 nt, Homo sapiens
  misc_RNA (1)...(19): siRNA sense strand
ugaauuggaacaucguuuc

SEQ ID NO: 1057136 - RNA, 19 nt, Homo sapiens
  misc_RNA (1)...(19): siRNA sense strand
gagugcaugcugugucuug

SEQ ID NO: 1057137 - RNA, 19 nt, Homo sapiens
  misc_RNA (1)...(19): siRNA sense strand
guaguaaaacugucaaaug

SEQ ID NO: 1057138 - RNA, 19 nt, Homo sapiens
  misc_RNA (1)...(19): siRNA sense strand
ccucgaaauuauagugaca

SEQ ID NO: 1057139 - RNA, 19 nt, Homo sapiens
  misc_RNA (1)...(19): siRNA sense strand
gguccagaauguauugacu

SEQ ID NO: 1057140 - RNA, 19 nt, Homo sapiens
  misc_RNA (1)...(19): siRNA sense strand
acacuauguugcugugcuu

SEQ ID NO: 1057141 - RNA, 19 nt, Homo sapiens
  misc_RNA (1)...(19): siRNA sense strand
ucaguugaauuggaacauc

SEQ ID NO: 1057142 - RNA, 19 nt, Homo sapiens
  misc_RNA (1)...(19): siRNA sense strand
uuauuccagugacaaagaa

SEQ ID NO: 1057143 - RNA, 19 nt, Homo sapiens
  misc_RNA (1)...(19): siRNA sense strand
gaauuggaacaucguuucu

SEQ ID NO: 1057144 - RNA, 19 nt, Homo sapiens
  misc_RNA (1)...(19): siRNA sense strand
uauguguaauccucgaaau

SEQ ID NO: 1057145 - RNA, 19 nt, Homo sapiens
  misc_RNA (1)...(19): siRNA sense strand
guccagaauguauugacua

SEQ ID NO: 1057146 - RNA, 19 nt, Homo sapiens
  misc_RNA (1)...(19): siRNA sense strand
gaaucacugagcuguaaca

SEQ ID NO: 1057147 - RNA, 19 nt, Homo sapiens
  misc_RNA (1)...(19): siRNA sense strand
auaauguucacgcgccuua

SEQ ID NO: 1057148 - RNA, 19 nt, Homo sapiens
  misc_RNA (1)...(19): siRNA sense strand
accgaucccuucucucuuc

SEQ ID NO: 1057149 - RNA, 19 nt, Homo sapiens
  misc_RNA (1)...(19): siRNA sense strand
ugagaaucugguuucauuu

SEQ ID NO: 1057150 - RNA, 19 nt, Homo sapiens
  misc_RNA (1)...(19): siRNA sense strand
gugacacaccuccaacuuc

SEQ ID NO: 1057151 - RNA, 19 nt, Homo sapiens
  misc_RNA (1)...(19): siRNA sense strand
caauugcuccugcuguaag

SEQ ID NO: 1057152 - RNA, 19 nt, Homo sapiens
  misc_RNA (1)...(19): siRNA sense strand
gaugacugcauguccauac

SEQ ID NO: 1057153 - RNA, 19 nt, Homo sapiens
  misc_RNA (1)...(19): siRNA sense strand
ucaugagaaucugguuuca

SEQ ID NO: 1057154 - RNA, 19 nt, Homo sapiens
  misc_RNA (1)...(19): siRNA sense strand
guauguguaauccucgaaa

SEQ ID NO: 1057155 - RNA, 19 nt, Homo sapiens
  misc_RNA (1)...(19): siRNA sense strand
caguggaggagcugcauga

SEQ ID NO: 1057156 - RNA, 19 nt, Homo sapiens
  misc_RNA (1)...(19): siRNA sense strand
gaggaaggguugaaagaua

SEQ ID NO: 1057157 - RNA, 19 nt, Homo sapiens
  misc_RNA (1)...(19): siRNA sense strand
gggaugagcuggagacaaa

SEQ ID NO: 1057158 - RNA, 19 nt, Homo sapiens
  misc_RNA (1)...(19): siRNA sense strand
gaacaaauccaucuucuuc

SEQ ID NO: 1057159 - RNA, 19 nt, Homo sapiens
  misc_RNA (1)...(19): siRNA sense strand
gaacugacauugaccuuca

SEQ ID NO: 1057160 - RNA, 19 nt, Homo sapiens
  misc_RNA (1)...(19): siRNA sense strand
gagaauggaugacccuaaa

SEQ ID NO: 1057161 - RNA, 19 nt, Homo sapiens
  misc_RNA (1)...(19): siRNA sense strand
gaugauagccuuaagaaug

SEQ ID NO: 1057162 - RNA, 19 nt, Homo sapiens
  misc_RNA (1)...(19): siRNA sense strand
gcaugucccuguucaguuu

SEQ ID NO: 1057163 - RNA, 19 nt, Homo sapiens
  misc_RNA (1)...(19): siRNA sense strand
gaaaagagguggucaaaca

SEQ ID NO: 1057164 - RNA, 19 nt, Homo sapiens
  misc_RNA (1)...(19): siRNA sense strand
ggacacagccagagaauuc

SEQ ID NO: 1057165 - RNA, 19 nt, Homo sapiens
  misc_RNA (1)...(19): siRNA sense strand
gaacagaccaagaacaaau

SEQ ID NO: 1057166 - RNA, 19 nt, Homo sapiens
  misc_RNA (1)...(19): siRNA sense strand
caaugugucugaaauguga

SEQ ID NO: 1057167 - RNA, 19 nt, Homo sapiens
  misc_RNA (1)...(19): siRNA sense strand
gaaaugugaucuccaagag

SEQ ID NO: 1057168 - RNA, 19 nt, Homo sapiens
  misc_RNA (1)...(19): siRNA sense strand
ccagauggcuucccaguca

SEQ ID NO: 1057169 - RNA, 19 nt, Homo sapiens
  misc_RNA (1)...(19): siRNA sense strand
guaaagggcccucuacuca

SEQ ID NO: 1057170 - RNA, 19 nt, Homo sapiens
  misc_RNA (1)...(19): siRNA sense strand
gaacuccgcauguuacaga

SEQ ID NO: 1057171 - RNA, 19 nt, Homo sapiens
  misc_RNA (1)...(19): siRNA sense strand
gaucaaggcuuuaaaaucu

SEQ ID NO: 1057172 - RNA, 19 nt, Homo sapiens
  misc_RNA (1)...(19): siRNA sense strand
gggcagcucugaccuauac

SEQ ID NO: 1057173 - RNA, 19 nt, Homo sapiens
  misc_RNA (1)...(19): siRNA sense strand
guugaaagauacagaccua

SEQ ID NO: 1057174 - RNA, 19 nt, Homo sapiens
  misc_RNA (1)...(19): siRNA sense strand
gccagcaccuucuauguga

SEQ ID NO: 1057175 - RNA, 19 nt, Homo sapiens
  misc_RNA (1)...(19): siRNA sense strand
gcugacggcuccuugagaa

SEQ ID NO: 1057176 - RNA, 19 nt, Homo sapiens
  misc_RNA (1)...(19): siRNA sense strand
caauacagcagacauguga

SEQ ID NO: 1057177 - RNA, 19 nt, Homo sapiens
  misc_RNA (1)...(19): siRNA sense strand
acauugaccuucagacuau

SEQ ID NO: 1057178 - RNA, 19 nt, Homo sapiens
  misc_RNA (1)...(19): siRNA sense strand
uaaaggagacuucaucaca

SEQ ID NO: 1057179 - RNA, 19 nt, Homo sapiens
  misc_RNA (1)...(19): siRNA sense strand
gauaauccaaugugucuga

SEQ ID NO: 1057180 - RNA, 19 nt, Homo sapiens
  misc_RNA (1)...(19): siRNA sense strand
gagagaaggguguuucaga

SEQ ID NO: 1057181 - RNA, 19 nt, Homo sapiens
  misc_RNA (1)...(19): siRNA sense strand
gaggauaccagcaaugaug

SEQ ID NO: 1057182 - RNA, 19 nt, Homo sapiens
  misc_RNA (1)...(19): siRNA sense strand
guuuauacaugguacaaga

SEQ ID NO: 1057183 - RNA, 19 nt, Homo sapiens
  misc_RNA (1)...(19): siRNA sense strand
acaaauccaucuucuucuu

SEQ ID NO: 1057184 - RNA, 19 nt, Homo sapiens
  misc_RNA (1)...(19): siRNA sense strand
ggacucagcgucuccuguu

SEQ ID NO: 1057185 - RNA, 19 nt, Homo sapiens
  misc_RNA (1)...(19): siRNA sense strand
gggaauggcugcuguuagc

SEQ ID NO: 1057186 - RNA, 19 nt, Homo sapiens
  misc_RNA (1)...(19): siRNA sense strand
gacauugaccuucagacua

SEQ ID NO: 1057187 - RNA, 19 nt, Homo sapiens
  misc_RNA (1)...(19): siRNA sense strand
gugaggcucugcagaacuu

SEQ ID NO: 1057188 - RNA, 19 nt, Homo sapiens
  misc_RNA (1)...(19): siRNA sense strand
cgagaaagcaucccugcaa

SEQ ID NO: 1057189 - RNA, 19 nt, Homo sapiens
  misc_RNA (1)...(19): siRNA sense strand
ggagacaaaucagcaacau

SEQ ID NO: 1057190 - RNA, 19 nt, Homo sapiens
  misc_RNA (1)...(19): siRNA sense strand
aggaugggcuccagcaauu

SEQ ID NO: 1057191 - RNA, 19 nt, Homo sapiens
  misc_RNA (1)...(19): siRNA sense strand
caaauccaucuucuucuuu

SEQ ID NO: 1057192 - RNA, 19 nt, Homo sapiens
  misc_RNA (1)...(19): siRNA sense strand
gcaaugaugagaguucuau

SEQ ID NO: 1057193 - RNA, 19 nt, Homo sapiens
  misc_RNA (1)...(19): siRNA sense strand
ggagauuacuauucugacu

SEQ ID NO: 1057194 - RNA, 19 nt, Homo sapiens
  misc_RNA (1)...(19): siRNA sense strand
agucaucggccucucauua

SEQ ID NO: 1057195 - RNA, 19 nt, Homo sapiens
  misc_RNA (1)...(19): siRNA sense strand
gagauaauccaaugugucu

SEQ ID NO: 1057196 - RNA, 19 nt, Homo sapiens
  misc_RNA (1)...(19): siRNA sense strand
ucucagaacuccgcauguu

SEQ ID NO: 1057197 - RNA, 19 nt, Homo sapiens
  misc_RNA (1)...(19): siRNA sense strand
uuacuauucugacuucuca

SEQ ID NO: 1057198 - RNA, 19 nt, Homo sapiens
  misc_RNA (1)...(19): siRNA sense strand
agaaggguguuucagauca

SEQ ID NO: 1057199 - RNA, 19 nt, Homo sapiens
  misc_RNA (1)...(19): siRNA sense strand
agagaaggguguuucagau

SEQ ID NO: 1057200 - RNA, 19 nt, Homo sapiens
  misc_RNA (1)...(19): siRNA sense strand
caagugaucaaggcuuuaa

SEQ ID NO: 1057201 - RNA, 19 nt, Homo sapiens
  misc_RNA (1)...(19): siRNA sense strand
aaagggcccucuacucaca

SEQ ID NO: 1057202 - RNA, 19 nt, Homo sapiens
  misc_RNA (1)...(19): siRNA sense strand
acaaugauaucgucagcau

SEQ ID NO: 1057203 - RNA, 19 nt, Homo sapiens
  misc_RNA (1)...(19): siRNA sense strand
auacagaccuagccagagu

SEQ ID NO: 1057204 - RNA, 19 nt, Homo sapiens
  misc_RNA (1)...(19): siRNA sense strand
ucugaaaugugaucuccaa

SEQ ID NO: 1057205 - RNA, 19 nt, Homo sapiens
  misc_RNA (1)...(19): siRNA sense strand
gcauggagauuuucuucaa

SEQ ID NO: 1057206 - RNA, 19 nt, Homo sapiens
  misc_RNA (1)...(19): siRNA sense strand
ucucuagccugcagcuuga

SEQ ID NO: 1057207 - RNA, 19 nt, Homo sapiens
  misc_RNA (1)...(19): siRNA sense strand
ggaacagaccaagaacaaa

SEQ ID NO: 1057208 - RNA, 19 nt, Homo sapiens
  misc_RNA (1)...(19): siRNA sense strand
ccacaugaugauagccuua

SEQ ID NO: 1057209 - RNA, 19 nt, Homo sapiens
  misc_RNA (1)...(19): siRNA sense strand
cauauggacucccguucau

SEQ ID NO: 1057210 - RNA, 19 nt, Homo sapiens
  misc_RNA (1)...(19): siRNA sense strand
gagacuucaucacacucua

SEQ ID NO: 1057211 - RNA, 19 nt, Homo sapiens
  misc_RNA (1)...(19): siRNA sense strand
uccagcaauucaaacaaua

SEQ ID NO: 1057212 - RNA, 19 nt, Homo sapiens
  misc_RNA (1)...(19): siRNA sense strand
aauccaaugugucugaaau

SEQ ID NO: 1057213 - RNA, 19 nt, Homo sapiens
  misc_RNA (1)...(19): siRNA sense strand
ggucacaaagggaauccua

SEQ ID NO: 1057214 - RNA, 19 nt, Homo sapiens
  misc_RNA (1)...(19): siRNA sense strand
gggcugacaucugcaccaa

SEQ ID NO: 1057215 - RNA, 19 nt, Homo sapiens
  misc_RNA (1)...(19): siRNA sense strand
gaaagcaucccugcaagac

SEQ ID NO: 1057216 - RNA, 19 nt, Homo sapiens
  misc_RNA (1)...(19): siRNA sense strand
uuaagaauguggagagcau

SEQ ID NO: 1057217 - RNA, 19 nt, Homo sapiens
  misc_RNA (1)...(19): siRNA sense strand
augauagccuuaagaaugu

SEQ ID NO: 1057218 - RNA, 19 nt, Homo sapiens
  misc_RNA (1)...(19): siRNA sense strand
cagagauaauccaaugugu

SEQ ID NO: 1057219 - RNA, 19 nt, Homo sapiens
  misc_RNA (1)...(19): siRNA sense strand
ggaggaaggguugaaagau

SEQ ID NO: 1057220 - RNA, 19 nt, Homo sapiens
  misc_RNA (1)...(19): siRNA sense strand
aaacaauacagcagacaug

SEQ ID NO: 1057221 - RNA, 19 nt, Homo sapiens
  misc_RNA (1)...(19): siRNA sense strand
aaagccaccuguacucaca

SEQ ID NO: 1057222 - RNA, 19 nt, Homo sapiens
  misc_RNA (1)...(19): siRNA sense strand
uccaagugaucaaggcuuu

SEQ ID NO: 1057223 - RNA, 19 nt, Homo sapiens
  misc_RNA (1)...(19): siRNA sense strand
cuacucacacucagauuga

SEQ ID NO: 1057224 - RNA, 19 nt, Homo sapiens
  misc_RNA (1)...(19): siRNA sense strand
ugaaaugugaucuccaaga

SEQ ID NO: 1057225 - RNA, 19 nt, Homo sapiens
  misc_RNA (1)...(19): siRNA sense strand
aaauccaucuucuucuuuc

SEQ ID NO: 1057226 - RNA, 19 nt, Homo sapiens
  misc_RNA (1)...(19): siRNA sense strand
ccuguucaguuuauacaug

SEQ ID NO: 1057227 - RNA, 19 nt, Homo sapiens
  misc_RNA (1)...(19): siRNA sense strand
ucacaaagggaauccuaga

SEQ ID NO: 1057228 - RNA, 19 nt, Homo sapiens
  misc_RNA (1)...(19): siRNA sense strand
gagauuacuauucugacuu

SEQ ID NO: 1057229 - RNA, 19 nt, Homo sapiens
  misc_RNA (1)...(19): siRNA sense strand
gagaaggguguuucagauc

SEQ ID NO: 1057230 - RNA, 19 nt, Homo sapiens
  misc_RNA (1)...(19): siRNA sense strand
gagacaaaucagcaacauu

SEQ ID NO: 1057231 - RNA, 19 nt, Homo sapiens
  misc_RNA (1)...(19): siRNA sense strand
acccagagauaauccaaug

SEQ ID NO: 1057232 - RNA, 19 nt, Homo sapiens
  misc_RNA (1)...(19): siRNA sense strand
cagacuauagacaaugaua

SEQ ID NO: 1057233 - RNA, 19 nt, Homo sapiens
  misc_RNA (1)...(19): siRNA sense strand
caagggcagcucugaccua

SEQ ID NO: 1057234 - RNA, 19 nt, Homo sapiens
  misc_RNA (1)...(19): siRNA sense strand
gaggaugggcuccagcaau

SEQ ID NO: 1057235 - RNA, 19 nt, Homo sapiens
  misc_RNA (1)...(19): siRNA sense strand
agauuacuauucugacuuc

SEQ ID NO: 1057236 - RNA, 19 nt, Homo sapiens
  misc_RNA (1)...(19): siRNA sense strand
ggacccacaugaugauagc

SEQ ID NO: 1057237 - RNA, 19 nt, Homo sapiens
  misc_RNA (1)...(19): siRNA sense strand
ccagagauaauccaaugug

SEQ ID NO: 1057238 - RNA, 19 nt, Homo sapiens
  misc_RNA (1)...(19): siRNA sense strand
ugacuucucagccuggaaa

SEQ ID NO: 1057239 - RNA, 19 nt, Homo sapiens
  misc_RNA (1)...(19): siRNA sense strand
gaauggaugacccuaaagg

SEQ ID NO: 1057240 - RNA, 19 nt, Homo sapiens
  misc_RNA (1)...(19): siRNA sense strand
aagagguggucaaacaguu

SEQ ID NO: 1057241 - RNA, 19 nt, Homo sapiens
  misc_RNA (1)...(19): siRNA sense strand
ggagguuucaggucguuga

SEQ ID NO: 1057242 - RNA, 19 nt, Homo sapiens
  misc_RNA (1)...(19): siRNA sense strand
uggaacagaccaagaacaa

SEQ ID NO: 1057243 - RNA, 19 nt, Homo sapiens
  misc_RNA (1)...(19): siRNA sense strand
gacuauagacaaugauauc

SEQ ID NO: 1057244 - RNA, 19 nt, Homo sapiens
  misc_RNA (1)...(19): siRNA sense strand
ggucaaacaguuggaggaa

SEQ ID NO: 1057245 - RNA, 19 nt, Homo sapiens
  misc_RNA (1)...(19): siRNA sense strand
gguaaagggcccucuacuc

SEQ ID NO: 1057246 - RNA, 19 nt, Homo sapiens
  misc_RNA (1)...(19): siRNA sense strand
gguacaagaucagcaugag

SEQ ID NO: 1057247 - RNA, 19 nt, Homo sapiens
  misc_RNA (1)...(19): siRNA sense strand
gaucacaaggugcuucucu

SEQ ID NO: 1057248 - RNA, 19 nt, Homo sapiens
  misc_RNA (1)...(19): siRNA sense strand
gaugccagcagccagcaaa

SEQ ID NO: 1057249 - RNA, 19 nt, Homo sapiens
  misc_RNA (1)...(19): siRNA sense strand
caacauuuccaugcuuugu

SEQ ID NO: 1057250 - RNA, 19 nt, Homo sapiens
  misc_RNA (1)...(19): siRNA sense strand
uaccagcaaugaugagagu

SEQ ID NO: 1057251 - RNA, 19 nt, Homo sapiens
  misc_RNA (1)...(19): siRNA sense strand
gaugggcuccagcaauuca

SEQ ID NO: 1057252 - RNA, 19 nt, Homo sapiens
  misc_RNA (1)...(19): siRNA sense strand
aagggaacuuugcuagguu

SEQ ID NO: 1057253 - RNA, 19 nt, Homo sapiens
  misc_RNA (1)...(19): siRNA sense strand
ugagaauggaugacccuaa

SEQ ID NO: 1057254 - RNA, 19 nt, Homo sapiens
  misc_RNA (1)...(19): siRNA sense strand
acauuuccaugcuuugugu

SEQ ID NO: 1057255 - RNA, 19 nt, Homo sapiens
  misc_RNA (1)...(19): siRNA sense strand
caccugagcagcaucuaug

SEQ ID NO: 1057256 - RNA, 19 nt, Homo sapiens
  misc_RNA (1)...(19): siRNA sense strand
acaacaagcuggacaaaga

SEQ ID NO: 1057257 - RNA, 19 nt, Homo sapiens
  misc_RNA (1)...(19): siRNA sense strand
aggaagagaucaucaaauu

SEQ ID NO: 1057258 - RNA, 19 nt, Homo sapiens
  misc_RNA (1)...(19): siRNA sense strand
gaagagaucaucaaauugg

SEQ ID NO: 1057259 - RNA, 19 nt, Homo sapiens
  misc_RNA (1)...(19): siRNA sense strand
gacaaccucuccuacauug

SEQ ID NO: 1057260 - RNA, 19 nt, Homo sapiens
  misc_RNA (1)...(19): siRNA sense strand
caacaucacccuugaagau

SEQ ID NO: 1057261 - RNA, 19 nt, Homo sapiens
  misc_RNA (1)...(19): siRNA sense strand
ccaacaacaucacccuuga

SEQ ID NO: 1057262 - RNA, 19 nt, Homo sapiens
  misc_RNA (1)...(19): siRNA sense strand
ucacuauggugguugacua

SEQ ID NO: 1057263 - RNA, 19 nt, Homo sapiens
  misc_RNA (1)...(19): siRNA sense strand
ggaagagaucaucaaauug

SEQ ID NO: 1057264 - RNA, 19 nt, Homo sapiens
  misc_RNA (1)...(19): siRNA sense strand
ugcaagaccugaccaacaa

SEQ ID NO: 1057265 - RNA, 19 nt, Homo sapiens
  misc_RNA (1)...(19): siRNA sense strand
caagaaguacaaagacauu

SEQ ID NO: 1057266 - RNA, 19 nt, Homo sapiens
  misc_RNA (1)...(19): siRNA sense strand
acaccaagcuaacccguau

SEQ ID NO: 1057267 - RNA, 19 nt, Homo sapiens
  misc_RNA (1)...(19): siRNA sense strand
gaaaaucucugaggaggau

SEQ ID NO: 1057268 - RNA, 19 nt, Homo sapiens
  misc_RNA (1)...(19): siRNA sense strand
guccugaccuacucacuau

SEQ ID NO: 1057269 - RNA, 19 nt, Homo sapiens
  misc_RNA (1)...(19): siRNA sense strand
gccaagaaguacaaagaca

SEQ ID NO: 1057270 - RNA, 19 nt, Homo sapiens
  misc_RNA (1)...(19): siRNA sense strand
aggaugagcuggacaccaa

SEQ ID NO: 1057271 - RNA, 19 nt, Homo sapiens
  misc_RNA (1)...(19): siRNA sense strand
gaaguacaaagacauuauc

SEQ ID NO: 1057272 - RNA, 19 nt, Homo sapiens
  misc_RNA (1)...(19): siRNA sense strand
caagucggccugcaaggaa

SEQ ID NO: 1057273 - RNA, 19 nt, Homo sapiens
  misc_RNA (1)...(19): siRNA sense strand
cuacauugagcacaucuuu

SEQ ID NO: 1057274 - RNA, 19 nt, Homo sapiens
  misc_RNA (1)...(19): siRNA sense strand
caucacccuugaagaucua

SEQ ID NO: 1057275 - RNA, 19 nt, Homo sapiens
  misc_RNA (1)...(19): siRNA sense strand
acaaagacaaccucuccua

SEQ ID NO: 1057276 - RNA, 19 nt, Homo sapiens
  misc_RNA (1)...(19): siRNA sense strand
acauugagcacaucuuuga

SEQ ID NO: 1057277 - RNA, 19 nt, Homo sapiens
  misc_RNA (1)...(19): siRNA sense strand
gaagacauccccagcgaaa

SEQ ID NO: 1057278 - RNA, 19 nt, Homo sapiens
  misc_RNA (1)...(19): siRNA sense strand
caacaacaucacccuugaa

SEQ ID NO: 1057279 - RNA, 19 nt, Homo sapiens
  misc_RNA (1)...(19): siRNA sense strand
guacgggacccuccugcaa

SEQ ID NO: 1057280 - RNA, 19 nt, Homo sapiens
  misc_RNA (1)...(19): siRNA sense strand
aagacaaccucuccuacau

SEQ ID NO: 1057281 - RNA, 19 nt, Homo sapiens
  misc_RNA (1)...(19): siRNA sense strand
ugaggaagagaucaucaaa

SEQ ID NO: 1057282 - RNA, 19 nt, Homo sapiens
  misc_RNA (1)...(19): siRNA sense strand
uauggugguugacuacaga

SEQ ID NO: 1057283 - RNA, 19 nt, Homo sapiens
  misc_RNA (1)...(19): siRNA sense strand
gaggaagagaucaucaaau

SEQ ID NO: 1057284 - RNA, 19 nt, Homo sapiens
  misc_RNA (1)...(19): siRNA sense strand
cagaacccgugugcugaaa

SEQ ID NO: 1057285 - RNA, 19 nt, Homo sapiens
  misc_RNA (1)...(19): siRNA sense strand
gaccugaccaacaacauca

SEQ ID NO: 1057286 - RNA, 19 nt, Homo sapiens
  misc_RNA (1)...(19): siRNA sense strand
gugccaagaaguacaaaga

SEQ ID NO: 1057287 - RNA, 19 nt, Homo sapiens
  misc_RNA (1)...(19): siRNA sense strand
agacaaccucuccuacauu

SEQ ID NO: 1057288 - RNA, 19 nt, Homo sapiens
  misc_RNA (1)...(19): siRNA sense strand
aaagacaaccucuccuaca

SEQ ID NO: 1057289 - RNA, 19 nt, Homo sapiens
  misc_RNA (1)...(19): siRNA sense strand
gaacccgugugcugaaaau

SEQ ID NO: 1057290 - RNA, 19 nt, Homo sapiens
  misc_RNA (1)...(19): siRNA sense strand
ccacaacaagcuggacaaa

SEQ ID NO: 1057291 - RNA, 19 nt, Homo sapiens
  misc_RNA (1)...(19): siRNA sense strand
caaccucuccuacauugag

SEQ ID NO: 1057292 - RNA, 19 nt, Homo sapiens
  misc_RNA (1)...(19): siRNA sense strand
ccaagaaguacaaagacau

SEQ ID NO: 1057293 - RNA, 19 nt, Homo sapiens
  misc_RNA (1)...(19): siRNA sense strand
gaucuagaacagcucaagu

SEQ ID NO: 1057294 - RNA, 19 nt, Homo sapiens
  misc_RNA (1)...(19): siRNA sense strand
ccuugaagaucuagaacag

SEQ ID NO: 1057295 - RNA, 19 nt, Homo sapiens
  misc_RNA (1)...(19): siRNA sense strand
cguccugaccuacucacua

SEQ ID NO: 1057296 - RNA, 19 nt, Homo sapiens
  misc_RNA (1)...(19): siRNA sense strand
acgggacccuccugcaaga

SEQ ID NO: 1057297 - RNA, 19 nt, Homo sapiens
  misc_RNA (1)...(19): siRNA sense strand
ccagugccaagaaguacaa

SEQ ID NO: 1057298 - RNA, 19 nt, Homo sapiens
  misc_RNA (1)...(19): siRNA sense strand
ucaagucggccugcaagga

SEQ ID NO: 1057299 - RNA, 19 nt, Homo sapiens
  misc_RNA (1)...(19): siRNA sense strand
gaaaggaacuucgucauga

SEQ ID NO: 1057300 - RNA, 19 nt, Homo sapiens
  misc_RNA (1)...(19): siRNA sense strand
ucacuaagauggcagaaua

SEQ ID NO: 1057301 - RNA, 19 nt, Homo sapiens
  misc_RNA (1)...(19): siRNA sense strand
gaacuggauuggcaucaua

SEQ ID NO: 1057302 - RNA, 19 nt, Homo sapiens
  misc_RNA (1)...(19): siRNA sense strand
ccacaagacuucacaugua

SEQ ID NO: 1057303 - RNA, 19 nt, Homo sapiens
  misc_RNA (1)...(19): siRNA sense strand
cuaauuaccugcuuuguga

SEQ ID NO: 1057304 - RNA, 19 nt, Homo sapiens
  misc_RNA (1)...(19): siRNA sense strand
gcacacauaugcagggaaa

SEQ ID NO: 1057305 - RNA, 19 nt, Homo sapiens
  misc_RNA (1)...(19): siRNA sense strand
gaggagggauccauacuug

SEQ ID NO: 1057306 - RNA, 19 nt, Homo sapiens
  misc_RNA (1)...(19): siRNA sense strand
gauuggcucuuaacacuuu

SEQ ID NO: 1057307 - RNA, 19 nt, Homo sapiens
  misc_RNA (1)...(19): siRNA sense strand
gcaaauaacgugugcauag

SEQ ID NO: 1057308 - RNA, 19 nt, Homo sapiens
  misc_RNA (1)...(19): siRNA sense strand
uaacaaggcuauagaaagg

SEQ ID NO: 1057309 - RNA, 19 nt, Homo sapiens
  misc_RNA (1)...(19): siRNA sense strand
gaauuacaaugaagccaaa

SEQ ID NO: 1057310 - RNA, 19 nt, Homo sapiens
  misc_RNA (1)...(19): siRNA sense strand
ggagaucaauggacacaug

SEQ ID NO: 1057311 - RNA, 19 nt, Homo sapiens
  misc_RNA (1)...(19): siRNA sense strand
ggauggaauucauuucauu

SEQ ID NO: 1057312 - RNA, 19 nt, Homo sapiens
  misc_RNA (1)...(19): siRNA sense strand
ggaguuacuuggugugcua

SEQ ID NO: 1057313 - RNA, 19 nt, Homo sapiens
  misc_RNA (1)...(19): siRNA sense strand
gaauaugaccuacagaaug

SEQ ID NO: 1057314 - RNA, 19 nt, Homo sapiens
  misc_RNA (1)...(19): siRNA sense strand
uggaauaucucaacuggaa

SEQ ID NO: 1057315 - RNA, 19 nt, Homo sapiens
  misc_RNA (1)...(19): siRNA sense strand
ucaggaaucuuaagcaaau

SEQ ID NO: 1057316 - RNA, 19 nt, Homo sapiens
  misc_RNA (1)...(19): siRNA sense strand
aauaugaccuacagaauga

SEQ ID NO: 1057317 - RNA, 19 nt, Homo sapiens
  misc_RNA (1)...(19): siRNA sense strand
caacaauucaacacucuua

SEQ ID NO: 1057318 - RNA, 19 nt, Homo sapiens
  misc_RNA (1)...(19): siRNA sense strand
ugaaucaacugcagaaauc

SEQ ID NO: 1057319 - RNA, 19 nt, Homo sapiens
  misc_RNA (1)...(19): siRNA sense strand
cacaagacuucacauguaa

SEQ ID NO: 1057320 - RNA, 19 nt, Homo sapiens
  misc_RNA (1)...(19): siRNA sense strand
gcagaaauccugagugaca

SEQ ID NO: 1057321 - RNA, 19 nt, Homo sapiens
  misc_RNA (1)...(19): siRNA sense strand
aauaagauguggauugcua

SEQ ID NO: 1057322 - RNA, 19 nt, Homo sapiens
  misc_RNA (1)...(19): siRNA sense strand
gaauauauccucuuuccau

SEQ ID NO: 1057323 - RNA, 19 nt, Homo sapiens
  misc_RNA (1)...(19): siRNA sense strand
uuaagagucugcuauguga

SEQ ID NO: 1057324 - RNA, 19 nt, Homo sapiens
  misc_RNA (1)...(19): siRNA sense strand
cacaaacucuuacaugaau

SEQ ID NO: 1057325 - RNA, 19 nt, Homo sapiens
  misc_RNA (1)...(19): siRNA sense strand
caaggacacugauuugagu

SEQ ID NO: 1057326 - RNA, 19 nt, Homo sapiens
  misc_RNA (1)...(19): siRNA sense strand
uggcaaaguuguaggguuu

SEQ ID NO: 1057327 - RNA, 19 nt, Homo sapiens
  misc_RNA (1)...(19): siRNA sense strand
cccaaaugcuauguuauua

SEQ ID NO: 1057328 - RNA, 19 nt, Homo sapiens
  misc_RNA (1)...(19): siRNA sense strand
uaucuaugcuaccacauuu

SEQ ID NO: 1057329 - RNA, 19 nt, Homo sapiens
  misc_RNA (1)...(19): siRNA sense strand
gaagccaaauucauuacau

SEQ ID NO: 1057330 - RNA, 19 nt, Homo sapiens
  misc_RNA (1)...(19): siRNA sense strand
gaagaaaacuacaagaagu

SEQ ID NO: 1057331 - RNA, 19 nt, Homo sapiens
  misc_RNA (1)...(19): siRNA sense strand
ggaacuucgucaugagaaa

SEQ ID NO: 1057332 - RNA, 19 nt, Homo sapiens
  misc_RNA (1)...(19): siRNA sense strand
gagccaggacucauucaua

SEQ ID NO: 1057333 - RNA, 19 nt, Homo sapiens
  misc_RNA (1)...(19): siRNA sense strand
gagcggcaaugucacaaug

SEQ ID NO: 1057334 - RNA, 19 nt, Homo sapiens
  misc_RNA (1)...(19): siRNA sense strand
agcaagagauuaacacaaa

SEQ ID NO: 1057335 - RNA, 19 nt, Homo sapiens
  misc_RNA (1)...(19): siRNA sense strand
gcauccagguugucauuug

SEQ ID NO: 1057336 - RNA, 19 nt, Homo sapiens
  misc_RNA (1)...(19): siRNA sense strand
cgaagucucugaaaauuuu

SEQ ID NO: 1057337 - RNA, 19 nt, Homo sapiens
  misc_RNA (1)...(19): siRNA sense strand
guauucagcuugcaguguu

SEQ ID NO: 1057338 - RNA, 19 nt, Homo sapiens
  misc_RNA (1)...(19): siRNA sense strand
uaucauaauuggagguuug

SEQ ID NO: 1057339 - RNA, 19 nt, Homo sapiens
  misc_RNA (1)...(19): siRNA sense strand
acaagcauuugcacacaua

SEQ ID NO: 1057340 - RNA, 19 nt, Homo sapiens
  misc_RNA (1)...(19): siRNA sense strand
gcacaagcauuugcacaca

SEQ ID NO: 1057341 - RNA, 19 nt, Homo sapiens
  misc_RNA (1)...(19): siRNA sense strand
cauuuggcaugcucauuua

SEQ ID NO: 1057342 - RNA, 19 nt, Homo sapiens
  misc_RNA (1)...(19): siRNA sense strand
acacaucuguugcuaugaa

SEQ ID NO: 1057343 - RNA, 19 nt, Homo sapiens
  misc_RNA (1)...(19): siRNA sense strand
gucacaaacucuuacauga

SEQ ID NO: 1057344 - RNA, 19 nt, Homo sapiens
  misc_RNA (1)...(19): siRNA sense strand
ugaaaucuaugacacuugu

SEQ ID NO: 1057345 - RNA, 19 nt, Homo sapiens
  misc_RNA (1)...(19): siRNA sense strand
gaucccaaauuacagaaau

SEQ ID NO: 1057346 - RNA, 19 nt, Homo sapiens
  misc_RNA (1)...(19): siRNA sense strand
gauaauaccauugaaguca

SEQ ID NO: 1057347 - RNA, 19 nt, Homo sapiens
  misc_RNA (1)...(19): siRNA sense strand
ucuccaggauguugaauuu

SEQ ID NO: 1057348 - RNA, 19 nt, Homo sapiens
  misc_RNA (1)...(19): siRNA sense strand
cagccuuucuuucagauaa

SEQ ID NO: 1057349 - RNA, 19 nt, Homo sapiens
  misc_RNA (1)...(19): siRNA sense strand
uaaauaagauguggauugc

SEQ ID NO: 1057350 - RNA, 19 nt, Homo sapiens
  misc_RNA (1)...(19): siRNA sense strand
ucacauucaucccuaucua

SEQ ID NO: 1057351 - RNA, 19 nt, Homo sapiens
  misc_RNA (1)...(19): siRNA sense strand
ggccuucauuugcuucaua

SEQ ID NO: 1057352 - RNA, 19 nt, Homo sapiens
  misc_RNA (1)...(19): siRNA sense strand
acucugagguuucuuucua

SEQ ID NO: 1057353 - RNA, 19 nt, Homo sapiens
  misc_RNA (1)...(19): siRNA sense strand
uauggacgauuggcucuua

SEQ ID NO: 1057354 - RNA, 19 nt, Homo sapiens
  misc_RNA (1)...(19): siRNA sense strand
cugcagaaauccugaguga

SEQ ID NO: 1057355 - RNA, 19 nt, Homo sapiens
  misc_RNA (1)...(19): siRNA sense strand
ccaggaguguguuggcuuu

SEQ ID NO: 1057356 - RNA, 19 nt, Homo sapiens
  misc_RNA (1)...(19): siRNA sense strand
gcacgggcauccagguugu

SEQ ID NO: 1057357 - RNA, 19 nt, Homo sapiens
  misc_RNA (1)...(19): siRNA sense strand
acagguggguuaugaauca

SEQ ID NO: 1057358 - RNA, 19 nt, Homo sapiens
  misc_RNA (1)...(19): siRNA sense strand
ggaguguguuggcuuugaa

SEQ ID NO: 1057359 - RNA, 19 nt, Homo sapiens
  misc_RNA (1)...(19): siRNA sense strand
ccaggacucauucauagua

SEQ ID NO: 1057360 - RNA, 19 nt, Homo sapiens
  misc_RNA (1)...(19): siRNA sense strand
gugcauagccuucaaagag

SEQ ID NO: 1057361 - RNA, 19 nt, Homo sapiens
  misc_RNA (1)...(19): siRNA sense strand
guucaggaaucuuaagcaa

SEQ ID NO: 1057362 - RNA, 19 nt, Homo sapiens
  misc_RNA (1)...(19): siRNA sense strand
uauagaccgauccuuauua

SEQ ID NO: 1057363 - RNA, 19 nt, Homo sapiens
  misc_RNA (1)...(19): siRNA sense strand
ucaaacucuugccaugaua

SEQ ID NO: 1057364 - RNA, 19 nt, Homo sapiens
  misc_RNA (1)...(19): siRNA sense strand
gaaaaugccacaaguguau

SEQ ID NO: 1057365 - RNA, 19 nt, Homo sapiens
  misc_RNA (1)...(19): siRNA sense strand
guuguaggguuugccuuua

SEQ ID NO: 1057366 - RNA, 19 nt, Homo sapiens
  misc_RNA (1)...(19): siRNA sense strand
ucaacugccaccaagauua

SEQ ID NO: 1057367 - RNA, 19 nt, Homo sapiens
  misc_RNA (1)...(19): siRNA sense strand
aaccacagaugaugacuau

SEQ ID NO: 1057368 - RNA, 19 nt, Homo sapiens
  misc_RNA (1)...(19): siRNA sense strand
agcaauggcucaccugauu

SEQ ID NO: 1057369 - RNA, 19 nt, Homo sapiens
  misc_RNA (1)...(19): siRNA sense strand
ccagugacuuccaucaaau

SEQ ID NO: 1057370 - RNA, 19 nt, Homo sapiens
  misc_RNA (1)...(19): siRNA sense strand
gcaagagauuaacacaaag

SEQ ID NO: 1057371 - RNA, 19 nt, Homo sapiens
  misc_RNA (1)...(19): siRNA sense strand
gaccgauccuuauuaucuu

SEQ ID NO: 1057372 - RNA, 19 nt, Homo sapiens
  misc_RNA (1)...(19): siRNA sense strand
gaauaucucaacuggaaug

SEQ ID NO: 1057373 - RNA, 19 nt, Homo sapiens
  misc_RNA (1)...(19): siRNA sense strand
gaaguggaauaucucaacu

SEQ ID NO: 1057374 - RNA, 19 nt, Homo sapiens
  misc_RNA (1)...(19): siRNA sense strand
acacuaaucagacagauau

SEQ ID NO: 1057375 - RNA, 19 nt, Homo sapiens
  misc_RNA (1)...(19): siRNA sense strand
ucacaaacucuuacaugaa

SEQ ID NO: 1057376 - RNA, 19 nt, Homo sapiens
  misc_RNA (1)...(19): siRNA sense strand
ccaccaagauuaccaccau

SEQ ID NO: 1057377 - RNA, 19 nt, Homo sapiens
  misc_RNA (1)...(19): siRNA sense strand
uguguuggcuuugaaauau

SEQ ID NO: 1057378 - RNA, 19 nt, Homo sapiens
  misc_RNA (1)...(19): siRNA sense strand
gcuaacaaggcuauagaaa

SEQ ID NO: 1057379 - RNA, 19 nt, Homo sapiens
  misc_RNA (1)...(19): siRNA sense strand
gaguuuaagugugacuauu

SEQ ID NO: 1057380 - RNA, 19 nt, Homo sapiens
  misc_RNA (1)...(19): siRNA sense strand
gagguuucuuucuaaauuc

SEQ ID NO: 1057381 - RNA, 19 nt, Homo sapiens
  misc_RNA (1)...(19): siRNA sense strand
gagaugaucaacaauucaa

SEQ ID NO: 1057382 - RNA, 19 nt, Homo sapiens
  misc_RNA (1)...(19): siRNA sense strand
cuucauagcuuggaucaca

SEQ ID NO: 1057383 - RNA, 19 nt, Homo sapiens
  misc_RNA (1)...(19): siRNA sense strand
uuucugaagugccucuaua

SEQ ID NO: 1057384 - RNA, 19 nt, Homo sapiens
  misc_RNA (1)...(19): siRNA sense strand
gauuaagagucugcuaugu

SEQ ID NO: 1057385 - RNA, 19 nt, Homo sapiens
  misc_RNA (1)...(19): siRNA sense strand
uacaagaagucaacacauc

SEQ ID NO: 1057386 - RNA, 19 nt, Homo sapiens
  misc_RNA (1)...(19): siRNA sense strand
cccagugacuuccaucaaa

SEQ ID NO: 1057387 - RNA, 19 nt, Homo sapiens
  misc_RNA (1)...(19): siRNA sense strand
ggagguuuguuugcuauuc

SEQ ID NO: 1057388 - RNA, 19 nt, Homo sapiens
  misc_RNA (1)...(19): siRNA sense strand
cauaauuggagguuuguuu

SEQ ID NO: 1057389 - RNA, 19 nt, Homo sapiens
  misc_RNA (1)...(19): siRNA sense strand
caugcucauuuacuucaua

SEQ ID NO: 1057390 - RNA, 19 nt, Homo sapiens
  misc_RNA (1)...(19): siRNA sense strand
ggacucauucauaguauuc

SEQ ID NO: 1057391 - RNA, 19 nt, Homo sapiens
  misc_RNA (1)...(19): siRNA sense strand
ggauugcuagugauaauug

SEQ ID NO: 1057392 - RNA, 19 nt, Homo sapiens
  misc_RNA (1)...(19): siRNA sense strand
agauguggauugcuaguga

SEQ ID NO: 1057393 - RNA, 19 nt, Homo sapiens
  misc_RNA (1)...(19): siRNA sense strand
gagguuuguuugcuauuca

SEQ ID NO: 1057394 - RNA, 19 nt, Homo sapiens
  misc_RNA (1)...(19): siRNA sense strand
cuaugacacuuguacagaa

SEQ ID NO: 1057395 - RNA, 19 nt, Homo sapiens
  misc_RNA (1)...(19): siRNA sense strand
gucaaugcauauucaauca

SEQ ID NO: 1057396 - RNA, 19 nt, Homo sapiens
  misc_RNA (1)...(19): siRNA sense strand
gagcagcauugcccugagu

SEQ ID NO: 1057397 - RNA, 19 nt, Homo sapiens
  misc_RNA (1)...(19): siRNA sense strand
acuauggaauccuguauug

SEQ ID NO: 1057398 - RNA, 19 nt, Homo sapiens
  misc_RNA (1)...(19): siRNA sense strand
gauccauacuugcauuugg

SEQ ID NO: 1057399 - RNA, 19 nt, Homo sapiens
  misc_RNA (1)...(19): siRNA sense strand
gaauaacgaucccagauaa

SEQ ID NO: 1057400 - RNA, 19 nt, Homo sapiens
  misc_RNA (1)...(19): siRNA sense strand
gagaugauuucaaggauaa

SEQ ID NO: 1057401 - RNA, 19 nt, Homo sapiens
  misc_RNA (1)...(19): siRNA sense strand
ccucauaacuucucugauu

SEQ ID NO: 1057402 - RNA, 19 nt, Homo sapiens
  misc_RNA (1)...(19): siRNA sense strand
ggagaugauuucaaggaua

SEQ ID NO: 1057403 - RNA, 19 nt, Homo sapiens
  misc_RNA (1)...(19): siRNA sense strand
caaauugacucaucugugu

SEQ ID NO: 1057404 - RNA, 19 nt, Homo sapiens
  misc_RNA (1)...(19): siRNA sense strand
gcuaagaaccguaaggaua

SEQ ID NO: 1057405 - RNA, 19 nt, Homo sapiens
  misc_RNA (1)...(19): siRNA sense strand
ggaaaggaaaccaguuaua

SEQ ID NO: 1057406 - RNA, 19 nt, Homo sapiens
  misc_RNA (1)...(19): siRNA sense strand
gcuauaacaucucugugua

SEQ ID NO: 1057407 - RNA, 19 nt, Homo sapiens
  misc_RNA (1)...(19): siRNA sense strand
aaauggagaugguguaauu

SEQ ID NO: 1057408 - RNA, 19 nt, Homo sapiens
  misc_RNA (1)...(19): siRNA sense strand
gggaauuucuugugucuga

SEQ ID NO: 1057409 - RNA, 19 nt, Homo sapiens
  misc_RNA (1)...(19): siRNA sense strand
gcaaagcucugcucuagac

SEQ ID NO: 1057410 - RNA, 19 nt, Homo sapiens
  misc_RNA (1)...(19): siRNA sense strand
cauauuccauccaggcuua

SEQ ID NO: 1057411 - RNA, 19 nt, Homo sapiens
  misc_RNA (1)...(19): siRNA sense strand
uaacgaucccagauaauua

SEQ ID NO: 1057412 - RNA, 19 nt, Homo sapiens
  misc_RNA (1)...(19): siRNA sense strand
gggaaugacugaggaagaa

SEQ ID NO: 1057413 - RNA, 19 nt, Homo sapiens
  misc_RNA (1)...(19): siRNA sense strand
gcauggagaugauuucaag

SEQ ID NO: 1057414 - RNA, 19 nt, Homo sapiens
  misc_RNA (1)...(19): siRNA sense strand
cagcauaaauuucaagaca

SEQ ID NO: 1057415 - RNA, 19 nt, Homo sapiens
  misc_RNA (1)...(19): siRNA sense strand
gggugucuaugauuucuua

SEQ ID NO: 1057416 - RNA, 19 nt, Homo sapiens
  misc_RNA (1)...(19): siRNA sense strand
ccagauaauuauaccauug

SEQ ID NO: 1057417 - RNA, 19 nt, Homo sapiens
  misc_RNA (1)...(19): siRNA sense strand
gaaagagauucccaagagu

SEQ ID NO: 1057418 - RNA, 19 nt, Homo sapiens
  misc_RNA (1)...(19): siRNA sense strand
caaagaaggcguuccauca

SEQ ID NO: 1057419 - RNA, 19 nt, Homo sapiens
  misc_RNA (1)...(19): siRNA sense strand
acacuuggcuacaacauau

SEQ ID NO: 1057420 - RNA, 19 nt, Homo sapiens
  misc_RNA (1)...(19): siRNA sense strand
ggaaaaggauucuccaaga

SEQ ID NO: 1057421 - RNA, 19 nt, Homo sapiens
  misc_RNA (1)...(19): siRNA sense strand
gauccagcaagauaaauua

SEQ ID NO: 1057422 - RNA, 19 nt, Homo sapiens
  misc_RNA (1)...(19): siRNA sense strand
gaacauuuccugugucuac

SEQ ID NO: 1057423 - RNA, 19 nt, Homo sapiens
  misc_RNA (1)...(19): siRNA sense strand
gaaacaaugaacacuacua

SEQ ID NO: 1057424 - RNA, 19 nt, Homo sapiens
  misc_RNA (1)...(19): siRNA sense strand
gagaugguguaauuaaauc

SEQ ID NO: 1057425 - RNA, 19 nt, Homo sapiens
  misc_RNA (1)...(19): siRNA sense strand
cuaagaaccguaaggauaa

SEQ ID NO: 1057426 - RNA, 19 nt, Homo sapiens
  misc_RNA (1)...(19): siRNA sense strand
gaaaggaaaccaguuauac

SEQ ID NO: 1057427 - RNA, 19 nt, Homo sapiens
  misc_RNA (1)...(19): siRNA sense strand
acacuuggaugauugaaug

SEQ ID NO: 1057428 - RNA, 19 nt, Homo sapiens
  misc_RNA (1)...(19): siRNA sense strand
cauccaggcuuaugccaaa

SEQ ID NO: 1057429 - RNA, 19 nt, Homo sapiens
  misc_RNA (1)...(19): siRNA sense strand
caaauugaauggauaaagc

SEQ ID NO: 1057430 - RNA, 19 nt, Homo sapiens
  misc_RNA (1)...(19): siRNA sense strand
aaaccuuucuggugcuaua

SEQ ID NO: 1057431 - RNA, 19 nt, Homo sapiens
  misc_RNA (1)...(19): siRNA sense strand
ggacgauccagcaagauaa

SEQ ID NO: 1057432 - RNA, 19 nt, Homo sapiens
  misc_RNA (1)...(19): siRNA sense strand
gauuccagcuauucaagaa

SEQ ID NO: 1057433 - RNA, 19 nt, Homo sapiens
  misc_RNA (1)...(19): siRNA sense strand
ggagaugguguaauuaaau

SEQ ID NO: 1057434 - RNA, 19 nt, Homo sapiens
  misc_RNA (1)...(19): siRNA sense strand
caggaaaggaaaccaguua

SEQ ID NO: 1057435 - RNA, 19 nt, Homo sapiens
  misc_RNA (1)...(19): siRNA sense strand
ugucauagcucugcgaugu

SEQ ID NO: 1057436 - RNA, 19 nt, Homo sapiens
  misc_RNA (1)...(19): siRNA sense strand
gugacaaguuggugauuga

SEQ ID NO: 1057437 - RNA, 19 nt, Homo sapiens
  misc_RNA (1)...(19): siRNA sense strand
gaaaggggaucaucugcaa

SEQ ID NO: 1057438 - RNA, 19 nt, Homo sapiens
  misc_RNA (1)...(19): siRNA sense strand
gagaacauuuccugugucu

SEQ ID NO: 1057439 - RNA, 19 nt, Homo sapiens
  misc_RNA (1)...(19): siRNA sense strand
gcaacuacaccaucuuuua

SEQ ID NO: 1057440 - RNA, 19 nt, Homo sapiens
  misc_RNA (1)...(19): siRNA sense strand
gugaacacuuggaugauug

SEQ ID NO: 1057441 - RNA, 19 nt, Homo sapiens
  misc_RNA (1)...(19): siRNA sense strand
gaacauagcgaaaacugaa

SEQ ID NO: 1057442 - RNA, 19 nt, Homo sapiens
  misc_RNA (1)...(19): siRNA sense strand
ggaccagcauaaauuucaa

SEQ ID NO: 1057443 - RNA, 19 nt, Homo sapiens
  misc_RNA (1)...(19): siRNA sense strand
cagaaacaaugaacacuac

SEQ ID NO: 1057444 - RNA, 19 nt, Homo sapiens
  misc_RNA (1)...(19): siRNA sense strand
acacuaaccucacagaaac

SEQ ID NO: 1057445 - RNA, 19 nt, Homo sapiens
  misc_RNA (1)...(19): siRNA sense strand
uggcaaagcucugcucuag

SEQ ID NO: 1057446 - RNA, 19 nt, Homo sapiens
  misc_RNA (1)...(19): siRNA sense strand
gguggaggccuucuuauuc

SEQ ID NO: 1057447 - RNA, 19 nt, Homo sapiens
  misc_RNA (1)...(19): siRNA sense strand
gggaucaucugcaacuaca

SEQ ID NO: 1057448 - RNA, 19 nt, Homo sapiens
  misc_RNA (1)...(19): siRNA sense strand
ggagaacauuggcgugaag

SEQ ID NO: 1057449 - RNA, 19 nt, Homo sapiens
  misc_RNA (1)...(19): siRNA sense strand
agaauaacgaucccagaua

SEQ ID NO: 1057450 - RNA, 19 nt, Homo sapiens
  misc_RNA (1)...(19): siRNA sense strand
caacgggaccagcauaaau

SEQ ID NO: 1057451 - RNA, 19 nt, Homo sapiens
  misc_RNA (1)...(19): siRNA sense strand
ccagugcgguuguuaugga

SEQ ID NO: 1057452 - RNA, 19 nt, Homo sapiens
  misc_RNA (1)...(19): siRNA sense strand
uaagaaccguaaggauaaa

SEQ ID NO: 1057453 - RNA, 19 nt, Homo sapiens
  misc_RNA (1)...(19): siRNA sense strand
caauaguucuacaagugaa

SEQ ID NO: 1057454 - RNA, 19 nt, Homo sapiens
  misc_RNA (1)...(19): siRNA sense strand
cagcuaagccugagaacau

SEQ ID NO: 1057455 - RNA, 19 nt, Homo sapiens
  misc_RNA (1)...(19): siRNA sense strand
uaacaucucuguguaucca

SEQ ID NO: 1057456 - RNA, 19 nt, Homo sapiens
  misc_RNA (1)...(19): siRNA sense strand
aaacugaaccaccuaagau

SEQ ID NO: 1057457 - RNA, 19 nt, Homo sapiens
  misc_RNA (1)...(19): siRNA sense strand
gaaaagaauggguauguga

SEQ ID NO: 1057458 - RNA, 19 nt, Homo sapiens
  misc_RNA (1)...(19): siRNA sense strand
aggauaagcuaaaccugaa

SEQ ID NO: 1057459 - RNA, 19 nt, Homo sapiens
  misc_RNA (1)...(19): siRNA sense strand
gcucugcucuagacgugaa

SEQ ID NO: 1057460 - RNA, 19 nt, Homo sapiens
  misc_RNA (1)...(19): siRNA sense strand
gcuacaacauaugguacua

SEQ ID NO: 1057461 - RNA, 19 nt, Homo sapiens
  misc_RNA (1)...(19): siRNA sense strand
gacgugaacacuuggauga

SEQ ID NO: 1057462 - RNA, 19 nt, Homo sapiens
  misc_RNA (1)...(19): siRNA sense strand
gaucacauggaaagagauu

SEQ ID NO: 1057463 - RNA, 19 nt, Homo sapiens
  misc_RNA (1)...(19): siRNA sense strand
agaaggcguuccaucagaa

SEQ ID NO: 1057464 - RNA, 19 nt, Homo sapiens
  misc_RNA (1)...(19): siRNA sense strand
cgugaacacuuggaugauu

SEQ ID NO: 1057465 - RNA, 19 nt, Homo sapiens
  misc_RNA (1)...(19): siRNA sense strand
uggagaugguguaauuaaa

SEQ ID NO: 1057466 - RNA, 19 nt, Homo sapiens
  misc_RNA (1)...(19): siRNA sense strand
uggagucccugaaacgaaa

SEQ ID NO: 1057467 - RNA, 19 nt, Homo sapiens
  misc_RNA (1)...(19): siRNA sense strand
ggucaaggagucaaaguuc

SEQ ID NO: 1057468 - RNA, 19 nt, Homo sapiens
  misc_RNA (1)...(19): siRNA sense strand
ccaauaguucuacaaguga

SEQ ID NO: 1057469 - RNA, 19 nt, Homo sapiens
  misc_RNA (1)...(19): siRNA sense strand
aagaaggcguuccaucaga

SEQ ID NO: 1057470 - RNA, 19 nt, Homo sapiens
  misc_RNA (1)...(19): siRNA sense strand
agaccaagguggagaacau

SEQ ID NO: 1057471 - RNA, 19 nt, Homo sapiens
  misc_RNA (1)...(19): siRNA sense strand
guggugaacuuugggaaug

SEQ ID NO: 1057472 - RNA, 19 nt, Homo sapiens
  misc_RNA (1)...(19): siRNA sense strand
ccaacaaauugacucaucu

SEQ ID NO: 1057473 - RNA, 19 nt, Homo sapiens
  misc_RNA (1)...(19): siRNA sense strand
caugauaauuguacaacca

SEQ ID NO: 1057474 - RNA, 19 nt, Homo sapiens
  misc_RNA (1)...(19): siRNA sense strand
gcgccuguuucaucugauu

SEQ ID NO: 1057475 - RNA, 19 nt, Homo sapiens
  misc_RNA (1)...(19): siRNA sense strand
gccagggaauuucuugugu

SEQ ID NO: 1057476 - RNA, 19 nt, Homo sapiens
  misc_RNA (1)...(19): siRNA sense strand
uugaggagcucccaguuuc

SEQ ID NO: 1057477 - RNA, 19 nt, Homo sapiens
  misc_RNA (1)...(19): siRNA sense strand
acaaguuggugauugacaa

SEQ ID NO: 1057478 - RNA, 19 nt, Homo sapiens
  misc_RNA (1)...(19): siRNA sense strand
guggaggccuucuuauucu

SEQ ID NO: 1057479 - RNA, 19 nt, Homo sapiens
  misc_RNA (1)...(19): siRNA sense strand
uucagugucuuugagauua

SEQ ID NO: 1057480 - RNA, 19 nt, Homo sapiens
  misc_RNA (1)...(19): siRNA sense strand
aauguugcaugacaaaguu

SEQ ID NO: 1057481 - RNA, 19 nt, Homo sapiens
  misc_RNA (1)...(19): siRNA sense strand
gaaggccagugcgguuguu

SEQ ID NO: 1057482 - RNA, 19 nt, Homo sapiens
  misc_RNA (1)...(19): siRNA sense strand
ucaaaguucuggagugacu

SEQ ID NO: 1057483 - RNA, 19 nt, Homo sapiens
  misc_RNA (1)...(19): siRNA sense strand
agucaaaguucuggaguga

SEQ ID NO: 1057484 - RNA, 19 nt, Homo sapiens
  misc_RNA (1)...(19): siRNA sense strand
gguggaagcugaaaaugga

SEQ ID NO: 1057485 - RNA, 19 nt, Homo sapiens
  misc_RNA (1)...(19): siRNA sense strand
caccaagggagaagucuaa

SEQ ID NO: 1057486 - RNA, 19 nt, Homo sapiens
  misc_RNA (1)...(19): siRNA sense strand
aaaguaguauagccacaug

SEQ ID NO: 1057487 - RNA, 19 nt, Homo sapiens
  misc_RNA (1)...(19): siRNA sense strand
accaauaguucuacaagug

SEQ ID NO: 1057488 - RNA, 19 nt, Homo sapiens
  misc_RNA (1)...(19): siRNA sense strand
uauaacaucucuguguauc

SEQ ID NO: 1057489 - RNA, 19 nt, Homo sapiens
  misc_RNA (1)...(19): siRNA sense strand
uauacccaguacacaguua

SEQ ID NO: 1057490 - RNA, 19 nt, Homo sapiens
  misc_RNA (1)...(19): siRNA sense strand
cuacuaaccagcagcuuga

SEQ ID NO: 1057491 - RNA, 19 nt, Homo sapiens
  misc_RNA (1)...(19): siRNA sense strand
caacauaugguacuaucca

SEQ ID NO: 1057492 - RNA, 19 nt, Homo sapiens
  misc_RNA (1)...(19): siRNA sense strand
acagaaacaaugaacacua

SEQ ID NO: 1057493 - RNA, 19 nt, Homo sapiens
  misc_RNA (1)...(19): siRNA sense strand
aagcaacacuaaccucaca

SEQ ID NO: 1057494 - RNA, 19 nt, Homo sapiens
  misc_RNA (1)...(19): siRNA sense strand
uauccaauguugcaugaca

SEQ ID NO: 1057495 - RNA, 19 nt, Homo sapiens
  misc_RNA (1)...(19): siRNA sense strand
cugagaacauuuccugugu

SEQ ID NO: 1057496 - RNA, 19 nt, Homo sapiens
  misc_RNA (1)...(19): siRNA sense strand
gaaaguaguauagccacau

SEQ ID NO: 1057497 - RNA, 19 nt, Homo sapiens
  misc_RNA (1)...(19): siRNA sense strand
ggaauuucuugugucugaa

SEQ ID NO: 1057498 - RNA, 19 nt, Homo sapiens
  misc_RNA (1)...(19): siRNA sense strand
cagaaaaucccaauaccua

SEQ ID NO: 1057499 - RNA, 19 nt, Homo sapiens
  misc_RNA (1)...(19): siRNA sense strand
gacaagaacuuccacauga

SEQ ID NO: 1057500 - RNA, 19 nt, Homo sapiens
  misc_RNA (1)...(19): siRNA sense strand
gaauguggcugucaacgaa

SEQ ID NO: 1057501 - RNA, 19 nt, Homo sapiens
  misc_RNA (1)...(19): siRNA sense strand
caagaaugauccuuucaaa

SEQ ID NO: 1057502 - RNA, 19 nt, Homo sapiens
  misc_RNA (1)...(19): siRNA sense strand
ggacaagaacuuccacaug

SEQ ID NO: 1057503 - RNA, 19 nt, Homo sapiens
  misc_RNA (1)...(19): siRNA sense strand
gggagaaggugagcaguau

SEQ ID NO: 1057504 - RNA, 19 nt, Homo sapiens
  misc_RNA (1)...(19): siRNA sense strand
gaccaagaaugauccuuuc

SEQ ID NO: 1057505 - RNA, 19 nt, Homo sapiens
  misc_RNA (1)...(19): siRNA sense strand
gagaaggugagcaguauug

SEQ ID NO: 1057506 - RNA, 19 nt, Homo sapiens
  misc_RNA (1)...(19): siRNA sense strand
ggugagcaguauugauuug

SEQ ID NO: 1057507 - RNA, 19 nt, Homo sapiens
  misc_RNA (1)...(19): siRNA sense strand
uggaugacaugaccaagaa

SEQ ID NO: 1057508 - RNA, 19 nt, Homo sapiens
  misc_RNA (1)...(19): siRNA sense strand
ccagugacuccuaaguuua

SEQ ID NO: 1057509 - RNA, 19 nt, Homo sapiens
  misc_RNA (1)...(19): siRNA sense strand
acaagaacuuccacaugaa

SEQ ID NO: 1057510 - RNA, 19 nt, Homo sapiens
  misc_RNA (1)...(19): siRNA sense strand
ggugucaucuggauaugug

SEQ ID NO: 1057511 - RNA, 19 nt, Homo sapiens
  misc_RNA (1)...(19): siRNA sense strand
caugaaguguuacaagugu

SEQ ID NO: 1057512 - RNA, 19 nt, Homo sapiens
  misc_RNA (1)...(19): siRNA sense strand
uccagugacuccuaaguuu

SEQ ID NO: 1057513 - RNA, 19 nt, Homo sapiens
  misc_RNA (1)...(19): siRNA sense strand
agacacaguuccauguuca

SEQ ID NO: 1057514 - RNA, 19 nt, Homo sapiens
  misc_RNA (1)...(19): siRNA sense strand
ugaccaagaaugauccuuu

SEQ ID NO: 1057515 - RNA, 19 nt, Homo sapiens
  misc_RNA (1)...(19): siRNA sense strand
ggaagccccugucgauuga

SEQ ID NO: 1057516 - RNA, 19 nt, Homo sapiens
  misc_RNA (1)...(19): siRNA sense strand
ggaucugggucacaaccaa

SEQ ID NO: 1057517 - RNA, 19 nt, Homo sapiens
  misc_RNA (1)...(19): siRNA sense strand
cacaugaaguguuacaagu

SEQ ID NO: 1057518 - RNA, 19 nt, Homo sapiens
  misc_RNA (1)...(19): siRNA sense strand
aaggugagcaguauugauu

SEQ ID NO: 1057519 - RNA, 19 nt, Homo sapiens
  misc_RNA (1)...(19): siRNA sense strand
uguccucacugcuggauga

SEQ ID NO: 1057520 - RNA, 19 nt, Homo sapiens
  misc_RNA (1)...(19): siRNA sense strand
ggcagaauguggcugucaa

SEQ ID NO: 1057521 - RNA, 19 nt, Homo sapiens
  misc_RNA (1)...(19): siRNA sense strand
ccaagaaugauccuuucaa

SEQ ID NO: 1057522 - RNA, 19 nt, Homo sapiens
  misc_RNA (1)...(19): siRNA sense strand
guauugauuuggagaucga

SEQ ID NO: 1057523 - RNA, 19 nt, Homo sapiens
  misc_RNA (1)...(19): siRNA sense strand
cagacacaguuccauguuc

SEQ ID NO: 1057524 - RNA, 19 nt, Homo sapiens
  misc_RNA (1)...(19): siRNA sense strand
gaugacaugaccaagaaug

SEQ ID NO: 1057525 - RNA, 19 nt, Homo sapiens
  misc_RNA (1)...(19): siRNA sense strand
ccucccagcuucaccuaug

SEQ ID NO: 1057526 - RNA, 19 nt, Homo sapiens
  misc_RNA (1)...(19): siRNA sense strand
gaaggugagcaguauugau

SEQ ID NO: 1057527 - RNA, 19 nt, Homo sapiens
  misc_RNA (1)...(19): siRNA sense strand
ggagaaggugagcaguauu

SEQ ID NO: 1057528 - RNA, 19 nt, Homo sapiens
  misc_RNA (1)...(19): siRNA sense strand
gaucugggucacaaccaaa

SEQ ID NO: 1057529 - RNA, 19 nt, Homo sapiens
  misc_RNA (1)...(19): siRNA sense strand
gcccaagccucagguccaa

SEQ ID NO: 1057530 - RNA, 19 nt, Homo sapiens
  misc_RNA (1)...(19): siRNA sense strand
gacccagccugugucuuug

SEQ ID NO: 1057531 - RNA, 19 nt, Homo sapiens
  misc_RNA (1)...(19): siRNA sense strand
acacugacacccuggagaa

SEQ ID NO: 1057532 - RNA, 19 nt, Homo sapiens
  misc_RNA (1)...(19): siRNA sense strand
ugagcaguauugauuugga

SEQ ID NO: 1057533 - RNA, 19 nt, Homo sapiens
  misc_RNA (1)...(19): siRNA sense strand
uagggcagcuguuccacau

SEQ ID NO: 1057534 - RNA, 19 nt, Homo sapiens
  misc_RNA (1)...(19): siRNA sense strand
gacaugaccaagaaugauc

SEQ ID NO: 1057535 - RNA, 19 nt, Homo sapiens
  misc_RNA (1)...(19): siRNA sense strand
ccacaugaaguguuacaag

SEQ ID NO: 1057536 - RNA, 19 nt, Homo sapiens
  misc_RNA (1)...(19): siRNA sense strand
gagccuggccgagaugaga

SEQ ID NO: 1057537 - RNA, 19 nt, Homo sapiens
  misc_RNA (1)...(19): siRNA sense strand
ccgacuaccacaagcagua

SEQ ID NO: 1057538 - RNA, 19 nt, Homo sapiens
  misc_RNA (1)...(19): siRNA sense strand
ccagacacaguuccauguu

SEQ ID NO: 1057539 - RNA, 19 nt, Homo sapiens
  misc_RNA (1)...(19): siRNA sense strand
gccagcaguucuacagucu

SEQ ID NO: 1057540 - RNA, 19 nt, Homo sapiens
  misc_RNA (1)...(19): siRNA sense strand
ggucacaaccaaaucaaaa

SEQ ID NO: 1057541 - RNA, 19 nt, Homo sapiens
  misc_RNA (1)...(19): siRNA sense strand
ugaaguguuacaaguguga

SEQ ID NO: 1057542 - RNA, 19 nt, Homo sapiens
  misc_RNA (1)...(19): siRNA sense strand
ccucacugcuggaugacau

SEQ ID NO: 1057543 - RNA, 19 nt, Homo sapiens
  misc_RNA (1)...(19): siRNA sense strand
ccacgggcaaggccuauca

SEQ ID NO: 1057544 - RNA, 19 nt, Homo sapiens
  misc_RNA (1)...(19): siRNA sense strand
cccgaucgaggaaucauuu

SEQ ID NO: 1057545 - RNA, 19 nt, Homo sapiens
  misc_RNA (1)...(19): siRNA sense strand
cacgugcucugucggaagu

SEQ ID NO: 1057546 - RNA, 19 nt, Homo sapiens
  misc_RNA (1)...(19): siRNA sense strand
caccacagcccagggagaa

SEQ ID NO: 1057547 - RNA, 19 nt, Homo sapiens
  misc_RNA (1)...(19): siRNA sense strand
uuacuccuguggcuuccaa

SEQ ID NO: 1057548 - RNA, 19 nt, Homo sapiens
  misc_RNA (1)...(19): siRNA sense strand
cgauugaggcagaugacaa

SEQ ID NO: 1057549 - RNA, 19 nt, Homo sapiens
  misc_RNA (1)...(19): siRNA sense strand
cugacacccuggagaagug

SEQ ID NO: 1057550 - RNA, 19 nt, Homo sapiens
  misc_RNA (1)...(19): siRNA sense strand
uuucuccagugacuccuaa

SEQ ID NO: 1057551 - RNA, 19 nt, Homo sapiens
  misc_RNA (1)...(19): siRNA sense strand
gggaagccccugucgauug

SEQ ID NO: 1057552 - RNA, 19 nt, Homo sapiens
  misc_RNA (1)...(19): siRNA sense strand
gccagacacaguuccaugu

SEQ ID NO: 1057553 - RNA, 19 nt, Homo sapiens
  misc_RNA (1)...(19): siRNA sense strand
ggugcuccgucugcucuga

SEQ ID NO: 1057554 - RNA, 19 nt, Homo sapiens
  misc_RNA (1)...(19): siRNA sense strand
ugacaugaccaagaaugau

SEQ ID NO: 1057555 - RNA, 19 nt, Homo sapiens
  misc_RNA (1)...(19): siRNA sense strand
gacauggagcauccucaga

SEQ ID NO: 1057556 - RNA, 19 nt, Homo sapiens
  misc_RNA (1)...(19): siRNA sense strand
uccuguggcuuccaaguuc

SEQ ID NO: 1057557 - RNA, 19 nt, Homo sapiens
  misc_RNA (1)...(19): siRNA sense strand
gcucaaaguuccaaauuuc

SEQ ID NO: 1057558 - RNA, 19 nt, Homo sapiens
  misc_RNA (1)...(19): siRNA sense strand
gaaguggaauacaaacuau

SEQ ID NO: 1057559 - RNA, 19 nt, Homo sapiens
  misc_RNA (1)...(19): siRNA sense strand
gaauacugguuaaagauga

SEQ ID NO: 1057560 - RNA, 19 nt, Homo sapiens
  misc_RNA (1)...(19): siRNA sense strand
ggaaugggaaguugaaauu

SEQ ID NO: 1057561 - RNA, 19 nt, Homo sapiens
  misc_RNA (1)...(19): siRNA sense strand
gugaagauaugauggaaug

SEQ ID NO: 1057562 - RNA, 19 nt, Homo sapiens
  misc_RNA (1)...(19): siRNA sense strand
caaccucauuuagugauua

SEQ ID NO: 1057563 - RNA, 19 nt, Homo sapiens
  misc_RNA (1)...(19): siRNA sense strand
cagaauagcuacaucaaaa

SEQ ID NO: 1057564 - RNA, 19 nt, Homo sapiens
  misc_RNA (1)...(19): siRNA sense strand
gaaauugaaggucuacaga

SEQ ID NO: 1057565 - RNA, 19 nt, Homo sapiens
  misc_RNA (1)...(19): siRNA sense strand
gaacuccauugcucaaagu

SEQ ID NO: 1057566 - RNA, 19 nt, Homo sapiens
  misc_RNA (1)...(19): siRNA sense strand
uagagaauccagugaauuu

SEQ ID NO: 1057567 - RNA, 19 nt, Homo sapiens
  misc_RNA (1)...(19): siRNA sense strand
caaauuucauuggacagua

SEQ ID NO: 1057568 - RNA, 19 nt, Homo sapiens
  misc_RNA (1)...(19): siRNA sense strand
gguuuagucuuccaacuga

SEQ ID NO: 1057569 - RNA, 19 nt, Homo sapiens
  misc_RNA (1)...(19): siRNA sense strand
gaaaauggaucuacagcau

SEQ ID NO: 1057570 - RNA, 19 nt, Homo sapiens
  misc_RNA (1)...(19): siRNA sense strand
guaaauguaucagaccaau

SEQ ID NO: 1057571 - RNA, 19 nt, Homo sapiens
  misc_RNA (1)...(19): siRNA sense strand
gcuagagaauccagugaau

SEQ ID NO: 1057572 - RNA, 19 nt, Homo sapiens
  misc_RNA (1)...(19): siRNA sense strand
ggaagcagccagaauacug

SEQ ID NO: 1057573 - RNA, 19 nt, Homo sapiens
  misc_RNA (1)...(19): siRNA sense strand
aaugggaaguugaaauuga

SEQ ID NO: 1057574 - RNA, 19 nt, Homo sapiens
  misc_RNA (1)...(19): siRNA sense strand
uuacuugcccuacagguua

SEQ ID NO: 1057575 - RNA, 19 nt, Homo sapiens
  misc_RNA (1)...(19): siRNA sense strand
ccugagaaguggaauacaa

SEQ ID NO: 1057576 - RNA, 19 nt, Homo sapiens
  misc_RNA (1)...(19): siRNA sense strand
ggucagcccuguauagacu

SEQ ID NO: 1057577 - RNA, 19 nt, Homo sapiens
  misc_RNA (1)...(19): siRNA sense strand
gccaggaguuaccuaaaga

SEQ ID NO: 1057578 - RNA, 19 nt, Homo sapiens
  misc_RNA (1)...(19): siRNA sense strand
uaaagacccacguaaaugu

SEQ ID NO: 1057579 - RNA, 19 nt, Homo sapiens
  misc_RNA (1)...(19): siRNA sense strand
aaauggaucuacagcauca

SEQ ID NO: 1057580 - RNA, 19 nt, Homo sapiens
  misc_RNA (1)...(19): siRNA sense strand
ggacaguauuacaaaugga

SEQ ID NO: 1057581 - RNA, 19 nt, Homo sapiens
  misc_RNA (1)...(19): siRNA sense strand
gaacaauuauaaggguauc

SEQ ID NO: 1057582 - RNA, 19 nt, Homo sapiens
  misc_RNA (1)...(19): siRNA sense strand
cugcuaagccuguaaguga

SEQ ID NO: 1057583 - RNA, 19 nt, Homo sapiens
  misc_RNA (1)...(19): siRNA sense strand
ccagacaugguccagaaua

SEQ ID NO: 1057584 - RNA, 19 nt, Homo sapiens
  misc_RNA (1)...(19): siRNA sense strand
auaaggguaucacugcuaa

SEQ ID NO: 1057585 - RNA, 19 nt, Homo sapiens
  misc_RNA (1)...(19): siRNA sense strand
uuacaucggaguacaacua

SEQ ID NO: 1057586 - RNA, 19 nt, Homo sapiens
  misc_RNA (1)...(19): siRNA sense strand
ccuaaagacccacguaaau

SEQ ID NO: 1057587 - RNA, 19 nt, Homo sapiens
  misc_RNA (1)...(19): siRNA sense strand
agaaguggaauacaaacua

SEQ ID NO: 1057588 - RNA, 19 nt, Homo sapiens
  misc_RNA (1)...(19): siRNA sense strand
caauuccguuucauccaaa

SEQ ID NO: 1057589 - RNA, 19 nt, Homo sapiens
  misc_RNA (1)...(19): siRNA sense strand
acaauuccguuucauccaa

SEQ ID NO: 1057590 - RNA, 19 nt, Homo sapiens
  misc_RNA (1)...(19): siRNA sense strand
ggaagaaaauggaucuaca

SEQ ID NO: 1057591 - RNA, 19 nt, Homo sapiens
  misc_RNA (1)...(19): siRNA sense strand
caucagaaagaauggaauu

SEQ ID NO: 1057592 - RNA, 19 nt, Homo sapiens
  misc_RNA (1)...(19): siRNA sense strand
uugaaggucuacagaauuc

SEQ ID NO: 1057593 - RNA, 19 nt, Homo sapiens
  misc_RNA (1)...(19): siRNA sense strand
aaaacaaccucauuuagug

SEQ ID NO: 1057594 - RNA, 19 nt, Homo sapiens
  misc_RNA (1)...(19): siRNA sense strand
uacagguuaugcuuucuaa

SEQ ID NO: 1057595 - RNA, 19 nt, Homo sapiens
  misc_RNA (1)...(19): siRNA sense strand
cuaaagacccacguaaaug

SEQ ID NO: 1057596 - RNA, 19 nt, Homo sapiens
  misc_RNA (1)...(19): siRNA sense strand
gauggaaugggaaguugaa

SEQ ID NO: 1057597 - RNA, 19 nt, Homo sapiens
  misc_RNA (1)...(19): siRNA sense strand
cuaauccagugcuagagaa

SEQ ID NO: 1057598 - RNA, 19 nt, Homo sapiens
  misc_RNA (1)...(19): siRNA sense strand
aauugaaggucuacagaau

SEQ ID NO: 1057599 - RNA, 19 nt, Homo sapiens
  misc_RNA (1)...(19): siRNA sense strand
gaaugggaaguugaaauug

SEQ ID NO: 1057600 - RNA, 19 nt, Homo sapiens
  misc_RNA (1)...(19): siRNA sense strand
aaagacccacguaaaugua

SEQ ID NO: 1057601 - RNA, 19 nt, Homo sapiens
  misc_RNA (1)...(19): siRNA sense strand
caucaaaagccacagaaua

SEQ ID NO: 1057602 - RNA, 19 nt, Homo sapiens
  misc_RNA (1)...(19): siRNA sense strand
ccagaauagcuacaucaaa

SEQ ID NO: 1057603 - RNA, 19 nt, Homo sapiens
  misc_RNA (1)...(19): siRNA sense strand
aaacaaccucauuuaguga

SEQ ID NO: 1057604 - RNA, 19 nt, Homo sapiens
  misc_RNA (1)...(19): siRNA sense strand
gccuguaagugaagauaug

SEQ ID NO: 1057605 - RNA, 19 nt, Homo sapiens
  misc_RNA (1)...(19): siRNA sense strand
agacuucugugaucucaag

SEQ ID NO: 1057606 - RNA, 19 nt, Homo sapiens
  misc_RNA (1)...(19): siRNA sense strand
ggaucuacagcaucagaaa

SEQ ID NO: 1057607 - RNA, 19 nt, Homo sapiens
  misc_RNA (1)...(19): siRNA sense strand
cagacaugguccagaauag

SEQ ID NO: 1057608 - RNA, 19 nt, Homo sapiens
  misc_RNA (1)...(19): siRNA sense strand
gagaauccagugaauuugg

SEQ ID NO: 1057609 - RNA, 19 nt, Homo sapiens
  misc_RNA (1)...(19): siRNA sense strand
ggucuacagaauucaguuu

SEQ ID NO: 1057610 - RNA, 19 nt, Homo sapiens
  misc_RNA (1)...(19): siRNA sense strand
gacaguauuacaaauggaa

SEQ ID NO: 1057611 - RNA, 19 nt, Homo sapiens
  misc_RNA (1)...(19): siRNA sense strand
uuuggaagcagccagaaua

SEQ ID NO: 1057612 - RNA, 19 nt, Homo sapiens
  misc_RNA (1)...(19): siRNA sense strand
cagguuaugcuuucuaauc

SEQ ID NO: 1057613 - RNA, 19 nt, Homo sapiens
  misc_RNA (1)...(19): siRNA sense strand
uaagugaagauaugaugga

SEQ ID NO: 1057614 - RNA, 19 nt, Homo sapiens
  misc_RNA (1)...(19): siRNA sense strand
cagaauacugguuaaagau

SEQ ID NO: 1057615 - RNA, 19 nt, Homo sapiens
  misc_RNA (1)...(19): siRNA sense strand
ucaacaggccauuacaaau

SEQ ID NO: 1057616 - RNA, 19 nt, Homo sapiens
  misc_RNA (1)...(19): siRNA sense strand
ugcucaaaguuccaaauuu

SEQ ID NO: 1057617 - RNA, 19 nt, Homo sapiens
  misc_RNA (1)...(19): siRNA sense strand
uacauugagcagcaucuua

SEQ ID NO: 1057618 - RNA, 19 nt, Homo sapiens
  misc_RNA (1)...(19): siRNA sense strand
caucuuacuugcccuacag

SEQ ID NO: 1057619 - RNA, 19 nt, Homo sapiens
  misc_RNA (1)...(19): siRNA sense strand
caaaagccacagaauacua

SEQ ID NO: 1057620 - RNA, 19 nt, Homo sapiens
  misc_RNA (1)...(19): siRNA sense strand
uauaaggguaucacugcua

SEQ ID NO: 1057621 - RNA, 19 nt, Homo sapiens
  misc_RNA (1)...(19): siRNA sense strand
uaucacugcuaagccugua

SEQ ID NO: 1057622 - RNA, 19 nt, Homo sapiens
  misc_RNA (1)...(19): siRNA sense strand
ucagcccuguauagacuuu

SEQ ID NO: 1057623 - RNA, 19 nt, Homo sapiens
  misc_RNA (1)...(19): siRNA sense strand
cauuggacaguauuacaaa

SEQ ID NO: 1057624 - RNA, 19 nt, Homo sapiens
  misc_RNA (1)...(19): siRNA sense strand
gccacagaauacuacagaa

SEQ ID NO: 1057625 - RNA, 19 nt, Homo sapiens
  misc_RNA (1)...(19): siRNA sense strand
gcaucuuacuugcccuaca

SEQ ID NO: 1057626 - RNA, 19 nt, Homo sapiens
  misc_RNA (1)...(19): siRNA sense strand
aaauugaaggucuacagaa

SEQ ID NO: 1057627 - RNA, 19 nt, Homo sapiens
  misc_RNA (1)...(19): siRNA sense strand
agaacuccauugcucaaag

SEQ ID NO: 1057628 - RNA, 19 nt, Homo sapiens
  misc_RNA (1)...(19): siRNA sense strand
gguccagaauagcuacauc

SEQ ID NO: 1057629 - RNA, 19 nt, Homo sapiens
  misc_RNA (1)...(19): siRNA sense strand
ggaaguugaaauugaaggu

SEQ ID NO: 1057630 - RNA, 19 nt, Homo sapiens
  misc_RNA (1)...(19): siRNA sense strand
acaaccucauuuagugauu

SEQ ID NO: 1057631 - RNA, 19 nt, Homo sapiens
  misc_RNA (1)...(19): siRNA sense strand
acacuggucagcccuguau

SEQ ID NO: 1057632 - RNA, 19 nt, Homo sapiens
  misc_RNA (1)...(19): siRNA sense strand
cuacagguuaugcuuucua

SEQ ID NO: 1057633 - RNA, 19 nt, Homo sapiens
  misc_RNA (1)...(19): siRNA sense strand
gaucuacagcaucagaaag

SEQ ID NO: 1057634 - RNA, 19 nt, Homo sapiens
  misc_RNA (1)...(19): siRNA sense strand
caaggagaacaauuauaag

SEQ ID NO: 1057635 - RNA, 19 nt, Homo sapiens
  misc_RNA (1)...(19): siRNA sense strand
augggaaguugaaauugaa

SEQ ID NO: 1057636 - RNA, 19 nt, Homo sapiens
  misc_RNA (1)...(19): siRNA sense strand
agaauacugguuaaagaug

SEQ ID NO: 1057637 - RNA, 19 nt, Homo sapiens
  misc_RNA (1)...(19): siRNA sense strand
cuagagaauccagugaauu

SEQ ID NO: 1057638 - RNA, 19 nt, Homo sapiens
  misc_RNA (1)...(19): siRNA sense strand
cuccaguugugaaauuuau

SEQ ID NO: 1057639 - RNA, 19 nt, Homo sapiens
  misc_RNA (1)...(19): siRNA sense strand
uggacaguauuacaaaugg

SEQ ID NO: 1057640 - RNA, 19 nt, Homo sapiens
  misc_RNA (1)...(19): siRNA sense strand
acagaauacuacagaacuc

SEQ ID NO: 1057641 - RNA, 19 nt, Homo sapiens
  misc_RNA (1)...(19): siRNA sense strand
cugagaaguggaauacaaa

SEQ ID NO: 1057642 - RNA, 19 nt, Homo sapiens
  misc_RNA (1)...(19): siRNA sense strand
ucauuggacaguauuacaa

SEQ ID NO: 1057643 - RNA, 19 nt, Homo sapiens
  misc_RNA (1)...(19): siRNA sense strand
ccacagaauacuacagaac

SEQ ID NO: 1057644 - RNA, 19 nt, Homo sapiens
  misc_RNA (1)...(19): siRNA sense strand
gcccuacagguuaugcuuu

SEQ ID NO: 1057645 - RNA, 19 nt, Homo sapiens
  misc_RNA (1)...(19): siRNA sense strand
cuccuccaguugugaaauu

SEQ ID NO: 1057646 - RNA, 19 nt, Homo sapiens
  misc_RNA (1)...(19): siRNA sense strand
uaccuaaagacccacguaa

SEQ ID NO: 1057647 - RNA, 19 nt, Homo sapiens
  misc_RNA (1)...(19): siRNA sense strand
uugagcagcaucuuacuug

SEQ ID NO: 1057648 - RNA, 19 nt, Homo sapiens
  misc_RNA (1)...(19): siRNA sense strand
ccuccaguugugaaauuua

SEQ ID NO: 1057649 - RNA, 19 nt, Homo sapiens
  misc_RNA (1)...(19): siRNA sense strand
gaaggucuacagaauucag

SEQ ID NO: 1057650 - RNA, 19 nt, Homo sapiens
  misc_RNA (1)...(19): siRNA sense strand
uucaacaggccauuacaaa

SEQ ID NO: 1057651 - RNA, 19 nt, Homo sapiens
  misc_RNA (1)...(19): siRNA sense strand
gagaaguggaauacaaacu

SEQ ID NO: 1057652 - RNA, 19 nt, Homo sapiens
  misc_RNA (1)...(19): siRNA sense strand
uggacaacccugagaagug

SEQ ID NO: 1057653 - RNA, 19 nt, Homo sapiens
  misc_RNA (1)...(19): siRNA sense strand
aagugaagauaugauggaa

SEQ ID NO: 1057654 - RNA, 19 nt, Homo sapiens
  misc_RNA (1)...(19): siRNA sense strand
ucuacagcaucagaaagaa

SEQ ID NO: 1057655 - RNA, 19 nt, Homo sapiens
  misc_RNA (1)...(19): siRNA sense strand
gcuuucuaauccagugcua

SEQ ID NO: 1057656 - RNA, 19 nt, Homo sapiens
  misc_RNA (1)...(19): siRNA sense strand
cccuacagguuaugcuuuc

SEQ ID NO: 1057657 - RNA, 19 nt, Homo sapiens
  misc_RNA (1)...(19): siRNA sense strand
ggguaaggaugaaguguua

SEQ ID NO: 1057658 - RNA, 19 nt, Homo sapiens
  misc_RNA (1)...(19): siRNA sense strand
ggaagucucucuccaaagu

SEQ ID NO: 1057659 - RNA, 19 nt, Homo sapiens
  misc_RNA (1)...(19): siRNA sense strand
cagcuccucuccacaagaa

SEQ ID NO: 1057660 - RNA, 19 nt, Homo sapiens
  misc_RNA (1)...(19): siRNA sense strand
gcaagacagaggaugcuaa

SEQ ID NO: 1057661 - RNA, 19 nt, Homo sapiens
  misc_RNA (1)...(19): siRNA sense strand
guaaggaugaaguguuaaa

SEQ ID NO: 1057662 - RNA, 19 nt, Homo sapiens
  misc_RNA (1)...(19): siRNA sense strand
ggaguugguuggccucucu

SEQ ID NO: 1057663 - RNA, 19 nt, Homo sapiens
  misc_RNA (1)...(19): siRNA sense strand
ucauugaucugcacaagag

SEQ ID NO: 1057664 - RNA, 19 nt, Homo sapiens
  misc_RNA (1)...(19): siRNA sense strand
ccacagcuccucuccacaa

SEQ ID NO: 1057665 - RNA, 19 nt, Homo sapiens
  misc_RNA (1)...(19): siRNA sense strand
cuccacaccucuucgcuuu

SEQ ID NO: 1057666 - RNA, 19 nt, Homo sapiens
  misc_RNA (1)...(19): siRNA sense strand
agggaagucucucuccaaa

SEQ ID NO: 1057667 - RNA, 19 nt, Homo sapiens
  misc_RNA (1)...(19): siRNA sense strand
ccacaccucuucgcuuugg

SEQ ID NO: 1057668 - RNA, 19 nt, Homo sapiens
  misc_RNA (1)...(19): siRNA sense strand
gagggaagucucucuccaa

SEQ ID NO: 1057669 - RNA, 19 nt, Homo sapiens
  misc_RNA (1)...(19): siRNA sense strand
cagcuucgcuucguuucau

SEQ ID NO: 1057670 - RNA, 19 nt, Homo sapiens
  misc_RNA (1)...(19): siRNA sense strand
gaucugcacaagagacaau

SEQ ID NO: 1057671 - RNA, 19 nt, Homo sapiens
  misc_RNA (1)...(19): siRNA sense strand
ccacaagaagccauucauc

SEQ ID NO: 1057672 - RNA, 19 nt, Homo sapiens
  misc_RNA (1)...(19): siRNA sense strand
ccacacccuuuggaugaga

SEQ ID NO: 1057673 - RNA, 19 nt, Homo sapiens
  misc_RNA (1)...(19): siRNA sense strand
acaaugcucuggaaaagga

SEQ ID NO: 1057674 - RNA, 19 nt, Homo sapiens
  misc_RNA (1)...(19): siRNA sense strand
ccaccaagaaccaaugaag

SEQ ID NO: 1057675 - RNA, 19 nt, Homo sapiens
  misc_RNA (1)...(19): siRNA sense strand
ucgcuucguuucauugauc

SEQ ID NO: 1057676 - RNA, 19 nt, Homo sapiens
  misc_RNA (1)...(19): siRNA sense strand
cacaagaagccauucaucu

SEQ ID NO: 1057677 - RNA, 19 nt, Homo sapiens
  misc_RNA (1)...(19): siRNA sense strand
uccaaagucuauccagcuu

SEQ ID NO: 1057678 - RNA, 19 nt, Homo sapiens
  misc_RNA (1)...(19): siRNA sense strand
aaugaaguccacacccuuu

SEQ ID NO: 1057679 - RNA, 19 nt, Homo sapiens
  misc_RNA (1)...(19): siRNA sense strand
ccucucuucucccuguuau

SEQ ID NO: 1057680 - RNA, 19 nt, Homo sapiens
  misc_RNA (1)...(19): siRNA sense strand
ucccuguuauccaauuuga

SEQ ID NO: 1057681 - RNA, 19 nt, Homo sapiens
  misc_RNA (1)...(19): siRNA sense strand
gagacaaugcucuggaaaa

SEQ ID NO: 1057682 - RNA, 19 nt, Homo sapiens
  misc_RNA (1)...(19): siRNA sense strand
uauccagcuucgcuucguu

SEQ ID NO: 1057683 - RNA, 19 nt, Homo sapiens
  misc_RNA (1)...(19): siRNA sense strand
gaacaucacugucaaacuu

SEQ ID NO: 1057684 - RNA, 19 nt, Homo sapiens
  misc_RNA (1)...(19): siRNA sense strand
ggaaggugaugcucucuua

SEQ ID NO: 1057685 - RNA, 19 nt, Homo sapiens
  misc_RNA (1)...(19): siRNA sense strand
caagaaaucuccacaaagu

SEQ ID NO: 1057686 - RNA, 19 nt, Homo sapiens
  misc_RNA (1)...(19): siRNA sense strand
ccagagagcuuugaaggua

SEQ ID NO: 1057687 - RNA, 19 nt, Homo sapiens
  misc_RNA (1)...(19): siRNA sense strand
ggaaaucuacucacuauga

SEQ ID NO: 1057688 - RNA, 19 nt, Homo sapiens
  misc_RNA (1)...(19): siRNA sense strand
gaugaugacuguuacauag

SEQ ID NO: 1057689 - RNA, 19 nt, Homo sapiens
  misc_RNA (1)...(19): siRNA sense strand
gaagauccuuauuccugua

SEQ ID NO: 1057690 - RNA, 19 nt, Homo sapiens
  misc_RNA (1)...(19): siRNA sense strand
gcaccuggaugagacauuu

SEQ ID NO: 1057691 - RNA, 19 nt, Homo sapiens
  misc_RNA (1)...(19): siRNA sense strand
ccucgaagcuguauuuaau

SEQ ID NO: 1057692 - RNA, 19 nt, Homo sapiens
  misc_RNA (1)...(19): siRNA sense strand
aaacaacgagcuucaauuu

SEQ ID NO: 1057693 - RNA, 19 nt, Homo sapiens
  misc_RNA (1)...(19): siRNA sense strand
gcuacagcaucccacauua

SEQ ID NO: 1057694 - RNA, 19 nt, Homo sapiens
  misc_RNA (1)...(19): siRNA sense strand
gaaaucuacucacuaugau

SEQ ID NO: 1057695 - RNA, 19 nt, Homo sapiens
  misc_RNA (1)...(19): siRNA sense strand
caauucaucuuaccagaga

SEQ ID NO: 1057696 - RNA, 19 nt, Homo sapiens
  misc_RNA (1)...(19): siRNA sense strand
gucaagaaaucuccacaaa

SEQ ID NO: 1057697 - RNA, 19 nt, Homo sapiens
  misc_RNA (1)...(19): siRNA sense strand
ccaaggacaucgucaagug

SEQ ID NO: 1057698 - RNA, 19 nt, Homo sapiens
  misc_RNA (1)...(19): siRNA sense strand
gaaacaacgagcuucaauu

SEQ ID NO: 1057699 - RNA, 19 nt, Homo sapiens
  misc_RNA (1)...(19): siRNA sense strand
gaaaguggcaggaguugga

SEQ ID NO: 1057700 - RNA, 19 nt, Homo sapiens
  misc_RNA (1)...(19): siRNA sense strand
guggaaaucuacucacuau

SEQ ID NO: 1057701 - RNA, 19 nt, Homo sapiens
  misc_RNA (1)...(19): siRNA sense strand
gauaugugaucuccaagga

SEQ ID NO: 1057702 - RNA, 19 nt, Homo sapiens
  misc_RNA (1)...(19): siRNA sense strand
caacgagcuucaauuuguu

SEQ ID NO: 1057703 - RNA, 19 nt, Homo sapiens
  misc_RNA (1)...(19): siRNA sense strand
ucaaguggcuggcaagcaa

SEQ ID NO: 1057704 - RNA, 19 nt, Homo sapiens
  misc_RNA (1)...(19): siRNA sense strand
ggaguucucagagucauua

SEQ ID NO: 1057705 - RNA, 19 nt, Homo sapiens
  misc_RNA (1)...(19): siRNA sense strand
ugaacaagcugugguacaa

SEQ ID NO: 1057706 - RNA, 19 nt, Homo sapiens
  misc_RNA (1)...(19): siRNA sense strand
gcaggugguuuuauauaua

SEQ ID NO: 1057707 - RNA, 19 nt, Homo sapiens
  misc_RNA (1)...(19): siRNA sense strand
gaacuucgaaacgugauaa

SEQ ID NO: 1057708 - RNA, 19 nt, Homo sapiens
  misc_RNA (1)...(19): siRNA sense strand
gaggaaagcagcaucuaug

SEQ ID NO: 1057709 - RNA, 19 nt, Homo sapiens
  misc_RNA (1)...(19): siRNA sense strand
cagaucaguuggccuuauu

SEQ ID NO: 1057710 - RNA, 19 nt, Homo sapiens
  misc_RNA (1)...(19): siRNA sense strand
gcagaucaguuggccuuau

SEQ ID NO: 1057711 - RNA, 19 nt, Homo sapiens
  misc_RNA (1)...(19): siRNA sense strand
caggauaugugaucuccaa

SEQ ID NO: 1057712 - RNA, 19 nt, Homo sapiens
  misc_RNA (1)...(19): siRNA sense strand
ugaggaagaugccuuacug

SEQ ID NO: 1057713 - RNA, 19 nt, Homo sapiens
  misc_RNA (1)...(19): siRNA sense strand
ggaaacaacgagcuucaau

SEQ ID NO: 1057714 - RNA, 19 nt, Homo sapiens
  misc_RNA (1)...(19): siRNA sense strand
caacaucacaaauccaguu

SEQ ID NO: 1057715 - RNA, 19 nt, Homo sapiens
  misc_RNA (1)...(19): siRNA sense strand
gugaugcucucuuacacaa

SEQ ID NO: 1057716 - RNA, 19 nt, Homo sapiens
  misc_RNA (1)...(19): siRNA sense strand
ggaagaugccuuacugaag

SEQ ID NO: 1057717 - RNA, 19 nt, Homo sapiens
  misc_RNA (1)...(19): siRNA sense strand
gugcauugccucaugaauu

SEQ ID NO: 1057718 - RNA, 19 nt, Homo sapiens
  misc_RNA (1)...(19): siRNA sense strand
caauaaccaugaacuucga

SEQ ID NO: 1057719 - RNA, 19 nt, Homo sapiens
  misc_RNA (1)...(19): siRNA sense strand
cgacacuuaucguaauguu

SEQ ID NO: 1057720 - RNA, 19 nt, Homo sapiens
  misc_RNA (1)...(19): siRNA sense strand
ggaggaaagcagcaucuau

SEQ ID NO: 1057721 - RNA, 19 nt, Homo sapiens
  misc_RNA (1)...(19): siRNA sense strand
agaaaucuccacaaaguga

SEQ ID NO: 1057722 - RNA, 19 nt, Homo sapiens
  misc_RNA (1)...(19): siRNA sense strand
uggauguugucgacacuua

SEQ ID NO: 1057723 - RNA, 19 nt, Homo sapiens
  misc_RNA (1)...(19): siRNA sense strand
auaagaagcaccuggauga

SEQ ID NO: 1057724 - RNA, 19 nt, Homo sapiens
  misc_RNA (1)...(19): siRNA sense strand
gcaugugggucaggauaug

SEQ ID NO: 1057725 - RNA, 19 nt, Homo sapiens
  misc_RNA (1)...(19): siRNA sense strand
gaugagacauuugcuacag

SEQ ID NO: 1057726 - RNA, 19 nt, Homo sapiens
  misc_RNA (1)...(19): siRNA sense strand
ugacggaacuguggaaacu

SEQ ID NO: 1057727 - RNA, 19 nt, Homo sapiens
  misc_RNA (1)...(19): siRNA sense strand
guacaagcccguggaacaa

SEQ ID NO: 1057728 - RNA, 19 nt, Homo sapiens
  misc_RNA (1)...(19): siRNA sense strand
guucuacgaugccaaugau

SEQ ID NO: 1057729 - RNA, 19 nt, Homo sapiens
  misc_RNA (1)...(19): siRNA sense strand
cagcgugaguuuccgaguu

SEQ ID NO: 1057730 - RNA, 19 nt, Homo sapiens
  misc_RNA (1)...(19): siRNA sense strand
cguggaacaauucaucuua

SEQ ID NO: 1057731 - RNA, 19 nt, Homo sapiens
  misc_RNA (1)...(19): siRNA sense strand
ggaaagcagcaucuaugau

SEQ ID NO: 1057732 - RNA, 19 nt, Homo sapiens
  misc_RNA (1)...(19): siRNA sense strand
cuacagcaucccacauuaa

SEQ ID NO: 1057733 - RNA, 19 nt, Homo sapiens
  misc_RNA (1)...(19): siRNA sense strand
ugcauugccucaugaauuc

SEQ ID NO: 1057734 - RNA, 19 nt, Homo sapiens
  misc_RNA (1)...(19): siRNA sense strand
acaucacugucaaacuuua

SEQ ID NO: 1057735 - RNA, 19 nt, Homo sapiens
  misc_RNA (1)...(19): siRNA sense strand
gguacaagcccguggaaca

SEQ ID NO: 1057736 - RNA, 19 nt, Homo sapiens
  misc_RNA (1)...(19): siRNA sense strand
acaagcccguggaacaauu

SEQ ID NO: 1057737 - RNA, 19 nt, Homo sapiens
  misc_RNA (1)...(19): siRNA sense strand
cuaucagggugaagaugua

SEQ ID NO: 1057738 - RNA, 19 nt, Homo sapiens
  misc_RNA (1)...(19): siRNA sense strand
acaaagugacagugaauga

SEQ ID NO: 1057739 - RNA, 19 nt, Homo sapiens
  misc_RNA (1)...(19): siRNA sense strand
cagaggaacaucacuguca

SEQ ID NO: 1057740 - RNA, 19 nt, Homo sapiens
  misc_RNA (1)...(19): siRNA sense strand
gugaagugccuguggaaga

SEQ ID NO: 1057741 - RNA, 19 nt, Homo sapiens
  misc_RNA (1)...(19): siRNA sense strand
gcugucuucuccucaguau

SEQ ID NO: 1057742 - RNA, 19 nt, Homo sapiens
  misc_RNA (1)...(19): siRNA sense strand
uagauggacuguggaaaca

SEQ ID NO: 1057743 - RNA, 19 nt, Homo sapiens
  misc_RNA (1)...(19): siRNA sense strand
ugucgacacuuaucguaau

SEQ ID NO: 1057744 - RNA, 19 nt, Homo sapiens
  misc_RNA (1)...(19): siRNA sense strand
ccaugaggaagaugccuua

SEQ ID NO: 1057745 - RNA, 19 nt, Homo sapiens
  misc_RNA (1)...(19): siRNA sense strand
ugugguaguuggcguguug

SEQ ID NO: 1057746 - RNA, 19 nt, Homo sapiens
  misc_RNA (1)...(19): siRNA sense strand
ccuguaaacuacucaacau

SEQ ID NO: 1057747 - RNA, 19 nt, Homo sapiens
  misc_RNA (1)...(19): siRNA sense strand
agaccucgaagcuguauuu

SEQ ID NO: 1057748 - RNA, 19 nt, Homo sapiens
  misc_RNA (1)...(19): siRNA sense strand
gauggacuguggaaacaac

SEQ ID NO: 1057749 - RNA, 19 nt, Homo sapiens
  misc_RNA (1)...(19): siRNA sense strand
uauaaggaaucuccaugag

SEQ ID NO: 1057750 - RNA, 19 nt, Homo sapiens
  misc_RNA (1)...(19): siRNA sense strand
ccacaaagugacagugaau

SEQ ID NO: 1057751 - RNA, 19 nt, Homo sapiens
  misc_RNA (1)...(19): siRNA sense strand
guugucagcucgcaauaac

SEQ ID NO: 1057752 - RNA, 19 nt, Homo sapiens
  misc_RNA (1)...(19): siRNA sense strand
agaggaacaucacugucaa

SEQ ID NO: 1057753 - RNA, 19 nt, Homo sapiens
  misc_RNA (1)...(19): siRNA sense strand
aaagauaccaggacagucu

SEQ ID NO: 1057754 - RNA, 19 nt, Homo sapiens
  misc_RNA (1)...(19): siRNA sense strand
gaaucuggaugggccuaau

SEQ ID NO: 1057755 - RNA, 19 nt, Homo sapiens
  misc_RNA (1)...(19): siRNA sense strand
caucuuaccagagagcuuu

SEQ ID NO: 1057756 - RNA, 19 nt, Homo sapiens
  misc_RNA (1)...(19): siRNA sense strand
caaacuuuaucaggcagaa

SEQ ID NO: 1057757 - RNA, 19 nt, Homo sapiens
  misc_RNA (1)...(19): siRNA sense strand
cuucgaaacgugauaagaa

SEQ ID NO: 1057758 - RNA, 19 nt, Homo sapiens
  misc_RNA (1)...(19): siRNA sense strand
cuacucaacaucacaaauc

SEQ ID NO: 1057759 - RNA, 19 nt, Homo sapiens
  misc_RNA (1)...(19): siRNA sense strand
gaacggugcggugauccuu

SEQ ID NO: 1057760 - RNA, 19 nt, Homo sapiens
  misc_RNA (1)...(19): siRNA sense strand
acggaacuguggaaacuga

SEQ ID NO: 1057761 - RNA, 19 nt, Homo sapiens
  misc_RNA (1)...(19): siRNA sense strand
ugagaagaccugugagaca

SEQ ID NO: 1057762 - RNA, 19 nt, Homo sapiens
  misc_RNA (1)...(19): siRNA sense strand
gaggaagaugccuuacuga

SEQ ID NO: 1057763 - RNA, 19 nt, Homo sapiens
  misc_RNA (1)...(19): siRNA sense strand
ggaaucuccaugaggaaga

SEQ ID NO: 1057764 - RNA, 19 nt, Homo sapiens
  misc_RNA (1)...(19): siRNA sense strand
gcuguggugugcaggugaa

SEQ ID NO: 1057765 - RNA, 19 nt, Homo sapiens
  misc_RNA (1)...(19): siRNA sense strand
cuucauugcucgcuucagu

SEQ ID NO: 1057766 - RNA, 19 nt, Homo sapiens
  misc_RNA (1)...(19): siRNA sense strand
gaggaacaucacugucaaa

SEQ ID NO: 1057767 - RNA, 19 nt, Homo sapiens
  misc_RNA (1)...(19): siRNA sense strand
gaucaguuggccuuauuuc

SEQ ID NO: 1057768 - RNA, 19 nt, Homo sapiens
  misc_RNA (1)...(19): siRNA sense strand
ugucuucuccucaguauuc

SEQ ID NO: 1057769 - RNA, 19 nt, Homo sapiens
  misc_RNA (1)...(19): siRNA sense strand
aaagugacagugaaugaug

SEQ ID NO: 1057770 - RNA, 19 nt, Homo sapiens
  misc_RNA (1)...(19): siRNA sense strand
aacgugugcuugugaaguu

SEQ ID NO: 1057771 - RNA, 19 nt, Homo sapiens
  misc_RNA (1)...(19): siRNA sense strand
guaaacuacucaacaucac

SEQ ID NO: 1057772 - RNA, 19 nt, Homo sapiens
  misc_RNA (1)...(19): siRNA sense strand
agacagggaagauccuuau

SEQ ID NO: 1057773 - RNA, 19 nt, Homo sapiens
  misc_RNA (1)...(19): siRNA sense strand
gaaggaacggugcggugau

SEQ ID NO: 1057774 - RNA, 19 nt, Homo sapiens
  misc_RNA (1)...(19): siRNA sense strand
guaauguuccugcaaaauu

SEQ ID NO: 1057775 - RNA, 19 nt, Homo sapiens
  misc_RNA (1)...(19): siRNA sense strand
guggaacaauucaucuuac

SEQ ID NO: 1057776 - RNA, 19 nt, Homo sapiens
  misc_RNA (1)...(19): siRNA sense strand
gaagacagggaagauccuu

SEQ ID NO: 1057777 - RNA, 19 nt, Homo sapiens
  misc_RNA (1)...(19): siRNA sense strand
uuacauagaccucgaagcu

SEQ ID NO: 1057778 - RNA, 19 nt, Homo sapiens
  misc_RNA (1)...(19): siRNA sense strand
cagcaucccacauuaaguc

SEQ ID NO: 1057779 - RNA, 19 nt, Homo sapiens
  misc_RNA (1)...(19): siRNA sense strand
ccaaugauguggguuucca

SEQ ID NO: 1057780 - RNA, 19 nt, Homo sapiens
  misc_RNA (1)...(19): siRNA sense strand
agaugaugacuguuacaua

SEQ ID NO: 1057781 - RNA, 19 nt, Homo sapiens
  misc_RNA (1)...(19): siRNA sense strand
uguaaacuacucaacauca

SEQ ID NO: 1057782 - RNA, 19 nt, Homo sapiens
  misc_RNA (1)...(19): siRNA sense strand
caaagugacagugaaugau

SEQ ID NO: 1057783 - RNA, 19 nt, Homo sapiens
  misc_RNA (1)...(19): siRNA sense strand
gcgaaucccuucucaguuc

SEQ ID NO: 1057784 - RNA, 19 nt, Homo sapiens
  misc_RNA (1)...(19): siRNA sense strand
ccacggcacucaccauauu

SEQ ID NO: 1057785 - RNA, 19 nt, Homo sapiens
  misc_RNA (1)...(19): siRNA sense strand
agaaaucccuuaaccaaug

SEQ ID NO: 1057786 - RNA, 19 nt, Homo sapiens
  misc_RNA (1)...(19): siRNA sense strand
gaaaggugccauccagauu

SEQ ID NO: 1057787 - RNA, 19 nt, Homo sapiens
  misc_RNA (1)...(19): siRNA sense strand
gcugauggcucacuuugau

SEQ ID NO: 1057788 - RNA, 19 nt, Homo sapiens
  misc_RNA (1)...(19): siRNA sense strand
ucugagaaguccaauacua

SEQ ID NO: 1057789 - RNA, 19 nt, Homo sapiens
  misc_RNA (1)...(19): siRNA sense strand
ggagagaaaucccuuaacc

SEQ ID NO: 1057790 - RNA, 19 nt, Homo sapiens
  misc_RNA (1)...(19): siRNA sense strand
accaaugccuaucauauuu

SEQ ID NO: 1057791 - RNA, 19 nt, Homo sapiens
  misc_RNA (1)...(19): siRNA sense strand
gaacucacgaagaacauug

SEQ ID NO: 1057792 - RNA, 19 nt, Homo sapiens
  misc_RNA (1)...(19): siRNA sense strand
gcuaugcugcuccuaguuu

SEQ ID NO: 1057793 - RNA, 19 nt, Homo sapiens
  misc_RNA (1)...(19): siRNA sense strand
gcacucaccauauucaaag

SEQ ID NO: 1057794 - RNA, 19 nt, Homo sapiens
  misc_RNA (1)...(19): siRNA sense strand
gaugaaagaggcgcugaaa

SEQ ID NO: 1057795 - RNA, 19 nt, Homo sapiens
  misc_RNA (1)...(19): siRNA sense strand
acagucaacuuccggauuc

SEQ ID NO: 1057796 - RNA, 19 nt, Homo sapiens
  misc_RNA (1)...(19): siRNA sense strand
ugcagcaacuggcaaauga

SEQ ID NO: 1057797 - RNA, 19 nt, Homo sapiens
  misc_RNA (1)...(19): siRNA sense strand
gaaagaggcgcugaaaggu

SEQ ID NO: 1057798 - RNA, 19 nt, Homo sapiens
  misc_RNA (1)...(19): siRNA sense strand
gagaaaucccuuaaccaau

SEQ ID NO: 1057799 - RNA, 19 nt, Homo sapiens
  misc_RNA (1)...(19): siRNA sense strand
agagaaaucccuuaaccaa

SEQ ID NO: 1057800 - RNA, 19 nt, Homo sapiens
  misc_RNA (1)...(19): siRNA sense strand
cgacaagaacucugugaug

SEQ ID NO: 1057801 - RNA, 19 nt, Homo sapiens
  misc_RNA (1)...(19): siRNA sense strand
ugaaagaggcgcugaaagg

SEQ ID NO: 1057802 - RNA, 19 nt, Homo sapiens
  misc_RNA (1)...(19): siRNA sense strand
caccaaugccuaucauauu

SEQ ID NO: 1057803 - RNA, 19 nt, Homo sapiens
  misc_RNA (1)...(19): siRNA sense strand
gaguauagccaccuguuca

SEQ ID NO: 1057804 - RNA, 19 nt, Homo sapiens
  misc_RNA (1)...(19): siRNA sense strand
ccaaaggagacaagcauug

SEQ ID NO: 1057805 - RNA, 19 nt, Homo sapiens
  misc_RNA (1)...(19): siRNA sense strand
gaaaucccuuaaccaaugc

SEQ ID NO: 1057806 - RNA, 19 nt, Homo sapiens
  misc_RNA (1)...(19): siRNA sense strand
gcaacuggcaaaugagguu

SEQ ID NO: 1057807 - RNA, 19 nt, Homo sapiens
  misc_RNA (1)...(19): siRNA sense strand
gacaagcauuggcauccuu

SEQ ID NO: 1057808 - RNA, 19 nt, Homo sapiens
  misc_RNA (1)...(19): siRNA sense strand
gcacacuggacgacaagaa

SEQ ID NO: 1057809 - RNA, 19 nt, Homo sapiens
  misc_RNA (1)...(19): siRNA sense strand
uccuagaacucacgaagaa

SEQ ID NO: 1057810 - RNA, 19 nt, Homo sapiens
  misc_RNA (1)...(19): siRNA sense strand
ugagguuuauggagagaaa

SEQ ID NO: 1057811 - RNA, 19 nt, Homo sapiens
  misc_RNA (1)...(19): siRNA sense strand
gaggaucucagcccugcua

SEQ ID NO: 1057812 - RNA, 19 nt, Homo sapiens
  misc_RNA (1)...(19): siRNA sense strand
caagagguccuagaacuca

SEQ ID NO: 1057813 - RNA, 19 nt, Homo sapiens
  misc_RNA (1)...(19): siRNA sense strand
gcucugagaaguccaauac

SEQ ID NO: 1057814 - RNA, 19 nt, Homo sapiens
  misc_RNA (1)...(19): siRNA sense strand
ucagagaaggguuccauga

SEQ ID NO: 1057815 - RNA, 19 nt, Homo sapiens
  misc_RNA (1)...(19): siRNA sense strand
ccagcuagccuucauugug

SEQ ID NO: 1057816 - RNA, 19 nt, Homo sapiens
  misc_RNA (1)...(19): siRNA sense strand
cagagaaggguuccaugaa

SEQ ID NO: 1057817 - RNA, 19 nt, Homo sapiens
  misc_RNA (1)...(19): siRNA sense strand
gaucuuucuucauuucucu

SEQ ID NO: 1057818 - RNA, 19 nt, Homo sapiens
  misc_RNA (1)...(19): siRNA sense strand
caaagggcgucgcgaaucc

SEQ ID NO: 1057819 - RNA, 19 nt, Homo sapiens
  misc_RNA (1)...(19): siRNA sense strand
ucccuuaaccaaugcaaua

SEQ ID NO: 1057820 - RNA, 19 nt, Homo sapiens
  misc_RNA (1)...(19): siRNA sense strand
gaaccucaugcugcaagua

SEQ ID NO: 1057821 - RNA, 19 nt, Homo sapiens
  misc_RNA (1)...(19): siRNA sense strand
agaacucugugauggcauu

SEQ ID NO: 1057822 - RNA, 19 nt, Homo sapiens
  misc_RNA (1)...(19): siRNA sense strand
ccagcuuuauccagcauga

SEQ ID NO: 1057823 - RNA, 19 nt, Homo sapiens
  misc_RNA (1)...(19): siRNA sense strand
gaacucugugauggcauua

SEQ ID NO: 1057824 - RNA, 19 nt, Homo sapiens
  misc_RNA (1)...(19): siRNA sense strand
gauucacccuggacagaca

SEQ ID NO: 1057825 - RNA, 19 nt, Homo sapiens
  misc_RNA (1)...(19): siRNA sense strand
cuuaaccaaugcaauaauc

SEQ ID NO: 1057826 - RNA, 19 nt, Homo sapiens
  misc_RNA (1)...(19): siRNA sense strand
acaccaaugccuaucauau

SEQ ID NO: 1057827 - RNA, 19 nt, Homo sapiens
  misc_RNA (1)...(19): siRNA sense strand
ggucagcaccagcuuuauc

SEQ ID NO: 1057828 - RNA, 19 nt, Homo sapiens
  misc_RNA (1)...(19): siRNA sense strand
caaugccuaucauauuugg

SEQ ID NO: 1057829 - RNA, 19 nt, Homo sapiens
  misc_RNA (1)...(19): siRNA sense strand
ugauuucauuccuaacuuc

SEQ ID NO: 1057830 - RNA, 19 nt, Homo sapiens
  misc_RNA (1)...(19): siRNA sense strand
caccacggcacucaccaua

SEQ ID NO: 1057831 - RNA, 19 nt, Homo sapiens
  misc_RNA (1)...(19): siRNA sense strand
gagagaaaucccuuaacca

SEQ ID NO: 1057832 - RNA, 19 nt, Homo sapiens
  misc_RNA (1)...(19): siRNA sense strand
ccaaugccuaucauauuug

SEQ ID NO: 1057833 - RNA, 19 nt, Homo sapiens
  misc_RNA (1)...(19): siRNA sense strand
caaaggagacaagcauugg

SEQ ID NO: 1057834 - RNA, 19 nt, Homo sapiens
  misc_RNA (1)...(19): siRNA sense strand
cgaaucccuucucaguuca

SEQ ID NO: 1057835 - RNA, 19 nt, Homo sapiens
  misc_RNA (1)...(19): siRNA sense strand
uccaagagguccuagaacu

SEQ ID NO: 1057836 - RNA, 19 nt, Homo sapiens
  misc_RNA (1)...(19): siRNA sense strand
ugaagucguggaagaguau

SEQ ID NO: 1057837 - RNA, 19 nt, Homo sapiens
  misc_RNA (1)...(19): siRNA sense strand
ugaaaggugccauccagau

SEQ ID NO: 1057838 - RNA, 19 nt, Homo sapiens
  misc_RNA (1)...(19): siRNA sense strand
uauagccaccuguucacua

SEQ ID NO: 1057839 - RNA, 19 nt, Homo sapiens
  misc_RNA (1)...(19): siRNA sense strand
ccuuggagcuccugcugau

SEQ ID NO: 1057840 - RNA, 19 nt, Homo sapiens
  misc_RNA (1)...(19): siRNA sense strand
ccauccagauuccaacagu

SEQ ID NO: 1057841 - RNA, 19 nt, Homo sapiens
  misc_RNA (1)...(19): siRNA sense strand
agcaugaagucguggaaga

SEQ ID NO: 1057842 - RNA, 19 nt, Homo sapiens
  misc_RNA (1)...(19): siRNA sense strand
aaaggugccauccagauuc

SEQ ID NO: 1057843 - RNA, 19 nt, Homo sapiens
  misc_RNA (1)...(19): siRNA sense strand
agacaccaaugccuaucau

SEQ ID NO: 1057844 - RNA, 19 nt, Homo sapiens
  misc_RNA (1)...(19): siRNA sense strand
gaagcccaucgccuugauu

SEQ ID NO: 1057845 - RNA, 19 nt, Homo sapiens
  misc_RNA (1)...(19): siRNA sense strand
gaucucagcccugcuacag

SEQ ID NO: 1057846 - RNA, 19 nt, Homo sapiens
  misc_RNA (1)...(19): siRNA sense strand
ggcacucaccauauucaaa

SEQ ID NO: 1057847 - RNA, 19 nt, Homo sapiens
  misc_RNA (1)...(19): siRNA sense strand
gacaccaaugccuaucaua

SEQ ID NO: 1057848 - RNA, 19 nt, Homo sapiens
  misc_RNA (1)...(19): siRNA sense strand
augaagucguggaagagua

SEQ ID NO: 1057849 - RNA, 19 nt, Homo sapiens
  misc_RNA (1)...(19): siRNA sense strand
uggcugaguucggaaaaua

SEQ ID NO: 1057850 - RNA, 19 nt, Homo sapiens
  misc_RNA (1)...(19): siRNA sense strand
cuagaacucacgaagaaca

SEQ ID NO: 1057851 - RNA, 19 nt, Homo sapiens
  misc_RNA (1)...(19): siRNA sense strand
cuucucaguucagcaaaga

SEQ ID NO: 1057852 - RNA, 19 nt, Homo sapiens
  misc_RNA (1)...(19): siRNA sense strand
ucaaagggcgucgcgaauc

SEQ ID NO: 1057853 - RNA, 19 nt, Homo sapiens
  misc_RNA (1)...(19): siRNA sense strand
gaagucguggaagaguaua

SEQ ID NO: 1057854 - RNA, 19 nt, Homo sapiens
  misc_RNA (1)...(19): siRNA sense strand
ugagaaguccaauacuaca

SEQ ID NO: 1057855 - RNA, 19 nt, Homo sapiens
  misc_RNA (1)...(19): siRNA sense strand
caacuggcaaaugagguuu

SEQ ID NO: 1057856 - RNA, 19 nt, Homo sapiens
  misc_RNA (1)...(19): siRNA sense strand
gacgacaagaacucuguga

SEQ ID NO: 1057857 - RNA, 19 nt, Homo sapiens
  misc_RNA (1)...(19): siRNA sense strand
uggcaaaugagguuuaugg

SEQ ID NO: 1057858 - RNA, 19 nt, Homo sapiens
  misc_RNA (1)...(19): siRNA sense strand
cgucgcgaaucccuucuca

SEQ ID NO: 1057859 - RNA, 19 nt, Homo sapiens
  misc_RNA (1)...(19): siRNA sense strand
aaccucaugcugcaaguaa

SEQ ID NO: 1057860 - RNA, 19 nt, Homo sapiens
  misc_RNA (1)...(19): siRNA sense strand
ggacaggggcucagaggau

SEQ ID NO: 1057861 - RNA, 19 nt, Homo sapiens
  misc_RNA (1)...(19): siRNA sense strand
ccaagagguccuagaacuc

SEQ ID NO: 1057862 - RNA, 19 nt, Homo sapiens
  misc_RNA (1)...(19): siRNA sense strand
ucgcgaaucccuucucagu

SEQ ID NO: 1057863 - RNA, 19 nt, Homo sapiens
  misc_RNA (1)...(19): siRNA sense strand
gaaagaggaugcccuggua

SEQ ID NO: 1057864 - RNA, 19 nt, Homo sapiens
  misc_RNA (1)...(19): siRNA sense strand
gcagaaaggcgucaaagug

SEQ ID NO: 1057865 - RNA, 19 nt, Homo sapiens
  misc_RNA (1)...(19): siRNA sense strand
gagagaagcgacuacuaua

SEQ ID NO: 1057866 - RNA, 19 nt, Homo sapiens
  misc_RNA (1)...(19): siRNA sense strand
cagcugaaaugccuucuga

SEQ ID NO: 1057867 - RNA, 19 nt, Homo sapiens
  misc_RNA (1)...(19): siRNA sense strand
gcaagaaggagaugauuca

SEQ ID NO: 1057868 - RNA, 19 nt, Homo sapiens
  misc_RNA (1)...(19): siRNA sense strand
gagaagcgacuacuauaau

SEQ ID NO: 1057869 - RNA, 19 nt, Homo sapiens
  misc_RNA (1)...(19): siRNA sense strand
ugucggaacuggagagaaa

SEQ ID NO: 1057870 - RNA, 19 nt, Homo sapiens
  misc_RNA (1)...(19): siRNA sense strand
auaaucagcugaagcagaa

SEQ ID NO: 1057871 - RNA, 19 nt, Homo sapiens
  misc_RNA (1)...(19): siRNA sense strand
ccaacgagaucucugacaa

SEQ ID NO: 1057872 - RNA, 19 nt, Homo sapiens
  misc_RNA (1)...(19): siRNA sense strand
gaagaaagacgaggagauc

SEQ ID NO: 1057873 - RNA, 19 nt, Homo sapiens
  misc_RNA (1)...(19): siRNA sense strand
gauaagaaacaccaagaga

SEQ ID NO: 1057874 - RNA, 19 nt, Homo sapiens
  misc_RNA (1)...(19): siRNA sense strand
caggagugauugcgucuuu

SEQ ID NO: 1057875 - RNA, 19 nt, Homo sapiens
  misc_RNA (1)...(19): siRNA sense strand
cucgagagguuaaggaaua

SEQ ID NO: 1057876 - RNA, 19 nt, Homo sapiens
  misc_RNA (1)...(19): siRNA sense strand
agauacagguucagaagaa

SEQ ID NO: 1057877 - RNA, 19 nt, Homo sapiens
  misc_RNA (1)...(19): siRNA sense strand
gcugaaaugccuucugaaa

SEQ ID NO: 1057878 - RNA, 19 nt, Homo sapiens
  misc_RNA (1)...(19): siRNA sense strand
uaagaaacaccaagagaug

SEQ ID NO: 1057879 - RNA, 19 nt, Homo sapiens
  misc_RNA (1)...(19): siRNA sense strand
cgaaagaucaauacggaaa

SEQ ID NO: 1057880 - RNA, 19 nt, Homo sapiens
  misc_RNA (1)...(19): siRNA sense strand
gaauggaaaccgcaccaaa

SEQ ID NO: 1057881 - RNA, 19 nt, Homo sapiens
  misc_RNA (1)...(19): siRNA sense strand
ugucugagcuggagauaca

SEQ ID NO: 1057882 - RNA, 19 nt, Homo sapiens
  misc_RNA (1)...(19): siRNA sense strand
gaagcccugcagagaauua

SEQ ID NO: 1057883 - RNA, 19 nt, Homo sapiens
  misc_RNA (1)...(19): siRNA sense strand
gauacagguucagaagaaa

SEQ ID NO: 1057884 - RNA, 19 nt, Homo sapiens
  misc_RNA (1)...(19): siRNA sense strand
gauugcgucuuuacaacaa

SEQ ID NO: 1057885 - RNA, 19 nt, Homo sapiens
  misc_RNA (1)...(19): siRNA sense strand
ugaagacgcagcugaaaug

SEQ ID NO: 1057886 - RNA, 19 nt, Homo sapiens
  misc_RNA (1)...(19): siRNA sense strand
gaagcgaggaggaggaaga

SEQ ID NO: 1057887 - RNA, 19 nt, Homo sapiens
  misc_RNA (1)...(19): siRNA sense strand
guaagagcaucugcgaguu

SEQ ID NO: 1057888 - RNA, 19 nt, Homo sapiens
  misc_RNA (1)...(19): siRNA sense strand
gaucauccaggccaccuuu

SEQ ID NO: 1057889 - RNA, 19 nt, Homo sapiens
  misc_RNA (1)...(19): siRNA sense strand
gcagcucagucgcaucuca

SEQ ID NO: 1057890 - RNA, 19 nt, Homo sapiens
  misc_RNA (1)...(19): siRNA sense strand
gaagcgacuacuauaauca

SEQ ID NO: 1057891 - RNA, 19 nt, Homo sapiens
  misc_RNA (1)...(19): siRNA sense strand
ggagauacagguucagaag

SEQ ID NO: 1057892 - RNA, 19 nt, Homo sapiens
  misc_RNA (1)...(19): siRNA sense strand
gaaacccagcugcgaaaga

SEQ ID NO: 1057893 - RNA, 19 nt, Homo sapiens
  misc_RNA (1)...(19): siRNA sense strand
uggcccagcuggaggagua

SEQ ID NO: 1057894 - RNA, 19 nt, Homo sapiens
  misc_RNA (1)...(19): siRNA sense strand
uggaagcccugcagagaau

SEQ ID NO: 1057895 - RNA, 19 nt, Homo sapiens
  misc_RNA (1)...(19): siRNA sense strand
cgagaucucugacaaugac

SEQ ID NO: 1057896 - RNA, 19 nt, Homo sapiens
  misc_RNA (1)...(19): siRNA sense strand
aaacccagcugcgaaagau

SEQ ID NO: 1057897 - RNA, 19 nt, Homo sapiens
  misc_RNA (1)...(19): siRNA sense strand
gcaaaggccaagagacauc

SEQ ID NO: 1057898 - RNA, 19 nt, Homo sapiens
  misc_RNA (1)...(19): siRNA sense strand
ucauucagguccacauuca

SEQ ID NO: 1057899 - RNA, 19 nt, Homo sapiens
  misc_RNA (1)...(19): siRNA sense strand
agagaagcgacuacuauaa

SEQ ID NO: 1057900 - RNA, 19 nt, Homo sapiens
  misc_RNA (1)...(19): siRNA sense strand
gggacugugucaucucaga

SEQ ID NO: 1057901 - RNA, 19 nt, Homo sapiens
  misc_RNA (1)...(19): siRNA sense strand
agagagaagcgacuacuau

SEQ ID NO: 1057902 - RNA, 19 nt, Homo sapiens
  misc_RNA (1)...(19): siRNA sense strand
gaagcagaaaggcgucaaa

SEQ ID NO: 1057903 - RNA, 19 nt, Homo sapiens
  misc_RNA (1)...(19): siRNA sense strand
gcaucugcgaguucgauua

SEQ ID NO: 1057904 - RNA, 19 nt, Homo sapiens
  misc_RNA (1)...(19): siRNA sense strand
agaagcgacuacuauaauc

SEQ ID NO: 1057905 - RNA, 19 nt, Homo sapiens
  misc_RNA (1)...(19): siRNA sense strand
ggagaaaaucccagacuuu

SEQ ID NO: 1057906 - RNA, 19 nt, Homo sapiens
  misc_RNA (1)...(19): siRNA sense strand
gagauacagguucagaaga

SEQ ID NO: 1057907 - RNA, 19 nt, Homo sapiens
  misc_RNA (1)...(19): siRNA sense strand
gcgggacugugucaucuca

SEQ ID NO: 1057908 - RNA, 19 nt, Homo sapiens
  misc_RNA (1)...(19): siRNA sense strand
gagaggcacaguucgaugu

SEQ ID NO: 1057909 - RNA, 19 nt, Homo sapiens
  misc_RNA (1)...(19): siRNA sense strand
gaaaggcaaaggccaagag

SEQ ID NO: 1057910 - RNA, 19 nt, Homo sapiens
  misc_RNA (1)...(19): siRNA sense strand
ccggagagauugacaacag

SEQ ID NO: 1057911 - RNA, 19 nt, Homo sapiens
  misc_RNA (1)...(19): siRNA sense strand
gagcaagaaggagaugauu

SEQ ID NO: 1057912 - RNA, 19 nt, Homo sapiens
  misc_RNA (1)...(19): siRNA sense strand
cagcugcgaaagaucaaua

SEQ ID NO: 1057913 - RNA, 19 nt, Homo sapiens
  misc_RNA (1)...(19): siRNA sense strand
ccacugaggccgauuuguc

SEQ ID NO: 1057914 - RNA, 19 nt, Homo sapiens
  misc_RNA (1)...(19): siRNA sense strand
cgauuuguccggagagauu

SEQ ID NO: 1057915 - RNA, 19 nt, Homo sapiens
  misc_RNA (1)...(19): siRNA sense strand
cuccuucccuucaguaaga

SEQ ID NO: 1057916 - RNA, 19 nt, Homo sapiens
  misc_RNA (1)...(19): siRNA sense strand
caacgagaucucugacaau

SEQ ID NO: 1057917 - RNA, 19 nt, Homo sapiens
  misc_RNA (1)...(19): siRNA sense strand
gcaacaaagcucacuuggu

SEQ ID NO: 1057918 - RNA, 19 nt, Homo sapiens
  misc_RNA (1)...(19): siRNA sense strand
gagagguuaaggaauaaga

SEQ ID NO: 1057919 - RNA, 19 nt, Homo sapiens
  misc_RNA (1)...(19): siRNA sense strand
ucaccaagcgggacugugu

SEQ ID NO: 1057920 - RNA, 19 nt, Homo sapiens
  misc_RNA (1)...(19): siRNA sense strand
aacgagaucucugacaaug

SEQ ID NO: 1057921 - RNA, 19 nt, Homo sapiens
  misc_RNA (1)...(19): siRNA sense strand
ucgagagguuaaggaauaa

SEQ ID NO: 1057922 - RNA, 19 nt, Homo sapiens
  misc_RNA (1)...(19): siRNA sense strand
gaccagauacucccuugca

SEQ ID NO: 1057923 - RNA, 19 nt, Homo sapiens
  misc_RNA (1)...(19): siRNA sense strand
augagacgcugcagaagga

SEQ ID NO: 1057924 - RNA, 19 nt, Homo sapiens
  misc_RNA (1)...(19): siRNA sense strand
uacaacaacaaguggauuu

SEQ ID NO: 1057925 - RNA, 19 nt, Homo sapiens
  misc_RNA (1)...(19): siRNA sense strand
uacaagccaugaccgacaa

SEQ ID NO: 1057926 - RNA, 19 nt, Homo sapiens
  misc_RNA (1)...(19): siRNA sense strand
ugauggggcucauugaaaa

SEQ ID NO: 1057927 - RNA, 19 nt, Homo sapiens
  misc_RNA (1)...(19): siRNA sense strand
gagaaaaucccagacuuug

SEQ ID NO: 1057928 - RNA, 19 nt, Homo sapiens
  misc_RNA (1)...(19): siRNA sense strand
gaaacaccaagagaugaug

SEQ ID NO: 1057929 - RNA, 19 nt, Homo sapiens
  misc_RNA (1)...(19): siRNA sense strand
cagauacucccuugcaaca

SEQ ID NO: 1057930 - RNA, 19 nt, Homo sapiens
  misc_RNA (1)...(19): siRNA sense strand
uaagagcaucugcgaguuc

SEQ ID NO: 1057931 - RNA, 19 nt, Homo sapiens
  misc_RNA (1)...(19): siRNA sense strand
cagagagaagcgacuacua

SEQ ID NO: 1057932 - RNA, 19 nt, Homo sapiens
  misc_RNA (1)...(19): siRNA sense strand
ugacaaugacauccuggaa

SEQ ID NO: 1057933 - RNA, 19 nt, Homo sapiens
  misc_RNA (1)...(19): siRNA sense strand
aguccaggcucgagagguu

SEQ ID NO: 1057934 - RNA, 19 nt, Homo sapiens
  misc_RNA (1)...(19): siRNA sense strand
ccuccgagaagauaagaaa

SEQ ID NO: 1057935 - RNA, 19 nt, Homo sapiens
  misc_RNA (1)...(19): siRNA sense strand
cagagcugccugagaaaga

SEQ ID NO: 1057936 - RNA, 19 nt, Homo sapiens
  misc_RNA (1)...(19): siRNA sense strand
guaccuccuucccuucagu

SEQ ID NO: 1057937 - RNA, 19 nt, Homo sapiens
  misc_RNA (1)...(19): siRNA sense strand
guuaaggaauaagaucauc

SEQ ID NO: 1057938 - RNA, 19 nt, Homo sapiens
  misc_RNA (1)...(19): siRNA sense strand
gugauugcgucuuuacaac

SEQ ID NO: 1057939 - RNA, 19 nt, Homo sapiens
  misc_RNA (1)...(19): siRNA sense strand
gaggagauccccaggagaa

SEQ ID NO: 1057940 - RNA, 19 nt, Homo sapiens
  misc_RNA (1)...(19): siRNA sense strand
gaaaaucccagacuuugag

SEQ ID NO: 1057941 - RNA, 19 nt, Homo sapiens
  misc_RNA (1)...(19): siRNA sense strand
ggagugauugcgucuuuac

SEQ ID NO: 1057942 - RNA, 19 nt, Homo sapiens
  misc_RNA (1)...(19): siRNA sense strand
ucugcgaguucgauuacuu

SEQ ID NO: 1057943 - RNA, 19 nt, Homo sapiens
  misc_RNA (1)...(19): siRNA sense strand
gagguuaaggaauaagauc

SEQ ID NO: 1057944 - RNA, 19 nt, Homo sapiens
  misc_RNA (1)...(19): siRNA sense strand
aaaaugagacgcugcagaa

SEQ ID NO: 1057945 - RNA, 19 nt, Homo sapiens
  misc_RNA (1)...(19): siRNA sense strand
gaaagaucaauacggaaaa

SEQ ID NO: 1057946 - RNA, 19 nt, Homo sapiens
  misc_RNA (1)...(19): siRNA sense strand
aagaaacccagcugcgaaa

SEQ ID NO: 1057947 - RNA, 19 nt, Homo sapiens
  misc_RNA (1)...(19): siRNA sense strand
gcaccagggccacauccau

SEQ ID NO: 1057948 - RNA, 19 nt, Homo sapiens
  misc_RNA (1)...(19): siRNA sense strand
ggaggaggaagaggaggaa

SEQ ID NO: 1057949 - RNA, 19 nt, Homo sapiens
  misc_RNA (1)...(19): siRNA sense strand
gaaggaucacugccugucu

SEQ ID NO: 1057950 - RNA, 19 nt, Homo sapiens
  misc_RNA (1)...(19): siRNA sense strand
ccugguaccucucagucau

SEQ ID NO: 1057951 - RNA, 19 nt, Homo sapiens
  misc_RNA (1)...(19): siRNA sense strand
gaaggggaccuccaaguag

SEQ ID NO: 1057952 - RNA, 19 nt, Homo sapiens
  misc_RNA (1)...(19): siRNA sense strand
cgucugagaggcacaguuc

SEQ ID NO: 1057953 - RNA, 19 nt, Homo sapiens
  misc_RNA (1)...(19): siRNA sense strand
caggccaccuuuagcaucu

SEQ ID NO: 1057954 - RNA, 19 nt, Homo sapiens
  misc_RNA (1)...(19): siRNA sense strand
auaagaaacaccaagagau

SEQ ID NO: 1057955 - RNA, 19 nt, Homo sapiens
  misc_RNA (1)...(19): siRNA sense strand
aagauaagaaacaccaaga

SEQ ID NO: 1057956 - RNA, 19 nt, Homo sapiens
  misc_RNA (1)...(19): siRNA sense strand
gaccaucagccgcuacuac

SEQ ID NO: 1057957 - RNA, 19 nt, Homo sapiens
  misc_RNA (1)...(19): siRNA sense strand
gagcaucugcgaguucgau

SEQ ID NO: 1057958 - RNA, 19 nt, Homo sapiens
  misc_RNA (1)...(19): siRNA sense strand
caagcgggacugugucauc

SEQ ID NO: 1057959 - RNA, 19 nt, Homo sapiens
  misc_RNA (1)...(19): siRNA sense strand
aagaaacaccaagagauga

SEQ ID NO: 1057960 - RNA, 19 nt, Homo sapiens
  misc_RNA (1)...(19): siRNA sense strand
acaaagcucacuuggucuu

SEQ ID NO: 1057961 - RNA, 19 nt, Homo sapiens
  misc_RNA (1)...(19): siRNA sense strand
aggcaaaggccaagagaca

SEQ ID NO: 1057962 - RNA, 19 nt, Homo sapiens
  misc_RNA (1)...(19): siRNA sense strand
aggagugauugcgucuuua

SEQ ID NO: 1057963 - RNA, 19 nt, Homo sapiens
  misc_RNA (1)...(19): siRNA sense strand
gcgaaucucucucaucuga

SEQ ID NO: 1057964 - RNA, 19 nt, Homo sapiens
  misc_RNA (1)...(19): siRNA sense strand
ggacaagcccuacaagugu

SEQ ID NO: 1057965 - RNA, 19 nt, Homo sapiens
  misc_RNA (1)...(19): siRNA sense strand
gaguagaaguucaccaagu

SEQ ID NO: 1057966 - RNA, 19 nt, Homo sapiens
  misc_RNA (1)...(19): siRNA sense strand
ccaaggagggcaagacgua

SEQ ID NO: 1057967 - RNA, 19 nt, Homo sapiens
  misc_RNA (1)...(19): siRNA sense strand
ggaaaggacacucuaggau

SEQ ID NO: 1057968 - RNA, 19 nt, Homo sapiens
  misc_RNA (1)...(19): siRNA sense strand
gugcgaaucucucucaucu

SEQ ID NO: 1057969 - RNA, 19 nt, Homo sapiens
  misc_RNA (1)...(19): siRNA sense strand
ugaagcacauguccaaaca

SEQ ID NO: 1057970 - RNA, 19 nt, Homo sapiens
  misc_RNA (1)...(19): siRNA sense strand
gcgagaaggcuuucacuca

SEQ ID NO: 1057971 - RNA, 19 nt, Homo sapiens
  misc_RNA (1)...(19): siRNA sense strand
uguaagguaugcccacuga

SEQ ID NO: 1057972 - RNA, 19 nt, Homo sapiens
  misc_RNA (1)...(19): siRNA sense strand
ucggagaccuaccugauga

SEQ ID NO: 1057973 - RNA, 19 nt, Homo sapiens
  misc_RNA (1)...(19): siRNA sense strand
agaccuaccugaugaagca

SEQ ID NO: 1057974 - RNA, 19 nt, Homo sapiens
  misc_RNA (1)...(19): siRNA sense strand
gcacugcuccaaguccuuu

SEQ ID NO: 1057975 - RNA, 19 nt, Homo sapiens
  misc_RNA (1)...(19): siRNA sense strand
ugugagcacuucugaguca

SEQ ID NO: 1057976 - RNA, 19 nt, Homo sapiens
  misc_RNA (1)...(19): siRNA sense strand
ucacucagcucuccaaccu

SEQ ID NO: 1057977 - RNA, 19 nt, Homo sapiens
  misc_RNA (1)...(19): siRNA sense strand
gggaaaggacacucuagga

SEQ ID NO: 1057978 - RNA, 19 nt, Homo sapiens
  misc_RNA (1)...(19): siRNA sense strand
acaagugucccaacugcua

SEQ ID NO: 1057979 - RNA, 19 nt, Homo sapiens
  misc_RNA (1)...(19): siRNA sense strand
ucuccaaccuccagucuca

SEQ ID NO: 1057980 - RNA, 19 nt, Homo sapiens
  misc_RNA (1)...(19): siRNA sense strand
aguagaaguucaccaagug

SEQ ID NO: 1057981 - RNA, 19 nt, Homo sapiens
  misc_RNA (1)...(19): siRNA sense strand
aagcacauguccaaacaca

SEQ ID NO: 1057982 - RNA, 19 nt, Homo sapiens
  misc_RNA (1)...(19): siRNA sense strand
agucagagaugcagaucca

SEQ ID NO: 1057983 - RNA, 19 nt, Homo sapiens
  misc_RNA (1)...(19): siRNA sense strand
ugaugaagcacauguccaa

SEQ ID NO: 1057984 - RNA, 19 nt, Homo sapiens
  misc_RNA (1)...(19): siRNA sense strand
gcgacagacccuacaagug

SEQ ID NO: 1057985 - RNA, 19 nt, Homo sapiens
  misc_RNA (1)...(19): siRNA sense strand
agaugcagauccacuccaa

SEQ ID NO: 1057986 - RNA, 19 nt, Homo sapiens
  misc_RNA (1)...(19): siRNA sense strand
ccacugcuccuacugugau

SEQ ID NO: 1057987 - RNA, 19 nt, Homo sapiens
  misc_RNA (1)...(19): siRNA sense strand
ggguccgccuguccuugua

SEQ ID NO: 1057988 - RNA, 19 nt, Homo sapiens
  misc_RNA (1)...(19): siRNA sense strand
gcugauggccgagaagauc

SEQ ID NO: 1057989 - RNA, 19 nt, Homo sapiens
  misc_RNA (1)...(19): siRNA sense strand
ucaugucgcugcccaagcu

SEQ ID NO: 1057990 - RNA, 19 nt, Homo sapiens
  misc_RNA (1)...(19): siRNA sense strand
gguaugcccacugaccuuu

SEQ ID NO: 1057991 - RNA, 19 nt, Homo sapiens
  misc_RNA (1)...(19): siRNA sense strand
acaaggacaagcccuacaa

SEQ ID NO: 1057992 - RNA, 19 nt, Homo sapiens
  misc_RNA (1)...(19): siRNA sense strand
aggacaagcccuacaagug

SEQ ID NO: 1057993 - RNA, 19 nt, Homo sapiens
  misc_RNA (1)...(19): siRNA sense strand
gaugaagcacauguccaaa

SEQ ID NO: 1057994 - RNA, 19 nt, Homo sapiens
  misc_RNA (1)...(19): siRNA sense strand
gcacaccagaauccacaca

SEQ ID NO: 1057995 - RNA, 19 nt, Homo sapiens
  misc_RNA (1)...(19): siRNA sense strand
gacaacaucuacaucagua

SEQ ID NO: 1057996 - RNA, 19 nt, Homo sapiens
  misc_RNA (1)...(19): siRNA sense strand
ccgcaaagcugaggagaaa

SEQ ID NO: 1057997 - RNA, 19 nt, Homo sapiens
  misc_RNA (1)...(19): siRNA sense strand
ucaaggaccugcugaguag

SEQ ID NO: 1057998 - RNA, 19 nt, Homo sapiens
  misc_RNA (1)...(19): siRNA sense strand
cgacacagaagauguauga

SEQ ID NO: 1057999 - RNA, 19 nt, Homo sapiens
  misc_RNA (1)...(19): siRNA sense strand
ggaagaagcugggcaaacg

SEQ ID NO: 1058000 - RNA, 19 nt, Homo sapiens
  misc_RNA (1)...(19): siRNA sense strand
gaagauguaugagcugaag

SEQ ID NO: 1058001 - RNA, 19 nt, Homo sapiens
  misc_RNA (1)...(19): siRNA sense strand
gaacaccuccucagagaca

SEQ ID NO: 1058002 - RNA, 19 nt, Homo sapiens
  misc_RNA (1)...(19): siRNA sense strand
uguaugagcugaagaccaa

SEQ ID NO: 1058003 - RNA, 19 nt, Homo sapiens
  misc_RNA (1)...(19): siRNA sense strand
gaacaucuccgccacuuuu

SEQ ID NO: 1058004 - RNA, 19 nt, Homo sapiens
  misc_RNA (1)...(19): siRNA sense strand
gaacaucuacgaagaacag

SEQ ID NO: 1058005 - RNA, 19 nt, Homo sapiens
  misc_RNA (1)...(19): siRNA sense strand
gaagaacagaagauuaugu

SEQ ID NO: 1058006 - RNA, 19 nt, Homo sapiens
  misc_RNA (1)...(19): siRNA sense strand
ccaugaacaucuacgaaga

SEQ ID NO: 1058007 - RNA, 19 nt, Homo sapiens
  misc_RNA (1)...(19): siRNA sense strand
ccaaggugauggagguuug

SEQ ID NO: 1058008 - RNA, 19 nt, Homo sapiens
  misc_RNA (1)...(19): siRNA sense strand
gucauaaacuggaggugaa

SEQ ID NO: 1058009 - RNA, 19 nt, Homo sapiens
  misc_RNA (1)...(19): siRNA sense strand
auacucagcugccgucguu

SEQ ID NO: 1058010 - RNA, 19 nt, Homo sapiens
  misc_RNA (1)...(19): siRNA sense strand
gacacaaucucaacaacgu

SEQ ID NO: 1058011 - RNA, 19 nt, Homo sapiens
  misc_RNA (1)...(19): siRNA sense strand
cagcugccgucguugguuu

SEQ ID NO: 1058012 - RNA, 19 nt, Homo sapiens
  misc_RNA (1)...(19): siRNA sense strand
ccaagaugcugggcaagga

SEQ ID NO: 1058013 - RNA, 19 nt, Homo sapiens
  misc_RNA (1)...(19): siRNA sense strand
ggacagcuauaaccaugac

SEQ ID NO: 1058014 - RNA, 19 nt, Homo sapiens
  misc_RNA (1)...(19): siRNA sense strand
caucgcagccuucuacuuc

SEQ ID NO: 1058015 - RNA, 19 nt, Homo sapiens
  misc_RNA (1)...(19): siRNA sense strand
gagcagccuucaccaaacu

SEQ ID NO: 1058016 - RNA, 19 nt, Homo sapiens
  misc_RNA (1)...(19): siRNA sense strand
ggccauaggucucuuucag

SEQ ID NO: 1058017 - RNA, 19 nt, Homo sapiens
  misc_RNA (1)...(19): siRNA sense strand
ggagaaaaccgucaucuuc

SEQ ID NO: 1058018 - RNA, 19 nt, Homo sapiens
  misc_RNA (1)...(19): siRNA sense strand
caaggaaggcaggcucuuu

SEQ ID NO: 1058019 - RNA, 19 nt, Homo sapiens
  misc_RNA (1)...(19): siRNA sense strand
gauggaaucaaacaacaug

SEQ ID NO: 1058020 - RNA, 19 nt, Homo sapiens
  misc_RNA (1)...(19): siRNA sense strand
gacauuaaacaucaucaga

SEQ ID NO: 1058021 - RNA, 19 nt, Homo sapiens
  misc_RNA (1)...(19): siRNA sense strand
caagagggcaaagaagaaa

SEQ ID NO: 1058022 - RNA, 19 nt, Homo sapiens
  misc_RNA (1)...(19): siRNA sense strand
gagcagagacucggaacau

SEQ ID NO: 1058023 - RNA, 19 nt, Homo sapiens
  misc_RNA (1)...(19): siRNA sense strand
caagcugcguugcuccuau

SEQ ID NO: 1058024 - RNA, 19 nt, Homo sapiens
  misc_RNA (1)...(19): siRNA sense strand
cauccaggccucagaaaug

SEQ ID NO: 1058025 - RNA, 19 nt, Homo sapiens
  misc_RNA (1)...(19): siRNA sense strand
gcacaagagggcaaagaag

SEQ ID NO: 1058026 - RNA, 19 nt, Homo sapiens
  misc_RNA (1)...(19): siRNA sense strand
gaagaagcggauccuguuc

SEQ ID NO: 1058027 - RNA, 19 nt, Homo sapiens
  misc_RNA (1)...(19): siRNA sense strand
agaagaagcggauccuguu

SEQ ID NO: 1058028 - RNA, 19 nt, Homo sapiens
  misc_RNA (1)...(19): siRNA sense strand
cagagacagugauggaauc

SEQ ID NO: 1058029 - RNA, 19 nt, Homo sapiens
  misc_RNA (1)...(19): siRNA sense strand
gcagagacucggaacaucu

SEQ ID NO: 1058030 - RNA, 19 nt, Homo sapiens
  misc_RNA (1)...(19): siRNA sense strand
acgaagaacagaagauuau

SEQ ID NO: 1058031 - RNA, 19 nt, Homo sapiens
  misc_RNA (1)...(19): siRNA sense strand
ggucaucgcagccuucuac

SEQ ID NO: 1058032 - RNA, 19 nt, Homo sapiens
  misc_RNA (1)...(19): siRNA sense strand
cacaagagggcaaagaaga

SEQ ID NO: 1058033 - RNA, 19 nt, Homo sapiens
  misc_RNA (1)...(19): siRNA sense strand
gagguuuggugccgcaauc

SEQ ID NO: 1058034 - RNA, 19 nt, Homo sapiens
  misc_RNA (1)...(19): siRNA sense strand
ccguggagcugcagaucaa

SEQ ID NO: 1058035 - RNA, 19 nt, Homo sapiens
  misc_RNA (1)...(19): siRNA sense strand
uuaaacaucaucagaaugg

SEQ ID NO: 1058036 - RNA, 19 nt, Homo sapiens
  misc_RNA (1)...(19): siRNA sense strand
aagagcagccuucaccaaa

SEQ ID NO: 1058037 - RNA, 19 nt, Homo sapiens
  misc_RNA (1)...(19): siRNA sense strand
gagcugcaguaccgauugg

SEQ ID NO: 1058038 - RNA, 19 nt, Homo sapiens
  misc_RNA (1)...(19): siRNA sense strand
gaagaaaacagccucauac

SEQ ID NO: 1058039 - RNA, 19 nt, Homo sapiens
  misc_RNA (1)...(19): siRNA sense strand
ucuccuacauggacagcua

SEQ ID NO: 1058040 - RNA, 19 nt, Homo sapiens
  misc_RNA (1)...(19): siRNA sense strand
cuacgaagaacagaagauu

SEQ ID NO: 1058041 - RNA, 19 nt, Homo sapiens
  misc_RNA (1)...(19): siRNA sense strand
gguuugaccgcaagcauga

SEQ ID NO: 1058042 - RNA, 19 nt, Homo sapiens
  misc_RNA (1)...(19): siRNA sense strand
uacgaagaacagaagauua

SEQ ID NO: 1058043 - RNA, 19 nt, Homo sapiens
  misc_RNA (1)...(19): siRNA sense strand
ccgauuggccuguuagugu

SEQ ID NO: 1058044 - RNA, 19 nt, Homo sapiens
  misc_RNA (1)...(19): siRNA sense strand
acaagagggcaaagaagaa

SEQ ID NO: 1058045 - RNA, 19 nt, Homo sapiens
  misc_RNA (1)...(19): siRNA sense strand
caugaacaucuacgaagaa

SEQ ID NO: 1058046 - RNA, 19 nt, Homo sapiens
  misc_RNA (1)...(19): siRNA sense strand
caaguucuucuguggcauu

SEQ ID NO: 1058047 - RNA, 19 nt, Homo sapiens
  misc_RNA (1)...(19): siRNA sense strand
ggaacaucuccgccacuuu

SEQ ID NO: 1058048 - RNA, 19 nt, Homo sapiens
  misc_RNA (1)...(19): siRNA sense strand
uagccaaucugcgacacaa

SEQ ID NO: 1058049 - RNA, 19 nt, Homo sapiens
  misc_RNA (1)...(19): siRNA sense strand
gcuauaaccaugacauucg

SEQ ID NO: 1058050 - RNA, 19 nt, Homo sapiens
  misc_RNA (1)...(19): siRNA sense strand
ggcacaagagggcaaagaa

SEQ ID NO: 1058051 - RNA, 19 nt, Homo sapiens
  misc_RNA (1)...(19): siRNA sense strand
gcugaguagcaaagaauug

SEQ ID NO: 1058052 - RNA, 19 nt, Homo sapiens
  misc_RNA (1)...(19): siRNA sense strand
gagagcugcaguaccgauu

SEQ ID NO: 1058053 - RNA, 19 nt, Homo sapiens
  misc_RNA (1)...(19): siRNA sense strand
gcuacacgccugaggauac

SEQ ID NO: 1058054 - RNA, 19 nt, Homo sapiens
  misc_RNA (1)...(19): siRNA sense strand
ugucgacacagaagaugua

SEQ ID NO: 1058055 - RNA, 19 nt, Homo sapiens
  misc_RNA (1)...(19): siRNA sense strand
ccucagagacagugaugga

SEQ ID NO: 1058056 - RNA, 19 nt, Homo sapiens
  misc_RNA (1)...(19): siRNA sense strand
cagcuauaaccaugacauu

SEQ ID NO: 1058057 - RNA, 19 nt, Homo sapiens
  misc_RNA (1)...(19): siRNA sense strand
caagaugcugggcaaggaa

SEQ ID NO: 1058058 - RNA, 19 nt, Homo sapiens
  misc_RNA (1)...(19): siRNA sense strand
aaagagcagccuucaccaa

SEQ ID NO: 1058059 - RNA, 19 nt, Homo sapiens
  misc_RNA (1)...(19): siRNA sense strand
ggaauuuucagccaauauu

SEQ ID NO: 1058060 - RNA, 19 nt, Homo sapiens
  misc_RNA (1)...(19): siRNA sense strand
gcgacacaaucucaacaac

SEQ ID NO: 1058061 - RNA, 19 nt, Homo sapiens
  misc_RNA (1)...(19): siRNA sense strand
gagcugcagaucaacaaca

SEQ ID NO: 1058062 - RNA, 19 nt, Homo sapiens
  misc_RNA (1)...(19): siRNA sense strand
ucagagacagugauggaau

SEQ ID NO: 1058063 - RNA, 19 nt, Homo sapiens
  misc_RNA (1)...(19): siRNA sense strand
ucaucagaauggcacaaga

SEQ ID NO: 1058064 - RNA, 19 nt, Homo sapiens
  misc_RNA (1)...(19): siRNA sense strand
ugacaacaucuacaucagu

SEQ ID NO: 1058065 - RNA, 19 nt, Homo sapiens
  misc_RNA (1)...(19): siRNA sense strand
ggaaggcaggcucuuuguc

SEQ ID NO: 1058066 - RNA, 19 nt, Homo sapiens
  misc_RNA (1)...(19): siRNA sense strand
gcucucuuccuccgccuuu

SEQ ID NO: 1058067 - RNA, 19 nt, Homo sapiens
  misc_RNA (1)...(19): siRNA sense strand
aagcugcguugcuccuaug

SEQ ID NO: 1058068 - RNA, 19 nt, Homo sapiens
  misc_RNA (1)...(19): siRNA sense strand
auccaggccucagaaauga

SEQ ID NO: 1058069 - RNA, 19 nt, Homo sapiens
  misc_RNA (1)...(19): siRNA sense strand
gcaacuuugggcagaccua

SEQ ID NO: 1058070 - RNA, 19 nt, Homo sapiens
  misc_RNA (1)...(19): siRNA sense strand
aaggaaggcaggcucuuug

SEQ ID NO: 1058071 - RNA, 19 nt, Homo sapiens
  misc_RNA (1)...(19): siRNA sense strand
gauccuguuccucuacaau

SEQ ID NO: 1058072 - RNA, 19 nt, Homo sapiens
  misc_RNA (1)...(19): siRNA sense strand
gccaaucugcgacacaauc

SEQ ID NO: 1058073 - RNA, 19 nt, Homo sapiens
  misc_RNA (1)...(19): siRNA sense strand
uucaaggaccugcugagua

SEQ ID NO: 1058074 - RNA, 19 nt, Homo sapiens
  misc_RNA (1)...(19): siRNA sense strand
ggauccuguuccucuacaa

SEQ ID NO: 1058075 - RNA, 19 nt, Homo sapiens
  misc_RNA (1)...(19): siRNA sense strand
gggcugccagucuccugua

SEQ ID NO: 1058076 - RNA, 19 nt, Homo sapiens
  misc_RNA (1)...(19): siRNA sense strand
acaucuacaucaguaccua

SEQ ID NO: 1058077 - RNA, 19 nt, Homo sapiens
  misc_RNA (1)...(19): siRNA sense strand
ggacauuaaacaucaucag

SEQ ID NO: 1058078 - RNA, 19 nt, Homo sapiens
  misc_RNA (1)...(19): siRNA sense strand
augcccaggugaauaguga

SEQ ID NO: 1058079 - RNA, 19 nt, Homo sapiens
  misc_RNA (1)...(19): siRNA sense strand
cgaagaacagaagauuaug

SEQ ID NO: 1058080 - RNA, 19 nt, Homo sapiens
  misc_RNA (1)...(19): siRNA sense strand
aguaccgauuggccuguua

SEQ ID NO: 1058081 - RNA, 19 nt, Homo sapiens
  misc_RNA (1)...(19): siRNA sense strand
gugccagccuccuacuagu

SEQ ID NO: 1058082 - RNA, 19 nt, Homo sapiens
  misc_RNA (1)...(19): siRNA sense strand
gcaaggaaggcaggcucuu

SEQ ID NO: 1058083 - RNA, 19 nt, Homo sapiens
  misc_RNA (1)...(19): siRNA sense strand
gacuccaccugucgacaca

SEQ ID NO: 1058084 - RNA, 19 nt, Homo sapiens
  misc_RNA (1)...(19): siRNA sense strand
caucuacgaagaacagaag

SEQ ID NO: 1058085 - RNA, 19 nt, Homo sapiens
  misc_RNA (1)...(19): siRNA sense strand
gggcuaaguucaagaagua

SEQ ID NO: 1058086 - RNA, 19 nt, Homo sapiens
  misc_RNA (1)...(19): siRNA sense strand
gcauugagauguuccacaa

SEQ ID NO: 1058087 - RNA, 19 nt, Homo sapiens
  misc_RNA (1)...(19): siRNA sense strand
gaaguucaaccuaaucuug

SEQ ID NO: 1058088 - RNA, 19 nt, Homo sapiens
  misc_RNA (1)...(19): siRNA sense strand
ggagaagaauaucaaaugg

SEQ ID NO: 1058089 - RNA, 19 nt, Homo sapiens
  misc_RNA (1)...(19): siRNA sense strand
gacccgagagcacuuauua

SEQ ID NO: 1058090 - RNA, 19 nt, Homo sapiens
  misc_RNA (1)...(19): siRNA sense strand
gcaagaacauccgcacugu

SEQ ID NO: 1058091 - RNA, 19 nt, Homo sapiens
  misc_RNA (1)...(19): siRNA sense strand
ugacaggcauugagauguu

SEQ ID NO: 1058092 - RNA, 19 nt, Homo sapiens
  misc_RNA (1)...(19): siRNA sense strand
ccaaugaucuuagagaaag

SEQ ID NO: 1058093 - RNA, 19 nt, Homo sapiens
  misc_RNA (1)...(19): siRNA sense strand
ucaccgaguuuggcuauaa

SEQ ID NO: 1058094 - RNA, 19 nt, Homo sapiens
  misc_RNA (1)...(19): siRNA sense strand
uggaugcuguggacacuua

SEQ ID NO: 1058095 - RNA, 19 nt, Homo sapiens
  misc_RNA (1)...(19): siRNA sense strand
gauggcaaccggacuauug

SEQ ID NO: 1058096 - RNA, 19 nt, Homo sapiens
  misc_RNA (1)...(19): siRNA sense strand
ggucaugcagauuauguua

SEQ ID NO: 1058097 - RNA, 19 nt, Homo sapiens
  misc_RNA (1)...(19): siRNA sense strand
gcaccggucuagucaccaa

SEQ ID NO: 1058098 - RNA, 19 nt, Homo sapiens
  misc_RNA (1)...(19): siRNA sense strand
ugacugaggaggagaagaa

SEQ ID NO: 1058099 - RNA, 19 nt, Homo sapiens
  misc_RNA (1)...(19): siRNA sense strand
gaagguggaggcccagguu

SEQ ID NO: 1058100 - RNA, 19 nt, Homo sapiens
  misc_RNA (1)...(19): siRNA sense strand
cgacaagccacaugugaau

SEQ ID NO: 1058101 - RNA, 19 nt, Homo sapiens
  misc_RNA (1)...(19): siRNA sense strand
caagccagguuccaucaag

SEQ ID NO: 1058102 - RNA, 19 nt, Homo sapiens
  misc_RNA (1)...(19): siRNA sense strand
caagaaguacgaggagauu

SEQ ID NO: 1058103 - RNA, 19 nt, Homo sapiens
  misc_RNA (1)...(19): siRNA sense strand
cguaggcucugcucucugu

SEQ ID NO: 1058104 - RNA, 19 nt, Homo sapiens
  misc_RNA (1)...(19): siRNA sense strand
ggugacagguacacuagag

SEQ ID NO: 1058105 - RNA, 19 nt, Homo sapiens
  misc_RNA (1)...(19): siRNA sense strand
ggaggagaagaauaucaaa

SEQ ID NO: 1058106 - RNA, 19 nt, Homo sapiens
  misc_RNA (1)...(19): siRNA sense strand
cggcucauguggaguauag

SEQ ID NO: 1058107 - RNA, 19 nt, Homo sapiens
  misc_RNA (1)...(19): siRNA sense strand
gaggagaagaauaucaaau

SEQ ID NO: 1058108 - RNA, 19 nt, Homo sapiens
  misc_RNA (1)...(19): siRNA sense strand
ucaugcagauuauguuaag

SEQ ID NO: 1058109 - RNA, 19 nt, Homo sapiens
  misc_RNA (1)...(19): siRNA sense strand
caccgaguuuggcuauaaa

SEQ ID NO: 1058110 - RNA, 19 nt, Homo sapiens
  misc_RNA (1)...(19): siRNA sense strand
cgagauggcaaccggacua

SEQ ID NO: 1058111 - RNA, 19 nt, Homo sapiens
  misc_RNA (1)...(19): siRNA sense strand
gccaaugaucuuagagaaa

SEQ ID NO: 1058112 - RNA, 19 nt, Homo sapiens
  misc_RNA (1)...(19): siRNA sense strand
agaaguacgaggagauuga

SEQ ID NO: 1058113 - RNA, 19 nt, Homo sapiens
  misc_RNA (1)...(19): siRNA sense strand
gcgacaagccacaugugaa

SEQ ID NO: 1058114 - RNA, 19 nt, Homo sapiens
  misc_RNA (1)...(19): siRNA sense strand
gcagccaucacgaagauuc

SEQ ID NO: 1058115 - RNA, 19 nt, Homo sapiens
  misc_RNA (1)...(19): siRNA sense strand
ccaacacgcuggccaugac

SEQ ID NO: 1058116 - RNA, 19 nt, Homo sapiens
  misc_RNA (1)...(19): siRNA sense strand
ggcagccaaugaucuuaga

SEQ ID NO: 1058117 - RNA, 19 nt, Homo sapiens
  misc_RNA (1)...(19): siRNA sense strand
gagcguggcauuuuaaaga

SEQ ID NO: 1058118 - RNA, 19 nt, Homo sapiens
  misc_RNA (1)...(19): siRNA sense strand
uggagcaugugguggugua

SEQ ID NO: 1058119 - RNA, 19 nt, Homo sapiens
  misc_RNA (1)...(19): siRNA sense strand
auugagauguuccacaaga

SEQ ID NO: 1058120 - RNA, 19 nt, Homo sapiens
  misc_RNA (1)...(19): siRNA sense strand
aggagaagaauaucaaaug

SEQ ID NO: 1058121 - RNA, 19 nt, Homo sapiens
  misc_RNA (1)...(19): siRNA sense strand
gaggaggagaagaauauca

SEQ ID NO: 1058122 - RNA, 19 nt, Homo sapiens
  misc_RNA (1)...(19): siRNA sense strand
agacgagugugagcuccua

SEQ ID NO: 1058123 - RNA, 19 nt, Homo sapiens
  misc_RNA (1)...(19): siRNA sense strand
cugaggaggagaagaauau

SEQ ID NO: 1058124 - RNA, 19 nt, Homo sapiens
  misc_RNA (1)...(19): siRNA sense strand
agacuuacgugcgcgacaa

SEQ ID NO: 1058125 - RNA, 19 nt, Homo sapiens
  misc_RNA (1)...(19): siRNA sense strand
ggugacaggcauugagaug

SEQ ID NO: 1058126 - RNA, 19 nt, Homo sapiens
  misc_RNA (1)...(19): siRNA sense strand
aaagaagggagacgagugu

SEQ ID NO: 1058127 - RNA, 19 nt, Homo sapiens
  misc_RNA (1)...(19): siRNA sense strand
uagagaaaggccagcguuu

SEQ ID NO: 1058128 - RNA, 19 nt, Homo sapiens
  misc_RNA (1)...(19): siRNA sense strand
uuacuggccagacagauug

SEQ ID NO: 1058129 - RNA, 19 nt, Homo sapiens
  misc_RNA (1)...(19): siRNA sense strand
ugacugcagccaucacgaa

SEQ ID NO: 1058130 - RNA, 19 nt, Homo sapiens
  misc_RNA (1)...(19): siRNA sense strand
cugcagccaucacgaagau

SEQ ID NO: 1058131 - RNA, 19 nt, Homo sapiens
  misc_RNA (1)...(19): siRNA sense strand
gacaggcauugagauguuc

SEQ ID NO: 1058132 - RNA, 19 nt, Homo sapiens
  misc_RNA (1)...(19): siRNA sense strand
gcucaccgaguuuggcuau

SEQ ID NO: 1058133 - RNA, 19 nt, Homo sapiens
  misc_RNA (1)...(19): siRNA sense strand
agccaaugaucuuagagaa

SEQ ID NO: 1058134 - RNA, 19 nt, Homo sapiens
  misc_RNA (1)...(19): siRNA sense strand
uggaggccaagaagacuua

SEQ ID NO: 1058135 - RNA, 19 nt, Homo sapiens
  misc_RNA (1)...(19): siRNA sense strand
ugugagcuccuaggacaua

SEQ ID NO: 1058136 - RNA, 19 nt, Homo sapiens
  misc_RNA (1)...(19): siRNA sense strand
caucaaugcggcucaugug

SEQ ID NO: 1058137 - RNA, 19 nt, Homo sapiens
  misc_RNA (1)...(19): siRNA sense strand
acucugagaugguggaacu

SEQ ID NO: 1058138 - RNA, 19 nt, Homo sapiens
  misc_RNA (1)...(19): siRNA sense strand
ucaagaaguacgaggagau

SEQ ID NO: 1058139 - RNA, 19 nt, Homo sapiens
  misc_RNA (1)...(19): siRNA sense strand
aguuaggccugaagucugu

SEQ ID NO: 1058140 - RNA, 19 nt, Homo sapiens
  misc_RNA (1)...(19): siRNA sense strand
acacuagagcguggcauuu

SEQ ID NO: 1058141 - RNA, 19 nt, Homo sapiens
  misc_RNA (1)...(19): siRNA sense strand
ccagacccgagagcacuua

SEQ ID NO: 1058142 - RNA, 19 nt, Homo sapiens
  misc_RNA (1)...(19): siRNA sense strand
cagccaaugaucuuagaga

SEQ ID NO: 1058143 - RNA, 19 nt, Homo sapiens
  misc_RNA (1)...(19): siRNA sense strand
ggugguguaugugaacaag

SEQ ID NO: 1058144 - RNA, 19 nt, Homo sapiens
  misc_RNA (1)...(19): siRNA sense strand
ccuaggacauagcaagaac

SEQ ID NO: 1058145 - RNA, 19 nt, Homo sapiens
  misc_RNA (1)...(19): siRNA sense strand
acuagagcguggcauuuua

SEQ ID NO: 1058146 - RNA, 19 nt, Homo sapiens
  misc_RNA (1)...(19): siRNA sense strand
gucaugcagauuauguuaa

SEQ ID NO: 1058147 - RNA, 19 nt, Homo sapiens
  misc_RNA (1)...(19): siRNA sense strand
agaagggagacgaguguga

SEQ ID NO: 1058148 - RNA, 19 nt, Homo sapiens
  misc_RNA (1)...(19): siRNA sense strand
ggaagacauuacaaacuua

SEQ ID NO: 1058149 - RNA, 19 nt, Homo sapiens
  misc_RNA (1)...(19): siRNA sense strand
ucaacaagauucugccaua

SEQ ID NO: 1058150 - RNA, 19 nt, Homo sapiens
  misc_RNA (1)...(19): siRNA sense strand
gaaagaagaacuuaugcaa

SEQ ID NO: 1058151 - RNA, 19 nt, Homo sapiens
  misc_RNA (1)...(19): siRNA sense strand
aagaagaacuuaugcaaga

SEQ ID NO: 1058152 - RNA, 19 nt, Homo sapiens
  misc_RNA (1)...(19): siRNA sense strand
gagaauaccaaacuucauu

SEQ ID NO: 1058153 - RNA, 19 nt, Homo sapiens
  misc_RNA (1)...(19): siRNA sense strand
ccuggaaacucaaaucaaa

SEQ ID NO: 1058154 - RNA, 19 nt, Homo sapiens
  misc_RNA (1)...(19): siRNA sense strand
uaacacaaguacaggaaga

SEQ ID NO: 1058155 - RNA, 19 nt, Homo sapiens
  misc_RNA (1)...(19): siRNA sense strand
auaccaaacuucauuguga

SEQ ID NO: 1058156 - RNA, 19 nt, Homo sapiens
  misc_RNA (1)...(19): siRNA sense strand
gaaccgaauaacacaagua

SEQ ID NO: 1058157 - RNA, 19 nt, Homo sapiens
  misc_RNA (1)...(19): siRNA sense strand
ugacugaacuccaugaaaa

SEQ ID NO: 1058158 - RNA, 19 nt, Homo sapiens
  misc_RNA (1)...(19): siRNA sense strand
gugauagccuggaaacuca

SEQ ID NO: 1058159 - RNA, 19 nt, Homo sapiens
  misc_RNA (1)...(19): siRNA sense strand
gaacuuaugcaagaucuuc

SEQ ID NO: 1058160 - RNA, 19 nt, Homo sapiens
  misc_RNA (1)...(19): siRNA sense strand
ccaagaagauuuugaggaa

SEQ ID NO: 1058161 - RNA, 19 nt, Homo sapiens
  misc_RNA (1)...(19): siRNA sense strand
agaaacagcccaagaagau

SEQ ID NO: 1058162 - RNA, 19 nt, Homo sapiens
  misc_RNA (1)...(19): siRNA sense strand
aggaagacauuacaaacuu

SEQ ID NO: 1058163 - RNA, 19 nt, Homo sapiens
  misc_RNA (1)...(19): siRNA sense strand
aaacagcccaagaagauuu

SEQ ID NO: 1058164 - RNA, 19 nt, Homo sapiens
  misc_RNA (1)...(19): siRNA sense strand
ggaaguagagagcaaaugg

SEQ ID NO: 1058165 - RNA, 19 nt, Homo sapiens
  misc_RNA (1)...(19): siRNA sense strand
cauagaaacagcccaagaa

SEQ ID NO: 1058166 - RNA, 19 nt, Homo sapiens
  misc_RNA (1)...(19): siRNA sense strand
caacaagauucugccauag

SEQ ID NO: 1058167 - RNA, 19 nt, Homo sapiens
  misc_RNA (1)...(19): siRNA sense strand
ucaaauccuuacauucaga

SEQ ID NO: 1058168 - RNA, 19 nt, Homo sapiens
  misc_RNA (1)...(19): siRNA sense strand
gaaacagcccaagaagauu

SEQ ID NO: 1058169 - RNA, 19 nt, Homo sapiens
  misc_RNA (1)...(19): siRNA sense strand
cauagagaauaccaaacuu

SEQ ID NO: 1058170 - RNA, 19 nt, Homo sapiens
  misc_RNA (1)...(19): siRNA sense strand
gaagaacuuaugcaagauc

SEQ ID NO: 1058171 - RNA, 19 nt, Homo sapiens
  misc_RNA (1)...(19): siRNA sense strand
gacaaugaaagaagaacuu

SEQ ID NO: 1058172 - RNA, 19 nt, Homo sapiens
  misc_RNA (1)...(19): siRNA sense strand
ugcagaaacuaaagaaaca

SEQ ID NO: 1058173 - RNA, 19 nt, Homo sapiens
  misc_RNA (1)...(19): siRNA sense strand
ggagggaaccgaauaacac

SEQ ID NO: 1058174 - RNA, 19 nt, Homo sapiens
  misc_RNA (1)...(19): siRNA sense strand
acaaguacaggaagacauu

SEQ ID NO: 1058175 - RNA, 19 nt, Homo sapiens
  misc_RNA (1)...(19): siRNA sense strand
guacaggaagacauuacaa

SEQ ID NO: 1058176 - RNA, 19 nt, Homo sapiens
  misc_RNA (1)...(19): siRNA sense strand
gaauaccaaacuucauugu

SEQ ID NO: 1058177 - RNA, 19 nt, Homo sapiens
  misc_RNA (1)...(19): siRNA sense strand
ccaggagggaaccgaauaa

SEQ ID NO: 1058178 - RNA, 19 nt, Homo sapiens
  misc_RNA (1)...(19): siRNA sense strand
acaagauucugccauagag

SEQ ID NO: 1058179 - RNA, 19 nt, Homo sapiens
  misc_RNA (1)...(19): siRNA sense strand
caaguacaggaagacauua

SEQ ID NO: 1058180 - RNA, 19 nt, Homo sapiens
  misc_RNA (1)...(19): siRNA sense strand
cuaaagaaacagaaagaca

SEQ ID NO: 1058181 - RNA, 19 nt, Homo sapiens
  misc_RNA (1)...(19): siRNA sense strand
ggaaccgaauaacacaagu

SEQ ID NO: 1058182 - RNA, 19 nt, Homo sapiens
  misc_RNA (1)...(19): siRNA sense strand
uagaaacagcccaagaaga

SEQ ID NO: 1058183 - RNA, 19 nt, Homo sapiens
  misc_RNA (1)...(19): siRNA sense strand
guagagagcaaauggucau

SEQ ID NO: 1058184 - RNA, 19 nt, Homo sapiens
  misc_RNA (1)...(19): siRNA sense strand
uagagaauaccaaacuuca

SEQ ID NO: 1058185 - RNA, 19 nt, Homo sapiens
  misc_RNA (1)...(19): siRNA sense strand
uaccaaacuucauugugau

SEQ ID NO: 1058186 - RNA, 19 nt, Homo sapiens
  misc_RNA (1)...(19): siRNA sense strand
ccauagagaauaccaaacu

SEQ ID NO: 1058187 - RNA, 19 nt, Homo sapiens
  misc_RNA (1)...(19): siRNA sense strand
gaaguagagagcaaauggu

SEQ ID NO: 1058188 - RNA, 19 nt, Homo sapiens
  misc_RNA (1)...(19): siRNA sense strand
gagggaaccgaauaacaca

SEQ ID NO: 1058189 - RNA, 19 nt, Homo sapiens
  misc_RNA (1)...(19): siRNA sense strand
uugaggaacacaugauaaa

SEQ ID NO: 1058190 - RNA, 19 nt, Homo sapiens
  misc_RNA (1)...(19): siRNA sense strand
caaauccuuacauucagaa

SEQ ID NO: 1058191 - RNA, 19 nt, Homo sapiens
  misc_RNA (1)...(19): siRNA sense strand
uacaggaagacauuacaaa

SEQ ID NO: 1058192 - RNA, 19 nt, Homo sapiens
  misc_RNA (1)...(19): siRNA sense strand
cagaaacuaaagaaacaga

SEQ ID NO: 1058193 - RNA, 19 nt, Homo sapiens
  misc_RNA (1)...(19): siRNA sense strand
gaggaacacaugauaaaau

SEQ ID NO: 1058194 - RNA, 19 nt, Homo sapiens
  misc_RNA (1)...(19): siRNA sense strand
ccgaauaacacaaguacag

SEQ ID NO: 1058195 - RNA, 19 nt, Homo sapiens
  misc_RNA (1)...(19): siRNA sense strand
agaagaacuuaugcaagau

SEQ ID NO: 1058196 - RNA, 19 nt, Homo sapiens
  misc_RNA (1)...(19): siRNA sense strand
caaacuucauugugauagc

SEQ ID NO: 1058197 - RNA, 19 nt, Homo sapiens
  misc_RNA (1)...(19): siRNA sense strand
gauagccuggaaacucaaa

SEQ ID NO: 1058198 - RNA, 19 nt, Homo sapiens
  misc_RNA (1)...(19): siRNA sense strand
ugaaagaagaacuuaugca

SEQ ID NO: 1058199 - RNA, 19 nt, Homo sapiens
  misc_RNA (1)...(19): siRNA sense strand
aauaacacaaguacaggaa

SEQ ID NO: 1058200 - RNA, 19 nt, Homo sapiens
  misc_RNA (1)...(19): siRNA sense strand
ucauugugauagccuggaa

SEQ ID NO: 1058201 - RNA, 19 nt, Homo sapiens
  misc_RNA (1)...(19): siRNA sense strand
gacauuacaaacuuaaagg

SEQ ID NO: 1058202 - RNA, 19 nt, Homo sapiens
  misc_RNA (1)...(19): siRNA sense strand
caggaagacauuacaaacu

SEQ ID NO: 1058203 - RNA, 19 nt, Homo sapiens
  misc_RNA (1)...(19): siRNA sense strand
gggaaccgaauaacacaag

SEQ ID NO: 1058204 - RNA, 19 nt, Homo sapiens
  misc_RNA (1)...(19): siRNA sense strand
agaauaccaaacuucauug

SEQ ID NO: 1058205 - RNA, 19 nt, Homo sapiens
  misc_RNA (1)...(19): siRNA sense strand
caagauucugccauagaga

SEQ ID NO: 1058206 - RNA, 19 nt, Homo sapiens
  misc_RNA (1)...(19): siRNA sense strand
uggaaacucaaaucaaauc

SEQ ID NO: 1058207 - RNA, 19 nt, Homo sapiens
  misc_RNA (1)...(19): siRNA sense strand
ggaagacauuacaaacuua

SEQ ID NO: 1058208 - RNA, 19 nt, Homo sapiens
  misc_RNA (1)...(19): siRNA sense strand
gaaagaagaacuuaugcaa

SEQ ID NO: 1058209 - RNA, 19 nt, Homo sapiens
  misc_RNA (1)...(19): siRNA sense strand
aagaagaacuuaugcaaga

SEQ ID NO: 1058210 - RNA, 19 nt, Homo sapiens
  misc_RNA (1)...(19): siRNA sense strand
uaacacaaguacaggaaga

SEQ ID NO: 1058211 - RNA, 19 nt, Homo sapiens
  misc_RNA (1)...(19): siRNA sense strand
gaaccgaauaacacaagua

SEQ ID NO: 1058212 - RNA, 19 nt, Homo sapiens
  misc_RNA (1)...(19): siRNA sense strand
ugacugaacuccaugaaaa

SEQ ID NO: 1058213 - RNA, 19 nt, Homo sapiens
  misc_RNA (1)...(19): siRNA sense strand
gaacuuaugcaagaucuuc

SEQ ID NO: 1058214 - RNA, 19 nt, Homo sapiens
  misc_RNA (1)...(19): siRNA sense strand
aggaagacauuacaaacuu

SEQ ID NO: 1058215 - RNA, 19 nt, Homo sapiens
  misc_RNA (1)...(19): siRNA sense strand
ggaaguagagagcaaaugg

SEQ ID NO: 1058216 - RNA, 19 nt, Homo sapiens
  misc_RNA (1)...(19): siRNA sense strand
gaagaacuuaugcaagauc

SEQ ID NO: 1058217 - RNA, 19 nt, Homo sapiens
  misc_RNA (1)...(19): siRNA sense strand
gacaaugaaagaagaacuu

SEQ ID NO: 1058218 - RNA, 19 nt, Homo sapiens
  misc_RNA (1)...(19): siRNA sense strand
ggagggaaccgaauaacac

SEQ ID NO: 1058219 - RNA, 19 nt, Homo sapiens
  misc_RNA (1)...(19): siRNA sense strand
acaaguacaggaagacauu

SEQ ID NO: 1058220 - RNA, 19 nt, Homo sapiens
  misc_RNA (1)...(19): siRNA sense strand
guacaggaagacauuacaa

SEQ ID NO: 1058221 - RNA, 19 nt, Homo sapiens
  misc_RNA (1)...(19): siRNA sense strand
ccaggagggaaccgaauaa

SEQ ID NO: 1058222 - RNA, 19 nt, Homo sapiens
  misc_RNA (1)...(19): siRNA sense strand
caaguacaggaagacauua

SEQ ID NO: 1058223 - RNA, 19 nt, Homo sapiens
  misc_RNA (1)...(19): siRNA sense strand
ggaaccgaauaacacaagu

SEQ ID NO: 1058224 - RNA, 19 nt, Homo sapiens
  misc_RNA (1)...(19): siRNA sense strand
guagagagcaaauggucau

SEQ ID NO: 1058225 - RNA, 19 nt, Homo sapiens
  misc_RNA (1)...(19): siRNA sense strand
gagggaaccgaauaacaca

SEQ ID NO: 1058226 - RNA, 19 nt, Homo sapiens
  misc_RNA (1)...(19): siRNA sense strand
gaaguagagagcaaauggu

SEQ ID NO: 1058227 - RNA, 19 nt, Homo sapiens
  misc_RNA (1)...(19): siRNA sense strand
uacaggaagacauuacaaa

SEQ ID NO: 1058228 - RNA, 19 nt, Homo sapiens
  misc_RNA (1)...(19): siRNA sense strand
agaagaacuuaugcaagau

SEQ ID NO: 1058229 - RNA, 19 nt, Homo sapiens
  misc_RNA (1)...(19): siRNA sense strand
ccgaauaacacaaguacag

SEQ ID NO: 1058230 - RNA, 19 nt, Homo sapiens
  misc_RNA (1)...(19): siRNA sense strand
ugaaagaagaacuuaugca

SEQ ID NO: 1058231 - RNA, 19 nt, Homo sapiens
  misc_RNA (1)...(19): siRNA sense strand
aauaacacaaguacaggaa

SEQ ID NO: 1058232 - RNA, 19 nt, Homo sapiens
  misc_RNA (1)...(19): siRNA sense strand
gggaaccgaauaacacaag

SEQ ID NO: 1058233 - RNA, 19 nt, Homo sapiens
  misc_RNA (1)...(19): siRNA sense strand
gacauuacaaacuuaaagg

SEQ ID NO: 1058234 - RNA, 19 nt, Homo sapiens
  misc_RNA (1)...(19): siRNA sense strand
caggaagacauuacaaacu

SEQ ID NO: 1058235 - RNA, 19 nt, Homo sapiens
  misc_RNA (1)...(19): siRNA sense strand
gaaaagaaauccagcuaaa

SEQ ID NO: 1058236 - RNA, 19 nt, Homo sapiens
  misc_RNA (1)...(19): siRNA sense strand
aggcaaaugucucuucuua

SEQ ID NO: 1058237 - RNA, 19 nt, Homo sapiens
  misc_RNA (1)...(19): siRNA sense strand
cgacagaccuggagaagca

SEQ ID NO: 1058238 - RNA, 19 nt, Homo sapiens
  misc_RNA (1)...(19): siRNA sense strand
gcaaaugucucuucuuacg

SEQ ID NO: 1058239 - RNA, 19 nt, Homo sapiens
  misc_RNA (1)...(19): siRNA sense strand
gaagcacccuuaugagcaa

SEQ ID NO: 1058240 - RNA, 19 nt, Homo sapiens
  misc_RNA (1)...(19): siRNA sense strand
guaccuacguuggcuuuaa

SEQ ID NO: 1058241 - RNA, 19 nt, Homo sapiens
  misc_RNA (1)...(19): siRNA sense strand
gaagaaguaccgaauguca

SEQ ID NO: 1058242 - RNA, 19 nt, Homo sapiens
  misc_RNA (1)...(19): siRNA sense strand
aaaugucucuucuuacguu

SEQ ID NO: 1058243 - RNA, 19 nt, Homo sapiens
  misc_RNA (1)...(19): siRNA sense strand
guaaugccaggaagaagua

SEQ ID NO: 1058244 - RNA, 19 nt, Homo sapiens
  misc_RNA (1)...(19): siRNA sense strand
ucgaggaacuugaacucua

SEQ ID NO: 1058245 - RNA, 19 nt, Homo sapiens
  misc_RNA (1)...(19): siRNA sense strand
gggaagauguggucaacag

SEQ ID NO: 1058246 - RNA, 19 nt, Homo sapiens
  misc_RNA (1)...(19): siRNA sense strand
gaacucuaccguaaacaau

SEQ ID NO: 1058247 - RNA, 19 nt, Homo sapiens
  misc_RNA (1)...(19): siRNA sense strand
ucuagaaaguguucggaaa

SEQ ID NO: 1058248 - RNA, 19 nt, Homo sapiens
  misc_RNA (1)...(19): siRNA sense strand
uggagaagcacccuuauga

SEQ ID NO: 1058249 - RNA, 19 nt, Homo sapiens
  misc_RNA (1)...(19): siRNA sense strand
aaauccagcuaaagccuaa

SEQ ID NO: 1058250 - RNA, 19 nt, Homo sapiens
  misc_RNA (1)...(19): siRNA sense strand
guacuucgaggaacuugaa

SEQ ID NO: 1058251 - RNA, 19 nt, Homo sapiens
  misc_RNA (1)...(19): siRNA sense strand
ccugagagcuaaguacuuc

SEQ ID NO: 1058252 - RNA, 19 nt, Homo sapiens
  misc_RNA (1)...(19): siRNA sense strand
uaccuacguuggcuuuaaa

SEQ ID NO: 1058253 - RNA, 19 nt, Homo sapiens
  misc_RNA (1)...(19): siRNA sense strand
ugaauuauguuggcaagag

SEQ ID NO: 1058254 - RNA, 19 nt, Homo sapiens
  misc_RNA (1)...(19): siRNA sense strand
gcagccaaguaccuacguu

SEQ ID NO: 1058255 - RNA, 19 nt, Homo sapiens
  misc_RNA (1)...(19): siRNA sense strand
aacuugaacucuaccguaa

SEQ ID NO: 1058256 - RNA, 19 nt, Homo sapiens
  misc_RNA (1)...(19): siRNA sense strand
cgaggaacuugaacucuac

SEQ ID NO: 1058257 - RNA, 19 nt, Homo sapiens
  misc_RNA (1)...(19): siRNA sense strand
aggaagaaguaccgaaugu

SEQ ID NO: 1058258 - RNA, 19 nt, Homo sapiens
  misc_RNA (1)...(19): siRNA sense strand
uacguuggcuuuaaagagu

SEQ ID NO: 1058259 - RNA, 19 nt, Homo sapiens
  misc_RNA (1)...(19): siRNA sense strand
ccacuaugcucagcugaag

SEQ ID NO: 1058260 - RNA, 19 nt, Homo sapiens
  misc_RNA (1)...(19): siRNA sense strand
uaaggcaaaugucucuucu

SEQ ID NO: 1058261 - RNA, 19 nt, Homo sapiens
  misc_RNA (1)...(19): siRNA sense strand
ggaaaagaaauccagcuaa

SEQ ID NO: 1058262 - RNA, 19 nt, Homo sapiens
  misc_RNA (1)...(19): siRNA sense strand
uaccgaaugucagcuagaa

SEQ ID NO: 1058263 - RNA, 19 nt, Homo sapiens
  misc_RNA (1)...(19): siRNA sense strand
caucauccuuccuacucuu

SEQ ID NO: 1058264 - RNA, 19 nt, Homo sapiens
  misc_RNA (1)...(19): siRNA sense strand
caggaagaaaugaugaauu

SEQ ID NO: 1058265 - RNA, 19 nt, Homo sapiens
  misc_RNA (1)...(19): siRNA sense strand
ggagaagcacccuuaugag

SEQ ID NO: 1058266 - RNA, 19 nt, Homo sapiens
  misc_RNA (1)...(19): siRNA sense strand
gcacccuuaugagcaaaga

SEQ ID NO: 1058267 - RNA, 19 nt, Homo sapiens
  misc_RNA (1)...(19): siRNA sense strand
aaagaaauccagcuaaagc

SEQ ID NO: 1058268 - RNA, 19 nt, Homo sapiens
  misc_RNA (1)...(19): siRNA sense strand
ccagacggccuccaucauc

SEQ ID NO: 1058269 - RNA, 19 nt, Homo sapiens
  misc_RNA (1)...(19): siRNA sense strand
cuaaguacuucgaggaacu

SEQ ID NO: 1058270 - RNA, 19 nt, Homo sapiens
  misc_RNA (1)...(19): siRNA sense strand
ccaggaagaaguaccgaau

SEQ ID NO: 1058271 - RNA, 19 nt, Homo sapiens
  misc_RNA (1)...(19): siRNA sense strand
gcugaauuacagaaacaaa

SEQ ID NO: 1058272 - RNA, 19 nt, Homo sapiens
  misc_RNA (1)...(19): siRNA sense strand
ugaaaaggccaaauaugaa

SEQ ID NO: 1058273 - RNA, 19 nt, Homo sapiens
  misc_RNA (1)...(19): siRNA sense strand
gaaaaggccaaauaugaag

SEQ ID NO: 1058274 - RNA, 19 nt, Homo sapiens
  misc_RNA (1)...(19): siRNA sense strand
ugaacucuaccguaaacaa

SEQ ID NO: 1058275 - RNA, 19 nt, Homo sapiens
  misc_RNA (1)...(19): siRNA sense strand
acagaaacaaauucaagga

SEQ ID NO: 1058276 - RNA, 19 nt, Homo sapiens
  misc_RNA (1)...(19): siRNA sense strand
ggaagaaguaccgaauguc

SEQ ID NO: 1058277 - RNA, 19 nt, Homo sapiens
  misc_RNA (1)...(19): siRNA sense strand
uaccguaaacaauguaaug

SEQ ID NO: 1058278 - RNA, 19 nt, Homo sapiens
  misc_RNA (1)...(19): siRNA sense strand
caaagcccgauaccaggaa

SEQ ID NO: 1058279 - RNA, 19 nt, Homo sapiens
  misc_RNA (1)...(19): siRNA sense strand
caauguaaugccaggaaga

SEQ ID NO: 1058280 - RNA, 19 nt, Homo sapiens
  misc_RNA (1)...(19): siRNA sense strand
acucuaccguaaacaaugu

SEQ ID NO: 1058281 - RNA, 19 nt, Homo sapiens
  misc_RNA (1)...(19): siRNA sense strand
cagggaagauguggucaac

SEQ ID NO: 1058282 - RNA, 19 nt, Homo sapiens
  misc_RNA (1)...(19): siRNA sense strand
uggccaaacucgacaaagc

SEQ ID NO: 1058283 - RNA, 19 nt, Homo sapiens
  misc_RNA (1)...(19): siRNA sense strand
gcaugaaaaggccaaauau

SEQ ID NO: 1058284 - RNA, 19 nt, Homo sapiens
  misc_RNA (1)...(19): siRNA sense strand
cuaaggcaaaugucucuuc

SEQ ID NO: 1058285 - RNA, 19 nt, Homo sapiens
  misc_RNA (1)...(19): siRNA sense strand
cuugaacucuaccguaaac

SEQ ID NO: 1058286 - RNA, 19 nt, Homo sapiens
  misc_RNA (1)...(19): siRNA sense strand
gaaaggaaaugaagaguuu

SEQ ID NO: 1058287 - RNA, 19 nt, Homo sapiens
  misc_RNA (1)...(19): siRNA sense strand
gaaagaaacuguagacaau

SEQ ID NO: 1058288 - RNA, 19 nt, Homo sapiens
  misc_RNA (1)...(19): siRNA sense strand
gcacugagcuugcugguuu

SEQ ID NO: 1058289 - RNA, 19 nt, Homo sapiens
  misc_RNA (1)...(19): siRNA sense strand
gaaggaagcccguuguuua

SEQ ID NO: 1058290 - RNA, 19 nt, Homo sapiens
  misc_RNA (1)...(19): siRNA sense strand
caaagaaaguugcuaauga

SEQ ID NO: 1058291 - RNA, 19 nt, Homo sapiens
  misc_RNA (1)...(19): siRNA sense strand
gaaauauggucacaaacua

SEQ ID NO: 1058292 - RNA, 19 nt, Homo sapiens
  misc_RNA (1)...(19): siRNA sense strand
gcaacacacuuacaaauga

SEQ ID NO: 1058293 - RNA, 19 nt, Homo sapiens
  misc_RNA (1)...(19): siRNA sense strand
gcaaauaaggauccaauua

SEQ ID NO: 1058294 - RNA, 19 nt, Homo sapiens
  misc_RNA (1)...(19): siRNA sense strand
gaaaucagcaacacacuua

SEQ ID NO: 1058295 - RNA, 19 nt, Homo sapiens
  misc_RNA (1)...(19): siRNA sense strand
ggaagcccguuguuuaaua

SEQ ID NO: 1058296 - RNA, 19 nt, Homo sapiens
  misc_RNA (1)...(19): siRNA sense strand
gggaauaucuguaaaguca

SEQ ID NO: 1058297 - RNA, 19 nt, Homo sapiens
  misc_RNA (1)...(19): siRNA sense strand
agaagaaacucgacagaua

SEQ ID NO: 1058298 - RNA, 19 nt, Homo sapiens
  misc_RNA (1)...(19): siRNA sense strand
gaaaguugcuaaugauuca

SEQ ID NO: 1058299 - RNA, 19 nt, Homo sapiens
  misc_RNA (1)...(19): siRNA sense strand
gaaagaggauuaugaagag

SEQ ID NO: 1058300 - RNA, 19 nt, Homo sapiens
  misc_RNA (1)...(19): siRNA sense strand
gaauacaaguaccacauaa

SEQ ID NO: 1058301 - RNA, 19 nt, Homo sapiens
  misc_RNA (1)...(19): siRNA sense strand
gaggaggacuuaagagaaa

SEQ ID NO: 1058302 - RNA, 19 nt, Homo sapiens
  misc_RNA (1)...(19): siRNA sense strand
ugacucagcuuuacuguga

SEQ ID NO: 1058303 - RNA, 19 nt, Homo sapiens
  misc_RNA (1)...(19): siRNA sense strand
gcaguaugcugacaagauu

SEQ ID NO: 1058304 - RNA, 19 nt, Homo sapiens
  misc_RNA (1)...(19): siRNA sense strand
gcaccuauauuuacuacuu

SEQ ID NO: 1058305 - RNA, 19 nt, Homo sapiens
  misc_RNA (1)...(19): siRNA sense strand
ggaagaagcucugaauugg

SEQ ID NO: 1058306 - RNA, 19 nt, Homo sapiens
  misc_RNA (1)...(19): siRNA sense strand
gaaggagagugaaguguau

SEQ ID NO: 1058307 - RNA, 19 nt, Homo sapiens
  misc_RNA (1)...(19): siRNA sense strand
ggaaagaggauuaugaaga

SEQ ID NO: 1058308 - RNA, 19 nt, Homo sapiens
  misc_RNA (1)...(19): siRNA sense strand
gcucugaggaugcaaauua

SEQ ID NO: 1058309 - RNA, 19 nt, Homo sapiens
  misc_RNA (1)...(19): siRNA sense strand
gcacaggccuuuacagagu

SEQ ID NO: 1058310 - RNA, 19 nt, Homo sapiens
  misc_RNA (1)...(19): siRNA sense strand
ggaaagagagccacuauuc

SEQ ID NO: 1058311 - RNA, 19 nt, Homo sapiens
  misc_RNA (1)...(19): siRNA sense strand
gaacauaauacaccaagaa

SEQ ID NO: 1058312 - RNA, 19 nt, Homo sapiens
  misc_RNA (1)...(19): siRNA sense strand
ggaaggagaacuaaugaaa

SEQ ID NO: 1058313 - RNA, 19 nt, Homo sapiens
  misc_RNA (1)...(19): siRNA sense strand
gaaauuguccaaagaguga

SEQ ID NO: 1058314 - RNA, 19 nt, Homo sapiens
  misc_RNA (1)...(19): siRNA sense strand
gcauagugcuuuagaugaa

SEQ ID NO: 1058315 - RNA, 19 nt, Homo sapiens
  misc_RNA (1)...(19): siRNA sense strand
ugagaaauauggucacaaa

SEQ ID NO: 1058316 - RNA, 19 nt, Homo sapiens
  misc_RNA (1)...(19): siRNA sense strand
uaaagaugcuguuagagaa

SEQ ID NO: 1058317 - RNA, 19 nt, Homo sapiens
  misc_RNA (1)...(19): siRNA sense strand
uaauauggcugcuagaaga

SEQ ID NO: 1058318 - RNA, 19 nt, Homo sapiens
  misc_RNA (1)...(19): siRNA sense strand
gaaaggacaagaggacuua

SEQ ID NO: 1058319 - RNA, 19 nt, Homo sapiens
  misc_RNA (1)...(19): siRNA sense strand
gaugagcacuguggaaauu

SEQ ID NO: 1058320 - RNA, 19 nt, Homo sapiens
  misc_RNA (1)...(19): siRNA sense strand
uaacuuggcccacgaguaa

SEQ ID NO: 1058321 - RNA, 19 nt, Homo sapiens
  misc_RNA (1)...(19): siRNA sense strand
gggaauuguuucuuucuaa

SEQ ID NO: 1058322 - RNA, 19 nt, Homo sapiens
  misc_RNA (1)...(19): siRNA sense strand
uggaagauauuguggauuu

SEQ ID NO: 1058323 - RNA, 19 nt, Homo sapiens
  misc_RNA (1)...(19): siRNA sense strand
gcaaguuccugugaaauau

SEQ ID NO: 1058324 - RNA, 19 nt, Homo sapiens
  misc_RNA (1)...(19): siRNA sense strand
uaacugauccagacuuuaa

SEQ ID NO: 1058325 - RNA, 19 nt, Homo sapiens
  misc_RNA (1)...(19): siRNA sense strand
caaagggucauuaucguua

SEQ ID NO: 1058326 - RNA, 19 nt, Homo sapiens
  misc_RNA (1)...(19): siRNA sense strand
gugaaggugucauuucuaa

SEQ ID NO: 1058327 - RNA, 19 nt, Homo sapiens
  misc_RNA (1)...(19): siRNA sense strand
ggugucauuucuaagauua

SEQ ID NO: 1058328 - RNA, 19 nt, Homo sapiens
  misc_RNA (1)...(19): siRNA sense strand
ggaaaaggaacaugaauua

SEQ ID NO: 1058329 - RNA, 19 nt, Homo sapiens
  misc_RNA (1)...(19): siRNA sense strand
cuacaaggaauaugucuua

SEQ ID NO: 1058330 - RNA, 19 nt, Homo sapiens
  misc_RNA (1)...(19): siRNA sense strand
ggaaggagagugaagugua

SEQ ID NO: 1058331 - RNA, 19 nt, Homo sapiens
  misc_RNA (1)...(19): siRNA sense strand
ugagugagcuuaaagaagu

SEQ ID NO: 1058332 - RNA, 19 nt, Homo sapiens
  misc_RNA (1)...(19): siRNA sense strand
gaaggugucauuucuaaga

SEQ ID NO: 1058333 - RNA, 19 nt, Homo sapiens
  misc_RNA (1)...(19): siRNA sense strand
gaagaacacuuggccaaag

SEQ ID NO: 1058334 - RNA, 19 nt, Homo sapiens
  misc_RNA (1)...(19): siRNA sense strand
gaagcccguuguuuaauau

SEQ ID NO: 1058335 - RNA, 19 nt, Homo sapiens
  misc_RNA (1)...(19): siRNA sense strand
gaaauuuguugaagaaugc

SEQ ID NO: 1058336 - RNA, 19 nt, Homo sapiens
  misc_RNA (1)...(19): siRNA sense strand
acagguaucuuggaacaua

SEQ ID NO: 1058337 - RNA, 19 nt, Homo sapiens
  misc_RNA (1)...(19): siRNA sense strand
ugucuuugcugcugaauuu

SEQ ID NO: 1058338 - RNA, 19 nt, Homo sapiens
  misc_RNA (1)...(19): siRNA sense strand
gaaggaaagcaacuugauu

SEQ ID NO: 1058339 - RNA, 19 nt, Homo sapiens
  misc_RNA (1)...(19): siRNA sense strand
cgacaauucuucuagacaa

SEQ ID NO: 1058340 - RNA, 19 nt, Homo sapiens
  misc_RNA (1)...(19): siRNA sense strand
ugaaauguauacccagaaa

SEQ ID NO: 1058341 - RNA, 19 nt, Homo sapiens
  misc_RNA (1)...(19): siRNA sense strand
ccagagccauugaauauag

SEQ ID NO: 1058342 - RNA, 19 nt, Homo sapiens
  misc_RNA (1)...(19): siRNA sense strand
guacguaucuuccuuucca

SEQ ID NO: 1058343 - RNA, 19 nt, Homo sapiens
  misc_RNA (1)...(19): siRNA sense strand
gaauuugacaucugcagua

SEQ ID NO: 1058344 - RNA, 19 nt, Homo sapiens
  misc_RNA (1)...(19): siRNA sense strand
ugacauggagucugauaua

SEQ ID NO: 1058345 - RNA, 19 nt, Homo sapiens
  misc_RNA (1)...(19): siRNA sense strand
gcagagguauccguacuug

SEQ ID NO: 1058346 - RNA, 19 nt, Homo sapiens
  misc_RNA (1)...(19): siRNA sense strand
gagacaaguucccagcauu

SEQ ID NO: 1058347 - RNA, 19 nt, Homo sapiens
  misc_RNA (1)...(19): siRNA sense strand
ugacagaauucuacagugu

SEQ ID NO: 1058348 - RNA, 19 nt, Homo sapiens
  misc_RNA (1)...(19): siRNA sense strand
aaaguuagcacaagaaaga

SEQ ID NO: 1058349 - RNA, 19 nt, Homo sapiens
  misc_RNA (1)...(19): siRNA sense strand
gaagugccauggauauucu

SEQ ID NO: 1058350 - RNA, 19 nt, Homo sapiens
  misc_RNA (1)...(19): siRNA sense strand
cagaguugcugaacgguuu

SEQ ID NO: 1058351 - RNA, 19 nt, Homo sapiens
  misc_RNA (1)...(19): siRNA sense strand
cuacuucacuuaacuuugu

SEQ ID NO: 1058352 - RNA, 19 nt, Homo sapiens
  misc_RNA (1)...(19): siRNA sense strand
ucagcagcauguaaaguua

SEQ ID NO: 1058353 - RNA, 19 nt, Homo sapiens
  misc_RNA (1)...(19): siRNA sense strand
cuacacaccuaggaguuua

SEQ ID NO: 1058354 - RNA, 19 nt, Homo sapiens
  misc_RNA (1)...(19): siRNA sense strand
aaaggagcaccaaguauua

SEQ ID NO: 1058355 - RNA, 19 nt, Homo sapiens
  misc_RNA (1)...(19): siRNA sense strand
gaauaucuguaaagucaca

SEQ ID NO: 1058356 - RNA, 19 nt, Homo sapiens
  misc_RNA (1)...(19): siRNA sense strand
ggaaagcaacuugauuauu

SEQ ID NO: 1058357 - RNA, 19 nt, Homo sapiens
  misc_RNA (1)...(19): siRNA sense strand
cauaacugauccagacuuu

SEQ ID NO: 1058358 - RNA, 19 nt, Homo sapiens
  misc_RNA (1)...(19): siRNA sense strand
ucaaaacaguuccguaaua

SEQ ID NO: 1058359 - RNA, 19 nt, Homo sapiens
  misc_RNA (1)...(19): siRNA sense strand
gcagaaagcagaagauguc

SEQ ID NO: 1058360 - RNA, 19 nt, Homo sapiens
  misc_RNA (1)...(19): siRNA sense strand
aagcgagucuccuguaauu

SEQ ID NO: 1058361 - RNA, 19 nt, Homo sapiens
  misc_RNA (1)...(19): siRNA sense strand
gcaguggacuauguuauuc

SEQ ID NO: 1058362 - RNA, 19 nt, Homo sapiens
  misc_RNA (1)...(19): siRNA sense strand
uaaccgagcucuuuguuuu

SEQ ID NO: 1058363 - RNA, 19 nt, Homo sapiens
  misc_RNA (1)...(19): siRNA sense strand
acaaguaccacauaacuaa

SEQ ID NO: 1058364 - RNA, 19 nt, Homo sapiens
  misc_RNA (1)...(19): siRNA sense strand
uggccuauguuaaguauuu

SEQ ID NO: 1058365 - RNA, 19 nt, Homo sapiens
  misc_RNA (1)...(19): siRNA sense strand
gauggaagauauuguggau

SEQ ID NO: 1058366 - RNA, 19 nt, Homo sapiens
  misc_RNA (1)...(19): siRNA sense strand
gaacucacucucaggauug

SEQ ID NO: 1058367 - RNA, 19 nt, Homo sapiens
  misc_RNA (1)...(19): siRNA sense strand
gauuaugccuuguuagaag

SEQ ID NO: 1058368 - RNA, 19 nt, Homo sapiens
  misc_RNA (1)...(19): siRNA sense strand
aaggaaagcaacuugauua

SEQ ID NO: 1058369 - RNA, 19 nt, Homo sapiens
  misc_RNA (1)...(19): siRNA sense strand
agaaguggagcccaaauua

SEQ ID NO: 1058370 - RNA, 19 nt, Homo sapiens
  misc_RNA (1)...(19): siRNA sense strand
caagaccuauucugaaaca

SEQ ID NO: 1058371 - RNA, 19 nt, Homo sapiens
  misc_RNA (1)...(19): siRNA sense strand
guggugaaguuaaauguga

SEQ ID NO: 1058372 - RNA, 19 nt, Homo sapiens
  misc_RNA (1)...(19): siRNA sense strand
ugaagaaacuacaacaucu

SEQ ID NO: 1058373 - RNA, 19 nt, Homo sapiens
  misc_RNA (1)...(19): siRNA sense strand
gauauacguucaugggaau

SEQ ID NO: 1058374 - RNA, 19 nt, Homo sapiens
  misc_RNA (1)...(19): siRNA sense strand
ccaaaggggucucuucuaa

SEQ ID NO: 1058375 - RNA, 19 nt, Homo sapiens
  misc_RNA (1)...(19): siRNA sense strand
uagaagcucucaaucacuu

SEQ ID NO: 1058376 - RNA, 19 nt, Homo sapiens
  misc_RNA (1)...(19): siRNA sense strand
caccagagccauugaauau

SEQ ID NO: 1058377 - RNA, 19 nt, Homo sapiens
  misc_RNA (1)...(19): siRNA sense strand
ggaggcuuauugagaauug

SEQ ID NO: 1058378 - RNA, 19 nt, Homo sapiens
  misc_RNA (1)...(19): siRNA sense strand
ggauucaaagccuauguua

SEQ ID NO: 1058379 - RNA, 19 nt, Homo sapiens
  misc_RNA (1)...(19): siRNA sense strand
gaauauguuguccgcaaua

SEQ ID NO: 1058380 - RNA, 19 nt, Homo sapiens
  misc_RNA (1)...(19): siRNA sense strand
gggugggugugcaauauaa

SEQ ID NO: 1058381 - RNA, 19 nt, Homo sapiens
  misc_RNA (1)...(19): siRNA sense strand
gaaauccaagaaagacuaa

SEQ ID NO: 1058382 - RNA, 19 nt, Homo sapiens
  misc_RNA (1)...(19): siRNA sense strand
ugagggcucuuugggaaua

SEQ ID NO: 1058383 - RNA, 19 nt, Homo sapiens
  misc_RNA (1)...(19): siRNA sense strand
ccaaaccugugucugcaaa

SEQ ID NO: 1058384 - RNA, 19 nt, Homo sapiens
  misc_RNA (1)...(19): siRNA sense strand
gcaacuugauuauuucucu

SEQ ID NO: 1058385 - RNA, 19 nt, Homo sapiens
  misc_RNA (1)...(19): siRNA sense strand
gaacuuucuuuucucguua

SEQ ID NO: 1058386 - RNA, 19 nt, Homo sapiens
  misc_RNA (1)...(19): siRNA sense strand
ucaagaagguucaccauga

SEQ ID NO: 1058387 - RNA, 19 nt, Homo sapiens
  misc_RNA (1)...(19): siRNA sense strand
gaucgggucuggcuccuuu

SEQ ID NO: 1058388 - RNA, 19 nt, Homo sapiens
  misc_RNA (1)...(19): siRNA sense strand
gaagauaaacaccucauug

SEQ ID NO: 1058389 - RNA, 19 nt, Homo sapiens
  misc_RNA (1)...(19): siRNA sense strand
caauaugacuacacauuug

SEQ ID NO: 1058390 - RNA, 19 nt, Homo sapiens
  misc_RNA (1)...(19): siRNA sense strand
gcacugguauggucaggaa

SEQ ID NO: 1058391 - RNA, 19 nt, Homo sapiens
  misc_RNA (1)...(19): siRNA sense strand
gagaugacauggaauccuu

SEQ ID NO: 1058392 - RNA, 19 nt, Homo sapiens
  misc_RNA (1)...(19): siRNA sense strand
guacugggcgucacuguaa

SEQ ID NO: 1058393 - RNA, 19 nt, Homo sapiens
  misc_RNA (1)...(19): siRNA sense strand
gggcgucacuguaauaagu

SEQ ID NO: 1058394 - RNA, 19 nt, Homo sapiens
  misc_RNA (1)...(19): siRNA sense strand
cagugaagcuggaaucuca

SEQ ID NO: 1058395 - RNA, 19 nt, Homo sapiens
  misc_RNA (1)...(19): siRNA sense strand
uugaggaagucccagauua

SEQ ID NO: 1058396 - RNA, 19 nt, Homo sapiens
  misc_RNA (1)...(19): siRNA sense strand
ccaauaugacuacacauuu

SEQ ID NO: 1058397 - RNA, 19 nt, Homo sapiens
  misc_RNA (1)...(19): siRNA sense strand
cagaugaucagcagaauug

SEQ ID NO: 1058398 - RNA, 19 nt, Homo sapiens
  misc_RNA (1)...(19): siRNA sense strand
gagcaaacucuacacgauu

SEQ ID NO: 1058399 - RNA, 19 nt, Homo sapiens
  misc_RNA (1)...(19): siRNA sense strand
ggaagucccagauuacaug

SEQ ID NO: 1058400 - RNA, 19 nt, Homo sapiens
  misc_RNA (1)...(19): siRNA sense strand
gacuaaaggcuaugacaaa

SEQ ID NO: 1058401 - RNA, 19 nt, Homo sapiens
  misc_RNA (1)...(19): siRNA sense strand
uugaauacgugcauacaaa

SEQ ID NO: 1058402 - RNA, 19 nt, Homo sapiens
  misc_RNA (1)...(19): siRNA sense strand
ggacgauguuaaagcagaa

SEQ ID NO: 1058403 - RNA, 19 nt, Homo sapiens
  misc_RNA (1)...(19): siRNA sense strand
caaugcacaucuugguauu

SEQ ID NO: 1058404 - RNA, 19 nt, Homo sapiens
  misc_RNA (1)...(19): siRNA sense strand
ccaccaauaugacuacaca

SEQ ID NO: 1058405 - RNA, 19 nt, Homo sapiens
  misc_RNA (1)...(19): siRNA sense strand
ggacuaaaggcuaugacaa

SEQ ID NO: 1058406 - RNA, 19 nt, Homo sapiens
  misc_RNA (1)...(19): siRNA sense strand
acacauaccguacagagaa

SEQ ID NO: 1058407 - RNA, 19 nt, Homo sapiens
  misc_RNA (1)...(19): siRNA sense strand
ggcaaggacuaaaggcuau

SEQ ID NO: 1058408 - RNA, 19 nt, Homo sapiens
  misc_RNA (1)...(19): siRNA sense strand
cugcagaauucgccaugua

SEQ ID NO: 1058409 - RNA, 19 nt, Homo sapiens
  misc_RNA (1)...(19): siRNA sense strand
caugaaaacuguacuuaug

SEQ ID NO: 1058410 - RNA, 19 nt, Homo sapiens
  misc_RNA (1)...(19): siRNA sense strand
gcgaggaaguagcagugaa

SEQ ID NO: 1058411 - RNA, 19 nt, Homo sapiens
  misc_RNA (1)...(19): siRNA sense strand
gaauacgugcauacaaaga

SEQ ID NO: 1058412 - RNA, 19 nt, Homo sapiens
  misc_RNA (1)...(19): siRNA sense strand
uauguuagccgaccagaug

SEQ ID NO: 1058413 - RNA, 19 nt, Homo sapiens
  misc_RNA (1)...(19): siRNA sense strand
cagcuauuccgcauucuuu

SEQ ID NO: 1058414 - RNA, 19 nt, Homo sapiens
  misc_RNA (1)...(19): siRNA sense strand
ccgccgagaugacauggaa

SEQ ID NO: 1058415 - RNA, 19 nt, Homo sapiens
  misc_RNA (1)...(19): siRNA sense strand
cauuggcacuguccgauau

SEQ ID NO: 1058416 - RNA, 19 nt, Homo sapiens
  misc_RNA (1)...(19): siRNA sense strand
gaccagaugaucagcagaa

SEQ ID NO: 1058417 - RNA, 19 nt, Homo sapiens
  misc_RNA (1)...(19): siRNA sense strand
guacagagaagauaaacac

SEQ ID NO: 1058418 - RNA, 19 nt, Homo sapiens
  misc_RNA (1)...(19): siRNA sense strand
aaacaacagcggcuccaaa

SEQ ID NO: 1058419 - RNA, 19 nt, Homo sapiens
  misc_RNA (1)...(19): siRNA sense strand
agaauugaauacgugcaua

SEQ ID NO: 1058420 - RNA, 19 nt, Homo sapiens
  misc_RNA (1)...(19): siRNA sense strand
acaaugugcuagucaugga

SEQ ID NO: 1058421 - RNA, 19 nt, Homo sapiens
  misc_RNA (1)...(19): siRNA sense strand
gaauucgccauguacuuga

SEQ ID NO: 1058422 - RNA, 19 nt, Homo sapiens
  misc_RNA (1)...(19): siRNA sense strand
cauuaaaccagauaacuuc

SEQ ID NO: 1058423 - RNA, 19 nt, Homo sapiens
  misc_RNA (1)...(19): siRNA sense strand
gaugaucagcagaauugaa

SEQ ID NO: 1058424 - RNA, 19 nt, Homo sapiens
  misc_RNA (1)...(19): siRNA sense strand
caacaaugugcuagucaug

SEQ ID NO: 1058425 - RNA, 19 nt, Homo sapiens
  misc_RNA (1)...(19): siRNA sense strand
aaacuguacuuauguuagc

SEQ ID NO: 1058426 - RNA, 19 nt, Homo sapiens
  misc_RNA (1)...(19): siRNA sense strand
ccauguacuugaacuacug

SEQ ID NO: 1058427 - RNA, 19 nt, Homo sapiens
  misc_RNA (1)...(19): siRNA sense strand
ucaaugcacaucuugguau

SEQ ID NO: 1058428 - RNA, 19 nt, Homo sapiens
  misc_RNA (1)...(19): siRNA sense strand
ggacccugaaccaccaaua

SEQ ID NO: 1058429 - RNA, 19 nt, Homo sapiens
  misc_RNA (1)...(19): siRNA sense strand
gaaccaccaauaugacuac

SEQ ID NO: 1058430 - RNA, 19 nt, Homo sapiens
  misc_RNA (1)...(19): siRNA sense strand
cuccaaagccgaacucguu

SEQ ID NO: 1058431 - RNA, 19 nt, Homo sapiens
  misc_RNA (1)...(19): siRNA sense strand
agucccagauuacauguau

SEQ ID NO: 1058432 - RNA, 19 nt, Homo sapiens
  misc_RNA (1)...(19): siRNA sense strand
gaucagcagaauugaauac

SEQ ID NO: 1058433 - RNA, 19 nt, Homo sapiens
  misc_RNA (1)...(19): siRNA sense strand
agacaacaaugugcuaguc

SEQ ID NO: 1058434 - RNA, 19 nt, Homo sapiens
  misc_RNA (1)...(19): siRNA sense strand
gaagcuggaaucucagaag

SEQ ID NO: 1058435 - RNA, 19 nt, Homo sapiens
  misc_RNA (1)...(19): siRNA sense strand
caacggcgaggaaguagca

SEQ ID NO: 1058436 - RNA, 19 nt, Homo sapiens
  misc_RNA (1)...(19): siRNA sense strand
augcacaucuugguauuga

SEQ ID NO: 1058437 - RNA, 19 nt, Homo sapiens
  misc_RNA (1)...(19): siRNA sense strand
cgagacauuaaaccagaua

SEQ ID NO: 1058438 - RNA, 19 nt, Homo sapiens
  misc_RNA (1)...(19): siRNA sense strand
gguacugggcgucacugua

SEQ ID NO: 1058439 - RNA, 19 nt, Homo sapiens
  misc_RNA (1)...(19): siRNA sense strand
agacaggcaagcaaacuga

SEQ ID NO: 1058440 - RNA, 19 nt, Homo sapiens
  misc_RNA (1)...(19): siRNA sense strand
gacccugaaccaccaauau

SEQ ID NO: 1058441 - RNA, 19 nt, Homo sapiens
  misc_RNA (1)...(19): siRNA sense strand
caccaacggcgaggaagua

SEQ ID NO: 1058442 - RNA, 19 nt, Homo sapiens
  misc_RNA (1)...(19): siRNA sense strand
gaauugaauacgugcauac

SEQ ID NO: 1058443 - RNA, 19 nt, Homo sapiens
  misc_RNA (1)...(19): siRNA sense strand
aggcagcuauuccgcauuc

SEQ ID NO: 1058444 - RNA, 19 nt, Homo sapiens
  misc_RNA (1)...(19): siRNA sense strand
gaggaagucccagauuaca

SEQ ID NO: 1058445 - RNA, 19 nt, Homo sapiens
  misc_RNA (1)...(19): siRNA sense strand
agaauucgccauguacuug

SEQ ID NO: 1058446 - RNA, 19 nt, Homo sapiens
  misc_RNA (1)...(19): siRNA sense strand
uuucuacaccgagacauua

SEQ ID NO: 1058447 - RNA, 19 nt, Homo sapiens
  misc_RNA (1)...(19): siRNA sense strand
ugacuacacauuugauugg

SEQ ID NO: 1058448 - RNA, 19 nt, Homo sapiens
  misc_RNA (1)...(19): siRNA sense strand
gucgugggcugcgcuuuga

SEQ ID NO: 1058449 - RNA, 19 nt, Homo sapiens
  misc_RNA (1)...(19): siRNA sense strand
ccucuuuaauuucuguuca

SEQ ID NO: 1058450 - RNA, 19 nt, Homo sapiens
  misc_RNA (1)...(19): siRNA sense strand
gacuacacauuugauugga

SEQ ID NO: 1058451 - RNA, 19 nt, Homo sapiens
  misc_RNA (1)...(19): siRNA sense strand
gcagcuauuccgcauucuu

SEQ ID NO: 1058452 - RNA, 19 nt, Homo sapiens
  misc_RNA (1)...(19): siRNA sense strand
agcaaacucuacacgauuc

SEQ ID NO: 1058453 - RNA, 19 nt, Homo sapiens
  misc_RNA (1)...(19): siRNA sense strand
cuacacgauucuucaaggu

SEQ ID NO: 1058454 - RNA, 19 nt, Homo sapiens
  misc_RNA (1)...(19): siRNA sense strand
auacgugcauacaaagaau

SEQ ID NO: 1058455 - RNA, 19 nt, Homo sapiens
  misc_RNA (1)...(19): siRNA sense strand
ccagaugaucagcagaauu

SEQ ID NO: 1058456 - RNA, 19 nt, Homo sapiens
  misc_RNA (1)...(19): siRNA sense strand
gaaaagauuagugagaaga

SEQ ID NO: 1058457 - RNA, 19 nt, Homo sapiens
  misc_RNA (1)...(19): siRNA sense strand
caaagccgaacucguugug

SEQ ID NO: 1058458 - RNA, 19 nt, Homo sapiens
  misc_RNA (1)...(19): siRNA sense strand
uugauuggacgauguuaaa

SEQ ID NO: 1058459 - RNA, 19 nt, Homo sapiens
  misc_RNA (1)...(19): siRNA sense strand
cagaauucgccauguacuu

SEQ ID NO: 1058460 - RNA, 19 nt, Homo sapiens
  misc_RNA (1)...(19): siRNA sense strand
gacaacaaugugcuaguca

SEQ ID NO: 1058461 - RNA, 19 nt, Homo sapiens
  misc_RNA (1)...(19): siRNA sense strand
acaacaaugugcuagucau

SEQ ID NO: 1058462 - RNA, 19 nt, Homo sapiens
  misc_RNA (1)...(19): siRNA sense strand
gcgucacuguaauaaguug

SEQ ID NO: 1058463 - RNA, 19 nt, Homo sapiens
  misc_RNA (1)...(19): siRNA sense strand
gagacauuaaaccagauaa

SEQ ID NO: 1058464 - RNA, 19 nt, Homo sapiens
  misc_RNA (1)...(19): siRNA sense strand
gaagucccagauuacaugu

SEQ ID NO: 1058465 - RNA, 19 nt, Homo sapiens
  misc_RNA (1)...(19): siRNA sense strand
aaagauuagugagaagaag

SEQ ID NO: 1058466 - RNA, 19 nt, Homo sapiens
  misc_RNA (1)...(19): siRNA sense strand
ggaauccuuaggcuacguu

SEQ ID NO: 1058467 - RNA, 19 nt, Homo sapiens
  misc_RNA (1)...(19): siRNA sense strand
gacauuaaaccagauaacu

SEQ ID NO: 1058468 - RNA, 19 nt, Homo sapiens
  misc_RNA (1)...(19): siRNA sense strand
caggaccaggcaacacaua

SEQ ID NO: 1058469 - RNA, 19 nt, Homo sapiens
  misc_RNA (1)...(19): siRNA sense strand
ucauuggcacuguccgaua

SEQ ID NO: 1058470 - RNA, 19 nt, Homo sapiens
  misc_RNA (1)...(19): siRNA sense strand
gagaagauaaacaccucau

SEQ ID NO: 1058471 - RNA, 19 nt, Homo sapiens
  misc_RNA (1)...(19): siRNA sense strand
ucacuguaauaaguuguuc

SEQ ID NO: 1058472 - RNA, 19 nt, Homo sapiens
  misc_RNA (1)...(19): siRNA sense strand
ugaaccaccaauaugacua

SEQ ID NO: 1058473 - RNA, 19 nt, Homo sapiens
  misc_RNA (1)...(19): siRNA sense strand
aagauaaacaccucauugg

SEQ ID NO: 1058474 - RNA, 19 nt, Homo sapiens
  misc_RNA (1)...(19): siRNA sense strand
uaccguacagagaagauaa

SEQ ID NO: 1058475 - RNA, 19 nt, Homo sapiens
  misc_RNA (1)...(19): siRNA sense strand
ggcaacacauaccguacag

SEQ ID NO: 1058476 - RNA, 19 nt, Homo sapiens
  misc_RNA (1)...(19): siRNA sense strand
ugaggaagucccagauuac

SEQ ID NO: 1058477 - RNA, 19 nt, Homo sapiens
  misc_RNA (1)...(19): siRNA sense strand
gaagauguccaccccuguu

SEQ ID NO: 1058478 - RNA, 19 nt, Homo sapiens
  misc_RNA (1)...(19): siRNA sense strand
caaggacuaaaggcuauga

SEQ ID NO: 1058479 - RNA, 19 nt, Homo sapiens
  misc_RNA (1)...(19): siRNA sense strand
ucagcagaauugaauacgu

SEQ ID NO: 1058480 - RNA, 19 nt, Homo sapiens
  misc_RNA (1)...(19): siRNA sense strand
gauguuaaagcagaaagca

SEQ ID NO: 1058481 - RNA, 19 nt, Homo sapiens
  misc_RNA (1)...(19): siRNA sense strand
accaauaugacuacacauu

SEQ ID NO: 1058482 - RNA, 19 nt, Homo sapiens
  misc_RNA (1)...(19): siRNA sense strand
acaaacuggugcggaagau

SEQ ID NO: 1058483 - RNA, 19 nt, Homo sapiens
  misc_RNA (1)...(19): siRNA sense strand
gcuacguuuucauguauuu

SEQ ID NO: 1058484 - RNA, 19 nt, Homo sapiens
  misc_RNA (1)...(19): siRNA sense strand
agaccucuuuaauuucugu

SEQ ID NO: 1058485 - RNA, 19 nt, Homo sapiens
  misc_RNA (1)...(19): siRNA sense strand
caucaaugcacaucuuggu

SEQ ID NO: 1058486 - RNA, 19 nt, Homo sapiens
  misc_RNA (1)...(19): siRNA sense strand
gauauaaccuucuauguga

SEQ ID NO: 1058487 - RNA, 19 nt, Homo sapiens
  misc_RNA (1)...(19): siRNA sense strand
ggaaucacauuaaacauug

SEQ ID NO: 1058488 - RNA, 19 nt, Homo sapiens
  misc_RNA (1)...(19): siRNA sense strand
gaaaaucacugucuuguug

SEQ ID NO: 1058489 - RNA, 19 nt, Homo sapiens
  misc_RNA (1)...(19): siRNA sense strand
agaaguggaugaagaaauu

SEQ ID NO: 1058490 - RNA, 19 nt, Homo sapiens
  misc_RNA (1)...(19): siRNA sense strand
gagaauugauugcuaaagu

SEQ ID NO: 1058491 - RNA, 19 nt, Homo sapiens
  misc_RNA (1)...(19): siRNA sense strand
gaucuuuccuuuaacagaa

SEQ ID NO: 1058492 - RNA, 19 nt, Homo sapiens
  misc_RNA (1)...(19): siRNA sense strand
caacuuauggagaaucuua

SEQ ID NO: 1058493 - RNA, 19 nt, Homo sapiens
  misc_RNA (1)...(19): siRNA sense strand
gcccgaagguggagaauug

SEQ ID NO: 1058494 - RNA, 19 nt, Homo sapiens
  misc_RNA (1)...(19): siRNA sense strand
gacaucaacuuauggagaa

SEQ ID NO: 1058495 - RNA, 19 nt, Homo sapiens
  misc_RNA (1)...(19): siRNA sense strand
aagaaugacuggaaacaaa

SEQ ID NO: 1058496 - RNA, 19 nt, Homo sapiens
  misc_RNA (1)...(19): siRNA sense strand
aaacaaaucucacuuucuc

SEQ ID NO: 1058497 - RNA, 19 nt, Homo sapiens
  misc_RNA (1)...(19): siRNA sense strand
cuaaagugcuacauaagaa

SEQ ID NO: 1058498 - RNA, 19 nt, Homo sapiens
  misc_RNA (1)...(19): siRNA sense strand
ucacacaacaggagucuua

SEQ ID NO: 1058499 - RNA, 19 nt, Homo sapiens
  misc_RNA (1)...(19): siRNA sense strand
cagcaggaaucacauuaaa

SEQ ID NO: 1058500 - RNA, 19 nt, Homo sapiens
  misc_RNA (1)...(19): siRNA sense strand
caaaauaacucaugaugga

SEQ ID NO: 1058501 - RNA, 19 nt, Homo sapiens
  misc_RNA (1)...(19): siRNA sense strand
gcgcgaaucuccagaaucu

SEQ ID NO: 1058502 - RNA, 19 nt, Homo sapiens
  misc_RNA (1)...(19): siRNA sense strand
caacauagagggagaagga

SEQ ID NO: 1058503 - RNA, 19 nt, Homo sapiens
  misc_RNA (1)...(19): siRNA sense strand
cauuaaacauugcugguaa

SEQ ID NO: 1058504 - RNA, 19 nt, Homo sapiens
  misc_RNA (1)...(19): siRNA sense strand
gcaaugcugcaaauuaauu

SEQ ID NO: 1058505 - RNA, 19 nt, Homo sapiens
  misc_RNA (1)...(19): siRNA sense strand
cgaaacugcuucagaaaca

SEQ ID NO: 1058506 - RNA, 19 nt, Homo sapiens
  misc_RNA (1)...(19): siRNA sense strand
ggauauaaccuucuaugug

SEQ ID NO: 1058507 - RNA, 19 nt, Homo sapiens
  misc_RNA (1)...(19): siRNA sense strand
gcaggaaucacauuaaaca

SEQ ID NO: 1058508 - RNA, 19 nt, Homo sapiens
  misc_RNA (1)...(19): siRNA sense strand
guauuuggcugauguacug

SEQ ID NO: 1058509 - RNA, 19 nt, Homo sapiens
  misc_RNA (1)...(19): siRNA sense strand
ucaaauggguugucuaaaa

SEQ ID NO: 1058510 - RNA, 19 nt, Homo sapiens
  misc_RNA (1)...(19): siRNA sense strand
guggagaauugauugcuaa

SEQ ID NO: 1058511 - RNA, 19 nt, Homo sapiens
  misc_RNA (1)...(19): siRNA sense strand
gcuaaagugcuacauaaga

SEQ ID NO: 1058512 - RNA, 19 nt, Homo sapiens
  misc_RNA (1)...(19): siRNA sense strand
ggaagagucuacaguccau

SEQ ID NO: 1058513 - RNA, 19 nt, Homo sapiens
  misc_RNA (1)...(19): siRNA sense strand
gaagguggagaauugauug

SEQ ID NO: 1058514 - RNA, 19 nt, Homo sapiens
  misc_RNA (1)...(19): siRNA sense strand
auacagauguggagccauu

SEQ ID NO: 1058515 - RNA, 19 nt, Homo sapiens
  misc_RNA (1)...(19): siRNA sense strand
gaugucagcugcaacaaaa

SEQ ID NO: 1058516 - RNA, 19 nt, Homo sapiens
  misc_RNA (1)...(19): siRNA sense strand
uugcuaaagugcuacauaa

SEQ ID NO: 1058517 - RNA, 19 nt, Homo sapiens
  misc_RNA (1)...(19): siRNA sense strand
gaaacugcuucagaaacaa

SEQ ID NO: 1058518 - RNA, 19 nt, Homo sapiens
  misc_RNA (1)...(19): siRNA sense strand
agaaucggacucugaaaua

SEQ ID NO: 1058519 - RNA, 19 nt, Homo sapiens
  misc_RNA (1)...(19): siRNA sense strand
gguggagaauugauugcua

SEQ ID NO: 1058520 - RNA, 19 nt, Homo sapiens
  misc_RNA (1)...(19): siRNA sense strand
agaaagaguuacaggugaa

SEQ ID NO: 1058521 - RNA, 19 nt, Homo sapiens
  misc_RNA (1)...(19): siRNA sense strand
ggccgcauguugaaagaaa

SEQ ID NO: 1058522 - RNA, 19 nt, Homo sapiens
  misc_RNA (1)...(19): siRNA sense strand
cuacguguauaacauauuc

SEQ ID NO: 1058523 - RNA, 19 nt, Homo sapiens
  misc_RNA (1)...(19): siRNA sense strand
aaucucacuuucucucaua

SEQ ID NO: 1058524 - RNA, 19 nt, Homo sapiens
  misc_RNA (1)...(19): siRNA sense strand
gcacuuucacaaucaauga

SEQ ID NO: 1058525 - RNA, 19 nt, Homo sapiens
  misc_RNA (1)...(19): siRNA sense strand
caaacuaucucagugaaac

SEQ ID NO: 1058526 - RNA, 19 nt, Homo sapiens
  misc_RNA (1)...(19): siRNA sense strand
gcagcaggaaucacauuaa

SEQ ID NO: 1058527 - RNA, 19 nt, Homo sapiens
  misc_RNA (1)...(19): siRNA sense strand
gaaguggaugaagaaauua

SEQ ID NO: 1058528 - RNA, 19 nt, Homo sapiens
  misc_RNA (1)...(19): siRNA sense strand
gugaugcacuguaucugaa

SEQ ID NO: 1058529 - RNA, 19 nt, Homo sapiens
  misc_RNA (1)...(19): siRNA sense strand
guauacaacaguuauguga

SEQ ID NO: 1058530 - RNA, 19 nt, Homo sapiens
  misc_RNA (1)...(19): siRNA sense strand
guuuggauguuggauauaa

SEQ ID NO: 1058531 - RNA, 19 nt, Homo sapiens
  misc_RNA (1)...(19): siRNA sense strand
guguauaucuugcagaagu

SEQ ID NO: 1058532 - RNA, 19 nt, Homo sapiens
  misc_RNA (1)...(19): siRNA sense strand
ucuaaucuguguauggaaa

SEQ ID NO: 1058533 - RNA, 19 nt, Homo sapiens
  misc_RNA (1)...(19): siRNA sense strand
auacaacaguuaugugaug

SEQ ID NO: 1058534 - RNA, 19 nt, Homo sapiens
  misc_RNA (1)...(19): siRNA sense strand
ccaagaaguggaugaagaa

SEQ ID NO: 1058535 - RNA, 19 nt, Homo sapiens
  misc_RNA (1)...(19): siRNA sense strand
cugcgaaacugcuucagaa

SEQ ID NO: 1058536 - RNA, 19 nt, Homo sapiens
  misc_RNA (1)...(19): siRNA sense strand
guuaugugaugcacuguau

SEQ ID NO: 1058537 - RNA, 19 nt, Homo sapiens
  misc_RNA (1)...(19): siRNA sense strand
gcaacaaaauaacucauga

SEQ ID NO: 1058538 - RNA, 19 nt, Homo sapiens
  misc_RNA (1)...(19): siRNA sense strand
cauaagaaucggacucuga

SEQ ID NO: 1058539 - RNA, 19 nt, Homo sapiens
  misc_RNA (1)...(19): siRNA sense strand
gaugaggcuacguguauaa

SEQ ID NO: 1058540 - RNA, 19 nt, Homo sapiens
  misc_RNA (1)...(19): siRNA sense strand
gaaucggacucugaaauac

SEQ ID NO: 1058541 - RNA, 19 nt, Homo sapiens
  misc_RNA (1)...(19): siRNA sense strand
gcauauacuccaagaagug

SEQ ID NO: 1058542 - RNA, 19 nt, Homo sapiens
  misc_RNA (1)...(19): siRNA sense strand
ugugguagauggacgugua

SEQ ID NO: 1058543 - RNA, 19 nt, Homo sapiens
  misc_RNA (1)...(19): siRNA sense strand
ucucucauaucuacauuug

SEQ ID NO: 1058544 - RNA, 19 nt, Homo sapiens
  misc_RNA (1)...(19): siRNA sense strand
acacuacccuggaaguaau

SEQ ID NO: 1058545 - RNA, 19 nt, Homo sapiens
  misc_RNA (1)...(19): siRNA sense strand
caacacuacccuggaagua

SEQ ID NO: 1058546 - RNA, 19 nt, Homo sapiens
  misc_RNA (1)...(19): siRNA sense strand
gaggcuacguguauaacau

SEQ ID NO: 1058547 - RNA, 19 nt, Homo sapiens
  misc_RNA (1)...(19): siRNA sense strand
cagaaacaacuuaaucuca

SEQ ID NO: 1058548 - RNA, 19 nt, Homo sapiens
  misc_RNA (1)...(19): siRNA sense strand
aagcaacacuacccuggaa

SEQ ID NO: 1058549 - RNA, 19 nt, Homo sapiens
  misc_RNA (1)...(19): siRNA sense strand
agaauugauugcuaaagug

SEQ ID NO: 1058550 - RNA, 19 nt, Homo sapiens
  misc_RNA (1)...(19): siRNA sense strand
augauggaaugguguauuu

SEQ ID NO: 1058551 - RNA, 19 nt, Homo sapiens
  misc_RNA (1)...(19): siRNA sense strand
gcaaacuaucucagugaaa

SEQ ID NO: 1058552 - RNA, 19 nt, Homo sapiens
  misc_RNA (1)...(19): siRNA sense strand
gcgcaaacuaucucaguga

SEQ ID NO: 1058553 - RNA, 19 nt, Homo sapiens
  misc_RNA (1)...(19): siRNA sense strand
acucugaaauaccuaagaa

SEQ ID NO: 1058554 - RNA, 19 nt, Homo sapiens
  misc_RNA (1)...(19): siRNA sense strand
agaaggacuuguugcacuu

SEQ ID NO: 1058555 - RNA, 19 nt, Homo sapiens
  misc_RNA (1)...(19): siRNA sense strand
ugaugaggcuacguguaua

SEQ ID NO: 1058556 - RNA, 19 nt, Homo sapiens
  misc_RNA (1)...(19): siRNA sense strand
ugaaauaccuaagaaugac

SEQ ID NO: 1058557 - RNA, 19 nt, Homo sapiens
  misc_RNA (1)...(19): siRNA sense strand
uauuggacaucaacuuaug

SEQ ID NO: 1058558 - RNA, 19 nt, Homo sapiens
  misc_RNA (1)...(19): siRNA sense strand
cugaaauaccuaagaauga

SEQ ID NO: 1058559 - RNA, 19 nt, Homo sapiens
  misc_RNA (1)...(19): siRNA sense strand
ucagugaaacucuuacuuc

SEQ ID NO: 1058560 - RNA, 19 nt, Homo sapiens
  misc_RNA (1)...(19): siRNA sense strand
gaaaauaaagguggaaugu

SEQ ID NO: 1058561 - RNA, 19 nt, Homo sapiens
  misc_RNA (1)...(19): siRNA sense strand
ugauguuggugcauacuau

SEQ ID NO: 1058562 - RNA, 19 nt, Homo sapiens
  misc_RNA (1)...(19): siRNA sense strand
gaaggacuuguugcacuuu

SEQ ID NO: 1058563 - RNA, 19 nt, Homo sapiens
  misc_RNA (1)...(19): siRNA sense strand
gauggacguguauaucuug

SEQ ID NO: 1058564 - RNA, 19 nt, Homo sapiens
  misc_RNA (1)...(19): siRNA sense strand
gaguuacaggugaagauuu

SEQ ID NO: 1058565 - RNA, 19 nt, Homo sapiens
  misc_RNA (1)...(19): siRNA sense strand
gcauuauuauuggacauca

SEQ ID NO: 1058566 - RNA, 19 nt, Homo sapiens
  misc_RNA (1)...(19): siRNA sense strand
uugcagaagucuccaaugg

SEQ ID NO: 1058567 - RNA, 19 nt, Homo sapiens
  misc_RNA (1)...(19): siRNA sense strand
uuaaagcguugucaguagu

SEQ ID NO: 1058568 - RNA, 19 nt, Homo sapiens
  misc_RNA (1)...(19): siRNA sense strand
cuuaaagcguugucaguag

SEQ ID NO: 1058569 - RNA, 19 nt, Homo sapiens
  misc_RNA (1)...(19): siRNA sense strand
uaucucagugaaacucuua

SEQ ID NO: 1058570 - RNA, 19 nt, Homo sapiens
  misc_RNA (1)...(19): siRNA sense strand
aaacagugguauacaacag

SEQ ID NO: 1058571 - RNA, 19 nt, Homo sapiens
  misc_RNA (1)...(19): siRNA sense strand
ucacugucuuguugcacua

SEQ ID NO: 1058572 - RNA, 19 nt, Homo sapiens
  misc_RNA (1)...(19): siRNA sense strand
cgaagguggagaauugauu

SEQ ID NO: 1058573 - RNA, 19 nt, Homo sapiens
  misc_RNA (1)...(19): siRNA sense strand
gguagauggacguguauau

SEQ ID NO: 1058574 - RNA, 19 nt, Homo sapiens
  misc_RNA (1)...(19): siRNA sense strand
gcuagcagcaggaaucaca

SEQ ID NO: 1058575 - RNA, 19 nt, Homo sapiens
  misc_RNA (1)...(19): siRNA sense strand
guagucagcaacaacauag

SEQ ID NO: 1058576 - RNA, 19 nt, Homo sapiens
  misc_RNA (1)...(19): siRNA sense strand
gcugcaaauuaauucauca

SEQ ID NO: 1058577 - RNA, 19 nt, Homo sapiens
  misc_RNA (1)...(19): siRNA sense strand
gggugacugugaucuggaa

SEQ ID NO: 1058578 - RNA, 19 nt, Homo sapiens
  misc_RNA (1)...(19): siRNA sense strand
cgcaaacuaucucagugaa

SEQ ID NO: 1058579 - RNA, 19 nt, Homo sapiens
  misc_RNA (1)...(19): siRNA sense strand
ucugaaauaccuaagaaug

SEQ ID NO: 1058580 - RNA, 19 nt, Homo sapiens
  misc_RNA (1)...(19): siRNA sense strand
guagauggacguguauauc

SEQ ID NO: 1058581 - RNA, 19 nt, Homo sapiens
  misc_RNA (1)...(19): siRNA sense strand
ugguuuggauguuggauau

SEQ ID NO: 1058582 - RNA, 19 nt, Homo sapiens
  misc_RNA (1)...(19): siRNA sense strand
acagugguauacaacaguu

SEQ ID NO: 1058583 - RNA, 19 nt, Homo sapiens
  misc_RNA (1)...(19): siRNA sense strand
uaagaaugacuggaaacaa

SEQ ID NO: 1058584 - RNA, 19 nt, Homo sapiens
  misc_RNA (1)...(19): siRNA sense strand
gagggagaaggacuuguug

SEQ ID NO: 1058585 - RNA, 19 nt, Homo sapiens
  misc_RNA (1)...(19): siRNA sense strand
gaaacucuuacuucacaca

SEQ ID NO: 1058586 - RNA, 19 nt, Homo sapiens
  misc_RNA (1)...(19): siRNA sense strand
ggaaaugaauaucagcuua

SEQ ID NO: 1058587 - RNA, 19 nt, Homo sapiens
  misc_RNA (1)...(19): siRNA sense strand
guagucaccugcaagcuua

SEQ ID NO: 1058588 - RNA, 19 nt, Homo sapiens
  misc_RNA (1)...(19): siRNA sense strand
uaacugaagucuacuacaa

SEQ ID NO: 1058589 - RNA, 19 nt, Homo sapiens
  misc_RNA (1)...(19): siRNA sense strand
ccaauucuguuuacucuga

SEQ ID NO: 1058590 - RNA, 19 nt, Homo sapiens
  misc_RNA (1)...(19): siRNA sense strand
gauuauaccucacuauucu

SEQ ID NO: 1058591 - RNA, 19 nt, Homo sapiens
  misc_RNA (1)...(19): siRNA sense strand
gcaccuuuauuuaugguuu

SEQ ID NO: 1058592 - RNA, 19 nt, Homo sapiens
  misc_RNA (1)...(19): siRNA sense strand
gaaaguaagccauuaacca

SEQ ID NO: 1058593 - RNA, 19 nt, Homo sapiens
  misc_RNA (1)...(19): siRNA sense strand
gaaucuaucucuaccuuac

SEQ ID NO: 1058594 - RNA, 19 nt, Homo sapiens
  misc_RNA (1)...(19): siRNA sense strand
ccugcaagcuuauuuaaau

SEQ ID NO: 1058595 - RNA, 19 nt, Homo sapiens
  misc_RNA (1)...(19): siRNA sense strand
cugcgacucugguuaauaa

SEQ ID NO: 1058596 - RNA, 19 nt, Homo sapiens
  misc_RNA (1)...(19): siRNA sense strand
caaagucaguuacagaagu

SEQ ID NO: 1058597 - RNA, 19 nt, Homo sapiens
  misc_RNA (1)...(19): siRNA sense strand
aaugguggcucgagucuuu

SEQ ID NO: 1058598 - RNA, 19 nt, Homo sapiens
  misc_RNA (1)...(19): siRNA sense strand
gauauugaccuucaucuag

SEQ ID NO: 1058599 - RNA, 19 nt, Homo sapiens
  misc_RNA (1)...(19): siRNA sense strand
guauacagcugguuguuac

SEQ ID NO: 1058600 - RNA, 19 nt, Homo sapiens
  misc_RNA (1)...(19): siRNA sense strand
aaagcaagguuuagaaucu

SEQ ID NO: 1058601 - RNA, 19 nt, Homo sapiens
  misc_RNA (1)...(19): siRNA sense strand
gaaacaaagucaguuacag

SEQ ID NO: 1058602 - RNA, 19 nt, Homo sapiens
  misc_RNA (1)...(19): siRNA sense strand
gauugcugcuugccucuuu

SEQ ID NO: 1058603 - RNA, 19 nt, Homo sapiens
  misc_RNA (1)...(19): siRNA sense strand
ggugaaagaucuguuugug

SEQ ID NO: 1058604 - RNA, 19 nt, Homo sapiens
  misc_RNA (1)...(19): siRNA sense strand
cacaguggcugcuacaguu

SEQ ID NO: 1058605 - RNA, 19 nt, Homo sapiens
  misc_RNA (1)...(19): siRNA sense strand
cagaaucuaucucuaccuu

SEQ ID NO: 1058606 - RNA, 19 nt, Homo sapiens
  misc_RNA (1)...(19): siRNA sense strand
uggaucagaugaagaaaga

SEQ ID NO: 1058607 - RNA, 19 nt, Homo sapiens
  misc_RNA (1)...(19): siRNA sense strand
ucaaagcaauggcaguguu

SEQ ID NO: 1058608 - RNA, 19 nt, Homo sapiens
  misc_RNA (1)...(19): siRNA sense strand
ggacuucugucuuuucuga

SEQ ID NO: 1058609 - RNA, 19 nt, Homo sapiens
  misc_RNA (1)...(19): siRNA sense strand
gaaaugaauaucagcuuag

SEQ ID NO: 1058610 - RNA, 19 nt, Homo sapiens
  misc_RNA (1)...(19): siRNA sense strand
gauuacgacuggcucaaau

SEQ ID NO: 1058611 - RNA, 19 nt, Homo sapiens
  misc_RNA (1)...(19): siRNA sense strand
cuagaaacaaagucaguua

SEQ ID NO: 1058612 - RNA, 19 nt, Homo sapiens
  misc_RNA (1)...(19): siRNA sense strand
agaagaugguggugaaaga

SEQ ID NO: 1058613 - RNA, 19 nt, Homo sapiens
  misc_RNA (1)...(19): siRNA sense strand
aaacaaagucaguuacaga

SEQ ID NO: 1058614 - RNA, 19 nt, Homo sapiens
  misc_RNA (1)...(19): siRNA sense strand
guaucaacauccuacagaa

SEQ ID NO: 1058615 - RNA, 19 nt, Homo sapiens
  misc_RNA (1)...(19): siRNA sense strand
caccaaagacuacauuaug

SEQ ID NO: 1058616 - RNA, 19 nt, Homo sapiens
  misc_RNA (1)...(19): siRNA sense strand
ggauauugaccuucaucua

SEQ ID NO: 1058617 - RNA, 19 nt, Homo sapiens
  misc_RNA (1)...(19): siRNA sense strand
uuucugaccugguggauug

SEQ ID NO: 1058618 - RNA, 19 nt, Homo sapiens
  misc_RNA (1)...(19): siRNA sense strand
caacuucuuggcaccuuua

SEQ ID NO: 1058619 - RNA, 19 nt, Homo sapiens
  misc_RNA (1)...(19): siRNA sense strand
ucuaguaacugaagucuac

SEQ ID NO: 1058620 - RNA, 19 nt, Homo sapiens
  misc_RNA (1)...(19): siRNA sense strand
acaguuguguaucuaguaa

SEQ ID NO: 1058621 - RNA, 19 nt, Homo sapiens
  misc_RNA (1)...(19): siRNA sense strand
ugcauuacuuuccagaaua

SEQ ID NO: 1058622 - RNA, 19 nt, Homo sapiens
  misc_RNA (1)...(19): siRNA sense strand
cauugaaaguaagccauua

SEQ ID NO: 1058623 - RNA, 19 nt, Homo sapiens
  misc_RNA (1)...(19): siRNA sense strand
accaaagacuacauuauga

SEQ ID NO: 1058624 - RNA, 19 nt, Homo sapiens
  misc_RNA (1)...(19): siRNA sense strand
gacauuuccuggauuacga

SEQ ID NO: 1058625 - RNA, 19 nt, Homo sapiens
  misc_RNA (1)...(19): siRNA sense strand
gguauacagcugguuguua

SEQ ID NO: 1058626 - RNA, 19 nt, Homo sapiens
  misc_RNA (1)...(19): siRNA sense strand
gcauuacuuuccagaauac

SEQ ID NO: 1058627 - RNA, 19 nt, Homo sapiens
  misc_RNA (1)...(19): siRNA sense strand
ccaaagacuacauuaugaa

SEQ ID NO: 1058628 - RNA, 19 nt, Homo sapiens
  misc_RNA (1)...(19): siRNA sense strand
uaugaagccuacacaggaa

SEQ ID NO: 1058629 - RNA, 19 nt, Homo sapiens
  misc_RNA (1)...(19): siRNA sense strand
cuucuuggcaccuuuauuu

SEQ ID NO: 1058630 - RNA, 19 nt, Homo sapiens
  misc_RNA (1)...(19): siRNA sense strand
uuugacauuuccuggauua

SEQ ID NO: 1058631 - RNA, 19 nt, Homo sapiens
  misc_RNA (1)...(19): siRNA sense strand
ggaauuuggacuugaaaca

SEQ ID NO: 1058632 - RNA, 19 nt, Homo sapiens
  misc_RNA (1)...(19): siRNA sense strand
cauuaaccauuccaaagga

SEQ ID NO: 1058633 - RNA, 19 nt, Homo sapiens
  misc_RNA (1)...(19): siRNA sense strand
cuacacaggaaaugaauau

SEQ ID NO: 1058634 - RNA, 19 nt, Homo sapiens
  misc_RNA (1)...(19): siRNA sense strand
ugaauuaccaucagcugaa

SEQ ID NO: 1058635 - RNA, 19 nt, Homo sapiens
  misc_RNA (1)...(19): siRNA sense strand
gacagaagccacauucgau

SEQ ID NO: 1058636 - RNA, 19 nt, Homo sapiens
  misc_RNA (1)...(19): siRNA sense strand
gaagauuauaccucacuau

SEQ ID NO: 1058637 - RNA, 19 nt, Homo sapiens
  misc_RNA (1)...(19): siRNA sense strand
ucaacauccuacagaagaa

SEQ ID NO: 1058638 - RNA, 19 nt, Homo sapiens
  misc_RNA (1)...(19): siRNA sense strand
ccacugggcaaagaaagua

SEQ ID NO: 1058639 - RNA, 19 nt, Homo sapiens
  misc_RNA (1)...(19): siRNA sense strand
uaaaaccaaucaccaaaga

SEQ ID NO: 1058640 - RNA, 19 nt, Homo sapiens
  misc_RNA (1)...(19): siRNA sense strand
aguagaagaugguggugaa

SEQ ID NO: 1058641 - RNA, 19 nt, Homo sapiens
  misc_RNA (1)...(19): siRNA sense strand
acugaagucuacuacaauu

SEQ ID NO: 1058642 - RNA, 19 nt, Homo sapiens
  misc_RNA (1)...(19): siRNA sense strand
cucgauggcuacucuguaa

SEQ ID NO: 1058643 - RNA, 19 nt, Homo sapiens
  misc_RNA (1)...(19): siRNA sense strand
gguaucaacauccuacaga

SEQ ID NO: 1058644 - RNA, 19 nt, Homo sapiens
  misc_RNA (1)...(19): siRNA sense strand
gaauuaccaucagcugaag

SEQ ID NO: 1058645 - RNA, 19 nt, Homo sapiens
  misc_RNA (1)...(19): siRNA sense strand
guauguggcgccucuggua

SEQ ID NO: 1058646 - RNA, 19 nt, Homo sapiens
  misc_RNA (1)...(19): siRNA sense strand
ucaccugcaagcuuauuua

SEQ ID NO: 1058647 - RNA, 19 nt, Homo sapiens
  misc_RNA (1)...(19): siRNA sense strand
acagaagccacauucgaua

SEQ ID NO: 1058648 - RNA, 19 nt, Homo sapiens
  misc_RNA (1)...(19): siRNA sense strand
ggaaauauaauggucacau

SEQ ID NO: 1058649 - RNA, 19 nt, Homo sapiens
  misc_RNA (1)...(19): siRNA sense strand
gaaucucagaguccuguuu

SEQ ID NO: 1058650 - RNA, 19 nt, Homo sapiens
  misc_RNA (1)...(19): siRNA sense strand
aaagucaguuacagaagug

SEQ ID NO: 1058651 - RNA, 19 nt, Homo sapiens
  misc_RNA (1)...(19): siRNA sense strand
aguaagccauuaaccauuc

SEQ ID NO: 1058652 - RNA, 19 nt, Homo sapiens
  misc_RNA (1)...(19): siRNA sense strand
auauugaccuucaucuaga

SEQ ID NO: 1058653 - RNA, 19 nt, Homo sapiens
  misc_RNA (1)...(19): siRNA sense strand
acacaacucugcuuuugaa

SEQ ID NO: 1058654 - RNA, 19 nt, Homo sapiens
  misc_RNA (1)...(19): siRNA sense strand
guaaugcugcuucacacaa

SEQ ID NO: 1058655 - RNA, 19 nt, Homo sapiens
  misc_RNA (1)...(19): siRNA sense strand
uaucuggaauuuggacuug

SEQ ID NO: 1058656 - RNA, 19 nt, Homo sapiens
  misc_RNA (1)...(19): siRNA sense strand
ggugauggccagugucaug

SEQ ID NO: 1058657 - RNA, 19 nt, Homo sapiens
  misc_RNA (1)...(19): siRNA sense strand
acacaggaaaugaauauca

SEQ ID NO: 1058658 - RNA, 19 nt, Homo sapiens
  misc_RNA (1)...(19): siRNA sense strand
guaucugacuguggcauga

SEQ ID NO: 1058659 - RNA, 19 nt, Homo sapiens
  misc_RNA (1)...(19): siRNA sense strand
uucgaggacuucugucuuu

SEQ ID NO: 1058660 - RNA, 19 nt, Homo sapiens
  misc_RNA (1)...(19): siRNA sense strand
gaagggaaaaugaagguaa

SEQ ID NO: 1058661 - RNA, 19 nt, Homo sapiens
  misc_RNA (1)...(19): siRNA sense strand
gaucagaugaagaaagaag

SEQ ID NO: 1058662 - RNA, 19 nt, Homo sapiens
  misc_RNA (1)...(19): siRNA sense strand
gaagaugguggugaaagau

SEQ ID NO: 1058663 - RNA, 19 nt, Homo sapiens
  misc_RNA (1)...(19): siRNA sense strand
aaaguaagccauuaaccau

SEQ ID NO: 1058664 - RNA, 19 nt, Homo sapiens
  misc_RNA (1)...(19): siRNA sense strand
accaucagcugaagggaaa

SEQ ID NO: 1058665 - RNA, 19 nt, Homo sapiens
  misc_RNA (1)...(19): siRNA sense strand
auaauagucuacuguccaa

SEQ ID NO: 1058666 - RNA, 19 nt, Homo sapiens
  misc_RNA (1)...(19): siRNA sense strand
auaccucacuauucucuug

SEQ ID NO: 1058667 - RNA, 19 nt, Homo sapiens
  misc_RNA (1)...(19): siRNA sense strand
ggauuacgacuggcucaaa

SEQ ID NO: 1058668 - RNA, 19 nt, Homo sapiens
  misc_RNA (1)...(19): siRNA sense strand
gaaagaucuguuuguguca

SEQ ID NO: 1058669 - RNA, 19 nt, Homo sapiens
  misc_RNA (1)...(19): siRNA sense strand
caaagcaauggcaguguug

SEQ ID NO: 1058670 - RNA, 19 nt, Homo sapiens
  misc_RNA (1)...(19): siRNA sense strand
uauccagaaucuaucucua

SEQ ID NO: 1058671 - RNA, 19 nt, Homo sapiens
  misc_RNA (1)...(19): siRNA sense strand
ugacagaagccacauucga

SEQ ID NO: 1058672 - RNA, 19 nt, Homo sapiens
  misc_RNA (1)...(19): siRNA sense strand
aaguaucccuuuaaugaca

SEQ ID NO: 1058673 - RNA, 19 nt, Homo sapiens
  misc_RNA (1)...(19): siRNA sense strand
cuuggcaccuuuauuuaug

SEQ ID NO: 1058674 - RNA, 19 nt, Homo sapiens
  misc_RNA (1)...(19): siRNA sense strand
gaaaagcaagguuuagaau

SEQ ID NO: 1058675 - RNA, 19 nt, Homo sapiens
  misc_RNA (1)...(19): siRNA sense strand
agaagauuauaccucacua

SEQ ID NO: 1058676 - RNA, 19 nt, Homo sapiens
  misc_RNA (1)...(19): siRNA sense strand
gguggugaaagaucuguuu

SEQ ID NO: 1058677 - RNA, 19 nt, Homo sapiens
  misc_RNA (1)...(19): siRNA sense strand
guccaauucuguuuacucu

SEQ ID NO: 1058678 - RNA, 19 nt, Homo sapiens
  misc_RNA (1)...(19): siRNA sense strand
ucacacaacucugcuuuug

SEQ ID NO: 1058679 - RNA, 19 nt, Homo sapiens
  misc_RNA (1)...(19): siRNA sense strand
uaagcacgguugagcuaca

SEQ ID NO: 1058680 - RNA, 19 nt, Homo sapiens
  misc_RNA (1)...(19): siRNA sense strand
gaagccacauucgauacuc

SEQ ID NO: 1058681 - RNA, 19 nt, Homo sapiens
  misc_RNA (1)...(19): siRNA sense strand
gcuuugcgguuggccauga

SEQ ID NO: 1058682 - RNA, 19 nt, Homo sapiens
  misc_RNA (1)...(19): siRNA sense strand
ccagugucaugcagaagau

SEQ ID NO: 1058683 - RNA, 19 nt, Homo sapiens
  misc_RNA (1)...(19): siRNA sense strand
gaaaaugaagguaacuguu

SEQ ID NO: 1058684 - RNA, 19 nt, Homo sapiens
  misc_RNA (1)...(19): siRNA sense strand
gcucgagucuuuuauuauc

SEQ ID NO: 1058685 - RNA, 19 nt, Homo sapiens
  misc_RNA (1)...(19): siRNA sense strand
aauaagcacgguugagcua

SEQ ID NO: 1058686 - RNA, 19 nt, Homo sapiens
  misc_RNA (1)...(19): siRNA sense strand
gaagacaucucauuuacaa

SEQ ID NO: 1058687 - RNA, 19 nt, Homo sapiens
  misc_RNA (1)...(19): siRNA sense strand
ggacagcuuugauuucaua

SEQ ID NO: 1058688 - RNA, 19 nt, Homo sapiens
  misc_RNA (1)...(19): siRNA sense strand
gaagaggacagcuuugauu

SEQ ID NO: 1058689 - RNA, 19 nt, Homo sapiens
  misc_RNA (1)...(19): siRNA sense strand
auauagaccucguuacaua

SEQ ID NO: 1058690 - RNA, 19 nt, Homo sapiens
  misc_RNA (1)...(19): siRNA sense strand
gaggacagcuuugauuuca

SEQ ID NO: 1058691 - RNA, 19 nt, Homo sapiens
  misc_RNA (1)...(19): siRNA sense strand
ucagaagacaucucauuua

SEQ ID NO: 1058692 - RNA, 19 nt, Homo sapiens
  misc_RNA (1)...(19): siRNA sense strand
gaucauuagguuucucuua

SEQ ID NO: 1058693 - RNA, 19 nt, Homo sapiens
  misc_RNA (1)...(19): siRNA sense strand
gcaccuauccuggcaaauu

SEQ ID NO: 1058694 - RNA, 19 nt, Homo sapiens
  misc_RNA (1)...(19): siRNA sense strand
cagaagacaucucauuuac

SEQ ID NO: 1058695 - RNA, 19 nt, Homo sapiens
  misc_RNA (1)...(19): siRNA sense strand
caccuauccuggcaaauuu

SEQ ID NO: 1058696 - RNA, 19 nt, Homo sapiens
  misc_RNA (1)...(19): siRNA sense strand
gagaauggaccaggaugua

SEQ ID NO: 1058697 - RNA, 19 nt, Homo sapiens
  misc_RNA (1)...(19): siRNA sense strand
gaccuuauccugacuuuua

SEQ ID NO: 1058698 - RNA, 19 nt, Homo sapiens
  misc_RNA (1)...(19): siRNA sense strand
ccuguuauguugugaaaug

SEQ ID NO: 1058699 - RNA, 19 nt, Homo sapiens
  misc_RNA (1)...(19): siRNA sense strand
caauauagaccucguuaca

SEQ ID NO: 1058700 - RNA, 19 nt, Homo sapiens
  misc_RNA (1)...(19): siRNA sense strand
ugaagaagaggacagcuuu

SEQ ID NO: 1058701 - RNA, 19 nt, Homo sapiens
  misc_RNA (1)...(19): siRNA sense strand
ggaauguguuuguuaucug

SEQ ID NO: 1058702 - RNA, 19 nt, Homo sapiens
  misc_RNA (1)...(19): siRNA sense strand
gauguacggugacgucagu

SEQ ID NO: 1058703 - RNA, 19 nt, Homo sapiens
  misc_RNA (1)...(19): siRNA sense strand
uagguggcuuugacucuua

SEQ ID NO: 1058704 - RNA, 19 nt, Homo sapiens
  misc_RNA (1)...(19): siRNA sense strand
caucuacgccuguuauguu

SEQ ID NO: 1058705 - RNA, 19 nt, Homo sapiens
  misc_RNA (1)...(19): siRNA sense strand
ggauaucagugggcaccua

SEQ ID NO: 1058706 - RNA, 19 nt, Homo sapiens
  misc_RNA (1)...(19): siRNA sense strand
gacaucucauuuacaacua

SEQ ID NO: 1058707 - RNA, 19 nt, Homo sapiens
  misc_RNA (1)...(19): siRNA sense strand
gggcaccuauccuggcaaa

SEQ ID NO: 1058708 - RNA, 19 nt, Homo sapiens
  misc_RNA (1)...(19): siRNA sense strand
guugugaaauguauaacug

SEQ ID NO: 1058709 - RNA, 19 nt, Homo sapiens
  misc_RNA (1)...(19): siRNA sense strand
cgucauucuugguuuguuu

SEQ ID NO: 1058710 - RNA, 19 nt, Homo sapiens
  misc_RNA (1)...(19): siRNA sense strand
acauagaaguggcucauag

SEQ ID NO: 1058711 - RNA, 19 nt, Homo sapiens
  misc_RNA (1)...(19): siRNA sense strand
cguggaauguguuuguuau

SEQ ID NO: 1058712 - RNA, 19 nt, Homo sapiens
  misc_RNA (1)...(19): siRNA sense strand
gaagaagaggacagcuuug

SEQ ID NO: 1058713 - RNA, 19 nt, Homo sapiens
  misc_RNA (1)...(19): siRNA sense strand
uauuugacuuccuuggaua

SEQ ID NO: 1058714 - RNA, 19 nt, Homo sapiens
  misc_RNA (1)...(19): siRNA sense strand
gcuggagaggcaaauauuu

SEQ ID NO: 1058715 - RNA, 19 nt, Homo sapiens
  misc_RNA (1)...(19): siRNA sense strand
gaagaccaucgcuacauca

SEQ ID NO: 1058716 - RNA, 19 nt, Homo sapiens
  misc_RNA (1)...(19): siRNA sense strand
cagcuuugauuucauaggu

SEQ ID NO: 1058717 - RNA, 19 nt, Homo sapiens
  misc_RNA (1)...(19): siRNA sense strand
uggcuaguccucuggguua

SEQ ID NO: 1058718 - RNA, 19 nt, Homo sapiens
  misc_RNA (1)...(19): siRNA sense strand
uaucaagggccucagaaga

SEQ ID NO: 1058719 - RNA, 19 nt, Homo sapiens
  misc_RNA (1)...(19): siRNA sense strand
caggguguuugcuggagua

SEQ ID NO: 1058720 - RNA, 19 nt, Homo sapiens
  misc_RNA (1)...(19): siRNA sense strand
ccucagaagacaucucauu

SEQ ID NO: 1058721 - RNA, 19 nt, Homo sapiens
  misc_RNA (1)...(19): siRNA sense strand
uaucgucauucuugguuug

SEQ ID NO: 1058722 - RNA, 19 nt, Homo sapiens
  misc_RNA (1)...(19): siRNA sense strand
agaagaccaucgcuacauc

SEQ ID NO: 1058723 - RNA, 19 nt, Homo sapiens
  misc_RNA (1)...(19): siRNA sense strand
guuaucugcuucuauuugg

SEQ ID NO: 1058724 - RNA, 19 nt, Homo sapiens
  misc_RNA (1)...(19): siRNA sense strand
gaucuugguggauggagaa

SEQ ID NO: 1058725 - RNA, 19 nt, Homo sapiens
  misc_RNA (1)...(19): siRNA sense strand
ucaagggccucagaagaca

SEQ ID NO: 1058726 - RNA, 19 nt, Homo sapiens
  misc_RNA (1)...(19): siRNA sense strand
aagaggacagcuuugauuu

SEQ ID NO: 1058727 - RNA, 19 nt, Homo sapiens
  misc_RNA (1)...(19): siRNA sense strand
gguguuugcuggaguacca

SEQ ID NO: 1058728 - RNA, 19 nt, Homo sapiens
  misc_RNA (1)...(19): siRNA sense strand
uauagaccucguuacauaa

SEQ ID NO: 1058729 - RNA, 19 nt, Homo sapiens
  misc_RNA (1)...(19): siRNA sense strand
auaguucccuccagauugu

SEQ ID NO: 1058730 - RNA, 19 nt, Homo sapiens
  misc_RNA (1)...(19): siRNA sense strand
ggagaauggaccaggaugu

SEQ ID NO: 1058731 - RNA, 19 nt, Homo sapiens
  misc_RNA (1)...(19): siRNA sense strand
cauaguucccuccagauug

SEQ ID NO: 1058732 - RNA, 19 nt, Homo sapiens
  misc_RNA (1)...(19): siRNA sense strand
gauaucagugggcaccuau

SEQ ID NO: 1058733 - RNA, 19 nt, Homo sapiens
  misc_RNA (1)...(19): siRNA sense strand
gauaugcugucuggcuagu

SEQ ID NO: 1058734 - RNA, 19 nt, Homo sapiens
  misc_RNA (1)...(19): siRNA sense strand
cagaccuuauccugacuuu

SEQ ID NO: 1058735 - RNA, 19 nt, Homo sapiens
  misc_RNA (1)...(19): siRNA sense strand
uggguuacguggaaugugu

SEQ ID NO: 1058736 - RNA, 19 nt, Homo sapiens
  misc_RNA (1)...(19): siRNA sense strand
gcacuggcagguuucaucu

SEQ ID NO: 1058737 - RNA, 19 nt, Homo sapiens
  misc_RNA (1)...(19): siRNA sense strand
uggaauguguuuguuaucu

SEQ ID NO: 1058738 - RNA, 19 nt, Homo sapiens
  misc_RNA (1)...(19): siRNA sense strand
aagaagaggacagcuuuga

SEQ ID NO: 1058739 - RNA, 19 nt, Homo sapiens
  misc_RNA (1)...(19): siRNA sense strand
cuacgccuguuauguugug

SEQ ID NO: 1058740 - RNA, 19 nt, Homo sapiens
  misc_RNA (1)...(19): siRNA sense strand
ucauaguucccuccagauu

SEQ ID NO: 1058741 - RNA, 19 nt, Homo sapiens
  misc_RNA (1)...(19): siRNA sense strand
uagaaguggcucauaguuc

SEQ ID NO: 1058742 - RNA, 19 nt, Homo sapiens
  misc_RNA (1)...(19): siRNA sense strand
cgccuguuauguugugaaa

SEQ ID NO: 1058743 - RNA, 19 nt, Homo sapiens
  misc_RNA (1)...(19): siRNA sense strand
cagccuauguacaugucaa

SEQ ID NO: 1058744 - RNA, 19 nt, Homo sapiens
  misc_RNA (1)...(19): siRNA sense strand
uuacaacuacagccuaugu

SEQ ID NO: 1058745 - RNA, 19 nt, Homo sapiens
  misc_RNA (1)...(19): siRNA sense strand
cucagaagacaucucauuu

SEQ ID NO: 1058746 - RNA, 19 nt, Homo sapiens
  misc_RNA (1)...(19): siRNA sense strand
ugacucuuauggcuaucaa

SEQ ID NO: 1058747 - RNA, 19 nt, Homo sapiens
  misc_RNA (1)...(19): siRNA sense strand
uuucauagguggcuuugac

SEQ ID NO: 1058748 - RNA, 19 nt, Homo sapiens
  misc_RNA (1)...(19): siRNA sense strand
ucaaugcaccgaucuuggu

SEQ ID NO: 1058749 - RNA, 19 nt, Homo sapiens
  misc_RNA (1)...(19): siRNA sense strand
agacaucucauuuacaacu

SEQ ID NO: 1058750 - RNA, 19 nt, Homo sapiens
  misc_RNA (1)...(19): siRNA sense strand
gcuaucaagggccucagaa

SEQ ID NO: 1058751 - RNA, 19 nt, Homo sapiens
  misc_RNA (1)...(19): siRNA sense strand
auauuugacuuccuuggau

SEQ ID NO: 1058752 - RNA, 19 nt, Homo sapiens
  misc_RNA (1)...(19): siRNA sense strand
auguauaacugaagaagag

SEQ ID NO: 1058753 - RNA, 19 nt, Homo sapiens
  misc_RNA (1)...(19): siRNA sense strand
guacauagaaguggcucau

SEQ ID NO: 1058754 - RNA, 19 nt, Homo sapiens
  misc_RNA (1)...(19): siRNA sense strand
auucuugguuuguuuggaa

SEQ ID NO: 1058755 - RNA, 19 nt, Homo sapiens
  misc_RNA (1)...(19): siRNA sense strand
gugcuggagaggcaaauau

SEQ ID NO: 1058756 - RNA, 19 nt, Homo sapiens
  misc_RNA (1)...(19): siRNA sense strand
cuuugacucuuauggcuau

SEQ ID NO: 1058757 - RNA, 19 nt, Homo sapiens
  misc_RNA (1)...(19): siRNA sense strand
uaucaaugcaccgaucuug

SEQ ID NO: 1058758 - RNA, 19 nt, Homo sapiens
  misc_RNA (1)...(19): siRNA sense strand
ggggaccucucaaaggaaa

SEQ ID NO: 1058759 - RNA, 19 nt, Homo sapiens
  misc_RNA (1)...(19): siRNA sense strand
cagaagaccaucgcuacau

SEQ ID NO: 1058760 - RNA, 19 nt, Homo sapiens
  misc_RNA (1)...(19): siRNA sense strand
cuugguggauggagaaugg

SEQ ID NO: 1058761 - RNA, 19 nt, Homo sapiens
  misc_RNA (1)...(19): siRNA sense strand
uuacguggaauguguuugu

SEQ ID NO: 1058762 - RNA, 19 nt, Homo sapiens
  misc_RNA (1)...(19): siRNA sense strand
caucucauuuacaacuaca

SEQ ID NO: 1058763 - RNA, 19 nt, Homo sapiens
  misc_RNA (1)...(19): siRNA sense strand
cauagaaguggcucauagu

SEQ ID NO: 1058764 - RNA, 19 nt, Homo sapiens
  misc_RNA (1)...(19): siRNA sense strand
ccagaagaccaucgcuaca

SEQ ID NO: 1058765 - RNA, 19 nt, Homo sapiens
  misc_RNA (1)...(19): siRNA sense strand
ggccucagaagacaucuca

SEQ ID NO: 1058766 - RNA, 19 nt, Homo sapiens
  misc_RNA (1)...(19): siRNA sense strand
gaaagggucuauaccaaug

SEQ ID NO: 1058767 - RNA, 19 nt, Homo sapiens
  misc_RNA (1)...(19): siRNA sense strand
gaccugcacuucagauuaa

SEQ ID NO: 1058768 - RNA, 19 nt, Homo sapiens
  misc_RNA (1)...(19): siRNA sense strand
gcaggugccuagcuucaua

SEQ ID NO: 1058769 - RNA, 19 nt, Homo sapiens
  misc_RNA (1)...(19): siRNA sense strand
gaagugcggucgcuuugaa

SEQ ID NO: 1058770 - RNA, 19 nt, Homo sapiens
  misc_RNA (1)...(19): siRNA sense strand
gcgacaagauggaguguuu

SEQ ID NO: 1058771 - RNA, 19 nt, Homo sapiens
  misc_RNA (1)...(19): siRNA sense strand
caacagugcaggcccauua

SEQ ID NO: 1058772 - RNA, 19 nt, Homo sapiens
  misc_RNA (1)...(19): siRNA sense strand
gagcagccaucuuucugua

SEQ ID NO: 1058773 - RNA, 19 nt, Homo sapiens
  misc_RNA (1)...(19): siRNA sense strand
cuaccaagauuuaugauga

SEQ ID NO: 1058774 - RNA, 19 nt, Homo sapiens
  misc_RNA (1)...(19): siRNA sense strand
cgacguauaagaaagauua

SEQ ID NO: 1058775 - RNA, 19 nt, Homo sapiens
  misc_RNA (1)...(19): siRNA sense strand
gacaguaaauauccaugua

SEQ ID NO: 1058776 - RNA, 19 nt, Homo sapiens
  misc_RNA (1)...(19): siRNA sense strand
ccacugaguuucgagauaa

SEQ ID NO: 1058777 - RNA, 19 nt, Homo sapiens
  misc_RNA (1)...(19): siRNA sense strand
ccacacaccaggacgauua

SEQ ID NO: 1058778 - RNA, 19 nt, Homo sapiens
  misc_RNA (1)...(19): siRNA sense strand
cagcagagcagccaucuuu

SEQ ID NO: 1058779 - RNA, 19 nt, Homo sapiens
  misc_RNA (1)...(19): siRNA sense strand
gugaagagaauauggauuu

SEQ ID NO: 1058780 - RNA, 19 nt, Homo sapiens
  misc_RNA (1)...(19): siRNA sense strand
gaacuacccuuucuaucac

SEQ ID NO: 1058781 - RNA, 19 nt, Homo sapiens
  misc_RNA (1)...(19): siRNA sense strand
cagaaagggucuauaccaa

SEQ ID NO: 1058782 - RNA, 19 nt, Homo sapiens
  misc_RNA (1)...(19): siRNA sense strand
ggaaaugucccuguggaaa

SEQ ID NO: 1058783 - RNA, 19 nt, Homo sapiens
  misc_RNA (1)...(19): siRNA sense strand
gcagccaucuuucuguaga

SEQ ID NO: 1058784 - RNA, 19 nt, Homo sapiens
  misc_RNA (1)...(19): siRNA sense strand
gugacuaacuacaagauga

SEQ ID NO: 1058785 - RNA, 19 nt, Homo sapiens
  misc_RNA (1)...(19): siRNA sense strand
ggauggaucuucugacaac

SEQ ID NO: 1058786 - RNA, 19 nt, Homo sapiens
  misc_RNA (1)...(19): siRNA sense strand
ccaaagcucccaucaccua

SEQ ID NO: 1058787 - RNA, 19 nt, Homo sapiens
  misc_RNA (1)...(19): siRNA sense strand
cagugaagguccaccagua

SEQ ID NO: 1058788 - RNA, 19 nt, Homo sapiens
  misc_RNA (1)...(19): siRNA sense strand
ccacaucucccuaccaaga

SEQ ID NO: 1058789 - RNA, 19 nt, Homo sapiens
  misc_RNA (1)...(19): siRNA sense strand
uggaggaugugacuaacua

SEQ ID NO: 1058790 - RNA, 19 nt, Homo sapiens
  misc_RNA (1)...(19): siRNA sense strand
cgagauaaguaccaagcuu

SEQ ID NO: 1058791 - RNA, 19 nt, Homo sapiens
  misc_RNA (1)...(19): siRNA sense strand
cgaccugcacuucagauua

SEQ ID NO: 1058792 - RNA, 19 nt, Homo sapiens
  misc_RNA (1)...(19): siRNA sense strand
ugucuucucuccgaauaua

SEQ ID NO: 1058793 - RNA, 19 nt, Homo sapiens
  misc_RNA (1)...(19): siRNA sense strand
gugaagaccauaagcugua

SEQ ID NO: 1058794 - RNA, 19 nt, Homo sapiens
  misc_RNA (1)...(19): siRNA sense strand
uggauuugcucacgacgua

SEQ ID NO: 1058795 - RNA, 19 nt, Homo sapiens
  misc_RNA (1)...(19): siRNA sense strand
ccgaauauaccgagaacua

SEQ ID NO: 1058796 - RNA, 19 nt, Homo sapiens
  misc_RNA (1)...(19): siRNA sense strand
uggaguguuugccuacuua

SEQ ID NO: 1058797 - RNA, 19 nt, Homo sapiens
  misc_RNA (1)...(19): siRNA sense strand
gaaaugucccuguggaaag

SEQ ID NO: 1058798 - RNA, 19 nt, Homo sapiens
  misc_RNA (1)...(19): siRNA sense strand
caucaaaccucgggacagu

SEQ ID NO: 1058799 - RNA, 19 nt, Homo sapiens
  misc_RNA (1)...(19): siRNA sense strand
caugucuucucuccgaaua

SEQ ID NO: 1058800 - RNA, 19 nt, Homo sapiens
  misc_RNA (1)...(19): siRNA sense strand
caggauggaucuucugaca

SEQ ID NO: 1058801 - RNA, 19 nt, Homo sapiens
  misc_RNA (1)...(19): siRNA sense strand
ggaugugacuaacuacaag

SEQ ID NO: 1058802 - RNA, 19 nt, Homo sapiens
  misc_RNA (1)...(19): siRNA sense strand
cagcuuuacucccaaggaa

SEQ ID NO: 1058803 - RNA, 19 nt, Homo sapiens
  misc_RNA (1)...(19): siRNA sense strand
gcucacgacguauaagaaa

SEQ ID NO: 1058804 - RNA, 19 nt, Homo sapiens
  misc_RNA (1)...(19): siRNA sense strand
uaagaagugcggucgcuuu

SEQ ID NO: 1058805 - RNA, 19 nt, Homo sapiens
  misc_RNA (1)...(19): siRNA sense strand
ugaagaccauaagcuguaa

SEQ ID NO: 1058806 - RNA, 19 nt, Homo sapiens
  misc_RNA (1)...(19): siRNA sense strand
ucaaaccucgggacaguaa

SEQ ID NO: 1058807 - RNA, 19 nt, Homo sapiens
  misc_RNA (1)...(19): siRNA sense strand
cggcaucacuguccacauc

SEQ ID NO: 1058808 - RNA, 19 nt, Homo sapiens
  misc_RNA (1)...(19): siRNA sense strand
caaaguggcaccagugaag

SEQ ID NO: 1058809 - RNA, 19 nt, Homo sapiens
  misc_RNA (1)...(19): siRNA sense strand
caccaaggaugacuacaag

SEQ ID NO: 1058810 - RNA, 19 nt, Homo sapiens
  misc_RNA (1)...(19): siRNA sense strand
gacaugccuuucuguaaca

SEQ ID NO: 1058811 - RNA, 19 nt, Homo sapiens
  misc_RNA (1)...(19): siRNA sense strand
ccaccaguaugaccaguuc

SEQ ID NO: 1058812 - RNA, 19 nt, Homo sapiens
  misc_RNA (1)...(19): siRNA sense strand
ggacaguaaauauccaugu

SEQ ID NO: 1058813 - RNA, 19 nt, Homo sapiens
  misc_RNA (1)...(19): siRNA sense strand
guccacaucucccuaccaa

SEQ ID NO: 1058814 - RNA, 19 nt, Homo sapiens
  misc_RNA (1)...(19): siRNA sense strand
uaacaccacugaguuucga

SEQ ID NO: 1058815 - RNA, 19 nt, Homo sapiens
  misc_RNA (1)...(19): siRNA sense strand
gaaagccuuaccacucaaa

SEQ ID NO: 1058816 - RNA, 19 nt, Homo sapiens
  misc_RNA (1)...(19): siRNA sense strand
gcaugaagcagagaaguuc

SEQ ID NO: 1058817 - RNA, 19 nt, Homo sapiens
  misc_RNA (1)...(19): siRNA sense strand
gagggaguuggaaguguua

SEQ ID NO: 1058818 - RNA, 19 nt, Homo sapiens
  misc_RNA (1)...(19): siRNA sense strand
agacaugccuuucuguaac

SEQ ID NO: 1058819 - RNA, 19 nt, Homo sapiens
  misc_RNA (1)...(19): siRNA sense strand
uugaaagccuuaccacuca

SEQ ID NO: 1058820 - RNA, 19 nt, Homo sapiens
  misc_RNA (1)...(19): siRNA sense strand
uggaaggccugacuacauc

SEQ ID NO: 1058821 - RNA, 19 nt, Homo sapiens
  misc_RNA (1)...(19): siRNA sense strand
uugaggaaguggaugcuuu

SEQ ID NO: 1058822 - RNA, 19 nt, Homo sapiens
  misc_RNA (1)...(19): siRNA sense strand
ucagucagguuugauaaca

SEQ ID NO: 1058823 - RNA, 19 nt, Homo sapiens
  misc_RNA (1)...(19): siRNA sense strand
guguuugccuacuuauaaa

SEQ ID NO: 1058824 - RNA, 19 nt, Homo sapiens
  misc_RNA (1)...(19): siRNA sense strand
ugaagagaauauggauuug

SEQ ID NO: 1058825 - RNA, 19 nt, Homo sapiens
  misc_RNA (1)...(19): siRNA sense strand
gaagacgaagugcaucugu

SEQ ID NO: 1058826 - RNA, 19 nt, Homo sapiens
  misc_RNA (1)...(19): siRNA sense strand
gauuugcucacgacguaua

SEQ ID NO: 1058827 - RNA, 19 nt, Homo sapiens
  misc_RNA (1)...(19): siRNA sense strand
gaagcgcuuugugcaugaa

SEQ ID NO: 1058828 - RNA, 19 nt, Homo sapiens
  misc_RNA (1)...(19): siRNA sense strand
agagggaguuggaaguguu

SEQ ID NO: 1058829 - RNA, 19 nt, Homo sapiens
  misc_RNA (1)...(19): siRNA sense strand
uagacaugccuuucuguaa

SEQ ID NO: 1058830 - RNA, 19 nt, Homo sapiens
  misc_RNA (1)...(19): siRNA sense strand
ugccaaagcucuguaacau

SEQ ID NO: 1058831 - RNA, 19 nt, Homo sapiens
  misc_RNA (1)...(19): siRNA sense strand
ccaccaaggaugacuacaa

SEQ ID NO: 1058832 - RNA, 19 nt, Homo sapiens
  misc_RNA (1)...(19): siRNA sense strand
acagagaaaccaugucuuc

SEQ ID NO: 1058833 - RNA, 19 nt, Homo sapiens
  misc_RNA (1)...(19): siRNA sense strand
cggcaucagucagguuuga

SEQ ID NO: 1058834 - RNA, 19 nt, Homo sapiens
  misc_RNA (1)...(19): siRNA sense strand
gaagugcaucugugaacug

SEQ ID NO: 1058835 - RNA, 19 nt, Homo sapiens
  misc_RNA (1)...(19): siRNA sense strand
gcagagcagccaucuuucu

SEQ ID NO: 1058836 - RNA, 19 nt, Homo sapiens
  misc_RNA (1)...(19): siRNA sense strand
aguguuugccuacuuauaa

SEQ ID NO: 1058837 - RNA, 19 nt, Homo sapiens
  misc_RNA (1)...(19): siRNA sense strand
ccaggacgauuaccccaua

SEQ ID NO: 1058838 - RNA, 19 nt, Homo sapiens
  misc_RNA (1)...(19): siRNA sense strand
cugauuauuugccuuggaa

SEQ ID NO: 1058839 - RNA, 19 nt, Homo sapiens
  misc_RNA (1)...(19): siRNA sense strand
ugaagguccaccaguauga

SEQ ID NO: 1058840 - RNA, 19 nt, Homo sapiens
  misc_RNA (1)...(19): siRNA sense strand
agacgaagugcaucuguga

SEQ ID NO: 1058841 - RNA, 19 nt, Homo sapiens
  misc_RNA (1)...(19): siRNA sense strand
gaguguuugccuacuuaua

SEQ ID NO: 1058842 - RNA, 19 nt, Homo sapiens
  misc_RNA (1)...(19): siRNA sense strand
ucacgacguauaagaaaga

SEQ ID NO: 1058843 - RNA, 19 nt, Homo sapiens
  misc_RNA (1)...(19): siRNA sense strand
aaacagagaaaccaugucu

SEQ ID NO: 1058844 - RNA, 19 nt, Homo sapiens
  misc_RNA (1)...(19): siRNA sense strand
cuagacaugccuuucugua

SEQ ID NO: 1058845 - RNA, 19 nt, Homo sapiens
  misc_RNA (1)...(19): siRNA sense strand
caggauauacaaaccaguu

SEQ ID NO: 1058846 - RNA, 19 nt, Homo sapiens
  misc_RNA (1)...(19): siRNA sense strand
cagaccaccuacaccauca

SEQ ID NO: 1058847 - RNA, 19 nt, Homo sapiens
  misc_RNA (1)...(19): siRNA sense strand
ccagaaagggucuauacca

SEQ ID NO: 1058848 - RNA, 19 nt, Homo sapiens
  misc_RNA (1)...(19): siRNA sense strand
uaaaaggccuugugaagac

SEQ ID NO: 1058849 - RNA, 19 nt, Homo sapiens
  misc_RNA (1)...(19): siRNA sense strand
ccuccuggcuacaccuuug

SEQ ID NO: 1058850 - RNA, 19 nt, Homo sapiens
  misc_RNA (1)...(19): siRNA sense strand
ugaaacagagaaaccaugu

SEQ ID NO: 1058851 - RNA, 19 nt, Homo sapiens
  misc_RNA (1)...(19): siRNA sense strand
gacaggauggaucuucuga

SEQ ID NO: 1058852 - RNA, 19 nt, Homo sapiens
  misc_RNA (1)...(19): siRNA sense strand
agaagcgcuuugugcauga

SEQ ID NO: 1058853 - RNA, 19 nt, Homo sapiens
  misc_RNA (1)...(19): siRNA sense strand
ggagaagcgcuuugugcau

SEQ ID NO: 1058854 - RNA, 19 nt, Homo sapiens
  misc_RNA (1)...(19): siRNA sense strand
agucagguuugauaacaga

SEQ ID NO: 1058855 - RNA, 19 nt, Homo sapiens
  misc_RNA (1)...(19): siRNA sense strand
acuccuaccugcccagaga

SEQ ID NO: 1058856 - RNA, 19 nt, Homo sapiens
  misc_RNA (1)...(19): siRNA sense strand
cuacaucaaggagagauuu

SEQ ID NO: 1058857 - RNA, 19 nt, Homo sapiens
  misc_RNA (1)...(19): siRNA sense strand
ccaauggaaggccugacua

SEQ ID NO: 1058858 - RNA, 19 nt, Homo sapiens
  misc_RNA (1)...(19): siRNA sense strand
ccaaggaugacuacaagca

SEQ ID NO: 1058859 - RNA, 19 nt, Homo sapiens
  misc_RNA (1)...(19): siRNA sense strand
cuacgucccucccgaagac

SEQ ID NO: 1058860 - RNA, 19 nt, Homo sapiens
  misc_RNA (1)...(19): siRNA sense strand
gcugauuauuugccuugga

SEQ ID NO: 1058861 - RNA, 19 nt, Homo sapiens
  misc_RNA (1)...(19): siRNA sense strand
gugccuagcuucauauccu

SEQ ID NO: 1058862 - RNA, 19 nt, Homo sapiens
  misc_RNA (1)...(19): siRNA sense strand
gcucuuccaccaccaagga

SEQ ID NO: 1058863 - RNA, 19 nt, Homo sapiens
  misc_RNA (1)...(19): siRNA sense strand
acuacaagaugagcuaugu

SEQ ID NO: 1058864 - RNA, 19 nt, Homo sapiens
  misc_RNA (1)...(19): siRNA sense strand
ugaaagccuuaccacucaa

SEQ ID NO: 1058865 - RNA, 19 nt, Homo sapiens
  misc_RNA (1)...(19): siRNA sense strand
ggucacaggauauacaaac

SEQ ID NO: 1058866 - RNA, 19 nt, Homo sapiens
  misc_RNA (1)...(19): siRNA sense strand
cagcagggcuuccaugaga

SEQ ID NO: 1058867 - RNA, 19 nt, Homo sapiens
  misc_RNA (1)...(19): siRNA sense strand
ucacagagacucgcaauaa

SEQ ID NO: 1058868 - RNA, 19 nt, Homo sapiens
  misc_RNA (1)...(19): siRNA sense strand
ccaaauguaugagaagauu

SEQ ID NO: 1058869 - RNA, 19 nt, Homo sapiens
  misc_RNA (1)...(19): siRNA sense strand
ccucagacauuaaaggauu

SEQ ID NO: 1058870 - RNA, 19 nt, Homo sapiens
  misc_RNA (1)...(19): siRNA sense strand
cacgagaccuucuggcuuu

SEQ ID NO: 1058871 - RNA, 19 nt, Homo sapiens
  misc_RNA (1)...(19): siRNA sense strand
ggacugaagccuggaaauu

SEQ ID NO: 1058872 - RNA, 19 nt, Homo sapiens
  misc_RNA (1)...(19): siRNA sense strand
gcaacacgcaggcagagua

SEQ ID NO: 1058873 - RNA, 19 nt, Homo sapiens
  misc_RNA (1)...(19): siRNA sense strand
gaagaacuacaaggccuua

SEQ ID NO: 1058874 - RNA, 19 nt, Homo sapiens
  misc_RNA (1)...(19): siRNA sense strand
uaacauugcacgugacauu

SEQ ID NO: 1058875 - RNA, 19 nt, Homo sapiens
  misc_RNA (1)...(19): siRNA sense strand
caccggaacuucacagaga

SEQ ID NO: 1058876 - RNA, 19 nt, Homo sapiens
  misc_RNA (1)...(19): siRNA sense strand
ucacgggacuucauuugug

SEQ ID NO: 1058877 - RNA, 19 nt, Homo sapiens
  misc_RNA (1)...(19): siRNA sense strand
uacaaggccuuaugccaaa

SEQ ID NO: 1058878 - RNA, 19 nt, Homo sapiens
  misc_RNA (1)...(19): siRNA sense strand
agaagaggcuagagaagau

SEQ ID NO: 1058879 - RNA, 19 nt, Homo sapiens
  misc_RNA (1)...(19): siRNA sense strand
ugggacagcuucuuugaug

SEQ ID NO: 1058880 - RNA, 19 nt, Homo sapiens
  misc_RNA (1)...(19): siRNA sense strand
gcaacguccucaucgacaa

SEQ ID NO: 1058881 - RNA, 19 nt, Homo sapiens
  misc_RNA (1)...(19): siRNA sense strand
ggacuucauuuguguuaac

SEQ ID NO: 1058882 - RNA, 19 nt, Homo sapiens
  misc_RNA (1)...(19): siRNA sense strand
agaucuugcuccugaguua

SEQ ID NO: 1058883 - RNA, 19 nt, Homo sapiens
  misc_RNA (1)...(19): siRNA sense strand
caaaucacgggacuucauu

SEQ ID NO: 1058884 - RNA, 19 nt, Homo sapiens
  misc_RNA (1)...(19): siRNA sense strand
gcaugaggaggaagaacua

SEQ ID NO: 1058885 - RNA, 19 nt, Homo sapiens
  misc_RNA (1)...(19): siRNA sense strand
augcugagcucauccagaa

SEQ ID NO: 1058886 - RNA, 19 nt, Homo sapiens
  misc_RNA (1)...(19): siRNA sense strand
gaaugggacagcuucuuug

SEQ ID NO: 1058887 - RNA, 19 nt, Homo sapiens
  misc_RNA (1)...(19): siRNA sense strand
gggaagcccugcaggaacu

SEQ ID NO: 1058888 - RNA, 19 nt, Homo sapiens
  misc_RNA (1)...(19): siRNA sense strand
gacauuaaaggauuucuuc

SEQ ID NO: 1058889 - RNA, 19 nt, Homo sapiens
  misc_RNA (1)...(19): siRNA sense strand
gggacagcuucuuugauga

SEQ ID NO: 1058890 - RNA, 19 nt, Homo sapiens
  misc_RNA (1)...(19): siRNA sense strand
gacaagaagaggcuagaga

SEQ ID NO: 1058891 - RNA, 19 nt, Homo sapiens
  misc_RNA (1)...(19): siRNA sense strand
gaacuacaaggccuuaugc

SEQ ID NO: 1058892 - RNA, 19 nt, Homo sapiens
  misc_RNA (1)...(19): siRNA sense strand
ccaagaaccuagacaugcu

SEQ ID NO: 1058893 - RNA, 19 nt, Homo sapiens
  misc_RNA (1)...(19): siRNA sense strand
ggccuuaugccaaauguau

SEQ ID NO: 1058894 - RNA, 19 nt, Homo sapiens
  misc_RNA (1)...(19): siRNA sense strand
ucaaguccuucgaugaugu

SEQ ID NO: 1058895 - RNA, 19 nt, Homo sapiens
  misc_RNA (1)...(19): siRNA sense strand
acaagaagaggcuagagaa

SEQ ID NO: 1058896 - RNA, 19 nt, Homo sapiens
  misc_RNA (1)...(19): siRNA sense strand
gacugaagccuggaaauuc

SEQ ID NO: 1058897 - RNA, 19 nt, Homo sapiens
  misc_RNA (1)...(19): siRNA sense strand
gggcuuccaugagaugaug

SEQ ID NO: 1058898 - RNA, 19 nt, Homo sapiens
  misc_RNA (1)...(19): siRNA sense strand
gaaaaccacccauugacaa

SEQ ID NO: 1058899 - RNA, 19 nt, Homo sapiens
  misc_RNA (1)...(19): siRNA sense strand
ggacagcuucuuugaugag

SEQ ID NO: 1058900 - RNA, 19 nt, Homo sapiens
  misc_RNA (1)...(19): siRNA sense strand
gcacgugacauucagaaaa

SEQ ID NO: 1058901 - RNA, 19 nt, Homo sapiens
  misc_RNA (1)...(19): siRNA sense strand
gaagagaaaaccacccauu

SEQ ID NO: 1058902 - RNA, 19 nt, Homo sapiens
  misc_RNA (1)...(19): siRNA sense strand
gaagaucuugcuccugagu

SEQ ID NO: 1058903 - RNA, 19 nt, Homo sapiens
  misc_RNA (1)...(19): siRNA sense strand
uaugccaaauguaugagaa

SEQ ID NO: 1058904 - RNA, 19 nt, Homo sapiens
  misc_RNA (1)...(19): siRNA sense strand
aagaagaggcuagagaaga

SEQ ID NO: 1058905 - RNA, 19 nt, Homo sapiens
  misc_RNA (1)...(19): siRNA sense strand
ccaaaucacgggacuucau

SEQ ID NO: 1058906 - RNA, 19 nt, Homo sapiens
  misc_RNA (1)...(19): siRNA sense strand
gacagcuucuuugaugaga

SEQ ID NO: 1058907 - RNA, 19 nt, Homo sapiens
  misc_RNA (1)...(19): siRNA sense strand
cagcuucuuugaugagagu

SEQ ID NO: 1058908 - RNA, 19 nt, Homo sapiens
  misc_RNA (1)...(19): siRNA sense strand
gggacuucauuuguguuaa

SEQ ID NO: 1058909 - RNA, 19 nt, Homo sapiens
  misc_RNA (1)...(19): siRNA sense strand
cacagagacucgcaauaac

SEQ ID NO: 1058910 - RNA, 19 nt, Homo sapiens
  misc_RNA (1)...(19): siRNA sense strand
ggccaagaaccuagacaug

SEQ ID NO: 1058911 - RNA, 19 nt, Homo sapiens
  misc_RNA (1)...(19): siRNA sense strand
gcagggcuuccaugagaug

SEQ ID NO: 1058912 - RNA, 19 nt, Homo sapiens
  misc_RNA (1)...(19): siRNA sense strand
guguuaacauccuggaaag

SEQ ID NO: 1058913 - RNA, 19 nt, Homo sapiens
  misc_RNA (1)...(19): siRNA sense strand
caacaaccucaucgaccuu

SEQ ID NO: 1058914 - RNA, 19 nt, Homo sapiens
  misc_RNA (1)...(19): siRNA sense strand
caagaagaggcuagagaag

SEQ ID NO: 1058915 - RNA, 19 nt, Homo sapiens
  misc_RNA (1)...(19): siRNA sense strand
cgggacuucauuuguguua

SEQ ID NO: 1058916 - RNA, 19 nt, Homo sapiens
  misc_RNA (1)...(19): siRNA sense strand
cacgggacuucauuugugu

SEQ ID NO: 1058917 - RNA, 19 nt, Homo sapiens
  misc_RNA (1)...(19): siRNA sense strand
acagagacucgcaauaaca

SEQ ID NO: 1058918 - RNA, 19 nt, Homo sapiens
  misc_RNA (1)...(19): siRNA sense strand
acagucagccuccuucauc

SEQ ID NO: 1058919 - RNA, 19 nt, Homo sapiens
  misc_RNA (1)...(19): siRNA sense strand
cuucauuuguguuaacauc

SEQ ID NO: 1058920 - RNA, 19 nt, Homo sapiens
  misc_RNA (1)...(19): siRNA sense strand
ugaggaggaagaacuacaa

SEQ ID NO: 1058921 - RNA, 19 nt, Homo sapiens
  misc_RNA (1)...(19): siRNA sense strand
ggccaaaucacgggacuuc

SEQ ID NO: 1058922 - RNA, 19 nt, Homo sapiens
  misc_RNA (1)...(19): siRNA sense strand
uguguuaacauccuggaaa

SEQ ID NO: 1058923 - RNA, 19 nt, Homo sapiens
  misc_RNA (1)...(19): siRNA sense strand
cgaccuugaugcugaugag

SEQ ID NO: 1058924 - RNA, 19 nt, Homo sapiens
  misc_RNA (1)...(19): siRNA sense strand
gcugugucaucaacauugg

SEQ ID NO: 1058925 - RNA, 19 nt, Homo sapiens
  misc_RNA (1)...(19): siRNA sense strand
ugccaaauguaugagaaga

SEQ ID NO: 1058926 - RNA, 19 nt, Homo sapiens
  misc_RNA (1)...(19): siRNA sense strand
gguuuaugcugagcucauc

SEQ ID NO: 1058927 - RNA, 19 nt, Homo sapiens
  misc_RNA (1)...(19): siRNA sense strand
cagagacucgcaauaacau

SEQ ID NO: 1058928 - RNA, 19 nt, Homo sapiens
  misc_RNA (1)...(19): siRNA sense strand
gacagcaugaggaggaaga

SEQ ID NO: 1058929 - RNA, 19 nt, Homo sapiens
  misc_RNA (1)...(19): siRNA sense strand
aaucacgggacuucauuug

SEQ ID NO: 1058930 - RNA, 19 nt, Homo sapiens
  misc_RNA (1)...(19): siRNA sense strand
gaagaggcuagagaagauc

SEQ ID NO: 1058931 - RNA, 19 nt, Homo sapiens
  misc_RNA (1)...(19): siRNA sense strand
ccuuaugccaaauguauga

SEQ ID NO: 1058932 - RNA, 19 nt, Homo sapiens
  misc_RNA (1)...(19): siRNA sense strand
cagaaaaucuaugacaaag

SEQ ID NO: 1058933 - RNA, 19 nt, Homo sapiens
  misc_RNA (1)...(19): siRNA sense strand
cucagacauuaaaggauuu

SEQ ID NO: 1058934 - RNA, 19 nt, Homo sapiens
  misc_RNA (1)...(19): siRNA sense strand
gaacagaccuccuccucuu

SEQ ID NO: 1058935 - RNA, 19 nt, Homo sapiens
  misc_RNA (1)...(19): siRNA sense strand
ccaaguggcucuucauaaa

SEQ ID NO: 1058936 - RNA, 19 nt, Homo sapiens
  misc_RNA (1)...(19): siRNA sense strand
gaccuagucugccauauuu

SEQ ID NO: 1058937 - RNA, 19 nt, Homo sapiens
  misc_RNA (1)...(19): siRNA sense strand
ggagagagagugaauuuaa

SEQ ID NO: 1058938 - RNA, 19 nt, Homo sapiens
  misc_RNA (1)...(19): siRNA sense strand
ggugauguguugcuaaaua

SEQ ID NO: 1058939 - RNA, 19 nt, Homo sapiens
  misc_RNA (1)...(19): siRNA sense strand
gcacacaaccauucugaua

SEQ ID NO: 1058940 - RNA, 19 nt, Homo sapiens
  misc_RNA (1)...(19): siRNA sense strand
aagcagagauugagaauga

SEQ ID NO: 1058941 - RNA, 19 nt, Homo sapiens
  misc_RNA (1)...(19): siRNA sense strand
aaagagaggugauguguug

SEQ ID NO: 1058942 - RNA, 19 nt, Homo sapiens
  misc_RNA (1)...(19): siRNA sense strand
ggacauacauucugcuaca

SEQ ID NO: 1058943 - RNA, 19 nt, Homo sapiens
  misc_RNA (1)...(19): siRNA sense strand
cuucauagcugccacgaua

SEQ ID NO: 1058944 - RNA, 19 nt, Homo sapiens
  misc_RNA (1)...(19): siRNA sense strand
gugaacagcuuggcauuaa

SEQ ID NO: 1058945 - RNA, 19 nt, Homo sapiens
  misc_RNA (1)...(19): siRNA sense strand
caacagcacuggacaagag

SEQ ID NO: 1058946 - RNA, 19 nt, Homo sapiens
  misc_RNA (1)...(19): siRNA sense strand
gaacuccugcuuauuauga

SEQ ID NO: 1058947 - RNA, 19 nt, Homo sapiens
  misc_RNA (1)...(19): siRNA sense strand
caacgaaacaccuuugauu

SEQ ID NO: 1058948 - RNA, 19 nt, Homo sapiens
  misc_RNA (1)...(19): siRNA sense strand
agaaugaaguggaugauga

SEQ ID NO: 1058949 - RNA, 19 nt, Homo sapiens
  misc_RNA (1)...(19): siRNA sense strand
gaaacaccuuugauuaaca

SEQ ID NO: 1058950 - RNA, 19 nt, Homo sapiens
  misc_RNA (1)...(19): siRNA sense strand
gaggugauguguugcuaaa

SEQ ID NO: 1058951 - RNA, 19 nt, Homo sapiens
  misc_RNA (1)...(19): siRNA sense strand
ugaaguggaugaugaccua

SEQ ID NO: 1058952 - RNA, 19 nt, Homo sapiens
  misc_RNA (1)...(19): siRNA sense strand
gagccacucugcacuaguu

SEQ ID NO: 1058953 - RNA, 19 nt, Homo sapiens
  misc_RNA (1)...(19): siRNA sense strand
gaagagaaccacaccaauc

SEQ ID NO: 1058954 - RNA, 19 nt, Homo sapiens
  misc_RNA (1)...(19): siRNA sense strand
gaucuuacucaguguguua

SEQ ID NO: 1058955 - RNA, 19 nt, Homo sapiens
  misc_RNA (1)...(19): siRNA sense strand
ggagcuugcugcccagauu

SEQ ID NO: 1058956 - RNA, 19 nt, Homo sapiens
  misc_RNA (1)...(19): siRNA sense strand
ccacuuaguuuaccagaag

SEQ ID NO: 1058957 - RNA, 19 nt, Homo sapiens
  misc_RNA (1)...(19): siRNA sense strand
gaacagcuuggcauuaaau

SEQ ID NO: 1058958 - RNA, 19 nt, Homo sapiens
  misc_RNA (1)...(19): siRNA sense strand
ucagcaaugugucccauaa

SEQ ID NO: 1058959 - RNA, 19 nt, Homo sapiens
  misc_RNA (1)...(19): siRNA sense strand
gugaugagauggugucugu

SEQ ID NO: 1058960 - RNA, 19 nt, Homo sapiens
  misc_RNA (1)...(19): siRNA sense strand
cgagauggcagaauaaaga

SEQ ID NO: 1058961 - RNA, 19 nt, Homo sapiens
  misc_RNA (1)...(19): siRNA sense strand
gaacaacaagugaugagau

SEQ ID NO: 1058962 - RNA, 19 nt, Homo sapiens
  misc_RNA (1)...(19): siRNA sense strand
ugggaacuccugcuuauua

SEQ ID NO: 1058963 - RNA, 19 nt, Homo sapiens
  misc_RNA (1)...(19): siRNA sense strand
gucaacaacuacaauauca

SEQ ID NO: 1058964 - RNA, 19 nt, Homo sapiens
  misc_RNA (1)...(19): siRNA sense strand
gggaacuccugcuuauuau

SEQ ID NO: 1058965 - RNA, 19 nt, Homo sapiens
  misc_RNA (1)...(19): siRNA sense strand
gcacgagauggcagaauaa

SEQ ID NO: 1058966 - RNA, 19 nt, Homo sapiens
  misc_RNA (1)...(19): siRNA sense strand
gcaacacacugcaucuuac

SEQ ID NO: 1058967 - RNA, 19 nt, Homo sapiens
  misc_RNA (1)...(19): siRNA sense strand
cagcgucucuuuccacaug

SEQ ID NO: 1058968 - RNA, 19 nt, Homo sapiens
  misc_RNA (1)...(19): siRNA sense strand
gagaagagauuuuccaagu

SEQ ID NO: 1058969 - RNA, 19 nt, Homo sapiens
  misc_RNA (1)...(19): siRNA sense strand
caacuacaauaucagcaau

SEQ ID NO: 1058970 - RNA, 19 nt, Homo sapiens
  misc_RNA (1)...(19): siRNA sense strand
agaccaagcucacauaagg

SEQ ID NO: 1058971 - RNA, 19 nt, Homo sapiens
  misc_RNA (1)...(19): siRNA sense strand
acacaccaccaccguauua

SEQ ID NO: 1058972 - RNA, 19 nt, Homo sapiens
  misc_RNA (1)...(19): siRNA sense strand
gcaaugugucccauaacua

SEQ ID NO: 1058973 - RNA, 19 nt, Homo sapiens
  misc_RNA (1)...(19): siRNA sense strand
uaaagaaggaaccacauga

SEQ ID NO: 1058974 - RNA, 19 nt, Homo sapiens
  misc_RNA (1)...(19): siRNA sense strand
aaaguguggugacaugauu

SEQ ID NO: 1058975 - RNA, 19 nt, Homo sapiens
  misc_RNA (1)...(19): siRNA sense strand
ugcaagaagucuaguauuc

SEQ ID NO: 1058976 - RNA, 19 nt, Homo sapiens
  misc_RNA (1)...(19): siRNA sense strand
cacaacagccacuuaguuu

SEQ ID NO: 1058977 - RNA, 19 nt, Homo sapiens
  misc_RNA (1)...(19): siRNA sense strand
guggugagcugcccaucuu

SEQ ID NO: 1058978 - RNA, 19 nt, Homo sapiens
  misc_RNA (1)...(19): siRNA sense strand
cgaaacaccuuugauuaac

SEQ ID NO: 1058979 - RNA, 19 nt, Homo sapiens
  misc_RNA (1)...(19): siRNA sense strand
gagcagaggaacaaaguca

SEQ ID NO: 1058980 - RNA, 19 nt, Homo sapiens
  misc_RNA (1)...(19): siRNA sense strand
gagcugcccaucuuuguga

SEQ ID NO: 1058981 - RNA, 19 nt, Homo sapiens
  misc_RNA (1)...(19): siRNA sense strand
gagagagagugaauuuaac

SEQ ID NO: 1058982 - RNA, 19 nt, Homo sapiens
  misc_RNA (1)...(19): siRNA sense strand
gagcacacaaccauucuga

SEQ ID NO: 1058983 - RNA, 19 nt, Homo sapiens
  misc_RNA (1)...(19): siRNA sense strand
gcagagauugagaaugaaa

SEQ ID NO: 1058984 - RNA, 19 nt, Homo sapiens
  misc_RNA (1)...(19): siRNA sense strand
gcacuugagguccagauug

SEQ ID NO: 1058985 - RNA, 19 nt, Homo sapiens
  misc_RNA (1)...(19): siRNA sense strand
gugauguguugcuaaauau

SEQ ID NO: 1058986 - RNA, 19 nt, Homo sapiens
  misc_RNA (1)...(19): siRNA sense strand
gagaggugauguguugcua

SEQ ID NO: 1058987 - RNA, 19 nt, Homo sapiens
  misc_RNA (1)...(19): siRNA sense strand
gcagaccaagcucacauaa

SEQ ID NO: 1058988 - RNA, 19 nt, Homo sapiens
  misc_RNA (1)...(19): siRNA sense strand
ggacucuggugaacagcuu

SEQ ID NO: 1058989 - RNA, 19 nt, Homo sapiens
  misc_RNA (1)...(19): siRNA sense strand
ugacaacccugccuuugag

SEQ ID NO: 1058990 - RNA, 19 nt, Homo sapiens
  misc_RNA (1)...(19): siRNA sense strand
gaaauucaucgguccaauc

SEQ ID NO: 1058991 - RNA, 19 nt, Homo sapiens
  misc_RNA (1)...(19): siRNA sense strand
ugcacgagauggcagaaua

SEQ ID NO: 1058992 - RNA, 19 nt, Homo sapiens
  misc_RNA (1)...(19): siRNA sense strand
caaugugucccauaacuau

SEQ ID NO: 1058993 - RNA, 19 nt, Homo sapiens
  misc_RNA (1)...(19): siRNA sense strand
acgaaacaccuuugauuaa

SEQ ID NO: 1058994 - RNA, 19 nt, Homo sapiens
  misc_RNA (1)...(19): siRNA sense strand
aacgaaacaccuuugauua

SEQ ID NO: 1058995 - RNA, 19 nt, Homo sapiens
  misc_RNA (1)...(19): siRNA sense strand
gguccaauccuuacauuca

SEQ ID NO: 1058996 - RNA, 19 nt, Homo sapiens
  misc_RNA (1)...(19): siRNA sense strand
uguguuacaugccaagaaa

SEQ ID NO: 1058997 - RNA, 19 nt, Homo sapiens
  misc_RNA (1)...(19): siRNA sense strand
guggagagagagugaauuu

SEQ ID NO: 1058998 - RNA, 19 nt, Homo sapiens
  misc_RNA (1)...(19): siRNA sense strand
gagcuugcugcccagauua

SEQ ID NO: 1058999 - RNA, 19 nt, Homo sapiens
  misc_RNA (1)...(19): siRNA sense strand
acacaaccauucugauagu

SEQ ID NO: 1059000 - RNA, 19 nt, Homo sapiens
  misc_RNA (1)...(19): siRNA sense strand
uaccuuaucuccagaagca

SEQ ID NO: 1059001 - RNA, 19 nt, Homo sapiens
  misc_RNA (1)...(19): siRNA sense strand
gaaggaaccacaugaaucc

SEQ ID NO: 1059002 - RNA, 19 nt, Homo sapiens
  misc_RNA (1)...(19): siRNA sense strand
ggcacgaccugaaguaugg

SEQ ID NO: 1059003 - RNA, 19 nt, Homo sapiens
  misc_RNA (1)...(19): siRNA sense strand
caacagccacuuaguuuac

SEQ ID NO: 1059004 - RNA, 19 nt, Homo sapiens
  misc_RNA (1)...(19): siRNA sense strand
ggugaacagcuuggcauua

SEQ ID NO: 1059005 - RNA, 19 nt, Homo sapiens
  misc_RNA (1)...(19): siRNA sense strand
gcacuaguucccauguuga

SEQ ID NO: 1059006 - RNA, 19 nt, Homo sapiens
  misc_RNA (1)...(19): siRNA sense strand
guaaagaaggaaccacaug

SEQ ID NO: 1059007 - RNA, 19 nt, Homo sapiens
  misc_RNA (1)...(19): siRNA sense strand
gagcggcacuugacaucag

SEQ ID NO: 1059008 - RNA, 19 nt, Homo sapiens
  misc_RNA (1)...(19): siRNA sense strand
ugaacagcuuggcauuaaa

SEQ ID NO: 1059009 - RNA, 19 nt, Homo sapiens
  misc_RNA (1)...(19): siRNA sense strand
gagcugacaccacacaaca

SEQ ID NO: 1059010 - RNA, 19 nt, Homo sapiens
  misc_RNA (1)...(19): siRNA sense strand
gagaaaaccauuuguacaa

SEQ ID NO: 1059011 - RNA, 19 nt, Homo sapiens
  misc_RNA (1)...(19): siRNA sense strand
acacaacagccacuuaguu

SEQ ID NO: 1059012 - RNA, 19 nt, Homo sapiens
  misc_RNA (1)...(19): siRNA sense strand
ggucaacaacuacaauauc

SEQ ID NO: 1059013 - RNA, 19 nt, Homo sapiens
  misc_RNA (1)...(19): siRNA sense strand
gaauaaagagaggugaugu

SEQ ID NO: 1059014 - RNA, 19 nt, Homo sapiens
  misc_RNA (1)...(19): siRNA sense strand
guucauaaacuccuagaca

SEQ ID NO: 1059015 - RNA, 19 nt, Homo sapiens
  misc_RNA (1)...(19): siRNA sense strand
ucauagcugccacgauaua

SEQ ID NO: 1059016 - RNA, 19 nt, Homo sapiens
  misc_RNA (1)...(19): siRNA sense strand
agagaagcaggaaaucaua

SEQ ID NO: 1059017 - RNA, 19 nt, Homo sapiens
  misc_RNA (1)...(19): siRNA sense strand
guauggaacuccggagcuu

SEQ ID NO: 1059018 - RNA, 19 nt, Homo sapiens
  misc_RNA (1)...(19): siRNA sense strand
acaacagccacuuaguuua

SEQ ID NO: 1059019 - RNA, 19 nt, Homo sapiens
  misc_RNA (1)...(19): siRNA sense strand
gaguugcccuggagagaag

SEQ ID NO: 1059020 - RNA, 19 nt, Homo sapiens
  misc_RNA (1)...(19): siRNA sense strand
aaagaaggaaccacaugaa

SEQ ID NO: 1059021 - RNA, 19 nt, Homo sapiens
  misc_RNA (1)...(19): siRNA sense strand
ugaccuagucugccauauu

SEQ ID NO: 1059022 - RNA, 19 nt, Homo sapiens
  misc_RNA (1)...(19): siRNA sense strand
ccacacaccaccaccguau

SEQ ID NO: 1059023 - RNA, 19 nt, Homo sapiens
  misc_RNA (1)...(19): siRNA sense strand
caccuuugauuaacauugu

SEQ ID NO: 1059024 - RNA, 19 nt, Homo sapiens
  misc_RNA (1)...(19): siRNA sense strand
ucauaaacuccuagacaaa

SEQ ID NO: 1059025 - RNA, 19 nt, Homo sapiens
  misc_RNA (1)...(19): siRNA sense strand
ugaaggagcagaggaacaa

SEQ ID NO: 1059026 - RNA, 19 nt, Homo sapiens
  misc_RNA (1)...(19): siRNA sense strand
aacaacaagugaugagaug

SEQ ID NO: 1059027 - RNA, 19 nt, Homo sapiens
  misc_RNA (1)...(19): siRNA sense strand
gguaacaccauuagagaag

SEQ ID NO: 1059028 - RNA, 19 nt, Homo sapiens
  misc_RNA (1)...(19): siRNA sense strand
guaaugcaacguugugauc

SEQ ID NO: 1059029 - RNA, 19 nt, Homo sapiens
  misc_RNA (1)...(19): siRNA sense strand
cauaaacuccuagacaaau

SEQ ID NO: 1059030 - RNA, 19 nt, Homo sapiens
  misc_RNA (1)...(19): siRNA sense strand
gauguguugcuaaauauca

SEQ ID NO: 1059031 - RNA, 19 nt, Homo sapiens
  misc_RNA (1)...(19): siRNA sense strand
cuugggaacuccugcuuau

SEQ ID NO: 1059032 - RNA, 19 nt, Homo sapiens
  misc_RNA (1)...(19): siRNA sense strand
cgauauaguuuuacgaaga

SEQ ID NO: 1059033 - RNA, 19 nt, Homo sapiens
  misc_RNA (1)...(19): siRNA sense strand
gagcagccgaguacuuuca

SEQ ID NO: 1059034 - RNA, 19 nt, Homo sapiens
  misc_RNA (1)...(19): siRNA sense strand
ggacagccguaucguguua

SEQ ID NO: 1059035 - RNA, 19 nt, Homo sapiens
  misc_RNA (1)...(19): siRNA sense strand
ucagauaccugcuauacaa

SEQ ID NO: 1059036 - RNA, 19 nt, Homo sapiens
  misc_RNA (1)...(19): siRNA sense strand
gcucagaccugcuccagau

SEQ ID NO: 1059037 - RNA, 19 nt, Homo sapiens
  misc_RNA (1)...(19): siRNA sense strand
gccaaugucucgcugacua

SEQ ID NO: 1059038 - RNA, 19 nt, Homo sapiens
  misc_RNA (1)...(19): siRNA sense strand
gcacuucacugggcucaga

SEQ ID NO: 1059039 - RNA, 19 nt, Homo sapiens
  misc_RNA (1)...(19): siRNA sense strand
cgaaucaucuccacuucuu

SEQ ID NO: 1059040 - RNA, 19 nt, Homo sapiens
  misc_RNA (1)...(19): siRNA sense strand
gcaagcgcauccagcugua

SEQ ID NO: 1059041 - RNA, 19 nt, Homo sapiens
  misc_RNA (1)...(19): siRNA sense strand
cuauacaacuucccgauga

SEQ ID NO: 1059042 - RNA, 19 nt, Homo sapiens
  misc_RNA (1)...(19): siRNA sense strand
cgaaggaucucugcucauc

SEQ ID NO: 1059043 - RNA, 19 nt, Homo sapiens
  misc_RNA (1)...(19): siRNA sense strand
cgacaccgcuucucuuugc

SEQ ID NO: 1059044 - RNA, 19 nt, Homo sapiens
  misc_RNA (1)...(19): siRNA sense strand
gugaucgggugcugaugua

SEQ ID NO: 1059045 - RNA, 19 nt, Homo sapiens
  misc_RNA (1)...(19): siRNA sense strand
ucauugagauccacagcaa

SEQ ID NO: 1059046 - RNA, 19 nt, Homo sapiens
  misc_RNA (1)...(19): siRNA sense strand
gggcucagauaccugcuau

SEQ ID NO: 1059047 - RNA, 19 nt, Homo sapiens
  misc_RNA (1)...(19): siRNA sense strand
ggaacucuacgcagacuau

SEQ ID NO: 1059048 - RNA, 19 nt, Homo sapiens
  misc_RNA (1)...(19): siRNA sense strand
gauaccugcuauacaacuu

SEQ ID NO: 1059049 - RNA, 19 nt, Homo sapiens
  misc_RNA (1)...(19): siRNA sense strand
caacgacccuccaguaccu

SEQ ID NO: 1059050 - RNA, 19 nt, Homo sapiens
  misc_RNA (1)...(19): siRNA sense strand
gccguaucguguuaccuua

SEQ ID NO: 1059051 - RNA, 19 nt, Homo sapiens
  misc_RNA (1)...(19): siRNA sense strand
ccacuggagcgaucauuga

SEQ ID NO: 1059052 - RNA, 19 nt, Homo sapiens
  misc_RNA (1)...(19): siRNA sense strand
gaacucuacgcagacuaua

SEQ ID NO: 1059053 - RNA, 19 nt, Homo sapiens
  misc_RNA (1)...(19): siRNA sense strand
ggugagagcccugaagauc

SEQ ID NO: 1059054 - RNA, 19 nt, Homo sapiens
  misc_RNA (1)...(19): siRNA sense strand
ccucagcccugugcauuuc

SEQ ID NO: 1059055 - RNA, 19 nt, Homo sapiens
  misc_RNA (1)...(19): siRNA sense strand
gagcggagaagaggagcua

SEQ ID NO: 1059056 - RNA, 19 nt, Homo sapiens
  misc_RNA (1)...(19): siRNA sense strand
cuucuacuauuccuauaug

SEQ ID NO: 1059057 - RNA, 19 nt, Homo sapiens
  misc_RNA (1)...(19): siRNA sense strand
cugggaagaugcagcuuug

SEQ ID NO: 1059058 - RNA, 19 nt, Homo sapiens
  misc_RNA (1)...(19): siRNA sense strand
acacacuggucuucucuag

SEQ ID NO: 1059059 - RNA, 19 nt, Homo sapiens
  misc_RNA (1)...(19): siRNA sense strand
gcucagauaccugcuauac

SEQ ID NO: 1059060 - RNA, 19 nt, Homo sapiens
  misc_RNA (1)...(19): siRNA sense strand
gcccugugcauuucuacua

SEQ ID NO: 1059061 - RNA, 19 nt, Homo sapiens
  misc_RNA (1)...(19): siRNA sense strand
caacuccgcaaucagaugu

SEQ ID NO: 1059062 - RNA, 19 nt, Homo sapiens
  misc_RNA (1)...(19): siRNA sense strand
ucaucgugcucuucagcua

SEQ ID NO: 1059063 - RNA, 19 nt, Homo sapiens
  misc_RNA (1)...(19): siRNA sense strand
gaucgggugcugauguaug

SEQ ID NO: 1059064 - RNA, 19 nt, Homo sapiens
  misc_RNA (1)...(19): siRNA sense strand
ccgcuucucuuugcagguu

SEQ ID NO: 1059065 - RNA, 19 nt, Homo sapiens
  misc_RNA (1)...(19): siRNA sense strand
cguaucguguuaccuuaga

SEQ ID NO: 1059066 - RNA, 19 nt, Homo sapiens
  misc_RNA (1)...(19): siRNA sense strand
ccaccucacucugcuccuu

SEQ ID NO: 1059067 - RNA, 19 nt, Homo sapiens
  misc_RNA (1)...(19): siRNA sense strand
gaaggaucucugcucauca

SEQ ID NO: 1059068 - RNA, 19 nt, Homo sapiens
  misc_RNA (1)...(19): siRNA sense strand
gaaguccaacgaaggaucu

SEQ ID NO: 1059069 - RNA, 19 nt, Homo sapiens
  misc_RNA (1)...(19): siRNA sense strand
gacuaaggguggacgugau

SEQ ID NO: 1059070 - RNA, 19 nt, Homo sapiens
  misc_RNA (1)...(19): siRNA sense strand
ccaaugucucgcugacuaa

SEQ ID NO: 1059071 - RNA, 19 nt, Homo sapiens
  misc_RNA (1)...(19): siRNA sense strand
gggugucugucuuccucua

SEQ ID NO: 1059072 - RNA, 19 nt, Homo sapiens
  misc_RNA (1)...(19): siRNA sense strand
gccgaaucaucuccacuuc

SEQ ID NO: 1059073 - RNA, 19 nt, Homo sapiens
  misc_RNA (1)...(19): siRNA sense strand
acuccgcaaucagauguua

SEQ ID NO: 1059074 - RNA, 19 nt, Homo sapiens
  misc_RNA (1)...(19): siRNA sense strand
ccgaugaccugcgccuuca

SEQ ID NO: 1059075 - RNA, 19 nt, Homo sapiens
  misc_RNA (1)...(19): siRNA sense strand
ggacacacuggucuucucu

SEQ ID NO: 1059076 - RNA, 19 nt, Homo sapiens
  misc_RNA (1)...(19): siRNA sense strand
gagccuaccuccgcaucca

SEQ ID NO: 1059077 - RNA, 19 nt, Homo sapiens
  misc_RNA (1)...(19): siRNA sense strand
ggccgaaucaucuccacuu

SEQ ID NO: 1059078 - RNA, 19 nt, Homo sapiens
  misc_RNA (1)...(19): siRNA sense strand
agucaacuccgcaaucaga

SEQ ID NO: 1059079 - RNA, 19 nt, Homo sapiens
  misc_RNA (1)...(19): siRNA sense strand
gcuucucuuugcagguuaa

SEQ ID NO: 1059080 - RNA, 19 nt, Homo sapiens
  misc_RNA (1)...(19): siRNA sense strand
ucacugggcucagauaccu

SEQ ID NO: 1059081 - RNA, 19 nt, Homo sapiens
  misc_RNA (1)...(19): siRNA sense strand
cuggagcgaucauugagau

SEQ ID NO: 1059082 - RNA, 19 nt, Homo sapiens
  misc_RNA (1)...(19): siRNA sense strand
uauggcuccuucuacuauu

SEQ ID NO: 1059083 - RNA, 19 nt, Homo sapiens
  misc_RNA (1)...(19): siRNA sense strand
cuauggcuccuucuacuau

SEQ ID NO: 1059084 - RNA, 19 nt, Homo sapiens
  misc_RNA (1)...(19): siRNA sense strand
ucagcccugugcauuucua

SEQ ID NO: 1059085 - RNA, 19 nt, Homo sapiens
  misc_RNA (1)...(19): siRNA sense strand
gcggagaagaggagcuaga

SEQ ID NO: 1059086 - RNA, 19 nt, Homo sapiens
  misc_RNA (1)...(19): siRNA sense strand
agagguggccgaaucaucu

SEQ ID NO: 1059087 - RNA, 19 nt, Homo sapiens
  misc_RNA (1)...(19): siRNA sense strand
gcucugggugucugucuuc

SEQ ID NO: 1059088 - RNA, 19 nt, Homo sapiens
  misc_RNA (1)...(19): siRNA sense strand
ugaggccagugaugguuca

SEQ ID NO: 1059089 - RNA, 19 nt, Homo sapiens
  misc_RNA (1)...(19): siRNA sense strand
aaggaucucugcucaucag

SEQ ID NO: 1059090 - RNA, 19 nt, Homo sapiens
  misc_RNA (1)...(19): siRNA sense strand
ccacaaaucucaucucaau

SEQ ID NO: 1059091 - RNA, 19 nt, Homo sapiens
  misc_RNA (1)...(19): siRNA sense strand
caaagaaacagaccacaua

SEQ ID NO: 1059092 - RNA, 19 nt, Homo sapiens
  misc_RNA (1)...(19): siRNA sense strand
gaaaucacacucuaaagaa

SEQ ID NO: 1059093 - RNA, 19 nt, Homo sapiens
  misc_RNA (1)...(19): siRNA sense strand
ggaaaucacacucuaaaga

SEQ ID NO: 1059094 - RNA, 19 nt, Homo sapiens
  misc_RNA (1)...(19): siRNA sense strand
ccagauuucuuaaugcuuu

SEQ ID NO: 1059095 - RNA, 19 nt, Homo sapiens
  misc_RNA (1)...(19): siRNA sense strand
ggacugcauucacgccuaa

SEQ ID NO: 1059096 - RNA, 19 nt, Homo sapiens
  misc_RNA (1)...(19): siRNA sense strand
uaacaaggcacuaucaaau

SEQ ID NO: 1059097 - RNA, 19 nt, Homo sapiens
  misc_RNA (1)...(19): siRNA sense strand
uuccugagcuucaagauuu

SEQ ID NO: 1059098 - RNA, 19 nt, Homo sapiens
  misc_RNA (1)...(19): siRNA sense strand
aaacagaccacauaccaaa

SEQ ID NO: 1059099 - RNA, 19 nt, Homo sapiens
  misc_RNA (1)...(19): siRNA sense strand
cuaccucacugucaacaaa

SEQ ID NO: 1059100 - RNA, 19 nt, Homo sapiens
  misc_RNA (1)...(19): siRNA sense strand
cuacccagauuucuuaaug

SEQ ID NO: 1059101 - RNA, 19 nt, Homo sapiens
  misc_RNA (1)...(19): siRNA sense strand
acaaggcacuaucaaauca

SEQ ID NO: 1059102 - RNA, 19 nt, Homo sapiens
  misc_RNA (1)...(19): siRNA sense strand
auugaucgcuuuauucgua

SEQ ID NO: 1059103 - RNA, 19 nt, Homo sapiens
  misc_RNA (1)...(19): siRNA sense strand
ccaaagugacuacgacaaa

SEQ ID NO: 1059104 - RNA, 19 nt, Homo sapiens
  misc_RNA (1)...(19): siRNA sense strand
gaaccaagagcacacaaag

SEQ ID NO: 1059105 - RNA, 19 nt, Homo sapiens
  misc_RNA (1)...(19): siRNA sense strand
ugaguacacuuggaaauca

SEQ ID NO: 1059106 - RNA, 19 nt, Homo sapiens
  misc_RNA (1)...(19): siRNA sense strand
gacaaaaccuacccagauu

SEQ ID NO: 1059107 - RNA, 19 nt, Homo sapiens
  misc_RNA (1)...(19): siRNA sense strand
gaaguuaacaaggcacuau

SEQ ID NO: 1059108 - RNA, 19 nt, Homo sapiens
  misc_RNA (1)...(19): siRNA sense strand
gaacugccucccuuggaaa

SEQ ID NO: 1059109 - RNA, 19 nt, Homo sapiens
  misc_RNA (1)...(19): siRNA sense strand
caguuuauuucccuuacua

SEQ ID NO: 1059110 - RNA, 19 nt, Homo sapiens
  misc_RNA (1)...(19): siRNA sense strand
gaaacagaccacauaccaa

SEQ ID NO: 1059111 - RNA, 19 nt, Homo sapiens
  misc_RNA (1)...(19): siRNA sense strand
cacaauauagugaugagua

SEQ ID NO: 1059112 - RNA, 19 nt, Homo sapiens
  misc_RNA (1)...(19): siRNA sense strand
caacugggauuccuaugcu

SEQ ID NO: 1059113 - RNA, 19 nt, Homo sapiens
  misc_RNA (1)...(19): siRNA sense strand
caaaagcucagaagauuaa

SEQ ID NO: 1059114 - RNA, 19 nt, Homo sapiens
  misc_RNA (1)...(19): siRNA sense strand
gcacuaucaaaucaguuua

SEQ ID NO: 1059115 - RNA, 19 nt, Homo sapiens
  misc_RNA (1)...(19): siRNA sense strand
aaauauggaugcuacucaa

SEQ ID NO: 1059116 - RNA, 19 nt, Homo sapiens
  misc_RNA (1)...(19): siRNA sense strand
gaaucaagagccacaaauc

SEQ ID NO: 1059117 - RNA, 19 nt, Homo sapiens
  misc_RNA (1)...(19): siRNA sense strand
aagaguaccuucagagucu

SEQ ID NO: 1059118 - RNA, 19 nt, Homo sapiens
  misc_RNA (1)...(19): siRNA sense strand
gaucaaaacugagacuuca

SEQ ID NO: 1059119 - RNA, 19 nt, Homo sapiens
  misc_RNA (1)...(19): siRNA sense strand
ucacuugucucuggaaugg

SEQ ID NO: 1059120 - RNA, 19 nt, Homo sapiens
  misc_RNA (1)...(19): siRNA sense strand
gcuucaagauuucaguuuc

SEQ ID NO: 1059121 - RNA, 19 nt, Homo sapiens
  misc_RNA (1)...(19): siRNA sense strand
ggaaucaagagccacaaau

SEQ ID NO: 1059122 - RNA, 19 nt, Homo sapiens
  misc_RNA (1)...(19): siRNA sense strand
gacacugaauuccgaagga

SEQ ID NO: 1059123 - RNA, 19 nt, Homo sapiens
  misc_RNA (1)...(19): siRNA sense strand
agaacugccucccuuggaa

SEQ ID NO: 1059124 - RNA, 19 nt, Homo sapiens
  misc_RNA (1)...(19): siRNA sense strand
ucaaucagacacaauauag

SEQ ID NO: 1059125 - RNA, 19 nt, Homo sapiens
  misc_RNA (1)...(19): siRNA sense strand
ucagagucuuuccuacaaa

SEQ ID NO: 1059126 - RNA, 19 nt, Homo sapiens
  misc_RNA (1)...(19): siRNA sense strand
gaaaaucccggcuucaaug

SEQ ID NO: 1059127 - RNA, 19 nt, Homo sapiens
  misc_RNA (1)...(19): siRNA sense strand
gauccuauucucaaucaga

SEQ ID NO: 1059128 - RNA, 19 nt, Homo sapiens
  misc_RNA (1)...(19): siRNA sense strand
ccacauaccaaagugacua

SEQ ID NO: 1059129 - RNA, 19 nt, Homo sapiens
  misc_RNA (1)...(19): siRNA sense strand
ggaaccaagagcacacaaa

SEQ ID NO: 1059130 - RNA, 19 nt, Homo sapiens
  misc_RNA (1)...(19): siRNA sense strand
caacaaacggggacacuaa

SEQ ID NO: 1059131 - RNA, 19 nt, Homo sapiens
  misc_RNA (1)...(19): siRNA sense strand
gagagacuuuguggacaga

SEQ ID NO: 1059132 - RNA, 19 nt, Homo sapiens
  misc_RNA (1)...(19): siRNA sense strand
uuaccaaauuccagcuaaa

SEQ ID NO: 1059133 - RNA, 19 nt, Homo sapiens
  misc_RNA (1)...(19): siRNA sense strand
caaagaguaccuucagagu

SEQ ID NO: 1059134 - RNA, 19 nt, Homo sapiens
  misc_RNA (1)...(19): siRNA sense strand
uacucaagcuugccuguug

SEQ ID NO: 1059135 - RNA, 19 nt, Homo sapiens
  misc_RNA (1)...(19): siRNA sense strand
caaauauggaugcuacuca

SEQ ID NO: 1059136 - RNA, 19 nt, Homo sapiens
  misc_RNA (1)...(19): siRNA sense strand
ccaaaacgguaucagaaga

SEQ ID NO: 1059137 - RNA, 19 nt, Homo sapiens
  misc_RNA (1)...(19): siRNA sense strand
ccaagagcacacaaagaaa

SEQ ID NO: 1059138 - RNA, 19 nt, Homo sapiens
  misc_RNA (1)...(19): siRNA sense strand
aaccuacccagauuucuua

SEQ ID NO: 1059139 - RNA, 19 nt, Homo sapiens
  misc_RNA (1)...(19): siRNA sense strand
ggcacuaucaaaucaguuu

SEQ ID NO: 1059140 - RNA, 19 nt, Homo sapiens
  misc_RNA (1)...(19): siRNA sense strand
gagcacacaaagaaacaga

SEQ ID NO: 1059141 - RNA, 19 nt, Homo sapiens
  misc_RNA (1)...(19): siRNA sense strand
accaagagcacacaaagaa

SEQ ID NO: 1059142 - RNA, 19 nt, Homo sapiens
  misc_RNA (1)...(19): siRNA sense strand
gaugaguacacuuggaaau

SEQ ID NO: 1059143 - RNA, 19 nt, Homo sapiens
  misc_RNA (1)...(19): siRNA sense strand
gucaaagaguaccuucaga

SEQ ID NO: 1059144 - RNA, 19 nt, Homo sapiens
  misc_RNA (1)...(19): siRNA sense strand
aaacgguaucagaagauua

SEQ ID NO: 1059145 - RNA, 19 nt, Homo sapiens
  misc_RNA (1)...(19): siRNA sense strand
caaagugacuacgacaaaa

SEQ ID NO: 1059146 - RNA, 19 nt, Homo sapiens
  misc_RNA (1)...(19): siRNA sense strand
uuaacaaggcacuaucaaa

SEQ ID NO: 1059147 - RNA, 19 nt, Homo sapiens
  misc_RNA (1)...(19): siRNA sense strand
ucaagagccacaaaucuca

SEQ ID NO: 1059148 - RNA, 19 nt, Homo sapiens
  misc_RNA (1)...(19): siRNA sense strand
aaaucacacucuaaagaag

SEQ ID NO: 1059149 - RNA, 19 nt, Homo sapiens
  misc_RNA (1)...(19): siRNA sense strand
caagagcacacaaagaaac

SEQ ID NO: 1059150 - RNA, 19 nt, Homo sapiens
  misc_RNA (1)...(19): siRNA sense strand
cuucaagauuucaguuuca

SEQ ID NO: 1059151 - RNA, 19 nt, Homo sapiens
  misc_RNA (1)...(19): siRNA sense strand
cagacacaauauagugaug

SEQ ID NO: 1059152 - RNA, 19 nt, Homo sapiens
  misc_RNA (1)...(19): siRNA sense strand
gaucaaaagcucagaagau

SEQ ID NO: 1059153 - RNA, 19 nt, Homo sapiens
  misc_RNA (1)...(19): siRNA sense strand
gagacuuuguggacagauc

SEQ ID NO: 1059154 - RNA, 19 nt, Homo sapiens
  misc_RNA (1)...(19): siRNA sense strand
aaucagacacaauauagug

SEQ ID NO: 1059155 - RNA, 19 nt, Homo sapiens
  misc_RNA (1)...(19): siRNA sense strand
aaaccuacccagauuucuu

SEQ ID NO: 1059156 - RNA, 19 nt, Homo sapiens
  misc_RNA (1)...(19): siRNA sense strand
gacacaauauagugaugag

SEQ ID NO: 1059157 - RNA, 19 nt, Homo sapiens
  misc_RNA (1)...(19): siRNA sense strand
gguaucagaagauuaggau

SEQ ID NO: 1059158 - RNA, 19 nt, Homo sapiens
  misc_RNA (1)...(19): siRNA sense strand
gagcuucaagauuucaguu

SEQ ID NO: 1059159 - RNA, 19 nt, Homo sapiens
  misc_RNA (1)...(19): siRNA sense strand
aagcucagaagauuaagaa

SEQ ID NO: 1059160 - RNA, 19 nt, Homo sapiens
  misc_RNA (1)...(19): siRNA sense strand
acugagacuucaagaggaa

SEQ ID NO: 1059161 - RNA, 19 nt, Homo sapiens
  misc_RNA (1)...(19): siRNA sense strand
acaauauagugaugaguac

SEQ ID NO: 1059162 - RNA, 19 nt, Homo sapiens
  misc_RNA (1)...(19): siRNA sense strand
gcucagaagauuaagaaaa

SEQ ID NO: 1059163 - RNA, 19 nt, Homo sapiens
  misc_RNA (1)...(19): siRNA sense strand
agaaacagaccacauacca

SEQ ID NO: 1059164 - RNA, 19 nt, Homo sapiens
  misc_RNA (1)...(19): siRNA sense strand
gugaugaguacacuuggaa

SEQ ID NO: 1059165 - RNA, 19 nt, Homo sapiens
  misc_RNA (1)...(19): siRNA sense strand
ucauuuacuuccucucaag

SEQ ID NO: 1059166 - RNA, 19 nt, Homo sapiens
  misc_RNA (1)...(19): siRNA sense strand
uuagugauccuauucucaa

SEQ ID NO: 1059167 - RNA, 19 nt, Homo sapiens
  misc_RNA (1)...(19): siRNA sense strand
cagaagauuaggauauaca

SEQ ID NO: 1059168 - RNA, 19 nt, Homo sapiens
  misc_RNA (1)...(19): siRNA sense strand
uucagagucuuuccuacaa

SEQ ID NO: 1059169 - RNA, 19 nt, Homo sapiens
  misc_RNA (1)...(19): siRNA sense strand
ccacuaugaggacugcauu

SEQ ID NO: 1059170 - RNA, 19 nt, Homo sapiens
  misc_RNA (1)...(19): siRNA sense strand
cgacaaaaccuacccagau

SEQ ID NO: 1059171 - RNA, 19 nt, Homo sapiens
  misc_RNA (1)...(19): siRNA sense strand
cagaccacauaccaaagug

SEQ ID NO: 1059172 - RNA, 19 nt, Homo sapiens
  misc_RNA (1)...(19): siRNA sense strand
agccacaaaucucaucuca

SEQ ID NO: 1059173 - RNA, 19 nt, Homo sapiens
  misc_RNA (1)...(19): siRNA sense strand
uuacuaagagagacuuugu

SEQ ID NO: 1059174 - RNA, 19 nt, Homo sapiens
  misc_RNA (1)...(19): siRNA sense strand
ggaaaaucccggcuucaau

SEQ ID NO: 1059175 - RNA, 19 nt, Homo sapiens
  misc_RNA (1)...(19): siRNA sense strand
aaucacacucuaaagaaga

SEQ ID NO: 1059176 - RNA, 19 nt, Homo sapiens
  misc_RNA (1)...(19): siRNA sense strand
uuggaaaucacacucuaaa

SEQ ID NO: 1059177 - RNA, 19 nt, Homo sapiens
  misc_RNA (1)...(19): siRNA sense strand
cucaaucagacacaauaua

SEQ ID NO: 1059178 - RNA, 19 nt, Homo sapiens
  misc_RNA (1)...(19): siRNA sense strand
uaaaauuccugagcuucaa

SEQ ID NO: 1059179 - RNA, 19 nt, Homo sapiens
  misc_RNA (1)...(19): siRNA sense strand
acuugucucuggaauggaa

SEQ ID NO: 1059180 - RNA, 19 nt, Homo sapiens
  misc_RNA (1)...(19): siRNA sense strand
ucaaaagcucagaagauua

SEQ ID NO: 1059181 - RNA, 19 nt, Homo sapiens
  misc_RNA (1)...(19): siRNA sense strand
guuaacaaggcacuaucaa

SEQ ID NO: 1059182 - RNA, 19 nt, Homo sapiens
  misc_RNA (1)...(19): siRNA sense strand
aaucaagagccacaaaucu

SEQ ID NO: 1059183 - RNA, 19 nt, Homo sapiens
  misc_RNA (1)...(19): siRNA sense strand
auuaccaaauuccagcuaa

SEQ ID NO: 1059184 - RNA, 19 nt, Homo sapiens
  misc_RNA (1)...(19): siRNA sense strand
ucagaagauuaggauauac

SEQ ID NO: 1059185 - RNA, 19 nt, Homo sapiens
  misc_RNA (1)...(19): siRNA sense strand
acaaagaaacagaccacau

SEQ ID NO: 1059186 - RNA, 19 nt, Homo sapiens
  misc_RNA (1)...(19): siRNA sense strand
gcuugccuguugcuucuca

SEQ ID NO: 1059187 - RNA, 19 nt, Homo sapiens
  misc_RNA (1)...(19): siRNA sense strand
acuuggaaaucacacucua

SEQ ID NO: 1059188 - RNA, 19 nt, Homo sapiens
  misc_RNA (1)...(19): siRNA sense strand
aaagaaacagaccacauac

SEQ ID NO: 1059189 - RNA, 19 nt, Homo sapiens
  misc_RNA (1)...(19): siRNA sense strand
uaacuuaucucgcaacaaa

SEQ ID NO: 1059190 - RNA, 19 nt, Homo sapiens
  misc_RNA (1)...(19): siRNA sense strand
cuacagagaugguaacaaa

SEQ ID NO: 1059191 - RNA, 19 nt, Homo sapiens
  misc_RNA (1)...(19): siRNA sense strand
gaacaaacuuaguggcaaa

SEQ ID NO: 1059192 - RNA, 19 nt, Homo sapiens
  misc_RNA (1)...(19): siRNA sense strand
gaaggaaaccucauuguau

SEQ ID NO: 1059193 - RNA, 19 nt, Homo sapiens
  misc_RNA (1)...(19): siRNA sense strand
gaacuuccgagacugauua

SEQ ID NO: 1059194 - RNA, 19 nt, Homo sapiens
  misc_RNA (1)...(19): siRNA sense strand
ugaaaucgaucgugaacuu

SEQ ID NO: 1059195 - RNA, 19 nt, Homo sapiens
  misc_RNA (1)...(19): siRNA sense strand
cuaauccacuuaaagauga

SEQ ID NO: 1059196 - RNA, 19 nt, Homo sapiens
  misc_RNA (1)...(19): siRNA sense strand
caaacuuaguggcaaauga

SEQ ID NO: 1059197 - RNA, 19 nt, Homo sapiens
  misc_RNA (1)...(19): siRNA sense strand
agaguuggcuccuguaaug

SEQ ID NO: 1059198 - RNA, 19 nt, Homo sapiens
  misc_RNA (1)...(19): siRNA sense strand
gaacagacagccauuaacu

SEQ ID NO: 1059199 - RNA, 19 nt, Homo sapiens
  misc_RNA (1)...(19): siRNA sense strand
caacaaagaaaccgagcua

SEQ ID NO: 1059200 - RNA, 19 nt, Homo sapiens
  misc_RNA (1)...(19): siRNA sense strand
agacagccauuaacuucua

SEQ ID NO: 1059201 - RNA, 19 nt, Homo sapiens
  misc_RNA (1)...(19): siRNA sense strand
gacaaacacauucaucaaa

SEQ ID NO: 1059202 - RNA, 19 nt, Homo sapiens
  misc_RNA (1)...(19): siRNA sense strand
ugaaggaaaccucauugua

SEQ ID NO: 1059203 - RNA, 19 nt, Homo sapiens
  misc_RNA (1)...(19): siRNA sense strand
aagcgaagccuaagugaaa

SEQ ID NO: 1059204 - RNA, 19 nt, Homo sapiens
  misc_RNA (1)...(19): siRNA sense strand
auguugagaugcaguauua

SEQ ID NO: 1059205 - RNA, 19 nt, Homo sapiens
  misc_RNA (1)...(19): siRNA sense strand
aaaccgagcuacucagaca

SEQ ID NO: 1059206 - RNA, 19 nt, Homo sapiens
  misc_RNA (1)...(19): siRNA sense strand
aguauuagcuguucuugau

SEQ ID NO: 1059207 - RNA, 19 nt, Homo sapiens
  misc_RNA (1)...(19): siRNA sense strand
ggaagaagccagggugguu

SEQ ID NO: 1059208 - RNA, 19 nt, Homo sapiens
  misc_RNA (1)...(19): siRNA sense strand
gcgugaacaugcacagaaa

SEQ ID NO: 1059209 - RNA, 19 nt, Homo sapiens
  misc_RNA (1)...(19): siRNA sense strand
gacaacacccugaaggaaa

SEQ ID NO: 1059210 - RNA, 19 nt, Homo sapiens
  misc_RNA (1)...(19): siRNA sense strand
gguuggagcuacagagaug

SEQ ID NO: 1059211 - RNA, 19 nt, Homo sapiens
  misc_RNA (1)...(19): siRNA sense strand
gauucugucuuuaacucua

SEQ ID NO: 1059212 - RNA, 19 nt, Homo sapiens
  misc_RNA (1)...(19): siRNA sense strand
uugaaagcaugaaguauug

SEQ ID NO: 1059213 - RNA, 19 nt, Homo sapiens
  misc_RNA (1)...(19): siRNA sense strand
uaaagaugauucagguauc

SEQ ID NO: 1059214 - RNA, 19 nt, Homo sapiens
  misc_RNA (1)...(19): siRNA sense strand
uggcaacuaugaccagaaa

SEQ ID NO: 1059215 - RNA, 19 nt, Homo sapiens
  misc_RNA (1)...(19): siRNA sense strand
guucuugauucagcuguua

SEQ ID NO: 1059216 - RNA, 19 nt, Homo sapiens
  misc_RNA (1)...(19): siRNA sense strand
ucaaucaaauacuggaaga

SEQ ID NO: 1059217 - RNA, 19 nt, Homo sapiens
  misc_RNA (1)...(19): siRNA sense strand
guugagaugcaguauuaua

SEQ ID NO: 1059218 - RNA, 19 nt, Homo sapiens
  misc_RNA (1)...(19): siRNA sense strand
gaagcgaagccuaagugaa

SEQ ID NO: 1059219 - RNA, 19 nt, Homo sapiens
  misc_RNA (1)...(19): siRNA sense strand
aaggaaaccucauuguauc

SEQ ID NO: 1059220 - RNA, 19 nt, Homo sapiens
  misc_RNA (1)...(19): siRNA sense strand
accugaaccuccuaacuua

SEQ ID NO: 1059221 - RNA, 19 nt, Homo sapiens
  misc_RNA (1)...(19): siRNA sense strand
aaauucagcucgaaguaca

SEQ ID NO: 1059222 - RNA, 19 nt, Homo sapiens
  misc_RNA (1)...(19): siRNA sense strand
gaaaccucauuguaucagu

SEQ ID NO: 1059223 - RNA, 19 nt, Homo sapiens
  misc_RNA (1)...(19): siRNA sense strand
gaggaacagacagccauua

SEQ ID NO: 1059224 - RNA, 19 nt, Homo sapiens
  misc_RNA (1)...(19): siRNA sense strand
gacagccauuaacuucuaa

SEQ ID NO: 1059225 - RNA, 19 nt, Homo sapiens
  misc_RNA (1)...(19): siRNA sense strand
acaccuggcccauauuauu

SEQ ID NO: 1059226 - RNA, 19 nt, Homo sapiens
  misc_RNA (1)...(19): siRNA sense strand
uuacaccuggcccauauua

SEQ ID NO: 1059227 - RNA, 19 nt, Homo sapiens
  misc_RNA (1)...(19): siRNA sense strand
auaucuggcugcacaauga

SEQ ID NO: 1059228 - RNA, 19 nt, Homo sapiens
  misc_RNA (1)...(19): siRNA sense strand
gaaaauucagcucgaagua

SEQ ID NO: 1059229 - RNA, 19 nt, Homo sapiens
  misc_RNA (1)...(19): siRNA sense strand
gcaguuauugaaagcauga

SEQ ID NO: 1059230 - RNA, 19 nt, Homo sapiens
  misc_RNA (1)...(19): siRNA sense strand
aaaccucauuguaucaguu

SEQ ID NO: 1059231 - RNA, 19 nt, Homo sapiens
  misc_RNA (1)...(19): siRNA sense strand
uaaacgaacaaacuuagug

SEQ ID NO: 1059232 - RNA, 19 nt, Homo sapiens
  misc_RNA (1)...(19): siRNA sense strand
ccucugagaagucaagauu

SEQ ID NO: 1059233 - RNA, 19 nt, Homo sapiens
  misc_RNA (1)...(19): siRNA sense strand
uauuagcuguucuugauuc

SEQ ID NO: 1059234 - RNA, 19 nt, Homo sapiens
  misc_RNA (1)...(19): siRNA sense strand
caguuacaguuuaaggaaa

SEQ ID NO: 1059235 - RNA, 19 nt, Homo sapiens
  misc_RNA (1)...(19): siRNA sense strand
caaagaaaccgagcuacuc

SEQ ID NO: 1059236 - RNA, 19 nt, Homo sapiens
  misc_RNA (1)...(19): siRNA sense strand
aaagaaaccgagcuacuca

SEQ ID NO: 1059237 - RNA, 19 nt, Homo sapiens
  misc_RNA (1)...(19): siRNA sense strand
acagacagccauuaacuuc

SEQ ID NO: 1059238 - RNA, 19 nt, Homo sapiens
  misc_RNA (1)...(19): siRNA sense strand
cuacucagacaaacacauu

SEQ ID NO: 1059239 - RNA, 19 nt, Homo sapiens
  misc_RNA (1)...(19): siRNA sense strand
aaugagagggcuagacaaa

SEQ ID NO: 1059240 - RNA, 19 nt, Homo sapiens
  misc_RNA (1)...(19): siRNA sense strand
aaaauacucugccuugugu

SEQ ID NO: 1059241 - RNA, 19 nt, Homo sapiens
  misc_RNA (1)...(19): siRNA sense strand
uguuacaccuggcccauau

SEQ ID NO: 1059242 - RNA, 19 nt, Homo sapiens
  misc_RNA (1)...(19): siRNA sense strand
cuucuaauccacuuaaaga

SEQ ID NO: 1059243 - RNA, 19 nt, Homo sapiens
  misc_RNA (1)...(19): siRNA sense strand
caaauaccacauucagcuu

SEQ ID NO: 1059244 - RNA, 19 nt, Homo sapiens
  misc_RNA (1)...(19): siRNA sense strand
gaccggcgucuguuucuga

SEQ ID NO: 1059245 - RNA, 19 nt, Homo sapiens
  misc_RNA (1)...(19): siRNA sense strand
ucaguuacaguuuaaggaa

SEQ ID NO: 1059246 - RNA, 19 nt, Homo sapiens
  misc_RNA (1)...(19): siRNA sense strand
aaacagugcacuacagaca

SEQ ID NO: 1059247 - RNA, 19 nt, Homo sapiens
  misc_RNA (1)...(19): siRNA sense strand
agacaaacacauucaucaa

SEQ ID NO: 1059248 - RNA, 19 nt, Homo sapiens
  misc_RNA (1)...(19): siRNA sense strand
cagacaaacacauucauca

SEQ ID NO: 1059249 - RNA, 19 nt, Homo sapiens
  misc_RNA (1)...(19): siRNA sense strand
ggagcuacagagaugguaa

SEQ ID NO: 1059250 - RNA, 19 nt, Homo sapiens
  misc_RNA (1)...(19): siRNA sense strand
guuggcuccuguaaugaaa

SEQ ID NO: 1059251 - RNA, 19 nt, Homo sapiens
  misc_RNA (1)...(19): siRNA sense strand
gauuagaggccgaguucau

SEQ ID NO: 1059252 - RNA, 19 nt, Homo sapiens
  misc_RNA (1)...(19): siRNA sense strand
uaccugaaccuccuaacuu

SEQ ID NO: 1059253 - RNA, 19 nt, Homo sapiens
  misc_RNA (1)...(19): siRNA sense strand
caauguaaacgaacaaacu

SEQ ID NO: 1059254 - RNA, 19 nt, Homo sapiens
  misc_RNA (1)...(19): siRNA sense strand
aaacuuaguggcaaaugau

SEQ ID NO: 1059255 - RNA, 19 nt, Homo sapiens
  misc_RNA (1)...(19): siRNA sense strand
gaauaccugaaccuccuaa

SEQ ID NO: 1059256 - RNA, 19 nt, Homo sapiens
  misc_RNA (1)...(19): siRNA sense strand
uucgggagcucaacaacaa

SEQ ID NO: 1059257 - RNA, 19 nt, Homo sapiens
  misc_RNA (1)...(19): siRNA sense strand
gaaguauuagcuguucuug

SEQ ID NO: 1059258 - RNA, 19 nt, Homo sapiens
  misc_RNA (1)...(19): siRNA sense strand
ggacaccgggcaaauacca

SEQ ID NO: 1059259 - RNA, 19 nt, Homo sapiens
  misc_RNA (1)...(19): siRNA sense strand
gauguugagaugcaguauu

SEQ ID NO: 1059260 - RNA, 19 nt, Homo sapiens
  misc_RNA (1)...(19): siRNA sense strand
aauugcagauguugagaug

SEQ ID NO: 1059261 - RNA, 19 nt, Homo sapiens
  misc_RNA (1)...(19): siRNA sense strand
gaggccgaguucauagaug

SEQ ID NO: 1059262 - RNA, 19 nt, Homo sapiens
  misc_RNA (1)...(19): siRNA sense strand
gaaaucgaucgugaacuuc

SEQ ID NO: 1059263 - RNA, 19 nt, Homo sapiens
  misc_RNA (1)...(19): siRNA sense strand
agacaacacccugaaggaa

SEQ ID NO: 1059264 - RNA, 19 nt, Homo sapiens
  misc_RNA (1)...(19): siRNA sense strand
cagaagacaacacccugaa

SEQ ID NO: 1059265 - RNA, 19 nt, Homo sapiens
  misc_RNA (1)...(19): siRNA sense strand
aagccucaauguaaacgaa

SEQ ID NO: 1059266 - RNA, 19 nt, Homo sapiens
  misc_RNA (1)...(19): siRNA sense strand
caauuaagaauaccugaac

SEQ ID NO: 1059267 - RNA, 19 nt, Homo sapiens
  misc_RNA (1)...(19): siRNA sense strand
ucuaauccacuuaaagaug

SEQ ID NO: 1059268 - RNA, 19 nt, Homo sapiens
  misc_RNA (1)...(19): siRNA sense strand
aggaacagacagccauuaa

SEQ ID NO: 1059269 - RNA, 19 nt, Homo sapiens
  misc_RNA (1)...(19): siRNA sense strand
caugaaguauuggcgugaa

SEQ ID NO: 1059270 - RNA, 19 nt, Homo sapiens
  misc_RNA (1)...(19): siRNA sense strand
gggcaaauaccacauucag

SEQ ID NO: 1059271 - RNA, 19 nt, Homo sapiens
  misc_RNA (1)...(19): siRNA sense strand
uacucugccuugugucuuu

SEQ ID NO: 1059272 - RNA, 19 nt, Homo sapiens
  misc_RNA (1)...(19): siRNA sense strand
ccagaguuggcuccuguaa

SEQ ID NO: 1059273 - RNA, 19 nt, Homo sapiens
  misc_RNA (1)...(19): siRNA sense strand
guaaacgaacaaacuuagu

SEQ ID NO: 1059274 - RNA, 19 nt, Homo sapiens
  misc_RNA (1)...(19): siRNA sense strand
ccauauuauucgaagacuu

SEQ ID NO: 1059275 - RNA, 19 nt, Homo sapiens
  misc_RNA (1)...(19): siRNA sense strand
guauuggcgugaacaugca

SEQ ID NO: 1059276 - RNA, 19 nt, Homo sapiens
  misc_RNA (1)...(19): siRNA sense strand
acaacacccugaaggaaac

SEQ ID NO: 1059277 - RNA, 19 nt, Homo sapiens
  misc_RNA (1)...(19): siRNA sense strand
gaugauauuccagaagaca

SEQ ID NO: 1059278 - RNA, 19 nt, Homo sapiens
  misc_RNA (1)...(19): siRNA sense strand
acaaugagagggcuagaca

SEQ ID NO: 1059279 - RNA, 19 nt, Homo sapiens
  misc_RNA (1)...(19): siRNA sense strand
ggaacagacagccauuaac

SEQ ID NO: 1059280 - RNA, 19 nt, Homo sapiens
  misc_RNA (1)...(19): siRNA sense strand
ggcgugaacaugcacagaa

SEQ ID NO: 1059281 - RNA, 19 nt, Homo sapiens
  misc_RNA (1)...(19): siRNA sense strand
agacacuuaagcccaauuu

SEQ ID NO: 1059282 - RNA, 19 nt, Homo sapiens
  misc_RNA (1)...(19): siRNA sense strand
gcacuacagacacuuaagc

SEQ ID NO: 1059283 - RNA, 19 nt, Homo sapiens
  misc_RNA (1)...(19): siRNA sense strand
agaaaccgagcuacucaga

SEQ ID NO: 1059284 - RNA, 19 nt, Homo sapiens
  misc_RNA (1)...(19): siRNA sense strand
aaacuuuccaggcauuugu

SEQ ID NO: 1059285 - RNA, 19 nt, Homo sapiens
  misc_RNA (1)...(19): siRNA sense strand
caccuggcccauauuauuc

SEQ ID NO: 1059286 - RNA, 19 nt, Homo sapiens
  misc_RNA (1)...(19): siRNA sense strand
gaacaugcacagaaaacug

SEQ ID NO: 1059287 - RNA, 19 nt, Homo sapiens
  misc_RNA (1)...(19): siRNA sense strand
gaaguauuggcgugaacau

SEQ ID NO: 1059288 - RNA, 19 nt, Homo sapiens
  misc_RNA (1)...(19): siRNA sense strand
guuccguuguucaaucaga

SEQ ID NO: 1059289 - RNA, 19 nt, Homo sapiens
  misc_RNA (1)...(19): siRNA sense strand
gaacgugacugguacauug

SEQ ID NO: 1059290 - RNA, 19 nt, Homo sapiens
  misc_RNA (1)...(19): siRNA sense strand
gagaugagcucguuauuuc

SEQ ID NO: 1059291 - RNA, 19 nt, Homo sapiens
  misc_RNA (1)...(19): siRNA sense strand
ggucauauauugagaguuu

SEQ ID NO: 1059292 - RNA, 19 nt, Homo sapiens
  misc_RNA (1)...(19): siRNA sense strand
uaaggcaguuggaauguua

SEQ ID NO: 1059293 - RNA, 19 nt, Homo sapiens
  misc_RNA (1)...(19): siRNA sense strand
gagaaggccucaaauguac

SEQ ID NO: 1059294 - RNA, 19 nt, Homo sapiens
  misc_RNA (1)...(19): siRNA sense strand
gcuuagccuucaagaauua

SEQ ID NO: 1059295 - RNA, 19 nt, Homo sapiens
  misc_RNA (1)...(19): siRNA sense strand
uauacaagcucauccacua

SEQ ID NO: 1059296 - RNA, 19 nt, Homo sapiens
  misc_RNA (1)...(19): siRNA sense strand
gauauccgauuuauucuuc

SEQ ID NO: 1059297 - RNA, 19 nt, Homo sapiens
  misc_RNA (1)...(19): siRNA sense strand
gaagagaaggccucaaaug

SEQ ID NO: 1059298 - RNA, 19 nt, Homo sapiens
  misc_RNA (1)...(19): siRNA sense strand
gaugaagaacguuauagua

SEQ ID NO: 1059299 - RNA, 19 nt, Homo sapiens
  misc_RNA (1)...(19): siRNA sense strand
caaauguacuggaagaaau

SEQ ID NO: 1059300 - RNA, 19 nt, Homo sapiens
  misc_RNA (1)...(19): siRNA sense strand
cacaaacgaugaugaagaa

SEQ ID NO: 1059301 - RNA, 19 nt, Homo sapiens
  misc_RNA (1)...(19): siRNA sense strand
gaagacugguaccaauuug

SEQ ID NO: 1059302 - RNA, 19 nt, Homo sapiens
  misc_RNA (1)...(19): siRNA sense strand
gguauacucugaaacuaau

SEQ ID NO: 1059303 - RNA, 19 nt, Homo sapiens
  misc_RNA (1)...(19): siRNA sense strand
gauccaagugggaaaguua

SEQ ID NO: 1059304 - RNA, 19 nt, Homo sapiens
  misc_RNA (1)...(19): siRNA sense strand
ggagaugagcucguuauuu

SEQ ID NO: 1059305 - RNA, 19 nt, Homo sapiens
  misc_RNA (1)...(19): siRNA sense strand
agagaaggccucaaaugua

SEQ ID NO: 1059306 - RNA, 19 nt, Homo sapiens
  misc_RNA (1)...(19): siRNA sense strand
ccagaacuguuucaacuag

SEQ ID NO: 1059307 - RNA, 19 nt, Homo sapiens
  misc_RNA (1)...(19): siRNA sense strand
gaguucaguuguucacauu

SEQ ID NO: 1059308 - RNA, 19 nt, Homo sapiens
  misc_RNA (1)...(19): siRNA sense strand
ugaaggagaugagcucguu

SEQ ID NO: 1059309 - RNA, 19 nt, Homo sapiens
  misc_RNA (1)...(19): siRNA sense strand
ggagagugcuuagccuuca

SEQ ID NO: 1059310 - RNA, 19 nt, Homo sapiens
  misc_RNA (1)...(19): siRNA sense strand
uggaagaaauugccaagga

SEQ ID NO: 1059311 - RNA, 19 nt, Homo sapiens
  misc_RNA (1)...(19): siRNA sense strand
cagaagagaaggccucaaa

SEQ ID NO: 1059312 - RNA, 19 nt, Homo sapiens
  misc_RNA (1)...(19): siRNA sense strand
gugcuuagccuucaagaau

SEQ ID NO: 1059313 - RNA, 19 nt, Homo sapiens
  misc_RNA (1)...(19): siRNA sense strand
ggacaaaguuuuaaaagac

SEQ ID NO: 1059314 - RNA, 19 nt, Homo sapiens
  misc_RNA (1)...(19): siRNA sense strand
guacauugguuugguaucu

SEQ ID NO: 1059315 - RNA, 19 nt, Homo sapiens
  misc_RNA (1)...(19): siRNA sense strand
ccucaaauguacuggaaga

SEQ ID NO: 1059316 - RNA, 19 nt, Homo sapiens
  misc_RNA (1)...(19): siRNA sense strand
ccacaaacgaugaugaaga

SEQ ID NO: 1059317 - RNA, 19 nt, Homo sapiens
  misc_RNA (1)...(19): siRNA sense strand
aaguuuagguccaauagaa

SEQ ID NO: 1059318 - RNA, 19 nt, Homo sapiens
  misc_RNA (1)...(19): siRNA sense strand
ggaguucaguuguucacau

SEQ ID NO: 1059319 - RNA, 19 nt, Homo sapiens
  misc_RNA (1)...(19): siRNA sense strand
gaugaugaagaacguuaua

SEQ ID NO: 1059320 - RNA, 19 nt, Homo sapiens
  misc_RNA (1)...(19): siRNA sense strand
gacuuuagagaacugauua

SEQ ID NO: 1059321 - RNA, 19 nt, Homo sapiens
  misc_RNA (1)...(19): siRNA sense strand
guuaaauccugaagcuguu

SEQ ID NO: 1059322 - RNA, 19 nt, Homo sapiens
  misc_RNA (1)...(19): siRNA sense strand
ggaagcaauuuuacaagaa

SEQ ID NO: 1059323 - RNA, 19 nt, Homo sapiens
  misc_RNA (1)...(19): siRNA sense strand
gauuaaguaccuugaagaa

SEQ ID NO: 1059324 - RNA, 19 nt, Homo sapiens
  misc_RNA (1)...(19): siRNA sense strand
guaccaauuuguucuaagg

SEQ ID NO: 1059325 - RNA, 19 nt, Homo sapiens
  misc_RNA (1)...(19): siRNA sense strand
caauagaagacuuuagaga

SEQ ID NO: 1059326 - RNA, 19 nt, Homo sapiens
  misc_RNA (1)...(19): siRNA sense strand
ugggauauccgauuuauuc

SEQ ID NO: 1059327 - RNA, 19 nt, Homo sapiens
  misc_RNA (1)...(19): siRNA sense strand
ggccucaaauguacuggaa

SEQ ID NO: 1059328 - RNA, 19 nt, Homo sapiens
  misc_RNA (1)...(19): siRNA sense strand
aauaugaacgugacuggua

SEQ ID NO: 1059329 - RNA, 19 nt, Homo sapiens
  misc_RNA (1)...(19): siRNA sense strand
gaaggagaugagcucguua

SEQ ID NO: 1059330 - RNA, 19 nt, Homo sapiens
  misc_RNA (1)...(19): siRNA sense strand
aaaguuaaauccugaagcu

SEQ ID NO: 1059331 - RNA, 19 nt, Homo sapiens
  misc_RNA (1)...(19): siRNA sense strand
gaaggaagcaauuuuacaa

SEQ ID NO: 1059332 - RNA, 19 nt, Homo sapiens
  misc_RNA (1)...(19): siRNA sense strand
agaagacugguaccaauuu

SEQ ID NO: 1059333 - RNA, 19 nt, Homo sapiens
  misc_RNA (1)...(19): siRNA sense strand
ggucagugggccaaucuuu

SEQ ID NO: 1059334 - RNA, 19 nt, Homo sapiens
  misc_RNA (1)...(19): siRNA sense strand
ucaaauguacuggaagaaa

SEQ ID NO: 1059335 - RNA, 19 nt, Homo sapiens
  misc_RNA (1)...(19): siRNA sense strand
aagagaaggccucaaaugu

SEQ ID NO: 1059336 - RNA, 19 nt, Homo sapiens
  misc_RNA (1)...(19): siRNA sense strand
ucaugggaauuacuuuaug

SEQ ID NO: 1059337 - RNA, 19 nt, Homo sapiens
  misc_RNA (1)...(19): siRNA sense strand
cagguauacucugaaacua

SEQ ID NO: 1059338 - RNA, 19 nt, Homo sapiens
  misc_RNA (1)...(19): siRNA sense strand
gcaaguuuagguccaauag

SEQ ID NO: 1059339 - RNA, 19 nt, Homo sapiens
  misc_RNA (1)...(19): siRNA sense strand
cagaagacugguaccaauu

SEQ ID NO: 1059340 - RNA, 19 nt, Homo sapiens
  misc_RNA (1)...(19): siRNA sense strand
caaaaccucuccacauaca

SEQ ID NO: 1059341 - RNA, 19 nt, Homo sapiens
  misc_RNA (1)...(19): siRNA sense strand
aaacgaugaugaagaacgu

SEQ ID NO: 1059342 - RNA, 19 nt, Homo sapiens
  misc_RNA (1)...(19): siRNA sense strand
ggguaugauucuaauaugg

SEQ ID NO: 1059343 - RNA, 19 nt, Homo sapiens
  misc_RNA (1)...(19): siRNA sense strand
gcucguuauuuccagaaga

SEQ ID NO: 1059344 - RNA, 19 nt, Homo sapiens
  misc_RNA (1)...(19): siRNA sense strand
gagaacugauuaaguaccu

SEQ ID NO: 1059345 - RNA, 19 nt, Homo sapiens
  misc_RNA (1)...(19): siRNA sense strand
uuguucacauucucacuua

SEQ ID NO: 1059346 - RNA, 19 nt, Homo sapiens
  misc_RNA (1)...(19): siRNA sense strand
aaaccucuccacauacauu

SEQ ID NO: 1059347 - RNA, 19 nt, Homo sapiens
  misc_RNA (1)...(19): siRNA sense strand
gccaaucuuucaugggaau

SEQ ID NO: 1059348 - RNA, 19 nt, Homo sapiens
  misc_RNA (1)...(19): siRNA sense strand
gagagugcuuagccuucaa

SEQ ID NO: 1059349 - RNA, 19 nt, Homo sapiens
  misc_RNA (1)...(19): siRNA sense strand
auagaagacuuuagagaac

SEQ ID NO: 1059350 - RNA, 19 nt, Homo sapiens
  misc_RNA (1)...(19): siRNA sense strand
gacaauauggcuccuaguc

SEQ ID NO: 1059351 - RNA, 19 nt, Homo sapiens
  misc_RNA (1)...(19): siRNA sense strand
gaguggaggacuagcugua

SEQ ID NO: 1059352 - RNA, 19 nt, Homo sapiens
  misc_RNA (1)...(19): siRNA sense strand
gcuccuaguccuggucaua

SEQ ID NO: 1059353 - RNA, 19 nt, Homo sapiens
  misc_RNA (1)...(19): siRNA sense strand
ggauauccgauuuauucuu

SEQ ID NO: 1059354 - RNA, 19 nt, Homo sapiens
  misc_RNA (1)...(19): siRNA sense strand
caagcucauccacuacuuu

SEQ ID NO: 1059355 - RNA, 19 nt, Homo sapiens
  misc_RNA (1)...(19): siRNA sense strand
gguuugguaucugaugaaa

SEQ ID NO: 1059356 - RNA, 19 nt, Homo sapiens
  misc_RNA (1)...(19): siRNA sense strand
cuaaggcaguuggaauguu

SEQ ID NO: 1059357 - RNA, 19 nt, Homo sapiens
  misc_RNA (1)...(19): siRNA sense strand
gccuuggucuguugcuuug

SEQ ID NO: 1059358 - RNA, 19 nt, Homo sapiens
  misc_RNA (1)...(19): siRNA sense strand
guggaggacuagcuguaug

SEQ ID NO: 1059359 - RNA, 19 nt, Homo sapiens
  misc_RNA (1)...(19): siRNA sense strand
gcaguuggaauguuaucau

SEQ ID NO: 1059360 - RNA, 19 nt, Homo sapiens
  misc_RNA (1)...(19): siRNA sense strand
uucaaaaccucuccacaua

SEQ ID NO: 1059361 - RNA, 19 nt, Homo sapiens
  misc_RNA (1)...(19): siRNA sense strand
caaucuuucaugggaauua

SEQ ID NO: 1059362 - RNA, 19 nt, Homo sapiens
  misc_RNA (1)...(19): siRNA sense strand
caagugggaaaguuaaauc

SEQ ID NO: 1059363 - RNA, 19 nt, Homo sapiens
  misc_RNA (1)...(19): siRNA sense strand
acucugaaacuaaugauug

SEQ ID NO: 1059364 - RNA, 19 nt, Homo sapiens
  misc_RNA (1)...(19): siRNA sense strand
guucaguuguucacauucu

SEQ ID NO: 1059365 - RNA, 19 nt, Homo sapiens
  misc_RNA (1)...(19): siRNA sense strand
ccugggauauccgauuuau

SEQ ID NO: 1059366 - RNA, 19 nt, Homo sapiens
  misc_RNA (1)...(19): siRNA sense strand
gcucauccacuacuuuuaa

SEQ ID NO: 1059367 - RNA, 19 nt, Homo sapiens
  misc_RNA (1)...(19): siRNA sense strand
gaauuacuuuaugccacaa

SEQ ID NO: 1059368 - RNA, 19 nt, Homo sapiens
  misc_RNA (1)...(19): siRNA sense strand
gaauuuacacugggagagu

SEQ ID NO: 1059369 - RNA, 19 nt, Homo sapiens
  misc_RNA (1)...(19): siRNA sense strand
caacuagcacugaaagcau

SEQ ID NO: 1059370 - RNA, 19 nt, Homo sapiens
  misc_RNA (1)...(19): siRNA sense strand
gaaauugccaaggacaaag

SEQ ID NO: 1059371 - RNA, 19 nt, Homo sapiens
  misc_RNA (1)...(19): siRNA sense strand
gccagaacuguuucaacua

SEQ ID NO: 1059372 - RNA, 19 nt, Homo sapiens
  misc_RNA (1)...(19): siRNA sense strand
ucauggaguucaguuguuc

SEQ ID NO: 1059373 - RNA, 19 nt, Homo sapiens
  misc_RNA (1)...(19): siRNA sense strand
ucagugggccaaucuuuca

SEQ ID NO: 1059374 - RNA, 19 nt, Homo sapiens
  misc_RNA (1)...(19): siRNA sense strand
acauugguuugguaucuga

SEQ ID NO: 1059375 - RNA, 19 nt, Homo sapiens
  misc_RNA (1)...(19): siRNA sense strand
aacuagcacugaaagcauu

SEQ ID NO: 1059376 - RNA, 19 nt, Homo sapiens
  misc_RNA (1)...(19): siRNA sense strand
agaaauugccaaggacaaa

SEQ ID NO: 1059377 - RNA, 19 nt, Homo sapiens
  misc_RNA (1)...(19): siRNA sense strand
agacugguaccaauuuguu

SEQ ID NO: 1059378 - RNA, 19 nt, Homo sapiens
  misc_RNA (1)...(19): siRNA sense strand
uccaauagaagacuuuaga

SEQ ID NO: 1059379 - RNA, 19 nt, Homo sapiens
  misc_RNA (1)...(19): siRNA sense strand
aaagcaaguuuagguccaa

SEQ ID NO: 1059380 - RNA, 19 nt, Homo sapiens
  misc_RNA (1)...(19): siRNA sense strand
uccuaguccuggucauaua

SEQ ID NO: 1059381 - RNA, 19 nt, Homo sapiens
  misc_RNA (1)...(19): siRNA sense strand
agccagaacuguuucaacu

SEQ ID NO: 1059382 - RNA, 19 nt, Homo sapiens
  misc_RNA (1)...(19): siRNA sense strand
aaaguggaaggaagcaauu

SEQ ID NO: 1059383 - RNA, 19 nt, Homo sapiens
  misc_RNA (1)...(19): siRNA sense strand
guaccuugaagaauaugaa

SEQ ID NO: 1059384 - RNA, 19 nt, Homo sapiens
  misc_RNA (1)...(19): siRNA sense strand
gaaggccucaaauguacug

SEQ ID NO: 1059385 - RNA, 19 nt, Homo sapiens
  misc_RNA (1)...(19): siRNA sense strand
cauauauuccucucaugga

SEQ ID NO: 1059386 - RNA, 19 nt, Homo sapiens
  misc_RNA (1)...(19): siRNA sense strand
ugcuuagccuucaagaauu

SEQ ID NO: 1059387 - RNA, 19 nt, Homo sapiens
  misc_RNA (1)...(19): siRNA sense strand
agaaaagccauacuuguuu

SEQ ID NO: 1059388 - RNA, 19 nt, Homo sapiens
  misc_RNA (1)...(19): siRNA sense strand
cucugaaacuaaugauuga

SEQ ID NO: 1059389 - RNA, 19 nt, Homo sapiens
  misc_RNA (1)...(19): siRNA sense strand
gaaguaacaccaaaugaaa

SEQ ID NO: 1059390 - RNA, 19 nt, Homo sapiens
  misc_RNA (1)...(19): siRNA sense strand
gaagauaaugcuacaguuu

SEQ ID NO: 1059391 - RNA, 19 nt, Homo sapiens
  misc_RNA (1)...(19): siRNA sense strand
cuacagaauuacccaguua

SEQ ID NO: 1059392 - RNA, 19 nt, Homo sapiens
  misc_RNA (1)...(19): siRNA sense strand
guacuucccucuacagaau

SEQ ID NO: 1059393 - RNA, 19 nt, Homo sapiens
  misc_RNA (1)...(19): siRNA sense strand
ucagagccuugauuacaua

SEQ ID NO: 1059394 - RNA, 19 nt, Homo sapiens
  misc_RNA (1)...(19): siRNA sense strand
cagacacgcugagaauaua

SEQ ID NO: 1059395 - RNA, 19 nt, Homo sapiens
  misc_RNA (1)...(19): siRNA sense strand
gagccuugauuacauagaa

SEQ ID NO: 1059396 - RNA, 19 nt, Homo sapiens
  misc_RNA (1)...(19): siRNA sense strand
gaauauaucagagccuuga

SEQ ID NO: 1059397 - RNA, 19 nt, Homo sapiens
  misc_RNA (1)...(19): siRNA sense strand
gccaggaucugaggcaauu

SEQ ID NO: 1059398 - RNA, 19 nt, Homo sapiens
  misc_RNA (1)...(19): siRNA sense strand
ugaaguaacaccaaaugaa

SEQ ID NO: 1059399 - RNA, 19 nt, Homo sapiens
  misc_RNA (1)...(19): siRNA sense strand
acagugaacuagcaacaga

SEQ ID NO: 1059400 - RNA, 19 nt, Homo sapiens
  misc_RNA (1)...(19): siRNA sense strand
caauugaugccaugaagaa

SEQ ID NO: 1059401 - RNA, 19 nt, Homo sapiens
  misc_RNA (1)...(19): siRNA sense strand
cauagaagauaaugcuaca

SEQ ID NO: 1059402 - RNA, 19 nt, Homo sapiens
  misc_RNA (1)...(19): siRNA sense strand
gcagauguacuucccucua

SEQ ID NO: 1059403 - RNA, 19 nt, Homo sapiens
  misc_RNA (1)...(19): siRNA sense strand
ggaacaagaccaacauuuu

SEQ ID NO: 1059404 - RNA, 19 nt, Homo sapiens
  misc_RNA (1)...(19): siRNA sense strand
gggaacaagaccaacauuu

SEQ ID NO: 1059405 - RNA, 19 nt, Homo sapiens
  misc_RNA (1)...(19): siRNA sense strand
agaaaagcaugaugaagua

SEQ ID NO: 1059406 - RNA, 19 nt, Homo sapiens
  misc_RNA (1)...(19): siRNA sense strand
ccagacacgcugagaauau

SEQ ID NO: 1059407 - RNA, 19 nt, Homo sapiens
  misc_RNA (1)...(19): siRNA sense strand
gaugaaguaacaccaaaug

SEQ ID NO: 1059408 - RNA, 19 nt, Homo sapiens
  misc_RNA (1)...(19): siRNA sense strand
ccaguuaacaacaugguaa

SEQ ID NO: 1059409 - RNA, 19 nt, Homo sapiens
  misc_RNA (1)...(19): siRNA sense strand
gaacaagaccaacauuuuc

SEQ ID NO: 1059410 - RNA, 19 nt, Homo sapiens
  misc_RNA (1)...(19): siRNA sense strand
agaauuacccaguuaacaa

SEQ ID NO: 1059411 - RNA, 19 nt, Homo sapiens
  misc_RNA (1)...(19): siRNA sense strand
ggaaaacagugaacuagca

SEQ ID NO: 1059412 - RNA, 19 nt, Homo sapiens
  misc_RNA (1)...(19): siRNA sense strand
ggcuuugggucauuucauu

SEQ ID NO: 1059413 - RNA, 19 nt, Homo sapiens
  misc_RNA (1)...(19): siRNA sense strand
uugaugccaugaagaaauu

SEQ ID NO: 1059414 - RNA, 19 nt, Homo sapiens
  misc_RNA (1)...(19): siRNA sense strand
agaagauaaugcuacaguu

SEQ ID NO: 1059415 - RNA, 19 nt, Homo sapiens
  misc_RNA (1)...(19): siRNA sense strand
agaccaacauuuucugaua

SEQ ID NO: 1059416 - RNA, 19 nt, Homo sapiens
  misc_RNA (1)...(19): siRNA sense strand
aaagcaugaugaaguaaca

SEQ ID NO: 1059417 - RNA, 19 nt, Homo sapiens
  misc_RNA (1)...(19): siRNA sense strand
cagauguacuucccucuac

SEQ ID NO: 1059418 - RNA, 19 nt, Homo sapiens
  misc_RNA (1)...(19): siRNA sense strand
ugcgguagcuaaugccaaa

SEQ ID NO: 1059419 - RNA, 19 nt, Homo sapiens
  misc_RNA (1)...(19): siRNA sense strand
gaauuacccaguuaacaac

SEQ ID NO: 1059420 - RNA, 19 nt, Homo sapiens
  misc_RNA (1)...(19): siRNA sense strand
gguagcuaaugccaaaaua

SEQ ID NO: 1059421 - RNA, 19 nt, Homo sapiens
  misc_RNA (1)...(19): siRNA sense strand
gaaauuccuuggggagcua

SEQ ID NO: 1059422 - RNA, 19 nt, Homo sapiens
  misc_RNA (1)...(19): siRNA sense strand
uagaagauaaugcuacagu

SEQ ID NO: 1059423 - RNA, 19 nt, Homo sapiens
  misc_RNA (1)...(19): siRNA sense strand
uagaaaagcagauguacuu

SEQ ID NO: 1059424 - RNA, 19 nt, Homo sapiens
  misc_RNA (1)...(19): siRNA sense strand
ucuacagaauuacccaguu

SEQ ID NO: 1059425 - RNA, 19 nt, Homo sapiens
  misc_RNA (1)...(19): siRNA sense strand
aaacagugaacuagcaaca

SEQ ID NO: 1059426 - RNA, 19 nt, Homo sapiens
  misc_RNA (1)...(19): siRNA sense strand
caaauugaagaggaaauag

SEQ ID NO: 1059427 - RNA, 19 nt, Homo sapiens
  misc_RNA (1)...(19): siRNA sense strand
augaugaaguaacaccaaa

SEQ ID NO: 1059428 - RNA, 19 nt, Homo sapiens
  misc_RNA (1)...(19): siRNA sense strand
uuacccaguuaacaacaug

SEQ ID NO: 1059429 - RNA, 19 nt, Homo sapiens
  misc_RNA (1)...(19): siRNA sense strand
cagaauuacccaguuaaca

SEQ ID NO: 1059430 - RNA, 19 nt, Homo sapiens
  misc_RNA (1)...(19): siRNA sense strand
acuucccucuacagaauua

SEQ ID NO: 1059431 - RNA, 19 nt, Homo sapiens
  misc_RNA (1)...(19): siRNA sense strand
uuucaugccuacuaucucu

SEQ ID NO: 1059432 - RNA, 19 nt, Homo sapiens
  misc_RNA (1)...(19): siRNA sense strand
ccucaggauauuuggcaua

SEQ ID NO: 1059433 - RNA, 19 nt, Homo sapiens
  misc_RNA (1)...(19): siRNA sense strand
gauagaaaagcaugaugaa

SEQ ID NO: 1059434 - RNA, 19 nt, Homo sapiens
  misc_RNA (1)...(19): siRNA sense strand
gaccaacauuuucugauag

SEQ ID NO: 1059435 - RNA, 19 nt, Homo sapiens
  misc_RNA (1)...(19): siRNA sense strand
gcaauucuggguggcugaa

SEQ ID NO: 1059436 - RNA, 19 nt, Homo sapiens
  misc_RNA (1)...(19): siRNA sense strand
uggaaccucaggauauuug

SEQ ID NO: 1059437 - RNA, 19 nt, Homo sapiens
  misc_RNA (1)...(19): siRNA sense strand
gggcagcgcgguugguuuu

SEQ ID NO: 1059438 - RNA, 19 nt, Homo sapiens
  misc_RNA (1)...(19): siRNA sense strand
ccuccugcgugccugcaaa

SEQ ID NO: 1059439 - RNA, 19 nt, Homo sapiens
  misc_RNA (1)...(19): siRNA sense strand
uauuuggcauaucauguuc

SEQ ID NO: 1059440 - RNA, 19 nt, Homo sapiens
  misc_RNA (1)...(19): siRNA sense strand
ucaauugaugccaugaaga

SEQ ID NO: 1059441 - RNA, 19 nt, Homo sapiens
  misc_RNA (1)...(19): siRNA sense strand
gaaaacagugaacuagcaa

SEQ ID NO: 1059442 - RNA, 19 nt, Homo sapiens
  misc_RNA (1)...(19): siRNA sense strand
gaaaagcaugaugaaguaa

SEQ ID NO: 1059443 - RNA, 19 nt, Homo sapiens
  misc_RNA (1)...(19): siRNA sense strand
gagaacagcuucaaacaga

SEQ ID NO: 1059444 - RNA, 19 nt, Homo sapiens
  misc_RNA (1)...(19): siRNA sense strand
gaaacuggaugaugauuca

SEQ ID NO: 1059445 - RNA, 19 nt, Homo sapiens
  misc_RNA (1)...(19): siRNA sense strand
ggaugaugauucaguuaua

SEQ ID NO: 1059446 - RNA, 19 nt, Homo sapiens
  misc_RNA (1)...(19): siRNA sense strand
gggcaacccagaucuauua

SEQ ID NO: 1059447 - RNA, 19 nt, Homo sapiens
  misc_RNA (1)...(19): siRNA sense strand
gcaaucaguuguccaaucu

SEQ ID NO: 1059448 - RNA, 19 nt, Homo sapiens
  misc_RNA (1)...(19): siRNA sense strand
caacccagaucuauuaugg

SEQ ID NO: 1059449 - RNA, 19 nt, Homo sapiens
  misc_RNA (1)...(19): siRNA sense strand
ggccaaauaucaaggugaa

SEQ ID NO: 1059450 - RNA, 19 nt, Homo sapiens
  misc_RNA (1)...(19): siRNA sense strand
gagauugcaucaggauauu

SEQ ID NO: 1059451 - RNA, 19 nt, Homo sapiens
  misc_RNA (1)...(19): siRNA sense strand
ggagagaauuauggaucua

SEQ ID NO: 1059452 - RNA, 19 nt, Homo sapiens
  misc_RNA (1)...(19): siRNA sense strand
gaucuacccacuuuacuga

SEQ ID NO: 1059453 - RNA, 19 nt, Homo sapiens
  misc_RNA (1)...(19): siRNA sense strand
uaucuuauaucaccucuag

SEQ ID NO: 1059454 - RNA, 19 nt, Homo sapiens
  misc_RNA (1)...(19): siRNA sense strand
gaucuauuauggagagaau

SEQ ID NO: 1059455 - RNA, 19 nt, Homo sapiens
  misc_RNA (1)...(19): siRNA sense strand
gugccugcauuauugcuua

SEQ ID NO: 1059456 - RNA, 19 nt, Homo sapiens
  misc_RNA (1)...(19): siRNA sense strand
gaccaacuguggacaucuu

SEQ ID NO: 1059457 - RNA, 19 nt, Homo sapiens
  misc_RNA (1)...(19): siRNA sense strand
gaugaugauucaguuauag

SEQ ID NO: 1059458 - RNA, 19 nt, Homo sapiens
  misc_RNA (1)...(19): siRNA sense strand
ccugaagccuuguuuggaa

SEQ ID NO: 1059459 - RNA, 19 nt, Homo sapiens
  misc_RNA (1)...(19): siRNA sense strand
uuauggaucuacccacuuu

SEQ ID NO: 1059460 - RNA, 19 nt, Homo sapiens
  misc_RNA (1)...(19): siRNA sense strand
gagaagugauaacccaaag

SEQ ID NO: 1059461 - RNA, 19 nt, Homo sapiens
  misc_RNA (1)...(19): siRNA sense strand
gauugcaucaggauauuaa

SEQ ID NO: 1059462 - RNA, 19 nt, Homo sapiens
  misc_RNA (1)...(19): siRNA sense strand
gcaucaggauaauacuuug

SEQ ID NO: 1059463 - RNA, 19 nt, Homo sapiens
  misc_RNA (1)...(19): siRNA sense strand
uguggugccugcauuauug

SEQ ID NO: 1059464 - RNA, 19 nt, Homo sapiens
  misc_RNA (1)...(19): siRNA sense strand
uagacaaacgguaaccuua

SEQ ID NO: 1059465 - RNA, 19 nt, Homo sapiens
  misc_RNA (1)...(19): siRNA sense strand
gauuauaaccggagauucu

SEQ ID NO: 1059466 - RNA, 19 nt, Homo sapiens
  misc_RNA (1)...(19): siRNA sense strand
cccaaaggcuaacuagaug

SEQ ID NO: 1059467 - RNA, 19 nt, Homo sapiens
  misc_RNA (1)...(19): siRNA sense strand
gugauaacccaaaggcuaa

SEQ ID NO: 1059468 - RNA, 19 nt, Homo sapiens
  misc_RNA (1)...(19): siRNA sense strand
ggcaaucaguuguccaauc

SEQ ID NO: 1059469 - RNA, 19 nt, Homo sapiens
  misc_RNA (1)...(19): siRNA sense strand
cuagaugauuucuuuguca

SEQ ID NO: 1059470 - RNA, 19 nt, Homo sapiens
  misc_RNA (1)...(19): siRNA sense strand
ggaguaagcgaccaaguac

SEQ ID NO: 1059471 - RNA, 19 nt, Homo sapiens
  misc_RNA (1)...(19): siRNA sense strand
uaaccuuacuccuaacagu

SEQ ID NO: 1059472 - RNA, 19 nt, Homo sapiens
  misc_RNA (1)...(19): siRNA sense strand
uggcaguuguggucaguuu

SEQ ID NO: 1059473 - RNA, 19 nt, Homo sapiens
  misc_RNA (1)...(19): siRNA sense strand
uaacaguauuuggugaaga

SEQ ID NO: 1059474 - RNA, 19 nt, Homo sapiens
  misc_RNA (1)...(19): siRNA sense strand
caaauaucaaggugaaguu

SEQ ID NO: 1059475 - RNA, 19 nt, Homo sapiens
  misc_RNA (1)...(19): siRNA sense strand
gagaccaacuguggacauc

SEQ ID NO: 1059476 - RNA, 19 nt, Homo sapiens
  misc_RNA (1)...(19): siRNA sense strand
uauuauguaucgagaagug

SEQ ID NO: 1059477 - RNA, 19 nt, Homo sapiens
  misc_RNA (1)...(19): siRNA sense strand
guuuggaauucuaggcuuu

SEQ ID NO: 1059478 - RNA, 19 nt, Homo sapiens
  misc_RNA (1)...(19): siRNA sense strand
ugagauugcaucaggauau

SEQ ID NO: 1059479 - RNA, 19 nt, Homo sapiens
  misc_RNA (1)...(19): siRNA sense strand
guagacaaacgguaaccuu

SEQ ID NO: 1059480 - RNA, 19 nt, Homo sapiens
  misc_RNA (1)...(19): siRNA sense strand
uugcuuaucuacaucucua

SEQ ID NO: 1059481 - RNA, 19 nt, Homo sapiens
  misc_RNA (1)...(19): siRNA sense strand
gaacagcuucaaacagaac

SEQ ID NO: 1059482 - RNA, 19 nt, Homo sapiens
  misc_RNA (1)...(19): siRNA sense strand
gugaagaugaucagucuca

SEQ ID NO: 1059483 - RNA, 19 nt, Homo sapiens
  misc_RNA (1)...(19): siRNA sense strand
gaagccuuguuuggaauuc

SEQ ID NO: 1059484 - RNA, 19 nt, Homo sapiens
  misc_RNA (1)...(19): siRNA sense strand
aggcaugcauucagggaaa

SEQ ID NO: 1059485 - RNA, 19 nt, Homo sapiens
  misc_RNA (1)...(19): siRNA sense strand
aggaguaagcgaccaagua

SEQ ID NO: 1059486 - RNA, 19 nt, Homo sapiens
  misc_RNA (1)...(19): siRNA sense strand
aaucaguuguccaaucugu

SEQ ID NO: 1059487 - RNA, 19 nt, Homo sapiens
  misc_RNA (1)...(19): siRNA sense strand
cgagaagugauaacccaaa

SEQ ID NO: 1059488 - RNA, 19 nt, Homo sapiens
  misc_RNA (1)...(19): siRNA sense strand
uaggcuuucuagaugauuu

SEQ ID NO: 1059489 - RNA, 19 nt, Homo sapiens
  misc_RNA (1)...(19): siRNA sense strand
agaacagcuucaaacagaa

SEQ ID NO: 1059490 - RNA, 19 nt, Homo sapiens
  misc_RNA (1)...(19): siRNA sense strand
ugauucaguuauagaagga

SEQ ID NO: 1059491 - RNA, 19 nt, Homo sapiens
  misc_RNA (1)...(19): siRNA sense strand
ggucaguuucgcuuugauu

SEQ ID NO: 1059492 - RNA, 19 nt, Homo sapiens
  misc_RNA (1)...(19): siRNA sense strand
ucuauuauguaucgagaag

SEQ ID NO: 1059493 - RNA, 19 nt, Homo sapiens
  misc_RNA (1)...(19): siRNA sense strand
uaaggguacuucgagaaca

SEQ ID NO: 1059494 - RNA, 19 nt, Homo sapiens
  misc_RNA (1)...(19): siRNA sense strand
aacaguauuuggugaagau

SEQ ID NO: 1059495 - RNA, 19 nt, Homo sapiens
  misc_RNA (1)...(19): siRNA sense strand
ccaaauaucaaggugaagu

SEQ ID NO: 1059496 - RNA, 19 nt, Homo sapiens
  misc_RNA (1)...(19): siRNA sense strand
ccacucgacagcaguucua

SEQ ID NO: 1059497 - RNA, 19 nt, Homo sapiens
  misc_RNA (1)...(19): siRNA sense strand
ggaucuacccacuuuacug

SEQ ID NO: 1059498 - RNA, 19 nt, Homo sapiens
  misc_RNA (1)...(19): siRNA sense strand
ccaaaggcuaacuagauga

SEQ ID NO: 1059499 - RNA, 19 nt, Homo sapiens
  misc_RNA (1)...(19): siRNA sense strand
cgcaucaggauaauacuuu

SEQ ID NO: 1059500 - RNA, 19 nt, Homo sapiens
  misc_RNA (1)...(19): siRNA sense strand
gaaaaccaggagcuaguaa

SEQ ID NO: 1059501 - RNA, 19 nt, Homo sapiens
  misc_RNA (1)...(19): siRNA sense strand
guggucaguuucgcuuuga

SEQ ID NO: 1059502 - RNA, 19 nt, Homo sapiens
  misc_RNA (1)...(19): siRNA sense strand
ucaaaacauucacccagaa

SEQ ID NO: 1059503 - RNA, 19 nt, Homo sapiens
  misc_RNA (1)...(19): siRNA sense strand
uggagagaauuauggaucu

SEQ ID NO: 1059504 - RNA, 19 nt, Homo sapiens
  misc_RNA (1)...(19): siRNA sense strand
gcaacccagaucuauuaug

SEQ ID NO: 1059505 - RNA, 19 nt, Homo sapiens
  misc_RNA (1)...(19): siRNA sense strand
ugcaucaggauauuaauga

SEQ ID NO: 1059506 - RNA, 19 nt, Homo sapiens
  misc_RNA (1)...(19): siRNA sense strand
guaaggguacuucgagaac

SEQ ID NO: 1059507 - RNA, 19 nt, Homo sapiens
  misc_RNA (1)...(19): siRNA sense strand
ucaguuguccaaucuguag

SEQ ID NO: 1059508 - RNA, 19 nt, Homo sapiens
  misc_RNA (1)...(19): siRNA sense strand
ucaguuauagaaggaguaa

SEQ ID NO: 1059509 - RNA, 19 nt, Homo sapiens
  misc_RNA (1)...(19): siRNA sense strand
uguggucaguuucgcuuug

SEQ ID NO: 1059510 - RNA, 19 nt, Homo sapiens
  misc_RNA (1)...(19): siRNA sense strand
ucuagaugauuucuuuguc

SEQ ID NO: 1059511 - RNA, 19 nt, Homo sapiens
  misc_RNA (1)...(19): siRNA sense strand
guaccugaagccuuguuug

SEQ ID NO: 1059512 - RNA, 19 nt, Homo sapiens
  misc_RNA (1)...(19): siRNA sense strand
uggugaagaugaucagucu

SEQ ID NO: 1059513 - RNA, 19 nt, Homo sapiens
  misc_RNA (1)...(19): siRNA sense strand
ggagaccaacuguggacau

SEQ ID NO: 1059514 - RNA, 19 nt, Homo sapiens
  misc_RNA (1)...(19): siRNA sense strand
acccaaaggcuaacuagau

SEQ ID NO: 1059515 - RNA, 19 nt, Homo sapiens
  misc_RNA (1)...(19): siRNA sense strand
gcuuaucuacaucucuauu

SEQ ID NO: 1059516 - RNA, 19 nt, Homo sapiens
  misc_RNA (1)...(19): siRNA sense strand
ugaaacuggaugaugauuc

SEQ ID NO: 1059517 - RNA, 19 nt, Homo sapiens
  misc_RNA (1)...(19): siRNA sense strand
ucagggcaacccagaucua

SEQ ID NO: 1059518 - RNA, 19 nt, Homo sapiens
  misc_RNA (1)...(19): siRNA sense strand
gaugauucaguuauagaag

SEQ ID NO: 1059519 - RNA, 19 nt, Homo sapiens
  misc_RNA (1)...(19): siRNA sense strand
aguauuuggugaagaugau

SEQ ID NO: 1059520 - RNA, 19 nt, Homo sapiens
  misc_RNA (1)...(19): siRNA sense strand
cgagaacagcuucaaacag

SEQ ID NO: 1059521 - RNA, 19 nt, Homo sapiens
  misc_RNA (1)...(19): siRNA sense strand
uaacccaaaggcuaacuag

SEQ ID NO: 1059522 - RNA, 19 nt, Homo sapiens
  misc_RNA (1)...(19): siRNA sense strand
ugaucagucucaggauguu

SEQ ID NO: 1059523 - RNA, 19 nt, Homo sapiens
  misc_RNA (1)...(19): siRNA sense strand
gaacagauauucuccauaa

SEQ ID NO: 1059524 - RNA, 19 nt, Homo sapiens
  misc_RNA (1)...(19): siRNA sense strand
gaagucguguugacagauu

SEQ ID NO: 1059525 - RNA, 19 nt, Homo sapiens
  misc_RNA (1)...(19): siRNA sense strand
acaaagaucuguugaagag

SEQ ID NO: 1059526 - RNA, 19 nt, Homo sapiens
  misc_RNA (1)...(19): siRNA sense strand
gcuccaaccuuauacagaa

SEQ ID NO: 1059527 - RNA, 19 nt, Homo sapiens
  misc_RNA (1)...(19): siRNA sense strand
ggcagaaccugguccauga

SEQ ID NO: 1059528 - RNA, 19 nt, Homo sapiens
  misc_RNA (1)...(19): siRNA sense strand
uggaggaacuugcuuugua

SEQ ID NO: 1059529 - RNA, 19 nt, Homo sapiens
  misc_RNA (1)...(19): siRNA sense strand
cagauauucuccauaaaga

SEQ ID NO: 1059530 - RNA, 19 nt, Homo sapiens
  misc_RNA (1)...(19): siRNA sense strand
ggaauaagaagcagcugaa

SEQ ID NO: 1059531 - RNA, 19 nt, Homo sapiens
  misc_RNA (1)...(19): siRNA sense strand
cguuugagguucuugauuu

SEQ ID NO: 1059532 - RNA, 19 nt, Homo sapiens
  misc_RNA (1)...(19): siRNA sense strand
ggaaagcguguguguguga

SEQ ID NO: 1059533 - RNA, 19 nt, Homo sapiens
  misc_RNA (1)...(19): siRNA sense strand
gaauccuacugaccaauau

SEQ ID NO: 1059534 - RNA, 19 nt, Homo sapiens
  misc_RNA (1)...(19): siRNA sense strand
ggaggaacuugcuuuguac

SEQ ID NO: 1059535 - RNA, 19 nt, Homo sapiens
  misc_RNA (1)...(19): siRNA sense strand
agacaaagaucuguugaag

SEQ ID NO: 1059536 - RNA, 19 nt, Homo sapiens
  misc_RNA (1)...(19): siRNA sense strand
gauauucuccauaaagaug

SEQ ID NO: 1059537 - RNA, 19 nt, Homo sapiens
  misc_RNA (1)...(19): siRNA sense strand
gcacuuggacgucagaauc

SEQ ID NO: 1059538 - RNA, 19 nt, Homo sapiens
  misc_RNA (1)...(19): siRNA sense strand
gggaguagcagacaaagau

SEQ ID NO: 1059539 - RNA, 19 nt, Homo sapiens
  misc_RNA (1)...(19): siRNA sense strand
aacagcagcuagugcguua

SEQ ID NO: 1059540 - RNA, 19 nt, Homo sapiens
  misc_RNA (1)...(19): siRNA sense strand
gaacguguggaacaucuga

SEQ ID NO: 1059541 - RNA, 19 nt, Homo sapiens
  misc_RNA (1)...(19): siRNA sense strand
gaaugaagaggacaaaguc

SEQ ID NO: 1059542 - RNA, 19 nt, Homo sapiens
  misc_RNA (1)...(19): siRNA sense strand
ggcagcagcuuguggaaca

SEQ ID NO: 1059543 - RNA, 19 nt, Homo sapiens
  misc_RNA (1)...(19): siRNA sense strand
gaaccaagagcaccuuucu

SEQ ID NO: 1059544 - RNA, 19 nt, Homo sapiens
  misc_RNA (1)...(19): siRNA sense strand
uggaacaucugagugaauu

SEQ ID NO: 1059545 - RNA, 19 nt, Homo sapiens
  misc_RNA (1)...(19): siRNA sense strand
auacuccgauuaugggaua

SEQ ID NO: 1059546 - RNA, 19 nt, Homo sapiens
  misc_RNA (1)...(19): siRNA sense strand
ugaaggaccucagacauac

SEQ ID NO: 1059547 - RNA, 19 nt, Homo sapiens
  misc_RNA (1)...(19): siRNA sense strand
gaagauacucacggacauu

SEQ ID NO: 1059548 - RNA, 19 nt, Homo sapiens
  misc_RNA (1)...(19): siRNA sense strand
agaagcagcugaagauacu

SEQ ID NO: 1059549 - RNA, 19 nt, Homo sapiens
  misc_RNA (1)...(19): siRNA sense strand
agaaugaccuggaggaacu

SEQ ID NO: 1059550 - RNA, 19 nt, Homo sapiens
  misc_RNA (1)...(19): siRNA sense strand
ccucagacauacagagaau

SEQ ID NO: 1059551 - RNA, 19 nt, Homo sapiens
  misc_RNA (1)...(19): siRNA sense strand
cagaagcgcauucccaaga

SEQ ID NO: 1059552 - RNA, 19 nt, Homo sapiens
  misc_RNA (1)...(19): siRNA sense strand
cagaagucguguugacaga

SEQ ID NO: 1059553 - RNA, 19 nt, Homo sapiens
  misc_RNA (1)...(19): siRNA sense strand
gguguggacugcugucauc

SEQ ID NO: 1059554 - RNA, 19 nt, Homo sapiens
  misc_RNA (1)...(19): siRNA sense strand
ggaacagauauucuccaua

SEQ ID NO: 1059555 - RNA, 19 nt, Homo sapiens
  misc_RNA (1)...(19): siRNA sense strand
ucagacauacagagaauga

SEQ ID NO: 1059556 - RNA, 19 nt, Homo sapiens
  misc_RNA (1)...(19): siRNA sense strand
gaaagccugggcccucuug

SEQ ID NO: 1059557 - RNA, 19 nt, Homo sapiens
  misc_RNA (1)...(19): siRNA sense strand
gaaucacacacucuauguu

SEQ ID NO: 1059558 - RNA, 19 nt, Homo sapiens
  misc_RNA (1)...(19): siRNA sense strand
uaagaagcagcugaagaua

SEQ ID NO: 1059559 - RNA, 19 nt, Homo sapiens
  misc_RNA (1)...(19): siRNA sense strand
gacaaagaucuguugaaga

SEQ ID NO: 1059560 - RNA, 19 nt, Homo sapiens
  misc_RNA (1)...(19): siRNA sense strand
gaaagcgugugugugugau

SEQ ID NO: 1059561 - RNA, 19 nt, Homo sapiens
  misc_RNA (1)...(19): siRNA sense strand
ccaccucaguccagaaucu

SEQ ID NO: 1059562 - RNA, 19 nt, Homo sapiens
  misc_RNA (1)...(19): siRNA sense strand
gauacucacggacauuaug

SEQ ID NO: 1059563 - RNA, 19 nt, Homo sapiens
  misc_RNA (1)...(19): siRNA sense strand
agaauccuacugaccaaua

SEQ ID NO: 1059564 - RNA, 19 nt, Homo sapiens
  misc_RNA (1)...(19): siRNA sense strand
gcuuccgccuugagaauga

SEQ ID NO: 1059565 - RNA, 19 nt, Homo sapiens
  misc_RNA (1)...(19): siRNA sense strand
auaagaagcagcugaagau

SEQ ID NO: 1059566 - RNA, 19 nt, Homo sapiens
  misc_RNA (1)...(19): siRNA sense strand
gauugaugccgcuguguug

SEQ ID NO: 1059567 - RNA, 19 nt, Homo sapiens
  misc_RNA (1)...(19): siRNA sense strand
uggccucggugcugcuaua

SEQ ID NO: 1059568 - RNA, 19 nt, Homo sapiens
  misc_RNA (1)...(19): siRNA sense strand
ugaagauacucacggacau

SEQ ID NO: 1059569 - RNA, 19 nt, Homo sapiens
  misc_RNA (1)...(19): siRNA sense strand
gcuucggccuccauaugaa

SEQ ID NO: 1059570 - RNA, 19 nt, Homo sapiens
  misc_RNA (1)...(19): siRNA sense strand
ccugggcccucuugcagaa

SEQ ID NO: 1059571 - RNA, 19 nt, Homo sapiens
  misc_RNA (1)...(19): siRNA sense strand
guacaacccggucaaacag

SEQ ID NO: 1059572 - RNA, 19 nt, Homo sapiens
  misc_RNA (1)...(19): siRNA sense strand
aagauacucacggacauua

SEQ ID NO: 1059573 - RNA, 19 nt, Homo sapiens
  misc_RNA (1)...(19): siRNA sense strand
ugaccaauauccgaaccaa

SEQ ID NO: 1059574 - RNA, 19 nt, Homo sapiens
  misc_RNA (1)...(19): siRNA sense strand
gguggaggccuuuggaaca

SEQ ID NO: 1059575 - RNA, 19 nt, Homo sapiens
  misc_RNA (1)...(19): siRNA sense strand
gaccucagacauacagaga

SEQ ID NO: 1059576 - RNA, 19 nt, Homo sapiens
  misc_RNA (1)...(19): siRNA sense strand
gugaauuccugguggacau

SEQ ID NO: 1059577 - RNA, 19 nt, Homo sapiens
  misc_RNA (1)...(19): siRNA sense strand
cagaacguguggaacaucu

SEQ ID NO: 1059578 - RNA, 19 nt, Homo sapiens
  misc_RNA (1)...(19): siRNA sense strand
gugcugcuauacuccgauu

SEQ ID NO: 1059579 - RNA, 19 nt, Homo sapiens
  misc_RNA (1)...(19): siRNA sense strand
gcugcuauacuccgauuau

SEQ ID NO: 1059580 - RNA, 19 nt, Homo sapiens
  misc_RNA (1)...(19): siRNA sense strand
ggaggccuuuggaacagau

SEQ ID NO: 1059581 - RNA, 19 nt, Homo sapiens
  misc_RNA (1)...(19): siRNA sense strand
gcaggccacguuugagguu

SEQ ID NO: 1059582 - RNA, 19 nt, Homo sapiens
  misc_RNA (1)...(19): siRNA sense strand
ggugggaguagcagacaaa

SEQ ID NO: 1059583 - RNA, 19 nt, Homo sapiens
  misc_RNA (1)...(19): siRNA sense strand
gacauacagagaaugaaga

SEQ ID NO: 1059584 - RNA, 19 nt, Homo sapiens
  misc_RNA (1)...(19): siRNA sense strand
gaagcgcauucccaagacu

SEQ ID NO: 1059585 - RNA, 19 nt, Homo sapiens
  misc_RNA (1)...(19): siRNA sense strand
acagauauucuccauaaag

SEQ ID NO: 1059586 - RNA, 19 nt, Homo sapiens
  misc_RNA (1)...(19): siRNA sense strand
guuugagguucuugauuuc

SEQ ID NO: 1059587 - RNA, 19 nt, Homo sapiens
  misc_RNA (1)...(19): siRNA sense strand
aauaagaagcagcugaaga

SEQ ID NO: 1059588 - RNA, 19 nt, Homo sapiens
  misc_RNA (1)...(19): siRNA sense strand
ugaaucacacacucuaugu

SEQ ID NO: 1059589 - RNA, 19 nt, Homo sapiens
  misc_RNA (1)...(19): siRNA sense strand
accaauauccgaaccaaga

SEQ ID NO: 1059590 - RNA, 19 nt, Homo sapiens
  misc_RNA (1)...(19): siRNA sense strand
auacagaacguguggaaca

SEQ ID NO: 1059591 - RNA, 19 nt, Homo sapiens
  misc_RNA (1)...(19): siRNA sense strand
acaagguguugcucagugu

SEQ ID NO: 1059592 - RNA, 19 nt, Homo sapiens
  misc_RNA (1)...(19): siRNA sense strand
aaucacacacucuauguuc

SEQ ID NO: 1059593 - RNA, 19 nt, Homo sapiens
  misc_RNA (1)...(19): siRNA sense strand
ggucaaacagcagcuagug

SEQ ID NO: 1059594 - RNA, 19 nt, Homo sapiens
  misc_RNA (1)...(19): siRNA sense strand
agaaugaagaggacaaagu

SEQ ID NO: 1059595 - RNA, 19 nt, Homo sapiens
  misc_RNA (1)...(19): siRNA sense strand
ccucggugcugcuauacuc

SEQ ID NO: 1059596 - RNA, 19 nt, Homo sapiens
  misc_RNA (1)...(19): siRNA sense strand
aagcgugugugugugauug

SEQ ID NO: 1059597 - RNA, 19 nt, Homo sapiens
  misc_RNA (1)...(19): siRNA sense strand
gccggguguuugggaauaa

SEQ ID NO: 1059598 - RNA, 19 nt, Homo sapiens
  misc_RNA (1)...(19): siRNA sense strand
guguggaacaucugaguga

SEQ ID NO: 1059599 - RNA, 19 nt, Homo sapiens
  misc_RNA (1)...(19): siRNA sense strand
gaaggaccucagacauaca

SEQ ID NO: 1059600 - RNA, 19 nt, Homo sapiens
  misc_RNA (1)...(19): siRNA sense strand
gggcuguggcugagggaaa

SEQ ID NO: 1059601 - RNA, 19 nt, Homo sapiens
  misc_RNA (1)...(19): siRNA sense strand
ggacgucagaauccuacug

SEQ ID NO: 1059602 - RNA, 19 nt, Homo sapiens
  misc_RNA (1)...(19): siRNA sense strand
cccagagacugaggcugua

SEQ ID NO: 1059603 - RNA, 19 nt, Homo sapiens
  misc_RNA (1)...(19): siRNA sense strand
gaacaucugagugaauucc

SEQ ID NO: 1059604 - RNA, 19 nt, Homo sapiens
  misc_RNA (1)...(19): siRNA sense strand
agggaaagcgugugugugu

SEQ ID NO: 1059605 - RNA, 19 nt, Homo sapiens
  misc_RNA (1)...(19): siRNA sense strand
gccccuggauguccccuua

SEQ ID NO: 1059606 - RNA, 19 nt, Homo sapiens
  misc_RNA (1)...(19): siRNA sense strand
gaauaagaagcagcugaag

SEQ ID NO: 1059607 - RNA, 19 nt, Homo sapiens
  misc_RNA (1)...(19): siRNA sense strand
agacauacagagaaugaag

SEQ ID NO: 1059608 - RNA, 19 nt, Homo sapiens
  misc_RNA (1)...(19): siRNA sense strand
guuacgccaccagcuguua

SEQ ID NO: 1059609 - RNA, 19 nt, Homo sapiens
  misc_RNA (1)...(19): siRNA sense strand
ggccaauuaucgcaaagcu

SEQ ID NO: 1059610 - RNA, 19 nt, Homo sapiens
  misc_RNA (1)...(19): siRNA sense strand
gaauugugaugcuuugcua

SEQ ID NO: 1059611 - RNA, 19 nt, Homo sapiens
  misc_RNA (1)...(19): siRNA sense strand
aaacagcacacucacuuua

SEQ ID NO: 1059612 - RNA, 19 nt, Homo sapiens
  misc_RNA (1)...(19): siRNA sense strand
cacacucacuuuacucuga

SEQ ID NO: 1059613 - RNA, 19 nt, Homo sapiens
  misc_RNA (1)...(19): siRNA sense strand
gaacuauaccucacaugca

SEQ ID NO: 1059614 - RNA, 19 nt, Homo sapiens
  misc_RNA (1)...(19): siRNA sense strand
ucucauccuucccauguuu

SEQ ID NO: 1059615 - RNA, 19 nt, Homo sapiens
  misc_RNA (1)...(19): siRNA sense strand
ucacuuuacucugaacuau

SEQ ID NO: 1059616 - RNA, 19 nt, Homo sapiens
  misc_RNA (1)...(19): siRNA sense strand
uuaaacagcacacucacuu

SEQ ID NO: 1059617 - RNA, 19 nt, Homo sapiens
  misc_RNA (1)...(19): siRNA sense strand
uaaacagcacacucacuuu

SEQ ID NO: 1059618 - RNA, 19 nt, Homo sapiens
  misc_RNA (1)...(19): siRNA sense strand
acacgucuguccuuaccuu

SEQ ID NO: 1059619 - RNA, 19 nt, Homo sapiens
  misc_RNA (1)...(19): siRNA sense strand
acacucacuuuacucugaa

SEQ ID NO: 1059620 - RNA, 19 nt, Homo sapiens
  misc_RNA (1)...(19): siRNA sense strand
cccaagaccagcuaccuaa

SEQ ID NO: 1059621 - RNA, 19 nt, Homo sapiens
  misc_RNA (1)...(19): siRNA sense strand
acacacacacacacucauu

SEQ ID NO: 1059622 - RNA, 19 nt, Homo sapiens
  misc_RNA (1)...(19): siRNA sense strand
ucacacacacacacacuca

SEQ ID NO: 1059623 - RNA, 19 nt, Homo sapiens
  misc_RNA (1)...(19): siRNA sense strand
gcuacaucauucugcaauc

SEQ ID NO: 1059624 - RNA, 19 nt, Homo sapiens
  misc_RNA (1)...(19): siRNA sense strand
cacacucauucacagcuuu

SEQ ID NO: 1059625 - RNA, 19 nt, Homo sapiens
  misc_RNA (1)...(19): siRNA sense strand
acacacacacucauucaca

SEQ ID NO: 1059626 - RNA, 19 nt, Homo sapiens
  misc_RNA (1)...(19): siRNA sense strand
gcuuucugcuccaucuguu

SEQ ID NO: 1059627 - RNA, 19 nt, Homo sapiens
  misc_RNA (1)...(19): siRNA sense strand
acacacucauucacagcuu

SEQ ID NO: 1059628 - RNA, 19 nt, Homo sapiens
  misc_RNA (1)...(19): siRNA sense strand
gugugugucuguuuauguc

SEQ ID NO: 1059629 - RNA, 19 nt, Homo sapiens
  misc_RNA (1)...(19): siRNA sense strand
acacacacacacucauuca

SEQ ID NO: 1059630 - RNA, 19 nt, Homo sapiens
  misc_RNA (1)...(19): siRNA sense strand
acuuuacucugaacuauac

SEQ ID NO: 1059631 - RNA, 19 nt, Homo sapiens
  misc_RNA (1)...(19): siRNA sense strand
ucacaugcacacgagcuuu

SEQ ID NO: 1059632 - RNA, 19 nt, Homo sapiens
  misc_RNA (1)...(19): siRNA sense strand
guucaucccacaugugucu

SEQ ID NO: 1059633 - RNA, 19 nt, Homo sapiens
  misc_RNA (1)...(19): siRNA sense strand
ucucucauccuucccaugu

SEQ ID NO: 1059634 - RNA, 19 nt, Homo sapiens
  misc_RNA (1)...(19): siRNA sense strand
aaagaaagauuaccuagga

SEQ ID NO: 1059635 - RNA, 19 nt, Homo sapiens
  misc_RNA (1)...(19): siRNA sense strand
caacaagacucucaacauc

SEQ ID NO: 1059636 - RNA, 19 nt, Homo sapiens
  misc_RNA (1)...(19): siRNA sense strand
cagcagcucuggauucuuu

SEQ ID NO: 1059637 - RNA, 19 nt, Homo sapiens
  misc_RNA (1)...(19): siRNA sense strand
ccacucaggugaaagaauu

SEQ ID NO: 1059638 - RNA, 19 nt, Homo sapiens
  misc_RNA (1)...(19): siRNA sense strand
gcaagagucuccugcugaa

SEQ ID NO: 1059639 - RNA, 19 nt, Homo sapiens
  misc_RNA (1)...(19): siRNA sense strand
gaaaggaccuaagugugaa

SEQ ID NO: 1059640 - RNA, 19 nt, Homo sapiens
  misc_RNA (1)...(19): siRNA sense strand
gaagaaaugugagguugau

SEQ ID NO: 1059641 - RNA, 19 nt, Homo sapiens
  misc_RNA (1)...(19): siRNA sense strand
gaaacugagagcagaaaua

SEQ ID NO: 1059642 - RNA, 19 nt, Homo sapiens
  misc_RNA (1)...(19): siRNA sense strand
gaccagcgcuguuucuguu

SEQ ID NO: 1059643 - RNA, 19 nt, Homo sapiens
  misc_RNA (1)...(19): siRNA sense strand
gaaaggaccagcgcuguuu

SEQ ID NO: 1059644 - RNA, 19 nt, Homo sapiens
  misc_RNA (1)...(19): siRNA sense strand
gaaagaagaaucucauuac

SEQ ID NO: 1059645 - RNA, 19 nt, Homo sapiens
  misc_RNA (1)...(19): siRNA sense strand
gaacagguaucucuuucca

SEQ ID NO: 1059646 - RNA, 19 nt, Homo sapiens
  misc_RNA (1)...(19): siRNA sense strand
guacugcucuucuucuaug

SEQ ID NO: 1059647 - RNA, 19 nt, Homo sapiens
  misc_RNA (1)...(19): siRNA sense strand
gagaacacguggcucaaga

SEQ ID NO: 1059648 - RNA, 19 nt, Homo sapiens
  misc_RNA (1)...(19): siRNA sense strand
caugagugcuguuuacauu

SEQ ID NO: 1059649 - RNA, 19 nt, Homo sapiens
  misc_RNA (1)...(19): siRNA sense strand
agaagaaucucauuacauc

SEQ ID NO: 1059650 - RNA, 19 nt, Homo sapiens
  misc_RNA (1)...(19): siRNA sense strand
caagucggcuuucagauca

SEQ ID NO: 1059651 - RNA, 19 nt, Homo sapiens
  misc_RNA (1)...(19): siRNA sense strand
gaaacugguauccuuagua

SEQ ID NO: 1059652 - RNA, 19 nt, Homo sapiens
  misc_RNA (1)...(19): siRNA sense strand
ggauugacgugucucagaa

SEQ ID NO: 1059653 - RNA, 19 nt, Homo sapiens
  misc_RNA (1)...(19): siRNA sense strand
ugaacaaggugucuuugaa

SEQ ID NO: 1059654 - RNA, 19 nt, Homo sapiens
  misc_RNA (1)...(19): siRNA sense strand
gagcagaccuuuuaucaug

SEQ ID NO: 1059655 - RNA, 19 nt, Homo sapiens
  misc_RNA (1)...(19): siRNA sense strand
acaagacucucaacaucua

SEQ ID NO: 1059656 - RNA, 19 nt, Homo sapiens
  misc_RNA (1)...(19): siRNA sense strand
ggacaugacuagcacaaac

SEQ ID NO: 1059657 - RNA, 19 nt, Homo sapiens
  misc_RNA (1)...(19): siRNA sense strand
caacgucugugaacucugu

SEQ ID NO: 1059658 - RNA, 19 nt, Homo sapiens
  misc_RNA (1)...(19): siRNA sense strand
ggagagagagauccagaaa

SEQ ID NO: 1059659 - RNA, 19 nt, Homo sapiens
  misc_RNA (1)...(19): siRNA sense strand
caacacaucacuugucuuc

SEQ ID NO: 1059660 - RNA, 19 nt, Homo sapiens
  misc_RNA (1)...(19): siRNA sense strand
aaacugagagcagaaauaa

SEQ ID NO: 1059661 - RNA, 19 nt, Homo sapiens
  misc_RNA (1)...(19): siRNA sense strand
gaaaccacuucucuacauc

SEQ ID NO: 1059662 - RNA, 19 nt, Homo sapiens
  misc_RNA (1)...(19): siRNA sense strand
ggaccuaagugugaaauac

SEQ ID NO: 1059663 - RNA, 19 nt, Homo sapiens
  misc_RNA (1)...(19): siRNA sense strand
ugaugaagcucacccuaga

SEQ ID NO: 1059664 - RNA, 19 nt, Homo sapiens
  misc_RNA (1)...(19): siRNA sense strand
gggcagggauggagcugaa

SEQ ID NO: 1059665 - RNA, 19 nt, Homo sapiens
  misc_RNA (1)...(19): siRNA sense strand
cagaucagguguuguuugu

SEQ ID NO: 1059666 - RNA, 19 nt, Homo sapiens
  misc_RNA (1)...(19): siRNA sense strand
agaaaggaccuaaguguga

SEQ ID NO: 1059667 - RNA, 19 nt, Homo sapiens
  misc_RNA (1)...(19): siRNA sense strand
caacagaaaggaccuaagu

SEQ ID NO: 1059668 - RNA, 19 nt, Homo sapiens
  misc_RNA (1)...(19): siRNA sense strand
gaaaaggcaucucauugga

SEQ ID NO: 1059669 - RNA, 19 nt, Homo sapiens
  misc_RNA (1)...(19): siRNA sense strand
cagcugagaacaucuguaa

SEQ ID NO: 1059670 - RNA, 19 nt, Homo sapiens
  misc_RNA (1)...(19): siRNA sense strand
ugagugcuguuuacauuga

SEQ ID NO: 1059671 - RNA, 19 nt, Homo sapiens
  misc_RNA (1)...(19): siRNA sense strand
ugaaaccacuucucuacau

SEQ ID NO: 1059672 - RNA, 19 nt, Homo sapiens
  misc_RNA (1)...(19): siRNA sense strand
gaacaaggugucuuugaag

SEQ ID NO: 1059673 - RNA, 19 nt, Homo sapiens
  misc_RNA (1)...(19): siRNA sense strand
cuacacagcugagaacauc

SEQ ID NO: 1059674 - RNA, 19 nt, Homo sapiens
  misc_RNA (1)...(19): siRNA sense strand
agagagagauccagaaacu

SEQ ID NO: 1059675 - RNA, 19 nt, Homo sapiens
  misc_RNA (1)...(19): siRNA sense strand
ucagagcgaggcagucuua

SEQ ID NO: 1059676 - RNA, 19 nt, Homo sapiens
  misc_RNA (1)...(19): siRNA sense strand
gagcuccacucaggugaaa

SEQ ID NO: 1059677 - RNA, 19 nt, Homo sapiens
  misc_RNA (1)...(19): siRNA sense strand
gcaagucggcuuucagauc

SEQ ID NO: 1059678 - RNA, 19 nt, Homo sapiens
  misc_RNA (1)...(19): siRNA sense strand
caucccaucucaaucagaa

SEQ ID NO: 1059679 - RNA, 19 nt, Homo sapiens
  misc_RNA (1)...(19): siRNA sense strand
gaauaacgagcugaagaaa

SEQ ID NO: 1059680 - RNA, 19 nt, Homo sapiens
  misc_RNA (1)...(19): siRNA sense strand
gaaguggccuuggaguaca

SEQ ID NO: 1059681 - RNA, 19 nt, Homo sapiens
  misc_RNA (1)...(19): siRNA sense strand
ggccugagcugcagaacca

SEQ ID NO: 1059682 - RNA, 19 nt, Homo sapiens
  misc_RNA (1)...(19): siRNA sense strand
agugacaacugauaccuuu

SEQ ID NO: 1059683 - RNA, 19 nt, Homo sapiens
  misc_RNA (1)...(19): siRNA sense strand
ggcaauuguugacgugaaa

SEQ ID NO: 1059684 - RNA, 19 nt, Homo sapiens
  misc_RNA (1)...(19): siRNA sense strand
ggagaacaggacagacuaa

SEQ ID NO: 1059685 - RNA, 19 nt, Homo sapiens
  misc_RNA (1)...(19): siRNA sense strand
gaugaaaccacuucucuac

SEQ ID NO: 1059686 - RNA, 19 nt, Homo sapiens
  misc_RNA (1)...(19): siRNA sense strand
caucgacucugaacaaggu

SEQ ID NO: 1059687 - RNA, 19 nt, Homo sapiens
  misc_RNA (1)...(19): siRNA sense strand
gcauguugcaggaccauaa

SEQ ID NO: 1059688 - RNA, 19 nt, Homo sapiens
  misc_RNA (1)...(19): siRNA sense strand
agagucuccugcugaauaa

SEQ ID NO: 1059689 - RNA, 19 nt, Homo sapiens
  misc_RNA (1)...(19): siRNA sense strand
aaacugguauccuuaguac

SEQ ID NO: 1059690 - RNA, 19 nt, Homo sapiens
  misc_RNA (1)...(19): siRNA sense strand
auaaacaucuugcgaaacu

SEQ ID NO: 1059691 - RNA, 19 nt, Homo sapiens
  misc_RNA (1)...(19): siRNA sense strand
ccuaggaacaguacgauuu

SEQ ID NO: 1059692 - RNA, 19 nt, Homo sapiens
  misc_RNA (1)...(19): siRNA sense strand
cuucuucaccucagcauua

SEQ ID NO: 1059693 - RNA, 19 nt, Homo sapiens
  misc_RNA (1)...(19): siRNA sense strand
agagagauccagaaacuga

SEQ ID NO: 1059694 - RNA, 19 nt, Homo sapiens
  misc_RNA (1)...(19): siRNA sense strand
gaaguggacaugacuagca

SEQ ID NO: 1059695 - RNA, 19 nt, Homo sapiens
  misc_RNA (1)...(19): siRNA sense strand
gaaagauuaccuaggaaca

SEQ ID NO: 1059696 - RNA, 19 nt, Homo sapiens
  misc_RNA (1)...(19): siRNA sense strand
gaacuacacagcugagaac

SEQ ID NO: 1059697 - RNA, 19 nt, Homo sapiens
  misc_RNA (1)...(19): siRNA sense strand
ccaaagcaagcacugauga

SEQ ID NO: 1059698 - RNA, 19 nt, Homo sapiens
  misc_RNA (1)...(19): siRNA sense strand
auaacgagcugaagaaagg

SEQ ID NO: 1059699 - RNA, 19 nt, Homo sapiens
  misc_RNA (1)...(19): siRNA sense strand
aagagucuccugcugaaua

SEQ ID NO: 1059700 - RNA, 19 nt, Homo sapiens
  misc_RNA (1)...(19): siRNA sense strand
gcugagaacaucuguaagu

SEQ ID NO: 1059701 - RNA, 19 nt, Homo sapiens
  misc_RNA (1)...(19): siRNA sense strand
cuacaucccaucucaauca

SEQ ID NO: 1059702 - RNA, 19 nt, Homo sapiens
  misc_RNA (1)...(19): siRNA sense strand
ugaauaacgagcugaagaa

SEQ ID NO: 1059703 - RNA, 19 nt, Homo sapiens
  misc_RNA (1)...(19): siRNA sense strand
acauagacauuucaacaca

SEQ ID NO: 1059704 - RNA, 19 nt, Homo sapiens
  misc_RNA (1)...(19): siRNA sense strand
aaacuacgagccuggagua

SEQ ID NO: 1059705 - RNA, 19 nt, Homo sapiens
  misc_RNA (1)...(19): siRNA sense strand
guucccgucucagcauuua

SEQ ID NO: 1059706 - RNA, 19 nt, Homo sapiens
  misc_RNA (1)...(19): siRNA sense strand
gcuacuacacugcauguug

SEQ ID NO: 1059707 - RNA, 19 nt, Homo sapiens
  misc_RNA (1)...(19): siRNA sense strand
aaacuucagcguucucuau

SEQ ID NO: 1059708 - RNA, 19 nt, Homo sapiens
  misc_RNA (1)...(19): siRNA sense strand
gaaccaacaagacucucaa

SEQ ID NO: 1059709 - RNA, 19 nt, Homo sapiens
  misc_RNA (1)...(19): siRNA sense strand
caucagacagcauagaaug

SEQ ID NO: 1059710 - RNA, 19 nt, Homo sapiens
  misc_RNA (1)...(19): siRNA sense strand
gaacacguggcucaagauc

SEQ ID NO: 1059711 - RNA, 19 nt, Homo sapiens
  misc_RNA (1)...(19): siRNA sense strand
ccucagcauuacauucauu

SEQ ID NO: 1059712 - RNA, 19 nt, Homo sapiens
  misc_RNA (1)...(19): siRNA sense strand
ggaccaaucgaauacaaag

SEQ ID NO: 1059713 - RNA, 19 nt, Homo sapiens
  misc_RNA (1)...(19): siRNA sense strand
gaagcucacccuagagucu

SEQ ID NO: 1059714 - RNA, 19 nt, Homo sapiens
  misc_RNA (1)...(19): siRNA sense strand
caaagcaagcacugaugaa

SEQ ID NO: 1059715 - RNA, 19 nt, Homo sapiens
  misc_RNA (1)...(19): siRNA sense strand
ccaacaagacucucaacau

SEQ ID NO: 1059716 - RNA, 19 nt, Homo sapiens
  misc_RNA (1)...(19): siRNA sense strand
uagacgagaucaccgaagu

SEQ ID NO: 1059717 - RNA, 19 nt, Homo sapiens
  misc_RNA (1)...(19): siRNA sense strand
uugcgaaacugguauccuu

SEQ ID NO: 1059718 - RNA, 19 nt, Homo sapiens
  misc_RNA (1)...(19): siRNA sense strand
gaaguggcucugcccaguu

SEQ ID NO: 1059719 - RNA, 19 nt, Homo sapiens
  misc_RNA (1)...(19): siRNA sense strand
agaaucucauuacaucuug

SEQ ID NO: 1059720 - RNA, 19 nt, Homo sapiens
  misc_RNA (1)...(19): siRNA sense strand
gcuuucagaucagguguug

SEQ ID NO: 1059721 - RNA, 19 nt, Homo sapiens
  misc_RNA (1)...(19): siRNA sense strand
ucaccgaaguggccuugga

SEQ ID NO: 1059722 - RNA, 19 nt, Homo sapiens
  misc_RNA (1)...(19): siRNA sense strand
cuacgagccuggaguacuc

SEQ ID NO: 1059723 - RNA, 19 nt, Homo sapiens
  misc_RNA (1)...(19): siRNA sense strand
gcuggccgaugccucagaa

SEQ ID NO: 1059724 - RNA, 19 nt, Homo sapiens
  misc_RNA (1)...(19): siRNA sense strand
cagcaagucggcuuucaga

SEQ ID NO: 1059725 - RNA, 19 nt, Homo sapiens
  misc_RNA (1)...(19): siRNA sense strand
gaugugauaauaccagcaa

SEQ ID NO: 1059726 - RNA, 19 nt, Homo sapiens
  misc_RNA (1)...(19): siRNA sense strand
gcuccucgcccucaaguuc

SEQ ID NO: 1059727 - RNA, 19 nt, Homo sapiens
  misc_RNA (1)...(19): siRNA sense strand
cuguuuacauugagaaguu

SEQ ID NO: 1059728 - RNA, 19 nt, Homo sapiens
  misc_RNA (1)...(19): siRNA sense strand
acagaaaggaccuaagugu

SEQ ID NO: 1059729 - RNA, 19 nt, Homo sapiens
  misc_RNA (1)...(19): siRNA sense strand
guccaucccucaaucacau

SEQ ID NO: 1059730 - RNA, 19 nt, Homo sapiens
  misc_RNA (1)...(19): siRNA sense strand
gacguucuccugcucuauu

SEQ ID NO: 1059731 - RNA, 19 nt, Homo sapiens
  misc_RNA (1)...(19): siRNA sense strand
ggaccagcgcuguuucugu

SEQ ID NO: 1059732 - RNA, 19 nt, Homo sapiens
  misc_RNA (1)...(19): siRNA sense strand
ucaaucacaucuucaucca

SEQ ID NO: 1059733 - RNA, 19 nt, Homo sapiens
  misc_RNA (1)...(19): siRNA sense strand
gaaauugagcaagcagcaa

SEQ ID NO: 1059734 - RNA, 19 nt, Homo sapiens
  misc_RNA (1)...(19): siRNA sense strand
ggaaugaccuuuacaacuu

SEQ ID NO: 1059735 - RNA, 19 nt, Homo sapiens
  misc_RNA (1)...(19): siRNA sense strand
gcucaaagaugacagauug

SEQ ID NO: 1059736 - RNA, 19 nt, Homo sapiens
  misc_RNA (1)...(19): siRNA sense strand
gaacagaugcaaucaguga

SEQ ID NO: 1059737 - RNA, 19 nt, Homo sapiens
  misc_RNA (1)...(19): siRNA sense strand
gaaugaccuuuacaacuuu

SEQ ID NO: 1059738 - RNA, 19 nt, Homo sapiens
  misc_RNA (1)...(19): siRNA sense strand
caagaaaucuggaaaacuu

SEQ ID NO: 1059739 - RNA, 19 nt, Homo sapiens
  misc_RNA (1)...(19): siRNA sense strand
aaguugagcuuaaugcuuu

SEQ ID NO: 1059740 - RNA, 19 nt, Homo sapiens
  misc_RNA (1)...(19): siRNA sense strand
cagaagagcuaacaauugc

SEQ ID NO: 1059741 - RNA, 19 nt, Homo sapiens
  misc_RNA (1)...(19): siRNA sense strand
cagaacagaugcaaucagu

SEQ ID NO: 1059742 - RNA, 19 nt, Homo sapiens
  misc_RNA (1)...(19): siRNA sense strand
gcuaacaauugcuggaaug

SEQ ID NO: 1059743 - RNA, 19 nt, Homo sapiens
  misc_RNA (1)...(19): siRNA sense strand
gcaagcacgucgcguuugg

SEQ ID NO: 1059744 - RNA, 19 nt, Homo sapiens
  misc_RNA (1)...(19): siRNA sense strand
gaugaaacaauauccaaug

SEQ ID NO: 1059745 - RNA, 19 nt, Homo sapiens
  misc_RNA (1)...(19): siRNA sense strand
gagcaagcacgucgcguuu

SEQ ID NO: 1059746 - RNA, 19 nt, Homo sapiens
  misc_RNA (1)...(19): siRNA sense strand
ucagaagagcuaacaauug

SEQ ID NO: 1059747 - RNA, 19 nt, Homo sapiens
  misc_RNA (1)...(19): siRNA sense strand
aauccaaaguugagcuuaa

SEQ ID NO: 1059748 - RNA, 19 nt, Homo sapiens
  misc_RNA (1)...(19): siRNA sense strand
ugagauauuugggcuuuau

SEQ ID NO: 1059749 - RNA, 19 nt, Homo sapiens
  misc_RNA (1)...(19): siRNA sense strand
ggaaugugacccugaagga

SEQ ID NO: 1059750 - RNA, 19 nt, Homo sapiens
  misc_RNA (1)...(19): siRNA sense strand
ugacagaacagaugcaauc

SEQ ID NO: 1059751 - RNA, 19 nt, Homo sapiens
  misc_RNA (1)...(19): siRNA sense strand
cgugagauauuugggcuuu

SEQ ID NO: 1059752 - RNA, 19 nt, Homo sapiens
  misc_RNA (1)...(19): siRNA sense strand
uuaaugggauugucuuucu

SEQ ID NO: 1059753 - RNA, 19 nt, Homo sapiens
  misc_RNA (1)...(19): siRNA sense strand
ggacagaccacaggaaagg

SEQ ID NO: 1059754 - RNA, 19 nt, Homo sapiens
  misc_RNA (1)...(19): siRNA sense strand
aaaccacucuucuucacau

SEQ ID NO: 1059755 - RNA, 19 nt, Homo sapiens
  misc_RNA (1)...(19): siRNA sense strand
aaaauuaucucccagcaau

SEQ ID NO: 1059756 - RNA, 19 nt, Homo sapiens
  misc_RNA (1)...(19): siRNA sense strand
caucagaagagcuaacaau

SEQ ID NO: 1059757 - RNA, 19 nt, Homo sapiens
  misc_RNA (1)...(19): siRNA sense strand
ggacugugcagaucauucu

SEQ ID NO: 1059758 - RNA, 19 nt, Homo sapiens
  misc_RNA (1)...(19): siRNA sense strand
gcacgucgcguuuggaaaa

SEQ ID NO: 1059759 - RNA, 19 nt, Homo sapiens
  misc_RNA (1)...(19): siRNA sense strand
cagaugcaaucagugaaga

SEQ ID NO: 1059760 - RNA, 19 nt, Homo sapiens
  misc_RNA (1)...(19): siRNA sense strand
gaugcaaucagugaagaaa

SEQ ID NO: 1059761 - RNA, 19 nt, Homo sapiens
  misc_RNA (1)...(19): siRNA sense strand
gaauccaaaguugagcuua

SEQ ID NO: 1059762 - RNA, 19 nt, Homo sapiens
  misc_RNA (1)...(19): siRNA sense strand
ccaaugugccaauccuuau

SEQ ID NO: 1059763 - RNA, 19 nt, Homo sapiens
  misc_RNA (1)...(19): siRNA sense strand
gagcuaacaauugcuggaa

SEQ ID NO: 1059764 - RNA, 19 nt, Homo sapiens
  misc_RNA (1)...(19): siRNA sense strand
uccuaggacuguacaagaa

SEQ ID NO: 1059765 - RNA, 19 nt, Homo sapiens
  misc_RNA (1)...(19): siRNA sense strand
gcagugugcuccaguuccu

SEQ ID NO: 1059766 - RNA, 19 nt, Homo sapiens
  misc_RNA (1)...(19): siRNA sense strand
uccaaugugccaauccuua

SEQ ID NO: 1059767 - RNA, 19 nt, Homo sapiens
  misc_RNA (1)...(19): siRNA sense strand
gauauuugggcuuuaugga

SEQ ID NO: 1059768 - RNA, 19 nt, Homo sapiens
  misc_RNA (1)...(19): siRNA sense strand
gcuggaaugaccuuuacaa

SEQ ID NO: 1059769 - RNA, 19 nt, Homo sapiens
  misc_RNA (1)...(19): siRNA sense strand
gugagauauuugggcuuua

SEQ ID NO: 1059770 - RNA, 19 nt, Homo sapiens
  misc_RNA (1)...(19): siRNA sense strand
uugaguggaucuacaaugg

SEQ ID NO: 1059771 - RNA, 19 nt, Homo sapiens
  misc_RNA (1)...(19): siRNA sense strand
ggaauccaaaguugagcuu

SEQ ID NO: 1059772 - RNA, 19 nt, Homo sapiens
  misc_RNA (1)...(19): siRNA sense strand
cuaggacuguacaagaaau

SEQ ID NO: 1059773 - RNA, 19 nt, Homo sapiens
  misc_RNA (1)...(19): siRNA sense strand
caauccuuaucuuggguaa

SEQ ID NO: 1059774 - RNA, 19 nt, Homo sapiens
  misc_RNA (1)...(19): siRNA sense strand
caacacuacauccgacauc

SEQ ID NO: 1059775 - RNA, 19 nt, Homo sapiens
  misc_RNA (1)...(19): siRNA sense strand
guacaagaaaucuggaaaa

SEQ ID NO: 1059776 - RNA, 19 nt, Homo sapiens
  misc_RNA (1)...(19): siRNA sense strand
aaaguugagcuuaaugcuu

SEQ ID NO: 1059777 - RNA, 19 nt, Homo sapiens
  misc_RNA (1)...(19): siRNA sense strand
gcaaaaccacucuucuuca

SEQ ID NO: 1059778 - RNA, 19 nt, Homo sapiens
  misc_RNA (1)...(19): siRNA sense strand
aaaacuccgugagauauuu

SEQ ID NO: 1059779 - RNA, 19 nt, Homo sapiens
  misc_RNA (1)...(19): siRNA sense strand
gguggacugugcagaucau

SEQ ID NO: 1059780 - RNA, 19 nt, Homo sapiens
  misc_RNA (1)...(19): siRNA sense strand
uucacaugcucaaagauga

SEQ ID NO: 1059781 - RNA, 19 nt, Homo sapiens
  misc_RNA (1)...(19): siRNA sense strand
ccuaggacuguacaagaaa

SEQ ID NO: 1059782 - RNA, 19 nt, Homo sapiens
  misc_RNA (1)...(19): siRNA sense strand
guaacaaaauugacagaac

SEQ ID NO: 1059783 - RNA, 19 nt, Homo sapiens
  misc_RNA (1)...(19): siRNA sense strand
caauauccaaugugccaau

SEQ ID NO: 1059784 - RNA, 19 nt, Homo sapiens
  misc_RNA (1)...(19): siRNA sense strand
ugaaacaauauccaaugug

SEQ ID NO: 1059785 - RNA, 19 nt, Homo sapiens
  misc_RNA (1)...(19): siRNA sense strand
ugacugaugaaacaauauc

SEQ ID NO: 1059786 - RNA, 19 nt, Homo sapiens
  misc_RNA (1)...(19): siRNA sense strand
uaaugggauugucuuucug

SEQ ID NO: 1059787 - RNA, 19 nt, Homo sapiens
  misc_RNA (1)...(19): siRNA sense strand
ggacuguacaagaaaucug

SEQ ID NO: 1059788 - RNA, 19 nt, Homo sapiens
  misc_RNA (1)...(19): siRNA sense strand
gagaagaaauuacaggauu

SEQ ID NO: 1059789 - RNA, 19 nt, Homo sapiens
  misc_RNA (1)...(19): siRNA sense strand
gcaggaagacagaguguuu

SEQ ID NO: 1059790 - RNA, 19 nt, Homo sapiens
  misc_RNA (1)...(19): siRNA sense strand
gcacaagcagcccaccuua

SEQ ID NO: 1059791 - RNA, 19 nt, Homo sapiens
  misc_RNA (1)...(19): siRNA sense strand
ggucagagcauccagaaga

SEQ ID NO: 1059792 - RNA, 19 nt, Homo sapiens
  misc_RNA (1)...(19): siRNA sense strand
gacuucagcuguccucaaa

SEQ ID NO: 1059793 - RNA, 19 nt, Homo sapiens
  misc_RNA (1)...(19): siRNA sense strand
gaaagaacagcacaagcaa

SEQ ID NO: 1059794 - RNA, 19 nt, Homo sapiens
  misc_RNA (1)...(19): siRNA sense strand
gaacagcacaagcaaagau

SEQ ID NO: 1059795 - RNA, 19 nt, Homo sapiens
  misc_RNA (1)...(19): siRNA sense strand
cuaggugccuccaguuuga

SEQ ID NO: 1059796 - RNA, 19 nt, Homo sapiens
  misc_RNA (1)...(19): siRNA sense strand
agaagaaauuacaggauug

SEQ ID NO: 1059797 - RNA, 19 nt, Homo sapiens
  misc_RNA (1)...(19): siRNA sense strand
cagaagaaguggcaagacu

SEQ ID NO: 1059798 - RNA, 19 nt, Homo sapiens
  misc_RNA (1)...(19): siRNA sense strand
cggcuaaugcgcucuaauu

SEQ ID NO: 1059799 - RNA, 19 nt, Homo sapiens
  misc_RNA (1)...(19): siRNA sense strand
gucagagcauccagaagaa

SEQ ID NO: 1059800 - RNA, 19 nt, Homo sapiens
  misc_RNA (1)...(19): siRNA sense strand
agaaagaacagcacaagca

SEQ ID NO: 1059801 - RNA, 19 nt, Homo sapiens
  misc_RNA (1)...(19): siRNA sense strand
gcagaaagaacagcacaag

SEQ ID NO: 1059802 - RNA, 19 nt, Homo sapiens
  misc_RNA (1)...(19): siRNA sense strand
ggacaggugacuccuagag

SEQ ID NO: 1059803 - RNA, 19 nt, Homo sapiens
  misc_RNA (1)...(19): siRNA sense strand
gcacggcuaaugcgcucua

SEQ ID NO: 1059804 - RNA, 19 nt, Homo sapiens
  misc_RNA (1)...(19): siRNA sense strand
cacaagcaaagaucuggua

SEQ ID NO: 1059805 - RNA, 19 nt, Homo sapiens
  misc_RNA (1)...(19): siRNA sense strand
gcagcccaccuuacugaug

SEQ ID NO: 1059806 - RNA, 19 nt, Homo sapiens
  misc_RNA (1)...(19): siRNA sense strand
aagcagcccaccuuacuga

SEQ ID NO: 1059807 - RNA, 19 nt, Homo sapiens
  misc_RNA (1)...(19): siRNA sense strand
aaagaacagcacaagcaaa

SEQ ID NO: 1059808 - RNA, 19 nt, Homo sapiens
  misc_RNA (1)...(19): siRNA sense strand
gaagaaauuacaggauugc

SEQ ID NO: 1059809 - RNA, 19 nt, Homo sapiens
  misc_RNA (1)...(19): siRNA sense strand
aagaacagcacaagcaaag

SEQ ID NO: 1059810 - RNA, 19 nt, Homo sapiens
  misc_RNA (1)...(19): siRNA sense strand
cgagcgcgagaagaaauua

SEQ ID NO: 1059811 - RNA, 19 nt, Homo sapiens
  misc_RNA (1)...(19): siRNA sense strand
caaagcaggaagacagagu

SEQ ID NO: 1059812 - RNA, 19 nt, Homo sapiens
  misc_RNA (1)...(19): siRNA sense strand
cgagaagaaauuacaggau

SEQ ID NO: 1059813 - RNA, 19 nt, Homo sapiens
  misc_RNA (1)...(19): siRNA sense strand
aagcaaagaucugguaacc

SEQ ID NO: 1059814 - RNA, 19 nt, Homo sapiens
  misc_RNA (1)...(19): siRNA sense strand
acaagcagcccaccuuacu

SEQ ID NO: 1059815 - RNA, 19 nt, Homo sapiens
  misc_RNA (1)...(19): siRNA sense strand
ccuaggugccuccaguuug

SEQ ID NO: 1059816 - RNA, 19 nt, Homo sapiens
  misc_RNA (1)...(19): siRNA sense strand
acaagcaaagaucugguaa

SEQ ID NO: 1059817 - RNA, 19 nt, Homo sapiens
  misc_RNA (1)...(19): siRNA sense strand
ggucagggguucgagauua

SEQ ID NO: 1059818 - RNA, 19 nt, Homo sapiens
  misc_RNA (1)...(19): siRNA sense strand
gagauuagccuggucaaaa

SEQ ID NO: 1059819 - RNA, 19 nt, Homo sapiens
  misc_RNA (1)...(19): siRNA sense strand
ggagguggaggcaggagaa

SEQ ID NO: 1059820 - RNA, 19 nt, Homo sapiens
  misc_RNA (1)...(19): siRNA sense strand
gguggaggcaggagaauca

SEQ ID NO: 1059821 - RNA, 19 nt, Homo sapiens
  misc_RNA (1)...(19): siRNA sense strand
ggaggcaggagaaucacuu

SEQ ID NO: 1059822 - RNA, 19 nt, Homo sapiens
  misc_RNA (1)...(19): siRNA sense strand
ccuguaaucccagcacuuu

SEQ ID NO: 1059823 - RNA, 19 nt, Homo sapiens
  misc_RNA (1)...(19): siRNA sense strand
ccgaguggcugggauugca

SEQ ID NO: 1059824 - RNA, 19 nt, Homo sapiens
  misc_RNA (1)...(19): siRNA sense strand
gaaaggaacuggcagauug

SEQ ID NO: 1059825 - RNA, 19 nt, Homo sapiens
  misc_RNA (1)...(19): siRNA sense strand
cagcugaucuucuuucuua

SEQ ID NO: 1059826 - RNA, 19 nt, Homo sapiens
  misc_RNA (1)...(19): siRNA sense strand
gaagagugguggucaauga

SEQ ID NO: 1059827 - RNA, 19 nt, Homo sapiens
  misc_RNA (1)...(19): siRNA sense strand
ggugauagauuccgcagua

SEQ ID NO: 1059828 - RNA, 19 nt, Homo sapiens
  misc_RNA (1)...(19): siRNA sense strand
gcaaggacaugaagcuuau

SEQ ID NO: 1059829 - RNA, 19 nt, Homo sapiens
  misc_RNA (1)...(19): siRNA sense strand
gcaaacgucagcauacuua

SEQ ID NO: 1059830 - RNA, 19 nt, Homo sapiens
  misc_RNA (1)...(19): siRNA sense strand
gaacugccuuuccagauga

SEQ ID NO: 1059831 - RNA, 19 nt, Homo sapiens
  misc_RNA (1)...(19): siRNA sense strand
gcaagaguuuguuaagauu

SEQ ID NO: 1059832 - RNA, 19 nt, Homo sapiens
  misc_RNA (1)...(19): siRNA sense strand
gagaauaucagcauuaaug

SEQ ID NO: 1059833 - RNA, 19 nt, Homo sapiens
  misc_RNA (1)...(19): siRNA sense strand
gaacgaaacaguacugaug

SEQ ID NO: 1059834 - RNA, 19 nt, Homo sapiens
  misc_RNA (1)...(19): siRNA sense strand
caacauagagcauaauuca

SEQ ID NO: 1059835 - RNA, 19 nt, Homo sapiens
  misc_RNA (1)...(19): siRNA sense strand
caacugaccucaauaccau

SEQ ID NO: 1059836 - RNA, 19 nt, Homo sapiens
  misc_RNA (1)...(19): siRNA sense strand
gcagauuggugauagauuc

SEQ ID NO: 1059837 - RNA, 19 nt, Homo sapiens
  misc_RNA (1)...(19): siRNA sense strand
gaagaaaggaggacugguu

SEQ ID NO: 1059838 - RNA, 19 nt, Homo sapiens
  misc_RNA (1)...(19): siRNA sense strand
gcaggaaacuaugaucuau

SEQ ID NO: 1059839 - RNA, 19 nt, Homo sapiens
  misc_RNA (1)...(19): siRNA sense strand
gagcaagaguuuguuaaga

SEQ ID NO: 1059840 - RNA, 19 nt, Homo sapiens
  misc_RNA (1)...(19): siRNA sense strand
ucacaggcaucaugucaaa

SEQ ID NO: 1059841 - RNA, 19 nt, Homo sapiens
  misc_RNA (1)...(19): siRNA sense strand
gauagauuccgcaguauaa

SEQ ID NO: 1059842 - RNA, 19 nt, Homo sapiens
  misc_RNA (1)...(19): siRNA sense strand
gcagaagaacgaaacagua

SEQ ID NO: 1059843 - RNA, 19 nt, Homo sapiens
  misc_RNA (1)...(19): siRNA sense strand
agaauugacugcuuugcua

SEQ ID NO: 1059844 - RNA, 19 nt, Homo sapiens
  misc_RNA (1)...(19): siRNA sense strand
ccagacaguccuauaguua

SEQ ID NO: 1059845 - RNA, 19 nt, Homo sapiens
  misc_RNA (1)...(19): siRNA sense strand
cagcagcucugaugaggaa

SEQ ID NO: 1059846 - RNA, 19 nt, Homo sapiens
  misc_RNA (1)...(19): siRNA sense strand
gguagaggauccuguuguu

SEQ ID NO: 1059847 - RNA, 19 nt, Homo sapiens
  misc_RNA (1)...(19): siRNA sense strand
caaacacgguccaacauag

SEQ ID NO: 1059848 - RNA, 19 nt, Homo sapiens
  misc_RNA (1)...(19): siRNA sense strand
ggacaauaaugagagagaa

SEQ ID NO: 1059849 - RNA, 19 nt, Homo sapiens
  misc_RNA (1)...(19): siRNA sense strand
gaagaaaccuaagcagacu

SEQ ID NO: 1059850 - RNA, 19 nt, Homo sapiens
  misc_RNA (1)...(19): siRNA sense strand
gguccaacauagagcauaa

SEQ ID NO: 1059851 - RNA, 19 nt, Homo sapiens
  misc_RNA (1)...(19): siRNA sense strand
cugauauacuggauacuua

SEQ ID NO: 1059852 - RNA, 19 nt, Homo sapiens
  misc_RNA (1)...(19): siRNA sense strand
ccagaaagacaacaagauu

SEQ ID NO: 1059853 - RNA, 19 nt, Homo sapiens
  misc_RNA (1)...(19): siRNA sense strand
ggagguacgcuauauugaa

SEQ ID NO: 1059854 - RNA, 19 nt, Homo sapiens
  misc_RNA (1)...(19): siRNA sense strand
gaacauaaugccaggacuu

SEQ ID NO: 1059855 - RNA, 19 nt, Homo sapiens
  misc_RNA (1)...(19): siRNA sense strand
gaugacgccuggugguuug

SEQ ID NO: 1059856 - RNA, 19 nt, Homo sapiens
  misc_RNA (1)...(19): siRNA sense strand
guacugauauacuggauac

SEQ ID NO: 1059857 - RNA, 19 nt, Homo sapiens
  misc_RNA (1)...(19): siRNA sense strand
gagcuguacugauauacug

SEQ ID NO: 1059858 - RNA, 19 nt, Homo sapiens
  misc_RNA (1)...(19): siRNA sense strand
gcagaagagugguggucaa

SEQ ID NO: 1059859 - RNA, 19 nt, Homo sapiens
  misc_RNA (1)...(19): siRNA sense strand
gacagucuuuaaaguguaa

SEQ ID NO: 1059860 - RNA, 19 nt, Homo sapiens
  misc_RNA (1)...(19): siRNA sense strand
agacaguccuauaguuaaa

SEQ ID NO: 1059861 - RNA, 19 nt, Homo sapiens
  misc_RNA (1)...(19): siRNA sense strand
aagaugagcccaugggaua

SEQ ID NO: 1059862 - RNA, 19 nt, Homo sapiens
  misc_RNA (1)...(19): siRNA sense strand
agacauaguagucaaauug

SEQ ID NO: 1059863 - RNA, 19 nt, Homo sapiens
  misc_RNA (1)...(19): siRNA sense strand
gaagaaaggcagaagaaac

SEQ ID NO: 1059864 - RNA, 19 nt, Homo sapiens
  misc_RNA (1)...(19): siRNA sense strand
ccaaacacgguccaacaua

SEQ ID NO: 1059865 - RNA, 19 nt, Homo sapiens
  misc_RNA (1)...(19): siRNA sense strand
agacaguucuucagaggaa

SEQ ID NO: 1059866 - RNA, 19 nt, Homo sapiens
  misc_RNA (1)...(19): siRNA sense strand
gguggucaaugaacuaaau

SEQ ID NO: 1059867 - RNA, 19 nt, Homo sapiens
  misc_RNA (1)...(19): siRNA sense strand
caaaaugacuggagaaucu

SEQ ID NO: 1059868 - RNA, 19 nt, Homo sapiens
  misc_RNA (1)...(19): siRNA sense strand
ggacccaauuucaggcaaa

SEQ ID NO: 1059869 - RNA, 19 nt, Homo sapiens
  misc_RNA (1)...(19): siRNA sense strand
gcagaugcuggaauaaauu

SEQ ID NO: 1059870 - RNA, 19 nt, Homo sapiens
  misc_RNA (1)...(19): siRNA sense strand
agaggaagaugaaacuguu

SEQ ID NO: 1059871 - RNA, 19 nt, Homo sapiens
  misc_RNA (1)...(19): siRNA sense strand
gaaaucagucuuuauacag

SEQ ID NO: 1059872 - RNA, 19 nt, Homo sapiens
  misc_RNA (1)...(19): siRNA sense strand
gguguuagacaaaugcaua

SEQ ID NO: 1059873 - RNA, 19 nt, Homo sapiens
  misc_RNA (1)...(19): siRNA sense strand
agaggaggauacagaaauu

SEQ ID NO: 1059874 - RNA, 19 nt, Homo sapiens
  misc_RNA (1)...(19): siRNA sense strand
ggcaaggacaugaagcuua

SEQ ID NO: 1059875 - RNA, 19 nt, Homo sapiens
  misc_RNA (1)...(19): siRNA sense strand
cuacucaaaggaaugauua

SEQ ID NO: 1059876 - RNA, 19 nt, Homo sapiens
  misc_RNA (1)...(19): siRNA sense strand
gaagaaugugaacggguua

SEQ ID NO: 1059877 - RNA, 19 nt, Homo sapiens
  misc_RNA (1)...(19): siRNA sense strand
ccagauggccacugaaaga

SEQ ID NO: 1059878 - RNA, 19 nt, Homo sapiens
  misc_RNA (1)...(19): siRNA sense strand
aaggaggacugguuucuau

SEQ ID NO: 1059879 - RNA, 19 nt, Homo sapiens
  misc_RNA (1)...(19): siRNA sense strand
caggugagccuaaugaaga

SEQ ID NO: 1059880 - RNA, 19 nt, Homo sapiens
  misc_RNA (1)...(19): siRNA sense strand
ucaaaggaaugauuaugag

SEQ ID NO: 1059881 - RNA, 19 nt, Homo sapiens
  misc_RNA (1)...(19): siRNA sense strand
gccagacaguccuauaguu

SEQ ID NO: 1059882 - RNA, 19 nt, Homo sapiens
  misc_RNA (1)...(19): siRNA sense strand
gagguacgcuauauugaac

SEQ ID NO: 1059883 - RNA, 19 nt, Homo sapiens
  misc_RNA (1)...(19): siRNA sense strand
caggagaauaucagcauua

SEQ ID NO: 1059884 - RNA, 19 nt, Homo sapiens
  misc_RNA (1)...(19): siRNA sense strand
aaauucagguguacaggaa

SEQ ID NO: 1059885 - RNA, 19 nt, Homo sapiens
  misc_RNA (1)...(19): siRNA sense strand
gaaaggcagaagaaaccua

SEQ ID NO: 1059886 - RNA, 19 nt, Homo sapiens
  misc_RNA (1)...(19): siRNA sense strand
auaguucuuuccaguguua

SEQ ID NO: 1059887 - RNA, 19 nt, Homo sapiens
  misc_RNA (1)...(19): siRNA sense strand
ccaaacaucaggcuucgaa

SEQ ID NO: 1059888 - RNA, 19 nt, Homo sapiens
  misc_RNA (1)...(19): siRNA sense strand
caguggaucuuggauacua

SEQ ID NO: 1059889 - RNA, 19 nt, Homo sapiens
  misc_RNA (1)...(19): siRNA sense strand
aggaagaauugacugcuuu

SEQ ID NO: 1059890 - RNA, 19 nt, Homo sapiens
  misc_RNA (1)...(19): siRNA sense strand
gaggauacagaaauuguug

SEQ ID NO: 1059891 - RNA, 19 nt, Homo sapiens
  misc_RNA (1)...(19): siRNA sense strand
ugacugcuuugcuauacaa

SEQ ID NO: 1059892 - RNA, 19 nt, Homo sapiens
  misc_RNA (1)...(19): siRNA sense strand
gaagaacgaaacaguacug

SEQ ID NO: 1059893 - RNA, 19 nt, Homo sapiens
  misc_RNA (1)...(19): siRNA sense strand
gaagaaugucgaacugcaa

SEQ ID NO: 1059894 - RNA, 19 nt, Homo sapiens
  misc_RNA (1)...(19): siRNA sense strand
caagugaauauucugauug

SEQ ID NO: 1059895 - RNA, 19 nt, Homo sapiens
  misc_RNA (1)...(19): siRNA sense strand
uagaggauccuguuguuga

SEQ ID NO: 1059896 - RNA, 19 nt, Homo sapiens
  misc_RNA (1)...(19): siRNA sense strand
gacauagaaaucagucuuu

SEQ ID NO: 1059897 - RNA, 19 nt, Homo sapiens
  misc_RNA (1)...(19): siRNA sense strand
gauggccacugaaagagau

SEQ ID NO: 1059898 - RNA, 19 nt, Homo sapiens
  misc_RNA (1)...(19): siRNA sense strand
gaugucuuacuucgauuua

SEQ ID NO: 1059899 - RNA, 19 nt, Homo sapiens
  misc_RNA (1)...(19): siRNA sense strand
ccagacagacaacacguaa

SEQ ID NO: 1059900 - RNA, 19 nt, Homo sapiens
  misc_RNA (1)...(19): siRNA sense strand
caggaagacucagacaguu

SEQ ID NO: 1059901 - RNA, 19 nt, Homo sapiens
  misc_RNA (1)...(19): siRNA sense strand
cagcuaaaauuguaacuga

SEQ ID NO: 1059902 - RNA, 19 nt, Homo sapiens
  misc_RNA (1)...(19): siRNA sense strand
aggagaauaucagcauuaa

SEQ ID NO: 1059903 - RNA, 19 nt, Homo sapiens
  misc_RNA (1)...(19): siRNA sense strand
gaagacauaguagucaaau

SEQ ID NO: 1059904 - RNA, 19 nt, Homo sapiens
  misc_RNA (1)...(19): siRNA sense strand
caaaugggagaugagcuua

SEQ ID NO: 1059905 - RNA, 19 nt, Homo sapiens
  misc_RNA (1)...(19): siRNA sense strand
uagaagaaaggcagaagaa

SEQ ID NO: 1059906 - RNA, 19 nt, Homo sapiens
  misc_RNA (1)...(19): siRNA sense strand
ugaagucccuagaagaaag

SEQ ID NO: 1059907 - RNA, 19 nt, Homo sapiens
  misc_RNA (1)...(19): siRNA sense strand
gaaaguucuuccagugacu

SEQ ID NO: 1059908 - RNA, 19 nt, Homo sapiens
  misc_RNA (1)...(19): siRNA sense strand
gaauaucagcauuaaugug

SEQ ID NO: 1059909 - RNA, 19 nt, Homo sapiens
  misc_RNA (1)...(19): siRNA sense strand
caggaagaauugacugcuu

SEQ ID NO: 1059910 - RNA, 19 nt, Homo sapiens
  misc_RNA (1)...(19): siRNA sense strand
ggagccaauuccagaagga

SEQ ID NO: 1059911 - RNA, 19 nt, Homo sapiens
  misc_RNA (1)...(19): siRNA sense strand
uagauuccgcaguauaaua

SEQ ID NO: 1059912 - RNA, 19 nt, Homo sapiens
  misc_RNA (1)...(19): siRNA sense strand
aaacagccauggaacaaaa

SEQ ID NO: 1059913 - RNA, 19 nt, Homo sapiens
  misc_RNA (1)...(19): siRNA sense strand
agacaaaccagacagacaa

SEQ ID NO: 1059914 - RNA, 19 nt, Homo sapiens
  misc_RNA (1)...(19): siRNA sense strand
gcagaggaggauacagaaa

SEQ ID NO: 1059915 - RNA, 19 nt, Homo sapiens
  misc_RNA (1)...(19): siRNA sense strand
cagacaguccuauaguuaa

SEQ ID NO: 1059916 - RNA, 19 nt, Homo sapiens
  misc_RNA (1)...(19): siRNA sense strand
agacaaaugcauaacaaug

SEQ ID NO: 1059917 - RNA, 19 nt, Homo sapiens
  misc_RNA (1)...(19): siRNA sense strand
ugauaguucuuuccagugu

SEQ ID NO: 1059918 - RNA, 19 nt, Homo sapiens
  misc_RNA (1)...(19): siRNA sense strand
ugacucaucaagugaauau

SEQ ID NO: 1059919 - RNA, 19 nt, Homo sapiens
  misc_RNA (1)...(19): siRNA sense strand
agaaagacaacaagauuca

SEQ ID NO: 1059920 - RNA, 19 nt, Homo sapiens
  misc_RNA (1)...(19): siRNA sense strand
gggagaauccucagagucu

SEQ ID NO: 1059921 - RNA, 19 nt, Homo sapiens
  misc_RNA (1)...(19): siRNA sense strand
caggaagaaugucgaacug

SEQ ID NO: 1059922 - RNA, 19 nt, Homo sapiens
  misc_RNA (1)...(19): siRNA sense strand
ggaggauacagaaauuguu

SEQ ID NO: 1059923 - RNA, 19 nt, Homo sapiens
  misc_RNA (1)...(19): siRNA sense strand
ugaagguguuagacaaaug

SEQ ID NO: 1059924 - RNA, 19 nt, Homo sapiens
  misc_RNA (1)...(19): siRNA sense strand
gagagaagcuguuccagaa

SEQ ID NO: 1059925 - RNA, 19 nt, Homo sapiens
  misc_RNA (1)...(19): siRNA sense strand
gaaggaagaggacaugauu

SEQ ID NO: 1059926 - RNA, 19 nt, Homo sapiens
  misc_RNA (1)...(19): siRNA sense strand
ccaaaggucaugcucauuu

SEQ ID NO: 1059927 - RNA, 19 nt, Homo sapiens
  misc_RNA (1)...(19): siRNA sense strand
agaggaagcugaacgucua

SEQ ID NO: 1059928 - RNA, 19 nt, Homo sapiens
  misc_RNA (1)...(19): siRNA sense strand
cgaagcugcuggacuuuga

SEQ ID NO: 1059929 - RNA, 19 nt, Homo sapiens
  misc_RNA (1)...(19): siRNA sense strand
caaaggucaugcucauuuc

SEQ ID NO: 1059930 - RNA, 19 nt, Homo sapiens
  misc_RNA (1)...(19): siRNA sense strand
ggacccucaugacuccuua

SEQ ID NO: 1059931 - RNA, 19 nt, Homo sapiens
  misc_RNA (1)...(19): siRNA sense strand
gcaaacaccugcgcauggu

SEQ ID NO: 1059932 - RNA, 19 nt, Homo sapiens
  misc_RNA (1)...(19): siRNA sense strand
gaacgucauccacaucaug

SEQ ID NO: 1059933 - RNA, 19 nt, Homo sapiens
  misc_RNA (1)...(19): siRNA sense strand
caucaugggcugcuacauu

SEQ ID NO: 1059934 - RNA, 19 nt, Homo sapiens
  misc_RNA (1)...(19): siRNA sense strand
gaagaggacaugauucacu

SEQ ID NO: 1059935 - RNA, 19 nt, Homo sapiens
  misc_RNA (1)...(19): siRNA sense strand
acucgaagcugcuggacuu

SEQ ID NO: 1059936 - RNA, 19 nt, Homo sapiens
  misc_RNA (1)...(19): siRNA sense strand
gcccaaggcugaguacauc

SEQ ID NO: 1059937 - RNA, 19 nt, Homo sapiens
  misc_RNA (1)...(19): siRNA sense strand
aagaggacaugauucacuu

SEQ ID NO: 1059938 - RNA, 19 nt, Homo sapiens
  misc_RNA (1)...(19): siRNA sense strand
ccucaugacuccuuauagg

SEQ ID NO: 1059939 - RNA, 19 nt, Homo sapiens
  misc_RNA (1)...(19): siRNA sense strand
caccaaaggucaugcucau

SEQ ID NO: 1059940 - RNA, 19 nt, Homo sapiens
  misc_RNA (1)...(19): siRNA sense strand
agacagcaaccacaacuau

SEQ ID NO: 1059941 - RNA, 19 nt, Homo sapiens
  misc_RNA (1)...(19): siRNA sense strand
gccggaaacgggagaauga

SEQ ID NO: 1059942 - RNA, 19 nt, Homo sapiens
  misc_RNA (1)...(19): siRNA sense strand
ggacugggacacugagaag

SEQ ID NO: 1059943 - RNA, 19 nt, Homo sapiens
  misc_RNA (1)...(19): siRNA sense strand
gaugaucgagacguacuuu

SEQ ID NO: 1059944 - RNA, 19 nt, Homo sapiens
  misc_RNA (1)...(19): siRNA sense strand
ggagaaggaagaggacaug

SEQ ID NO: 1059945 - RNA, 19 nt, Homo sapiens
  misc_RNA (1)...(19): siRNA sense strand
ccaaaguggagaaggaaga

SEQ ID NO: 1059946 - RNA, 19 nt, Homo sapiens
  misc_RNA (1)...(19): siRNA sense strand
uugaggagauagagaggaa

SEQ ID NO: 1059947 - RNA, 19 nt, Homo sapiens
  misc_RNA (1)...(19): siRNA sense strand
ccacaagggagccaagauc

SEQ ID NO: 1059948 - RNA, 19 nt, Homo sapiens
  misc_RNA (1)...(19): siRNA sense strand
gccaagaucuggaaaaugc

SEQ ID NO: 1059949 - RNA, 19 nt, Homo sapiens
  misc_RNA (1)...(19): siRNA sense strand
gcguugaccgugugucuga

SEQ ID NO: 1059950 - RNA, 19 nt, Homo sapiens
  misc_RNA (1)...(19): siRNA sense strand
ugaucgagacguacuuuga

SEQ ID NO: 1059951 - RNA, 19 nt, Homo sapiens
  misc_RNA (1)...(19): siRNA sense strand
gagccaagaucuggaaaau

SEQ ID NO: 1059952 - RNA, 19 nt, Homo sapiens
  misc_RNA (1)...(19): siRNA sense strand
caacuaugcaagcgguguu

SEQ ID NO: 1059953 - RNA, 19 nt, Homo sapiens
  misc_RNA (1)...(19): siRNA sense strand
gguuguaucgccuguggaa

SEQ ID NO: 1059954 - RNA, 19 nt, Homo sapiens
  misc_RNA (1)...(19): siRNA sense strand
cgagacguacuuugacuuc

SEQ ID NO: 1059955 - RNA, 19 nt, Homo sapiens
  misc_RNA (1)...(19): siRNA sense strand
gggugaaggcccagacguu

SEQ ID NO: 1059956 - RNA, 19 nt, Homo sapiens
  misc_RNA (1)...(19): siRNA sense strand
gaaccucaggacccucaug

SEQ ID NO: 1059957 - RNA, 19 nt, Homo sapiens
  misc_RNA (1)...(19): siRNA sense strand
gagaaggaagaggacauga

SEQ ID NO: 1059958 - RNA, 19 nt, Homo sapiens
  misc_RNA (1)...(19): siRNA sense strand
ucuaucuccucaagaacaa

SEQ ID NO: 1059959 - RNA, 19 nt, Homo sapiens
  misc_RNA (1)...(19): siRNA sense strand
gacagcaaccacaacuaug

SEQ ID NO: 1059960 - RNA, 19 nt, Homo sapiens
  misc_RNA (1)...(19): siRNA sense strand
ccaugaaagccgacacuuc

SEQ ID NO: 1059961 - RNA, 19 nt, Homo sapiens
  misc_RNA (1)...(19): siRNA sense strand
aggaagaggacaugauuca

SEQ ID NO: 1059962 - RNA, 19 nt, Homo sapiens
  misc_RNA (1)...(19): siRNA sense strand
aucaugggcugcuacauuc

SEQ ID NO: 1059963 - RNA, 19 nt, Homo sapiens
  misc_RNA (1)...(19): siRNA sense strand
cggaaacgggagaaugauu

SEQ ID NO: 1059964 - RNA, 19 nt, Homo sapiens
  misc_RNA (1)...(19): siRNA sense strand
gcccaagggaagcagauga

SEQ ID NO: 1059965 - RNA, 19 nt, Homo sapiens
  misc_RNA (1)...(19): siRNA sense strand
acaccucuaucuccucaag

SEQ ID NO: 1059966 - RNA, 19 nt, Homo sapiens
  misc_RNA (1)...(19): siRNA sense strand
agcagaugaucgagacgua

SEQ ID NO: 1059967 - RNA, 19 nt, Homo sapiens
  misc_RNA (1)...(19): siRNA sense strand
cuuauagggucaccuucga

SEQ ID NO: 1059968 - RNA, 19 nt, Homo sapiens
  misc_RNA (1)...(19): siRNA sense strand
agauagagaggaagcugaa

SEQ ID NO: 1059969 - RNA, 19 nt, Homo sapiens
  misc_RNA (1)...(19): siRNA sense strand
aaugauuccgcgucuguaa

SEQ ID NO: 1059970 - RNA, 19 nt, Homo sapiens
  misc_RNA (1)...(19): siRNA sense strand
gcugaacgucuaccacaag

SEQ ID NO: 1059971 - RNA, 19 nt, Homo sapiens
  misc_RNA (1)...(19): siRNA sense strand
gaucgagacguacuuugac

SEQ ID NO: 1059972 - RNA, 19 nt, Homo sapiens
  misc_RNA (1)...(19): siRNA sense strand
ccaauggagagaagcuguu

SEQ ID NO: 1059973 - RNA, 19 nt, Homo sapiens
  misc_RNA (1)...(19): siRNA sense strand
uugccaaaguggagaagga

SEQ ID NO: 1059974 - RNA, 19 nt, Homo sapiens
  misc_RNA (1)...(19): siRNA sense strand
ugagccgccugaugagcaa

SEQ ID NO: 1059975 - RNA, 19 nt, Homo sapiens
  misc_RNA (1)...(19): siRNA sense strand
gagagaagcuguuccagaa

SEQ ID NO: 1059976 - RNA, 19 nt, Homo sapiens
  misc_RNA (1)...(19): siRNA sense strand
gcaagaagcuggagaggau

SEQ ID NO: 1059977 - RNA, 19 nt, Homo sapiens
  misc_RNA (1)...(19): siRNA sense strand
gaaggaagaggacaugauu

SEQ ID NO: 1059978 - RNA, 19 nt, Homo sapiens
  misc_RNA (1)...(19): siRNA sense strand
ccaaaggucaugcucauuu

SEQ ID NO: 1059979 - RNA, 19 nt, Homo sapiens
  misc_RNA (1)...(19): siRNA sense strand
agaggaagcugaacgucua

SEQ ID NO: 1059980 - RNA, 19 nt, Homo sapiens
  misc_RNA (1)...(19): siRNA sense strand
cgaagcugcuggacuuuga

SEQ ID NO: 1059981 - RNA, 19 nt, Homo sapiens
  misc_RNA (1)...(19): siRNA sense strand
caaaggucaugcucauuuc

SEQ ID NO: 1059982 - RNA, 19 nt, Homo sapiens
  misc_RNA (1)...(19): siRNA sense strand
ggacccucaugacuccuua

SEQ ID NO: 1059983 - RNA, 19 nt, Homo sapiens
  misc_RNA (1)...(19): siRNA sense strand
gcaaacaccugcgcauggu

SEQ ID NO: 1059984 - RNA, 19 nt, Homo sapiens
  misc_RNA (1)...(19): siRNA sense strand
gaacgucauccacaucaug

SEQ ID NO: 1059985 - RNA, 19 nt, Homo sapiens
  misc_RNA (1)...(19): siRNA sense strand
caucaugggcugcuacauu

SEQ ID NO: 1059986 - RNA, 19 nt, Homo sapiens
  misc_RNA (1)...(19): siRNA sense strand
gaagaggacaugauucacu

SEQ ID NO: 1059987 - RNA, 19 nt, Homo sapiens
  misc_RNA (1)...(19): siRNA sense strand
acucgaagcugcuggacuu

SEQ ID NO: 1059988 - RNA, 19 nt, Homo sapiens
  misc_RNA (1)...(19): siRNA sense strand
gcccaaggcugaguacauc

SEQ ID NO: 1059989 - RNA, 19 nt, Homo sapiens
  misc_RNA (1)...(19): siRNA sense strand
aagaggacaugauucacuu

SEQ ID NO: 1059990 - RNA, 19 nt, Homo sapiens
  misc_RNA (1)...(19): siRNA sense strand
ccucaugacuccuuauagg

SEQ ID NO: 1059991 - RNA, 19 nt, Homo sapiens
  misc_RNA (1)...(19): siRNA sense strand
caccaaaggucaugcucau

SEQ ID NO: 1059992 - RNA, 19 nt, Homo sapiens
  misc_RNA (1)...(19): siRNA sense strand
agacagcaaccacaacuau

SEQ ID NO: 1059993 - RNA, 19 nt, Homo sapiens
  misc_RNA (1)...(19): siRNA sense strand
gccggaaacgggagaauga

SEQ ID NO: 1059994 - RNA, 19 nt, Homo sapiens
  misc_RNA (1)...(19): siRNA sense strand
ggacugggacacugagaag

SEQ ID NO: 1059995 - RNA, 19 nt, Homo sapiens
  misc_RNA (1)...(19): siRNA sense strand
gaugaucgagacguacuuu

SEQ ID NO: 1059996 - RNA, 19 nt, Homo sapiens
  misc_RNA (1)...(19): siRNA sense strand
ggagaaggaagaggacaug

SEQ ID NO: 1059997 - RNA, 19 nt, Homo sapiens
  misc_RNA (1)...(19): siRNA sense strand
ccaaaguggagaaggaaga

SEQ ID NO: 1059998 - RNA, 19 nt, Homo sapiens
  misc_RNA (1)...(19): siRNA sense strand
uugaggagauagagaggaa

SEQ ID NO: 1059999 - RNA, 19 nt, Homo sapiens
  misc_RNA (1)...(19): siRNA sense strand
ccacaagggagccaagauc

SEQ ID NO: 1060000 - RNA, 19 nt, Homo sapiens
  misc_RNA (1)...(19): siRNA sense strand
gccaagaucuggaaaaugc

SEQ ID NO: 1060001 - RNA, 19 nt, Homo sapiens
  misc_RNA (1)...(19): siRNA sense strand
gagccaagaucuggaaaau

SEQ ID NO: 1060002 - RNA, 19 nt, Homo sapiens
  misc_RNA (1)...(19): siRNA sense strand
ugaucgagacguacuuuga

SEQ ID NO: 1060003 - RNA, 19 nt, Homo sapiens
  misc_RNA (1)...(19): siRNA sense strand
gcguugaccgugugucuga

SEQ ID NO: 1060004 - RNA, 19 nt, Homo sapiens
  misc_RNA (1)...(19): siRNA sense strand
caacuaugcaagcgguguu

SEQ ID NO: 1060005 - RNA, 19 nt, Homo sapiens
  misc_RNA (1)...(19): siRNA sense strand
gguuguaucgccuguggaa

SEQ ID NO: 1060006 - RNA, 19 nt, Homo sapiens
  misc_RNA (1)...(19): siRNA sense strand
cgagacguacuuugacuuc

SEQ ID NO: 1060007 - RNA, 19 nt, Homo sapiens
  misc_RNA (1)...(19): siRNA sense strand
gggugaaggcccagacguu

SEQ ID NO: 1060008 - RNA, 19 nt, Homo sapiens
  misc_RNA (1)...(19): siRNA sense strand
gacagcaaccacaacuaug

SEQ ID NO: 1060009 - RNA, 19 nt, Homo sapiens
  misc_RNA (1)...(19): siRNA sense strand
gaaccucaggacccucaug

SEQ ID NO: 1060010 - RNA, 19 nt, Homo sapiens
  misc_RNA (1)...(19): siRNA sense strand
gagaaggaagaggacauga

SEQ ID NO: 1060011 - RNA, 19 nt, Homo sapiens
  misc_RNA (1)...(19): siRNA sense strand
ucuaucuccucaagaacaa

SEQ ID NO: 1060012 - RNA, 19 nt, Homo sapiens
  misc_RNA (1)...(19): siRNA sense strand
ccaugaaagccgacacuuc

SEQ ID NO: 1060013 - RNA, 19 nt, Homo sapiens
  misc_RNA (1)...(19): siRNA sense strand
aggaagaggacaugauuca

SEQ ID NO: 1060014 - RNA, 19 nt, Homo sapiens
  misc_RNA (1)...(19): siRNA sense strand
cggaaacgggagaaugauu

SEQ ID NO: 1060015 - RNA, 19 nt, Homo sapiens
  misc_RNA (1)...(19): siRNA sense strand
gcccaagggaagcagauga

SEQ ID NO: 1060016 - RNA, 19 nt, Homo sapiens
  misc_RNA (1)...(19): siRNA sense strand
aucaugggcugcuacauuc

SEQ ID NO: 1060017 - RNA, 19 nt, Homo sapiens
  misc_RNA (1)...(19): siRNA sense strand
acaccucuaucuccucaag

SEQ ID NO: 1060018 - RNA, 19 nt, Homo sapiens
  misc_RNA (1)...(19): siRNA sense strand
agcagaugaucgagacgua

SEQ ID NO: 1060019 - RNA, 19 nt, Homo sapiens
  misc_RNA (1)...(19): siRNA sense strand
cuuauagggucaccuucga

SEQ ID NO: 1060020 - RNA, 19 nt, Homo sapiens
  misc_RNA (1)...(19): siRNA sense strand
agauagagaggaagcugaa

SEQ ID NO: 1060021 - RNA, 19 nt, Homo sapiens
  misc_RNA (1)...(19): siRNA sense strand
aaugauuccgcgucuguaa

SEQ ID NO: 1060022 - RNA, 19 nt, Homo sapiens
  misc_RNA (1)...(19): siRNA sense strand
gcugaacgucuaccacaag

SEQ ID NO: 1060023 - RNA, 19 nt, Homo sapiens
  misc_RNA (1)...(19): siRNA sense strand
gaucgagacguacuuugac

SEQ ID NO: 1060024 - RNA, 19 nt, Homo sapiens
  misc_RNA (1)...(19): siRNA sense strand
ccaauggagagaagcuguu

SEQ ID NO: 1060025 - RNA, 19 nt, Homo sapiens
  misc_RNA (1)...(19): siRNA sense strand
uugccaaaguggagaagga

SEQ ID NO: 1060026 - RNA, 19 nt, Homo sapiens
  misc_RNA (1)...(19): siRNA sense strand
ugagccgccugaugagcaa

SEQ ID NO: 1060027 - RNA, 19 nt, Homo sapiens
  misc_RNA (1)...(19): siRNA sense strand
gagaugauguacacaauua

SEQ ID NO: 1060028 - RNA, 19 nt, Homo sapiens
  misc_RNA (1)...(19): siRNA sense strand
gaacagaagucagaugaaa

SEQ ID NO: 1060029 - RNA, 19 nt, Homo sapiens
  misc_RNA (1)...(19): siRNA sense strand
gaaggaaguuagcaaguug

SEQ ID NO: 1060030 - RNA, 19 nt, Homo sapiens
  misc_RNA (1)...(19): siRNA sense strand
gagauaacaugucaagcua

SEQ ID NO: 1060031 - RNA, 19 nt, Homo sapiens
  misc_RNA (1)...(19): siRNA sense strand
gaagaagagugaagaaagu

SEQ ID NO: 1060032 - RNA, 19 nt, Homo sapiens
  misc_RNA (1)...(19): siRNA sense strand
caaauggccuugccgcuaa

SEQ ID NO: 1060033 - RNA, 19 nt, Homo sapiens
  misc_RNA (1)...(19): siRNA sense strand
gaaaggacaaggaacauuu

SEQ ID NO: 1060034 - RNA, 19 nt, Homo sapiens
  misc_RNA (1)...(19): siRNA sense strand
ggaaaggacugagaugaug

SEQ ID NO: 1060035 - RNA, 19 nt, Homo sapiens
  misc_RNA (1)...(19): siRNA sense strand
guuacaacgucaaugauua

SEQ ID NO: 1060036 - RNA, 19 nt, Homo sapiens
  misc_RNA (1)...(19): siRNA sense strand
gggauuaucucagacagua

SEQ ID NO: 1060037 - RNA, 19 nt, Homo sapiens
  misc_RNA (1)...(19): siRNA sense strand
gaagcaagacaucagaaua

SEQ ID NO: 1060038 - RNA, 19 nt, Homo sapiens
  misc_RNA (1)...(19): siRNA sense strand
gaacugagugauacaauga

SEQ ID NO: 1060039 - RNA, 19 nt, Homo sapiens
  misc_RNA (1)...(19): siRNA sense strand
gaaguauugucaaggauug

SEQ ID NO: 1060040 - RNA, 19 nt, Homo sapiens
  misc_RNA (1)...(19): siRNA sense strand
caaaugaagucuaccaaca

SEQ ID NO: 1060041 - RNA, 19 nt, Homo sapiens
  misc_RNA (1)...(19): siRNA sense strand
cgucaaugauuauuccuua

SEQ ID NO: 1060042 - RNA, 19 nt, Homo sapiens
  misc_RNA (1)...(19): siRNA sense strand
cccaacggguuacuaauua

SEQ ID NO: 1060043 - RNA, 19 nt, Homo sapiens
  misc_RNA (1)...(19): siRNA sense strand
agaaagggauuaucucaga

SEQ ID NO: 1060044 - RNA, 19 nt, Homo sapiens
  misc_RNA (1)...(19): siRNA sense strand
ccaaggagauaacauguca

SEQ ID NO: 1060045 - RNA, 19 nt, Homo sapiens
  misc_RNA (1)...(19): siRNA sense strand
ugacauaagugacauugug

SEQ ID NO: 1060046 - RNA, 19 nt, Homo sapiens
  misc_RNA (1)...(19): siRNA sense strand
ggacugagaugauguacac

SEQ ID NO: 1060047 - RNA, 19 nt, Homo sapiens
  misc_RNA (1)...(19): siRNA sense strand
caacaacgaacacuacaaa

SEQ ID NO: 1060048 - RNA, 19 nt, Homo sapiens
  misc_RNA (1)...(19): siRNA sense strand
gcaagacaucagaauaaua

SEQ ID NO: 1060049 - RNA, 19 nt, Homo sapiens
  misc_RNA (1)...(19): siRNA sense strand
ccacaaugcucuauucaag

SEQ ID NO: 1060050 - RNA, 19 nt, Homo sapiens
  misc_RNA (1)...(19): siRNA sense strand
ggacaaggaacauuugaug

SEQ ID NO: 1060051 - RNA, 19 nt, Homo sapiens
  misc_RNA (1)...(19): siRNA sense strand
uguaggaacuuacccauga

SEQ ID NO: 1060052 - RNA, 19 nt, Homo sapiens
  misc_RNA (1)...(19): siRNA sense strand
ugacauugauucugaugaa

SEQ ID NO: 1060053 - RNA, 19 nt, Homo sapiens
  misc_RNA (1)...(19): siRNA sense strand
ccaaagaacagaagucaga

SEQ ID NO: 1060054 - RNA, 19 nt, Homo sapiens
  misc_RNA (1)...(19): siRNA sense strand
gugaaauacugcacaaaug

SEQ ID NO: 1060055 - RNA, 19 nt, Homo sapiens
  misc_RNA (1)...(19): siRNA sense strand
gaagaacagcuccacaaug

SEQ ID NO: 1060056 - RNA, 19 nt, Homo sapiens
  misc_RNA (1)...(19): siRNA sense strand
gauaacaugucaagcuaca

SEQ ID NO: 1060057 - RNA, 19 nt, Homo sapiens
  misc_RNA (1)...(19): siRNA sense strand
acacacagcauccacauuu

SEQ ID NO: 1060058 - RNA, 19 nt, Homo sapiens
  misc_RNA (1)...(19): siRNA sense strand
cuuaagagaucagcuauug

SEQ ID NO: 1060059 - RNA, 19 nt, Homo sapiens
  misc_RNA (1)...(19): siRNA sense strand
gaaauacugcacaaaugaa

SEQ ID NO: 1060060 - RNA, 19 nt, Homo sapiens
  misc_RNA (1)...(19): siRNA sense strand
ugaaaguggugauggaaga

SEQ ID NO: 1060061 - RNA, 19 nt, Homo sapiens
  misc_RNA (1)...(19): siRNA sense strand
gaagucauauccucugaac

SEQ ID NO: 1060062 - RNA, 19 nt, Homo sapiens
  misc_RNA (1)...(19): siRNA sense strand
ugaaggaaguuagcaaguu

SEQ ID NO: 1060063 - RNA, 19 nt, Homo sapiens
  misc_RNA (1)...(19): siRNA sense strand
cuaaagaacugagugauac

SEQ ID NO: 1060064 - RNA, 19 nt, Homo sapiens
  misc_RNA (1)...(19): siRNA sense strand
cuaccaauccuuccuuuaa

SEQ ID NO: 1060065 - RNA, 19 nt, Homo sapiens
  misc_RNA (1)...(19): siRNA sense strand
ugaagacuguaggaacuua

SEQ ID NO: 1060066 - RNA, 19 nt, Homo sapiens
  misc_RNA (1)...(19): siRNA sense strand
ugaaauacugcacaaauga

SEQ ID NO: 1060067 - RNA, 19 nt, Homo sapiens
  misc_RNA (1)...(19): siRNA sense strand
gaauugacagccuauguug

SEQ ID NO: 1060068 - RNA, 19 nt, Homo sapiens
  misc_RNA (1)...(19): siRNA sense strand
gagaauccuuccgugguuu

SEQ ID NO: 1060069 - RNA, 19 nt, Homo sapiens
  misc_RNA (1)...(19): siRNA sense strand
ggaaugugccaaggagaua

SEQ ID NO: 1060070 - RNA, 19 nt, Homo sapiens
  misc_RNA (1)...(19): siRNA sense strand
aagcaagacaucagaauaa

SEQ ID NO: 1060071 - RNA, 19 nt, Homo sapiens
  misc_RNA (1)...(19): siRNA sense strand
cgagaauccuuccgugguu

SEQ ID NO: 1060072 - RNA, 19 nt, Homo sapiens
  misc_RNA (1)...(19): siRNA sense strand
gauuauuccuuaagagauc

SEQ ID NO: 1060073 - RNA, 19 nt, Homo sapiens
  misc_RNA (1)...(19): siRNA sense strand
uaaggacucuccgaaguau

SEQ ID NO: 1060074 - RNA, 19 nt, Homo sapiens
  misc_RNA (1)...(19): siRNA sense strand
gaggcuaucuuugaaguca

SEQ ID NO: 1060075 - RNA, 19 nt, Homo sapiens
  misc_RNA (1)...(19): siRNA sense strand
gaaagagacaagaggcuau

SEQ ID NO: 1060076 - RNA, 19 nt, Homo sapiens
  misc_RNA (1)...(19): siRNA sense strand
agucuggccucggaaauua

SEQ ID NO: 1060077 - RNA, 19 nt, Homo sapiens
  misc_RNA (1)...(19): siRNA sense strand
ggaaguauugucaaggauu

SEQ ID NO: 1060078 - RNA, 19 nt, Homo sapiens
  misc_RNA (1)...(19): siRNA sense strand
gagaaugggacgcuugcua

SEQ ID NO: 1060079 - RNA, 19 nt, Homo sapiens
  misc_RNA (1)...(19): siRNA sense strand
aagaacagcuccacaaugc

SEQ ID NO: 1060080 - RNA, 19 nt, Homo sapiens
  misc_RNA (1)...(19): siRNA sense strand
acucccagcuggaauuuaa

SEQ ID NO: 1060081 - RNA, 19 nt, Homo sapiens
  misc_RNA (1)...(19): siRNA sense strand
ggaagaacagcuccacaau

SEQ ID NO: 1060082 - RNA, 19 nt, Homo sapiens
  misc_RNA (1)...(19): siRNA sense strand
gaaaguggagaugcuacua

SEQ ID NO: 1060083 - RNA, 19 nt, Homo sapiens
  misc_RNA (1)...(19): siRNA sense strand
cgaagaagaagaacagaau

SEQ ID NO: 1060084 - RNA, 19 nt, Homo sapiens
  misc_RNA (1)...(19): siRNA sense strand
gcuccacaaugcucuauuc

SEQ ID NO: 1060085 - RNA, 19 nt, Homo sapiens
  misc_RNA (1)...(19): siRNA sense strand
uuaacgaugugcucauuau

SEQ ID NO: 1060086 - RNA, 19 nt, Homo sapiens
  misc_RNA (1)...(19): siRNA sense strand
cagcagaucauuccgaaga

SEQ ID NO: 1060087 - RNA, 19 nt, Homo sapiens
  misc_RNA (1)...(19): siRNA sense strand
ggagauaacaugucaagcu

SEQ ID NO: 1060088 - RNA, 19 nt, Homo sapiens
  misc_RNA (1)...(19): siRNA sense strand
gaucagcuauugguggaau

SEQ ID NO: 1060089 - RNA, 19 nt, Homo sapiens
  misc_RNA (1)...(19): siRNA sense strand
aaaguuacaacgucaauga

SEQ ID NO: 1060090 - RNA, 19 nt, Homo sapiens
  misc_RNA (1)...(19): siRNA sense strand
gaacuuacccaugaucucu

SEQ ID NO: 1060091 - RNA, 19 nt, Homo sapiens
  misc_RNA (1)...(19): siRNA sense strand
uuggagaucuugauacgaa

SEQ ID NO: 1060092 - RNA, 19 nt, Homo sapiens
  misc_RNA (1)...(19): siRNA sense strand
gaagaagaagaacagaaug

SEQ ID NO: 1060093 - RNA, 19 nt, Homo sapiens
  misc_RNA (1)...(19): siRNA sense strand
agagugaggucgauaacga

SEQ ID NO: 1060094 - RNA, 19 nt, Homo sapiens
  misc_RNA (1)...(19): siRNA sense strand
ccaacucucugcggugaaa

SEQ ID NO: 1060095 - RNA, 19 nt, Homo sapiens
  misc_RNA (1)...(19): siRNA sense strand
auaagaauguggagagaau

SEQ ID NO: 1060096 - RNA, 19 nt, Homo sapiens
  misc_RNA (1)...(19): siRNA sense strand
ccagucaccucuuuacucu

SEQ ID NO: 1060097 - RNA, 19 nt, Homo sapiens
  misc_RNA (1)...(19): siRNA sense strand
gcaaguugguucgacuaug

SEQ ID NO: 1060098 - RNA, 19 nt, Homo sapiens
  misc_RNA (1)...(19): siRNA sense strand
gaaguaugaagucugcaaa

SEQ ID NO: 1060099 - RNA, 19 nt, Homo sapiens
  misc_RNA (1)...(19): siRNA sense strand
ggcuaucuuugaagucaua

SEQ ID NO: 1060100 - RNA, 19 nt, Homo sapiens
  misc_RNA (1)...(19): siRNA sense strand
ccuaccagcucgaagaaga

SEQ ID NO: 1060101 - RNA, 19 nt, Homo sapiens
  misc_RNA (1)...(19): siRNA sense strand
caaguugguucgacuaugc

SEQ ID NO: 1060102 - RNA, 19 nt, Homo sapiens
  misc_RNA (1)...(19): siRNA sense strand
ucuaaagaacugagugaua

SEQ ID NO: 1060103 - RNA, 19 nt, Homo sapiens
  misc_RNA (1)...(19): siRNA sense strand
gaucuugauacgaauguuu

SEQ ID NO: 1060104 - RNA, 19 nt, Homo sapiens
  misc_RNA (1)...(19): siRNA sense strand
ggaagacaaggagaaguuu

SEQ ID NO: 1060105 - RNA, 19 nt, Homo sapiens
  misc_RNA (1)...(19): siRNA sense strand
ggaaagaaagagacaagag

SEQ ID NO: 1060106 - RNA, 19 nt, Homo sapiens
  misc_RNA (1)...(19): siRNA sense strand
agucaccucuuuacucuga

SEQ ID NO: 1060107 - RNA, 19 nt, Homo sapiens
  misc_RNA (1)...(19): siRNA sense strand
gggaagaacagcuccacaa

SEQ ID NO: 1060108 - RNA, 19 nt, Homo sapiens
  misc_RNA (1)...(19): siRNA sense strand
caagaaggacauccaaaca

SEQ ID NO: 1060109 - RNA, 19 nt, Homo sapiens
  misc_RNA (1)...(19): siRNA sense strand
ggauugagucccaugaaga

SEQ ID NO: 1060110 - RNA, 19 nt, Homo sapiens
  misc_RNA (1)...(19): siRNA sense strand
uaagugacauuguggaaaa

SEQ ID NO: 1060111 - RNA, 19 nt, Homo sapiens
  misc_RNA (1)...(19): siRNA sense strand
ugagugauacaaugacuaa

SEQ ID NO: 1060112 - RNA, 19 nt, Homo sapiens
  misc_RNA (1)...(19): siRNA sense strand
acaagagacuccucaaggu

SEQ ID NO: 1060113 - RNA, 19 nt, Homo sapiens
  misc_RNA (1)...(19): siRNA sense strand
acuacgagauggagaaaga

SEQ ID NO: 1060114 - RNA, 19 nt, Homo sapiens
  misc_RNA (1)...(19): siRNA sense strand
gcagaccgaaccucacuga

SEQ ID NO: 1060115 - RNA, 19 nt, Homo sapiens
  misc_RNA (1)...(19): siRNA sense strand
caacgucaaugauuauucc

SEQ ID NO: 1060116 - RNA, 19 nt, Homo sapiens
  misc_RNA (1)...(19): siRNA sense strand
cuaaggacucuccgaagua

SEQ ID NO: 1060117 - RNA, 19 nt, Homo sapiens
  misc_RNA (1)...(19): siRNA sense strand
ccuaaggacucuccgaagu

SEQ ID NO: 1060118 - RNA, 19 nt, Homo sapiens
  misc_RNA (1)...(19): siRNA sense strand
gguuacuaauuacggauuu

SEQ ID NO: 1060119 - RNA, 19 nt, Homo sapiens
  misc_RNA (1)...(19): siRNA sense strand
uaacaugucaagcuacaau

SEQ ID NO: 1060120 - RNA, 19 nt, Homo sapiens
  misc_RNA (1)...(19): siRNA sense strand
gacaaugaagagcuuaauu

SEQ ID NO: 1060121 - RNA, 19 nt, Homo sapiens
  misc_RNA (1)...(19): siRNA sense strand
gaaaggacugagaugaugu

SEQ ID NO: 1060122 - RNA, 19 nt, Homo sapiens
  misc_RNA (1)...(19): siRNA sense strand
gaaaagaaagggauuaucu

SEQ ID NO: 1060123 - RNA, 19 nt, Homo sapiens
  misc_RNA (1)...(19): siRNA sense strand
ggaagcaagacaucagaau

SEQ ID NO: 1060124 - RNA, 19 nt, Homo sapiens
  misc_RNA (1)...(19): siRNA sense strand
aaagaaagggauuaucuca

SEQ ID NO: 1060125 - RNA, 19 nt, Homo sapiens
  misc_RNA (1)...(19): siRNA sense strand
caugaagacuguaggaacu

SEQ ID NO: 1060126 - RNA, 19 nt, Homo sapiens
  misc_RNA (1)...(19): siRNA sense strand
cauccacauuugacccaua

SEQ ID NO: 1060127 - RNA, 19 nt, Homo sapiens
  misc_RNA (1)...(19): siRNA sense strand
ccacaaagcuaguuucugu

SEQ ID NO: 1060128 - RNA, 19 nt, Homo sapiens
  misc_RNA (1)...(19): siRNA sense strand
ggagucaucuguucugaga

SEQ ID NO: 1060129 - RNA, 19 nt, Homo sapiens
  misc_RNA (1)...(19): siRNA sense strand
uaacagagguggugaugag

SEQ ID NO: 1060130 - RNA, 19 nt, Homo sapiens
  misc_RNA (1)...(19): siRNA sense strand
gagagugacuuuaccaaca

SEQ ID NO: 1060131 - RNA, 19 nt, Homo sapiens
  misc_RNA (1)...(19): siRNA sense strand
gugcacaacugccacauug

SEQ ID NO: 1060132 - RNA, 19 nt, Homo sapiens
  misc_RNA (1)...(19): siRNA sense strand
gcugaggauuguucacaua

SEQ ID NO: 1060133 - RNA, 19 nt, Homo sapiens
  misc_RNA (1)...(19): siRNA sense strand
gcauggacaucuucacuca

SEQ ID NO: 1060134 - RNA, 19 nt, Homo sapiens
  misc_RNA (1)...(19): siRNA sense strand
gaacaucacagcugaggau

SEQ ID NO: 1060135 - RNA, 19 nt, Homo sapiens
  misc_RNA (1)...(19): siRNA sense strand
gcaucuggcuggacaacuu

SEQ ID NO: 1060136 - RNA, 19 nt, Homo sapiens
  misc_RNA (1)...(19): siRNA sense strand
guaugagugugccaacuuu

SEQ ID NO: 1060137 - RNA, 19 nt, Homo sapiens
  misc_RNA (1)...(19): siRNA sense strand
ggagaccgccuacaucgaa

SEQ ID NO: 1060138 - RNA, 19 nt, Homo sapiens
  misc_RNA (1)...(19): siRNA sense strand
caucacagcugaggauugu

SEQ ID NO: 1060139 - RNA, 19 nt, Homo sapiens
  misc_RNA (1)...(19): siRNA sense strand
ggacccacagugccaaaua

SEQ ID NO: 1060140 - RNA, 19 nt, Homo sapiens
  misc_RNA (1)...(19): siRNA sense strand
ggaguucuaucgugccaau

SEQ ID NO: 1060141 - RNA, 19 nt, Homo sapiens
  misc_RNA (1)...(19): siRNA sense strand
uaccaacaaugcaaugaaa

SEQ ID NO: 1060142 - RNA, 19 nt, Homo sapiens
  misc_RNA (1)...(19): siRNA sense strand
caucuucacucacuaugau

SEQ ID NO: 1060143 - RNA, 19 nt, Homo sapiens
  misc_RNA (1)...(19): siRNA sense strand
gacccacagugccaaauau

SEQ ID NO: 1060144 - RNA, 19 nt, Homo sapiens
  misc_RNA (1)...(19): siRNA sense strand
gaaucugggugcacaacug

SEQ ID NO: 1060145 - RNA, 19 nt, Homo sapiens
  misc_RNA (1)...(19): siRNA sense strand
gcacccacaucaccugcaa

SEQ ID NO: 1060146 - RNA, 19 nt, Homo sapiens
  misc_RNA (1)...(19): siRNA sense strand
gagcagagugugacugaau

SEQ ID NO: 1060147 - RNA, 19 nt, Homo sapiens
  misc_RNA (1)...(19): siRNA sense strand
aaacuacauucuccagguu

SEQ ID NO: 1060148 - RNA, 19 nt, Homo sapiens
  misc_RNA (1)...(19): siRNA sense strand
ggacaucuucacucacuau

SEQ ID NO: 1060149 - RNA, 19 nt, Homo sapiens
  misc_RNA (1)...(19): siRNA sense strand
gguagagcaucaccugcaa

SEQ ID NO: 1060150 - RNA, 19 nt, Homo sapiens
  misc_RNA (1)...(19): siRNA sense strand
ucauugagguagagcauca

SEQ ID NO: 1060151 - RNA, 19 nt, Homo sapiens
  misc_RNA (1)...(19): siRNA sense strand
cagaccagcaaccagauua

SEQ ID NO: 1060152 - RNA, 19 nt, Homo sapiens
  misc_RNA (1)...(19): siRNA sense strand
agagugacuuuaccaacaa

SEQ ID NO: 1060153 - RNA, 19 nt, Homo sapiens
  misc_RNA (1)...(19): siRNA sense strand
gcugagggccacaaagcua

SEQ ID NO: 1060154 - RNA, 19 nt, Homo sapiens
  misc_RNA (1)...(19): siRNA sense strand
caucauggcacccacauca

SEQ ID NO: 1060155 - RNA, 19 nt, Homo sapiens
  misc_RNA (1)...(19): siRNA sense strand
gcgagucgaggugcaaaua

SEQ ID NO: 1060156 - RNA, 19 nt, Homo sapiens
  misc_RNA (1)...(19): siRNA sense strand
gaagccaggaaacuacauu

SEQ ID NO: 1060157 - RNA, 19 nt, Homo sapiens
  misc_RNA (1)...(19): siRNA sense strand
caacaaugcaaugaaaugu

SEQ ID NO: 1060158 - RNA, 19 nt, Homo sapiens
  misc_RNA (1)...(19): siRNA sense strand
gcacaacugccacauuggu

SEQ ID NO: 1060159 - RNA, 19 nt, Homo sapiens
  misc_RNA (1)...(19): siRNA sense strand
gcaggagaccgccuacauc

SEQ ID NO: 1060160 - RNA, 19 nt, Homo sapiens
  misc_RNA (1)...(19): siRNA sense strand
ccaacaaugcaaugaaaug

SEQ ID NO: 1060161 - RNA, 19 nt, Homo sapiens
  misc_RNA (1)...(19): siRNA sense strand
ugucaucaacccaaacuuu

SEQ ID NO: 1060162 - RNA, 19 nt, Homo sapiens
  misc_RNA (1)...(19): siRNA sense strand
guacugugcugcggaagag

SEQ ID NO: 1060163 - RNA, 19 nt, Homo sapiens
  misc_RNA (1)...(19): siRNA sense strand
ucuguucccuggaguucua

SEQ ID NO: 1060164 - RNA, 19 nt, Homo sapiens
  misc_RNA (1)...(19): siRNA sense strand
guacugggacucugggaau

SEQ ID NO: 1060165 - RNA, 19 nt, Homo sapiens
  misc_RNA (1)...(19): siRNA sense strand
gcccaccucucccucuguu

SEQ ID NO: 1060166 - RNA, 19 nt, Homo sapiens
  misc_RNA (1)...(19): siRNA sense strand
gguaugagugugccaacuu

SEQ ID NO: 1060167 - RNA, 19 nt, Homo sapiens
  misc_RNA (1)...(19): siRNA sense strand
caaauauggcccuggaaca

SEQ ID NO: 1060168 - RNA, 19 nt, Homo sapiens
  misc_RNA (1)...(19): siRNA sense strand
cugcaaauaugauggacau

SEQ ID NO: 1060169 - RNA, 19 nt, Homo sapiens
  misc_RNA (1)...(19): siRNA sense strand
gagacugcaucagaucugu

SEQ ID NO: 1060170 - RNA, 19 nt, Homo sapiens
  misc_RNA (1)...(19): siRNA sense strand
gagucgaggugcaaauagg

SEQ ID NO: 1060171 - RNA, 19 nt, Homo sapiens
  misc_RNA (1)...(19): siRNA sense strand
uaacugcaaauaugaugga

SEQ ID NO: 1060172 - RNA, 19 nt, Homo sapiens
  misc_RNA (1)...(19): siRNA sense strand
cugggacucugggaauaua

SEQ ID NO: 1060173 - RNA, 19 nt, Homo sapiens
  misc_RNA (1)...(19): siRNA sense strand
uagcagagagugacuuuac

SEQ ID NO: 1060174 - RNA, 19 nt, Homo sapiens
  misc_RNA (1)...(19): siRNA sense strand
ucacagcugaggauuguuc

SEQ ID NO: 1060175 - RNA, 19 nt, Homo sapiens
  misc_RNA (1)...(19): siRNA sense strand
gcagagagugacuuuacca

SEQ ID NO: 1060176 - RNA, 19 nt, Homo sapiens
  misc_RNA (1)...(19): siRNA sense strand
cagaagaagcaacaacagu

SEQ ID NO: 1060177 - RNA, 19 nt, Homo sapiens
  misc_RNA (1)...(19): siRNA sense strand
gagagcaaggcaucacugu

SEQ ID NO: 1060178 - RNA, 19 nt, Homo sapiens
  misc_RNA (1)...(19): siRNA sense strand
gaucagugugcccaucaug

SEQ ID NO: 1060179 - RNA, 19 nt, Homo sapiens
  misc_RNA (1)...(19): siRNA sense strand
gccagaagaagcaacaaca

SEQ ID NO: 1060180 - RNA, 19 nt, Homo sapiens
  misc_RNA (1)...(19): siRNA sense strand
gagugacuuuaccaacaau

SEQ ID NO: 1060181 - RNA, 19 nt, Homo sapiens
  misc_RNA (1)...(19): siRNA sense strand
gagaccaggauccgacuca

SEQ ID NO: 1060182 - RNA, 19 nt, Homo sapiens
  misc_RNA (1)...(19): siRNA sense strand
gcagagugugacugaaugu

SEQ ID NO: 1060183 - RNA, 19 nt, Homo sapiens
  misc_RNA (1)...(19): siRNA sense strand
ccacagcauggacaucuuc

SEQ ID NO: 1060184 - RNA, 19 nt, Homo sapiens
  misc_RNA (1)...(19): siRNA sense strand
uacugggacucugggaaua

SEQ ID NO: 1060185 - RNA, 19 nt, Homo sapiens
  misc_RNA (1)...(19): siRNA sense strand
gcagcaacacuccuuuggu

SEQ ID NO: 1060186 - RNA, 19 nt, Homo sapiens
  misc_RNA (1)...(19): siRNA sense strand
cugcuggagucaucuguuc

SEQ ID NO: 1060187 - RNA, 19 nt, Homo sapiens
  misc_RNA (1)...(19): siRNA sense strand
cuucacugcuggagucauc

SEQ ID NO: 1060188 - RNA, 19 nt, Homo sapiens
  misc_RNA (1)...(19): siRNA sense strand
caaugaaauguaacugcaa

SEQ ID NO: 1060189 - RNA, 19 nt, Homo sapiens
  misc_RNA (1)...(19): siRNA sense strand
gacugcaucagaucuguug

SEQ ID NO: 1060190 - RNA, 19 nt, Homo sapiens
  misc_RNA (1)...(19): siRNA sense strand
cuucgggagugcucgagaa

SEQ ID NO: 1060191 - RNA, 19 nt, Homo sapiens
  misc_RNA (1)...(19): siRNA sense strand
ccgagcagagugugacuga

SEQ ID NO: 1060192 - RNA, 19 nt, Homo sapiens
  misc_RNA (1)...(19): siRNA sense strand
ggaucagugugcccaucau

SEQ ID NO: 1060193 - RNA, 19 nt, Homo sapiens
  misc_RNA (1)...(19): siRNA sense strand
ggacucugggaauauaaca

SEQ ID NO: 1060194 - RNA, 19 nt, Homo sapiens
  misc_RNA (1)...(19): siRNA sense strand
gcuauccaccugagugaag

SEQ ID NO: 1060195 - RNA, 19 nt, Homo sapiens
  misc_RNA (1)...(19): siRNA sense strand
agaagcaacaacagucgaa

SEQ ID NO: 1060196 - RNA, 19 nt, Homo sapiens
  misc_RNA (1)...(19): siRNA sense strand
ccagaccagcaaccagauu

SEQ ID NO: 1060197 - RNA, 19 nt, Homo sapiens
  misc_RNA (1)...(19): siRNA sense strand
gaggccaacaggagguuug

SEQ ID NO: 1060198 - RNA, 19 nt, Homo sapiens
  misc_RNA (1)...(19): siRNA sense strand
guagcagagagugacuuua

SEQ ID NO: 1060199 - RNA, 19 nt, Homo sapiens
  misc_RNA (1)...(19): siRNA sense strand
gaucucuaccggcaugaca

SEQ ID NO: 1060200 - RNA, 19 nt, Homo sapiens
  misc_RNA (1)...(19): siRNA sense strand
ggaaagaucuucaaucaua

SEQ ID NO: 1060201 - RNA, 19 nt, Homo sapiens
  misc_RNA (1)...(19): siRNA sense strand
gagaagcccuauacaugua

SEQ ID NO: 1060202 - RNA, 19 nt, Homo sapiens
  misc_RNA (1)...(19): siRNA sense strand
guacaaauguccugagugu

SEQ ID NO: 1060203 - RNA, 19 nt, Homo sapiens
  misc_RNA (1)...(19): siRNA sense strand
uaguagaacucucugaaua

SEQ ID NO: 1060204 - RNA, 19 nt, Homo sapiens
  misc_RNA (1)...(19): siRNA sense strand
ugagaaaccuuauaagugu

SEQ ID NO: 1060205 - RNA, 19 nt, Homo sapiens
  misc_RNA (1)...(19): siRNA sense strand
gacaugaccuuuccuuguu

SEQ ID NO: 1060206 - RNA, 19 nt, Homo sapiens
  misc_RNA (1)...(19): siRNA sense strand
guggaaagaucuucaauca

SEQ ID NO: 1060207 - RNA, 19 nt, Homo sapiens
  misc_RNA (1)...(19): siRNA sense strand
gaacauucauacagaggaa

SEQ ID NO: 1060208 - RNA, 19 nt, Homo sapiens
  misc_RNA (1)...(19): siRNA sense strand
guagaacucucugaauauu

SEQ ID NO: 1060209 - RNA, 19 nt, Homo sapiens
  misc_RNA (1)...(19): siRNA sense strand
gaucauucauaccuaguuu

SEQ ID NO: 1060210 - RNA, 19 nt, Homo sapiens
  misc_RNA (1)...(19): siRNA sense strand
gagcuuauuucccaucaga

SEQ ID NO: 1060211 - RNA, 19 nt, Homo sapiens
  misc_RNA (1)...(19): siRNA sense strand
gaaagaucuucaaucauag

SEQ ID NO: 1060212 - RNA, 19 nt, Homo sapiens
  misc_RNA (1)...(19): siRNA sense strand
gaaccaacacacuuucuga

SEQ ID NO: 1060213 - RNA, 19 nt, Homo sapiens
  misc_RNA (1)...(19): siRNA sense strand
caagugcagugccagcuuu

SEQ ID NO: 1060214 - RNA, 19 nt, Homo sapiens
  misc_RNA (1)...(19): siRNA sense strand
ggagaagcccuauacaugu

SEQ ID NO: 1060215 - RNA, 19 nt, Homo sapiens
  misc_RNA (1)...(19): siRNA sense strand
cuacgaaucuacuaacugu

SEQ ID NO: 1060216 - RNA, 19 nt, Homo sapiens
  misc_RNA (1)...(19): siRNA sense strand
cagcaaagaugguacaaaa

SEQ ID NO: 1060217 - RNA, 19 nt, Homo sapiens
  misc_RNA (1)...(19): siRNA sense strand
gggacaauuucuucucauu

SEQ ID NO: 1060218 - RNA, 19 nt, Homo sapiens
  misc_RNA (1)...(19): siRNA sense strand
ugagauuaaucagcaguua

SEQ ID NO: 1060219 - RNA, 19 nt, Homo sapiens
  misc_RNA (1)...(19): siRNA sense strand
acacaugaauagccacgua

SEQ ID NO: 1060220 - RNA, 19 nt, Homo sapiens
  misc_RNA (1)...(19): siRNA sense strand
cauaagcgaacucacauaa

SEQ ID NO: 1060221 - RNA, 19 nt, Homo sapiens
  misc_RNA (1)...(19): siRNA sense strand
acaaauguccugaguguga

SEQ ID NO: 1060222 - RNA, 19 nt, Homo sapiens
  misc_RNA (1)...(19): siRNA sense strand
gacaauuucuucucauucu

SEQ ID NO: 1060223 - RNA, 19 nt, Homo sapiens
  misc_RNA (1)...(19): siRNA sense strand
gaaaacaccuacgaaucua

SEQ ID NO: 1060224 - RNA, 19 nt, Homo sapiens
  misc_RNA (1)...(19): siRNA sense strand
uaagcgaacucacauaaaa

SEQ ID NO: 1060225 - RNA, 19 nt, Homo sapiens
  misc_RNA (1)...(19): siRNA sense strand
uggaaacccugaagcgaaa

SEQ ID NO: 1060226 - RNA, 19 nt, Homo sapiens
  misc_RNA (1)...(19): siRNA sense strand
gcgaaaauauuaaguggaa

SEQ ID NO: 1060227 - RNA, 19 nt, Homo sapiens
  misc_RNA (1)...(19): siRNA sense strand
gugagaaaccuuauaagug

SEQ ID NO: 1060228 - RNA, 19 nt, Homo sapiens
  misc_RNA (1)...(19): siRNA sense strand
gaauuugcaucucauuacu

SEQ ID NO: 1060229 - RNA, 19 nt, Homo sapiens
  misc_RNA (1)...(19): siRNA sense strand
ugacgagcuugccuuagaa

SEQ ID NO: 1060230 - RNA, 19 nt, Homo sapiens
  misc_RNA (1)...(19): siRNA sense strand
uaaaggagaagcccuauac

SEQ ID NO: 1060231 - RNA, 19 nt, Homo sapiens
  misc_RNA (1)...(19): siRNA sense strand
cgccagcacucucaucuau

SEQ ID NO: 1060232 - RNA, 19 nt, Homo sapiens
  misc_RNA (1)...(19): siRNA sense strand
acacacaggagaauccaua

SEQ ID NO: 1060233 - RNA, 19 nt, Homo sapiens
  misc_RNA (1)...(19): siRNA sense strand
ggugagaaaccuuauaagu

SEQ ID NO: 1060234 - RNA, 19 nt, Homo sapiens
  misc_RNA (1)...(19): siRNA sense strand
ggaacucccacuuacaaga

SEQ ID NO: 1060235 - RNA, 19 nt, Homo sapiens
  misc_RNA (1)...(19): siRNA sense strand
ggacaauuucuucucauuc

SEQ ID NO: 1060236 - RNA, 19 nt, Homo sapiens
  misc_RNA (1)...(19): siRNA sense strand
ugaggaaacauucguauca

SEQ ID NO: 1060237 - RNA, 19 nt, Homo sapiens
  misc_RNA (1)...(19): siRNA sense strand
uugaggaucuggcugugua

SEQ ID NO: 1060238 - RNA, 19 nt, Homo sapiens
  misc_RNA (1)...(19): siRNA sense strand
gcaaagaugguacaaaaga

SEQ ID NO: 1060239 - RNA, 19 nt, Homo sapiens
  misc_RNA (1)...(19): siRNA sense strand
gagccaaccugaggacaca

SEQ ID NO: 1060240 - RNA, 19 nt, Homo sapiens
  misc_RNA (1)...(19): siRNA sense strand
ccagggaccaauacuguuu

SEQ ID NO: 1060241 - RNA, 19 nt, Homo sapiens
  misc_RNA (1)...(19): siRNA sense strand
guaaaggagaagcccuaua

SEQ ID NO: 1060242 - RNA, 19 nt, Homo sapiens
  misc_RNA (1)...(19): siRNA sense strand
gcaguuaagccuagagucu

SEQ ID NO: 1060243 - RNA, 19 nt, Homo sapiens
  misc_RNA (1)...(19): siRNA sense strand
ugacaugaccuuuccuugu

SEQ ID NO: 1060244 - RNA, 19 nt, Homo sapiens
  misc_RNA (1)...(19): siRNA sense strand
cagcgaucauucauaccua

SEQ ID NO: 1060245 - RNA, 19 nt, Homo sapiens
  misc_RNA (1)...(19): siRNA sense strand
gcaagccugagauuaauca

SEQ ID NO: 1060246 - RNA, 19 nt, Homo sapiens
  misc_RNA (1)...(19): siRNA sense strand
gaccuuuccuuguuucucu

SEQ ID NO: 1060247 - RNA, 19 nt, Homo sapiens
  misc_RNA (1)...(19): siRNA sense strand
cuaagugcaugaagagcuu

SEQ ID NO: 1060248 - RNA, 19 nt, Homo sapiens
  misc_RNA (1)...(19): siRNA sense strand
gaacucccacuuacaagag

SEQ ID NO: 1060249 - RNA, 19 nt, Homo sapiens
  misc_RNA (1)...(19): siRNA sense strand
aaugagaaaccaaaucuug

SEQ ID NO: 1060250 - RNA, 19 nt, Homo sapiens
  misc_RNA (1)...(19): siRNA sense strand
gaaucuacuaacugugaua

SEQ ID NO: 1060251 - RNA, 19 nt, Homo sapiens
  misc_RNA (1)...(19): siRNA sense strand
uugacgagcuugccuuaga

SEQ ID NO: 1060252 - RNA, 19 nt, Homo sapiens
  misc_RNA (1)...(19): siRNA sense strand
uuauguggcucccaggauu

SEQ ID NO: 1060253 - RNA, 19 nt, Homo sapiens
  misc_RNA (1)...(19): siRNA sense strand
gcuuuggacucagaacuug

SEQ ID NO: 1060254 - RNA, 19 nt, Homo sapiens
  misc_RNA (1)...(19): siRNA sense strand
ggaggaugcggcuuugaug

SEQ ID NO: 1060255 - RNA, 19 nt, Homo sapiens
  misc_RNA (1)...(19): siRNA sense strand
ccagaagagccacaugcua

SEQ ID NO: 1060256 - RNA, 19 nt, Homo sapiens
  misc_RNA (1)...(19): siRNA sense strand
cuucagcgaucauucauac

SEQ ID NO: 1060257 - RNA, 19 nt, Homo sapiens
  misc_RNA (1)...(19): siRNA sense strand
uugcaucucauuacucaua

SEQ ID NO: 1060258 - RNA, 19 nt, Homo sapiens
  misc_RNA (1)...(19): siRNA sense strand
cccuauacauguagcauau

SEQ ID NO: 1060259 - RNA, 19 nt, Homo sapiens
  misc_RNA (1)...(19): siRNA sense strand
aaacuucagcgaucauuca

SEQ ID NO: 1060260 - RNA, 19 nt, Homo sapiens
  misc_RNA (1)...(19): siRNA sense strand
caucagaacauucauacag

SEQ ID NO: 1060261 - RNA, 19 nt, Homo sapiens
  misc_RNA (1)...(19): siRNA sense strand
gaggaaacauucguaucag

SEQ ID NO: 1060262 - RNA, 19 nt, Homo sapiens
  misc_RNA (1)...(19): siRNA sense strand
aggagaagcccuauacaug

SEQ ID NO: 1060263 - RNA, 19 nt, Homo sapiens
  misc_RNA (1)...(19): siRNA sense strand
ugaauagccacguaaagga

SEQ ID NO: 1060264 - RNA, 19 nt, Homo sapiens
  misc_RNA (1)...(19): siRNA sense strand
aauccauacuggugagaaa

SEQ ID NO: 1060265 - RNA, 19 nt, Homo sapiens
  misc_RNA (1)...(19): siRNA sense strand
acaugaccuuuccuuguuu

SEQ ID NO: 1060266 - RNA, 19 nt, Homo sapiens
  misc_RNA (1)...(19): siRNA sense strand
gagcuucaggcaguccuua

SEQ ID NO: 1060267 - RNA, 19 nt, Homo sapiens
  misc_RNA (1)...(19): siRNA sense strand
ggaucuggcuguguauuuu

SEQ ID NO: 1060268 - RNA, 19 nt, Homo sapiens
  misc_RNA (1)...(19): siRNA sense strand
caucuaucccgacacauga

SEQ ID NO: 1060269 - RNA, 19 nt, Homo sapiens
  misc_RNA (1)...(19): siRNA sense strand
gucaucagccuuuuaguua

SEQ ID NO: 1060270 - RNA, 19 nt, Homo sapiens
  misc_RNA (1)...(19): siRNA sense strand
gcuucaggcaguccuuaua

SEQ ID NO: 1060271 - RNA, 19 nt, Homo sapiens
  misc_RNA (1)...(19): siRNA sense strand
gcccagggaccaauacugu

SEQ ID NO: 1060272 - RNA, 19 nt, Homo sapiens
  misc_RNA (1)...(19): siRNA sense strand
cccaguaccagcacacuaa

SEQ ID NO: 1060273 - RNA, 19 nt, Homo sapiens
  misc_RNA (1)...(19): siRNA sense strand
uuaggaaccaacacacuuu

SEQ ID NO: 1060274 - RNA, 19 nt, Homo sapiens
  misc_RNA (1)...(19): siRNA sense strand
gaauauuuaggaaccaaca

SEQ ID NO: 1060275 - RNA, 19 nt, Homo sapiens
  misc_RNA (1)...(19): siRNA sense strand
cgaauuugcaucucauuac

SEQ ID NO: 1060276 - RNA, 19 nt, Homo sapiens
  misc_RNA (1)...(19): siRNA sense strand
ucgaauuugcaucucauua

SEQ ID NO: 1060277 - RNA, 19 nt, Homo sapiens
  misc_RNA (1)...(19): siRNA sense strand
ucucaucuaucccgacaca

SEQ ID NO: 1060278 - RNA, 19 nt, Homo sapiens
  misc_RNA (1)...(19): siRNA sense strand
ggaaccaacacacuuucug

SEQ ID NO: 1060279 - RNA, 19 nt, Homo sapiens
  misc_RNA (1)...(19): siRNA sense strand
gcggaaccuuuuaaaugua

SEQ ID NO: 1060280 - RNA, 19 nt, Homo sapiens
  misc_RNA (1)...(19): siRNA sense strand
gagaaaccaaaucuugcuu

SEQ ID NO: 1060281 - RNA, 19 nt, Homo sapiens
  misc_RNA (1)...(19): siRNA sense strand
gcauaugugguagagguuu

SEQ ID NO: 1060282 - RNA, 19 nt, Homo sapiens
  misc_RNA (1)...(19): siRNA sense strand
ccuugucccuuacccagaa

SEQ ID NO: 1060283 - RNA, 19 nt, Homo sapiens
  misc_RNA (1)...(19): siRNA sense strand
agaaaccaaaucuugcuuu

SEQ ID NO: 1060284 - RNA, 19 nt, Homo sapiens
  misc_RNA (1)...(19): siRNA sense strand
auacuggugagaaaccuua

SEQ ID NO: 1060285 - RNA, 19 nt, Homo sapiens
  misc_RNA (1)...(19): siRNA sense strand
uauggaacuugacgagcuu

SEQ ID NO: 1060286 - RNA, 19 nt, Homo sapiens
  misc_RNA (1)...(19): siRNA sense strand
acgaaucuacuaacuguga

SEQ ID NO: 1060287 - RNA, 19 nt, Homo sapiens
  misc_RNA (1)...(19): siRNA sense strand
gcccuauacauguagcaua

SEQ ID NO: 1060288 - RNA, 19 nt, Homo sapiens
  misc_RNA (1)...(19): siRNA sense strand
uguggugacuguggaaaga

SEQ ID NO: 1060289 - RNA, 19 nt, Homo sapiens
  misc_RNA (1)...(19): siRNA sense strand
gagcuugccuuagaaaagu

SEQ ID NO: 1060290 - RNA, 19 nt, Homo sapiens
  misc_RNA (1)...(19): siRNA sense strand
gauuggcacagcaucagaa

SEQ ID NO: 1060291 - RNA, 19 nt, Homo sapiens
  misc_RNA (1)...(19): siRNA sense strand
ccagcacucucaucuaucc

SEQ ID NO: 1060292 - RNA, 19 nt, Homo sapiens
  misc_RNA (1)...(19): siRNA sense strand
gaaaaccacaccccauuag

SEQ ID NO: 1060293 - RNA, 19 nt, Homo sapiens
  misc_RNA (1)...(19): siRNA sense strand
ccuuguuucucugagcuua

SEQ ID NO: 1060294 - RNA, 19 nt, Homo sapiens
  misc_RNA (1)...(19): siRNA sense strand
caauuucuucucauucuca

SEQ ID NO: 1060295 - RNA, 19 nt, Homo sapiens
  misc_RNA (1)...(19): siRNA sense strand
ccacgacgaggacucugaa

SEQ ID NO: 1060296 - RNA, 19 nt, Homo sapiens
  misc_RNA (1)...(19): siRNA sense strand
cuacuaacugugauaaaca

SEQ ID NO: 1060297 - RNA, 19 nt, Homo sapiens
  misc_RNA (1)...(19): siRNA sense strand
ucuacuaacugugauaaac

SEQ ID NO: 1060298 - RNA, 19 nt, Homo sapiens
  misc_RNA (1)...(19): siRNA sense strand
cuggugagaaaccuuauaa

SEQ ID NO: 1060299 - RNA, 19 nt, Homo sapiens
  misc_RNA (1)...(19): siRNA sense strand
caauacuguuugaggaucu

SEQ ID NO: 1060300 - RNA, 19 nt, Homo sapiens
  misc_RNA (1)...(19): siRNA sense strand
gacaaugaguugaguaaug

SEQ ID NO: 1060301 - RNA, 19 nt, Homo sapiens
  misc_RNA (1)...(19): siRNA sense strand
ggacugggcccaauuggau

SEQ ID NO: 1060302 - RNA, 19 nt, Homo sapiens
  misc_RNA (1)...(19): siRNA sense strand
cagacugaguaucguaaua

SEQ ID NO: 1060303 - RNA, 19 nt, Homo sapiens
  misc_RNA (1)...(19): siRNA sense strand
uggaggagguggagaaaga

SEQ ID NO: 1060304 - RNA, 19 nt, Homo sapiens
  misc_RNA (1)...(19): siRNA sense strand
gugagaaccucgacaacga

SEQ ID NO: 1060305 - RNA, 19 nt, Homo sapiens
  misc_RNA (1)...(19): siRNA sense strand
gagagugagccaccaguaa

SEQ ID NO: 1060306 - RNA, 19 nt, Homo sapiens
  misc_RNA (1)...(19): siRNA sense strand
gggcugaccuuccggaucu

SEQ ID NO: 1060307 - RNA, 19 nt, Homo sapiens
  misc_RNA (1)...(19): siRNA sense strand
ggagugaccugccucuacu

SEQ ID NO: 1060308 - RNA, 19 nt, Homo sapiens
  misc_RNA (1)...(19): siRNA sense strand
gcaaccacccugcgccuuu

SEQ ID NO: 1060309 - RNA, 19 nt, Homo sapiens
  misc_RNA (1)...(19): siRNA sense strand
acaaugaguugaguaaugu

SEQ ID NO: 1060310 - RNA, 19 nt, Homo sapiens
  misc_RNA (1)...(19): siRNA sense strand
ggacagcgaaagacuccua

SEQ ID NO: 1060311 - RNA, 19 nt, Homo sapiens
  misc_RNA (1)...(19): siRNA sense strand
ccucugagaucuuuaaacu

SEQ ID NO: 1060312 - RNA, 19 nt, Homo sapiens
  misc_RNA (1)...(19): siRNA sense strand
gaggugcucuacacaguca

SEQ ID NO: 1060313 - RNA, 19 nt, Homo sapiens
  misc_RNA (1)...(19): siRNA sense strand
gacaaggcccugcgcguuu

SEQ ID NO: 1060314 - RNA, 19 nt, Homo sapiens
  misc_RNA (1)...(19): siRNA sense strand
gcugucggcucggcaagua

SEQ ID NO: 1060315 - RNA, 19 nt, Homo sapiens
  misc_RNA (1)...(19): siRNA sense strand
ccacaaaaccaaacucuuu

SEQ ID NO: 1060316 - RNA, 19 nt, Homo sapiens
  misc_RNA (1)...(19): siRNA sense strand
gacaggagggugagaguga

SEQ ID NO: 1060317 - RNA, 19 nt, Homo sapiens
  misc_RNA (1)...(19): siRNA sense strand
caaccacccugcgccuuug

SEQ ID NO: 1060318 - RNA, 19 nt, Homo sapiens
  misc_RNA (1)...(19): siRNA sense strand
gaggagggacagcgaaaga

SEQ ID NO: 1060319 - RNA, 19 nt, Homo sapiens
  misc_RNA (1)...(19): siRNA sense strand
cguaauaagugugaguuuc

SEQ ID NO: 1060320 - RNA, 19 nt, Homo sapiens
  misc_RNA (1)...(19): siRNA sense strand
agacugaguaucguaauaa

SEQ ID NO: 1060321 - RNA, 19 nt, Homo sapiens
  misc_RNA (1)...(19): siRNA sense strand
guaauaagugugaguuucu

SEQ ID NO: 1060322 - RNA, 19 nt, Homo sapiens
  misc_RNA (1)...(19): siRNA sense strand
gaagguaaagagggucauu

SEQ ID NO: 1060323 - RNA, 19 nt, Homo sapiens
  misc_RNA (1)...(19): siRNA sense strand
guuuaccucugagaucuuu

SEQ ID NO: 1060324 - RNA, 19 nt, Homo sapiens
  misc_RNA (1)...(19): siRNA sense strand
gcauggugcccucuggaaa

SEQ ID NO: 1060325 - RNA, 19 nt, Homo sapiens
  misc_RNA (1)...(19): siRNA sense strand
gggcagccaugggcaacuu

SEQ ID NO: 1060326 - RNA, 19 nt, Homo sapiens
  misc_RNA (1)...(19): siRNA sense strand
ccauggccauugccuacuu

SEQ ID NO: 1060327 - RNA, 19 nt, Homo sapiens
  misc_RNA (1)...(19): siRNA sense strand
ugaacgcccaggacaauga

SEQ ID NO: 1060328 - RNA, 19 nt, Homo sapiens
  misc_RNA (1)...(19): siRNA sense strand
ccgaggugcucuacacagu

SEQ ID NO: 1060329 - RNA, 19 nt, Homo sapiens
  misc_RNA (1)...(19): siRNA sense strand
ggacaaugaguugaguaau

SEQ ID NO: 1060330 - RNA, 19 nt, Homo sapiens
  misc_RNA (1)...(19): siRNA sense strand
ggugaacgcccaggacaau

SEQ ID NO: 1060331 - RNA, 19 nt, Homo sapiens
  misc_RNA (1)...(19): siRNA sense strand
cagcagacugaguaucgua

SEQ ID NO: 1060332 - RNA, 19 nt, Homo sapiens
  misc_RNA (1)...(19): siRNA sense strand
gacugaguaucguaauaag

SEQ ID NO: 1060333 - RNA, 19 nt, Homo sapiens
  misc_RNA (1)...(19): siRNA sense strand
uaauaagugugaguuucug

SEQ ID NO: 1060334 - RNA, 19 nt, Homo sapiens
  misc_RNA (1)...(19): siRNA sense strand
ugagagugagccaccagua

SEQ ID NO: 1060335 - RNA, 19 nt, Homo sapiens
  misc_RNA (1)...(19): siRNA sense strand
cugaguaucguaauaagug

SEQ ID NO: 1060336 - RNA, 19 nt, Homo sapiens
  misc_RNA (1)...(19): siRNA sense strand
ugaguaucguaauaagugu

SEQ ID NO: 1060337 - RNA, 19 nt, Homo sapiens
  misc_RNA (1)...(19): siRNA sense strand
ucaggcggcugcuguacgu

SEQ ID NO: 1060338 - RNA, 19 nt, Homo sapiens
  misc_RNA (1)...(19): siRNA sense strand
uaagugugaguuucugguu

SEQ ID NO: 1060339 - RNA, 19 nt, Homo sapiens
  misc_RNA (1)...(19): siRNA sense strand
ccaggacaaugaguugagu

SEQ ID NO: 1060340 - RNA, 19 nt, Homo sapiens
  misc_RNA (1)...(19): siRNA sense strand
gugcuggcuugcauuccaa

SEQ ID NO: 1060341 - RNA, 19 nt, Homo sapiens
  misc_RNA (1)...(19): siRNA sense strand
gcagacugaguaucguaau

SEQ ID NO: 1060342 - RNA, 19 nt, Homo sapiens
  misc_RNA (1)...(19): siRNA sense strand
ugaccugccucuacuucgu

SEQ ID NO: 1060343 - RNA, 19 nt, Homo sapiens
  misc_RNA (1)...(19): siRNA sense strand
cagccgaggugcucuacac

SEQ ID NO: 1060344 - RNA, 19 nt, Homo sapiens
  misc_RNA (1)...(19): siRNA sense strand
uuaccucugagaucuuuaa

SEQ ID NO: 1060345 - RNA, 19 nt, Homo sapiens
  misc_RNA (1)...(19): siRNA sense strand
gagugagccaccaguaaca

SEQ ID NO: 1060346 - RNA, 19 nt, Homo sapiens
  misc_RNA (1)...(19): siRNA sense strand
ggagggacagcgaaagacu

SEQ ID NO: 1060347 - RNA, 19 nt, Homo sapiens
  misc_RNA (1)...(19): siRNA sense strand
gcagccaugggcaacuuug

SEQ ID NO: 1060348 - RNA, 19 nt, Homo sapiens
  misc_RNA (1)...(19): siRNA sense strand
gauaacacccuacaagaaa

SEQ ID NO: 1060349 - RNA, 19 nt, Homo sapiens
  misc_RNA (1)...(19): siRNA sense strand
gacaaugaguugaguaaug

SEQ ID NO: 1060350 - RNA, 19 nt, Homo sapiens
  misc_RNA (1)...(19): siRNA sense strand
ggacugggcccaauuggau

SEQ ID NO: 1060351 - RNA, 19 nt, Homo sapiens
  misc_RNA (1)...(19): siRNA sense strand
cagacugaguaucguaaua

SEQ ID NO: 1060352 - RNA, 19 nt, Homo sapiens
  misc_RNA (1)...(19): siRNA sense strand
uggaggagguggagaaaga

SEQ ID NO: 1060353 - RNA, 19 nt, Homo sapiens
  misc_RNA (1)...(19): siRNA sense strand
gugagaaccucgacaacga

SEQ ID NO: 1060354 - RNA, 19 nt, Homo sapiens
  misc_RNA (1)...(19): siRNA sense strand
gagagugagccaccaguaa

SEQ ID NO: 1060355 - RNA, 19 nt, Homo sapiens
  misc_RNA (1)...(19): siRNA sense strand
ccacagcccuccagcucaa

SEQ ID NO: 1060356 - RNA, 19 nt, Homo sapiens
  misc_RNA (1)...(19): siRNA sense strand
gggcugaccuuccggaucu

SEQ ID NO: 1060357 - RNA, 19 nt, Homo sapiens
  misc_RNA (1)...(19): siRNA sense strand
ggagugaccugccucuacu

SEQ ID NO: 1060358 - RNA, 19 nt, Homo sapiens
  misc_RNA (1)...(19): siRNA sense strand
gcaaccacccugcgccuuu

SEQ ID NO: 1060359 - RNA, 19 nt, Homo sapiens
  misc_RNA (1)...(19): siRNA sense strand
acaaugaguugaguaaugu

SEQ ID NO: 1060360 - RNA, 19 nt, Homo sapiens
  misc_RNA (1)...(19): siRNA sense strand
ggacagcgaaagacuccua

SEQ ID NO: 1060361 - RNA, 19 nt, Homo sapiens
  misc_RNA (1)...(19): siRNA sense strand
ccucugagaucuuuaaacu

SEQ ID NO: 1060362 - RNA, 19 nt, Homo sapiens
  misc_RNA (1)...(19): siRNA sense strand
gaggugcucuacacaguca

SEQ ID NO: 1060363 - RNA, 19 nt, Homo sapiens
  misc_RNA (1)...(19): siRNA sense strand
gacaaggcccugcgcguuu

SEQ ID NO: 1060364 - RNA, 19 nt, Homo sapiens
  misc_RNA (1)...(19): siRNA sense strand
gcugucggcucggcaagua

SEQ ID NO: 1060365 - RNA, 19 nt, Homo sapiens
  misc_RNA (1)...(19): siRNA sense strand
ccacaaaaccaaacucuuu

SEQ ID NO: 1060366 - RNA, 19 nt, Homo sapiens
  misc_RNA (1)...(19): siRNA sense strand
gacaggagggugagaguga

SEQ ID NO: 1060367 - RNA, 19 nt, Homo sapiens
  misc_RNA (1)...(19): siRNA sense strand
caaccacccugcgccuuug

SEQ ID NO: 1060368 - RNA, 19 nt, Homo sapiens
  misc_RNA (1)...(19): siRNA sense strand
gaggagggacagcgaaaga

SEQ ID NO: 1060369 - RNA, 19 nt, Homo sapiens
  misc_RNA (1)...(19): siRNA sense strand
cguaauaagugugaguuuc

SEQ ID NO: 1060370 - RNA, 19 nt, Homo sapiens
  misc_RNA (1)...(19): siRNA sense strand
cagauaacacccuacaaga

SEQ ID NO: 1060371 - RNA, 19 nt, Homo sapiens
  misc_RNA (1)...(19): siRNA sense strand
agacugaguaucguaauaa

SEQ ID NO: 1060372 - RNA, 19 nt, Homo sapiens
  misc_RNA (1)...(19): siRNA sense strand
guaauaagugugaguuucu

SEQ ID NO: 1060373 - RNA, 19 nt, Homo sapiens
  misc_RNA (1)...(19): siRNA sense strand
ccagauaacacccuacaag

SEQ ID NO: 1060374 - RNA, 19 nt, Homo sapiens
  misc_RNA (1)...(19): siRNA sense strand
gaagguaaagagggucauu

SEQ ID NO: 1060375 - RNA, 19 nt, Homo sapiens
  misc_RNA (1)...(19): siRNA sense strand
guuuaccucugagaucuuu

SEQ ID NO: 1060376 - RNA, 19 nt, Homo sapiens
  misc_RNA (1)...(19): siRNA sense strand
agauaacacccuacaagaa

SEQ ID NO: 1060377 - RNA, 19 nt, Homo sapiens
  misc_RNA (1)...(19): siRNA sense strand
gcauggugcccucuggaaa

SEQ ID NO: 1060378 - RNA, 19 nt, Homo sapiens
  misc_RNA (1)...(19): siRNA sense strand
gggcagccaugggcaacuu

SEQ ID NO: 1060379 - RNA, 19 nt, Homo sapiens
  misc_RNA (1)...(19): siRNA sense strand
ccauggccauugccuacuu

SEQ ID NO: 1060380 - RNA, 19 nt, Homo sapiens
  misc_RNA (1)...(19): siRNA sense strand
ugaacgcccaggacaauga

SEQ ID NO: 1060381 - RNA, 19 nt, Homo sapiens
  misc_RNA (1)...(19): siRNA sense strand
ccgaggugcucuacacagu

SEQ ID NO: 1060382 - RNA, 19 nt, Homo sapiens
  misc_RNA (1)...(19): siRNA sense strand
ggacaaugaguugaguaau

SEQ ID NO: 1060383 - RNA, 19 nt, Homo sapiens
  misc_RNA (1)...(19): siRNA sense strand
ggugaacgcccaggacaau

SEQ ID NO: 1060384 - RNA, 19 nt, Homo sapiens
  misc_RNA (1)...(19): siRNA sense strand
cagcagacugaguaucgua

SEQ ID NO: 1060385 - RNA, 19 nt, Homo sapiens
  misc_RNA (1)...(19): siRNA sense strand
gacugaguaucguaauaag

SEQ ID NO: 1060386 - RNA, 19 nt, Homo sapiens
  misc_RNA (1)...(19): siRNA sense strand
uaauaagugugaguuucug

SEQ ID NO: 1060387 - RNA, 19 nt, Homo sapiens
  misc_RNA (1)...(19): siRNA sense strand
ugagagugagccaccagua

SEQ ID NO: 1060388 - RNA, 19 nt, Homo sapiens
  misc_RNA (1)...(19): siRNA sense strand
cugaguaucguaauaagug

SEQ ID NO: 1060389 - RNA, 19 nt, Homo sapiens
  misc_RNA (1)...(19): siRNA sense strand
ugaguaucguaauaagugu

SEQ ID NO: 1060390 - RNA, 19 nt, Homo sapiens
  misc_RNA (1)...(19): siRNA sense strand
ucaggcggcugcuguacgu

SEQ ID NO: 1060391 - RNA, 19 nt, Homo sapiens
  misc_RNA (1)...(19): siRNA sense strand
uaagugugaguuucugguu

SEQ ID NO: 1060392 - RNA, 19 nt, Homo sapiens
  misc_RNA (1)...(19): siRNA sense strand
ccaggacaaugaguugagu

SEQ ID NO: 1060393 - RNA, 19 nt, Homo sapiens
  misc_RNA (1)...(19): siRNA sense strand
gugcuggcuugcauuccaa

SEQ ID NO: 1060394 - RNA, 19 nt, Homo sapiens
  misc_RNA (1)...(19): siRNA sense strand
gcagacugaguaucguaau

SEQ ID NO: 1060395 - RNA, 19 nt, Homo sapiens
  misc_RNA (1)...(19): siRNA sense strand
ugaccugccucuacuucgu

SEQ ID NO: 1060396 - RNA, 19 nt, Homo sapiens
  misc_RNA (1)...(19): siRNA sense strand
uuaccucugagaucuuuaa

SEQ ID NO: 1060397 - RNA, 19 nt, Homo sapiens
  misc_RNA (1)...(19): siRNA sense strand
cagccgaggugcucuacac

SEQ ID NO: 1060398 - RNA, 19 nt, Homo sapiens
  misc_RNA (1)...(19): siRNA sense strand
gagugagccaccaguaaca

SEQ ID NO: 1060399 - RNA, 19 nt, Homo sapiens
  misc_RNA (1)...(19): siRNA sense strand
ggagggacagcgaaagacu

SEQ ID NO: 1060400 - RNA, 19 nt, Homo sapiens
  misc_RNA (1)...(19): siRNA sense strand
gcagccaugggcaacuuug

SEQ ID NO: 1060401 - RNA, 19 nt, Homo sapiens
  misc_RNA (1)...(19): siRNA sense strand
ggaagaggcuauucagauu

SEQ ID NO: 1060402 - RNA, 19 nt, Homo sapiens
  misc_RNA (1)...(19): siRNA sense strand
uagaagaacuggaugaauu

SEQ ID NO: 1060403 - RNA, 19 nt, Homo sapiens
  misc_RNA (1)...(19): siRNA sense strand
gaaagaacuugaacuuagu

SEQ ID NO: 1060404 - RNA, 19 nt, Homo sapiens
  misc_RNA (1)...(19): siRNA sense strand
gaacuugaacuuaguguga

SEQ ID NO: 1060405 - RNA, 19 nt, Homo sapiens
  misc_RNA (1)...(19): siRNA sense strand
ccaaagauguuaacugcaa

SEQ ID NO: 1060406 - RNA, 19 nt, Homo sapiens
  misc_RNA (1)...(19): siRNA sense strand
gaagaggcuauucagauua

SEQ ID NO: 1060407 - RNA, 19 nt, Homo sapiens
  misc_RNA (1)...(19): siRNA sense strand
agaaagaacuugaacuuag

SEQ ID NO: 1060408 - RNA, 19 nt, Homo sapiens
  misc_RNA (1)...(19): siRNA sense strand
caaaugcuucuguuucuua

SEQ ID NO: 1060409 - RNA, 19 nt, Homo sapiens
  misc_RNA (1)...(19): siRNA sense strand
gaagaagacuagagaucug

SEQ ID NO: 1060410 - RNA, 19 nt, Homo sapiens
  misc_RNA (1)...(19): siRNA sense strand
gaacuuagugugaagaaga

SEQ ID NO: 1060411 - RNA, 19 nt, Homo sapiens
  misc_RNA (1)...(19): siRNA sense strand
caaagaaagacacuuguuu

SEQ ID NO: 1060412 - RNA, 19 nt, Homo sapiens
  misc_RNA (1)...(19): siRNA sense strand
caaguagucaggagaauaa

SEQ ID NO: 1060413 - RNA, 19 nt, Homo sapiens
  misc_RNA (1)...(19): siRNA sense strand
gaagguuuaucgucuugaa

SEQ ID NO: 1060414 - RNA, 19 nt, Homo sapiens
  misc_RNA (1)...(19): siRNA sense strand
uggcuuaucugcauucaaa

SEQ ID NO: 1060415 - RNA, 19 nt, Homo sapiens
  misc_RNA (1)...(19): siRNA sense strand
gagacuauguggaucauuc

SEQ ID NO: 1060416 - RNA, 19 nt, Homo sapiens
  misc_RNA (1)...(19): siRNA sense strand
caacauaugaucaccagaa

SEQ ID NO: 1060417 - RNA, 19 nt, Homo sapiens
  misc_RNA (1)...(19): siRNA sense strand
gcagcaaaccuccuucuga

SEQ ID NO: 1060418 - RNA, 19 nt, Homo sapiens
  misc_RNA (1)...(19): siRNA sense strand
ggacaaacuaguaucuauu

SEQ ID NO: 1060419 - RNA, 19 nt, Homo sapiens
  misc_RNA (1)...(19): siRNA sense strand
ccacaucauugucaaguuc

SEQ ID NO: 1060420 - RNA, 19 nt, Homo sapiens
  misc_RNA (1)...(19): siRNA sense strand
ggaaagacuggauaacaga

SEQ ID NO: 1060421 - RNA, 19 nt, Homo sapiens
  misc_RNA (1)...(19): siRNA sense strand
auacaaggcuguuuaaggu

SEQ ID NO: 1060422 - RNA, 19 nt, Homo sapiens
  misc_RNA (1)...(19): siRNA sense strand
gauaacagauugggauuuu

SEQ ID NO: 1060423 - RNA, 19 nt, Homo sapiens
  misc_RNA (1)...(19): siRNA sense strand
gcaaaugcuucuguuucuu

SEQ ID NO: 1060424 - RNA, 19 nt, Homo sapiens
  misc_RNA (1)...(19): siRNA sense strand
cagaaagaacuugaacuua

SEQ ID NO: 1060425 - RNA, 19 nt, Homo sapiens
  misc_RNA (1)...(19): siRNA sense strand
caaagauguuaacugcaaa

SEQ ID NO: 1060426 - RNA, 19 nt, Homo sapiens
  misc_RNA (1)...(19): siRNA sense strand
gugaagagauugccaaagc

SEQ ID NO: 1060427 - RNA, 19 nt, Homo sapiens
  misc_RNA (1)...(19): siRNA sense strand
ggucaaagaaagacacuug

SEQ ID NO: 1060428 - RNA, 19 nt, Homo sapiens
  misc_RNA (1)...(19): siRNA sense strand
ugaauugccuccauugucu

SEQ ID NO: 1060429 - RNA, 19 nt, Homo sapiens
  misc_RNA (1)...(19): siRNA sense strand
uuaaagauguggguauaga

SEQ ID NO: 1060430 - RNA, 19 nt, Homo sapiens
  misc_RNA (1)...(19): siRNA sense strand
ugaaugaacagucacagaa

SEQ ID NO: 1060431 - RNA, 19 nt, Homo sapiens
  misc_RNA (1)...(19): siRNA sense strand
ccagaugguuuaacucagu

SEQ ID NO: 1060432 - RNA, 19 nt, Homo sapiens
  misc_RNA (1)...(19): siRNA sense strand
cagauacccagaugguuua

SEQ ID NO: 1060433 - RNA, 19 nt, Homo sapiens
  misc_RNA (1)...(19): siRNA sense strand
gauauccucugacaauugc

SEQ ID NO: 1060434 - RNA, 19 nt, Homo sapiens
  misc_RNA (1)...(19): siRNA sense strand
ucagaaagaacuugaacuu

SEQ ID NO: 1060435 - RNA, 19 nt, Homo sapiens
  misc_RNA (1)...(19): siRNA sense strand
uugcacagauggucagaaa

SEQ ID NO: 1060436 - RNA, 19 nt, Homo sapiens
  misc_RNA (1)...(19): siRNA sense strand
gacaaacuaguaucuauuc

SEQ ID NO: 1060437 - RNA, 19 nt, Homo sapiens
  misc_RNA (1)...(19): siRNA sense strand
aaaccuaacuacaucucuu

SEQ ID NO: 1060438 - RNA, 19 nt, Homo sapiens
  misc_RNA (1)...(19): siRNA sense strand
caaguucccacagguauuu

SEQ ID NO: 1060439 - RNA, 19 nt, Homo sapiens
  misc_RNA (1)...(19): siRNA sense strand
uuaccgagacguuugauuu

SEQ ID NO: 1060440 - RNA, 19 nt, Homo sapiens
  misc_RNA (1)...(19): siRNA sense strand
caacagauacccagauggu

SEQ ID NO: 1060441 - RNA, 19 nt, Homo sapiens
  misc_RNA (1)...(19): siRNA sense strand
uaguaucuauuccugauga

SEQ ID NO: 1060442 - RNA, 19 nt, Homo sapiens
  misc_RNA (1)...(19): siRNA sense strand
gcagccaauuucagaggaa

SEQ ID NO: 1060443 - RNA, 19 nt, Homo sapiens
  misc_RNA (1)...(19): siRNA sense strand
cuaacuacaucucuuugga

SEQ ID NO: 1060444 - RNA, 19 nt, Homo sapiens
  misc_RNA (1)...(19): siRNA sense strand
acagauacccagaugguuu

SEQ ID NO: 1060445 - RNA, 19 nt, Homo sapiens
  misc_RNA (1)...(19): siRNA sense strand
auucugagcuguuucuaga

SEQ ID NO: 1060446 - RNA, 19 nt, Homo sapiens
  misc_RNA (1)...(19): siRNA sense strand
uggacaaacuaguaucuau

SEQ ID NO: 1060447 - RNA, 19 nt, Homo sapiens
  misc_RNA (1)...(19): siRNA sense strand
aagcagauguugcacagau

SEQ ID NO: 1060448 - RNA, 19 nt, Homo sapiens
  misc_RNA (1)...(19): siRNA sense strand
cugagacucugcagaaguu

SEQ ID NO: 1060449 - RNA, 19 nt, Homo sapiens
  misc_RNA (1)...(19): siRNA sense strand
aagaggcuauucagauuau

SEQ ID NO: 1060450 - RNA, 19 nt, Homo sapiens
  misc_RNA (1)...(19): siRNA sense strand
gaagacuagagaucuggua

SEQ ID NO: 1060451 - RNA, 19 nt, Homo sapiens
  misc_RNA (1)...(19): siRNA sense strand
cagaaucccaaagauguua

SEQ ID NO: 1060452 - RNA, 19 nt, Homo sapiens
  misc_RNA (1)...(19): siRNA sense strand
gccaccagcuucauucaca

SEQ ID NO: 1060453 - RNA, 19 nt, Homo sapiens
  misc_RNA (1)...(19): siRNA sense strand
ucacagaagacacaaaaua

SEQ ID NO: 1060454 - RNA, 19 nt, Homo sapiens
  misc_RNA (1)...(19): siRNA sense strand
caaugcagccaauuucaga

SEQ ID NO: 1060455 - RNA, 19 nt, Homo sapiens
  misc_RNA (1)...(19): siRNA sense strand
aaugaacagucacagaaga

SEQ ID NO: 1060456 - RNA, 19 nt, Homo sapiens
  misc_RNA (1)...(19): siRNA sense strand
acacuuguuucuuaccuau

SEQ ID NO: 1060457 - RNA, 19 nt, Homo sapiens
  misc_RNA (1)...(19): siRNA sense strand
ucaaguagucaggagaaua

SEQ ID NO: 1060458 - RNA, 19 nt, Homo sapiens
  misc_RNA (1)...(19): siRNA sense strand
gaagagauugccaaagcau

SEQ ID NO: 1060459 - RNA, 19 nt, Homo sapiens
  misc_RNA (1)...(19): siRNA sense strand
gacacuuguuucuuaccua

SEQ ID NO: 1060460 - RNA, 19 nt, Homo sapiens
  misc_RNA (1)...(19): siRNA sense strand
caggguggcuuaucugcau

SEQ ID NO: 1060461 - RNA, 19 nt, Homo sapiens
  misc_RNA (1)...(19): siRNA sense strand
ucaaagaaagacacuuguu

SEQ ID NO: 1060462 - RNA, 19 nt, Homo sapiens
  misc_RNA (1)...(19): siRNA sense strand
ucaccagaaucccaaagau

SEQ ID NO: 1060463 - RNA, 19 nt, Homo sapiens
  misc_RNA (1)...(19): siRNA sense strand
ggauaacagauugggauuu

SEQ ID NO: 1060464 - RNA, 19 nt, Homo sapiens
  misc_RNA (1)...(19): siRNA sense strand
gaaagacuggauaacagau

SEQ ID NO: 1060465 - RNA, 19 nt, Homo sapiens
  misc_RNA (1)...(19): siRNA sense strand
gaaugaacagucacagaag

SEQ ID NO: 1060466 - RNA, 19 nt, Homo sapiens
  misc_RNA (1)...(19): siRNA sense strand
ugaagaccaggguggcuua

SEQ ID NO: 1060467 - RNA, 19 nt, Homo sapiens
  misc_RNA (1)...(19): siRNA sense strand
uauagaggauaaccaacug

SEQ ID NO: 1060468 - RNA, 19 nt, Homo sapiens
  misc_RNA (1)...(19): siRNA sense strand
agaagaacuggaugaauug

SEQ ID NO: 1060469 - RNA, 19 nt, Homo sapiens
  misc_RNA (1)...(19): siRNA sense strand
uggaaagacuggauaacag

SEQ ID NO: 1060470 - RNA, 19 nt, Homo sapiens
  misc_RNA (1)...(19): siRNA sense strand
gaggaagaggcuauucaga

SEQ ID NO: 1060471 - RNA, 19 nt, Homo sapiens
  misc_RNA (1)...(19): siRNA sense strand
caucaguacaggacuuuga

SEQ ID NO: 1060472 - RNA, 19 nt, Homo sapiens
  misc_RNA (1)...(19): siRNA sense strand
ugaagagauugccaaagca

SEQ ID NO: 1060473 - RNA, 19 nt, Homo sapiens
  misc_RNA (1)...(19): siRNA sense strand
gcucaaguagucaggagaa

SEQ ID NO: 1060474 - RNA, 19 nt, Homo sapiens
  misc_RNA (1)...(19): siRNA sense strand
gcacaacucacaaaacguu

SEQ ID NO: 1060475 - RNA, 19 nt, Homo sapiens
  misc_RNA (1)...(19): siRNA sense strand
ggaagagcacaguaugauc

SEQ ID NO: 1060476 - RNA, 19 nt, Homo sapiens
  misc_RNA (1)...(19): siRNA sense strand
ccaaggcugcuaacuggaa

SEQ ID NO: 1060477 - RNA, 19 nt, Homo sapiens
  misc_RNA (1)...(19): siRNA sense strand
aagacuggauaacagauug

SEQ ID NO: 1060478 - RNA, 19 nt, Homo sapiens
  misc_RNA (1)...(19): siRNA sense strand
uauccagcuuugauucuga

SEQ ID NO: 1060479 - RNA, 19 nt, Homo sapiens
  misc_RNA (1)...(19): siRNA sense strand
uaugaagguuuaucgucuu

SEQ ID NO: 1060480 - RNA, 19 nt, Homo sapiens
  misc_RNA (1)...(19): siRNA sense strand
ggauuuguccaagauagaa

SEQ ID NO: 1060481 - RNA, 19 nt, Homo sapiens
  misc_RNA (1)...(19): siRNA sense strand
gaggcuauucagauuauug

SEQ ID NO: 1060482 - RNA, 19 nt, Homo sapiens
  misc_RNA (1)...(19): siRNA sense strand
ggaugaauugccuccauug

SEQ ID NO: 1060483 - RNA, 19 nt, Homo sapiens
  misc_RNA (1)...(19): siRNA sense strand
agaccaggguggcuuaucu

SEQ ID NO: 1060484 - RNA, 19 nt, Homo sapiens
  misc_RNA (1)...(19): siRNA sense strand
cauuaaugcugcacaacuc

SEQ ID NO: 1060485 - RNA, 19 nt, Homo sapiens
  misc_RNA (1)...(19): siRNA sense strand
uuugucagcccaacagaua

SEQ ID NO: 1060486 - RNA, 19 nt, Homo sapiens
  misc_RNA (1)...(19): siRNA sense strand
ggguauagaggauaaccaa

SEQ ID NO: 1060487 - RNA, 19 nt, Homo sapiens
  misc_RNA (1)...(19): siRNA sense strand
cccaacagauacccagaug

SEQ ID NO: 1060488 - RNA, 19 nt, Homo sapiens
  misc_RNA (1)...(19): siRNA sense strand
ccucauuaaugcugcacaa

SEQ ID NO: 1060489 - RNA, 19 nt, Homo sapiens
  misc_RNA (1)...(19): siRNA sense strand
uguuuaaggucaaagaaag

SEQ ID NO: 1060490 - RNA, 19 nt, Homo sapiens
  misc_RNA (1)...(19): siRNA sense strand
gaugaauugccuccauugu

SEQ ID NO: 1060491 - RNA, 19 nt, Homo sapiens
  misc_RNA (1)...(19): siRNA sense strand
ugaagaagacuagagaucu

SEQ ID NO: 1060492 - RNA, 19 nt, Homo sapiens
  misc_RNA (1)...(19): siRNA sense strand
guggaaagacuggauaaca

SEQ ID NO: 1060493 - RNA, 19 nt, Homo sapiens
  misc_RNA (1)...(19): siRNA sense strand
ggucagaaaagcaccauuu

SEQ ID NO: 1060494 - RNA, 19 nt, Homo sapiens
  misc_RNA (1)...(19): siRNA sense strand
ugggagcauuccugacaaa

SEQ ID NO: 1060495 - RNA, 19 nt, Homo sapiens
  misc_RNA (1)...(19): siRNA sense strand
guauagaggauaaccaacu

SEQ ID NO: 1060496 - RNA, 19 nt, Homo sapiens
  misc_RNA (1)...(19): siRNA sense strand
acuaguaucuauuccugau

SEQ ID NO: 1060497 - RNA, 19 nt, Homo sapiens
  misc_RNA (1)...(19): siRNA sense strand
ccagaaucccaaagauguu

SEQ ID NO: 1060498 - RNA, 19 nt, Homo sapiens
  misc_RNA (1)...(19): siRNA sense strand
gguuuaucgucuugaacuu

SEQ ID NO: 1060499 - RNA, 19 nt, Homo sapiens
  misc_RNA (1)...(19): siRNA sense strand
gugaagaagacuagagauc

SEQ ID NO: 1060500 - RNA, 19 nt, Homo sapiens
  misc_RNA (1)...(19): siRNA sense strand
gcacagauggucagaaaag

SEQ ID NO: 1060501 - RNA, 19 nt, Homo sapiens
  misc_RNA (1)...(19): siRNA sense strand
gaacauaacaguccaggaa

SEQ ID NO: 1060502 - RNA, 19 nt, Homo sapiens
  misc_RNA (1)...(19): siRNA sense strand
ggaaagcguuauaauguug

SEQ ID NO: 1060503 - RNA, 19 nt, Homo sapiens
  misc_RNA (1)...(19): siRNA sense strand
gcaaauugauuccuguuau

SEQ ID NO: 1060504 - RNA, 19 nt, Homo sapiens
  misc_RNA (1)...(19): siRNA sense strand
gacaugcacuaguggauua

SEQ ID NO: 1060505 - RNA, 19 nt, Homo sapiens
  misc_RNA (1)...(19): siRNA sense strand
gaucucaaguucaacaauu

SEQ ID NO: 1060506 - RNA, 19 nt, Homo sapiens
  misc_RNA (1)...(19): siRNA sense strand
gcacaacugcaccaaauuu

SEQ ID NO: 1060507 - RNA, 19 nt, Homo sapiens
  misc_RNA (1)...(19): siRNA sense strand
uguauggucugguuuguua

SEQ ID NO: 1060508 - RNA, 19 nt, Homo sapiens
  misc_RNA (1)...(19): siRNA sense strand
gcaugaaucucagcaaguu

SEQ ID NO: 1060509 - RNA, 19 nt, Homo sapiens
  misc_RNA (1)...(19): siRNA sense strand
caauggaucucaaguucaa

SEQ ID NO: 1060510 - RNA, 19 nt, Homo sapiens
  misc_RNA (1)...(19): siRNA sense strand
gaaaugguauuguauucgu

SEQ ID NO: 1060511 - RNA, 19 nt, Homo sapiens
  misc_RNA (1)...(19): siRNA sense strand
caaauugauuccuguuaug

SEQ ID NO: 1060512 - RNA, 19 nt, Homo sapiens
  misc_RNA (1)...(19): siRNA sense strand
ggauugacaugcacuagug

SEQ ID NO: 1060513 - RNA, 19 nt, Homo sapiens
  misc_RNA (1)...(19): siRNA sense strand
cagcacaacugcaccaaau

SEQ ID NO: 1060514 - RNA, 19 nt, Homo sapiens
  misc_RNA (1)...(19): siRNA sense strand
caaacaaugucaccacaca

SEQ ID NO: 1060515 - RNA, 19 nt, Homo sapiens
  misc_RNA (1)...(19): siRNA sense strand
caaggaaagcguuauaaug

SEQ ID NO: 1060516 - RNA, 19 nt, Homo sapiens
  misc_RNA (1)...(19): siRNA sense strand
guuauaauguugcagaugu

SEQ ID NO: 1060517 - RNA, 19 nt, Homo sapiens
  misc_RNA (1)...(19): siRNA sense strand
agagaaagcuaugaaacuu

SEQ ID NO: 1060518 - RNA, 19 nt, Homo sapiens
  misc_RNA (1)...(19): siRNA sense strand
gaauuacccuacccaaguc

SEQ ID NO: 1060519 - RNA, 19 nt, Homo sapiens
  misc_RNA (1)...(19): siRNA sense strand
guacuuggcaugaaucuca

SEQ ID NO: 1060520 - RNA, 19 nt, Homo sapiens
  misc_RNA (1)...(19): siRNA sense strand
ggaggagaauaccaggaaa

SEQ ID NO: 1060521 - RNA, 19 nt, Homo sapiens
  misc_RNA (1)...(19): siRNA sense strand
cuaauagaacuucagcuua

SEQ ID NO: 1060522 - RNA, 19 nt, Homo sapiens
  misc_RNA (1)...(19): siRNA sense strand
gcagaugccgucauuggaa

SEQ ID NO: 1060523 - RNA, 19 nt, Homo sapiens
  misc_RNA (1)...(19): siRNA sense strand
ggauuaggcccugcaguaa

SEQ ID NO: 1060524 - RNA, 19 nt, Homo sapiens
  misc_RNA (1)...(19): siRNA sense strand
gauaaacaaaucaguggaa

SEQ ID NO: 1060525 - RNA, 19 nt, Homo sapiens
  misc_RNA (1)...(19): siRNA sense strand
uaacaauggaucucaaguu

SEQ ID NO: 1060526 - RNA, 19 nt, Homo sapiens
  misc_RNA (1)...(19): siRNA sense strand
aaggaaagcguuauaaugu

SEQ ID NO: 1060527 - RNA, 19 nt, Homo sapiens
  misc_RNA (1)...(19): siRNA sense strand
ccauuguacuuucguuuau

SEQ ID NO: 1060528 - RNA, 19 nt, Homo sapiens
  misc_RNA (1)...(19): siRNA sense strand
agaugugucugcugccaua

SEQ ID NO: 1060529 - RNA, 19 nt, Homo sapiens
  misc_RNA (1)...(19): siRNA sense strand
cagaugccgucauuggaaa

SEQ ID NO: 1060530 - RNA, 19 nt, Homo sapiens
  misc_RNA (1)...(19): siRNA sense strand
uaugagccuuggccugaua

SEQ ID NO: 1060531 - RNA, 19 nt, Homo sapiens
  misc_RNA (1)...(19): siRNA sense strand
aacaauggaucucaaguuc

SEQ ID NO: 1060532 - RNA, 19 nt, Homo sapiens
  misc_RNA (1)...(19): siRNA sense strand
gaagcaagaaagucaagga

SEQ ID NO: 1060533 - RNA, 19 nt, Homo sapiens
  misc_RNA (1)...(19): siRNA sense strand
gguauuguauucguauuca

SEQ ID NO: 1060534 - RNA, 19 nt, Homo sapiens
  misc_RNA (1)...(19): siRNA sense strand
caacugcaccaaauuucaa

SEQ ID NO: 1060535 - RNA, 19 nt, Homo sapiens
  misc_RNA (1)...(19): siRNA sense strand
ccacacaucaagucaguug

SEQ ID NO: 1060536 - RNA, 19 nt, Homo sapiens
  misc_RNA (1)...(19): siRNA sense strand
ugaauuacccuacccaagu

SEQ ID NO: 1060537 - RNA, 19 nt, Homo sapiens
  misc_RNA (1)...(19): siRNA sense strand
uggaaauguucaagagaaa

SEQ ID NO: 1060538 - RNA, 19 nt, Homo sapiens
  misc_RNA (1)...(19): siRNA sense strand
gcaguaacauuuugugcaa

SEQ ID NO: 1060539 - RNA, 19 nt, Homo sapiens
  misc_RNA (1)...(19): siRNA sense strand
ugacggguguggugcuuau

SEQ ID NO: 1060540 - RNA, 19 nt, Homo sapiens
  misc_RNA (1)...(19): siRNA sense strand
aggaaagcguuauaauguu

SEQ ID NO: 1060541 - RNA, 19 nt, Homo sapiens
  misc_RNA (1)...(19): siRNA sense strand
caaaucaguggaagcaaga

SEQ ID NO: 1060542 - RNA, 19 nt, Homo sapiens
  misc_RNA (1)...(19): siRNA sense strand
caaaagacauacagaacau

SEQ ID NO: 1060543 - RNA, 19 nt, Homo sapiens
  misc_RNA (1)...(19): siRNA sense strand
cauaaugcuucuaauucug

SEQ ID NO: 1060544 - RNA, 19 nt, Homo sapiens
  misc_RNA (1)...(19): siRNA sense strand
uuggaaauguucaagagaa

SEQ ID NO: 1060545 - RNA, 19 nt, Homo sapiens
  misc_RNA (1)...(19): siRNA sense strand
caagugcugcaaauugauu

SEQ ID NO: 1060546 - RNA, 19 nt, Homo sapiens
  misc_RNA (1)...(19): siRNA sense strand
agacuaccaucacuguaug

SEQ ID NO: 1060547 - RNA, 19 nt, Homo sapiens
  misc_RNA (1)...(19): siRNA sense strand
caguauguauggucugguu

SEQ ID NO: 1060548 - RNA, 19 nt, Homo sapiens
  misc_RNA (1)...(19): siRNA sense strand
uuuggaaucuccuuuguuc

SEQ ID NO: 1060549 - RNA, 19 nt, Homo sapiens
  misc_RNA (1)...(19): siRNA sense strand
uggauuaggcccugcagua

SEQ ID NO: 1060550 - RNA, 19 nt, Homo sapiens
  misc_RNA (1)...(19): siRNA sense strand
uccuguggcugguaccuua

SEQ ID NO: 1060551 - RNA, 19 nt, Homo sapiens
  misc_RNA (1)...(19): siRNA sense strand
cuugguauauuucucaaug

SEQ ID NO: 1060552 - RNA, 19 nt, Homo sapiens
  misc_RNA (1)...(19): siRNA sense strand
guucggaccuaugguuaug

SEQ ID NO: 1060553 - RNA, 19 nt, Homo sapiens
  misc_RNA (1)...(19): siRNA sense strand
gagaaagcuaugaaacuuc

SEQ ID NO: 1060554 - RNA, 19 nt, Homo sapiens
  misc_RNA (1)...(19): siRNA sense strand
cauauguguugcuggaguu

SEQ ID NO: 1060555 - RNA, 19 nt, Homo sapiens
  misc_RNA (1)...(19): siRNA sense strand
ucucaauguuuacagcaaa

SEQ ID NO: 1060556 - RNA, 19 nt, Homo sapiens
  misc_RNA (1)...(19): siRNA sense strand
ggucugguuuguuaguugu

SEQ ID NO: 1060557 - RNA, 19 nt, Homo sapiens
  misc_RNA (1)...(19): siRNA sense strand
cugaaaugguauuguauuc

SEQ ID NO: 1060558 - RNA, 19 nt, Homo sapiens
  misc_RNA (1)...(19): siRNA sense strand
gaaacuucauaaugcuucu

SEQ ID NO: 1060559 - RNA, 19 nt, Homo sapiens
  misc_RNA (1)...(19): siRNA sense strand
ucaagagaaagcuaugaaa

SEQ ID NO: 1060560 - RNA, 19 nt, Homo sapiens
  misc_RNA (1)...(19): siRNA sense strand
ccuaauagaacuucagcuu

SEQ ID NO: 1060561 - RNA, 19 nt, Homo sapiens
  misc_RNA (1)...(19): siRNA sense strand
aaacaaaucaguggaagca

SEQ ID NO: 1060562 - RNA, 19 nt, Homo sapiens
  misc_RNA (1)...(19): siRNA sense strand
caagagaaagcuaugaaac

SEQ ID NO: 1060563 - RNA, 19 nt, Homo sapiens
  misc_RNA (1)...(19): siRNA sense strand
ucaaggaaagcguuauaau

SEQ ID NO: 1060564 - RNA, 19 nt, Homo sapiens
  misc_RNA (1)...(19): siRNA sense strand
aaaccuacaugauaauagc

SEQ ID NO: 1060565 - RNA, 19 nt, Homo sapiens
  misc_RNA (1)...(19): siRNA sense strand
uuacugggauugacaugca

SEQ ID NO: 1060566 - RNA, 19 nt, Homo sapiens
  misc_RNA (1)...(19): siRNA sense strand
caccacacaucaagucagu

SEQ ID NO: 1060567 - RNA, 19 nt, Homo sapiens
  misc_RNA (1)...(19): siRNA sense strand
ccauucacguuucaguaug

SEQ ID NO: 1060568 - RNA, 19 nt, Homo sapiens
  misc_RNA (1)...(19): siRNA sense strand
gaauccaguucggaccuau

SEQ ID NO: 1060569 - RNA, 19 nt, Homo sapiens
  misc_RNA (1)...(19): siRNA sense strand
ugacgacguugugguacuu

SEQ ID NO: 1060570 - RNA, 19 nt, Homo sapiens
  misc_RNA (1)...(19): siRNA sense strand
gccuuggccugauaugguu

SEQ ID NO: 1060571 - RNA, 19 nt, Homo sapiens
  misc_RNA (1)...(19): siRNA sense strand
uaacaguccaggaaaccaa

SEQ ID NO: 1060572 - RNA, 19 nt, Homo sapiens
  misc_RNA (1)...(19): siRNA sense strand
cuucaagugcugcaaauug

SEQ ID NO: 1060573 - RNA, 19 nt, Homo sapiens
  misc_RNA (1)...(19): siRNA sense strand
aaauaagacuaccaucacu

SEQ ID NO: 1060574 - RNA, 19 nt, Homo sapiens
  misc_RNA (1)...(19): siRNA sense strand
gaccauuguacuuucguuu

SEQ ID NO: 1060575 - RNA, 19 nt, Homo sapiens
  misc_RNA (1)...(19): siRNA sense strand
augaaucucagcaaguuua

SEQ ID NO: 1060576 - RNA, 19 nt, Homo sapiens
  misc_RNA (1)...(19): siRNA sense strand
agacauacagaacauaaca

SEQ ID NO: 1060577 - RNA, 19 nt, Homo sapiens
  misc_RNA (1)...(19): siRNA sense strand
cuacccaagucaucuucaa

SEQ ID NO: 1060578 - RNA, 19 nt, Homo sapiens
  misc_RNA (1)...(19): siRNA sense strand
ccuacaugauaauagcuuu

SEQ ID NO: 1060579 - RNA, 19 nt, Homo sapiens
  misc_RNA (1)...(19): siRNA sense strand
uuauggguauuuacaggaa

SEQ ID NO: 1060580 - RNA, 19 nt, Homo sapiens
  misc_RNA (1)...(19): siRNA sense strand
gcaaaagacauacagaaca

SEQ ID NO: 1060581 - RNA, 19 nt, Homo sapiens
  misc_RNA (1)...(19): siRNA sense strand
gaaauguucaagagaaagc

SEQ ID NO: 1060582 - RNA, 19 nt, Homo sapiens
  misc_RNA (1)...(19): siRNA sense strand
ucucagcaaguuuaacaaa

SEQ ID NO: 1060583 - RNA, 19 nt, Homo sapiens
  misc_RNA (1)...(19): siRNA sense strand
guauguauggucugguuug

SEQ ID NO: 1060584 - RNA, 19 nt, Homo sapiens
  misc_RNA (1)...(19): siRNA sense strand
ggacaaaaggaggagaaua

SEQ ID NO: 1060585 - RNA, 19 nt, Homo sapiens
  misc_RNA (1)...(19): siRNA sense strand
uuauuucccuggcacuaug

SEQ ID NO: 1060586 - RNA, 19 nt, Homo sapiens
  misc_RNA (1)...(19): siRNA sense strand
uaagacuaccaucacugua

SEQ ID NO: 1060587 - RNA, 19 nt, Homo sapiens
  misc_RNA (1)...(19): siRNA sense strand
guuaguuguccuugguaua

SEQ ID NO: 1060588 - RNA, 19 nt, Homo sapiens
  misc_RNA (1)...(19): siRNA sense strand
cauucacguuucaguaugu

SEQ ID NO: 1060589 - RNA, 19 nt, Homo sapiens
  misc_RNA (1)...(19): siRNA sense strand
ugacaugcacuaguggauu

SEQ ID NO: 1060590 - RNA, 19 nt, Homo sapiens
  misc_RNA (1)...(19): siRNA sense strand
auugauuccuguuaugcua

SEQ ID NO: 1060591 - RNA, 19 nt, Homo sapiens
  misc_RNA (1)...(19): siRNA sense strand
aguuguccuugguauauuu

SEQ ID NO: 1060592 - RNA, 19 nt, Homo sapiens
  misc_RNA (1)...(19): siRNA sense strand
uuaguuguccuugguauau

SEQ ID NO: 1060593 - RNA, 19 nt, Homo sapiens
  misc_RNA (1)...(19): siRNA sense strand
guaacagugacaacaggaa

SEQ ID NO: 1060594 - RNA, 19 nt, Homo sapiens
  misc_RNA (1)...(19): siRNA sense strand
caguucggaccuaugguua

SEQ ID NO: 1060595 - RNA, 19 nt, Homo sapiens
  misc_RNA (1)...(19): siRNA sense strand
ccaguucggaccuaugguu

SEQ ID NO: 1060596 - RNA, 19 nt, Homo sapiens
  misc_RNA (1)...(19): siRNA sense strand
gugcagaugccgucauugg

SEQ ID NO: 1060597 - RNA, 19 nt, Homo sapiens
  misc_RNA (1)...(19): siRNA sense strand
aagacuaccaucacuguau

SEQ ID NO: 1060598 - RNA, 19 nt, Homo sapiens
  misc_RNA (1)...(19): siRNA sense strand
guucuggcuuugauuaaaa

SEQ ID NO: 1060599 - RNA, 19 nt, Homo sapiens
  misc_RNA (1)...(19): siRNA sense strand
guauucguauucaauuggu

SEQ ID NO: 1060600 - RNA, 19 nt, Homo sapiens
  misc_RNA (1)...(19): siRNA sense strand
uguucuggcuuugauuaaa

SEQ ID NO: 1060601 - RNA, 19 nt, Homo sapiens
  misc_RNA (1)...(19): siRNA sense strand
gaaggacucuccauguuua

SEQ ID NO: 1060602 - RNA, 19 nt, Homo sapiens
  misc_RNA (1)...(19): siRNA sense strand
gagcaaagcagaauacuga

SEQ ID NO: 1060603 - RNA, 19 nt, Homo sapiens
  misc_RNA (1)...(19): siRNA sense strand
gcagaauacugauggauga

SEQ ID NO: 1060604 - RNA, 19 nt, Homo sapiens
  misc_RNA (1)...(19): siRNA sense strand
gaagaagcaugucuccuau

SEQ ID NO: 1060605 - RNA, 19 nt, Homo sapiens
  misc_RNA (1)...(19): siRNA sense strand
gaacaguacuggaaugaag

SEQ ID NO: 1060606 - RNA, 19 nt, Homo sapiens
  misc_RNA (1)...(19): siRNA sense strand
gaauacugauggaugauuu

SEQ ID NO: 1060607 - RNA, 19 nt, Homo sapiens
  misc_RNA (1)...(19): siRNA sense strand
gaagagucauacaguguuu

SEQ ID NO: 1060608 - RNA, 19 nt, Homo sapiens
  misc_RNA (1)...(19): siRNA sense strand
ucauaacucucaucgauaa

SEQ ID NO: 1060609 - RNA, 19 nt, Homo sapiens
  misc_RNA (1)...(19): siRNA sense strand
aagcaugucuccuauguuu

SEQ ID NO: 1060610 - RNA, 19 nt, Homo sapiens
  misc_RNA (1)...(19): siRNA sense strand
gagcuaacuuuguaccauu

SEQ ID NO: 1060611 - RNA, 19 nt, Homo sapiens
  misc_RNA (1)...(19): siRNA sense strand
ucacggaaaugcagacuga

SEQ ID NO: 1060612 - RNA, 19 nt, Homo sapiens
  misc_RNA (1)...(19): siRNA sense strand
aagaauacaucgccuuaaa

SEQ ID NO: 1060613 - RNA, 19 nt, Homo sapiens
  misc_RNA (1)...(19): siRNA sense strand
gcuaaaggaugaugaacau

SEQ ID NO: 1060614 - RNA, 19 nt, Homo sapiens
  misc_RNA (1)...(19): siRNA sense strand
cgaaacauuccgcaauuua

SEQ ID NO: 1060615 - RNA, 19 nt, Homo sapiens
  misc_RNA (1)...(19): siRNA sense strand
gaacaucaaagaagaguca

SEQ ID NO: 1060616 - RNA, 19 nt, Homo sapiens
  misc_RNA (1)...(19): siRNA sense strand
cagaaggacucuccauguu

SEQ ID NO: 1060617 - RNA, 19 nt, Homo sapiens
  misc_RNA (1)...(19): siRNA sense strand
cgaagaagcaugucuccua

SEQ ID NO: 1060618 - RNA, 19 nt, Homo sapiens
  misc_RNA (1)...(19): siRNA sense strand
ggucgaagauucauaacuc

SEQ ID NO: 1060619 - RNA, 19 nt, Homo sapiens
  misc_RNA (1)...(19): siRNA sense strand
uggauaaguuguuugauga

SEQ ID NO: 1060620 - RNA, 19 nt, Homo sapiens
  misc_RNA (1)...(19): siRNA sense strand
gagccaggauucagcagaa

SEQ ID NO: 1060621 - RNA, 19 nt, Homo sapiens
  misc_RNA (1)...(19): siRNA sense strand
gaauacaucgccuuaaaca

SEQ ID NO: 1060622 - RNA, 19 nt, Homo sapiens
  misc_RNA (1)...(19): siRNA sense strand
gaucucaaggugcguauaa

SEQ ID NO: 1060623 - RNA, 19 nt, Homo sapiens
  misc_RNA (1)...(19): siRNA sense strand
caaggucgaagauucauaa

SEQ ID NO: 1060624 - RNA, 19 nt, Homo sapiens
  misc_RNA (1)...(19): siRNA sense strand
guaauacaguccagcuaga

SEQ ID NO: 1060625 - RNA, 19 nt, Homo sapiens
  misc_RNA (1)...(19): siRNA sense strand
gcauuucagcgcacaauuu

SEQ ID NO: 1060626 - RNA, 19 nt, Homo sapiens
  misc_RNA (1)...(19): siRNA sense strand
gagcugcgccugaauaaag

SEQ ID NO: 1060627 - RNA, 19 nt, Homo sapiens
  misc_RNA (1)...(19): siRNA sense strand
gaaggagacagaaccaaga

SEQ ID NO: 1060628 - RNA, 19 nt, Homo sapiens
  misc_RNA (1)...(19): siRNA sense strand
gcagaaggacucuccaugu

SEQ ID NO: 1060629 - RNA, 19 nt, Homo sapiens
  misc_RNA (1)...(19): siRNA sense strand
caaggggccuguauguuua

SEQ ID NO: 1060630 - RNA, 19 nt, Homo sapiens
  misc_RNA (1)...(19): siRNA sense strand
ugggauagauuaccggaaa

SEQ ID NO: 1060631 - RNA, 19 nt, Homo sapiens
  misc_RNA (1)...(19): siRNA sense strand
ccacuucagagacuuauuu

SEQ ID NO: 1060632 - RNA, 19 nt, Homo sapiens
  misc_RNA (1)...(19): siRNA sense strand
caaagaagagucauacagu

SEQ ID NO: 1060633 - RNA, 19 nt, Homo sapiens
  misc_RNA (1)...(19): siRNA sense strand
gagacagaaccaagaagua

SEQ ID NO: 1060634 - RNA, 19 nt, Homo sapiens
  misc_RNA (1)...(19): siRNA sense strand
gaaauuacacgaggaccuu

SEQ ID NO: 1060635 - RNA, 19 nt, Homo sapiens
  misc_RNA (1)...(19): siRNA sense strand
gaagaaaucagcgaagaag

SEQ ID NO: 1060636 - RNA, 19 nt, Homo sapiens
  misc_RNA (1)...(19): siRNA sense strand
uacgaaacauuccgcaauu

SEQ ID NO: 1060637 - RNA, 19 nt, Homo sapiens
  misc_RNA (1)...(19): siRNA sense strand
agaagcaugucuccuaugu

SEQ ID NO: 1060638 - RNA, 19 nt, Homo sapiens
  misc_RNA (1)...(19): siRNA sense strand
agacagaaccaagaaguaa

SEQ ID NO: 1060639 - RNA, 19 nt, Homo sapiens
  misc_RNA (1)...(19): siRNA sense strand
gagagcugcgccugaauaa

SEQ ID NO: 1060640 - RNA, 19 nt, Homo sapiens
  misc_RNA (1)...(19): siRNA sense strand
uagcagucuugaaggaaua

SEQ ID NO: 1060641 - RNA, 19 nt, Homo sapiens
  misc_RNA (1)...(19): siRNA sense strand
ugaaagcuuuggccguuug

SEQ ID NO: 1060642 - RNA, 19 nt, Homo sapiens
  misc_RNA (1)...(19): siRNA sense strand
auacaucgccuuaaacaga

SEQ ID NO: 1060643 - RNA, 19 nt, Homo sapiens
  misc_RNA (1)...(19): siRNA sense strand
ugucauggauaaguuguuu

SEQ ID NO: 1060644 - RNA, 19 nt, Homo sapiens
  misc_RNA (1)...(19): siRNA sense strand
gcaucaacaucaugacagu

SEQ ID NO: 1060645 - RNA, 19 nt, Homo sapiens
  misc_RNA (1)...(19): siRNA sense strand
aaacaauggugauggacau

SEQ ID NO: 1060646 - RNA, 19 nt, Homo sapiens
  misc_RNA (1)...(19): siRNA sense strand
uggaggcugucauggauaa

SEQ ID NO: 1060647 - RNA, 19 nt, Homo sapiens
  misc_RNA (1)...(19): siRNA sense strand
uagauucugggauagauua

SEQ ID NO: 1060648 - RNA, 19 nt, Homo sapiens
  misc_RNA (1)...(19): siRNA sense strand
ggacauguuuuaugcuuau

SEQ ID NO: 1060649 - RNA, 19 nt, Homo sapiens
  misc_RNA (1)...(19): siRNA sense strand
caauggugauggacauguu

SEQ ID NO: 1060650 - RNA, 19 nt, Homo sapiens
  misc_RNA (1)...(19): siRNA sense strand
gcugaugccaugauucuga

SEQ ID NO: 1060651 - RNA, 19 nt, Homo sapiens
  misc_RNA (1)...(19): siRNA sense strand
gcaaagcagaauacugaug

SEQ ID NO: 1060652 - RNA, 19 nt, Homo sapiens
  misc_RNA (1)...(19): siRNA sense strand
gaaacauuccgcaauuuac

SEQ ID NO: 1060653 - RNA, 19 nt, Homo sapiens
  misc_RNA (1)...(19): siRNA sense strand
caugcuagaugugcacaaa

SEQ ID NO: 1060654 - RNA, 19 nt, Homo sapiens
  misc_RNA (1)...(19): siRNA sense strand
uaacucucaucgauaacuu

SEQ ID NO: 1060655 - RNA, 19 nt, Homo sapiens
  misc_RNA (1)...(19): siRNA sense strand
ucauagcagucuugaagga

SEQ ID NO: 1060656 - RNA, 19 nt, Homo sapiens
  misc_RNA (1)...(19): siRNA sense strand
ccgaagaaaucagcgaaga

SEQ ID NO: 1060657 - RNA, 19 nt, Homo sapiens
  misc_RNA (1)...(19): siRNA sense strand
gcaauuuacucuggcaaac

SEQ ID NO: 1060658 - RNA, 19 nt, Homo sapiens
  misc_RNA (1)...(19): siRNA sense strand
ggagacagaaccaagaagu

SEQ ID NO: 1060659 - RNA, 19 nt, Homo sapiens
  misc_RNA (1)...(19): siRNA sense strand
ucaaggugcguauaauuug

SEQ ID NO: 1060660 - RNA, 19 nt, Homo sapiens
  misc_RNA (1)...(19): siRNA sense strand
auucauaacucucaucgau

SEQ ID NO: 1060661 - RNA, 19 nt, Homo sapiens
  misc_RNA (1)...(19): siRNA sense strand
gaagauucauaacucucau

SEQ ID NO: 1060662 - RNA, 19 nt, Homo sapiens
  misc_RNA (1)...(19): siRNA sense strand
gacucaaggucgaagauuc

SEQ ID NO: 1060663 - RNA, 19 nt, Homo sapiens
  misc_RNA (1)...(19): siRNA sense strand
uacaguguuugcagaaauu

SEQ ID NO: 1060664 - RNA, 19 nt, Homo sapiens
  misc_RNA (1)...(19): siRNA sense strand
agaaggacucuccauguuu

SEQ ID NO: 1060665 - RNA, 19 nt, Homo sapiens
  misc_RNA (1)...(19): siRNA sense strand
caccggaagaucucuauaa

SEQ ID NO: 1060666 - RNA, 19 nt, Homo sapiens
  misc_RNA (1)...(19): siRNA sense strand
ccuauacgguucagacauc

SEQ ID NO: 1060667 - RNA, 19 nt, Homo sapiens
  misc_RNA (1)...(19): siRNA sense strand
gaccaaggauucuaaaagu

SEQ ID NO: 1060668 - RNA, 19 nt, Homo sapiens
  misc_RNA (1)...(19): siRNA sense strand
ucccauagccgaagaaauc

SEQ ID NO: 1060669 - RNA, 19 nt, Homo sapiens
  misc_RNA (1)...(19): siRNA sense strand
ucagagacuuauuugaaag

SEQ ID NO: 1060670 - RNA, 19 nt, Homo sapiens
  misc_RNA (1)...(19): siRNA sense strand
guauguuuauggagauguu

SEQ ID NO: 1060671 - RNA, 19 nt, Homo sapiens
  misc_RNA (1)...(19): siRNA sense strand
gacagugaguuggagcaaa

SEQ ID NO: 1060672 - RNA, 19 nt, Homo sapiens
  misc_RNA (1)...(19): siRNA sense strand
agagagcugcgccugaaua

SEQ ID NO: 1060673 - RNA, 19 nt, Homo sapiens
  misc_RNA (1)...(19): siRNA sense strand
accggaagaucucuauaaa

SEQ ID NO: 1060674 - RNA, 19 nt, Homo sapiens
  misc_RNA (1)...(19): siRNA sense strand
cgaagaaaucagcgaagaa

SEQ ID NO: 1060675 - RNA, 19 nt, Homo sapiens
  misc_RNA (1)...(19): siRNA sense strand
ccaaggggccuguauguuu

SEQ ID NO: 1060676 - RNA, 19 nt, Homo sapiens
  misc_RNA (1)...(19): siRNA sense strand
gcuagauucugggauagau

SEQ ID NO: 1060677 - RNA, 19 nt, Homo sapiens
  misc_RNA (1)...(19): siRNA sense strand
gggccuguauguuuaugga

SEQ ID NO: 1060678 - RNA, 19 nt, Homo sapiens
  misc_RNA (1)...(19): siRNA sense strand
ggagauguugguacaggaa

SEQ ID NO: 1060679 - RNA, 19 nt, Homo sapiens
  misc_RNA (1)...(19): siRNA sense strand
ggacucaaggucgaagauu

SEQ ID NO: 1060680 - RNA, 19 nt, Homo sapiens
  misc_RNA (1)...(19): siRNA sense strand
cauacaguguuugcagaaa

SEQ ID NO: 1060681 - RNA, 19 nt, Homo sapiens
  misc_RNA (1)...(19): siRNA sense strand
acagugaguuggagcaaag

SEQ ID NO: 1060682 - RNA, 19 nt, Homo sapiens
  misc_RNA (1)...(19): siRNA sense strand
acgaaacauuccgcaauuu

SEQ ID NO: 1060683 - RNA, 19 nt, Homo sapiens
  misc_RNA (1)...(19): siRNA sense strand
gaaaucagcgaagaagcau

SEQ ID NO: 1060684 - RNA, 19 nt, Homo sapiens
  misc_RNA (1)...(19): siRNA sense strand
ggaaagccuauacgguuca

SEQ ID NO: 1060685 - RNA, 19 nt, Homo sapiens
  misc_RNA (1)...(19): siRNA sense strand
uuaacuagaccaaggauuc

SEQ ID NO: 1060686 - RNA, 19 nt, Homo sapiens
  misc_RNA (1)...(19): siRNA sense strand
auacaguguuugcagaaau

SEQ ID NO: 1060687 - RNA, 19 nt, Homo sapiens
  misc_RNA (1)...(19): siRNA sense strand
auggauaaguuguuugaug

SEQ ID NO: 1060688 - RNA, 19 nt, Homo sapiens
  misc_RNA (1)...(19): siRNA sense strand
aaccaggauucauggcuaa

SEQ ID NO: 1060689 - RNA, 19 nt, Homo sapiens
  misc_RNA (1)...(19): siRNA sense strand
augcuuauguggaaaugaa

SEQ ID NO: 1060690 - RNA, 19 nt, Homo sapiens
  misc_RNA (1)...(19): siRNA sense strand
gagacuuauuugaaagcuu

SEQ ID NO: 1060691 - RNA, 19 nt, Homo sapiens
  misc_RNA (1)...(19): siRNA sense strand
cgacuccuauaucaagcuu

SEQ ID NO: 1060692 - RNA, 19 nt, Homo sapiens
  misc_RNA (1)...(19): siRNA sense strand
caaggugcguauaauuugc

SEQ ID NO: 1060693 - RNA, 19 nt, Homo sapiens
  misc_RNA (1)...(19): siRNA sense strand
cgaagauucauaacucuca

SEQ ID NO: 1060694 - RNA, 19 nt, Homo sapiens
  misc_RNA (1)...(19): siRNA sense strand
gaagcaugucuccuauguu

SEQ ID NO: 1060695 - RNA, 19 nt, Homo sapiens
  misc_RNA (1)...(19): siRNA sense strand
caacaggccaccggaagau

SEQ ID NO: 1060696 - RNA, 19 nt, Homo sapiens
  misc_RNA (1)...(19): siRNA sense strand
cucaaggugcguauaauuu

SEQ ID NO: 1060697 - RNA, 19 nt, Homo sapiens
  misc_RNA (1)...(19): siRNA sense strand
uguggaggcugucauggau

SEQ ID NO: 1060698 - RNA, 19 nt, Homo sapiens
  misc_RNA (1)...(19): siRNA sense strand
acuccuauaucaagcuuau

SEQ ID NO: 1060699 - RNA, 19 nt, Homo sapiens
  misc_RNA (1)...(19): siRNA sense strand
ucucaaggugcguauaauu

SEQ ID NO: 1060700 - RNA, 19 nt, Homo sapiens
  misc_RNA (1)...(19): siRNA sense strand
cagugacuauuuggaacua

SEQ ID NO: 1060701 - RNA, 19 nt, Homo sapiens
  misc_RNA (1)...(19): siRNA sense strand
gagaagagcucaccagaau

SEQ ID NO: 1060702 - RNA, 19 nt, Homo sapiens
  misc_RNA (1)...(19): siRNA sense strand
cagggaaccuuacgaauua

SEQ ID NO: 1060703 - RNA, 19 nt, Homo sapiens
  misc_RNA (1)...(19): siRNA sense strand
agaaaggccuggaacauaa

SEQ ID NO: 1060704 - RNA, 19 nt, Homo sapiens
  misc_RNA (1)...(19): siRNA sense strand
ggaauucucuggaucuuuc

SEQ ID NO: 1060705 - RNA, 19 nt, Homo sapiens
  misc_RNA (1)...(19): siRNA sense strand
caagagaggcauucuguuu

SEQ ID NO: 1060706 - RNA, 19 nt, Homo sapiens
  misc_RNA (1)...(19): siRNA sense strand
gaaaggagcauaguguuug

SEQ ID NO: 1060707 - RNA, 19 nt, Homo sapiens
  misc_RNA (1)...(19): siRNA sense strand
gcaaaugcaaccuuucuuu

SEQ ID NO: 1060708 - RNA, 19 nt, Homo sapiens
  misc_RNA (1)...(19): siRNA sense strand
gaaaauagaacaagccaua

SEQ ID NO: 1060709 - RNA, 19 nt, Homo sapiens
  misc_RNA (1)...(19): siRNA sense strand
ugacgaagcucagaauuuc

SEQ ID NO: 1060710 - RNA, 19 nt, Homo sapiens
  misc_RNA (1)...(19): siRNA sense strand
ggaaaggagcauaguguuu

SEQ ID NO: 1060711 - RNA, 19 nt, Homo sapiens
  misc_RNA (1)...(19): siRNA sense strand
gcacugccuuuacuuugaa

SEQ ID NO: 1060712 - RNA, 19 nt, Homo sapiens
  misc_RNA (1)...(19): siRNA sense strand
gaagagcucaccagaauag

SEQ ID NO: 1060713 - RNA, 19 nt, Homo sapiens
  misc_RNA (1)...(19): siRNA sense strand
caagagaaggagagaguua

SEQ ID NO: 1060714 - RNA, 19 nt, Homo sapiens
  misc_RNA (1)...(19): siRNA sense strand
cagaauacgucccugcauu

SEQ ID NO: 1060715 - RNA, 19 nt, Homo sapiens
  misc_RNA (1)...(19): siRNA sense strand
cuucagaucugcaggcuuu

SEQ ID NO: 1060716 - RNA, 19 nt, Homo sapiens
  misc_RNA (1)...(19): siRNA sense strand
caaacuaccuuguguucau

SEQ ID NO: 1060717 - RNA, 19 nt, Homo sapiens
  misc_RNA (1)...(19): siRNA sense strand
ucacaaggguguauaccaa

SEQ ID NO: 1060718 - RNA, 19 nt, Homo sapiens
  misc_RNA (1)...(19): siRNA sense strand
cagccucaguucuucauua

SEQ ID NO: 1060719 - RNA, 19 nt, Homo sapiens
  misc_RNA (1)...(19): siRNA sense strand
ggucaucaguguaggagaa

SEQ ID NO: 1060720 - RNA, 19 nt, Homo sapiens
  misc_RNA (1)...(19): siRNA sense strand
gagaagaucaggaaugugu

SEQ ID NO: 1060721 - RNA, 19 nt, Homo sapiens
  misc_RNA (1)...(19): siRNA sense strand
ggagaugggacuggauuua

SEQ ID NO: 1060722 - RNA, 19 nt, Homo sapiens
  misc_RNA (1)...(19): siRNA sense strand
gaagaucaggaauguguuu

SEQ ID NO: 1060723 - RNA, 19 nt, Homo sapiens
  misc_RNA (1)...(19): siRNA sense strand
ggacuagaggaguuaauaa

SEQ ID NO: 1060724 - RNA, 19 nt, Homo sapiens
  misc_RNA (1)...(19): siRNA sense strand
ucaggucucucuugaguga

SEQ ID NO: 1060725 - RNA, 19 nt, Homo sapiens
  misc_RNA (1)...(19): siRNA sense strand
caaaacacuuccaagaaua

SEQ ID NO: 1060726 - RNA, 19 nt, Homo sapiens
  misc_RNA (1)...(19): siRNA sense strand
ccagcuaucuuacccaaug

SEQ ID NO: 1060727 - RNA, 19 nt, Homo sapiens
  misc_RNA (1)...(19): siRNA sense strand
gaacaagccauauacaaac

SEQ ID NO: 1060728 - RNA, 19 nt, Homo sapiens
  misc_RNA (1)...(19): siRNA sense strand
ggcugcaugugcuuuauua

SEQ ID NO: 1060729 - RNA, 19 nt, Homo sapiens
  misc_RNA (1)...(19): siRNA sense strand
ugcaggcgcuucuuugaua

SEQ ID NO: 1060730 - RNA, 19 nt, Homo sapiens
  misc_RNA (1)...(19): siRNA sense strand
acacagaauucucuacguu

SEQ ID NO: 1060731 - RNA, 19 nt, Homo sapiens
  misc_RNA (1)...(19): siRNA sense strand
ccgauaaccuucacacuca

SEQ ID NO: 1060732 - RNA, 19 nt, Homo sapiens
  misc_RNA (1)...(19): siRNA sense strand
agaagugacucuuggagaa

SEQ ID NO: 1060733 - RNA, 19 nt, Homo sapiens
  misc_RNA (1)...(19): siRNA sense strand
ugaggaacuuuaucaguga

SEQ ID NO: 1060734 - RNA, 19 nt, Homo sapiens
  misc_RNA (1)...(19): siRNA sense strand
ugaaagcaaugaggaagaa

SEQ ID NO: 1060735 - RNA, 19 nt, Homo sapiens
  misc_RNA (1)...(19): siRNA sense strand
gcucagaauuuccguacug

SEQ ID NO: 1060736 - RNA, 19 nt, Homo sapiens
  misc_RNA (1)...(19): siRNA sense strand
ccagaagccuccgcaagaa

SEQ ID NO: 1060737 - RNA, 19 nt, Homo sapiens
  misc_RNA (1)...(19): siRNA sense strand
ggauccugcugaccuaauu

SEQ ID NO: 1060738 - RNA, 19 nt, Homo sapiens
  misc_RNA (1)...(19): siRNA sense strand
gaauuuccguacugaagau

SEQ ID NO: 1060739 - RNA, 19 nt, Homo sapiens
  misc_RNA (1)...(19): siRNA sense strand
gacccugacucuuugagaa

SEQ ID NO: 1060740 - RNA, 19 nt, Homo sapiens
  misc_RNA (1)...(19): siRNA sense strand
gcagaccaguguacuccaa

SEQ ID NO: 1060741 - RNA, 19 nt, Homo sapiens
  misc_RNA (1)...(19): siRNA sense strand
ucagggaaccuuacgaauu

SEQ ID NO: 1060742 - RNA, 19 nt, Homo sapiens
  misc_RNA (1)...(19): siRNA sense strand
cagaauaguucgcaaugca

SEQ ID NO: 1060743 - RNA, 19 nt, Homo sapiens
  misc_RNA (1)...(19): siRNA sense strand
gaaaggccuggaacauaaa

SEQ ID NO: 1060744 - RNA, 19 nt, Homo sapiens
  misc_RNA (1)...(19): siRNA sense strand
gaggaggagugauucgaau

SEQ ID NO: 1060745 - RNA, 19 nt, Homo sapiens
  misc_RNA (1)...(19): siRNA sense strand
ucacagcccagcaguauga

SEQ ID NO: 1060746 - RNA, 19 nt, Homo sapiens
  misc_RNA (1)...(19): siRNA sense strand
gaaauggguaggcaugaug

SEQ ID NO: 1060747 - RNA, 19 nt, Homo sapiens
  misc_RNA (1)...(19): siRNA sense strand
agaacaagccauauacaaa

SEQ ID NO: 1060748 - RNA, 19 nt, Homo sapiens
  misc_RNA (1)...(19): siRNA sense strand
uaugagcucuugaaagcaa

SEQ ID NO: 1060749 - RNA, 19 nt, Homo sapiens
  misc_RNA (1)...(19): siRNA sense strand
agaccaauauccaagagaa

SEQ ID NO: 1060750 - RNA, 19 nt, Homo sapiens
  misc_RNA (1)...(19): siRNA sense strand
ggagagcucuauggcuaug

SEQ ID NO: 1060751 - RNA, 19 nt, Homo sapiens
  misc_RNA (1)...(19): siRNA sense strand
acagaauucucuacguuug

SEQ ID NO: 1060752 - RNA, 19 nt, Homo sapiens
  misc_RNA (1)...(19): siRNA sense strand
auaagcaaaugcaaccuuu

SEQ ID NO: 1060753 - RNA, 19 nt, Homo sapiens
  misc_RNA (1)...(19): siRNA sense strand
aagaaaggccuggaacaua

SEQ ID NO: 1060754 - RNA, 19 nt, Homo sapiens
  misc_RNA (1)...(19): siRNA sense strand
gaaugucagcugagucuau

SEQ ID NO: 1060755 - RNA, 19 nt, Homo sapiens
  misc_RNA (1)...(19): siRNA sense strand
ccucaguucuucauuauac

SEQ ID NO: 1060756 - RNA, 19 nt, Homo sapiens
  misc_RNA (1)...(19): siRNA sense strand
ggacaguguucggcgauuc

SEQ ID NO: 1060757 - RNA, 19 nt, Homo sapiens
  misc_RNA (1)...(19): siRNA sense strand
gcagcucagugaugcaugu

SEQ ID NO: 1060758 - RNA, 19 nt, Homo sapiens
  misc_RNA (1)...(19): siRNA sense strand
ggaucuuucuggauuacuu

SEQ ID NO: 1060759 - RNA, 19 nt, Homo sapiens
  misc_RNA (1)...(19): siRNA sense strand
gacuagaggaguuaauaaa

SEQ ID NO: 1060760 - RNA, 19 nt, Homo sapiens
  misc_RNA (1)...(19): siRNA sense strand
ggauaguggaggacaagua

SEQ ID NO: 1060761 - RNA, 19 nt, Homo sapiens
  misc_RNA (1)...(19): siRNA sense strand
cagaagcucccaauucaug

SEQ ID NO: 1060762 - RNA, 19 nt, Homo sapiens
  misc_RNA (1)...(19): siRNA sense strand
ccaauguucugaucugucu

SEQ ID NO: 1060763 - RNA, 19 nt, Homo sapiens
  misc_RNA (1)...(19): siRNA sense strand
uccaauagccaaguacuua

SEQ ID NO: 1060764 - RNA, 19 nt, Homo sapiens
  misc_RNA (1)...(19): siRNA sense strand
cagauccaauagccaagua

SEQ ID NO: 1060765 - RNA, 19 nt, Homo sapiens
  misc_RNA (1)...(19): siRNA sense strand
cucagaagcucccaauuca

SEQ ID NO: 1060766 - RNA, 19 nt, Homo sapiens
  misc_RNA (1)...(19): siRNA sense strand
gcucacagcccagcaguau

SEQ ID NO: 1060767 - RNA, 19 nt, Homo sapiens
  misc_RNA (1)...(19): siRNA sense strand
acagaggacuagaggaguu

SEQ ID NO: 1060768 - RNA, 19 nt, Homo sapiens
  misc_RNA (1)...(19): siRNA sense strand
ugaugcaugugauauguug

SEQ ID NO: 1060769 - RNA, 19 nt, Homo sapiens
  misc_RNA (1)...(19): siRNA sense strand
gagcucaccagaauaguuc

SEQ ID NO: 1060770 - RNA, 19 nt, Homo sapiens
  misc_RNA (1)...(19): siRNA sense strand
gcaaaggguggcccaggaa

SEQ ID NO: 1060771 - RNA, 19 nt, Homo sapiens
  misc_RNA (1)...(19): siRNA sense strand
ggauuacccugcguccuau

SEQ ID NO: 1060772 - RNA, 19 nt, Homo sapiens
  misc_RNA (1)...(19): siRNA sense strand
cagugucuccgauggauua

SEQ ID NO: 1060773 - RNA, 19 nt, Homo sapiens
  misc_RNA (1)...(19): siRNA sense strand
caaaugcaaccuuucuuuc

SEQ ID NO: 1060774 - RNA, 19 nt, Homo sapiens
  misc_RNA (1)...(19): siRNA sense strand
gaauacgucccugcauuug

SEQ ID NO: 1060775 - RNA, 19 nt, Homo sapiens
  misc_RNA (1)...(19): siRNA sense strand
caaaacaacaccuguauau

SEQ ID NO: 1060776 - RNA, 19 nt, Homo sapiens
  misc_RNA (1)...(19): siRNA sense strand
ggaggaggagugauucgaa

SEQ ID NO: 1060777 - RNA, 19 nt, Homo sapiens
  misc_RNA (1)...(19): siRNA sense strand
gcugugcaguguucucaga

SEQ ID NO: 1060778 - RNA, 19 nt, Homo sapiens
  misc_RNA (1)...(19): siRNA sense strand
aaacuaccuuguguucauu

SEQ ID NO: 1060779 - RNA, 19 nt, Homo sapiens
  misc_RNA (1)...(19): siRNA sense strand
gagagcuuauucagucuuc

SEQ ID NO: 1060780 - RNA, 19 nt, Homo sapiens
  misc_RNA (1)...(19): siRNA sense strand
gggcuauucuccaaaggau

SEQ ID NO: 1060781 - RNA, 19 nt, Homo sapiens
  misc_RNA (1)...(19): siRNA sense strand
uggagaagaucaggaaugu

SEQ ID NO: 1060782 - RNA, 19 nt, Homo sapiens
  misc_RNA (1)...(19): siRNA sense strand
ggguaggcaugaugacaga

SEQ ID NO: 1060783 - RNA, 19 nt, Homo sapiens
  misc_RNA (1)...(19): siRNA sense strand
gcucagugaugcaugugau

SEQ ID NO: 1060784 - RNA, 19 nt, Homo sapiens
  misc_RNA (1)...(19): siRNA sense strand
aguaugagcucuugaaagc

SEQ ID NO: 1060785 - RNA, 19 nt, Homo sapiens
  misc_RNA (1)...(19): siRNA sense strand
ggagaagccaggagucauc

SEQ ID NO: 1060786 - RNA, 19 nt, Homo sapiens
  misc_RNA (1)...(19): siRNA sense strand
agaauacgucccugcauuu

SEQ ID NO: 1060787 - RNA, 19 nt, Homo sapiens
  misc_RNA (1)...(19): siRNA sense strand
auccagaucuucuacaguu

SEQ ID NO: 1060788 - RNA, 19 nt, Homo sapiens
  misc_RNA (1)...(19): siRNA sense strand
guggagcacuauaaguaug

SEQ ID NO: 1060789 - RNA, 19 nt, Homo sapiens
  misc_RNA (1)...(19): siRNA sense strand
ucagagagaccaagagaag

SEQ ID NO: 1060790 - RNA, 19 nt, Homo sapiens
  misc_RNA (1)...(19): siRNA sense strand
ucgcaaugcagauccaaua

SEQ ID NO: 1060791 - RNA, 19 nt, Homo sapiens
  misc_RNA (1)...(19): siRNA sense strand
gcagagacccggaaaacuu

SEQ ID NO: 1060792 - RNA, 19 nt, Homo sapiens
  misc_RNA (1)...(19): siRNA sense strand
ugaagaucauggagaagau

SEQ ID NO: 1060793 - RNA, 19 nt, Homo sapiens
  misc_RNA (1)...(19): siRNA sense strand
agaugggacuggauuuaga

SEQ ID NO: 1060794 - RNA, 19 nt, Homo sapiens
  misc_RNA (1)...(19): siRNA sense strand
caagaaaggccuggaacau

SEQ ID NO: 1060795 - RNA, 19 nt, Homo sapiens
  misc_RNA (1)...(19): siRNA sense strand
cuacaguugucugaagauu

SEQ ID NO: 1060796 - RNA, 19 nt, Homo sapiens
  misc_RNA (1)...(19): siRNA sense strand
gcaggcgcuucuuugauag

SEQ ID NO: 1060797 - RNA, 19 nt, Homo sapiens
  misc_RNA (1)...(19): siRNA sense strand
gaugggacuggauuuagaa

SEQ ID NO: 1060798 - RNA, 19 nt, Homo sapiens
  misc_RNA (1)...(19): siRNA sense strand
ccaguguacuccaagaaag

SEQ ID NO: 1060799 - RNA, 19 nt, Homo sapiens
  misc_RNA (1)...(19): siRNA sense strand
cagcugagucuaucuagug

SEQ ID NO: 1060800 - RNA, 19 nt, Homo sapiens
  misc_RNA (1)...(19): siRNA sense strand
acaguugucugaagauuuu

SEQ ID NO: 1060801 - RNA, 19 nt, Homo sapiens
  misc_RNA (1)...(19): siRNA sense strand
gcagaaagauggugaauau

SEQ ID NO: 1060802 - RNA, 19 nt, Homo sapiens
  misc_RNA (1)...(19): siRNA sense strand
gcaaaucauucaggaaaua

SEQ ID NO: 1060803 - RNA, 19 nt, Homo sapiens
  misc_RNA (1)...(19): siRNA sense strand
gaucgaagguucugaggaa

SEQ ID NO: 1060804 - RNA, 19 nt, Homo sapiens
  misc_RNA (1)...(19): siRNA sense strand
cgacuucucugguuaccua

SEQ ID NO: 1060805 - RNA, 19 nt, Homo sapiens
  misc_RNA (1)...(19): siRNA sense strand
gagcaaaucauucaggaaa

SEQ ID NO: 1060806 - RNA, 19 nt, Homo sapiens
  misc_RNA (1)...(19): siRNA sense strand
gaaagauggugaauauggu

SEQ ID NO: 1060807 - RNA, 19 nt, Homo sapiens
  misc_RNA (1)...(19): siRNA sense strand
ggacagcgaggaugaagaa

SEQ ID NO: 1060808 - RNA, 19 nt, Homo sapiens
  misc_RNA (1)...(19): siRNA sense strand
gaacauacucacagcgauu

SEQ ID NO: 1060809 - RNA, 19 nt, Homo sapiens
  misc_RNA (1)...(19): siRNA sense strand
aaacugcacugccaugaau

SEQ ID NO: 1060810 - RNA, 19 nt, Homo sapiens
  misc_RNA (1)...(19): siRNA sense strand
ccaaguuccucaacaucua

SEQ ID NO: 1060811 - RNA, 19 nt, Homo sapiens
  misc_RNA (1)...(19): siRNA sense strand
caagaaacaugggccaguu

SEQ ID NO: 1060812 - RNA, 19 nt, Homo sapiens
  misc_RNA (1)...(19): siRNA sense strand
ucaccgacuucucugguua

SEQ ID NO: 1060813 - RNA, 19 nt, Homo sapiens
  misc_RNA (1)...(19): siRNA sense strand
gauggugaauaugguauaa

SEQ ID NO: 1060814 - RNA, 19 nt, Homo sapiens
  misc_RNA (1)...(19): siRNA sense strand
acaccucgcucccaagaaa

SEQ ID NO: 1060815 - RNA, 19 nt, Homo sapiens
  misc_RNA (1)...(19): siRNA sense strand
caggaaauauggaugaaca

SEQ ID NO: 1060816 - RNA, 19 nt, Homo sapiens
  misc_RNA (1)...(19): siRNA sense strand
gcagggagcaaaucauuca

SEQ ID NO: 1060817 - RNA, 19 nt, Homo sapiens
  misc_RNA (1)...(19): siRNA sense strand
ccagagggaagacagcuua

SEQ ID NO: 1060818 - RNA, 19 nt, Homo sapiens
  misc_RNA (1)...(19): siRNA sense strand
uaaccaaacuccugcaaaa

SEQ ID NO: 1060819 - RNA, 19 nt, Homo sapiens
  misc_RNA (1)...(19): siRNA sense strand
gaaacugcacugccaugaa

SEQ ID NO: 1060820 - RNA, 19 nt, Homo sapiens
  misc_RNA (1)...(19): siRNA sense strand
gggcaagauuaccaaaugu

SEQ ID NO: 1060821 - RNA, 19 nt, Homo sapiens
  misc_RNA (1)...(19): siRNA sense strand
cgaagguucugaggaaaga

SEQ ID NO: 1060822 - RNA, 19 nt, Homo sapiens
  misc_RNA (1)...(19): siRNA sense strand
agaaggugcuggacgaaug

SEQ ID NO: 1060823 - RNA, 19 nt, Homo sapiens
  misc_RNA (1)...(19): siRNA sense strand
caagauuaccaaaugugua

SEQ ID NO: 1060824 - RNA, 19 nt, Homo sapiens
  misc_RNA (1)...(19): siRNA sense strand
ucucagcgcucaccgacuu

SEQ ID NO: 1060825 - RNA, 19 nt, Homo sapiens
  misc_RNA (1)...(19): siRNA sense strand
gcgcagggagcaaaucauu

SEQ ID NO: 1060826 - RNA, 19 nt, Homo sapiens
  misc_RNA (1)...(19): siRNA sense strand
gaauccaaguuccucaaca

SEQ ID NO: 1060827 - RNA, 19 nt, Homo sapiens
  misc_RNA (1)...(19): siRNA sense strand
ggacaccucgcucccaaga

SEQ ID NO: 1060828 - RNA, 19 nt, Homo sapiens
  misc_RNA (1)...(19): siRNA sense strand
ccucggcauucuacgauaa

SEQ ID NO: 1060829 - RNA, 19 nt, Homo sapiens
  misc_RNA (1)...(19): siRNA sense strand
gcaaaaucaucgucaacaa

SEQ ID NO: 1060830 - RNA, 19 nt, Homo sapiens
  misc_RNA (1)...(19): siRNA sense strand
gcaagauuaccaaaugugu

SEQ ID NO: 1060831 - RNA, 19 nt, Homo sapiens
  misc_RNA (1)...(19): siRNA sense strand
uuaaaugccaaccuaauga

SEQ ID NO: 1060832 - RNA, 19 nt, Homo sapiens
  misc_RNA (1)...(19): siRNA sense strand
gaaacaugggccaguucua

SEQ ID NO: 1060833 - RNA, 19 nt, Homo sapiens
  misc_RNA (1)...(19): siRNA sense strand
cagcgaggaugaagaagag

SEQ ID NO: 1060834 - RNA, 19 nt, Homo sapiens
  misc_RNA (1)...(19): siRNA sense strand
ugggcaagauuaccaaaug

SEQ ID NO: 1060835 - RNA, 19 nt, Homo sapiens
  misc_RNA (1)...(19): siRNA sense strand
aagcagagaugcaaaauca

SEQ ID NO: 1060836 - RNA, 19 nt, Homo sapiens
  misc_RNA (1)...(19): siRNA sense strand
uuacucagcuuugcaaguc

SEQ ID NO: 1060837 - RNA, 19 nt, Homo sapiens
  misc_RNA (1)...(19): siRNA sense strand
acgcauguguucccaagaa

SEQ ID NO: 1060838 - RNA, 19 nt, Homo sapiens
  misc_RNA (1)...(19): siRNA sense strand
gagcugcccugcuguucgu

SEQ ID NO: 1060839 - RNA, 19 nt, Homo sapiens
  misc_RNA (1)...(19): siRNA sense strand
uaaaugccaaccuaaugaa

SEQ ID NO: 1060840 - RNA, 19 nt, Homo sapiens
  misc_RNA (1)...(19): siRNA sense strand
agaaagauggugaauaugg

SEQ ID NO: 1060841 - RNA, 19 nt, Homo sapiens
  misc_RNA (1)...(19): siRNA sense strand
gcagagcucgcagaaagga

SEQ ID NO: 1060842 - RNA, 19 nt, Homo sapiens
  misc_RNA (1)...(19): siRNA sense strand
gggacuauuugaaucuaca

SEQ ID NO: 1060843 - RNA, 19 nt, Homo sapiens
  misc_RNA (1)...(19): siRNA sense strand
gugaagaccaggagcugaa

SEQ ID NO: 1060844 - RNA, 19 nt, Homo sapiens
  misc_RNA (1)...(19): siRNA sense strand
ggaaauauggaugaacagu

SEQ ID NO: 1060845 - RNA, 19 nt, Homo sapiens
  misc_RNA (1)...(19): siRNA sense strand
aaagauggugaauauggua

SEQ ID NO: 1060846 - RNA, 19 nt, Homo sapiens
  misc_RNA (1)...(19): siRNA sense strand
cgucaacaaucaccauuuu

SEQ ID NO: 1060847 - RNA, 19 nt, Homo sapiens
  misc_RNA (1)...(19): siRNA sense strand
gcaggaggacccaggaaag

SEQ ID NO: 1060848 - RNA, 19 nt, Homo sapiens
  misc_RNA (1)...(19): siRNA sense strand
cuccuggucuccuuuaaau

SEQ ID NO: 1060849 - RNA, 19 nt, Homo sapiens
  misc_RNA (1)...(19): siRNA sense strand
caaguccuaucccgaaggu

SEQ ID NO: 1060850 - RNA, 19 nt, Homo sapiens
  misc_RNA (1)...(19): siRNA sense strand
gagcgcagggagcaaauca

SEQ ID NO: 1060851 - RNA, 19 nt, Homo sapiens
  misc_RNA (1)...(19): siRNA sense strand
gcuaugggaagcagagaug

SEQ ID NO: 1060852 - RNA, 19 nt, Homo sapiens
  misc_RNA (1)...(19): siRNA sense strand
gaagcagaaagauggugaa

SEQ ID NO: 1060853 - RNA, 19 nt, Homo sapiens
  misc_RNA (1)...(19): siRNA sense strand
ccaaggacuuccgcgacuu

SEQ ID NO: 1060854 - RNA, 19 nt, Homo sapiens
  misc_RNA (1)...(19): siRNA sense strand
ggcagccuuugcuuacauu

SEQ ID NO: 1060855 - RNA, 19 nt, Homo sapiens
  misc_RNA (1)...(19): siRNA sense strand
agccuuugcuuacauuaga

SEQ ID NO: 1060856 - RNA, 19 nt, Homo sapiens
  misc_RNA (1)...(19): siRNA sense strand
ggagcaaaucauucaggaa

SEQ ID NO: 1060857 - RNA, 19 nt, Homo sapiens
  misc_RNA (1)...(19): siRNA sense strand
gauuaccaaauguguaguu

SEQ ID NO: 1060858 - RNA, 19 nt, Homo sapiens
  misc_RNA (1)...(19): siRNA sense strand
aauccaaguuccucaacau

SEQ ID NO: 1060859 - RNA, 19 nt, Homo sapiens
  misc_RNA (1)...(19): siRNA sense strand
guccuggucugcuccaaag

SEQ ID NO: 1060860 - RNA, 19 nt, Homo sapiens
  misc_RNA (1)...(19): siRNA sense strand
ggcaggaggacccaggaaa

SEQ ID NO: 1060861 - RNA, 19 nt, Homo sapiens
  misc_RNA (1)...(19): siRNA sense strand
guccaggaagcaguaaaua

SEQ ID NO: 1060862 - RNA, 19 nt, Homo sapiens
  misc_RNA (1)...(19): siRNA sense strand
aaacaugggccaguucuac

SEQ ID NO: 1060863 - RNA, 19 nt, Homo sapiens
  misc_RNA (1)...(19): siRNA sense strand
ggucugcuccaaagagauc

SEQ ID NO: 1060864 - RNA, 19 nt, Homo sapiens
  misc_RNA (1)...(19): siRNA sense strand
aaaucaucgucaacaauca

SEQ ID NO: 1060865 - RNA, 19 nt, Homo sapiens
  misc_RNA (1)...(19): siRNA sense strand
ggcauucuacgauaagugu

SEQ ID NO: 1060866 - RNA, 19 nt, Homo sapiens
  misc_RNA (1)...(19): siRNA sense strand
ggaggacagcgaggaugaa

SEQ ID NO: 1060867 - RNA, 19 nt, Homo sapiens
  misc_RNA (1)...(19): siRNA sense strand
uccuuuaaaugccaaccua

SEQ ID NO: 1060868 - RNA, 19 nt, Homo sapiens
  misc_RNA (1)...(19): siRNA sense strand
aagauuaccaaauguguag

SEQ ID NO: 1060869 - RNA, 19 nt, Homo sapiens
  misc_RNA (1)...(19): siRNA sense strand
gcgcccuggucaucagaga

SEQ ID NO: 1060870 - RNA, 19 nt, Homo sapiens
  misc_RNA (1)...(19): siRNA sense strand
gcagccuuugcuuacauua

SEQ ID NO: 1060871 - RNA, 19 nt, Homo sapiens
  misc_RNA (1)...(19): siRNA sense strand
ggaauucuuguuagcaacu

SEQ ID NO: 1060872 - RNA, 19 nt, Homo sapiens
  misc_RNA (1)...(19): siRNA sense strand
aaugccaaccuaaugaauu

SEQ ID NO: 1060873 - RNA, 19 nt, Homo sapiens
  misc_RNA (1)...(19): siRNA sense strand
uuuaaaugccaaccuaaug

SEQ ID NO: 1060874 - RNA, 19 nt, Homo sapiens
  misc_RNA (1)...(19): siRNA sense strand
ugaaacugcacugccauga

SEQ ID NO: 1060875 - RNA, 19 nt, Homo sapiens
  misc_RNA (1)...(19): siRNA sense strand
auauacaguuccauagaag

SEQ ID NO: 1060876 - RNA, 19 nt, Homo sapiens
  misc_RNA (1)...(19): siRNA sense strand
uggugaauaugguauaaac

SEQ ID NO: 1060877 - RNA, 19 nt, Homo sapiens
  misc_RNA (1)...(19): siRNA sense strand
ggcaagauuaccaaaugug

SEQ ID NO: 1060878 - RNA, 19 nt, Homo sapiens
  misc_RNA (1)...(19): siRNA sense strand
cuaaccaaacuccugcaaa

SEQ ID NO: 1060879 - RNA, 19 nt, Homo sapiens
  misc_RNA (1)...(19): siRNA sense strand
gauggggacuauuugaauc

SEQ ID NO: 1060880 - RNA, 19 nt, Homo sapiens
  misc_RNA (1)...(19): siRNA sense strand
ggaaagauguuuagucaug

SEQ ID NO: 1060881 - RNA, 19 nt, Homo sapiens
  misc_RNA (1)...(19): siRNA sense strand
gcgcguggcuuacuacuua

SEQ ID NO: 1060882 - RNA, 19 nt, Homo sapiens
  misc_RNA (1)...(19): siRNA sense strand
acucaaagcucacaacuua

SEQ ID NO: 1060883 - RNA, 19 nt, Homo sapiens
  misc_RNA (1)...(19): siRNA sense strand
gagaaacccuauaaaugua

SEQ ID NO: 1060884 - RNA, 19 nt, Homo sapiens
  misc_RNA (1)...(19): siRNA sense strand
gagaaacccuaucaaugua

SEQ ID NO: 1060885 - RNA, 19 nt, Homo sapiens
  misc_RNA (1)...(19): siRNA sense strand
ugagaaaccuuaugaaugu

SEQ ID NO: 1060886 - RNA, 19 nt, Homo sapiens
  misc_RNA (1)...(19): siRNA sense strand
ugagaaaccuuaugaaugu

SEQ ID NO: 1060887 - RNA, 19 nt, Homo sapiens
  misc_RNA (1)...(19): siRNA sense strand
agucauggcucacaacuua

SEQ ID NO: 1060888 - RNA, 19 nt, Homo sapiens
  misc_RNA (1)...(19): siRNA sense strand
ggcaagggaugaucauaua

SEQ ID NO: 1060889 - RNA, 19 nt, Homo sapiens
  misc_RNA (1)...(19): siRNA sense strand
gggaaggccuuuacucaaa

SEQ ID NO: 1060890 - RNA, 19 nt, Homo sapiens
  misc_RNA (1)...(19): siRNA sense strand
gagaaaccauaucaaugua

SEQ ID NO: 1060891 - RNA, 19 nt, Homo sapiens
  misc_RNA (1)...(19): siRNA sense strand
gagaaaccauaucaaugua

SEQ ID NO: 1060892 - RNA, 19 nt, Homo sapiens
  misc_RNA (1)...(19): siRNA sense strand
gcucagaacuuacucaaca

SEQ ID NO: 1060893 - RNA, 19 nt, Homo sapiens
  misc_RNA (1)...(19): siRNA sense strand
caacuuacccgacaucaaa

SEQ ID NO: 1060894 - RNA, 19 nt, Homo sapiens
  misc_RNA (1)...(19): siRNA sense strand
gaacacuuaugaaacagaa

SEQ ID NO: 1060895 - RNA, 19 nt, Homo sapiens
  misc_RNA (1)...(19): siRNA sense strand
ggaaaugagugacagacuu

SEQ ID NO: 1060896 - RNA, 19 nt, Homo sapiens
  misc_RNA (1)...(19): siRNA sense strand
caaccagcauacuuacuua

SEQ ID NO: 1060897 - RNA, 19 nt, Homo sapiens
  misc_RNA (1)...(19): siRNA sense strand
auucguagcucacaacuua

SEQ ID NO: 1060898 - RNA, 19 nt, Homo sapiens
  misc_RNA (1)...(19): siRNA sense strand
guaggaaggucuuuacuca

SEQ ID NO: 1060899 - RNA, 19 nt, Homo sapiens
  misc_RNA (1)...(19): siRNA sense strand
gcucacagcuuucucaaca

SEQ ID NO: 1060900 - RNA, 19 nt, Homo sapiens
  misc_RNA (1)...(19): siRNA sense strand
gagaaacccuaugaaugua

SEQ ID NO: 1060901 - RNA, 19 nt, Homo sapiens
  misc_RNA (1)...(19): siRNA sense strand
gagaaacccuaugaaugua

SEQ ID NO: 1060902 - RNA, 19 nt, Homo sapiens
  misc_RNA (1)...(19): siRNA sense strand
gagaaacccuaugaaugua

SEQ ID NO: 1060903 - RNA, 19 nt, Homo sapiens
  misc_RNA (1)...(19): siRNA sense strand
ggagaacuauagcaacuug

SEQ ID NO: 1060904 - RNA, 19 nt, Homo sapiens
  misc_RNA (1)...(19): siRNA sense strand
agucauggcucucagcuua

SEQ ID NO: 1060905 - RNA, 19 nt, Homo sapiens
  misc_RNA (1)...(19): siRNA sense strand
aaucguggcucacuccuua

SEQ ID NO: 1060906 - RNA, 19 nt, Homo sapiens
  misc_RNA (1)...(19): siRNA sense strand
acucagcucucacaacuua

SEQ ID NO: 1060907 - RNA, 19 nt, Homo sapiens
  misc_RNA (1)...(19): siRNA sense strand
gggaaggccuuuacucaga

SEQ ID NO: 1060908 - RNA, 19 nt, Homo sapiens
  misc_RNA (1)...(19): siRNA sense strand
caacaucagagaauucaua

SEQ ID NO: 1060909 - RNA, 19 nt, Homo sapiens
  misc_RNA (1)...(19): siRNA sense strand
caacaucagagaauucaua

SEQ ID NO: 1060910 - RNA, 19 nt, Homo sapiens
  misc_RNA (1)...(19): siRNA sense strand
gagaaacccuaugcaugua

SEQ ID NO: 1060911 - RNA, 19 nt, Homo sapiens
  misc_RNA (1)...(19): siRNA sense strand
agucauggcucacaaguuu

SEQ ID NO: 1060912 - RNA, 19 nt, Homo sapiens
  misc_RNA (1)...(19): siRNA sense strand
guauagagaugugauguug

SEQ ID NO: 1060913 - RNA, 19 nt, Homo sapiens
  misc_RNA (1)...(19): siRNA sense strand
gaaacccuaugaauguaaa

SEQ ID NO: 1060914 - RNA, 19 nt, Homo sapiens
  misc_RNA (1)...(19): siRNA sense strand
gaaacagaauuaucccaau

SEQ ID NO: 1060915 - RNA, 19 nt, Homo sapiens
  misc_RNA (1)...(19): siRNA sense strand
acucagaauucacaacuua

SEQ ID NO: 1060916 - RNA, 19 nt, Homo sapiens
  misc_RNA (1)...(19): siRNA sense strand
gcucacaacuuacucaaca

SEQ ID NO: 1060917 - RNA, 19 nt, Homo sapiens
  misc_RNA (1)...(19): siRNA sense strand
gcucacaacuuacucaaca

SEQ ID NO: 1060918 - RNA, 19 nt, Homo sapiens
  misc_RNA (1)...(19): siRNA sense strand
caacaucagaggauucaua

SEQ ID NO: 1060919 - RNA, 19 nt, Homo sapiens
  misc_RNA (1)...(19): siRNA sense strand
guggaaagauguuuaguca

SEQ ID NO: 1060920 - RNA, 19 nt, Homo sapiens
  misc_RNA (1)...(19): siRNA sense strand
uaaggaauguggaaagaug

SEQ ID NO: 1060921 - RNA, 19 nt, Homo sapiens
  misc_RNA (1)...(19): siRNA sense strand
ugagaaacccuauaaaugu

SEQ ID NO: 1060922 - RNA, 19 nt, Homo sapiens
  misc_RNA (1)...(19): siRNA sense strand
gagaaacccuaugugugua

SEQ ID NO: 1060923 - RNA, 19 nt, Homo sapiens
  misc_RNA (1)...(19): siRNA sense strand
gaaaagcucuaugaaugua

SEQ ID NO: 1060924 - RNA, 19 nt, Homo sapiens
  misc_RNA (1)...(19): siRNA sense strand
ggaaggccuuuacucagaa

SEQ ID NO: 1060925 - RNA, 19 nt, Homo sapiens
  misc_RNA (1)...(19): siRNA sense strand
ucagagagauuuguauaga

SEQ ID NO: 1060926 - RNA, 19 nt, Homo sapiens
  misc_RNA (1)...(19): siRNA sense strand
gaaaugagugacagacuug

SEQ ID NO: 1060927 - RNA, 19 nt, Homo sapiens
  misc_RNA (1)...(19): siRNA sense strand
gagaugugauguuggagaa

SEQ ID NO: 1060928 - RNA, 19 nt, Homo sapiens
  misc_RNA (1)...(19): siRNA sense strand
ggacuuaucuccagaaaag

SEQ ID NO: 1060929 - RNA, 19 nt, Homo sapiens
  misc_RNA (1)...(19): siRNA sense strand
gaaaccauaucaauguaag

SEQ ID NO: 1060930 - RNA, 19 nt, Homo sapiens
  misc_RNA (1)...(19): siRNA sense strand
gaaaccauaucaauguaag

SEQ ID NO: 1060931 - RNA, 19 nt, Homo sapiens
  misc_RNA (1)...(19): siRNA sense strand
gaauguagaauggccuuua

SEQ ID NO: 1060932 - RNA, 19 nt, Homo sapiens
  misc_RNA (1)...(19): siRNA sense strand
caacaucagagaauccaua

SEQ ID NO: 1060933 - RNA, 19 nt, Homo sapiens
  misc_RNA (1)...(19): siRNA sense strand
caagaugucauucuacuga

SEQ ID NO: 1060934 - RNA, 19 nt, Homo sapiens
  misc_RNA (1)...(19): siRNA sense strand
ugagaaacccuaugaaugu

SEQ ID NO: 1060935 - RNA, 19 nt, Homo sapiens
  misc_RNA (1)...(19): siRNA sense strand
ugagaaacccuaugaaugu

SEQ ID NO: 1060936 - RNA, 19 nt, Homo sapiens
  misc_RNA (1)...(19): siRNA sense strand
ugagaaacccuaugaaugu

SEQ ID NO: 1060937 - RNA, 19 nt, Homo sapiens
  misc_RNA (1)...(19): siRNA sense strand
ugagaaacccuaucaaugu

SEQ ID NO: 1060938 - RNA, 19 nt, Homo sapiens
  misc_RNA (1)...(19): siRNA sense strand
gaaaagcccuaugaaugua

SEQ ID NO: 1060939 - RNA, 19 nt, Homo sapiens
  misc_RNA (1)...(19): siRNA sense strand
aaacagaauuaucccaaug

SEQ ID NO: 1060940 - RNA, 19 nt, Homo sapiens
  misc_RNA (1)...(19): siRNA sense strand
caucagagaauucauauca

SEQ ID NO: 1060941 - RNA, 19 nt, Homo sapiens
  misc_RNA (1)...(19): siRNA sense strand
gcucagagagauuuguaua

SEQ ID NO: 1060942 - RNA, 19 nt, Homo sapiens
  misc_RNA (1)...(19): siRNA sense strand
ggcaaggccuuuagucaug

SEQ ID NO: 1060943 - RNA, 19 nt, Homo sapiens
  misc_RNA (1)...(19): siRNA sense strand
agacgagccucacaccuaa

SEQ ID NO: 1060944 - RNA, 19 nt, Homo sapiens
  misc_RNA (1)...(19): siRNA sense strand
guucagggauguugccauu

SEQ ID NO: 1060945 - RNA, 19 nt, Homo sapiens
  misc_RNA (1)...(19): siRNA sense strand
gaauguggaaagauguuua

SEQ ID NO: 1060946 - RNA, 19 nt, Homo sapiens
  misc_RNA (1)...(19): siRNA sense strand
gcucucagcuuacucuaca

SEQ ID NO: 1060947 - RNA, 19 nt, Homo sapiens
  misc_RNA (1)...(19): siRNA sense strand
ucagggauguugccauuga

SEQ ID NO: 1060948 - RNA, 19 nt, Homo sapiens
  misc_RNA (1)...(19): siRNA sense strand
agaauggccuuuacucaga

SEQ ID NO: 1060949 - RNA, 19 nt, Homo sapiens
  misc_RNA (1)...(19): siRNA sense strand
gaauucauaucagugagaa

SEQ ID NO: 1060950 - RNA, 19 nt, Homo sapiens
  misc_RNA (1)...(19): siRNA sense strand
gugaaaagcucuaugaaug

SEQ ID NO: 1060951 - RNA, 19 nt, Homo sapiens
  misc_RNA (1)...(19): siRNA sense strand
guucacaucuuucccaaca

SEQ ID NO: 1060952 - RNA, 19 nt, Homo sapiens
  misc_RNA (1)...(19): siRNA sense strand
ucacuagacuugccuucaa

SEQ ID NO: 1060953 - RNA, 19 nt, Homo sapiens
  misc_RNA (1)...(19): siRNA sense strand
gagaaaccuuaugaaugua

SEQ ID NO: 1060954 - RNA, 19 nt, Homo sapiens
  misc_RNA (1)...(19): siRNA sense strand
guucacagcuaacucaaca

SEQ ID NO: 1060955 - RNA, 19 nt, Homo sapiens
  misc_RNA (1)...(19): siRNA sense strand
gagaaaccuuaugaaugua

SEQ ID NO: 1060956 - RNA, 19 nt, Homo sapiens
  misc_RNA (1)...(19): siRNA sense strand
agucguggcucagaacuua

SEQ ID NO: 1060957 - RNA, 19 nt, Homo sapiens
  misc_RNA (1)...(19): siRNA sense strand
gaacuauagcaacuuggua

SEQ ID NO: 1060958 - RNA, 19 nt, Homo sapiens
  misc_RNA (1)...(19): siRNA sense strand
ccaauuccagggauuauuu

SEQ ID NO: 1060959 - RNA, 19 nt, Homo sapiens
  misc_RNA (1)...(19): siRNA sense strand
ugagaaaccauaucaaugu

SEQ ID NO: 1060960 - RNA, 19 nt, Homo sapiens
  misc_RNA (1)...(19): siRNA sense strand
ugagaaaccauaucaaugu

SEQ ID NO: 1060961 - RNA, 19 nt, Homo sapiens
  misc_RNA (1)...(19): siRNA sense strand
ucaaagcucacaacuuauu

SEQ ID NO: 1060962 - RNA, 19 nt, Homo sapiens
  misc_RNA (1)...(19): siRNA sense strand
agagagauuuguauagaga

SEQ ID NO: 1060963 - RNA, 19 nt, Homo sapiens
  misc_RNA (1)...(19): siRNA sense strand
gugagaagcccuaugaaug

SEQ ID NO: 1060964 - RNA, 19 nt, Homo sapiens
  misc_RNA (1)...(19): siRNA sense strand
cuacugagaaacccuauaa

SEQ ID NO: 1060965 - RNA, 19 nt, Homo sapiens
  misc_RNA (1)...(19): siRNA sense strand
ugagaaacccuaugcaugu

SEQ ID NO: 1060966 - RNA, 19 nt, Homo sapiens
  misc_RNA (1)...(19): siRNA sense strand
gaaugugggauugacuuua

SEQ ID NO: 1060967 - RNA, 19 nt, Homo sapiens
  misc_RNA (1)...(19): siRNA sense strand
ugagaaacccuaugugugu

SEQ ID NO: 1060968 - RNA, 19 nt, Homo sapiens
  misc_RNA (1)...(19): siRNA sense strand
gaauguaggaaggucuuua

SEQ ID NO: 1060969 - RNA, 19 nt, Homo sapiens
  misc_RNA (1)...(19): siRNA sense strand
caucagagacuucauacug

SEQ ID NO: 1060970 - RNA, 19 nt, Homo sapiens
  misc_RNA (1)...(19): siRNA sense strand
gugagaaaccuuaugaaug

SEQ ID NO: 1060971 - RNA, 19 nt, Homo sapiens
  misc_RNA (1)...(19): siRNA sense strand
ccagagaauucacaccaau

SEQ ID NO: 1060972 - RNA, 19 nt, Homo sapiens
  misc_RNA (1)...(19): siRNA sense strand
gugagaaaccuuaugaaug

SEQ ID NO: 1060973 - RNA, 19 nt, Homo sapiens
  misc_RNA (1)...(19): siRNA sense strand
cauucaagaugucauucua

SEQ ID NO: 1060974 - RNA, 19 nt, Homo sapiens
  misc_RNA (1)...(19): siRNA sense strand
ucagagaauucauaucagu

SEQ ID NO: 1060975 - RNA, 19 nt, Homo sapiens
  misc_RNA (1)...(19): siRNA sense strand
gcucggaaauuagugaugu

SEQ ID NO: 1060976 - RNA, 19 nt, Homo sapiens
  misc_RNA (1)...(19): siRNA sense strand
ggaaauuagugauguucag

SEQ ID NO: 1060977 - RNA, 19 nt, Homo sapiens
  misc_RNA (1)...(19): siRNA sense strand
caacucagucuucaucaga

SEQ ID NO: 1060978 - RNA, 19 nt, Homo sapiens
  misc_RNA (1)...(19): siRNA sense strand
gaaacccuaugaauguaag

SEQ ID NO: 1060979 - RNA, 19 nt, Homo sapiens
  misc_RNA (1)...(19): siRNA sense strand
caacaucagcgaauucaca

SEQ ID NO: 1060980 - RNA, 19 nt, Homo sapiens
  misc_RNA (1)...(19): siRNA sense strand
ggaaggaggugucauuguu

SEQ ID NO: 1060981 - RNA, 19 nt, Homo sapiens
  misc_RNA (1)...(19): siRNA sense strand
gggccaaucugcucagcua

SEQ ID NO: 1060982 - RNA, 19 nt, Homo sapiens
  misc_RNA (1)...(19): siRNA sense strand
gaaggaggugucauuguuu

SEQ ID NO: 1060983 - RNA, 19 nt, Homo sapiens
  misc_RNA (1)...(19): siRNA sense strand
ccucuaggguccuccgaaa

SEQ ID NO: 1060984 - RNA, 19 nt, Homo sapiens
  misc_RNA (1)...(19): siRNA sense strand
ccaaucugcucagcuaaca

SEQ ID NO: 1060985 - RNA, 19 nt, Homo sapiens
  misc_RNA (1)...(19): siRNA sense strand
cagcuaacauuugccuuuc

SEQ ID NO: 1060986 - RNA, 19 nt, Homo sapiens
  misc_RNA (1)...(19): siRNA sense strand
ucagcuaacauuugccuuu

SEQ ID NO: 1060987 - RNA, 19 nt, Homo sapiens
  misc_RNA (1)...(19): siRNA sense strand
aaggaggugucauuguuug

SEQ ID NO: 1060988 - RNA, 19 nt, Homo sapiens
  misc_RNA (1)...(19): siRNA sense strand
gcuaacauuugccuuucag

SEQ ID NO: 1060989 - RNA, 19 nt, Homo sapiens
  misc_RNA (1)...(19): siRNA sense strand
aaucugcucagcuaacauu

SEQ ID NO: 1060990 - RNA, 19 nt, Homo sapiens
  misc_RNA (1)...(19): siRNA sense strand
ugucauuguuugcccuuuc

SEQ ID NO: 1060991 - RNA, 19 nt, Homo sapiens
  misc_RNA (1)...(19): siRNA sense strand
gcggaaggaggugucauug

SEQ ID NO: 1060992 - RNA, 19 nt, Homo sapiens
  misc_RNA (1)...(19): siRNA sense strand
cugcucagcuaacauuugc

SEQ ID NO: 1060993 - RNA, 19 nt, Homo sapiens
  misc_RNA (1)...(19): siRNA sense strand
caacagaucuuugcauaua

SEQ ID NO: 1060994 - RNA, 19 nt, Homo sapiens
  misc_RNA (1)...(19): siRNA sense strand
caaagaugguucuaacaua

SEQ ID NO: 1060995 - RNA, 19 nt, Homo sapiens
  misc_RNA (1)...(19): siRNA sense strand
uaagaaagcucgaagaaca

SEQ ID NO: 1060996 - RNA, 19 nt, Homo sapiens
  misc_RNA (1)...(19): siRNA sense strand
caggagagauucagaagua

SEQ ID NO: 1060997 - RNA, 19 nt, Homo sapiens
  misc_RNA (1)...(19): siRNA sense strand
ugaaagggaucuggaaaua

SEQ ID NO: 1060998 - RNA, 19 nt, Homo sapiens
  misc_RNA (1)...(19): siRNA sense strand
agacagaccugguagauga

SEQ ID NO: 1060999 - RNA, 19 nt, Homo sapiens
  misc_RNA (1)...(19): siRNA sense strand
gaugacagcagauccauua

SEQ ID NO: 1061000 - RNA, 19 nt, Homo sapiens
  misc_RNA (1)...(19): siRNA sense strand
ggaaauggaucagaggauu

SEQ ID NO: 1061001 - RNA, 19 nt, Homo sapiens
  misc_RNA (1)...(19): siRNA sense strand
gaagagacauuugguuuag

SEQ ID NO: 1061002 - RNA, 19 nt, Homo sapiens
  misc_RNA (1)...(19): siRNA sense strand
ugaguuagaugcuuugaaa

SEQ ID NO: 1061003 - RNA, 19 nt, Homo sapiens
  misc_RNA (1)...(19): siRNA sense strand
acagaaggcuuacaagauu

SEQ ID NO: 1061004 - RNA, 19 nt, Homo sapiens
  misc_RNA (1)...(19): siRNA sense strand
caagauuaauucagccaua

SEQ ID NO: 1061005 - RNA, 19 nt, Homo sapiens
  misc_RNA (1)...(19): siRNA sense strand
gaaauacuccaaacagcua

SEQ ID NO: 1061006 - RNA, 19 nt, Homo sapiens
  misc_RNA (1)...(19): siRNA sense strand
guaugaaacugaaguagga

SEQ ID NO: 1061007 - RNA, 19 nt, Homo sapiens
  misc_RNA (1)...(19): siRNA sense strand
gaaguauugccaagucuua

SEQ ID NO: 1061008 - RNA, 19 nt, Homo sapiens
  misc_RNA (1)...(19): siRNA sense strand
ggaauacaauuucuagaag

SEQ ID NO: 1061009 - RNA, 19 nt, Homo sapiens
  misc_RNA (1)...(19): siRNA sense strand
agauguggcuuccgucuua

SEQ ID NO: 1061010 - RNA, 19 nt, Homo sapiens
  misc_RNA (1)...(19): siRNA sense strand
caccacagaugaagaauug

SEQ ID NO: 1061011 - RNA, 19 nt, Homo sapiens
  misc_RNA (1)...(19): siRNA sense strand
aaagggaucuggaaauaau

SEQ ID NO: 1061012 - RNA, 19 nt, Homo sapiens
  misc_RNA (1)...(19): siRNA sense strand
aaagagaacugacaaggau

SEQ ID NO: 1061013 - RNA, 19 nt, Homo sapiens
  misc_RNA (1)...(19): siRNA sense strand
gaagcuacaugacaguaau

SEQ ID NO: 1061014 - RNA, 19 nt, Homo sapiens
  misc_RNA (1)...(19): siRNA sense strand
ugagagaucccaaugagua

SEQ ID NO: 1061015 - RNA, 19 nt, Homo sapiens
  misc_RNA (1)...(19): siRNA sense strand
gaaauaauccgagcauaca

SEQ ID NO: 1061016 - RNA, 19 nt, Homo sapiens
  misc_RNA (1)...(19): siRNA sense strand
ggacgaagccaaguucauu

SEQ ID NO: 1061017 - RNA, 19 nt, Homo sapiens
  misc_RNA (1)...(19): siRNA sense strand
gaaagggaucuggaaauaa

SEQ ID NO: 1061018 - RNA, 19 nt, Homo sapiens
  misc_RNA (1)...(19): siRNA sense strand
gcaccuugcucgagaagug

SEQ ID NO: 1061019 - RNA, 19 nt, Homo sapiens
  misc_RNA (1)...(19): siRNA sense strand
gagaauggguagauaugau

SEQ ID NO: 1061020 - RNA, 19 nt, Homo sapiens
  misc_RNA (1)...(19): siRNA sense strand
gaacauaagacacggaaag

SEQ ID NO: 1061021 - RNA, 19 nt, Homo sapiens
  misc_RNA (1)...(19): siRNA sense strand
ccaagggucuguuagugaa

SEQ ID NO: 1061022 - RNA, 19 nt, Homo sapiens
  misc_RNA (1)...(19): siRNA sense strand
gaagagagcccaggacaag

SEQ ID NO: 1061023 - RNA, 19 nt, Homo sapiens
  misc_RNA (1)...(19): siRNA sense strand
gggaauacaauuucuagaa

SEQ ID NO: 1061024 - RNA, 19 nt, Homo sapiens
  misc_RNA (1)...(19): siRNA sense strand
ugaaacaagugccaaagau

SEQ ID NO: 1061025 - RNA, 19 nt, Homo sapiens
  misc_RNA (1)...(19): siRNA sense strand
gaucugcaggugaccauua

SEQ ID NO: 1061026 - RNA, 19 nt, Homo sapiens
  misc_RNA (1)...(19): siRNA sense strand
aaacaaggcugacauucgu

SEQ ID NO: 1061027 - RNA, 19 nt, Homo sapiens
  misc_RNA (1)...(19): siRNA sense strand
gaaggcagcauuguuaguu

SEQ ID NO: 1061028 - RNA, 19 nt, Homo sapiens
  misc_RNA (1)...(19): siRNA sense strand
ugaagagacauuugguuua

SEQ ID NO: 1061029 - RNA, 19 nt, Homo sapiens
  misc_RNA (1)...(19): siRNA sense strand
cauaagggaugaagagaca

SEQ ID NO: 1061030 - RNA, 19 nt, Homo sapiens
  misc_RNA (1)...(19): siRNA sense strand
aaagaugguucuaacauag

SEQ ID NO: 1061031 - RNA, 19 nt, Homo sapiens
  misc_RNA (1)...(19): siRNA sense strand
caaggcagcuaugcaguug

SEQ ID NO: 1061032 - RNA, 19 nt, Homo sapiens
  misc_RNA (1)...(19): siRNA sense strand
uagaagcagucccaaauuc

SEQ ID NO: 1061033 - RNA, 19 nt, Homo sapiens
  misc_RNA (1)...(19): siRNA sense strand
agauguggcugcauugaaa

SEQ ID NO: 1061034 - RNA, 19 nt, Homo sapiens
  misc_RNA (1)...(19): siRNA sense strand
gaaacaagugccaaagaug

SEQ ID NO: 1061035 - RNA, 19 nt, Homo sapiens
  misc_RNA (1)...(19): siRNA sense strand
gagagaaacuggccaugac

SEQ ID NO: 1061036 - RNA, 19 nt, Homo sapiens
  misc_RNA (1)...(19): siRNA sense strand
gcuaagaaagcucgaagaa

SEQ ID NO: 1061037 - RNA, 19 nt, Homo sapiens
  misc_RNA (1)...(19): siRNA sense strand
gagaagagcaaguuaguac

SEQ ID NO: 1061038 - RNA, 19 nt, Homo sapiens
  misc_RNA (1)...(19): siRNA sense strand
ggaaauaauccgagcauac

SEQ ID NO: 1061039 - RNA, 19 nt, Homo sapiens
  misc_RNA (1)...(19): siRNA sense strand
gacauuugguuuagaagau

SEQ ID NO: 1061040 - RNA, 19 nt, Homo sapiens
  misc_RNA (1)...(19): siRNA sense strand
ggagagaaacuggccauga

SEQ ID NO: 1061041 - RNA, 19 nt, Homo sapiens
  misc_RNA (1)...(19): siRNA sense strand
aaacauagccuuucuucag

SEQ ID NO: 1061042 - RNA, 19 nt, Homo sapiens
  misc_RNA (1)...(19): siRNA sense strand
gaagucuaguuuccucaug

SEQ ID NO: 1061043 - RNA, 19 nt, Homo sapiens
  misc_RNA (1)...(19): siRNA sense strand
ugacaacgcuaaaucuuuu

SEQ ID NO: 1061044 - RNA, 19 nt, Homo sapiens
  misc_RNA (1)...(19): siRNA sense strand
caaguucauucccagagaa

SEQ ID NO: 1061045 - RNA, 19 nt, Homo sapiens
  misc_RNA (1)...(19): siRNA sense strand
gagagauucagaaguauug

SEQ ID NO: 1061046 - RNA, 19 nt, Homo sapiens
  misc_RNA (1)...(19): siRNA sense strand
gcaguugagugaguuggaa

SEQ ID NO: 1061047 - RNA, 19 nt, Homo sapiens
  misc_RNA (1)...(19): siRNA sense strand
gaaacaaggcugacauucg

SEQ ID NO: 1061048 - RNA, 19 nt, Homo sapiens
  misc_RNA (1)...(19): siRNA sense strand
ccauuaugcugguaggaaa

SEQ ID NO: 1061049 - RNA, 19 nt, Homo sapiens
  misc_RNA (1)...(19): siRNA sense strand
agagacauuugguuuagaa

SEQ ID NO: 1061050 - RNA, 19 nt, Homo sapiens
  misc_RNA (1)...(19): siRNA sense strand
cacagaagaucgaaauagu

SEQ ID NO: 1061051 - RNA, 19 nt, Homo sapiens
  misc_RNA (1)...(19): siRNA sense strand
ggaagcuacaugacaguaa

SEQ ID NO: 1061052 - RNA, 19 nt, Homo sapiens
  misc_RNA (1)...(19): siRNA sense strand
ccaugagacuguucccauu

SEQ ID NO: 1061053 - RNA, 19 nt, Homo sapiens
  misc_RNA (1)...(19): siRNA sense strand
caugagacuuugcaagaau

SEQ ID NO: 1061054 - RNA, 19 nt, Homo sapiens
  misc_RNA (1)...(19): siRNA sense strand
acucagaaguggaauacaa

SEQ ID NO: 1061055 - RNA, 19 nt, Homo sapiens
  misc_RNA (1)...(19): siRNA sense strand
agagugaguuagaugcuuu

SEQ ID NO: 1061056 - RNA, 19 nt, Homo sapiens
  misc_RNA (1)...(19): siRNA sense strand
ggagagauucagaaguauu

SEQ ID NO: 1061057 - RNA, 19 nt, Homo sapiens
  misc_RNA (1)...(19): siRNA sense strand
ucaaagcacagaaauggaa

SEQ ID NO: 1061058 - RNA, 19 nt, Homo sapiens
  misc_RNA (1)...(19): siRNA sense strand
gcauuauucugugaaacaa

SEQ ID NO: 1061059 - RNA, 19 nt, Homo sapiens
  misc_RNA (1)...(19): siRNA sense strand
caugagacuguucccauua

SEQ ID NO: 1061060 - RNA, 19 nt, Homo sapiens
  misc_RNA (1)...(19): siRNA sense strand
guugacagccugccugaaa

SEQ ID NO: 1061061 - RNA, 19 nt, Homo sapiens
  misc_RNA (1)...(19): siRNA sense strand
uucaacagaucuuugcaua

SEQ ID NO: 1061062 - RNA, 19 nt, Homo sapiens
  misc_RNA (1)...(19): siRNA sense strand
gaaaagugauuaugcugau

SEQ ID NO: 1061063 - RNA, 19 nt, Homo sapiens
  misc_RNA (1)...(19): siRNA sense strand
aaacaguuauagcaaguuc

SEQ ID NO: 1061064 - RNA, 19 nt, Homo sapiens
  misc_RNA (1)...(19): siRNA sense strand
gagaucagacuucaaagca

SEQ ID NO: 1061065 - RNA, 19 nt, Homo sapiens
  misc_RNA (1)...(19): siRNA sense strand
gaaaacaguuauagcaagu

SEQ ID NO: 1061066 - RNA, 19 nt, Homo sapiens
  misc_RNA (1)...(19): siRNA sense strand
gaagauguggcugcauuga

SEQ ID NO: 1061067 - RNA, 19 nt, Homo sapiens
  misc_RNA (1)...(19): siRNA sense strand
gacagcagauccauuacca

SEQ ID NO: 1061068 - RNA, 19 nt, Homo sapiens
  misc_RNA (1)...(19): siRNA sense strand
ucagaaguauugccaaguc

SEQ ID NO: 1061069 - RNA, 19 nt, Homo sapiens
  misc_RNA (1)...(19): siRNA sense strand
cagaaggcuuacaagauug

SEQ ID NO: 1061070 - RNA, 19 nt, Homo sapiens
  misc_RNA (1)...(19): siRNA sense strand
ccaaguucauucccagaga

SEQ ID NO: 1061071 - RNA, 19 nt, Homo sapiens
  misc_RNA (1)...(19): siRNA sense strand
gauuaauucagccauauga

SEQ ID NO: 1061072 - RNA, 19 nt, Homo sapiens
  misc_RNA (1)...(19): siRNA sense strand
gaacuucauccgugagauc

SEQ ID NO: 1061073 - RNA, 19 nt, Homo sapiens
  misc_RNA (1)...(19): siRNA sense strand
ggauggagaacgaacaguu

SEQ ID NO: 1061074 - RNA, 19 nt, Homo sapiens
  misc_RNA (1)...(19): siRNA sense strand
ucacagaaggcuuacaaga

SEQ ID NO: 1061075 - RNA, 19 nt, Homo sapiens
  misc_RNA (1)...(19): siRNA sense strand
agugaaggcagcauuguua

SEQ ID NO: 1061076 - RNA, 19 nt, Homo sapiens
  misc_RNA (1)...(19): siRNA sense strand
agacaaacauagccuuucu

SEQ ID NO: 1061077 - RNA, 19 nt, Homo sapiens
  misc_RNA (1)...(19): siRNA sense strand
gaaauggaucagaggauuc

SEQ ID NO: 1061078 - RNA, 19 nt, Homo sapiens
  misc_RNA (1)...(19): siRNA sense strand
gcuaugcaguugagugagu

SEQ ID NO: 1061079 - RNA, 19 nt, Homo sapiens
  misc_RNA (1)...(19): siRNA sense strand
gaaacuggccaugacguau

SEQ ID NO: 1061080 - RNA, 19 nt, Homo sapiens
  misc_RNA (1)...(19): siRNA sense strand
caagaaugaauuucgagaa

SEQ ID NO: 1061081 - RNA, 19 nt, Homo sapiens
  misc_RNA (1)...(19): siRNA sense strand
gaugacaacgcuaaaucuu

SEQ ID NO: 1061082 - RNA, 19 nt, Homo sapiens
  misc_RNA (1)...(19): siRNA sense strand
ggucaucccgcucuuccua

SEQ ID NO: 1061083 - RNA, 19 nt, Homo sapiens
  misc_RNA (1)...(19): siRNA sense strand
ugagaggcaaauugaaaua

SEQ ID NO: 1061084 - RNA, 19 nt, Homo sapiens
  misc_RNA (1)...(19): siRNA sense strand
aggaagauguggcugcauu

SEQ ID NO: 1061085 - RNA, 19 nt, Homo sapiens
  misc_RNA (1)...(19): siRNA sense strand
gauucaggcugcagaacau

SEQ ID NO: 1061086 - RNA, 19 nt, Homo sapiens
  misc_RNA (1)...(19): siRNA sense strand
ccaaagaugguucuaacau

SEQ ID NO: 1061087 - RNA, 19 nt, Homo sapiens
  misc_RNA (1)...(19): siRNA sense strand
gcucacagaaggcuuacaa

SEQ ID NO: 1061088 - RNA, 19 nt, Homo sapiens
  misc_RNA (1)...(19): siRNA sense strand
ggagagcuuuggaggugau

SEQ ID NO: 1061089 - RNA, 19 nt, Homo sapiens
  misc_RNA (1)...(19): siRNA sense strand
cuacaugacaguaaugaug

SEQ ID NO: 1061090 - RNA, 19 nt, Homo sapiens
  misc_RNA (1)...(19): siRNA sense strand
ccucagacgucaguaugaa

SEQ ID NO: 1061091 - RNA, 19 nt, Homo sapiens
  misc_RNA (1)...(19): siRNA sense strand
auacgagaauggguagaua

SEQ ID NO: 1061092 - RNA, 19 nt, Homo sapiens
  misc_RNA (1)...(19): siRNA sense strand
ccacagaugaagaauuguu

SEQ ID NO: 1061093 - RNA, 19 nt, Homo sapiens
  misc_RNA (1)...(19): siRNA sense strand
ggaaaucuaucccuacuga

SEQ ID NO: 1061094 - RNA, 19 nt, Homo sapiens
  misc_RNA (1)...(19): siRNA sense strand
caucaaagguggacucaaa

SEQ ID NO: 1061095 - RNA, 19 nt, Homo sapiens
  misc_RNA (1)...(19): siRNA sense strand
caacuuauguguucuugaa

SEQ ID NO: 1061096 - RNA, 19 nt, Homo sapiens
  misc_RNA (1)...(19): siRNA sense strand
gaaaccaucucaauaucuu

SEQ ID NO: 1061097 - RNA, 19 nt, Homo sapiens
  misc_RNA (1)...(19): siRNA sense strand
ggaaaugcaugcugaaauc

SEQ ID NO: 1061098 - RNA, 19 nt, Homo sapiens
  misc_RNA (1)...(19): siRNA sense strand
gaauuggcaucuuuguaua

SEQ ID NO: 1061099 - RNA, 19 nt, Homo sapiens
  misc_RNA (1)...(19): siRNA sense strand
gaacaaacuucagcaggaa

SEQ ID NO: 1061100 - RNA, 19 nt, Homo sapiens
  misc_RNA (1)...(19): siRNA sense strand
gaauagaguugcugaaagg

SEQ ID NO: 1061101 - RNA, 19 nt, Homo sapiens
  misc_RNA (1)...(19): siRNA sense strand
gaugaugagugcuuaguga

SEQ ID NO: 1061102 - RNA, 19 nt, Homo sapiens
  misc_RNA (1)...(19): siRNA sense strand
caaggcaacuuauguguuc

SEQ ID NO: 1061103 - RNA, 19 nt, Homo sapiens
  misc_RNA (1)...(19): siRNA sense strand
gcagagaauugccgggaaa

SEQ ID NO: 1061104 - RNA, 19 nt, Homo sapiens
  misc_RNA (1)...(19): siRNA sense strand
gcacaagaaguauuucaaa

SEQ ID NO: 1061105 - RNA, 19 nt, Homo sapiens
  misc_RNA (1)...(19): siRNA sense strand
gcaggcauauuacuauuca

SEQ ID NO: 1061106 - RNA, 19 nt, Homo sapiens
  misc_RNA (1)...(19): siRNA sense strand
ggaacaacuacaaagauua

SEQ ID NO: 1061107 - RNA, 19 nt, Homo sapiens
  misc_RNA (1)...(19): siRNA sense strand
gauguugccucaagaacuu

SEQ ID NO: 1061108 - RNA, 19 nt, Homo sapiens
  misc_RNA (1)...(19): siRNA sense strand
agacuacacuucagaauuc

SEQ ID NO: 1061109 - RNA, 19 nt, Homo sapiens
  misc_RNA (1)...(19): siRNA sense strand
gccauaaaguuccuagaaa

SEQ ID NO: 1061110 - RNA, 19 nt, Homo sapiens
  misc_RNA (1)...(19): siRNA sense strand
gaacuauguuacaaucaug

SEQ ID NO: 1061111 - RNA, 19 nt, Homo sapiens
  misc_RNA (1)...(19): siRNA sense strand
gaaggacgcuuuacaaacc

SEQ ID NO: 1061112 - RNA, 19 nt, Homo sapiens
  misc_RNA (1)...(19): siRNA sense strand
caucuuaccugcccuggaa

SEQ ID NO: 1061113 - RNA, 19 nt, Homo sapiens
  misc_RNA (1)...(19): siRNA sense strand
ggaauucuucuaugaguuu

SEQ ID NO: 1061114 - RNA, 19 nt, Homo sapiens
  misc_RNA (1)...(19): siRNA sense strand
gcaacugagugaagaggaa

SEQ ID NO: 1061115 - RNA, 19 nt, Homo sapiens
  misc_RNA (1)...(19): siRNA sense strand
ugaagaggcacaagaagua

SEQ ID NO: 1061116 - RNA, 19 nt, Homo sapiens
  misc_RNA (1)...(19): siRNA sense strand
gaagaugccuuggaaacca

SEQ ID NO: 1061117 - RNA, 19 nt, Homo sapiens
  misc_RNA (1)...(19): siRNA sense strand
caaccaagguggaucucaa

SEQ ID NO: 1061118 - RNA, 19 nt, Homo sapiens
  misc_RNA (1)...(19): siRNA sense strand
uaaaggauguugccucaag

SEQ ID NO: 1061119 - RNA, 19 nt, Homo sapiens
  misc_RNA (1)...(19): siRNA sense strand
caagaagaauggaaacagu

SEQ ID NO: 1061120 - RNA, 19 nt, Homo sapiens
  misc_RNA (1)...(19): siRNA sense strand
caaauuuacagacgccuua

SEQ ID NO: 1061121 - RNA, 19 nt, Homo sapiens
  misc_RNA (1)...(19): siRNA sense strand
gaaauugacaaggccauaa

SEQ ID NO: 1061122 - RNA, 19 nt, Homo sapiens
  misc_RNA (1)...(19): siRNA sense strand
gaaucuuucucaagucuuc

SEQ ID NO: 1061123 - RNA, 19 nt, Homo sapiens
  misc_RNA (1)...(19): siRNA sense strand
gaacaacuacaaagauuac

SEQ ID NO: 1061124 - RNA, 19 nt, Homo sapiens
  misc_RNA (1)...(19): siRNA sense strand
gaaguaugaccacuaccua

SEQ ID NO: 1061125 - RNA, 19 nt, Homo sapiens
  misc_RNA (1)...(19): siRNA sense strand
gcuuaaccaucuuagcuuu

SEQ ID NO: 1061126 - RNA, 19 nt, Homo sapiens
  misc_RNA (1)...(19): siRNA sense strand
gaaagcugcacucacguuu

SEQ ID NO: 1061127 - RNA, 19 nt, Homo sapiens
  misc_RNA (1)...(19): siRNA sense strand
caagguggaucucaagagu

SEQ ID NO: 1061128 - RNA, 19 nt, Homo sapiens
  misc_RNA (1)...(19): siRNA sense strand
ugugguaacuuuauucaga

SEQ ID NO: 1061129 - RNA, 19 nt, Homo sapiens
  misc_RNA (1)...(19): siRNA sense strand
ucucaagucuucuuucuag

SEQ ID NO: 1061130 - RNA, 19 nt, Homo sapiens
  misc_RNA (1)...(19): siRNA sense strand
gagaaaaccuuccucagau

SEQ ID NO: 1061131 - RNA, 19 nt, Homo sapiens
  misc_RNA (1)...(19): siRNA sense strand
ugaauuggcaucuuuguau

SEQ ID NO: 1061132 - RNA, 19 nt, Homo sapiens
  misc_RNA (1)...(19): siRNA sense strand
gagaaugugguaacuuuau

SEQ ID NO: 1061133 - RNA, 19 nt, Homo sapiens
  misc_RNA (1)...(19): siRNA sense strand
gcauauuacuauucagauc

SEQ ID NO: 1061134 - RNA, 19 nt, Homo sapiens
  misc_RNA (1)...(19): siRNA sense strand
gcugaacuauguuacaauc

SEQ ID NO: 1061135 - RNA, 19 nt, Homo sapiens
  misc_RNA (1)...(19): siRNA sense strand
acacaguuguagaaucuuu

SEQ ID NO: 1061136 - RNA, 19 nt, Homo sapiens
  misc_RNA (1)...(19): siRNA sense strand
caaggaacaacuacaaaga

SEQ ID NO: 1061137 - RNA, 19 nt, Homo sapiens
  misc_RNA (1)...(19): siRNA sense strand
ugacaaggccauaaaguuc

SEQ ID NO: 1061138 - RNA, 19 nt, Homo sapiens
  misc_RNA (1)...(19): siRNA sense strand
cucaauaucuucucacuca

SEQ ID NO: 1061139 - RNA, 19 nt, Homo sapiens
  misc_RNA (1)...(19): siRNA sense strand
cagcaggaauucuucuaug

SEQ ID NO: 1061140 - RNA, 19 nt, Homo sapiens
  misc_RNA (1)...(19): siRNA sense strand
uuacagacgccuuagaauu

SEQ ID NO: 1061141 - RNA, 19 nt, Homo sapiens
  misc_RNA (1)...(19): siRNA sense strand
aggaacaacuacaaagauu

SEQ ID NO: 1061142 - RNA, 19 nt, Homo sapiens
  misc_RNA (1)...(19): siRNA sense strand
cgaauagaguugcugaaag

SEQ ID NO: 1061143 - RNA, 19 nt, Homo sapiens
  misc_RNA (1)...(19): siRNA sense strand
ucagacagguggacagcuu

SEQ ID NO: 1061144 - RNA, 19 nt, Homo sapiens
  misc_RNA (1)...(19): siRNA sense strand
gaugagugcuuagugaagu

SEQ ID NO: 1061145 - RNA, 19 nt, Homo sapiens
  misc_RNA (1)...(19): siRNA sense strand
gaggaucccuggagcaacu

SEQ ID NO: 1061146 - RNA, 19 nt, Homo sapiens
  misc_RNA (1)...(19): siRNA sense strand
gcaaggaacaacuacaaag

SEQ ID NO: 1061147 - RNA, 19 nt, Homo sapiens
  misc_RNA (1)...(19): siRNA sense strand
ggaaauugacaaggccaua

SEQ ID NO: 1061148 - RNA, 19 nt, Homo sapiens
  misc_RNA (1)...(19): siRNA sense strand
cagcaaggauuaucagacu

SEQ ID NO: 1061149 - RNA, 19 nt, Homo sapiens
  misc_RNA (1)...(19): siRNA sense strand
ccgagugucuccuacagaa

SEQ ID NO: 1061150 - RNA, 19 nt, Homo sapiens
  misc_RNA (1)...(19): siRNA sense strand
caagaguggccucgaagaa

SEQ ID NO: 1061151 - RNA, 19 nt, Homo sapiens
  misc_RNA (1)...(19): siRNA sense strand
augagaaugugguaacuuu

SEQ ID NO: 1061152 - RNA, 19 nt, Homo sapiens
  misc_RNA (1)...(19): siRNA sense strand
uuacaucucccuaauacuu

SEQ ID NO: 1061153 - RNA, 19 nt, Homo sapiens
  misc_RNA (1)...(19): siRNA sense strand
uacagacgccuuagaauug

SEQ ID NO: 1061154 - RNA, 19 nt, Homo sapiens
  misc_RNA (1)...(19): siRNA sense strand
ucacguuugugcaggauga

SEQ ID NO: 1061155 - RNA, 19 nt, Homo sapiens
  misc_RNA (1)...(19): siRNA sense strand
ccauaaaguuccuagaaac

SEQ ID NO: 1061156 - RNA, 19 nt, Homo sapiens
  misc_RNA (1)...(19): siRNA sense strand
cuugcaagcugaacuaugu

SEQ ID NO: 1061157 - RNA, 19 nt, Homo sapiens
  misc_RNA (1)...(19): siRNA sense strand
gcuguggcauugaacuuau

SEQ ID NO: 1061158 - RNA, 19 nt, Homo sapiens
  misc_RNA (1)...(19): siRNA sense strand
ggagaaaaccuuccucaga

SEQ ID NO: 1061159 - RNA, 19 nt, Homo sapiens
  misc_RNA (1)...(19): siRNA sense strand
ggccauaaaguuccuagaa

SEQ ID NO: 1061160 - RNA, 19 nt, Homo sapiens
  misc_RNA (1)...(19): siRNA sense strand
acaagcagccuucacuuug

SEQ ID NO: 1061161 - RNA, 19 nt, Homo sapiens
  misc_RNA (1)...(19): siRNA sense strand
agaguggccucgaagaaug

SEQ ID NO: 1061162 - RNA, 19 nt, Homo sapiens
  misc_RNA (1)...(19): siRNA sense strand
gcucuucaccucuggagaa

SEQ ID NO: 1061163 - RNA, 19 nt, Homo sapiens
  misc_RNA (1)...(19): siRNA sense strand
auucagaucugcuuugcaa

SEQ ID NO: 1061164 - RNA, 19 nt, Homo sapiens
  misc_RNA (1)...(19): siRNA sense strand
uuucgaagaugccuuggaa

SEQ ID NO: 1061165 - RNA, 19 nt, Homo sapiens
  misc_RNA (1)...(19): siRNA sense strand
aaagguggacucaaaauua

SEQ ID NO: 1061166 - RNA, 19 nt, Homo sapiens
  misc_RNA (1)...(19): siRNA sense strand
gaagaggcacaagaaguau

SEQ ID NO: 1061167 - RNA, 19 nt, Homo sapiens
  misc_RNA (1)...(19): siRNA sense strand
gcaguggggccuuuaauuu

SEQ ID NO: 1061168 - RNA, 19 nt, Homo sapiens
  misc_RNA (1)...(19): siRNA sense strand
ugucagcaguucaucauca

SEQ ID NO: 1061169 - RNA, 19 nt, Homo sapiens
  misc_RNA (1)...(19): siRNA sense strand
gcaacaagcagccuucacu

SEQ ID NO: 1061170 - RNA, 19 nt, Homo sapiens
  misc_RNA (1)...(19): siRNA sense strand
ggaaaccaucucaauaucu

SEQ ID NO: 1061171 - RNA, 19 nt, Homo sapiens
  misc_RNA (1)...(19): siRNA sense strand
gaggaaggcucggcguuac

SEQ ID NO: 1061172 - RNA, 19 nt, Homo sapiens
  misc_RNA (1)...(19): siRNA sense strand
caggaauucuucuaugagu

SEQ ID NO: 1061173 - RNA, 19 nt, Homo sapiens
  misc_RNA (1)...(19): siRNA sense strand
gggcuaaggagaguaugua

SEQ ID NO: 1061174 - RNA, 19 nt, Homo sapiens
  misc_RNA (1)...(19): siRNA sense strand
aaacugcaaggaacaacua

SEQ ID NO: 1061175 - RNA, 19 nt, Homo sapiens
  misc_RNA (1)...(19): siRNA sense strand
gaauugccgggaaaucuau

SEQ ID NO: 1061176 - RNA, 19 nt, Homo sapiens
  misc_RNA (1)...(19): siRNA sense strand
gaaugagaaugugguaacu

SEQ ID NO: 1061177 - RNA, 19 nt, Homo sapiens
  misc_RNA (1)...(19): siRNA sense strand
auacuuacaucucccuaau

SEQ ID NO: 1061178 - RNA, 19 nt, Homo sapiens
  misc_RNA (1)...(19): siRNA sense strand
aagcugcacucacguuugu

SEQ ID NO: 1061179 - RNA, 19 nt, Homo sapiens
  misc_RNA (1)...(19): siRNA sense strand
ggacauccagaacggcauu

SEQ ID NO: 1061180 - RNA, 19 nt, Homo sapiens
  misc_RNA (1)...(19): siRNA sense strand
cagacuacacuucagaauu

SEQ ID NO: 1061181 - RNA, 19 nt, Homo sapiens
  misc_RNA (1)...(19): siRNA sense strand
aagcugaacuauguuacaa

SEQ ID NO: 1061182 - RNA, 19 nt, Homo sapiens
  misc_RNA (1)...(19): siRNA sense strand
gcguuacuccgccuccuua

SEQ ID NO: 1061183 - RNA, 19 nt, Homo sapiens
  misc_RNA (1)...(19): siRNA sense strand
ugaggaaggcucggcguua

SEQ ID NO: 1061184 - RNA, 19 nt, Homo sapiens
  misc_RNA (1)...(19): siRNA sense strand
gcguuucaguucaagaaga

SEQ ID NO: 1061185 - RNA, 19 nt, Homo sapiens
  misc_RNA (1)...(19): siRNA sense strand
gauuaucagacuacuagaa

SEQ ID NO: 1061186 - RNA, 19 nt, Homo sapiens
  misc_RNA (1)...(19): siRNA sense strand
caugaaggacgcuuuacaa

SEQ ID NO: 1061187 - RNA, 19 nt, Homo sapiens
  misc_RNA (1)...(19): siRNA sense strand
gaggaaaugcaugcugaaa

SEQ ID NO: 1061188 - RNA, 19 nt, Homo sapiens
  misc_RNA (1)...(19): siRNA sense strand
gagaauugccgggaaaucu

SEQ ID NO: 1061189 - RNA, 19 nt, Homo sapiens
  misc_RNA (1)...(19): siRNA sense strand
caacaagcagccuucacuu

SEQ ID NO: 1061190 - RNA, 19 nt, Homo sapiens
  misc_RNA (1)...(19): siRNA sense strand
gcugaaagggaaucuugaa

SEQ ID NO: 1061191 - RNA, 19 nt, Homo sapiens
  misc_RNA (1)...(19): siRNA sense strand
uagcaacgaaugagaaugu

SEQ ID NO: 1061192 - RNA, 19 nt, Homo sapiens
  misc_RNA (1)...(19): siRNA sense strand
ucucaagaguggccucgaa

SEQ ID NO: 1061193 - RNA, 19 nt, Homo sapiens
  misc_RNA (1)...(19): siRNA sense strand
ggaaugagacaagaugaca

SEQ ID NO: 1061194 - RNA, 19 nt, Homo sapiens
  misc_RNA (1)...(19): siRNA sense strand
gagggaaugagacaagaug

SEQ ID NO: 1061195 - RNA, 19 nt, Homo sapiens
  misc_RNA (1)...(19): siRNA sense strand
ggucuugggagaauucaau

SEQ ID NO: 1061196 - RNA, 19 nt, Homo sapiens
  misc_RNA (1)...(19): siRNA sense strand
gcaggucuugggagaauuc

SEQ ID NO: 1061197 - RNA, 19 nt, Homo sapiens
  misc_RNA (1)...(19): siRNA sense strand
caucccagcucugcucagu

SEQ ID NO: 1061198 - RNA, 19 nt, Homo sapiens
  misc_RNA (1)...(19): siRNA sense strand
cugcaggucuugggagaau

SEQ ID NO: 1061199 - RNA, 19 nt, Homo sapiens
  misc_RNA (1)...(19): siRNA sense strand
caaguccacagcaggaaau

SEQ ID NO: 1061200 - RNA, 19 nt, Homo sapiens
  misc_RNA (1)...(19): siRNA sense strand
ucccagcucugcucaguac

SEQ ID NO: 1061201 - RNA, 19 nt, Homo sapiens
  misc_RNA (1)...(19): siRNA sense strand
gcuccaagaaccacaaguc

SEQ ID NO: 1061202 - RNA, 19 nt, Homo sapiens
  misc_RNA (1)...(19): siRNA sense strand
caaaagagggugacaaacu

SEQ ID NO: 1061203 - RNA, 19 nt, Homo sapiens
  misc_RNA (1)...(19): siRNA sense strand
ggagggaaugagacaagau

SEQ ID NO: 1061204 - RNA, 19 nt, Homo sapiens
  misc_RNA (1)...(19): siRNA sense strand
ugacaaacucagccucaca

SEQ ID NO: 1061205 - RNA, 19 nt, Homo sapiens
  misc_RNA (1)...(19): siRNA sense strand
acuaagaguugauguguuu

SEQ ID NO: 1061206 - RNA, 19 nt, Homo sapiens
  misc_RNA (1)...(19): siRNA sense strand
uagugaaucugucagguau

SEQ ID NO: 1061207 - RNA, 19 nt, Homo sapiens
  misc_RNA (1)...(19): siRNA sense strand
gcauucugccuguuucuga

SEQ ID NO: 1061208 - RNA, 19 nt, Homo sapiens
  misc_RNA (1)...(19): siRNA sense strand
gccuguuucugaagcuuaa

SEQ ID NO: 1061209 - RNA, 19 nt, Homo sapiens
  misc_RNA (1)...(19): siRNA sense strand
uaagaguugauguguuuga

SEQ ID NO: 1061210 - RNA, 19 nt, Homo sapiens
  misc_RNA (1)...(19): siRNA sense strand
gugaaucugucagguaugg

SEQ ID NO: 1061211 - RNA, 19 nt, Homo sapiens
  misc_RNA (1)...(19): siRNA sense strand
uuagugaaucugucaggua

SEQ ID NO: 1061212 - RNA, 19 nt, Homo sapiens
  misc_RNA (1)...(19): siRNA sense strand
caucaucaucauccucuga

SEQ ID NO: 1061213 - RNA, 19 nt, Homo sapiens
  misc_RNA (1)...(19): siRNA sense strand
cauucugccuguuucugaa

SEQ ID NO: 1061214 - RNA, 19 nt, Homo sapiens
  misc_RNA (1)...(19): siRNA sense strand
ugucagguauggcauucug

SEQ ID NO: 1061215 - RNA, 19 nt, Homo sapiens
  misc_RNA (1)...(19): siRNA sense strand
uguuugaucagguuaguga

SEQ ID NO: 1061216 - RNA, 19 nt, Homo sapiens
  misc_RNA (1)...(19): siRNA sense strand
gaacauacuugucucagaa

SEQ ID NO: 1061217 - RNA, 19 nt, Homo sapiens
  misc_RNA (1)...(19): siRNA sense strand
caacaccucccgacuauua

SEQ ID NO: 1061218 - RNA, 19 nt, Homo sapiens
  misc_RNA (1)...(19): siRNA sense strand
gagaaaacauggcaauuua

SEQ ID NO: 1061219 - RNA, 19 nt, Homo sapiens
  misc_RNA (1)...(19): siRNA sense strand
caaagucggauauaaagua

SEQ ID NO: 1061220 - RNA, 19 nt, Homo sapiens
  misc_RNA (1)...(19): siRNA sense strand
uaaacgagguucugucuuc

SEQ ID NO: 1061221 - RNA, 19 nt, Homo sapiens
  misc_RNA (1)...(19): siRNA sense strand
gagaagacauagacgguau

SEQ ID NO: 1061222 - RNA, 19 nt, Homo sapiens
  misc_RNA (1)...(19): siRNA sense strand
caacauaaucagccacaua

SEQ ID NO: 1061223 - RNA, 19 nt, Homo sapiens
  misc_RNA (1)...(19): siRNA sense strand
gaagguggccugcauggaa

SEQ ID NO: 1061224 - RNA, 19 nt, Homo sapiens
  misc_RNA (1)...(19): siRNA sense strand
caagaugccugcuggugaa

SEQ ID NO: 1061225 - RNA, 19 nt, Homo sapiens
  misc_RNA (1)...(19): siRNA sense strand
gaagacauagacgguauua

SEQ ID NO: 1061226 - RNA, 19 nt, Homo sapiens
  misc_RNA (1)...(19): siRNA sense strand
ugacaaagucggauauaaa

SEQ ID NO: 1061227 - RNA, 19 nt, Homo sapiens
  misc_RNA (1)...(19): siRNA sense strand
uaagagagcucgaaaacaa

SEQ ID NO: 1061228 - RNA, 19 nt, Homo sapiens
  misc_RNA (1)...(19): siRNA sense strand
caagugaauuugcuucuca

SEQ ID NO: 1061229 - RNA, 19 nt, Homo sapiens
  misc_RNA (1)...(19): siRNA sense strand
gccaacaccucccgacuau

SEQ ID NO: 1061230 - RNA, 19 nt, Homo sapiens
  misc_RNA (1)...(19): siRNA sense strand
gaauuugcuucucaccauu

SEQ ID NO: 1061231 - RNA, 19 nt, Homo sapiens
  misc_RNA (1)...(19): siRNA sense strand
acaaacagaugcaauggau

SEQ ID NO: 1061232 - RNA, 19 nt, Homo sapiens
  misc_RNA (1)...(19): siRNA sense strand
cauggucgaucacaucauu

SEQ ID NO: 1061233 - RNA, 19 nt, Homo sapiens
  misc_RNA (1)...(19): siRNA sense strand
aaacugaaaucucugacau

SEQ ID NO: 1061234 - RNA, 19 nt, Homo sapiens
  misc_RNA (1)...(19): siRNA sense strand
ccagaacuaucucuaaguc

SEQ ID NO: 1061235 - RNA, 19 nt, Homo sapiens
  misc_RNA (1)...(19): siRNA sense strand
guucagcagugcaagagaa

SEQ ID NO: 1061236 - RNA, 19 nt, Homo sapiens
  misc_RNA (1)...(19): siRNA sense strand
acaaagaagggaaguacua

SEQ ID NO: 1061237 - RNA, 19 nt, Homo sapiens
  misc_RNA (1)...(19): siRNA sense strand
ugggaaaccguuaguauuu

SEQ ID NO: 1061238 - RNA, 19 nt, Homo sapiens
  misc_RNA (1)...(19): siRNA sense strand
caagacagggaccaucuaa

SEQ ID NO: 1061239 - RNA, 19 nt, Homo sapiens
  misc_RNA (1)...(19): siRNA sense strand
cuuacaggcucauaucaaa

SEQ ID NO: 1061240 - RNA, 19 nt, Homo sapiens
  misc_RNA (1)...(19): siRNA sense strand
cuaucacugugcuaauuua

SEQ ID NO: 1061241 - RNA, 19 nt, Homo sapiens
  misc_RNA (1)...(19): siRNA sense strand
gaccuacgauccaucaucu

SEQ ID NO: 1061242 - RNA, 19 nt, Homo sapiens
  misc_RNA (1)...(19): siRNA sense strand
uaugaauucuccuccacua

SEQ ID NO: 1061243 - RNA, 19 nt, Homo sapiens
  misc_RNA (1)...(19): siRNA sense strand
uaaaaucuaugggcgaaua

SEQ ID NO: 1061244 - RNA, 19 nt, Homo sapiens
  misc_RNA (1)...(19): siRNA sense strand
gguaauccaucugcaagug

SEQ ID NO: 1061245 - RNA, 19 nt, Homo sapiens
  misc_RNA (1)...(19): siRNA sense strand
gagguucugucuucaugug

SEQ ID NO: 1061246 - RNA, 19 nt, Homo sapiens
  misc_RNA (1)...(19): siRNA sense strand
cagaugcaauggaucauag

SEQ ID NO: 1061247 - RNA, 19 nt, Homo sapiens
  misc_RNA (1)...(19): siRNA sense strand
ugaauuugcuucucaccau

SEQ ID NO: 1061248 - RNA, 19 nt, Homo sapiens
  misc_RNA (1)...(19): siRNA sense strand
ccaauucauuucugugaca

SEQ ID NO: 1061249 - RNA, 19 nt, Homo sapiens
  misc_RNA (1)...(19): siRNA sense strand
cauagaagguggccugcau

SEQ ID NO: 1061250 - RNA, 19 nt, Homo sapiens
  misc_RNA (1)...(19): siRNA sense strand
aaacagaugcaauggauca

SEQ ID NO: 1061251 - RNA, 19 nt, Homo sapiens
  misc_RNA (1)...(19): siRNA sense strand
gccacaaacugaaaucucu

SEQ ID NO: 1061252 - RNA, 19 nt, Homo sapiens
  misc_RNA (1)...(19): siRNA sense strand
gacaaagucggauauaaag

SEQ ID NO: 1061253 - RNA, 19 nt, Homo sapiens
  misc_RNA (1)...(19): siRNA sense strand
gcaagacagggaccaucua

SEQ ID NO: 1061254 - RNA, 19 nt, Homo sapiens
  misc_RNA (1)...(19): siRNA sense strand
cgacuauuauccugagugu

SEQ ID NO: 1061255 - RNA, 19 nt, Homo sapiens
  misc_RNA (1)...(19): siRNA sense strand
gguucugucuucaugugua

SEQ ID NO: 1061256 - RNA, 19 nt, Homo sapiens
  misc_RNA (1)...(19): siRNA sense strand
uacaagagcaacauaauca

SEQ ID NO: 1061257 - RNA, 19 nt, Homo sapiens
  misc_RNA (1)...(19): siRNA sense strand
gaccaucuaagcuauauuc

SEQ ID NO: 1061258 - RNA, 19 nt, Homo sapiens
  misc_RNA (1)...(19): siRNA sense strand
aaaguucguccucauauug

SEQ ID NO: 1061259 - RNA, 19 nt, Homo sapiens
  misc_RNA (1)...(19): siRNA sense strand
gcuaucacugugcuaauuu

SEQ ID NO: 1061260 - RNA, 19 nt, Homo sapiens
  misc_RNA (1)...(19): siRNA sense strand
cauggcaauuuaacaguug

SEQ ID NO: 1061261 - RNA, 19 nt, Homo sapiens
  misc_RNA (1)...(19): siRNA sense strand
gggaccaucuaagcuauau

SEQ ID NO: 1061262 - RNA, 19 nt, Homo sapiens
  misc_RNA (1)...(19): siRNA sense strand
gaauugaggcgcauaaacg

SEQ ID NO: 1061263 - RNA, 19 nt, Homo sapiens
  misc_RNA (1)...(19): siRNA sense strand
uaaaccaucaaaugccaua

SEQ ID NO: 1061264 - RNA, 19 nt, Homo sapiens
  misc_RNA (1)...(19): siRNA sense strand
uaauccaucugcaagugaa

SEQ ID NO: 1061265 - RNA, 19 nt, Homo sapiens
  misc_RNA (1)...(19): siRNA sense strand
caucauaggugaaaaggau

SEQ ID NO: 1061266 - RNA, 19 nt, Homo sapiens
  misc_RNA (1)...(19): siRNA sense strand
ucacaccagagaagacaua

SEQ ID NO: 1061267 - RNA, 19 nt, Homo sapiens
  misc_RNA (1)...(19): siRNA sense strand
aaggaugauuuaccaauuc

SEQ ID NO: 1061268 - RNA, 19 nt, Homo sapiens
  misc_RNA (1)...(19): siRNA sense strand
aacauaaucagccacauaa

SEQ ID NO: 1061269 - RNA, 19 nt, Homo sapiens
  misc_RNA (1)...(19): siRNA sense strand
agaacauacuugucucaga

SEQ ID NO: 1061270 - RNA, 19 nt, Homo sapiens
  misc_RNA (1)...(19): siRNA sense strand
gaugccugcuggugaacaa

SEQ ID NO: 1061271 - RNA, 19 nt, Homo sapiens
  misc_RNA (1)...(19): siRNA sense strand
gcaauuuaacaguugauca

SEQ ID NO: 1061272 - RNA, 19 nt, Homo sapiens
  misc_RNA (1)...(19): siRNA sense strand
gugggaaaccguuaguauu

SEQ ID NO: 1061273 - RNA, 19 nt, Homo sapiens
  misc_RNA (1)...(19): siRNA sense strand
uaacaaagaagggaaguac

SEQ ID NO: 1061274 - RNA, 19 nt, Homo sapiens
  misc_RNA (1)...(19): siRNA sense strand
agucggauauaaaguaugu

SEQ ID NO: 1061275 - RNA, 19 nt, Homo sapiens
  misc_RNA (1)...(19): siRNA sense strand
aaacgacugucaccuuguc

SEQ ID NO: 1061276 - RNA, 19 nt, Homo sapiens
  misc_RNA (1)...(19): siRNA sense strand
ucucaccauuauaaccuua

SEQ ID NO: 1061277 - RNA, 19 nt, Homo sapiens
  misc_RNA (1)...(19): siRNA sense strand
caucauauuauaccucaga

SEQ ID NO: 1061278 - RNA, 19 nt, Homo sapiens
  misc_RNA (1)...(19): siRNA sense strand
ugcaacauaugcuacaaga

SEQ ID NO: 1061279 - RNA, 19 nt, Homo sapiens
  misc_RNA (1)...(19): siRNA sense strand
caucaccaguaaaccauca

SEQ ID NO: 1061280 - RNA, 19 nt, Homo sapiens
  misc_RNA (1)...(19): siRNA sense strand
gcuacaagagcaacauaau

SEQ ID NO: 1061281 - RNA, 19 nt, Homo sapiens
  misc_RNA (1)...(19): siRNA sense strand
cagggaccaucuaagcuau

SEQ ID NO: 1061282 - RNA, 19 nt, Homo sapiens
  misc_RNA (1)...(19): siRNA sense strand
gggaaaccguuaguauuuu

SEQ ID NO: 1061283 - RNA, 19 nt, Homo sapiens
  misc_RNA (1)...(19): siRNA sense strand
uaccgucugugcaacauau

SEQ ID NO: 1061284 - RNA, 19 nt, Homo sapiens
  misc_RNA (1)...(19): siRNA sense strand
gagaauugaggcgcauaaa

SEQ ID NO: 1061285 - RNA, 19 nt, Homo sapiens
  misc_RNA (1)...(19): siRNA sense strand
aagguggccugcauggaaa

SEQ ID NO: 1061286 - RNA, 19 nt, Homo sapiens
  misc_RNA (1)...(19): siRNA sense strand
acauggcaauuuaacaguu

SEQ ID NO: 1061287 - RNA, 19 nt, Homo sapiens
  misc_RNA (1)...(19): siRNA sense strand
gauaaacaucauaggugaa

SEQ ID NO: 1061288 - RNA, 19 nt, Homo sapiens
  misc_RNA (1)...(19): siRNA sense strand
gucuucauguguaguauug

SEQ ID NO: 1061289 - RNA, 19 nt, Homo sapiens
  misc_RNA (1)...(19): siRNA sense strand
gaaacgacugucaccuugu

SEQ ID NO: 1061290 - RNA, 19 nt, Homo sapiens
  misc_RNA (1)...(19): siRNA sense strand
guaauccaucugcaaguga

SEQ ID NO: 1061291 - RNA, 19 nt, Homo sapiens
  misc_RNA (1)...(19): siRNA sense strand
gaauucuccuccacuacgu

SEQ ID NO: 1061292 - RNA, 19 nt, Homo sapiens
  misc_RNA (1)...(19): siRNA sense strand
acuccuaacucgguucgua

SEQ ID NO: 1061293 - RNA, 19 nt, Homo sapiens
  misc_RNA (1)...(19): siRNA sense strand
ccaguaaaccaucaaaugc

SEQ ID NO: 1061294 - RNA, 19 nt, Homo sapiens
  misc_RNA (1)...(19): siRNA sense strand
aaacauggcaauuuaacag

SEQ ID NO: 1061295 - RNA, 19 nt, Homo sapiens
  misc_RNA (1)...(19): siRNA sense strand
cuucauguguaguauuguu

SEQ ID NO: 1061296 - RNA, 19 nt, Homo sapiens
  misc_RNA (1)...(19): siRNA sense strand
aaacgagguucugucuuca

SEQ ID NO: 1061297 - RNA, 19 nt, Homo sapiens
  misc_RNA (1)...(19): siRNA sense strand
uuaccucaguucaccgaaa

SEQ ID NO: 1061298 - RNA, 19 nt, Homo sapiens
  misc_RNA (1)...(19): siRNA sense strand
uugcuucucaccauuauaa

SEQ ID NO: 1061299 - RNA, 19 nt, Homo sapiens
  misc_RNA (1)...(19): siRNA sense strand
acuauuauccugaguguca

SEQ ID NO: 1061300 - RNA, 19 nt, Homo sapiens
  misc_RNA (1)...(19): siRNA sense strand
acagggaccaucuaagcua

SEQ ID NO: 1061301 - RNA, 19 nt, Homo sapiens
  misc_RNA (1)...(19): siRNA sense strand
ggacauuaagauaaacauc

SEQ ID NO: 1061302 - RNA, 19 nt, Homo sapiens
  misc_RNA (1)...(19): siRNA sense strand
guuauccugugcugagaau

SEQ ID NO: 1061303 - RNA, 19 nt, Homo sapiens
  misc_RNA (1)...(19): siRNA sense strand
uauaugacaaagucggaua

SEQ ID NO: 1061304 - RNA, 19 nt, Homo sapiens
  misc_RNA (1)...(19): siRNA sense strand
caguugaucauauucagaa

SEQ ID NO: 1061305 - RNA, 19 nt, Homo sapiens
  misc_RNA (1)...(19): siRNA sense strand
ugaaaaggaugauuuacca

SEQ ID NO: 1061306 - RNA, 19 nt, Homo sapiens
  misc_RNA (1)...(19): siRNA sense strand
uaccucagaaacagcauua

SEQ ID NO: 1061307 - RNA, 19 nt, Homo sapiens
  misc_RNA (1)...(19): siRNA sense strand
cgagaaaacauggcaauuu

SEQ ID NO: 1061308 - RNA, 19 nt, Homo sapiens
  misc_RNA (1)...(19): siRNA sense strand
auaaucagccacauaagga

SEQ ID NO: 1061309 - RNA, 19 nt, Homo sapiens
  misc_RNA (1)...(19): siRNA sense strand
gcuuacaggcucauaucaa

SEQ ID NO: 1061310 - RNA, 19 nt, Homo sapiens
  misc_RNA (1)...(19): siRNA sense strand
gaugcaauggaucauagaa

SEQ ID NO: 1061311 - RNA, 19 nt, Homo sapiens
  misc_RNA (1)...(19): siRNA sense strand
augacaaagucggauauaa

SEQ ID NO: 1061312 - RNA, 19 nt, Homo sapiens
  misc_RNA (1)...(19): siRNA sense strand
ccucagaaacagcauuaug

SEQ ID NO: 1061313 - RNA, 19 nt, Homo sapiens
  misc_RNA (1)...(19): siRNA sense strand
cauauuauaccucagaaac

SEQ ID NO: 1061314 - RNA, 19 nt, Homo sapiens
  misc_RNA (1)...(19): siRNA sense strand
aaucagccacauaaggaua

SEQ ID NO: 1061315 - RNA, 19 nt, Homo sapiens
  misc_RNA (1)...(19): siRNA sense strand
cuacaagagcaacauaauc

SEQ ID NO: 1061316 - RNA, 19 nt, Homo sapiens
  misc_RNA (1)...(19): siRNA sense strand
gaggaagucugaaauguua

SEQ ID NO: 1061317 - RNA, 19 nt, Homo sapiens
  misc_RNA (1)...(19): siRNA sense strand
guaaugagcugcaagaucu

SEQ ID NO: 1061318 - RNA, 19 nt, Homo sapiens
  misc_RNA (1)...(19): siRNA sense strand
gcuacuaccuguccuacua

SEQ ID NO: 1061319 - RNA, 19 nt, Homo sapiens
  misc_RNA (1)...(19): siRNA sense strand
acuuagagcuggcaacuua

SEQ ID NO: 1061320 - RNA, 19 nt, Homo sapiens
  misc_RNA (1)...(19): siRNA sense strand
ggacauauccugcccaaca

SEQ ID NO: 1061321 - RNA, 19 nt, Homo sapiens
  misc_RNA (1)...(19): siRNA sense strand
cuaaacagaugaugcaaau

SEQ ID NO: 1061322 - RNA, 19 nt, Homo sapiens
  misc_RNA (1)...(19): siRNA sense strand
gaaggaagcgaaagaggaa

SEQ ID NO: 1061323 - RNA, 19 nt, Homo sapiens
  misc_RNA (1)...(19): siRNA sense strand
gccaaucucuggaagaaga

SEQ ID NO: 1061324 - RNA, 19 nt, Homo sapiens
  misc_RNA (1)...(19): siRNA sense strand
ccacgagcuucaaauguuu

SEQ ID NO: 1061325 - RNA, 19 nt, Homo sapiens
  misc_RNA (1)...(19): siRNA sense strand
gaaagaggaagucugaaau

SEQ ID NO: 1061326 - RNA, 19 nt, Homo sapiens
  misc_RNA (1)...(19): siRNA sense strand
gaucagccuuauccuggua

SEQ ID NO: 1061327 - RNA, 19 nt, Homo sapiens
  misc_RNA (1)...(19): siRNA sense strand
ccaacaacuugcaaucuga

SEQ ID NO: 1061328 - RNA, 19 nt, Homo sapiens
  misc_RNA (1)...(19): siRNA sense strand
ugguaugucugcccauuua

SEQ ID NO: 1061329 - RNA, 19 nt, Homo sapiens
  misc_RNA (1)...(19): siRNA sense strand
uggaagcuuugcugaauuu

SEQ ID NO: 1061330 - RNA, 19 nt, Homo sapiens
  misc_RNA (1)...(19): siRNA sense strand
cgaaagaggaagucugaaa

SEQ ID NO: 1061331 - RNA, 19 nt, Homo sapiens
  misc_RNA (1)...(19): siRNA sense strand
caaagaaggaagcgaaaga

SEQ ID NO: 1061332 - RNA, 19 nt, Homo sapiens
  misc_RNA (1)...(19): siRNA sense strand
uggcaaagccuuguaauga

SEQ ID NO: 1061333 - RNA, 19 nt, Homo sapiens
  misc_RNA (1)...(19): siRNA sense strand
aaacagaugaugcaaaugu

SEQ ID NO: 1061334 - RNA, 19 nt, Homo sapiens
  misc_RNA (1)...(19): siRNA sense strand
ggaacauggugacgaguag

SEQ ID NO: 1061335 - RNA, 19 nt, Homo sapiens
  misc_RNA (1)...(19): siRNA sense strand
gaagaagauuccgcauugg

SEQ ID NO: 1061336 - RNA, 19 nt, Homo sapiens
  misc_RNA (1)...(19): siRNA sense strand
ggaccacgagcuucaaaug

SEQ ID NO: 1061337 - RNA, 19 nt, Homo sapiens
  misc_RNA (1)...(19): siRNA sense strand
ggcaaagccuuguaaugag

SEQ ID NO: 1061338 - RNA, 19 nt, Homo sapiens
  misc_RNA (1)...(19): siRNA sense strand
uuagugagagugaauguuu

SEQ ID NO: 1061339 - RNA, 19 nt, Homo sapiens
  misc_RNA (1)...(19): siRNA sense strand
gagaugugccuaaacagau

SEQ ID NO: 1061340 - RNA, 19 nt, Homo sapiens
  misc_RNA (1)...(19): siRNA sense strand
ccauuuggauccugcuguu

SEQ ID NO: 1061341 - RNA, 19 nt, Homo sapiens
  misc_RNA (1)...(19): siRNA sense strand
gcuccggguccucauauuu

SEQ ID NO: 1061342 - RNA, 19 nt, Homo sapiens
  misc_RNA (1)...(19): siRNA sense strand
gcguguggcucacuuagag

SEQ ID NO: 1061343 - RNA, 19 nt, Homo sapiens
  misc_RNA (1)...(19): siRNA sense strand
uggcgggaaucucuaaaga

SEQ ID NO: 1061344 - RNA, 19 nt, Homo sapiens
  misc_RNA (1)...(19): siRNA sense strand
aagaggaagucugaaaugu

SEQ ID NO: 1061345 - RNA, 19 nt, Homo sapiens
  misc_RNA (1)...(19): siRNA sense strand
accacgagcuucaaauguu

SEQ ID NO: 1061346 - RNA, 19 nt, Homo sapiens
  misc_RNA (1)...(19): siRNA sense strand
caagaggacgugaggaaca

SEQ ID NO: 1061347 - RNA, 19 nt, Homo sapiens
  misc_RNA (1)...(19): siRNA sense strand
uguaacggguuugaagaaa

SEQ ID NO: 1061348 - RNA, 19 nt, Homo sapiens
  misc_RNA (1)...(19): siRNA sense strand
ggauggcgggaaucucuaa

SEQ ID NO: 1061349 - RNA, 19 nt, Homo sapiens
  misc_RNA (1)...(19): siRNA sense strand
aaagaggaagucugaaaug

SEQ ID NO: 1061350 - RNA, 19 nt, Homo sapiens
  misc_RNA (1)...(19): siRNA sense strand
gaucuuagugagagugaau

SEQ ID NO: 1061351 - RNA, 19 nt, Homo sapiens
  misc_RNA (1)...(19): siRNA sense strand
uggccaaucucuggaagaa

SEQ ID NO: 1061352 - RNA, 19 nt, Homo sapiens
  misc_RNA (1)...(19): siRNA sense strand
guaugucugcccauuuauu

SEQ ID NO: 1061353 - RNA, 19 nt, Homo sapiens
  misc_RNA (1)...(19): siRNA sense strand
gcaagaucuuagugagagu

SEQ ID NO: 1061354 - RNA, 19 nt, Homo sapiens
  misc_RNA (1)...(19): siRNA sense strand
gaccacgagcuucaaaugu

SEQ ID NO: 1061355 - RNA, 19 nt, Homo sapiens
  misc_RNA (1)...(19): siRNA sense strand
uaaagaugcgggucagcaa

SEQ ID NO: 1061356 - RNA, 19 nt, Homo sapiens
  misc_RNA (1)...(19): siRNA sense strand
acagaguuguaacggguuu

SEQ ID NO: 1061357 - RNA, 19 nt, Homo sapiens
  misc_RNA (1)...(19): siRNA sense strand
agaggaagucugaaauguu

SEQ ID NO: 1061358 - RNA, 19 nt, Homo sapiens
  misc_RNA (1)...(19): siRNA sense strand
ggaggaauaggagaaguca

SEQ ID NO: 1061359 - RNA, 19 nt, Homo sapiens
  misc_RNA (1)...(19): siRNA sense strand
gcuugcaaauggacauauc

SEQ ID NO: 1061360 - RNA, 19 nt, Homo sapiens
  misc_RNA (1)...(19): siRNA sense strand
ggaagucugaaauguuaca

SEQ ID NO: 1061361 - RNA, 19 nt, Homo sapiens
  misc_RNA (1)...(19): siRNA sense strand
ggccgaugauuuacaaagg

SEQ ID NO: 1061362 - RNA, 19 nt, Homo sapiens
  misc_RNA (1)...(19): siRNA sense strand
gacauauccugcccaacag

SEQ ID NO: 1061363 - RNA, 19 nt, Homo sapiens
  misc_RNA (1)...(19): siRNA sense strand
uccaacaacuugcaaucug

SEQ ID NO: 1061364 - RNA, 19 nt, Homo sapiens
  misc_RNA (1)...(19): siRNA sense strand
uaugucugcccauuuauug

SEQ ID NO: 1061365 - RNA, 19 nt, Homo sapiens
  misc_RNA (1)...(19): siRNA sense strand
acagaugaugcaaauguuu

SEQ ID NO: 1061366 - RNA, 19 nt, Homo sapiens
  misc_RNA (1)...(19): siRNA sense strand
agaugugccuaaacagaug

SEQ ID NO: 1061367 - RNA, 19 nt, Homo sapiens
  misc_RNA (1)...(19): siRNA sense strand
agagaugugccuaaacaga

SEQ ID NO: 1061368 - RNA, 19 nt, Homo sapiens
  misc_RNA (1)...(19): siRNA sense strand
ugaagaaacaaagaaggaa

SEQ ID NO: 1061369 - RNA, 19 nt, Homo sapiens
  misc_RNA (1)...(19): siRNA sense strand
uagugagagugaauguuug

SEQ ID NO: 1061370 - RNA, 19 nt, Homo sapiens
  misc_RNA (1)...(19): siRNA sense strand
gugaauguuugagacacaa

SEQ ID NO: 1061371 - RNA, 19 nt, Homo sapiens
  misc_RNA (1)...(19): siRNA sense strand
gggaaaaucagguggcaaa

SEQ ID NO: 1061372 - RNA, 19 nt, Homo sapiens
  misc_RNA (1)...(19): siRNA sense strand
aaagaugcgggucagcaaa

SEQ ID NO: 1061373 - RNA, 19 nt, Homo sapiens
  misc_RNA (1)...(19): siRNA sense strand
acaaaggcaggacaacaga

SEQ ID NO: 1061374 - RNA, 19 nt, Homo sapiens
  misc_RNA (1)...(19): siRNA sense strand
ccuaaacagaugaugcaaa

SEQ ID NO: 1061375 - RNA, 19 nt, Homo sapiens
  misc_RNA (1)...(19): siRNA sense strand
ugagagugaauguuugaga

SEQ ID NO: 1061376 - RNA, 19 nt, Homo sapiens
  misc_RNA (1)...(19): siRNA sense strand
auuggaagcuuugcugaau

SEQ ID NO: 1061377 - RNA, 19 nt, Homo sapiens
  misc_RNA (1)...(19): siRNA sense strand
gagcugcaagaucuuagug

SEQ ID NO: 1061378 - RNA, 19 nt, Homo sapiens
  misc_RNA (1)...(19): siRNA sense strand
uuggaagcuuugcugaauu

SEQ ID NO: 1061379 - RNA, 19 nt, Homo sapiens
  misc_RNA (1)...(19): siRNA sense strand
gagcuggcaacuuaugagu

SEQ ID NO: 1061380 - RNA, 19 nt, Homo sapiens
  misc_RNA (1)...(19): siRNA sense strand
ccugguaugucugcccauu

SEQ ID NO: 1061381 - RNA, 19 nt, Homo sapiens
  misc_RNA (1)...(19): siRNA sense strand
guggcaaagccuuguaaug

SEQ ID NO: 1061382 - RNA, 19 nt, Homo sapiens
  misc_RNA (1)...(19): siRNA sense strand
guuguaacggguuugaaga

SEQ ID NO: 1061383 - RNA, 19 nt, Homo sapiens
  misc_RNA (1)...(19): siRNA sense strand
caggauggcgggaaucucu

SEQ ID NO: 1061384 - RNA, 19 nt, Homo sapiens
  misc_RNA (1)...(19): siRNA sense strand
aagaagauuccgcauugga

SEQ ID NO: 1061385 - RNA, 19 nt, Homo sapiens
  misc_RNA (1)...(19): siRNA sense strand
gcucaugcucuccauuugg

SEQ ID NO: 1061386 - RNA, 19 nt, Homo sapiens
  misc_RNA (1)...(19): siRNA sense strand
aaugagcugcaagaucuua

SEQ ID NO: 1061387 - RNA, 19 nt, Homo sapiens
  misc_RNA (1)...(19): siRNA sense strand
ucacaaaggucaaacaguu

SEQ ID NO: 1061388 - RNA, 19 nt, Homo sapiens
  misc_RNA (1)...(19): siRNA sense strand
gaacagcgcccagcaguuu

SEQ ID NO: 1061389 - RNA, 19 nt, Homo sapiens
  misc_RNA (1)...(19): siRNA sense strand
ggaaacagcauccuccauu

SEQ ID NO: 1061390 - RNA, 19 nt, Homo sapiens
  misc_RNA (1)...(19): siRNA sense strand
gaaacagcauccuccauuc

SEQ ID NO: 1061391 - RNA, 19 nt, Homo sapiens
  misc_RNA (1)...(19): siRNA sense strand
ggucaaggcgaauauuuaa

SEQ ID NO: 1061392 - RNA, 19 nt, Homo sapiens
  misc_RNA (1)...(19): siRNA sense strand
ggacaggaagccagaguuu

SEQ ID NO: 1061393 - RNA, 19 nt, Homo sapiens
  misc_RNA (1)...(19): siRNA sense strand
gcugggagcuguccaaguc

SEQ ID NO: 1061394 - RNA, 19 nt, Homo sapiens
  misc_RNA (1)...(19): siRNA sense strand
cggcagaguuugauuuguu

SEQ ID NO: 1061395 - RNA, 19 nt, Homo sapiens
  misc_RNA (1)...(19): siRNA sense strand
cagaagaccugaagaacag

SEQ ID NO: 1061396 - RNA, 19 nt, Homo sapiens
  misc_RNA (1)...(19): siRNA sense strand
gagcagaggagaagacaga

SEQ ID NO: 1061397 - RNA, 19 nt, Homo sapiens
  misc_RNA (1)...(19): siRNA sense strand
gcacaagcuugccaugaag

SEQ ID NO: 1061398 - RNA, 19 nt, Homo sapiens
  misc_RNA (1)...(19): siRNA sense strand
uuaaugguaucgauccuaa

SEQ ID NO: 1061399 - RNA, 19 nt, Homo sapiens
  misc_RNA (1)...(19): siRNA sense strand
gagcagcuucgccagguua

SEQ ID NO: 1061400 - RNA, 19 nt, Homo sapiens
  misc_RNA (1)...(19): siRNA sense strand
ggaagccagaguuuauuaa

SEQ ID NO: 1061401 - RNA, 19 nt, Homo sapiens
  misc_RNA (1)...(19): siRNA sense strand
gaagacagaagaccugaag

SEQ ID NO: 1061402 - RNA, 19 nt, Homo sapiens
  misc_RNA (1)...(19): siRNA sense strand
ccaugaagcacaaauguug

SEQ ID NO: 1061403 - RNA, 19 nt, Homo sapiens
  misc_RNA (1)...(19): siRNA sense strand
gaggucaaggcgaauauuu

SEQ ID NO: 1061404 - RNA, 19 nt, Homo sapiens
  misc_RNA (1)...(19): siRNA sense strand
ugaaggcuccacaucauuu

SEQ ID NO: 1061405 - RNA, 19 nt, Homo sapiens
  misc_RNA (1)...(19): siRNA sense strand
gcuaucagcaaggaaauuu

SEQ ID NO: 1061406 - RNA, 19 nt, Homo sapiens
  misc_RNA (1)...(19): siRNA sense strand
gacaggaagccagaguuua

SEQ ID NO: 1061407 - RNA, 19 nt, Homo sapiens
  misc_RNA (1)...(19): siRNA sense strand
cgcacaagcuugccaugaa

SEQ ID NO: 1061408 - RNA, 19 nt, Homo sapiens
  misc_RNA (1)...(19): siRNA sense strand
caaggcgaauauuuaacuu

SEQ ID NO: 1061409 - RNA, 19 nt, Homo sapiens
  misc_RNA (1)...(19): siRNA sense strand
ggcagaguuugauuuguug

SEQ ID NO: 1061410 - RNA, 19 nt, Homo sapiens
  misc_RNA (1)...(19): siRNA sense strand
gaguuugauuuguuguuug

SEQ ID NO: 1061411 - RNA, 19 nt, Homo sapiens
  misc_RNA (1)...(19): siRNA sense strand
agacagaagaccugaagaa

SEQ ID NO: 1061412 - RNA, 19 nt, Homo sapiens
  misc_RNA (1)...(19): siRNA sense strand
acacaggcguccaucacaa

SEQ ID NO: 1061413 - RNA, 19 nt, Homo sapiens
  misc_RNA (1)...(19): siRNA sense strand
ucaagaggaggacaaagaa

SEQ ID NO: 1061414 - RNA, 19 nt, Homo sapiens
  misc_RNA (1)...(19): siRNA sense strand
gcccagcaguuugcagaaa

SEQ ID NO: 1061415 - RNA, 19 nt, Homo sapiens
  misc_RNA (1)...(19): siRNA sense strand
acaggaagccagaguuuau

SEQ ID NO: 1061416 - RNA, 19 nt, Homo sapiens
  misc_RNA (1)...(19): siRNA sense strand
gaaggcuccacaucauuug

SEQ ID NO: 1061417 - RNA, 19 nt, Homo sapiens
  misc_RNA (1)...(19): siRNA sense strand
gucaagaggaggacaaaga

SEQ ID NO: 1061418 - RNA, 19 nt, Homo sapiens
  misc_RNA (1)...(19): siRNA sense strand
cagaggagaagacagaaga

SEQ ID NO: 1061419 - RNA, 19 nt, Homo sapiens
  misc_RNA (1)...(19): siRNA sense strand
caagaggaggacaaagaaa

SEQ ID NO: 1061420 - RNA, 19 nt, Homo sapiens
  misc_RNA (1)...(19): siRNA sense strand
gggauucggcagaguuuga

SEQ ID NO: 1061421 - RNA, 19 nt, Homo sapiens
  misc_RNA (1)...(19): siRNA sense strand
aggaagccagaguuuauua

SEQ ID NO: 1061422 - RNA, 19 nt, Homo sapiens
  misc_RNA (1)...(19): siRNA sense strand
aaacagcauccuccauuca

SEQ ID NO: 1061423 - RNA, 19 nt, Homo sapiens
  misc_RNA (1)...(19): siRNA sense strand
uuccagauccuccaccaua

SEQ ID NO: 1061424 - RNA, 19 nt, Homo sapiens
  misc_RNA (1)...(19): siRNA sense strand
gaagccagaguuuauuaac

SEQ ID NO: 1061425 - RNA, 19 nt, Homo sapiens
  misc_RNA (1)...(19): siRNA sense strand
caaacaagaaacccacaca

SEQ ID NO: 1061426 - RNA, 19 nt, Homo sapiens
  misc_RNA (1)...(19): siRNA sense strand
gcgcacaagcuugccauga

SEQ ID NO: 1061427 - RNA, 19 nt, Homo sapiens
  misc_RNA (1)...(19): siRNA sense strand
acagaagaccugaagaaca

SEQ ID NO: 1061428 - RNA, 19 nt, Homo sapiens
  misc_RNA (1)...(19): siRNA sense strand
uauaucugccugucaguga

SEQ ID NO: 1061429 - RNA, 19 nt, Homo sapiens
  misc_RNA (1)...(19): siRNA sense strand
ccagguuaaugguaucgau

SEQ ID NO: 1061430 - RNA, 19 nt, Homo sapiens
  misc_RNA (1)...(19): siRNA sense strand
uuuauuaacugccaaucca

SEQ ID NO: 1061431 - RNA, 19 nt, Homo sapiens
  misc_RNA (1)...(19): siRNA sense strand
ggaggucaaggcgaauauu

SEQ ID NO: 1061432 - RNA, 19 nt, Homo sapiens
  misc_RNA (1)...(19): siRNA sense strand
cagcuucgccagguuaaug

SEQ ID NO: 1061433 - RNA, 19 nt, Homo sapiens
  misc_RNA (1)...(19): siRNA sense strand
gccaugaagcacaaauguu

SEQ ID NO: 1061434 - RNA, 19 nt, Homo sapiens
  misc_RNA (1)...(19): siRNA sense strand
ucaaggcgaauauuuaacu

SEQ ID NO: 1061435 - RNA, 19 nt, Homo sapiens
  misc_RNA (1)...(19): siRNA sense strand
aggucaaggcgaauauuua

SEQ ID NO: 1061436 - RNA, 19 nt, Homo sapiens
  misc_RNA (1)...(19): siRNA sense strand
uuugaaggcuccacaucau

SEQ ID NO: 1061437 - RNA, 19 nt, Homo sapiens
  misc_RNA (1)...(19): siRNA sense strand
caucauuuguucggagauc

SEQ ID NO: 1061438 - RNA, 19 nt, Homo sapiens
  misc_RNA (1)...(19): siRNA sense strand
caugaagcacaaauguuga

SEQ ID NO: 1061439 - RNA, 19 nt, Homo sapiens
  misc_RNA (1)...(19): siRNA sense strand
guuugaaggcuccacauca

SEQ ID NO: 1061440 - RNA, 19 nt, Homo sapiens
  misc_RNA (1)...(19): siRNA sense strand
gagcguggagagcgauuag

SEQ ID NO: 1061441 - RNA, 19 nt, Homo sapiens
  misc_RNA (1)...(19): siRNA sense strand
caggaagccagaguuuauu

SEQ ID NO: 1061442 - RNA, 19 nt, Homo sapiens
  misc_RNA (1)...(19): siRNA sense strand
caagucaagaggaggacaa

SEQ ID NO: 1061443 - RNA, 19 nt, Homo sapiens
  misc_RNA (1)...(19): siRNA sense strand
uugcaccucuugaugaaag

SEQ ID NO: 1061444 - RNA, 19 nt, Homo sapiens
  misc_RNA (1)...(19): siRNA sense strand
aaugguaucgauccuaaug

SEQ ID NO: 1061445 - RNA, 19 nt, Homo sapiens
  misc_RNA (1)...(19): siRNA sense strand
cacaggcguccaucacaaa

SEQ ID NO: 1061446 - RNA, 19 nt, Homo sapiens
  misc_RNA (1)...(19): siRNA sense strand
cgagcagcuucgccagguu

SEQ ID NO: 1061447 - RNA, 19 nt, Homo sapiens
  misc_RNA (1)...(19): siRNA sense strand
gacagaagaccugaagaac

SEQ ID NO: 1061448 - RNA, 19 nt, Homo sapiens
  misc_RNA (1)...(19): siRNA sense strand
gcagaggagaagacagaag

SEQ ID NO: 1061449 - RNA, 19 nt, Homo sapiens
  misc_RNA (1)...(19): siRNA sense strand
uaacugccaauccaaaauu

SEQ ID NO: 1061450 - RNA, 19 nt, Homo sapiens
  misc_RNA (1)...(19): siRNA sense strand
uauuaacugccaauccaaa

SEQ ID NO: 1061451 - RNA, 19 nt, Homo sapiens
  misc_RNA (1)...(19): siRNA sense strand
ggaaacaacuacagaauuu

SEQ ID NO: 1061452 - RNA, 19 nt, Homo sapiens
  misc_RNA (1)...(19): siRNA sense strand
ggauauaacuccuuuagaa

SEQ ID NO: 1061453 - RNA, 19 nt, Homo sapiens
  misc_RNA (1)...(19): siRNA sense strand
gauggaaucuaacaaacuu

SEQ ID NO: 1061454 - RNA, 19 nt, Homo sapiens
  misc_RNA (1)...(19): siRNA sense strand
ggagagaguucuucacuac

SEQ ID NO: 1061455 - RNA, 19 nt, Homo sapiens
  misc_RNA (1)...(19): siRNA sense strand
aaacacugauggaaucuaa

SEQ ID NO: 1061456 - RNA, 19 nt, Homo sapiens
  misc_RNA (1)...(19): siRNA sense strand
gauaucaacuuagaaagga

SEQ ID NO: 1061457 - RNA, 19 nt, Homo sapiens
  misc_RNA (1)...(19): siRNA sense strand
auaaagagauggucacuca

SEQ ID NO: 1061458 - RNA, 19 nt, Homo sapiens
  misc_RNA (1)...(19): siRNA sense strand
ggaaauaacaguacaacag

SEQ ID NO: 1061459 - RNA, 19 nt, Homo sapiens
  misc_RNA (1)...(19): siRNA sense strand
cuaacaaacuugagacaau

SEQ ID NO: 1061460 - RNA, 19 nt, Homo sapiens
  misc_RNA (1)...(19): siRNA sense strand
caacaacuaaugcaugaaa

SEQ ID NO: 1061461 - RNA, 19 nt, Homo sapiens
  misc_RNA (1)...(19): siRNA sense strand
cuuggaaacucauggauuu

SEQ ID NO: 1061462 - RNA, 19 nt, Homo sapiens
  misc_RNA (1)...(19): siRNA sense strand
ggaaagacauggucauccu

SEQ ID NO: 1061463 - RNA, 19 nt, Homo sapiens
  misc_RNA (1)...(19): siRNA sense strand
caacuuauggaaacaacua

SEQ ID NO: 1061464 - RNA, 19 nt, Homo sapiens
  misc_RNA (1)...(19): siRNA sense strand
acagauauguuuacagauc

SEQ ID NO: 1061465 - RNA, 19 nt, Homo sapiens
  misc_RNA (1)...(19): siRNA sense strand
ucaaaugucagccuggaua

SEQ ID NO: 1061466 - RNA, 19 nt, Homo sapiens
  misc_RNA (1)...(19): siRNA sense strand
gcagauaauaaacuggaua

SEQ ID NO: 1061467 - RNA, 19 nt, Homo sapiens
  misc_RNA (1)...(19): siRNA sense strand
cgaaucagagcagauaaua

SEQ ID NO: 1061468 - RNA, 19 nt, Homo sapiens
  misc_RNA (1)...(19): siRNA sense strand
aaaggauacucaaaccaaa

SEQ ID NO: 1061469 - RNA, 19 nt, Homo sapiens
  misc_RNA (1)...(19): siRNA sense strand
gauggucacucaagcucaa

SEQ ID NO: 1061470 - RNA, 19 nt, Homo sapiens
  misc_RNA (1)...(19): siRNA sense strand
gaaucagagcagauaauaa

SEQ ID NO: 1061471 - RNA, 19 nt, Homo sapiens
  misc_RNA (1)...(19): siRNA sense strand
ugaaaccagucgaaucaga

SEQ ID NO: 1061472 - RNA, 19 nt, Homo sapiens
  misc_RNA (1)...(19): siRNA sense strand
uaucagcguuaacugcuuu

SEQ ID NO: 1061473 - RNA, 19 nt, Homo sapiens
  misc_RNA (1)...(19): siRNA sense strand
ggagaucguuggguuucaa

SEQ ID NO: 1061474 - RNA, 19 nt, Homo sapiens
  misc_RNA (1)...(19): siRNA sense strand
gaaaggagcagaguaacag

SEQ ID NO: 1061475 - RNA, 19 nt, Homo sapiens
  misc_RNA (1)...(19): siRNA sense strand
gaaagacauggucauccua

SEQ ID NO: 1061476 - RNA, 19 nt, Homo sapiens
  misc_RNA (1)...(19): siRNA sense strand
uuagaaaggagcagaguaa

SEQ ID NO: 1061477 - RNA, 19 nt, Homo sapiens
  misc_RNA (1)...(19): siRNA sense strand
ggagcagaguaacagauau

SEQ ID NO: 1061478 - RNA, 19 nt, Homo sapiens
  misc_RNA (1)...(19): siRNA sense strand
gaaaagcaacuuauggaaa

SEQ ID NO: 1061479 - RNA, 19 nt, Homo sapiens
  misc_RNA (1)...(19): siRNA sense strand
ugaauuagaccaaguuaag

SEQ ID NO: 1061480 - RNA, 19 nt, Homo sapiens
  misc_RNA (1)...(19): siRNA sense strand
caugaaaccagucgaauca

SEQ ID NO: 1061481 - RNA, 19 nt, Homo sapiens
  misc_RNA (1)...(19): siRNA sense strand
gagacaauucguuaucuug

SEQ ID NO: 1061482 - RNA, 19 nt, Homo sapiens
  misc_RNA (1)...(19): siRNA sense strand
acaauuguaucagcguuaa

SEQ ID NO: 1061483 - RNA, 19 nt, Homo sapiens
  misc_RNA (1)...(19): siRNA sense strand
caaccaaggagggauauga

SEQ ID NO: 1061484 - RNA, 19 nt, Homo sapiens
  misc_RNA (1)...(19): siRNA sense strand
cagagcagauaauaaacug

SEQ ID NO: 1061485 - RNA, 19 nt, Homo sapiens
  misc_RNA (1)...(19): siRNA sense strand
gaaucuaacaaacuugaga

SEQ ID NO: 1061486 - RNA, 19 nt, Homo sapiens
  misc_RNA (1)...(19): siRNA sense strand
ccacaaccaaggagggaua

SEQ ID NO: 1061487 - RNA, 19 nt, Homo sapiens
  misc_RNA (1)...(19): siRNA sense strand
gagagcagagaaugagaaa

SEQ ID NO: 1061488 - RNA, 19 nt, Homo sapiens
  misc_RNA (1)...(19): siRNA sense strand
uuucagagaccaguaauaa

SEQ ID NO: 1061489 - RNA, 19 nt, Homo sapiens
  misc_RNA (1)...(19): siRNA sense strand
gagcagaguaacagauaug

SEQ ID NO: 1061490 - RNA, 19 nt, Homo sapiens
  misc_RNA (1)...(19): siRNA sense strand
cggagagaguucuucacua

SEQ ID NO: 1061491 - RNA, 19 nt, Homo sapiens
  misc_RNA (1)...(19): siRNA sense strand
cagauauguuuacagauca

SEQ ID NO: 1061492 - RNA, 19 nt, Homo sapiens
  misc_RNA (1)...(19): siRNA sense strand
caguggauauaacuccuuu

SEQ ID NO: 1061493 - RNA, 19 nt, Homo sapiens
  misc_RNA (1)...(19): siRNA sense strand
ugagacaauucguuaucuu

SEQ ID NO: 1061494 - RNA, 19 nt, Homo sapiens
  misc_RNA (1)...(19): siRNA sense strand
caacaggaaauaacaguac

SEQ ID NO: 1061495 - RNA, 19 nt, Homo sapiens
  misc_RNA (1)...(19): siRNA sense strand
gcugaaauugcuuccuuaa

SEQ ID NO: 1061496 - RNA, 19 nt, Homo sapiens
  misc_RNA (1)...(19): siRNA sense strand
agcguuaacugcuuuauca

SEQ ID NO: 1061497 - RNA, 19 nt, Homo sapiens
  misc_RNA (1)...(19): siRNA sense strand
cacucaagcucaacaggaa

SEQ ID NO: 1061498 - RNA, 19 nt, Homo sapiens
  misc_RNA (1)...(19): siRNA sense strand
gagcagagaaugagaaaau

SEQ ID NO: 1061499 - RNA, 19 nt, Homo sapiens
  misc_RNA (1)...(19): siRNA sense strand
gacaauucguuaucuugca

SEQ ID NO: 1061500 - RNA, 19 nt, Homo sapiens
  misc_RNA (1)...(19): siRNA sense strand
ggauaucaacuuagaaagg

SEQ ID NO: 1061501 - RNA, 19 nt, Homo sapiens
  misc_RNA (1)...(19): siRNA sense strand
gcaugaaaccagucgaauc

SEQ ID NO: 1061502 - RNA, 19 nt, Homo sapiens
  misc_RNA (1)...(19): siRNA sense strand
agcaacaacuaaugcauga

SEQ ID NO: 1061503 - RNA, 19 nt, Homo sapiens
  misc_RNA (1)...(19): siRNA sense strand
gcauugggauuuuauagau

SEQ ID NO: 1061504 - RNA, 19 nt, Homo sapiens
  misc_RNA (1)...(19): siRNA sense strand
ggacuuggaaacucaugga

SEQ ID NO: 1061505 - RNA, 19 nt, Homo sapiens
  misc_RNA (1)...(19): siRNA sense strand
ggaaacucauggauuugac

SEQ ID NO: 1061506 - RNA, 19 nt, Homo sapiens
  misc_RNA (1)...(19): siRNA sense strand
aaacacaagcagaaacaau

SEQ ID NO: 1061507 - RNA, 19 nt, Homo sapiens
  misc_RNA (1)...(19): siRNA sense strand
ccaaggagggauaugauag

SEQ ID NO: 1061508 - RNA, 19 nt, Homo sapiens
  misc_RNA (1)...(19): siRNA sense strand
gauauaacuccuuuagaac

SEQ ID NO: 1061509 - RNA, 19 nt, Homo sapiens
  misc_RNA (1)...(19): siRNA sense strand
uggaaacaacuacagaauu

SEQ ID NO: 1061510 - RNA, 19 nt, Homo sapiens
  misc_RNA (1)...(19): siRNA sense strand
gacauggucauccuagaga

SEQ ID NO: 1061511 - RNA, 19 nt, Homo sapiens
  misc_RNA (1)...(19): siRNA sense strand
gaucaagaaaagcaacuua

SEQ ID NO: 1061512 - RNA, 19 nt, Homo sapiens
  misc_RNA (1)...(19): siRNA sense strand
ucagagaccaguaauaaaa

SEQ ID NO: 1061513 - RNA, 19 nt, Homo sapiens
  misc_RNA (1)...(19): siRNA sense strand
acacaagcagaaacaauug

SEQ ID NO: 1061514 - RNA, 19 nt, Homo sapiens
  misc_RNA (1)...(19): siRNA sense strand
guucaggacuuggaaacuc

SEQ ID NO: 1061515 - RNA, 19 nt, Homo sapiens
  misc_RNA (1)...(19): siRNA sense strand
ugauacccaugcauugguu

SEQ ID NO: 1061516 - RNA, 19 nt, Homo sapiens
  misc_RNA (1)...(19): siRNA sense strand
aaacuugagacaauucguu

SEQ ID NO: 1061517 - RNA, 19 nt, Homo sapiens
  misc_RNA (1)...(19): siRNA sense strand
cgcugaaauugcuuccuua

SEQ ID NO: 1061518 - RNA, 19 nt, Homo sapiens
  misc_RNA (1)...(19): siRNA sense strand
gaaacucauggauuugaca

SEQ ID NO: 1061519 - RNA, 19 nt, Homo sapiens
  misc_RNA (1)...(19): siRNA sense strand
acgcugaaauugcuuccuu

SEQ ID NO: 1061520 - RNA, 19 nt, Homo sapiens
  misc_RNA (1)...(19): siRNA sense strand
gaggagaucguuggguuuc

SEQ ID NO: 1061521 - RNA, 19 nt, Homo sapiens
  misc_RNA (1)...(19): siRNA sense strand
gaugcuaucaggaaagaca

SEQ ID NO: 1061522 - RNA, 19 nt, Homo sapiens
  misc_RNA (1)...(19): siRNA sense strand
aacacaagcagaaacaauu

SEQ ID NO: 1061523 - RNA, 19 nt, Homo sapiens
  misc_RNA (1)...(19): siRNA sense strand
agagaguucuucacuacca

SEQ ID NO: 1061524 - RNA, 19 nt, Homo sapiens
  misc_RNA (1)...(19): siRNA sense strand
ucaacaggaaauaacagua

SEQ ID NO: 1061525 - RNA, 19 nt, Homo sapiens
  misc_RNA (1)...(19): siRNA sense strand
caagcagaaacaauuguau

SEQ ID NO: 1061526 - RNA, 19 nt, Homo sapiens
  misc_RNA (1)...(19): siRNA sense strand
caagcucaacaggaaauaa

SEQ ID NO: 1061527 - RNA, 19 nt, Homo sapiens
  misc_RNA (1)...(19): siRNA sense strand
guaucagcguuaacugcuu

SEQ ID NO: 1061528 - RNA, 19 nt, Homo sapiens
  misc_RNA (1)...(19): siRNA sense strand
ugacaaaacacaagcagaa

SEQ ID NO: 1061529 - RNA, 19 nt, Homo sapiens
  misc_RNA (1)...(19): siRNA sense strand
aggagcagaguaacagaua

SEQ ID NO: 1061530 - RNA, 19 nt, Homo sapiens
  misc_RNA (1)...(19): siRNA sense strand
uagaccaaguuaagcaaca

SEQ ID NO: 1061531 - RNA, 19 nt, Homo sapiens
  misc_RNA (1)...(19): siRNA sense strand
uggaugcuaucaggaaaga

SEQ ID NO: 1061532 - RNA, 19 nt, Homo sapiens
  misc_RNA (1)...(19): siRNA sense strand
aaagagauggucacucaag

SEQ ID NO: 1061533 - RNA, 19 nt, Homo sapiens
  misc_RNA (1)...(19): siRNA sense strand
aauaacaguacaacagcua

SEQ ID NO: 1061534 - RNA, 19 nt, Homo sapiens
  misc_RNA (1)...(19): siRNA sense strand
cuggauaucaacuuagaaa

SEQ ID NO: 1061535 - RNA, 19 nt, Homo sapiens
  misc_RNA (1)...(19): siRNA sense strand
guggauauaacuccuuuag

SEQ ID NO: 1061536 - RNA, 19 nt, Homo sapiens
  misc_RNA (1)...(19): siRNA sense strand
cguuaacugcuuuaucaaa

SEQ ID NO: 1061537 - RNA, 19 nt, Homo sapiens
  misc_RNA (1)...(19): siRNA sense strand
agaccaaguuaagcaacaa

SEQ ID NO: 1061538 - RNA, 19 nt, Homo sapiens
  misc_RNA (1)...(19): siRNA sense strand
gcagagaaugagaaaauga

SEQ ID NO: 1061539 - RNA, 19 nt, Homo sapiens
  misc_RNA (1)...(19): siRNA sense strand
ugagagcagagaaugagaa

SEQ ID NO: 1061540 - RNA, 19 nt, Homo sapiens
  misc_RNA (1)...(19): siRNA sense strand
aaugucagccuggauacua

SEQ ID NO: 1061541 - RNA, 19 nt, Homo sapiens
  misc_RNA (1)...(19): siRNA sense strand
uaacaguacaacagcuaau

SEQ ID NO: 1061542 - RNA, 19 nt, Homo sapiens
  misc_RNA (1)...(19): siRNA sense strand
uauggaaacaacuacagaa

SEQ ID NO: 1061543 - RNA, 19 nt, Homo sapiens
  misc_RNA (1)...(19): siRNA sense strand
aaaagcaacuuauggaaac

SEQ ID NO: 1061544 - RNA, 19 nt, Homo sapiens
  misc_RNA (1)...(19): siRNA sense strand
aacuggauaucaacuuaga

SEQ ID NO: 1061545 - RNA, 19 nt, Homo sapiens
  misc_RNA (1)...(19): siRNA sense strand
agucgaaucagagcagaua

SEQ ID NO: 1061546 - RNA, 19 nt, Homo sapiens
  misc_RNA (1)...(19): siRNA sense strand
gcggagagaguucuucacu

SEQ ID NO: 1061547 - RNA, 19 nt, Homo sapiens
  misc_RNA (1)...(19): siRNA sense strand
agaaaggagcagaguaaca

SEQ ID NO: 1061548 - RNA, 19 nt, Homo sapiens
  misc_RNA (1)...(19): siRNA sense strand
caacuaaugcaugaaacca

SEQ ID NO: 1061549 - RNA, 19 nt, Homo sapiens
  misc_RNA (1)...(19): siRNA sense strand
aacuugagacaauucguua

SEQ ID NO: 1061550 - RNA, 19 nt, Homo sapiens
  misc_RNA (1)...(19): siRNA sense strand
acugauggaaucuaacaaa

SEQ ID NO: 1061551 - RNA, 19 nt, Homo sapiens
  misc_RNA (1)...(19): siRNA sense strand
cugcagaacuccucuauga

SEQ ID NO: 1061552 - RNA, 19 nt, Homo sapiens
  misc_RNA (1)...(19): siRNA sense strand
ggaagccuguuucugauga

SEQ ID NO: 1061553 - RNA, 19 nt, Homo sapiens
  misc_RNA (1)...(19): siRNA sense strand
gggagaggcugaccuacuu

SEQ ID NO: 1061554 - RNA, 19 nt, Homo sapiens
  misc_RNA (1)...(19): siRNA sense strand
ugacagaagugugguuaaa

SEQ ID NO: 1061555 - RNA, 19 nt, Homo sapiens
  misc_RNA (1)...(19): siRNA sense strand
gcagaacuccucuaugaug

SEQ ID NO: 1061556 - RNA, 19 nt, Homo sapiens
  misc_RNA (1)...(19): siRNA sense strand
caacaacuucgaugacuuu

SEQ ID NO: 1061557 - RNA, 19 nt, Homo sapiens
  misc_RNA (1)...(19): siRNA sense strand
ugaagaagaccuugaaaug

SEQ ID NO: 1061558 - RNA, 19 nt, Homo sapiens
  misc_RNA (1)...(19): siRNA sense strand
cuacguauuugccaucauu

SEQ ID NO: 1061559 - RNA, 19 nt, Homo sapiens
  misc_RNA (1)...(19): siRNA sense strand
caacggacuuugagcuuca

SEQ ID NO: 1061560 - RNA, 19 nt, Homo sapiens
  misc_RNA (1)...(19): siRNA sense strand
gggaucaacuuguuuagag

SEQ ID NO: 1061561 - RNA, 19 nt, Homo sapiens
  misc_RNA (1)...(19): siRNA sense strand
acagaagugugguuaaaga

SEQ ID NO: 1061562 - RNA, 19 nt, Homo sapiens
  misc_RNA (1)...(19): siRNA sense strand
gcaaaccugguguccauuu

SEQ ID NO: 1061563 - RNA, 19 nt, Homo sapiens
  misc_RNA (1)...(19): siRNA sense strand
cagaacuccucuaugauga

SEQ ID NO: 1061564 - RNA, 19 nt, Homo sapiens
  misc_RNA (1)...(19): siRNA sense strand
ucucaacucuggcugugua

SEQ ID NO: 1061565 - RNA, 19 nt, Homo sapiens
  misc_RNA (1)...(19): siRNA sense strand
ggugggaccucugcauuga

SEQ ID NO: 1061566 - RNA, 19 nt, Homo sapiens
  misc_RNA (1)...(19): siRNA sense strand
aagaagaccuugaaaugca

SEQ ID NO: 1061567 - RNA, 19 nt, Homo sapiens
  misc_RNA (1)...(19): siRNA sense strand
gcuggucgcugccggaaau

SEQ ID NO: 1061568 - RNA, 19 nt, Homo sapiens
  misc_RNA (1)...(19): siRNA sense strand
ggaacuugaugguggugaa

SEQ ID NO: 1061569 - RNA, 19 nt, Homo sapiens
  misc_RNA (1)...(19): siRNA sense strand
gagcuucaccaucuucuug

SEQ ID NO: 1061570 - RNA, 19 nt, Homo sapiens
  misc_RNA (1)...(19): siRNA sense strand
gaagaagaccuugaaaugc

SEQ ID NO: 1061571 - RNA, 19 nt, Homo sapiens
  misc_RNA (1)...(19): siRNA sense strand
gaacuccucuaugaugaag

SEQ ID NO: 1061572 - RNA, 19 nt, Homo sapiens
  misc_RNA (1)...(19): siRNA sense strand
ggacagcucccacaaacag

SEQ ID NO: 1061573 - RNA, 19 nt, Homo sapiens
  misc_RNA (1)...(19): siRNA sense strand
guacugggccaacaacuuc

SEQ ID NO: 1061574 - RNA, 19 nt, Homo sapiens
  misc_RNA (1)...(19): siRNA sense strand
gguggucuacuacguauuu

SEQ ID NO: 1061575 - RNA, 19 nt, Homo sapiens
  misc_RNA (1)...(19): siRNA sense strand
ccagcucgauguggcuuua

SEQ ID NO: 1061576 - RNA, 19 nt, Homo sapiens
  misc_RNA (1)...(19): siRNA sense strand
ucgaagaugcuauucagua

SEQ ID NO: 1061577 - RNA, 19 nt, Homo sapiens
  misc_RNA (1)...(19): siRNA sense strand
cgaagaugcuauucaguac

SEQ ID NO: 1061578 - RNA, 19 nt, Homo sapiens
  misc_RNA (1)...(19): siRNA sense strand
auaggaagccuguuucuga

SEQ ID NO: 1061579 - RNA, 19 nt, Homo sapiens
  misc_RNA (1)...(19): siRNA sense strand
gaggccaccuaccagauga

SEQ ID NO: 1061580 - RNA, 19 nt, Homo sapiens
  misc_RNA (1)...(19): siRNA sense strand
caacgagcuugacagaagu

SEQ ID NO: 1061581 - RNA, 19 nt, Homo sapiens
  misc_RNA (1)...(19): siRNA sense strand
ucauugggaucaacuuguu

SEQ ID NO: 1061582 - RNA, 19 nt, Homo sapiens
  misc_RNA (1)...(19): siRNA sense strand
ccacaaacaggccaugaug

SEQ ID NO: 1061583 - RNA, 19 nt, Homo sapiens
  misc_RNA (1)...(19): siRNA sense strand
ccaacaacuucgaugacuu

SEQ ID NO: 1061584 - RNA, 19 nt, Homo sapiens
  misc_RNA (1)...(19): siRNA sense strand
gaagccuguuucugaugaa

SEQ ID NO: 1061585 - RNA, 19 nt, Homo sapiens
  misc_RNA (1)...(19): siRNA sense strand
ugugaaggguuaccuguuc

SEQ ID NO: 1061586 - RNA, 19 nt, Homo sapiens
  misc_RNA (1)...(19): siRNA sense strand
gaggaugagcucacagaga

SEQ ID NO: 1061587 - RNA, 19 nt, Homo sapiens
  misc_RNA (1)...(19): siRNA sense strand
cuggagaacuuccuucaca

SEQ ID NO: 1061588 - RNA, 19 nt, Homo sapiens
  misc_RNA (1)...(19): siRNA sense strand
uggcaaaccugguguccau

SEQ ID NO: 1061589 - RNA, 19 nt, Homo sapiens
  misc_RNA (1)...(19): siRNA sense strand
ugacagccaucaucuacag

SEQ ID NO: 1061590 - RNA, 19 nt, Homo sapiens
  misc_RNA (1)...(19): siRNA sense strand
ucaacugcgucuucauugu

SEQ ID NO: 1061591 - RNA, 19 nt, Homo sapiens
  misc_RNA (1)...(19): siRNA sense strand
ucgagcagcuggaguacug

SEQ ID NO: 1061592 - RNA, 19 nt, Homo sapiens
  misc_RNA (1)...(19): siRNA sense strand
caacugcgucuucauugug

SEQ ID NO: 1061593 - RNA, 19 nt, Homo sapiens
  misc_RNA (1)...(19): siRNA sense strand
gaugaagaagaccuugaaa

SEQ ID NO: 1061594 - RNA, 19 nt, Homo sapiens
  misc_RNA (1)...(19): siRNA sense strand
uggagaaggugcguuccua

SEQ ID NO: 1061595 - RNA, 19 nt, Homo sapiens
  misc_RNA (1)...(19): siRNA sense strand
uaggaagccuguuucugau

SEQ ID NO: 1061596 - RNA, 19 nt, Homo sapiens
  misc_RNA (1)...(19): siRNA sense strand
uguacuaccuguuggagau

SEQ ID NO: 1061597 - RNA, 19 nt, Homo sapiens
  misc_RNA (1)...(19): siRNA sense strand
cggccgaccucucugugaa

SEQ ID NO: 1061598 - RNA, 19 nt, Homo sapiens
  misc_RNA (1)...(19): siRNA sense strand
gguccaagaucuauuuugu

SEQ ID NO: 1061599 - RNA, 19 nt, Homo sapiens
  misc_RNA (1)...(19): siRNA sense strand
ggugguggucuacuacgua

SEQ ID NO: 1061600 - RNA, 19 nt, Homo sapiens
  misc_RNA (1)...(19): siRNA sense strand
gccaucaucuacagucagu

SEQ ID NO: 1061601 - RNA, 19 nt, Homo sapiens
  misc_RNA (1)...(19): siRNA sense strand
cuccagaccucgcuguuuc

SEQ ID NO: 1061602 - RNA, 19 nt, Homo sapiens
  misc_RNA (1)...(19): siRNA sense strand
ccaccuaccagaugacugu

SEQ ID NO: 1061603 - RNA, 19 nt, Homo sapiens
  misc_RNA (1)...(19): siRNA sense strand
ggagaacuuccuucacaag

SEQ ID NO: 1061604 - RNA, 19 nt, Homo sapiens
  misc_RNA (1)...(19): siRNA sense strand
gugcagaacaugcgugcuu

SEQ ID NO: 1061605 - RNA, 19 nt, Homo sapiens
  misc_RNA (1)...(19): siRNA sense strand
gugguggucuacuacguau

SEQ ID NO: 1061606 - RNA, 19 nt, Homo sapiens
  misc_RNA (1)...(19): siRNA sense strand
gcuucgagcagcuggagua

SEQ ID NO: 1061607 - RNA, 19 nt, Homo sapiens
  misc_RNA (1)...(19): siRNA sense strand
caacaaccccgaugugaug

SEQ ID NO: 1061608 - RNA, 19 nt, Homo sapiens
  misc_RNA (1)...(19): siRNA sense strand
gguauuacucgaacguaug

SEQ ID NO: 1061609 - RNA, 19 nt, Homo sapiens
  misc_RNA (1)...(19): siRNA sense strand
ggugcuggaugcagaugug

SEQ ID NO: 1061610 - RNA, 19 nt, Homo sapiens
  misc_RNA (1)...(19): siRNA sense strand
gaguaccagucuccguuuc

SEQ ID NO: 1061611 - RNA, 19 nt, Homo sapiens
  misc_RNA (1)...(19): siRNA sense strand
guaccagucuccguuucug

SEQ ID NO: 1061612 - RNA, 19 nt, Homo sapiens
  misc_RNA (1)...(19): siRNA sense strand
caucugggucaaccuguuu

SEQ ID NO: 1061613 - RNA, 19 nt, Homo sapiens
  misc_RNA (1)...(19): siRNA sense strand
gggccaacaacuucgauga

SEQ ID NO: 1061614 - RNA, 19 nt, Homo sapiens
  misc_RNA (1)...(19): siRNA sense strand
ccacuacuacuuugacuac

SEQ ID NO: 1061615 - RNA, 19 nt, Homo sapiens
  misc_RNA (1)...(19): siRNA sense strand
ucucaacugcgucuucauu

SEQ ID NO: 1061616 - RNA, 19 nt, Homo sapiens
  misc_RNA (1)...(19): siRNA sense strand
cgaggaggaugagcucaca

SEQ ID NO: 1061617 - RNA, 19 nt, Homo sapiens
  misc_RNA (1)...(19): siRNA sense strand
uggagaacuuccuucacaa

SEQ ID NO: 1061618 - RNA, 19 nt, Homo sapiens
  misc_RNA (1)...(19): siRNA sense strand
gccaacaacuucgaugacu

SEQ ID NO: 1061619 - RNA, 19 nt, Homo sapiens
  misc_RNA (1)...(19): siRNA sense strand
acuccucuaugaugaagaa

SEQ ID NO: 1061620 - RNA, 19 nt, Homo sapiens
  misc_RNA (1)...(19): siRNA sense strand
acuuugagcuucaccaucu

SEQ ID NO: 1061621 - RNA, 19 nt, Homo sapiens
  misc_RNA (1)...(19): siRNA sense strand
caucaucuacagucaguuc

SEQ ID NO: 1061622 - RNA, 19 nt, Homo sapiens
  misc_RNA (1)...(19): siRNA sense strand
ugugauaggaagccuguuu

SEQ ID NO: 1061623 - RNA, 19 nt, Homo sapiens
  misc_RNA (1)...(19): siRNA sense strand
ugaugaagaagaccuugaa

SEQ ID NO: 1061624 - RNA, 19 nt, Homo sapiens
  misc_RNA (1)...(19): siRNA sense strand
cgguauuacucgaacguau

SEQ ID NO: 1061625 - RNA, 19 nt, Homo sapiens
  misc_RNA (1)...(19): siRNA sense strand
gcgucuucauuguguacua

SEQ ID NO: 1061626 - RNA, 19 nt, Homo sapiens
  misc_RNA (1)...(19): siRNA sense strand
uggagaugcugcucaaggu

SEQ ID NO: 1061627 - RNA, 19 nt, Homo sapiens
  misc_RNA (1)...(19): siRNA sense strand
acagggagaggcugaccua

SEQ ID NO: 1061628 - RNA, 19 nt, Homo sapiens
  misc_RNA (1)...(19): siRNA sense strand
guuuagaggcgucauugug

SEQ ID NO: 1061629 - RNA, 19 nt, Homo sapiens
  misc_RNA (1)...(19): siRNA sense strand
cgaguaccagucuccguuu

SEQ ID NO: 1061630 - RNA, 19 nt, Homo sapiens
  misc_RNA (1)...(19): siRNA sense strand
gauaggaagccuguuucug

SEQ ID NO: 1061631 - RNA, 19 nt, Homo sapiens
  misc_RNA (1)...(19): siRNA sense strand
uggcuggugucgucuguca

SEQ ID NO: 1061632 - RNA, 19 nt, Homo sapiens
  misc_RNA (1)...(19): siRNA sense strand
cgugguccaagaucuauuu

SEQ ID NO: 1061633 - RNA, 19 nt, Homo sapiens
  misc_RNA (1)...(19): siRNA sense strand
caucauugggaucaacuug

SEQ ID NO: 1061634 - RNA, 19 nt, Homo sapiens
  misc_RNA (1)...(19): siRNA sense strand
ugcagaacaugcgugcuuu

SEQ ID NO: 1061635 - RNA, 19 nt, Homo sapiens
  misc_RNA (1)...(19): siRNA sense strand
ugaucaggcuguggucuuc

SEQ ID NO: 1061636 - RNA, 19 nt, Homo sapiens
  misc_RNA (1)...(19): siRNA sense strand
cuggacagcucccacaaac

SEQ ID NO: 1061637 - RNA, 19 nt, Homo sapiens
  misc_RNA (1)...(19): siRNA sense strand
ggacuuugagcuucaccau

SEQ ID NO: 1061638 - RNA, 19 nt, Homo sapiens
  misc_RNA (1)...(19): siRNA sense strand
agaagaccuugaaaugcau

SEQ ID NO: 1061639 - RNA, 19 nt, Homo sapiens
  misc_RNA (1)...(19): siRNA sense strand
ucaucugggucaaccuguu

SEQ ID NO: 1061640 - RNA, 19 nt, Homo sapiens
  misc_RNA (1)...(19): siRNA sense strand
ucaggcccgugguccaaga

SEQ ID NO: 1061641 - RNA, 19 nt, Homo sapiens
  misc_RNA (1)...(19): siRNA sense strand
gucacucuguggaacuuga

SEQ ID NO: 1061642 - RNA, 19 nt, Homo sapiens
  misc_RNA (1)...(19): siRNA sense strand
gguguccauuugcguguuc

SEQ ID NO: 1061643 - RNA, 19 nt, Homo sapiens
  misc_RNA (1)...(19): siRNA sense strand
cagccaucaucuacaguca

SEQ ID NO: 1061644 - RNA, 19 nt, Homo sapiens
  misc_RNA (1)...(19): siRNA sense strand
gccaucuucuucauagucu

SEQ ID NO: 1061645 - RNA, 19 nt, Homo sapiens
  misc_RNA (1)...(19): siRNA sense strand
ccuaugccaucuucuucau

SEQ ID NO: 1061646 - RNA, 19 nt, Homo sapiens
  misc_RNA (1)...(19): siRNA sense strand
gggccuaugccaucuucuu

SEQ ID NO: 1061647 - RNA, 19 nt, Homo sapiens
  misc_RNA (1)...(19): siRNA sense strand
ggugggcccauuuccagaa

SEQ ID NO: 1061648 - RNA, 19 nt, Homo sapiens
  misc_RNA (1)...(19): siRNA sense strand
ggggcuaccugaugaaauc

SEQ ID NO: 1061649 - RNA, 19 nt, Homo sapiens
  misc_RNA (1)...(19): siRNA sense strand
gcagguguuucuggaugca

SEQ ID NO: 1061650 - RNA, 19 nt, Homo sapiens
  misc_RNA (1)...(19): siRNA sense strand
ugggaccucugcauugauc

SEQ ID NO: 1061651 - RNA, 19 nt, Homo sapiens
  misc_RNA (1)...(19): siRNA sense strand
gcauaaagccuuagacuua

SEQ ID NO: 1061652 - RNA, 19 nt, Homo sapiens
  misc_RNA (1)...(19): siRNA sense strand
caagagaucucgguuguua

SEQ ID NO: 1061653 - RNA, 19 nt, Homo sapiens
  misc_RNA (1)...(19): siRNA sense strand
ugaagaagauggauccuua

SEQ ID NO: 1061654 - RNA, 19 nt, Homo sapiens
  misc_RNA (1)...(19): siRNA sense strand
caagaggaauuaaagagua

SEQ ID NO: 1061655 - RNA, 19 nt, Homo sapiens
  misc_RNA (1)...(19): siRNA sense strand
ccacaaaucauuaagcaua

SEQ ID NO: 1061656 - RNA, 19 nt, Homo sapiens
  misc_RNA (1)...(19): siRNA sense strand
gagagaggcugcuucacaa

SEQ ID NO: 1061657 - RNA, 19 nt, Homo sapiens
  misc_RNA (1)...(19): siRNA sense strand
uaaaggagguacauaagau

SEQ ID NO: 1061658 - RNA, 19 nt, Homo sapiens
  misc_RNA (1)...(19): siRNA sense strand
gaugacagauggcaauuca

SEQ ID NO: 1061659 - RNA, 19 nt, Homo sapiens
  misc_RNA (1)...(19): siRNA sense strand
gaaagcugcucuacucauc

SEQ ID NO: 1061660 - RNA, 19 nt, Homo sapiens
  misc_RNA (1)...(19): siRNA sense strand
gcuauuaacaccaaguaua

SEQ ID NO: 1061661 - RNA, 19 nt, Homo sapiens
  misc_RNA (1)...(19): siRNA sense strand
ggaagacagugaacaagca

SEQ ID NO: 1061662 - RNA, 19 nt, Homo sapiens
  misc_RNA (1)...(19): siRNA sense strand
gggcaugucugaacaacug

SEQ ID NO: 1061663 - RNA, 19 nt, Homo sapiens
  misc_RNA (1)...(19): siRNA sense strand
gauaaagcauccaaaauga

SEQ ID NO: 1061664 - RNA, 19 nt, Homo sapiens
  misc_RNA (1)...(19): siRNA sense strand
acacacagcucuaaauuuu

SEQ ID NO: 1061665 - RNA, 19 nt, Homo sapiens
  misc_RNA (1)...(19): siRNA sense strand
ggagguacauaagauaaau

SEQ ID NO: 1061666 - RNA, 19 nt, Homo sapiens
  misc_RNA (1)...(19): siRNA sense strand
acagaaagcugcucuacuc

SEQ ID NO: 1061667 - RNA, 19 nt, Homo sapiens
  misc_RNA (1)...(19): siRNA sense strand
caggguaccuuuagugguu

SEQ ID NO: 1061668 - RNA, 19 nt, Homo sapiens
  misc_RNA (1)...(19): siRNA sense strand
cugaacaacuggguuauaa

SEQ ID NO: 1061669 - RNA, 19 nt, Homo sapiens
  misc_RNA (1)...(19): siRNA sense strand
gaagaagauggauccuuaa

SEQ ID NO: 1061670 - RNA, 19 nt, Homo sapiens
  misc_RNA (1)...(19): siRNA sense strand
ugaacaagcaguagauaaa

SEQ ID NO: 1061671 - RNA, 19 nt, Homo sapiens
  misc_RNA (1)...(19): siRNA sense strand
uagacaaucugaccuuaau

SEQ ID NO: 1061672 - RNA, 19 nt, Homo sapiens
  misc_RNA (1)...(19): siRNA sense strand
aaacacacagcucuaaauu

SEQ ID NO: 1061673 - RNA, 19 nt, Homo sapiens
  misc_RNA (1)...(19): siRNA sense strand
guacaccacaaaucauuaa

SEQ ID NO: 1061674 - RNA, 19 nt, Homo sapiens
  misc_RNA (1)...(19): siRNA sense strand
gaacaacuggguuauaaaa

SEQ ID NO: 1061675 - RNA, 19 nt, Homo sapiens
  misc_RNA (1)...(19): siRNA sense strand
gcuaguacaccacaaauca

SEQ ID NO: 1061676 - RNA, 19 nt, Homo sapiens
  misc_RNA (1)...(19): siRNA sense strand
aguaaaggauguaaacaga

SEQ ID NO: 1061677 - RNA, 19 nt, Homo sapiens
  misc_RNA (1)...(19): siRNA sense strand
agcaguagauaaacuagua

SEQ ID NO: 1061678 - RNA, 19 nt, Homo sapiens
  misc_RNA (1)...(19): siRNA sense strand
guacaaacacacagcucua

SEQ ID NO: 1061679 - RNA, 19 nt, Homo sapiens
  misc_RNA (1)...(19): siRNA sense strand
gguaguaguaaccaagaua

SEQ ID NO: 1061680 - RNA, 19 nt, Homo sapiens
  misc_RNA (1)...(19): siRNA sense strand
cauaaagccuuagacuuag

SEQ ID NO: 1061681 - RNA, 19 nt, Homo sapiens
  misc_RNA (1)...(19): siRNA sense strand
guaguaguaaccaagauaa

SEQ ID NO: 1061682 - RNA, 19 nt, Homo sapiens
  misc_RNA (1)...(19): siRNA sense strand
caagacaaacgaucuaaag

SEQ ID NO: 1061683 - RNA, 19 nt, Homo sapiens
  misc_RNA (1)...(19): siRNA sense strand
caaacacacagcucuaaau

SEQ ID NO: 1061684 - RNA, 19 nt, Homo sapiens
  misc_RNA (1)...(19): siRNA sense strand
gaauauucacggucuccua

SEQ ID NO: 1061685 - RNA, 19 nt, Homo sapiens
  misc_RNA (1)...(19): siRNA sense strand
uaaagcagauacugguagu

SEQ ID NO: 1061686 - RNA, 19 nt, Homo sapiens
  misc_RNA (1)...(19): siRNA sense strand
caaucugaccuuaauggua

SEQ ID NO: 1061687 - RNA, 19 nt, Homo sapiens
  misc_RNA (1)...(19): siRNA sense strand
guagacaaucugaccuuaa

SEQ ID NO: 1061688 - RNA, 19 nt, Homo sapiens
  misc_RNA (1)...(19): siRNA sense strand
caccaaguauaauaacaga

SEQ ID NO: 1061689 - RNA, 19 nt, Homo sapiens
  misc_RNA (1)...(19): siRNA sense strand
ggaauuaaagaguauaugc

SEQ ID NO: 1061690 - RNA, 19 nt, Homo sapiens
  misc_RNA (1)...(19): siRNA sense strand
gguagaacacacugacauu

SEQ ID NO: 1061691 - RNA, 19 nt, Homo sapiens
  misc_RNA (1)...(19): siRNA sense strand
ugacauuccugaagcuagu

SEQ ID NO: 1061692 - RNA, 19 nt, Homo sapiens
  misc_RNA (1)...(19): siRNA sense strand
caccacaaaucauuaagca

SEQ ID NO: 1061693 - RNA, 19 nt, Homo sapiens
  misc_RNA (1)...(19): siRNA sense strand
aaaggagguacauaagaua

SEQ ID NO: 1061694 - RNA, 19 nt, Homo sapiens
  misc_RNA (1)...(19): siRNA sense strand
gaacaagcaguagauaaac

SEQ ID NO: 1061695 - RNA, 19 nt, Homo sapiens
  misc_RNA (1)...(19): siRNA sense strand
gugaacaagcaguagauaa

SEQ ID NO: 1061696 - RNA, 19 nt, Homo sapiens
  misc_RNA (1)...(19): siRNA sense strand
gauggcaauucaagagauc

SEQ ID NO: 1061697 - RNA, 19 nt, Homo sapiens
  misc_RNA (1)...(19): siRNA sense strand
gcaguagauaaacuaguaa

SEQ ID NO: 1061698 - RNA, 19 nt, Homo sapiens
  misc_RNA (1)...(19): siRNA sense strand
gagcagcccagaaacagau

SEQ ID NO: 1061699 - RNA, 19 nt, Homo sapiens
  misc_RNA (1)...(19): siRNA sense strand
ggagaggagcacagauuca

SEQ ID NO: 1061700 - RNA, 19 nt, Homo sapiens
  misc_RNA (1)...(19): siRNA sense strand
gaugaaggguuuuggugaa

SEQ ID NO: 1061701 - RNA, 19 nt, Homo sapiens
  misc_RNA (1)...(19): siRNA sense strand
guagauaaacuaguaaagg

SEQ ID NO: 1061702 - RNA, 19 nt, Homo sapiens
  misc_RNA (1)...(19): siRNA sense strand
caagagagaagaacaucca

SEQ ID NO: 1061703 - RNA, 19 nt, Homo sapiens
  misc_RNA (1)...(19): siRNA sense strand
uuaaaggagguacauaaga

SEQ ID NO: 1061704 - RNA, 19 nt, Homo sapiens
  misc_RNA (1)...(19): siRNA sense strand
gaaggguuuuggugaauau

SEQ ID NO: 1061705 - RNA, 19 nt, Homo sapiens
  misc_RNA (1)...(19): siRNA sense strand
ugucugaacaacuggguua

SEQ ID NO: 1061706 - RNA, 19 nt, Homo sapiens
  misc_RNA (1)...(19): siRNA sense strand
aguagacaaucugaccuua

SEQ ID NO: 1061707 - RNA, 19 nt, Homo sapiens
  misc_RNA (1)...(19): siRNA sense strand
gagagaagaacauccaaaa

SEQ ID NO: 1061708 - RNA, 19 nt, Homo sapiens
  misc_RNA (1)...(19): siRNA sense strand
agacagugaacaagcagua

SEQ ID NO: 1061709 - RNA, 19 nt, Homo sapiens
  misc_RNA (1)...(19): siRNA sense strand
acaagcaguagauaaacua

SEQ ID NO: 1061710 - RNA, 19 nt, Homo sapiens
  misc_RNA (1)...(19): siRNA sense strand
ugacagauggcaauucaag

SEQ ID NO: 1061711 - RNA, 19 nt, Homo sapiens
  misc_RNA (1)...(19): siRNA sense strand
uugaaaagaugaaggguuu

SEQ ID NO: 1061712 - RNA, 19 nt, Homo sapiens
  misc_RNA (1)...(19): siRNA sense strand
gcccagaaacagaugaaga

SEQ ID NO: 1061713 - RNA, 19 nt, Homo sapiens
  misc_RNA (1)...(19): siRNA sense strand
aaaaugagcagcccagaaa

SEQ ID NO: 1061714 - RNA, 19 nt, Homo sapiens
  misc_RNA (1)...(19): siRNA sense strand
caagauaaagcauccaaaa

SEQ ID NO: 1061715 - RNA, 19 nt, Homo sapiens
  misc_RNA (1)...(19): siRNA sense strand
acacaagacaaacgaucua

SEQ ID NO: 1061716 - RNA, 19 nt, Homo sapiens
  misc_RNA (1)...(19): siRNA sense strand
agagagaggcugcuucaca

SEQ ID NO: 1061717 - RNA, 19 nt, Homo sapiens
  misc_RNA (1)...(19): siRNA sense strand
guagaacacacugacauuc

SEQ ID NO: 1061718 - RNA, 19 nt, Homo sapiens
  misc_RNA (1)...(19): siRNA sense strand
guaaaggauguaaacagau

SEQ ID NO: 1061719 - RNA, 19 nt, Homo sapiens
  misc_RNA (1)...(19): siRNA sense strand
gaaacagaugaagaaauug

SEQ ID NO: 1061720 - RNA, 19 nt, Homo sapiens
  misc_RNA (1)...(19): siRNA sense strand
cagaaacagaugaagaaau

SEQ ID NO: 1061721 - RNA, 19 nt, Homo sapiens
  misc_RNA (1)...(19): siRNA sense strand
cccagaaacagaugaagaa

SEQ ID NO: 1061722 - RNA, 19 nt, Homo sapiens
  misc_RNA (1)...(19): siRNA sense strand
agacaaacgaucuaaagca

SEQ ID NO: 1061723 - RNA, 19 nt, Homo sapiens
  misc_RNA (1)...(19): siRNA sense strand
gacaaucugaccuuaaugg

SEQ ID NO: 1061724 - RNA, 19 nt, Homo sapiens
  misc_RNA (1)...(19): siRNA sense strand
aaggagaggagcacagauu

SEQ ID NO: 1061725 - RNA, 19 nt, Homo sapiens
  misc_RNA (1)...(19): siRNA sense strand
agagaucucgguuguuaga

SEQ ID NO: 1061726 - RNA, 19 nt, Homo sapiens
  misc_RNA (1)...(19): siRNA sense strand
uucaagagaucucgguugu

SEQ ID NO: 1061727 - RNA, 19 nt, Homo sapiens
  misc_RNA (1)...(19): siRNA sense strand
auaaagccuuagacuuaga

SEQ ID NO: 1061728 - RNA, 19 nt, Homo sapiens
  misc_RNA (1)...(19): siRNA sense strand
gauguaguagacaaucuga

SEQ ID NO: 1061729 - RNA, 19 nt, Homo sapiens
  misc_RNA (1)...(19): siRNA sense strand
aagaagauggauccuuaaa

SEQ ID NO: 1061730 - RNA, 19 nt, Homo sapiens
  misc_RNA (1)...(19): siRNA sense strand
ucacaggguaccuuuagug

SEQ ID NO: 1061731 - RNA, 19 nt, Homo sapiens
  misc_RNA (1)...(19): siRNA sense strand
guuagauacacaagacaaa

SEQ ID NO: 1061732 - RNA, 19 nt, Homo sapiens
  misc_RNA (1)...(19): siRNA sense strand
uagccgagcaguacaaaca

SEQ ID NO: 1061733 - RNA, 19 nt, Homo sapiens
  misc_RNA (1)...(19): siRNA sense strand
gcacagauucaggcagcaa

SEQ ID NO: 1061734 - RNA, 19 nt, Homo sapiens
  misc_RNA (1)...(19): siRNA sense strand
ccagaaacagaugaagaaa

SEQ ID NO: 1061735 - RNA, 19 nt, Homo sapiens
  misc_RNA (1)...(19): siRNA sense strand
acaaacacacagcucuaaa

SEQ ID NO: 1061736 - RNA, 19 nt, Homo sapiens
  misc_RNA (1)...(19): siRNA sense strand
ucauucauguguuaugucu

SEQ ID NO: 1061737 - RNA, 19 nt, Homo sapiens
  misc_RNA (1)...(19): siRNA sense strand
ugaacaacuggguuauaaa

SEQ ID NO: 1061738 - RNA, 19 nt, Homo sapiens
  misc_RNA (1)...(19): siRNA sense strand
aaggagguacauaagauaa

SEQ ID NO: 1061739 - RNA, 19 nt, Homo sapiens
  misc_RNA (1)...(19): siRNA sense strand
uucacggucuccuacauuu

SEQ ID NO: 1061740 - RNA, 19 nt, Homo sapiens
  misc_RNA (1)...(19): siRNA sense strand
uaguacaccacaaaucauu

SEQ ID NO: 1061741 - RNA, 19 nt, Homo sapiens
  misc_RNA (1)...(19): siRNA sense strand
ccagcuaguacaccacaaa

SEQ ID NO: 1061742 - RNA, 19 nt, Homo sapiens
  misc_RNA (1)...(19): siRNA sense strand
gcagcaagagagaagaaca

SEQ ID NO: 1061743 - RNA, 19 nt, Homo sapiens
  misc_RNA (1)...(19): siRNA sense strand
uaacagaaagcugcucuac

SEQ ID NO: 1061744 - RNA, 19 nt, Homo sapiens
  misc_RNA (1)...(19): siRNA sense strand
uacaaacacacagcucuaa

SEQ ID NO: 1061745 - RNA, 19 nt, Homo sapiens
  misc_RNA (1)...(19): siRNA sense strand
ugaccuuaaugguagaaca

SEQ ID NO: 1061746 - RNA, 19 nt, Homo sapiens
  misc_RNA (1)...(19): siRNA sense strand
cuacaaccaccaucucgau

SEQ ID NO: 1061747 - RNA, 19 nt, Homo sapiens
  misc_RNA (1)...(19): siRNA sense strand
guaguaaccaagauaaagc

SEQ ID NO: 1061748 - RNA, 19 nt, Homo sapiens
  misc_RNA (1)...(19): siRNA sense strand
acaagacaaacgaucuaaa

SEQ ID NO: 1061749 - RNA, 19 nt, Homo sapiens
  misc_RNA (1)...(19): siRNA sense strand
uuucugcuauuaacaccaa

SEQ ID NO: 1061750 - RNA, 19 nt, Homo sapiens
  misc_RNA (1)...(19): siRNA sense strand
ccaagauaaagcauccaaa

SEQ ID NO: 1061751 - RNA, 19 nt, Homo sapiens
  misc_RNA (1)...(19): siRNA sense strand
gaaagaaucguaagaauga

SEQ ID NO: 1061752 - RNA, 19 nt, Homo sapiens
  misc_RNA (1)...(19): siRNA sense strand
gaugaagccucuuaugaaa

SEQ ID NO: 1061753 - RNA, 19 nt, Homo sapiens
  misc_RNA (1)...(19): siRNA sense strand
gaaaagauguugaaacuga

SEQ ID NO: 1061754 - RNA, 19 nt, Homo sapiens
  misc_RNA (1)...(19): siRNA sense strand
ucacaaaguucaagaaugu

SEQ ID NO: 1061755 - RNA, 19 nt, Homo sapiens
  misc_RNA (1)...(19): siRNA sense strand
ggaccaagcuaaccauuca

SEQ ID NO: 1061756 - RNA, 19 nt, Homo sapiens
  misc_RNA (1)...(19): siRNA sense strand
ggacagugauagugaagaa

SEQ ID NO: 1061757 - RNA, 19 nt, Homo sapiens
  misc_RNA (1)...(19): siRNA sense strand
gcaaccagauuaugauaug

SEQ ID NO: 1061758 - RNA, 19 nt, Homo sapiens
  misc_RNA (1)...(19): siRNA sense strand
aaacgaagaugauuaccuu

SEQ ID NO: 1061759 - RNA, 19 nt, Homo sapiens
  misc_RNA (1)...(19): siRNA sense strand
agagcaacgucaacuauua

SEQ ID NO: 1061760 - RNA, 19 nt, Homo sapiens
  misc_RNA (1)...(19): siRNA sense strand
ccagaaagauugggcuuaa

SEQ ID NO: 1061761 - RNA, 19 nt, Homo sapiens
  misc_RNA (1)...(19): siRNA sense strand
ggaaucggaacaucauuua

SEQ ID NO: 1061762 - RNA, 19 nt, Homo sapiens
  misc_RNA (1)...(19): siRNA sense strand
ccaagaagauguauaggau

SEQ ID NO: 1061763 - RNA, 19 nt, Homo sapiens
  misc_RNA (1)...(19): siRNA sense strand
agagugacauuaagcaaua

SEQ ID NO: 1061764 - RNA, 19 nt, Homo sapiens
  misc_RNA (1)...(19): siRNA sense strand
gaccaaugcuuccaguaaa

SEQ ID NO: 1061765 - RNA, 19 nt, Homo sapiens
  misc_RNA (1)...(19): siRNA sense strand
gaaauuaagccuuugcaau

SEQ ID NO: 1061766 - RNA, 19 nt, Homo sapiens
  misc_RNA (1)...(19): siRNA sense strand
aaacugagacgagaauuua

SEQ ID NO: 1061767 - RNA, 19 nt, Homo sapiens
  misc_RNA (1)...(19): siRNA sense strand
cagcaaguguuuagagaaa

SEQ ID NO: 1061768 - RNA, 19 nt, Homo sapiens
  misc_RNA (1)...(19): siRNA sense strand
gcagugagguagccaagga

SEQ ID NO: 1061769 - RNA, 19 nt, Homo sapiens
  misc_RNA (1)...(19): siRNA sense strand
cgaagaugauuaccuuauu

SEQ ID NO: 1061770 - RNA, 19 nt, Homo sapiens
  misc_RNA (1)...(19): siRNA sense strand
gaaacugagacgagaauuu

SEQ ID NO: 1061771 - RNA, 19 nt, Homo sapiens
  misc_RNA (1)...(19): siRNA sense strand
ggcagacugugaacaauaa

SEQ ID NO: 1061772 - RNA, 19 nt, Homo sapiens
  misc_RNA (1)...(19): siRNA sense strand
ggaccaaugcuuccaguaa

SEQ ID NO: 1061773 - RNA, 19 nt, Homo sapiens
  misc_RNA (1)...(19): siRNA sense strand
cagcaacucuucauaaugg

SEQ ID NO: 1061774 - RNA, 19 nt, Homo sapiens
  misc_RNA (1)...(19): siRNA sense strand
aaacagcaaucucagcauu

SEQ ID NO: 1061775 - RNA, 19 nt, Homo sapiens
  misc_RNA (1)...(19): siRNA sense strand
cugaaaugcugaauaguuu

SEQ ID NO: 1061776 - RNA, 19 nt, Homo sapiens
  misc_RNA (1)...(19): siRNA sense strand
guggugaaauccuuaauga

SEQ ID NO: 1061777 - RNA, 19 nt, Homo sapiens
  misc_RNA (1)...(19): siRNA sense strand
gaaaucaucacaaaguuca

SEQ ID NO: 1061778 - RNA, 19 nt, Homo sapiens
  misc_RNA (1)...(19): siRNA sense strand
cagcaagaauggcauauca

SEQ ID NO: 1061779 - RNA, 19 nt, Homo sapiens
  misc_RNA (1)...(19): siRNA sense strand
gcagugcaccucaauaaug

SEQ ID NO: 1061780 - RNA, 19 nt, Homo sapiens
  misc_RNA (1)...(19): siRNA sense strand
guacaaaggagaguuuaaa

SEQ ID NO: 1061781 - RNA, 19 nt, Homo sapiens
  misc_RNA (1)...(19): siRNA sense strand
cgagaauuauugcacuuaa

SEQ ID NO: 1061782 - RNA, 19 nt, Homo sapiens
  misc_RNA (1)...(19): siRNA sense strand
ccaaaacaguucauucaua

SEQ ID NO: 1061783 - RNA, 19 nt, Homo sapiens
  misc_RNA (1)...(19): siRNA sense strand
uaagcacccucaucauuug

SEQ ID NO: 1061784 - RNA, 19 nt, Homo sapiens
  misc_RNA (1)...(19): siRNA sense strand
ggacagagugccaaagguu

SEQ ID NO: 1061785 - RNA, 19 nt, Homo sapiens
  misc_RNA (1)...(19): siRNA sense strand
gaacaauuccugccugaca

SEQ ID NO: 1061786 - RNA, 19 nt, Homo sapiens
  misc_RNA (1)...(19): siRNA sense strand
cagcucagaugaagaugaa

SEQ ID NO: 1061787 - RNA, 19 nt, Homo sapiens
  misc_RNA (1)...(19): siRNA sense strand
gggcuuaaauggaauagca

SEQ ID NO: 1061788 - RNA, 19 nt, Homo sapiens
  misc_RNA (1)...(19): siRNA sense strand
gaaccacgaaccagaaaga

SEQ ID NO: 1061789 - RNA, 19 nt, Homo sapiens
  misc_RNA (1)...(19): siRNA sense strand
ggaaaugauuaagagaaga

SEQ ID NO: 1061790 - RNA, 19 nt, Homo sapiens
  misc_RNA (1)...(19): siRNA sense strand
ccacgaaccagaaagauug

SEQ ID NO: 1061791 - RNA, 19 nt, Homo sapiens
  misc_RNA (1)...(19): siRNA sense strand
gcaguuaguucagaugcaa

SEQ ID NO: 1061792 - RNA, 19 nt, Homo sapiens
  misc_RNA (1)...(19): siRNA sense strand
aagaauggcauaucaguaa

SEQ ID NO: 1061793 - RNA, 19 nt, Homo sapiens
  misc_RNA (1)...(19): siRNA sense strand
ugaagaauguaccucaaga

SEQ ID NO: 1061794 - RNA, 19 nt, Homo sapiens
  misc_RNA (1)...(19): siRNA sense strand
gagcaaccagauuaugaua

SEQ ID NO: 1061795 - RNA, 19 nt, Homo sapiens
  misc_RNA (1)...(19): siRNA sense strand
cagcaucuguagcuuuauu

SEQ ID NO: 1061796 - RNA, 19 nt, Homo sapiens
  misc_RNA (1)...(19): siRNA sense strand
aaacuaagcacccucauca

SEQ ID NO: 1061797 - RNA, 19 nt, Homo sapiens
  misc_RNA (1)...(19): siRNA sense strand
aagaagaaguacccaaaga

SEQ ID NO: 1061798 - RNA, 19 nt, Homo sapiens
  misc_RNA (1)...(19): siRNA sense strand
gaauauccacagaacauga

SEQ ID NO: 1061799 - RNA, 19 nt, Homo sapiens
  misc_RNA (1)...(19): siRNA sense strand
gcagaggcuuugauaacau

SEQ ID NO: 1061800 - RNA, 19 nt, Homo sapiens
  misc_RNA (1)...(19): siRNA sense strand
ugauauggauucagaagau

SEQ ID NO: 1061801 - RNA, 19 nt, Homo sapiens
  misc_RNA (1)...(19): siRNA sense strand
guauuaugcuccucguuug

SEQ ID NO: 1061802 - RNA, 19 nt, Homo sapiens
  misc_RNA (1)...(19): siRNA sense strand
uaucagaaccggaagaaga

SEQ ID NO: 1061803 - RNA, 19 nt, Homo sapiens
  misc_RNA (1)...(19): siRNA sense strand
ccugagacauugccuguga

SEQ ID NO: 1061804 - RNA, 19 nt, Homo sapiens
  misc_RNA (1)...(19): siRNA sense strand
gaagaaguacccaaagaag

SEQ ID NO: 1061805 - RNA, 19 nt, Homo sapiens
  misc_RNA (1)...(19): siRNA sense strand
cuaagcacccucaucauuu

SEQ ID NO: 1061806 - RNA, 19 nt, Homo sapiens
  misc_RNA (1)...(19): siRNA sense strand
acaacgagcaaccagauua

SEQ ID NO: 1061807 - RNA, 19 nt, Homo sapiens
  misc_RNA (1)...(19): siRNA sense strand
agauugggcuuaaauggaa

SEQ ID NO: 1061808 - RNA, 19 nt, Homo sapiens
  misc_RNA (1)...(19): siRNA sense strand
gaaagauugggcuuaaaug

SEQ ID NO: 1061809 - RNA, 19 nt, Homo sapiens
  misc_RNA (1)...(19): siRNA sense strand
ugcagcaucuguagcuuua

SEQ ID NO: 1061810 - RNA, 19 nt, Homo sapiens
  misc_RNA (1)...(19): siRNA sense strand
gggcagacugugaacaaua

SEQ ID NO: 1061811 - RNA, 19 nt, Homo sapiens
  misc_RNA (1)...(19): siRNA sense strand
gaagaauguaccucaagaa

SEQ ID NO: 1061812 - RNA, 19 nt, Homo sapiens
  misc_RNA (1)...(19): siRNA sense strand
acagauagacccugaaaug

SEQ ID NO: 1061813 - RNA, 19 nt, Homo sapiens
  misc_RNA (1)...(19): siRNA sense strand
uggcagauuuggauaaguu

SEQ ID NO: 1061814 - RNA, 19 nt, Homo sapiens
  misc_RNA (1)...(19): siRNA sense strand
caauaagagugacauuaag

SEQ ID NO: 1061815 - RNA, 19 nt, Homo sapiens
  misc_RNA (1)...(19): siRNA sense strand
gaauuuaguagagccauaa

SEQ ID NO: 1061816 - RNA, 19 nt, Homo sapiens
  misc_RNA (1)...(19): siRNA sense strand
cgaaagaaucguaagaaug

SEQ ID NO: 1061817 - RNA, 19 nt, Homo sapiens
  misc_RNA (1)...(19): siRNA sense strand
cuaaucagcuuguaacacu

SEQ ID NO: 1061818 - RNA, 19 nt, Homo sapiens
  misc_RNA (1)...(19): siRNA sense strand
agauggaaauuaagccuuu

SEQ ID NO: 1061819 - RNA, 19 nt, Homo sapiens
  misc_RNA (1)...(19): siRNA sense strand
ccaccaauauggcuuuauc

SEQ ID NO: 1061820 - RNA, 19 nt, Homo sapiens
  misc_RNA (1)...(19): siRNA sense strand
cagcauuccucgcaacaga

SEQ ID NO: 1061821 - RNA, 19 nt, Homo sapiens
  misc_RNA (1)...(19): siRNA sense strand
ggugaaauccuuaaugaag

SEQ ID NO: 1061822 - RNA, 19 nt, Homo sapiens
  misc_RNA (1)...(19): siRNA sense strand
cagaagaugagacuuuauu

SEQ ID NO: 1061823 - RNA, 19 nt, Homo sapiens
  misc_RNA (1)...(19): siRNA sense strand
gacagagugccaaagguua

SEQ ID NO: 1061824 - RNA, 19 nt, Homo sapiens
  misc_RNA (1)...(19): siRNA sense strand
acauuauacuccaccaaua

SEQ ID NO: 1061825 - RNA, 19 nt, Homo sapiens
  misc_RNA (1)...(19): siRNA sense strand
ucaagcaccucugacugua

SEQ ID NO: 1061826 - RNA, 19 nt, Homo sapiens
  misc_RNA (1)...(19): siRNA sense strand
uaucagaucaugucgacua

SEQ ID NO: 1061827 - RNA, 19 nt, Homo sapiens
  misc_RNA (1)...(19): siRNA sense strand
ccucaucauuugucuuuga

SEQ ID NO: 1061828 - RNA, 19 nt, Homo sapiens
  misc_RNA (1)...(19): siRNA sense strand
caacgucaacuauuacaau

SEQ ID NO: 1061829 - RNA, 19 nt, Homo sapiens
  misc_RNA (1)...(19): siRNA sense strand
uuggauaaguugagguaua

SEQ ID NO: 1061830 - RNA, 19 nt, Homo sapiens
  misc_RNA (1)...(19): siRNA sense strand
caagaauggcauaucagua

SEQ ID NO: 1061831 - RNA, 19 nt, Homo sapiens
  misc_RNA (1)...(19): siRNA sense strand
ugaugaagccucuuaugaa

SEQ ID NO: 1061832 - RNA, 19 nt, Homo sapiens
  misc_RNA (1)...(19): siRNA sense strand
gcaacccacuccugagaca

SEQ ID NO: 1061833 - RNA, 19 nt, Homo sapiens
  misc_RNA (1)...(19): siRNA sense strand
gugaaauccuuaaugaagu

SEQ ID NO: 1061834 - RNA, 19 nt, Homo sapiens
  misc_RNA (1)...(19): siRNA sense strand
ggaaaucaucacaaaguuc

SEQ ID NO: 1061835 - RNA, 19 nt, Homo sapiens
  misc_RNA (1)...(19): siRNA sense strand
gcaagaauggcauaucagu

SEQ ID NO: 1061836 - RNA, 19 nt, Homo sapiens
  misc_RNA (1)...(19): siRNA sense strand
gaauguaccucaagaaaac

SEQ ID NO: 1061837 - RNA, 19 nt, Homo sapiens
  misc_RNA (1)...(19): siRNA sense strand
ucauucauauucagccuuu

SEQ ID NO: 1061838 - RNA, 19 nt, Homo sapiens
  misc_RNA (1)...(19): siRNA sense strand
gagagcaacgucaacuauu

SEQ ID NO: 1061839 - RNA, 19 nt, Homo sapiens
  misc_RNA (1)...(19): siRNA sense strand
uauguugccuuucggagaa

SEQ ID NO: 1061840 - RNA, 19 nt, Homo sapiens
  misc_RNA (1)...(19): siRNA sense strand
caaaggagaguuuaaacag

SEQ ID NO: 1061841 - RNA, 19 nt, Homo sapiens
  misc_RNA (1)...(19): siRNA sense strand
cagugcaccucaauaaugu

SEQ ID NO: 1061842 - RNA, 19 nt, Homo sapiens
  misc_RNA (1)...(19): siRNA sense strand
ccacuuaaucccagcauug

SEQ ID NO: 1061843 - RNA, 19 nt, Homo sapiens
  misc_RNA (1)...(19): siRNA sense strand
uaaauuuacaggacaguga

SEQ ID NO: 1061844 - RNA, 19 nt, Homo sapiens
  misc_RNA (1)...(19): siRNA sense strand
caugucgacuacaguguuu

SEQ ID NO: 1061845 - RNA, 19 nt, Homo sapiens
  misc_RNA (1)...(19): siRNA sense strand
aaacagauagacccugaaa

SEQ ID NO: 1061846 - RNA, 19 nt, Homo sapiens
  misc_RNA (1)...(19): siRNA sense strand
guggaagggucauaaugga

SEQ ID NO: 1061847 - RNA, 19 nt, Homo sapiens
  misc_RNA (1)...(19): siRNA sense strand
gauggucccugugcuuuca

SEQ ID NO: 1061848 - RNA, 19 nt, Homo sapiens
  misc_RNA (1)...(19): siRNA sense strand
gcucagaugaagaugaauu

SEQ ID NO: 1061849 - RNA, 19 nt, Homo sapiens
  misc_RNA (1)...(19): siRNA sense strand
uaguagagccauaacaauu

SEQ ID NO: 1061850 - RNA, 19 nt, Homo sapiens
  misc_RNA (1)...(19): siRNA sense strand
agaaugaugaagccucuua

SEQ ID NO: 1061851 - RNA, 19 nt, Homo sapiens
  misc_RNA (1)...(19): siRNA sense strand
cgacucaucucccucaaga

SEQ ID NO: 1061852 - RNA, 19 nt, Homo sapiens
  misc_RNA (1)...(19): siRNA sense strand
gcccgagacuccuguguuu

SEQ ID NO: 1061853 - RNA, 19 nt, Homo sapiens
  misc_RNA (1)...(19): siRNA sense strand
gaaccacgcugcugaugac

SEQ ID NO: 1061854 - RNA, 19 nt, Homo sapiens
  misc_RNA (1)...(19): siRNA sense strand
guacgacgguguugagauc

SEQ ID NO: 1061855 - RNA, 19 nt, Homo sapiens
  misc_RNA (1)...(19): siRNA sense strand
gacaugugcugcagugaga

SEQ ID NO: 1061856 - RNA, 19 nt, Homo sapiens
  misc_RNA (1)...(19): siRNA sense strand
ugagaucacugugcagaaa

SEQ ID NO: 1061857 - RNA, 19 nt, Homo sapiens
  misc_RNA (1)...(19): siRNA sense strand
gagcgaggccugaagcauu

SEQ ID NO: 1061858 - RNA, 19 nt, Homo sapiens
  misc_RNA (1)...(19): siRNA sense strand
cagaguggauggaggagaa

SEQ ID NO: 1061859 - RNA, 19 nt, Homo sapiens
  misc_RNA (1)...(19): siRNA sense strand
aggagaagaucgaggauga

SEQ ID NO: 1061860 - RNA, 19 nt, Homo sapiens
  misc_RNA (1)...(19): siRNA sense strand
gagcacacgcccaucauug

SEQ ID NO: 1061861 - RNA, 19 nt, Homo sapiens
  misc_RNA (1)...(19): siRNA sense strand
ucgaggagaugaacgagaa

SEQ ID NO: 1061862 - RNA, 19 nt, Homo sapiens
  misc_RNA (1)...(19): siRNA sense strand
agaaaugcaccgaguauug

SEQ ID NO: 1061863 - RNA, 19 nt, Homo sapiens
  misc_RNA (1)...(19): siRNA sense strand
gaggagggcuuuggcuauc

SEQ ID NO: 1061864 - RNA, 19 nt, Homo sapiens
  misc_RNA (1)...(19): siRNA sense strand
agcgaggccugaagcauua

SEQ ID NO: 1061865 - RNA, 19 nt, Homo sapiens
  misc_RNA (1)...(19): siRNA sense strand
gaaaugcaccgaguauugg

SEQ ID NO: 1061866 - RNA, 19 nt, Homo sapiens
  misc_RNA (1)...(19): siRNA sense strand
ccucugaguuccuacauca

SEQ ID NO: 1061867 - RNA, 19 nt, Homo sapiens
  misc_RNA (1)...(19): siRNA sense strand
ggucacagaacgccacaaa

SEQ ID NO: 1061868 - RNA, 19 nt, Homo sapiens
  misc_RNA (1)...(19): siRNA sense strand
cuacaucaaugccaacuac

SEQ ID NO: 1061869 - RNA, 19 nt, Homo sapiens
  misc_RNA (1)...(19): siRNA sense strand
caaaccucgucuccucuuu

SEQ ID NO: 1061870 - RNA, 19 nt, Homo sapiens
  misc_RNA (1)...(19): siRNA sense strand
gaacuuuguggauccgaaa

SEQ ID NO: 1061871 - RNA, 19 nt, Homo sapiens
  misc_RNA (1)...(19): siRNA sense strand
gucaugagccucuacgaaa

SEQ ID NO: 1061872 - RNA, 19 nt, Homo sapiens
  misc_RNA (1)...(19): siRNA sense strand
agacuccuguguuugauug

SEQ ID NO: 1061873 - RNA, 19 nt, Homo sapiens
  misc_RNA (1)...(19): siRNA sense strand
gacaggcgccagucaguga

SEQ ID NO: 1061874 - RNA, 19 nt, Homo sapiens
  misc_RNA (1)...(19): siRNA sense strand
gaggaccggcugcuucauu

SEQ ID NO: 1061875 - RNA, 19 nt, Homo sapiens
  misc_RNA (1)...(19): siRNA sense strand
cgagaaaugcaccgaguau

SEQ ID NO: 1061876 - RNA, 19 nt, Homo sapiens
  misc_RNA (1)...(19): siRNA sense strand
ucaccaacaucgaggagau

SEQ ID NO: 1061877 - RNA, 19 nt, Homo sapiens
  misc_RNA (1)...(19): siRNA sense strand
ucauucacacggaggauua

SEQ ID NO: 1061878 - RNA, 19 nt, Homo sapiens
  misc_RNA (1)...(19): siRNA sense strand
ccaccucacucaccgucaa

SEQ ID NO: 1061879 - RNA, 19 nt, Homo sapiens
  misc_RNA (1)...(19): siRNA sense strand
caggcggaauucuuugaaa

SEQ ID NO: 1061880 - RNA, 19 nt, Homo sapiens
  misc_RNA (1)...(19): siRNA sense strand
gcugcaggcggaauucuuu

SEQ ID NO: 1061881 - RNA, 19 nt, Homo sapiens
  misc_RNA (1)...(19): siRNA sense strand
ggagcacacgcccaucauu

SEQ ID NO: 1061882 - RNA, 19 nt, Homo sapiens
  misc_RNA (1)...(19): siRNA sense strand
gagaaaugcaccgaguauu

SEQ ID NO: 1061883 - RNA, 19 nt, Homo sapiens
  misc_RNA (1)...(19): siRNA sense strand
ccucagauccagcucagaa

SEQ ID NO: 1061884 - RNA, 19 nt, Homo sapiens
  misc_RNA (1)...(19): siRNA sense strand
ccgagacuccuguguuuga

SEQ ID NO: 1061885 - RNA, 19 nt, Homo sapiens
  misc_RNA (1)...(19): siRNA sense strand
ggagcagccugugccuguu

SEQ ID NO: 1061886 - RNA, 19 nt, Homo sapiens
  misc_RNA (1)...(19): siRNA sense strand
gcaggcggaauucuuugaa

SEQ ID NO: 1061887 - RNA, 19 nt, Homo sapiens
  misc_RNA (1)...(19): siRNA sense strand
gagaugaacgagaaaugca

SEQ ID NO: 1061888 - RNA, 19 nt, Homo sapiens
  misc_RNA (1)...(19): siRNA sense strand
ggcuuuggcuaucucaugu

SEQ ID NO: 1061889 - RNA, 19 nt, Homo sapiens
  misc_RNA (1)...(19): siRNA sense strand
gcacacgcccaucauuguc

SEQ ID NO: 1061890 - RNA, 19 nt, Homo sapiens
  misc_RNA (1)...(19): siRNA sense strand
ggacucacagagagagaug

SEQ ID NO: 1061891 - RNA, 19 nt, Homo sapiens
  misc_RNA (1)...(19): siRNA sense strand
gggaggagaagguguacau

SEQ ID NO: 1061892 - RNA, 19 nt, Homo sapiens
  misc_RNA (1)...(19): siRNA sense strand
cgaggagggcuuuggcuau

SEQ ID NO: 1061893 - RNA, 19 nt, Homo sapiens
  misc_RNA (1)...(19): siRNA sense strand
aagcauuacugguucacau

SEQ ID NO: 1061894 - RNA, 19 nt, Homo sapiens
  misc_RNA (1)...(19): siRNA sense strand
caucaaugccaacuacauc

SEQ ID NO: 1061895 - RNA, 19 nt, Homo sapiens
  misc_RNA (1)...(19): siRNA sense strand
ggauggaggagaagaucga

SEQ ID NO: 1061896 - RNA, 19 nt, Homo sapiens
  misc_RNA (1)...(19): siRNA sense strand
gugcagaaagucauucaca

SEQ ID NO: 1061897 - RNA, 19 nt, Homo sapiens
  misc_RNA (1)...(19): siRNA sense strand
gagccaggagugagagaga

SEQ ID NO: 1061898 - RNA, 19 nt, Homo sapiens
  misc_RNA (1)...(19): siRNA sense strand
ggagaugaacgagaaaugc

SEQ ID NO: 1061899 - RNA, 19 nt, Homo sapiens
  misc_RNA (1)...(19): siRNA sense strand
aggcggaauucuuugaaau

SEQ ID NO: 1061900 - RNA, 19 nt, Homo sapiens
  misc_RNA (1)...(19): siRNA sense strand
gggcuuuggcuaucucaug

SEQ ID NO: 1061901 - RNA, 19 nt, Homo sapiens
  misc_RNA (1)...(19): siRNA sense strand
gcuccaggacucacagaga

SEQ ID NO: 1061902 - RNA, 19 nt, Homo sapiens
  misc_RNA (1)...(19): siRNA sense strand
gagggagccaggagugaga

SEQ ID NO: 1061903 - RNA, 19 nt, Homo sapiens
  misc_RNA (1)...(19): siRNA sense strand
ggagugagagagagaacca

SEQ ID NO: 1061904 - RNA, 19 nt, Homo sapiens
  misc_RNA (1)...(19): siRNA sense strand
caugcgagcaguaccaguu

SEQ ID NO: 1061905 - RNA, 19 nt, Homo sapiens
  misc_RNA (1)...(19): siRNA sense strand
gccugaagcauuacugguu

SEQ ID NO: 1061906 - RNA, 19 nt, Homo sapiens
  misc_RNA (1)...(19): siRNA sense strand
ggagggcuuuggcuaucuc

SEQ ID NO: 1061907 - RNA, 19 nt, Homo sapiens
  misc_RNA (1)...(19): siRNA sense strand
uguguuugauugugugaug

SEQ ID NO: 1061908 - RNA, 19 nt, Homo sapiens
  misc_RNA (1)...(19): siRNA sense strand
aggaccggcugcuucauug

SEQ ID NO: 1061909 - RNA, 19 nt, Homo sapiens
  misc_RNA (1)...(19): siRNA sense strand
gaaauccccaugaacuuug

SEQ ID NO: 1061910 - RNA, 19 nt, Homo sapiens
  misc_RNA (1)...(19): siRNA sense strand
cgucaugagccucuacgaa

SEQ ID NO: 1061911 - RNA, 19 nt, Homo sapiens
  misc_RNA (1)...(19): siRNA sense strand
cggaagaaccgguacaaaa

SEQ ID NO: 1061912 - RNA, 19 nt, Homo sapiens
  misc_RNA (1)...(19): siRNA sense strand
gagacuccuguguuugauu

SEQ ID NO: 1061913 - RNA, 19 nt, Homo sapiens
  misc_RNA (1)...(19): siRNA sense strand
gauuaccggcugcgacuca

SEQ ID NO: 1061914 - RNA, 19 nt, Homo sapiens
  misc_RNA (1)...(19): siRNA sense strand
gagcagccugugccuguuc

SEQ ID NO: 1061915 - RNA, 19 nt, Homo sapiens
  misc_RNA (1)...(19): siRNA sense strand
gaaccgguacaaaaccaua

SEQ ID NO: 1061916 - RNA, 19 nt, Homo sapiens
  misc_RNA (1)...(19): siRNA sense strand
ggaagaaccgguacaaaac

SEQ ID NO: 1061917 - RNA, 19 nt, Homo sapiens
  misc_RNA (1)...(19): siRNA sense strand
gcggaagaaccgguacaaa

SEQ ID NO: 1061918 - RNA, 19 nt, Homo sapiens
  misc_RNA (1)...(19): siRNA sense strand
gagaaccacgcugcugaug

SEQ ID NO: 1061919 - RNA, 19 nt, Homo sapiens
  misc_RNA (1)...(19): siRNA sense strand
ucacagaacgccacaaacc

SEQ ID NO: 1061920 - RNA, 19 nt, Homo sapiens
  misc_RNA (1)...(19): siRNA sense strand
ucaugagccucuacgaaaa

SEQ ID NO: 1061921 - RNA, 19 nt, Homo sapiens
  misc_RNA (1)...(19): siRNA sense strand
gcggaauucuuugaaaucc

SEQ ID NO: 1061922 - RNA, 19 nt, Homo sapiens
  misc_RNA (1)...(19): siRNA sense strand
aaaccucgucuccucuuug

SEQ ID NO: 1061923 - RNA, 19 nt, Homo sapiens
  misc_RNA (1)...(19): siRNA sense strand
cagcgguuauggccacauc

SEQ ID NO: 1061924 - RNA, 19 nt, Homo sapiens
  misc_RNA (1)...(19): siRNA sense strand
gagaagaucgaggaugacu

SEQ ID NO: 1061925 - RNA, 19 nt, Homo sapiens
  misc_RNA (1)...(19): siRNA sense strand
gaggagggguuccaauguc

SEQ ID NO: 1061926 - RNA, 19 nt, Homo sapiens
  misc_RNA (1)...(19): siRNA sense strand
cgagacuccuguguuugau

SEQ ID NO: 1061927 - RNA, 19 nt, Homo sapiens
  misc_RNA (1)...(19): siRNA sense strand
aaacaaagcuccguccuaa

SEQ ID NO: 1061928 - RNA, 19 nt, Homo sapiens
  misc_RNA (1)...(19): siRNA sense strand
ggaaugagccuuuggagau

SEQ ID NO: 1061929 - RNA, 19 nt, Homo sapiens
  misc_RNA (1)...(19): siRNA sense strand
ccaaagcccugcuggacaa

SEQ ID NO: 1061930 - RNA, 19 nt, Homo sapiens
  misc_RNA (1)...(19): siRNA sense strand
gaaugagccuuuggagaug

SEQ ID NO: 1061931 - RNA, 19 nt, Homo sapiens
  misc_RNA (1)...(19): siRNA sense strand
guacugcuccugcuguaaa

SEQ ID NO: 1061932 - RNA, 19 nt, Homo sapiens
  misc_RNA (1)...(19): siRNA sense strand
ucauggagcugcuguacug

SEQ ID NO: 1061933 - RNA, 19 nt, Homo sapiens
  misc_RNA (1)...(19): siRNA sense strand
gggacaagcugcaguacag

SEQ ID NO: 1061934 - RNA, 19 nt, Homo sapiens
  misc_RNA (1)...(19): siRNA sense strand
uaaacuggcaggacuguga

SEQ ID NO: 1061935 - RNA, 19 nt, Homo sapiens
  misc_RNA (1)...(19): siRNA sense strand
guacaugaaacacuacuuc

SEQ ID NO: 1061936 - RNA, 19 nt, Homo sapiens
  misc_RNA (1)...(19): siRNA sense strand
uaaacaaagcuccguccua

SEQ ID NO: 1061937 - RNA, 19 nt, Homo sapiens
  misc_RNA (1)...(19): siRNA sense strand
agacgcugcugcugaaugu

SEQ ID NO: 1061938 - RNA, 19 nt, Homo sapiens
  misc_RNA (1)...(19): siRNA sense strand
caagguggaauccguguug

SEQ ID NO: 1061939 - RNA, 19 nt, Homo sapiens
  misc_RNA (1)...(19): siRNA sense strand
ggagccgacuucaguacau

SEQ ID NO: 1061940 - RNA, 19 nt, Homo sapiens
  misc_RNA (1)...(19): siRNA sense strand
gcccagagcccucauugca

SEQ ID NO: 1061941 - RNA, 19 nt, Homo sapiens
  misc_RNA (1)...(19): siRNA sense strand
gagccgacuucaguacaug

SEQ ID NO: 1061942 - RNA, 19 nt, Homo sapiens
  misc_RNA (1)...(19): siRNA sense strand
caagaucagugugccuuac

SEQ ID NO: 1061943 - RNA, 19 nt, Homo sapiens
  misc_RNA (1)...(19): siRNA sense strand
ucaccuggcugcgcuaucu

SEQ ID NO: 1061944 - RNA, 19 nt, Homo sapiens
  misc_RNA (1)...(19): siRNA sense strand
aaugaggagugcacuguca

SEQ ID NO: 1061945 - RNA, 19 nt, Homo sapiens
  misc_RNA (1)...(19): siRNA sense strand
acaaagcuccguccuaaac

SEQ ID NO: 1061946 - RNA, 19 nt, Homo sapiens
  misc_RNA (1)...(19): siRNA sense strand
cccaucaacuacaagauca

SEQ ID NO: 1061947 - RNA, 19 nt, Homo sapiens
  misc_RNA (1)...(19): siRNA sense strand
uuggagauguggcccuuga

SEQ ID NO: 1061948 - RNA, 19 nt, Homo sapiens
  misc_RNA (1)...(19): siRNA sense strand
uacaggagccgacuucagu

SEQ ID NO: 1061949 - RNA, 19 nt, Homo sapiens
  misc_RNA (1)...(19): siRNA sense strand
aaagcuccguccuaaacug

SEQ ID NO: 1061950 - RNA, 19 nt, Homo sapiens
  misc_RNA (1)...(19): siRNA sense strand
acaagaucagugugccuua

SEQ ID NO: 1061951 - RNA, 19 nt, Homo sapiens
  misc_RNA (1)...(19): siRNA sense strand
ucaacuacaagaucagugu

SEQ ID NO: 1061952 - RNA, 19 nt, Homo sapiens
  misc_RNA (1)...(19): siRNA sense strand
ggccacccauccuggaagu

SEQ ID NO: 1061953 - RNA, 19 nt, Homo sapiens
  misc_RNA (1)...(19): siRNA sense strand
aaacacuacuuccccauca

SEQ ID NO: 1061954 - RNA, 19 nt, Homo sapiens
  misc_RNA (1)...(19): siRNA sense strand
ggacagaacuggcucaaug

SEQ ID NO: 1061955 - RNA, 19 nt, Homo sapiens
  misc_RNA (1)...(19): siRNA sense strand
ggaggaggaugaagaugaa

SEQ ID NO: 1061956 - RNA, 19 nt, Homo sapiens
  misc_RNA (1)...(19): siRNA sense strand
caagucagguggaggguuu

SEQ ID NO: 1061957 - RNA, 19 nt, Homo sapiens
  misc_RNA (1)...(19): siRNA sense strand
cuaagcauauugccaagua

SEQ ID NO: 1061958 - RNA, 19 nt, Homo sapiens
  misc_RNA (1)...(19): siRNA sense strand
gugcauuucuucaauaguu

SEQ ID NO: 1061959 - RNA, 19 nt, Homo sapiens
  misc_RNA (1)...(19): siRNA sense strand
cuggaaagguuacuucaaa

SEQ ID NO: 1061960 - RNA, 19 nt, Homo sapiens
  misc_RNA (1)...(19): siRNA sense strand
ggaugcugcucuacucaaa

SEQ ID NO: 1061961 - RNA, 19 nt, Homo sapiens
  misc_RNA (1)...(19): siRNA sense strand
ggaagggccugguguugca

SEQ ID NO: 1061962 - RNA, 19 nt, Homo sapiens
  misc_RNA (1)...(19): siRNA sense strand
gcaccucgcugacauucca

SEQ ID NO: 1061963 - RNA, 19 nt, Homo sapiens
  misc_RNA (1)...(19): siRNA sense strand
uagagaagcuggaggacau

SEQ ID NO: 1061964 - RNA, 19 nt, Homo sapiens
  misc_RNA (1)...(19): siRNA sense strand
cagaggcgguaaagaaaga

SEQ ID NO: 1061965 - RNA, 19 nt, Homo sapiens
  misc_RNA (1)...(19): siRNA sense strand
gacgcaccaucaccuauuu

SEQ ID NO: 1061966 - RNA, 19 nt, Homo sapiens
  misc_RNA (1)...(19): siRNA sense strand
agaaagaccgacuggauuu

SEQ ID NO: 1061967 - RNA, 19 nt, Homo sapiens
  misc_RNA (1)...(19): siRNA sense strand
ggagcugugucacugcaaa

SEQ ID NO: 1061968 - RNA, 19 nt, Homo sapiens
  misc_RNA (1)...(19): siRNA sense strand
cgaauuccuucaaacguau

SEQ ID NO: 1061969 - RNA, 19 nt, Homo sapiens
  misc_RNA (1)...(19): siRNA sense strand
acgaauuccuucaaacgua

SEQ ID NO: 1061970 - RNA, 19 nt, Homo sapiens
  misc_RNA (1)...(19): siRNA sense strand
gugaaaagguggaccaaaa

SEQ ID NO: 1061971 - RNA, 19 nt, Homo sapiens
  misc_RNA (1)...(19): siRNA sense strand
aaaggugcauuucuucaau

SEQ ID NO: 1061972 - RNA, 19 nt, Homo sapiens
  misc_RNA (1)...(19): siRNA sense strand
gcacugaugagguaguaga

SEQ ID NO: 1061973 - RNA, 19 nt, Homo sapiens
  misc_RNA (1)...(19): siRNA sense strand
auaaggagcuacugcuaau

SEQ ID NO: 1061974 - RNA, 19 nt, Homo sapiens
  misc_RNA (1)...(19): siRNA sense strand
guggacaucuucaauaagg

SEQ ID NO: 1061975 - RNA, 19 nt, Homo sapiens
  misc_RNA (1)...(19): siRNA sense strand
ucaaugaccaggugaugaa

SEQ ID NO: 1061976 - RNA, 19 nt, Homo sapiens
  misc_RNA (1)...(19): siRNA sense strand
cagcacugaugagguagua

SEQ ID NO: 1061977 - RNA, 19 nt, Homo sapiens
  misc_RNA (1)...(19): siRNA sense strand
aaagaaagaccgacuggau

SEQ ID NO: 1061978 - RNA, 19 nt, Homo sapiens
  misc_RNA (1)...(19): siRNA sense strand
guacucugcccaacgguuu

SEQ ID NO: 1061979 - RNA, 19 nt, Homo sapiens
  misc_RNA (1)...(19): siRNA sense strand
caauaaggagcuacugcua

SEQ ID NO: 1061980 - RNA, 19 nt, Homo sapiens
  misc_RNA (1)...(19): siRNA sense strand
acguggacaucuucaauaa

SEQ ID NO: 1061981 - RNA, 19 nt, Homo sapiens
  misc_RNA (1)...(19): siRNA sense strand
caugugaccugcguacaga

SEQ ID NO: 1061982 - RNA, 19 nt, Homo sapiens
  misc_RNA (1)...(19): siRNA sense strand
aaggugcauuucuucaaua

SEQ ID NO: 1061983 - RNA, 19 nt, Homo sapiens
  misc_RNA (1)...(19): siRNA sense strand
gugaagaggaggaagaaga

SEQ ID NO: 1061984 - RNA, 19 nt, Homo sapiens
  misc_RNA (1)...(19): siRNA sense strand
cugaugagguaguagagaa

SEQ ID NO: 1061985 - RNA, 19 nt, Homo sapiens
  misc_RNA (1)...(19): siRNA sense strand
ggcagaggcgguaaagaaa

SEQ ID NO: 1061986 - RNA, 19 nt, Homo sapiens
  misc_RNA (1)...(19): siRNA sense strand
gagcaucuuggacgaauuc

SEQ ID NO: 1061987 - RNA, 19 nt, Homo sapiens
  misc_RNA (1)...(19): siRNA sense strand
caagugaagaggaggaaga

SEQ ID NO: 1061988 - RNA, 19 nt, Homo sapiens
  misc_RNA (1)...(19): siRNA sense strand
gacagaacuggcucaauga

SEQ ID NO: 1061989 - RNA, 19 nt, Homo sapiens
  misc_RNA (1)...(19): siRNA sense strand
ggaggaggaggaugaagau

SEQ ID NO: 1061990 - RNA, 19 nt, Homo sapiens
  misc_RNA (1)...(19): siRNA sense strand
aggcagaggcgguaaagaa

SEQ ID NO: 1061991 - RNA, 19 nt, Homo sapiens
  misc_RNA (1)...(19): siRNA sense strand
aauaaggagcuacugcuaa

SEQ ID NO: 1061992 - RNA, 19 nt, Homo sapiens
  misc_RNA (1)...(19): siRNA sense strand
ggcagaauaaugacaguga

SEQ ID NO: 1061993 - RNA, 19 nt, Homo sapiens
  misc_RNA (1)...(19): siRNA sense strand
aagaaagaccgacuggauu

SEQ ID NO: 1061994 - RNA, 19 nt, Homo sapiens
  misc_RNA (1)...(19): siRNA sense strand
gcuuccgaguggcuuauaa

SEQ ID NO: 1061995 - RNA, 19 nt, Homo sapiens
  misc_RNA (1)...(19): siRNA sense strand
gcauauugccaaguaucua

SEQ ID NO: 1061996 - RNA, 19 nt, Homo sapiens
  misc_RNA (1)...(19): siRNA sense strand
cgacgcaccaucaccuauu

SEQ ID NO: 1061997 - RNA, 19 nt, Homo sapiens
  misc_RNA (1)...(19): siRNA sense strand
ggacgaauuccuucaaacg

SEQ ID NO: 1061998 - RNA, 19 nt, Homo sapiens
  misc_RNA (1)...(19): siRNA sense strand
ggacaugcccaaacuucgu

SEQ ID NO: 1061999 - RNA, 19 nt, Homo sapiens
  misc_RNA (1)...(19): siRNA sense strand
gaccuuguauggacagaac

SEQ ID NO: 1062000 - RNA, 19 nt, Homo sapiens
  misc_RNA (1)...(19): siRNA sense strand
cagagcaucuuggacgaau

SEQ ID NO: 1062001 - RNA, 19 nt, Homo sapiens
  misc_RNA (1)...(19): siRNA sense strand
gaaagguuacuucaaaaug

SEQ ID NO: 1062002 - RNA, 19 nt, Homo sapiens
  misc_RNA (1)...(19): siRNA sense strand
aaacguggacaucuucaau

SEQ ID NO: 1062003 - RNA, 19 nt, Homo sapiens
  misc_RNA (1)...(19): siRNA sense strand
caucuuggacgaauuccuu

SEQ ID NO: 1062004 - RNA, 19 nt, Homo sapiens
  misc_RNA (1)...(19): siRNA sense strand
gugcauuggucccucaucu

SEQ ID NO: 1062005 - RNA, 19 nt, Homo sapiens
  misc_RNA (1)...(19): siRNA sense strand
caucuucaauaaggagcua

SEQ ID NO: 1062006 - RNA, 19 nt, Homo sapiens
  misc_RNA (1)...(19): siRNA sense strand
ugcagcugauccagucuua

SEQ ID NO: 1062007 - RNA, 19 nt, Homo sapiens
  misc_RNA (1)...(19): siRNA sense strand
gagaagcuggaggacauuu

SEQ ID NO: 1062008 - RNA, 19 nt, Homo sapiens
  misc_RNA (1)...(19): siRNA sense strand
gucggcagaucuacaagga

SEQ ID NO: 1062009 - RNA, 19 nt, Homo sapiens
  misc_RNA (1)...(19): siRNA sense strand
ucucagccauucagcuuca

SEQ ID NO: 1062010 - RNA, 19 nt, Homo sapiens
  misc_RNA (1)...(19): siRNA sense strand
gaauguggccaggcagaau

SEQ ID NO: 1062011 - RNA, 19 nt, Homo sapiens
  misc_RNA (1)...(19): siRNA sense strand
gcagaggcgguaaagaaag

SEQ ID NO: 1062012 - RNA, 19 nt, Homo sapiens
  misc_RNA (1)...(19): siRNA sense strand
acucgggccuccuuucaug

SEQ ID NO: 1062013 - RNA, 19 nt, Homo sapiens
  misc_RNA (1)...(19): siRNA sense strand
uaagcauauugccaaguau

SEQ ID NO: 1062014 - RNA, 19 nt, Homo sapiens
  misc_RNA (1)...(19): siRNA sense strand
gcauuggucccucaucucu

SEQ ID NO: 1062015 - RNA, 19 nt, Homo sapiens
  misc_RNA (1)...(19): siRNA sense strand
ucugcuaggugcucucaug

SEQ ID NO: 1062016 - RNA, 19 nt, Homo sapiens
  misc_RNA (1)...(19): siRNA sense strand
ccagcauccucaucagcaa

SEQ ID NO: 1062017 - RNA, 19 nt, Homo sapiens
  misc_RNA (1)...(19): siRNA sense strand
gaccaggugaugaacaugu

SEQ ID NO: 1062018 - RNA, 19 nt, Homo sapiens
  misc_RNA (1)...(19): siRNA sense strand
ccgcugcccuaagcauauu

SEQ ID NO: 1062019 - RNA, 19 nt, Homo sapiens
  misc_RNA (1)...(19): siRNA sense strand
uggccaggcagaauaauga

SEQ ID NO: 1062020 - RNA, 19 nt, Homo sapiens
  misc_RNA (1)...(19): siRNA sense strand
ggcacgugcugaccaugga

SEQ ID NO: 1062021 - RNA, 19 nt, Homo sapiens
  misc_RNA (1)...(19): siRNA sense strand
accaggugaugaacaugua

SEQ ID NO: 1062022 - RNA, 19 nt, Homo sapiens
  misc_RNA (1)...(19): siRNA sense strand
aauguggccaggcagaaua

SEQ ID NO: 1062023 - RNA, 19 nt, Homo sapiens
  misc_RNA (1)...(19): siRNA sense strand
ggaggaggaggaggaugaa

SEQ ID NO: 1062024 - RNA, 19 nt, Homo sapiens
  misc_RNA (1)...(19): siRNA sense strand
uuucagggcucagauuugg

SEQ ID NO: 1062025 - RNA, 19 nt, Homo sapiens
  misc_RNA (1)...(19): siRNA sense strand
caggacaugcccaaacuuc

SEQ ID NO: 1062026 - RNA, 19 nt, Homo sapiens
  misc_RNA (1)...(19): siRNA sense strand
gcuggaaagguuacuucaa

SEQ ID NO: 1062027 - RNA, 19 nt, Homo sapiens
  misc_RNA (1)...(19): siRNA sense strand
aggaggaggaugaagauga

SEQ ID NO: 1062028 - RNA, 19 nt, Homo sapiens
  misc_RNA (1)...(19): siRNA sense strand
uuggacgaauuccuucaaa

SEQ ID NO: 1062029 - RNA, 19 nt, Homo sapiens
  misc_RNA (1)...(19): siRNA sense strand
gcaggacaugcccaaacuu

SEQ ID NO: 1062030 - RNA, 19 nt, Homo sapiens
  misc_RNA (1)...(19): siRNA sense strand
ggaaagguuacuucaaaau

SEQ ID NO: 1062031 - RNA, 19 nt, Homo sapiens
  misc_RNA (1)...(19): siRNA sense strand
gcaugugaccugcguacag

SEQ ID NO: 1062032 - RNA, 19 nt, Homo sapiens
  misc_RNA (1)...(19): siRNA sense strand
ggaggaugaagaugaagag

SEQ ID NO: 1062033 - RNA, 19 nt, Homo sapiens
  misc_RNA (1)...(19): siRNA sense strand
gggcuggaaagguuacuuc

SEQ ID NO: 1062034 - RNA, 19 nt, Homo sapiens
  misc_RNA (1)...(19): siRNA sense strand
gugaggcgacgcaccauca

SEQ ID NO: 1062035 - RNA, 19 nt, Homo sapiens
  misc_RNA (1)...(19): siRNA sense strand
gcucaaugaccaggugaug

SEQ ID NO: 1062036 - RNA, 19 nt, Homo sapiens
  misc_RNA (1)...(19): siRNA sense strand
uaugauaaacuccguacca

SEQ ID NO: 1062037 - RNA, 19 nt, Homo sapiens
  misc_RNA (1)...(19): siRNA sense strand
ugacucgggccuccuuuca

SEQ ID NO: 1062038 - RNA, 19 nt, Homo sapiens
  misc_RNA (1)...(19): siRNA sense strand
ggcccugucucagccauuc

SEQ ID NO: 1062039 - RNA, 19 nt, Homo sapiens
  misc_RNA (1)...(19): siRNA sense strand
ugaagaggaggaagaagag

SEQ ID NO: 1062040 - RNA, 19 nt, Homo sapiens
  misc_RNA (1)...(19): siRNA sense strand
aacguggacaucuucaaua

SEQ ID NO: 1062041 - RNA, 19 nt, Homo sapiens
  misc_RNA (1)...(19): siRNA sense strand
augauaaacuccguaccaa

SEQ ID NO: 1062042 - RNA, 19 nt, Homo sapiens
  misc_RNA (1)...(19): siRNA sense strand
aaacuucgucggcagaucu

SEQ ID NO: 1062043 - RNA, 19 nt, Homo sapiens
  misc_RNA (1)...(19): siRNA sense strand
gcagagaccuggguaauug

SEQ ID NO: 1062044 - RNA, 19 nt, Homo sapiens
  misc_RNA (1)...(19): siRNA sense strand
ggagaggaacagacacuca

SEQ ID NO: 1062045 - RNA, 19 nt, Homo sapiens
  misc_RNA (1)...(19): siRNA sense strand
gaagcagagaccuggguaa

SEQ ID NO: 1062046 - RNA, 19 nt, Homo sapiens
  misc_RNA (1)...(19): siRNA sense strand
caaggcaagccaguucuuu

SEQ ID NO: 1062047 - RNA, 19 nt, Homo sapiens
  misc_RNA (1)...(19): siRNA sense strand
gggcaaggcaagccaguuc

SEQ ID NO: 1062048 - RNA, 19 nt, Homo sapiens
  misc_RNA (1)...(19): siRNA sense strand
gcaaggcaagccaguucuu

SEQ ID NO: 1062049 - RNA, 19 nt, Homo sapiens
  misc_RNA (1)...(19): siRNA sense strand
gcgagugggaggugaguga

SEQ ID NO: 1062050 - RNA, 19 nt, Homo sapiens
  misc_RNA (1)...(19): siRNA sense strand
ggguaauuguggccuugga

SEQ ID NO: 1062051 - RNA, 19 nt, Homo sapiens
  misc_RNA (1)...(19): siRNA sense strand
ccaguucuuugggcugaug

SEQ ID NO: 1062052 - RNA, 19 nt, Homo sapiens
  misc_RNA (1)...(19): siRNA sense strand
gcccugagcuguucaagaa

SEQ ID NO: 1062053 - RNA, 19 nt, Homo sapiens
  misc_RNA (1)...(19): siRNA sense strand
gcaaggcacuggucaagga

SEQ ID NO: 1062054 - RNA, 19 nt, Homo sapiens
  misc_RNA (1)...(19): siRNA sense strand
aagcugccguucuuuaaua

SEQ ID NO: 1062055 - RNA, 19 nt, Homo sapiens
  misc_RNA (1)...(19): siRNA sense strand
caaccucacucaccucaug

SEQ ID NO: 1062056 - RNA, 19 nt, Homo sapiens
  misc_RNA (1)...(19): siRNA sense strand
caagacagguggaguugau

SEQ ID NO: 1062057 - RNA, 19 nt, Homo sapiens
  misc_RNA (1)...(19): siRNA sense strand
gcugaagcccaccgaauua

SEQ ID NO: 1062058 - RNA, 19 nt, Homo sapiens
  misc_RNA (1)...(19): siRNA sense strand
gugaagcugccguucuuua

SEQ ID NO: 1062059 - RNA, 19 nt, Homo sapiens
  misc_RNA (1)...(19): siRNA sense strand
gaauuagucccacagaaca

SEQ ID NO: 1062060 - RNA, 19 nt, Homo sapiens
  misc_RNA (1)...(19): siRNA sense strand
gcuacucgguggcccugua

SEQ ID NO: 1062061 - RNA, 19 nt, Homo sapiens
  misc_RNA (1)...(19): siRNA sense strand
ggagagcccgugcaucuuc

SEQ ID NO: 1062062 - RNA, 19 nt, Homo sapiens
  misc_RNA (1)...(19): siRNA sense strand
ggaacuacggcaagagcua

SEQ ID NO: 1062063 - RNA, 19 nt, Homo sapiens
  misc_RNA (1)...(19): siRNA sense strand
ugaagcugccguucuuuaa

SEQ ID NO: 1062064 - RNA, 19 nt, Homo sapiens
  misc_RNA (1)...(19): siRNA sense strand
ggaggaagacgaggacgaa

SEQ ID NO: 1062065 - RNA, 19 nt, Homo sapiens
  misc_RNA (1)...(19): siRNA sense strand
gaagcugccguucuuuaau

SEQ ID NO: 1062066 - RNA, 19 nt, Homo sapiens
  misc_RNA (1)...(19): siRNA sense strand
gaguaagaguggacugaag

SEQ ID NO: 1062067 - RNA, 19 nt, Homo sapiens
  misc_RNA (1)...(19): siRNA sense strand
agaagaagcccaccuggau

SEQ ID NO: 1062068 - RNA, 19 nt, Homo sapiens
  misc_RNA (1)...(19): siRNA sense strand
ucuuuaauaugcuggauga

SEQ ID NO: 1062069 - RNA, 19 nt, Homo sapiens
  misc_RNA (1)...(19): siRNA sense strand
ccugagcuguucaagaaga

SEQ ID NO: 1062070 - RNA, 19 nt, Homo sapiens
  misc_RNA (1)...(19): siRNA sense strand
gcucuacggaaaguacuua

SEQ ID NO: 1062071 - RNA, 19 nt, Homo sapiens
  misc_RNA (1)...(19): siRNA sense strand
ggaagacgaggacgaagag

SEQ ID NO: 1062072 - RNA, 19 nt, Homo sapiens
  misc_RNA (1)...(19): siRNA sense strand
gagaagcugcgccuugauc

SEQ ID NO: 1062073 - RNA, 19 nt, Homo sapiens
  misc_RNA (1)...(19): siRNA sense strand
gcccgugcaucuucgcauu

SEQ ID NO: 1062074 - RNA, 19 nt, Homo sapiens
  misc_RNA (1)...(19): siRNA sense strand
caggagagcccgugcaucu

SEQ ID NO: 1062075 - RNA, 19 nt, Homo sapiens
  misc_RNA (1)...(19): siRNA sense strand
ggaggaagaggaggaggaa

SEQ ID NO: 1062076 - RNA, 19 nt, Homo sapiens
  misc_RNA (1)...(19): siRNA sense strand
aggagaagcugcgccuuga

SEQ ID NO: 1062077 - RNA, 19 nt, Homo sapiens
  misc_RNA (1)...(19): siRNA sense strand
ccgaauuagucccacagaa

SEQ ID NO: 1062078 - RNA, 19 nt, Homo sapiens
  misc_RNA (1)...(19): siRNA sense strand
ggaguaagaguggacugaa

SEQ ID NO: 1062079 - RNA, 19 nt, Homo sapiens
  misc_RNA (1)...(19): siRNA sense strand
gcuacuaccccuccaauaa

SEQ ID NO: 1062080 - RNA, 19 nt, Homo sapiens
  misc_RNA (1)...(19): siRNA sense strand
ucacucaccucauguaccu

SEQ ID NO: 1062081 - RNA, 19 nt, Homo sapiens
  misc_RNA (1)...(19): siRNA sense strand
gaagcccaccgaauuaguc

SEQ ID NO: 1062082 - RNA, 19 nt, Homo sapiens
  misc_RNA (1)...(19): siRNA sense strand
uggugaagcugccguucuu

SEQ ID NO: 1062083 - RNA, 19 nt, Homo sapiens
  misc_RNA (1)...(19): siRNA sense strand
ccaccaaccgcaucacugu

SEQ ID NO: 1062084 - RNA, 19 nt, Homo sapiens
  misc_RNA (1)...(19): siRNA sense strand
cgaauuagucccacagaac

SEQ ID NO: 1062085 - RNA, 19 nt, Homo sapiens
  misc_RNA (1)...(19): siRNA sense strand
gagacccgcuacgccaaga

SEQ ID NO: 1062086 - RNA, 19 nt, Homo sapiens
  misc_RNA (1)...(19): siRNA sense strand
gaagaucaaggagcuguac

SEQ ID NO: 1062087 - RNA, 19 nt, Homo sapiens
  misc_RNA (1)...(19): siRNA sense strand
gcagaugaacgagaagaag

SEQ ID NO: 1062088 - RNA, 19 nt, Homo sapiens
  misc_RNA (1)...(19): siRNA sense strand
ucuucuaccugcagaugaa

SEQ ID NO: 1062089 - RNA, 19 nt, Homo sapiens
  misc_RNA (1)...(19): siRNA sense strand
gaagauccugagcgagugu

SEQ ID NO: 1062090 - RNA, 19 nt, Homo sapiens
  misc_RNA (1)...(19): siRNA sense strand
gacgggcuccucucgaaga

SEQ ID NO: 1062091 - RNA, 19 nt, Homo sapiens
  misc_RNA (1)...(19): siRNA sense strand
ucuguccgcuggugaagau

SEQ ID NO: 1062092 - RNA, 19 nt, Homo sapiens
  misc_RNA (1)...(19): siRNA sense strand
ugaggacgccgacgagauc

SEQ ID NO: 1062093 - RNA, 19 nt, Homo sapiens
  misc_RNA (1)...(19): siRNA sense strand
uucagaugcuccuggguuu

SEQ ID NO: 1062094 - RNA, 19 nt, Homo sapiens
  misc_RNA (1)...(19): siRNA sense strand
gcgggugucccucaucugu

SEQ ID NO: 1062095 - RNA, 19 nt, Homo sapiens
  misc_RNA (1)...(19): siRNA sense strand
gagcuguucaagaagauca

SEQ ID NO: 1062096 - RNA, 19 nt, Homo sapiens
  misc_RNA (1)...(19): siRNA sense strand
cuacggaaaguacuuaaac

SEQ ID NO: 1062097 - RNA, 19 nt, Homo sapiens
  misc_RNA (1)...(19): siRNA sense strand
aggaagaggaggaggaaga

SEQ ID NO: 1062098 - RNA, 19 nt, Homo sapiens
  misc_RNA (1)...(19): siRNA sense strand
gaacaacgagaagcuucag

SEQ ID NO: 1062099 - RNA, 19 nt, Homo sapiens
  misc_RNA (1)...(19): siRNA sense strand
gugcgggugucccucaucu

SEQ ID NO: 1062100 - RNA, 19 nt, Homo sapiens
  misc_RNA (1)...(19): siRNA sense strand
ugcagaggcugaagaccau

SEQ ID NO: 1062101 - RNA, 19 nt, Homo sapiens
  misc_RNA (1)...(19): siRNA sense strand
gccaagacagguggaguug

SEQ ID NO: 1062102 - RNA, 19 nt, Homo sapiens
  misc_RNA (1)...(19): siRNA sense strand
ccgugcaucuucgcauuga

SEQ ID NO: 1062103 - RNA, 19 nt, Homo sapiens
  misc_RNA (1)...(19): siRNA sense strand
ugaccaugcacuccaccua

SEQ ID NO: 1062104 - RNA, 19 nt, Homo sapiens
  misc_RNA (1)...(19): siRNA sense strand
ggacaaagaugaggcagaa

SEQ ID NO: 1062105 - RNA, 19 nt, Homo sapiens
  misc_RNA (1)...(19): siRNA sense strand
ucaagaaugugaacgaaua

SEQ ID NO: 1062106 - RNA, 19 nt, Homo sapiens
  misc_RNA (1)...(19): siRNA sense strand
gcacagaguuuaagagaag

SEQ ID NO: 1062107 - RNA, 19 nt, Homo sapiens
  misc_RNA (1)...(19): siRNA sense strand
caaaagagcuuacaauuca

SEQ ID NO: 1062108 - RNA, 19 nt, Homo sapiens
  misc_RNA (1)...(19): siRNA sense strand
agacagagcucauaaugga

SEQ ID NO: 1062109 - RNA, 19 nt, Homo sapiens
  misc_RNA (1)...(19): siRNA sense strand
gaagaacuaugagcagaaa

SEQ ID NO: 1062110 - RNA, 19 nt, Homo sapiens
  misc_RNA (1)...(19): siRNA sense strand
ccaggaagauggaagaauu

SEQ ID NO: 1062111 - RNA, 19 nt, Homo sapiens
  misc_RNA (1)...(19): siRNA sense strand
gcaaagaucugcucaaccu

SEQ ID NO: 1062112 - RNA, 19 nt, Homo sapiens
  misc_RNA (1)...(19): siRNA sense strand
gaagagagguauggcaaag

SEQ ID NO: 1062113 - RNA, 19 nt, Homo sapiens
  misc_RNA (1)...(19): siRNA sense strand
ugaaucagcugucacaaca

SEQ ID NO: 1062114 - RNA, 19 nt, Homo sapiens
  misc_RNA (1)...(19): siRNA sense strand
gcauugugguuacauguga

SEQ ID NO: 1062115 - RNA, 19 nt, Homo sapiens
  misc_RNA (1)...(19): siRNA sense strand
acaguuugcucuaucagua

SEQ ID NO: 1062116 - RNA, 19 nt, Homo sapiens
  misc_RNA (1)...(19): siRNA sense strand
gagcuuacaauucaagaaa

SEQ ID NO: 1062117 - RNA, 19 nt, Homo sapiens
  misc_RNA (1)...(19): siRNA sense strand
caccagaugaucccaauua

SEQ ID NO: 1062118 - RNA, 19 nt, Homo sapiens
  misc_RNA (1)...(19): siRNA sense strand
gagaagaguggcagaguga

SEQ ID NO: 1062119 - RNA, 19 nt, Homo sapiens
  misc_RNA (1)...(19): siRNA sense strand
caucggcuaugacaacauu

SEQ ID NO: 1062120 - RNA, 19 nt, Homo sapiens
  misc_RNA (1)...(19): siRNA sense strand
gcagaaaugccgggacaaa

SEQ ID NO: 1062121 - RNA, 19 nt, Homo sapiens
  misc_RNA (1)...(19): siRNA sense strand
gaugcuauccauaaacaaa

SEQ ID NO: 1062122 - RNA, 19 nt, Homo sapiens
  misc_RNA (1)...(19): siRNA sense strand
gcucaagaaugugaacgaa

SEQ ID NO: 1062123 - RNA, 19 nt, Homo sapiens
  misc_RNA (1)...(19): siRNA sense strand
gagaagaggccaggaagau

SEQ ID NO: 1062124 - RNA, 19 nt, Homo sapiens
  misc_RNA (1)...(19): siRNA sense strand
gaaaugccgggacaaagau

SEQ ID NO: 1062125 - RNA, 19 nt, Homo sapiens
  misc_RNA (1)...(19): siRNA sense strand
cgcaagaacugcaaagagu

SEQ ID NO: 1062126 - RNA, 19 nt, Homo sapiens
  misc_RNA (1)...(19): siRNA sense strand
guagaggacucagacaaag

SEQ ID NO: 1062127 - RNA, 19 nt, Homo sapiens
  misc_RNA (1)...(19): siRNA sense strand
agaaagggcagcaauugaa

SEQ ID NO: 1062128 - RNA, 19 nt, Homo sapiens
  misc_RNA (1)...(19): siRNA sense strand
ccuaaaagcucaccagaug

SEQ ID NO: 1062129 - RNA, 19 nt, Homo sapiens
  misc_RNA (1)...(19): siRNA sense strand
gaacaauggccgcaagaac

SEQ ID NO: 1062130 - RNA, 19 nt, Homo sapiens
  misc_RNA (1)...(19): siRNA sense strand
aaagacagagcucauaaug

SEQ ID NO: 1062131 - RNA, 19 nt, Homo sapiens
  misc_RNA (1)...(19): siRNA sense strand
aaagaaagggcagcaauug

SEQ ID NO: 1062132 - RNA, 19 nt, Homo sapiens
  misc_RNA (1)...(19): siRNA sense strand
gaaacuggcaacuucaaag

SEQ ID NO: 1062133 - RNA, 19 nt, Homo sapiens
  misc_RNA (1)...(19): siRNA sense strand
ugacuacaguuugcucuau

SEQ ID NO: 1062134 - RNA, 19 nt, Homo sapiens
  misc_RNA (1)...(19): siRNA sense strand
caagaaugugaacgaauaa

SEQ ID NO: 1062135 - RNA, 19 nt, Homo sapiens
  misc_RNA (1)...(19): siRNA sense strand
aaucagcugucacaacaau

SEQ ID NO: 1062136 - RNA, 19 nt, Homo sapiens
  misc_RNA (1)...(19): siRNA sense strand
gaaagggcagcaauugaag

SEQ ID NO: 1062137 - RNA, 19 nt, Homo sapiens
  misc_RNA (1)...(19): siRNA sense strand
ggaaugcauugugguuaca

SEQ ID NO: 1062138 - RNA, 19 nt, Homo sapiens
  misc_RNA (1)...(19): siRNA sense strand
agaaaugccgggacaaaga

SEQ ID NO: 1062139 - RNA, 19 nt, Homo sapiens
  misc_RNA (1)...(19): siRNA sense strand
agagagguauggcaaagau

SEQ ID NO: 1062140 - RNA, 19 nt, Homo sapiens
  misc_RNA (1)...(19): siRNA sense strand
ggacucagacaaagcauac

SEQ ID NO: 1062141 - RNA, 19 nt, Homo sapiens
  misc_RNA (1)...(19): siRNA sense strand
caauuacucuuugguugau

SEQ ID NO: 1062142 - RNA, 19 nt, Homo sapiens
  misc_RNA (1)...(19): siRNA sense strand
uccaacaucugaacaaugg

SEQ ID NO: 1062143 - RNA, 19 nt, Homo sapiens
  misc_RNA (1)...(19): siRNA sense strand
gcacaucggcacccuggau

SEQ ID NO: 1062144 - RNA, 19 nt, Homo sapiens
  misc_RNA (1)...(19): siRNA sense strand
gcucacuguucaagggaaa

SEQ ID NO: 1062145 - RNA, 19 nt, Homo sapiens
  misc_RNA (1)...(19): siRNA sense strand
uaagagaagaggccaggaa

SEQ ID NO: 1062146 - RNA, 19 nt, Homo sapiens
  misc_RNA (1)...(19): siRNA sense strand
gaacccgaagcaacaagaa

SEQ ID NO: 1062147 - RNA, 19 nt, Homo sapiens
  misc_RNA (1)...(19): siRNA sense strand
ucaaugaaaccagagcuuu

SEQ ID NO: 1062148 - RNA, 19 nt, Homo sapiens
  misc_RNA (1)...(19): siRNA sense strand
gaaugugaacgaauaaacu

SEQ ID NO: 1062149 - RNA, 19 nt, Homo sapiens
  misc_RNA (1)...(19): siRNA sense strand
uggauaagguccgagaaga

SEQ ID NO: 1062150 - RNA, 19 nt, Homo sapiens
  misc_RNA (1)...(19): siRNA sense strand
cagaugaucccaauuacuc

SEQ ID NO: 1062151 - RNA, 19 nt, Homo sapiens
  misc_RNA (1)...(19): siRNA sense strand
gauaagguccgagaagagu

SEQ ID NO: 1062152 - RNA, 19 nt, Homo sapiens
  misc_RNA (1)...(19): siRNA sense strand
augcaaagaagaacuauga

SEQ ID NO: 1062153 - RNA, 19 nt, Homo sapiens
  misc_RNA (1)...(19): siRNA sense strand
ugacaacauuauccaacau

SEQ ID NO: 1062154 - RNA, 19 nt, Homo sapiens
  misc_RNA (1)...(19): siRNA sense strand
aaacuggcaacuucaaaga

SEQ ID NO: 1062155 - RNA, 19 nt, Homo sapiens
  misc_RNA (1)...(19): siRNA sense strand
auaaacuucuuccggaaug

SEQ ID NO: 1062156 - RNA, 19 nt, Homo sapiens
  misc_RNA (1)...(19): siRNA sense strand
gaagccguguggacagucu

SEQ ID NO: 1062157 - RNA, 19 nt, Homo sapiens
  misc_RNA (1)...(19): siRNA sense strand
aaccauggaugcaaagaag

SEQ ID NO: 1062158 - RNA, 19 nt, Homo sapiens
  misc_RNA (1)...(19): siRNA sense strand
cagcuugcacagaguuuaa

SEQ ID NO: 1062159 - RNA, 19 nt, Homo sapiens
  misc_RNA (1)...(19): siRNA sense strand
aacauuauccaacaucuga

SEQ ID NO: 1062160 - RNA, 19 nt, Homo sapiens
  misc_RNA (1)...(19): siRNA sense strand
acucuuugguugaugacua

SEQ ID NO: 1062161 - RNA, 19 nt, Homo sapiens
  misc_RNA (1)...(19): siRNA sense strand
aagaaagggcagcaauuga

SEQ ID NO: 1062162 - RNA, 19 nt, Homo sapiens
  misc_RNA (1)...(19): siRNA sense strand
gugaacgaauaaacuucuu

SEQ ID NO: 1062163 - RNA, 19 nt, Homo sapiens
  misc_RNA (1)...(19): siRNA sense strand
caaccucucuaggaagaag

SEQ ID NO: 1062164 - RNA, 19 nt, Homo sapiens
  misc_RNA (1)...(19): siRNA sense strand
gaucugcucaaccucucua

SEQ ID NO: 1062165 - RNA, 19 nt, Homo sapiens
  misc_RNA (1)...(19): siRNA sense strand
gcaauugaagagagguaug

SEQ ID NO: 1062166 - RNA, 19 nt, Homo sapiens
  misc_RNA (1)...(19): siRNA sense strand
gacuacaguuugcucuauc

SEQ ID NO: 1062167 - RNA, 19 nt, Homo sapiens
  misc_RNA (1)...(19): siRNA sense strand
uauccaacaucugaacaau

SEQ ID NO: 1062168 - RNA, 19 nt, Homo sapiens
  misc_RNA (1)...(19): siRNA sense strand
ccauggaugcaaagaagaa

SEQ ID NO: 1062169 - RNA, 19 nt, Homo sapiens
  misc_RNA (1)...(19): siRNA sense strand
guugaugacuacaguuugc

SEQ ID NO: 1062170 - RNA, 19 nt, Homo sapiens
  misc_RNA (1)...(19): siRNA sense strand
cggaaugcauugugguuac

SEQ ID NO: 1062171 - RNA, 19 nt, Homo sapiens
  misc_RNA (1)...(19): siRNA sense strand
gaguuugaagacuuucuaa

SEQ ID NO: 1062172 - RNA, 19 nt, Homo sapiens
  misc_RNA (1)...(19): siRNA sense strand
ggauaagguccgagaagag

SEQ ID NO: 1062173 - RNA, 19 nt, Homo sapiens
  misc_RNA (1)...(19): siRNA sense strand
cuucaaagaccgcaguaga

SEQ ID NO: 1062174 - RNA, 19 nt, Homo sapiens
  misc_RNA (1)...(19): siRNA sense strand
ucaagcagcaaguagacaa

SEQ ID NO: 1062175 - RNA, 19 nt, Homo sapiens
  misc_RNA (1)...(19): siRNA sense strand
ucagcaccaucggcuauga

SEQ ID NO: 1062176 - RNA, 19 nt, Homo sapiens
  misc_RNA (1)...(19): siRNA sense strand
gcagagugagcacaucaag

SEQ ID NO: 1062177 - RNA, 19 nt, Homo sapiens
  misc_RNA (1)...(19): siRNA sense strand
acaaagaugaggcagaaca

SEQ ID NO: 1062178 - RNA, 19 nt, Homo sapiens
  misc_RNA (1)...(19): siRNA sense strand
gaacuaugagcagaaaugc

SEQ ID NO: 1062179 - RNA, 19 nt, Homo sapiens
  misc_RNA (1)...(19): siRNA sense strand
agaaaaccauggaugcaaa

SEQ ID NO: 1062180 - RNA, 19 nt, Homo sapiens
  misc_RNA (1)...(19): siRNA sense strand
gcagcaaguagacaaugug

SEQ ID NO: 1062181 - RNA, 19 nt, Homo sapiens
  misc_RNA (1)...(19): siRNA sense strand
uggcaaagaucugcucaac

SEQ ID NO: 1062182 - RNA, 19 nt, Homo sapiens
  misc_RNA (1)...(19): siRNA sense strand
agaacuaugagcagaaaug

SEQ ID NO: 1062183 - RNA, 19 nt, Homo sapiens
  misc_RNA (1)...(19): siRNA sense strand
cucaaccucucuaggaaga

SEQ ID NO: 1062184 - RNA, 19 nt, Homo sapiens
  misc_RNA (1)...(19): siRNA sense strand
gagcucauaauggaugcua

SEQ ID NO: 1062185 - RNA, 19 nt, Homo sapiens
  misc_RNA (1)...(19): siRNA sense strand
gaugaucccaauuacucuu

SEQ ID NO: 1062186 - RNA, 19 nt, Homo sapiens
  misc_RNA (1)...(19): siRNA sense strand
uugugaaacuggcaacuuc

SEQ ID NO: 1062187 - RNA, 19 nt, Homo sapiens
  misc_RNA (1)...(19): siRNA sense strand
ugaagagagguauggcaaa

SEQ ID NO: 1062188 - RNA, 19 nt, Homo sapiens
  misc_RNA (1)...(19): siRNA sense strand
aguagaggacucagacaaa

SEQ ID NO: 1062189 - RNA, 19 nt, Homo sapiens
  misc_RNA (1)...(19): siRNA sense strand
gcucauaauggaugcuauc

SEQ ID NO: 1062190 - RNA, 19 nt, Homo sapiens
  misc_RNA (1)...(19): siRNA sense strand
caacauuauccaacaucug

SEQ ID NO: 1062191 - RNA, 19 nt, Homo sapiens
  misc_RNA (1)...(19): siRNA sense strand
aaaccauggaugcaaagaa

SEQ ID NO: 1062192 - RNA, 19 nt, Homo sapiens
  misc_RNA (1)...(19): siRNA sense strand
cacaucggcacccuggaua

SEQ ID NO: 1062193 - RNA, 19 nt, Homo sapiens
  misc_RNA (1)...(19): siRNA sense strand
ggagugccaaccuggugaa

SEQ ID NO: 1062194 - RNA, 19 nt, Homo sapiens
  misc_RNA (1)...(19): siRNA sense strand
agaagaacuaugagcagaa

SEQ ID NO: 1062195 - RNA, 19 nt, Homo sapiens
  misc_RNA (1)...(19): siRNA sense strand
ccggaaugcauugugguua

SEQ ID NO: 1062196 - RNA, 19 nt, Homo sapiens
  misc_RNA (1)...(19): siRNA sense strand
ugaaaucaacacccugaag

SEQ ID NO: 1062197 - RNA, 19 nt, Homo sapiens
  misc_RNA (1)...(19): siRNA sense strand
caguagaggacucagacaa

SEQ ID NO: 1062198 - RNA, 19 nt, Homo sapiens
  misc_RNA (1)...(19): siRNA sense strand
gacaacauuauccaacauc

SEQ ID NO: 1062199 - RNA, 19 nt, Homo sapiens
  misc_RNA (1)...(19): siRNA sense strand
auggaagaauucagggaaa

SEQ ID NO: 1062200 - RNA, 19 nt, Homo sapiens
  misc_RNA (1)...(19): siRNA sense strand
ucagcugucacaacaaugu

SEQ ID NO: 1062201 - RNA, 19 nt, Homo sapiens
  misc_RNA (1)...(19): siRNA sense strand
caaugaaaccagagcuuuu

SEQ ID NO: 1062202 - RNA, 19 nt, Homo sapiens
  misc_RNA (1)...(19): siRNA sense strand
caguuugcucuaucaguaa

SEQ ID NO: 1062203 - RNA, 19 nt, Homo sapiens
  misc_RNA (1)...(19): siRNA sense strand
gaagauggcuugaaagaaa

SEQ ID NO: 1062204 - RNA, 19 nt, Homo sapiens
  misc_RNA (1)...(19): siRNA sense strand
aaacugagcuucaaacaua

SEQ ID NO: 1062205 - RNA, 19 nt, Homo sapiens
  misc_RNA (1)...(19): siRNA sense strand
ucaaauugcugccauauua

SEQ ID NO: 1062206 - RNA, 19 nt, Homo sapiens
  misc_RNA (1)...(19): siRNA sense strand
gaaacaagauacucugaua

SEQ ID NO: 1062207 - RNA, 19 nt, Homo sapiens
  misc_RNA (1)...(19): siRNA sense strand
gaaacacggucuuaaagua

SEQ ID NO: 1062208 - RNA, 19 nt, Homo sapiens
  misc_RNA (1)...(19): siRNA sense strand
gaaacugacuugaagauug

SEQ ID NO: 1062209 - RNA, 19 nt, Homo sapiens
  misc_RNA (1)...(19): siRNA sense strand
gaaaggaauguucaaauug

SEQ ID NO: 1062210 - RNA, 19 nt, Homo sapiens
  misc_RNA (1)...(19): siRNA sense strand
gcaacacauuguaaacuuu

SEQ ID NO: 1062211 - RNA, 19 nt, Homo sapiens
  misc_RNA (1)...(19): siRNA sense strand
ggaagaagaaggagcagua

SEQ ID NO: 1062212 - RNA, 19 nt, Homo sapiens
  misc_RNA (1)...(19): siRNA sense strand
cagcaauucuuuguuguua

SEQ ID NO: 1062213 - RNA, 19 nt, Homo sapiens
  misc_RNA (1)...(19): siRNA sense strand
auacuaagcugauugaaga

SEQ ID NO: 1062214 - RNA, 19 nt, Homo sapiens
  misc_RNA (1)...(19): siRNA sense strand
agaaagauauccaugagaa

SEQ ID NO: 1062215 - RNA, 19 nt, Homo sapiens
  misc_RNA (1)...(19): siRNA sense strand
gcaauucuuuguuguuaug

SEQ ID NO: 1062216 - RNA, 19 nt, Homo sapiens
  misc_RNA (1)...(19): siRNA sense strand
gcaacaagcuuagcgaauc

SEQ ID NO: 1062217 - RNA, 19 nt, Homo sapiens
  misc_RNA (1)...(19): siRNA sense strand
cuacaagaaugucucagua

SEQ ID NO: 1062218 - RNA, 19 nt, Homo sapiens
  misc_RNA (1)...(19): siRNA sense strand
gaacucggcaacaagcuua

SEQ ID NO: 1062219 - RNA, 19 nt, Homo sapiens
  misc_RNA (1)...(19): siRNA sense strand
gacaggauguagagaauga

SEQ ID NO: 1062220 - RNA, 19 nt, Homo sapiens
  misc_RNA (1)...(19): siRNA sense strand
aaacugacuugaagauuga

SEQ ID NO: 1062221 - RNA, 19 nt, Homo sapiens
  misc_RNA (1)...(19): siRNA sense strand
ugaaauaauugcccgacua

SEQ ID NO: 1062222 - RNA, 19 nt, Homo sapiens
  misc_RNA (1)...(19): siRNA sense strand
gauuuagacucacaaguug

SEQ ID NO: 1062223 - RNA, 19 nt, Homo sapiens
  misc_RNA (1)...(19): siRNA sense strand
ugaaguugcuggagaaaga

SEQ ID NO: 1062224 - RNA, 19 nt, Homo sapiens
  misc_RNA (1)...(19): siRNA sense strand
ggagaaagauauccaugag

SEQ ID NO: 1062225 - RNA, 19 nt, Homo sapiens
  misc_RNA (1)...(19): siRNA sense strand
agagagagcaaacuuguua

SEQ ID NO: 1062226 - RNA, 19 nt, Homo sapiens
  misc_RNA (1)...(19): siRNA sense strand
gaacuaccuuugccuucuu

SEQ ID NO: 1062227 - RNA, 19 nt, Homo sapiens
  misc_RNA (1)...(19): siRNA sense strand
aaacauggcuaaacugagu

SEQ ID NO: 1062228 - RNA, 19 nt, Homo sapiens
  misc_RNA (1)...(19): siRNA sense strand
ggauuuagacucacaaguu

SEQ ID NO: 1062229 - RNA, 19 nt, Homo sapiens
  misc_RNA (1)...(19): siRNA sense strand
gaagaaggagcaguaauug

SEQ ID NO: 1062230 - RNA, 19 nt, Homo sapiens
  misc_RNA (1)...(19): siRNA sense strand
uaagcugauugaagaguua

SEQ ID NO: 1062231 - RNA, 19 nt, Homo sapiens
  misc_RNA (1)...(19): siRNA sense strand
caaaguagauguggaaacu

SEQ ID NO: 1062232 - RNA, 19 nt, Homo sapiens
  misc_RNA (1)...(19): siRNA sense strand
acaagaaugucucaguaaa

SEQ ID NO: 1062233 - RNA, 19 nt, Homo sapiens
  misc_RNA (1)...(19): siRNA sense strand
gggagaggauuuagacuca

SEQ ID NO: 1062234 - RNA, 19 nt, Homo sapiens
  misc_RNA (1)...(19): siRNA sense strand
caacaagcuuagcgaauca

SEQ ID NO: 1062235 - RNA, 19 nt, Homo sapiens
  misc_RNA (1)...(19): siRNA sense strand
gagcuagcaguacaaguua

SEQ ID NO: 1062236 - RNA, 19 nt, Homo sapiens
  misc_RNA (1)...(19): siRNA sense strand
ggaaauaaagaaaggaaug

SEQ ID NO: 1062237 - RNA, 19 nt, Homo sapiens
  misc_RNA (1)...(19): siRNA sense strand
ugaaugugaucgaugcuaa

SEQ ID NO: 1062238 - RNA, 19 nt, Homo sapiens
  misc_RNA (1)...(19): siRNA sense strand
aagcaccacuguagaaauu

SEQ ID NO: 1062239 - RNA, 19 nt, Homo sapiens
  misc_RNA (1)...(19): siRNA sense strand
gaugagaaauaucuacaag

SEQ ID NO: 1062240 - RNA, 19 nt, Homo sapiens
  misc_RNA (1)...(19): siRNA sense strand
gaugaaauguacaaugaag

SEQ ID NO: 1062241 - RNA, 19 nt, Homo sapiens
  misc_RNA (1)...(19): siRNA sense strand
gaucgaugcuaaucugugu

SEQ ID NO: 1062242 - RNA, 19 nt, Homo sapiens
  misc_RNA (1)...(19): siRNA sense strand
gcaaauggaagcugaagau

SEQ ID NO: 1062243 - RNA, 19 nt, Homo sapiens
  misc_RNA (1)...(19): siRNA sense strand
ucauuaaacuccaggaaga

SEQ ID NO: 1062244 - RNA, 19 nt, Homo sapiens
  misc_RNA (1)...(19): siRNA sense strand
caaagaagcaacacauugu

SEQ ID NO: 1062245 - RNA, 19 nt, Homo sapiens
  misc_RNA (1)...(19): siRNA sense strand
gaaagcaccacuguagaaa

SEQ ID NO: 1062246 - RNA, 19 nt, Homo sapiens
  misc_RNA (1)...(19): siRNA sense strand
guaugaagcaugagauuga

SEQ ID NO: 1062247 - RNA, 19 nt, Homo sapiens
  misc_RNA (1)...(19): siRNA sense strand
gcaguacaaguuaguauga

SEQ ID NO: 1062248 - RNA, 19 nt, Homo sapiens
  misc_RNA (1)...(19): siRNA sense strand
aagaugaggaugagaaaua

SEQ ID NO: 1062249 - RNA, 19 nt, Homo sapiens
  misc_RNA (1)...(19): siRNA sense strand
gcaagagcguggcuucgau

SEQ ID NO: 1062250 - RNA, 19 nt, Homo sapiens
  misc_RNA (1)...(19): siRNA sense strand
gagacucaacaaaucauua

SEQ ID NO: 1062251 - RNA, 19 nt, Homo sapiens
  misc_RNA (1)...(19): siRNA sense strand
gaaagauauccaugagaaa

SEQ ID NO: 1062252 - RNA, 19 nt, Homo sapiens
  misc_RNA (1)...(19): siRNA sense strand
gaaugaagaagauauugga

SEQ ID NO: 1062253 - RNA, 19 nt, Homo sapiens
  misc_RNA (1)...(19): siRNA sense strand
gaagaagaaggagcaguaa

SEQ ID NO: 1062254 - RNA, 19 nt, Homo sapiens
  misc_RNA (1)...(19): siRNA sense strand
uauggaacauugccugaaa

SEQ ID NO: 1062255 - RNA, 19 nt, Homo sapiens
  misc_RNA (1)...(19): siRNA sense strand
gaaggagcaguaauuguug

SEQ ID NO: 1062256 - RNA, 19 nt, Homo sapiens
  misc_RNA (1)...(19): siRNA sense strand
aaacacggucuuaaaguaa

SEQ ID NO: 1062257 - RNA, 19 nt, Homo sapiens
  misc_RNA (1)...(19): siRNA sense strand
gaaauaauugcccgacuag

SEQ ID NO: 1062258 - RNA, 19 nt, Homo sapiens
  misc_RNA (1)...(19): siRNA sense strand
gacaacaacuagaggaagu

SEQ ID NO: 1062259 - RNA, 19 nt, Homo sapiens
  misc_RNA (1)...(19): siRNA sense strand
gaguaucacgcacuaauga

SEQ ID NO: 1062260 - RNA, 19 nt, Homo sapiens
  misc_RNA (1)...(19): siRNA sense strand
agaaacagcuggugcaacu

SEQ ID NO: 1062261 - RNA, 19 nt, Homo sapiens
  misc_RNA (1)...(19): siRNA sense strand
gauaggccuucgacaacaa

SEQ ID NO: 1062262 - RNA, 19 nt, Homo sapiens
  misc_RNA (1)...(19): siRNA sense strand
agauugaacuugccaugaa

SEQ ID NO: 1062263 - RNA, 19 nt, Homo sapiens
  misc_RNA (1)...(19): siRNA sense strand
caaauacuaagcugauuga

SEQ ID NO: 1062264 - RNA, 19 nt, Homo sapiens
  misc_RNA (1)...(19): siRNA sense strand
agaagaaggagcaguaauu

SEQ ID NO: 1062265 - RNA, 19 nt, Homo sapiens
  misc_RNA (1)...(19): siRNA sense strand
ggaucuaccuggucugaag

SEQ ID NO: 1062266 - RNA, 19 nt, Homo sapiens
  misc_RNA (1)...(19): siRNA sense strand
gaaaaggaauucucacucu

SEQ ID NO: 1062267 - RNA, 19 nt, Homo sapiens
  misc_RNA (1)...(19): siRNA sense strand
agaaugagcuagcaguaca

SEQ ID NO: 1062268 - RNA, 19 nt, Homo sapiens
  misc_RNA (1)...(19): siRNA sense strand
agaaggagcaguaauuguu

SEQ ID NO: 1062269 - RNA, 19 nt, Homo sapiens
  misc_RNA (1)...(19): siRNA sense strand
gcaccacuguagaaauugu

SEQ ID NO: 1062270 - RNA, 19 nt, Homo sapiens
  misc_RNA (1)...(19): siRNA sense strand
agaggaaguuaaagcaauu

SEQ ID NO: 1062271 - RNA, 19 nt, Homo sapiens
  misc_RNA (1)...(19): siRNA sense strand
aaucaucaauuacgaagug

SEQ ID NO: 1062272 - RNA, 19 nt, Homo sapiens
  misc_RNA (1)...(19): siRNA sense strand
caaguuggagugauugauu

SEQ ID NO: 1062273 - RNA, 19 nt, Homo sapiens
  misc_RNA (1)...(19): siRNA sense strand
ccaugaaguugcuggagaa

SEQ ID NO: 1062274 - RNA, 19 nt, Homo sapiens
  misc_RNA (1)...(19): siRNA sense strand
gaaagacaaagaagcaaca

SEQ ID NO: 1062275 - RNA, 19 nt, Homo sapiens
  misc_RNA (1)...(19): siRNA sense strand
ggacugguuuggcugaaag

SEQ ID NO: 1062276 - RNA, 19 nt, Homo sapiens
  misc_RNA (1)...(19): siRNA sense strand
ccuagagguuaccaaagua

SEQ ID NO: 1062277 - RNA, 19 nt, Homo sapiens
  misc_RNA (1)...(19): siRNA sense strand
ugccuuaucucaucuuaga

SEQ ID NO: 1062278 - RNA, 19 nt, Homo sapiens
  misc_RNA (1)...(19): siRNA sense strand
ugaggcagcuggaacaaag

SEQ ID NO: 1062279 - RNA, 19 nt, Homo sapiens
  misc_RNA (1)...(19): siRNA sense strand
uagaggaaguuaaagcaau

SEQ ID NO: 1062280 - RNA, 19 nt, Homo sapiens
  misc_RNA (1)...(19): siRNA sense strand
gagaggauuuagacucaca

SEQ ID NO: 1062281 - RNA, 19 nt, Homo sapiens
  misc_RNA (1)...(19): siRNA sense strand
gcacuuuggauucugacua

SEQ ID NO: 1062282 - RNA, 19 nt, Homo sapiens
  misc_RNA (1)...(19): siRNA sense strand
aaguagauguggaaacuga

SEQ ID NO: 1062283 - RNA, 19 nt, Homo sapiens
  misc_RNA (1)...(19): siRNA sense strand
uaaacugaguaucaaagga

SEQ ID NO: 1062284 - RNA, 19 nt, Homo sapiens
  misc_RNA (1)...(19): siRNA sense strand
gaagggagaggauuuagac

SEQ ID NO: 1062285 - RNA, 19 nt, Homo sapiens
  misc_RNA (1)...(19): siRNA sense strand
aaacaaaucucccaaaagg

SEQ ID NO: 1062286 - RNA, 19 nt, Homo sapiens
  misc_RNA (1)...(19): siRNA sense strand
aagaaugucucaguaaauc

SEQ ID NO: 1062287 - RNA, 19 nt, Homo sapiens
  misc_RNA (1)...(19): siRNA sense strand
gagaaacaagauacucuga

SEQ ID NO: 1062288 - RNA, 19 nt, Homo sapiens
  misc_RNA (1)...(19): siRNA sense strand
aaaggaauguucaaauugc

SEQ ID NO: 1062289 - RNA, 19 nt, Homo sapiens
  misc_RNA (1)...(19): siRNA sense strand
caacacauuguaaacuuug

SEQ ID NO: 1062290 - RNA, 19 nt, Homo sapiens
  misc_RNA (1)...(19): siRNA sense strand
acaaagaagcaacacauug

SEQ ID NO: 1062291 - RNA, 19 nt, Homo sapiens
  misc_RNA (1)...(19): siRNA sense strand
guagagagagcaaacuugu

SEQ ID NO: 1062292 - RNA, 19 nt, Homo sapiens
  misc_RNA (1)...(19): siRNA sense strand
ggaaacugacuugaagauu

SEQ ID NO: 1062293 - RNA, 19 nt, Homo sapiens
  misc_RNA (1)...(19): siRNA sense strand
gauagucugcagaaacaaa

SEQ ID NO: 1062294 - RNA, 19 nt, Homo sapiens
  misc_RNA (1)...(19): siRNA sense strand
gcagagaaggcgcaaaugg

SEQ ID NO: 1062295 - RNA, 19 nt, Homo sapiens
  misc_RNA (1)...(19): siRNA sense strand
gaaacugagcuucaaacau

SEQ ID NO: 1062296 - RNA, 19 nt, Homo sapiens
  misc_RNA (1)...(19): siRNA sense strand
aaacacagcagcaccuaga

SEQ ID NO: 1062297 - RNA, 19 nt, Homo sapiens
  misc_RNA (1)...(19): siRNA sense strand
caagaaugucucaguaaau

SEQ ID NO: 1062298 - RNA, 19 nt, Homo sapiens
  misc_RNA (1)...(19): siRNA sense strand
gagaaagcaccacuguaga

SEQ ID NO: 1062299 - RNA, 19 nt, Homo sapiens
  misc_RNA (1)...(19): siRNA sense strand
gacaaagaagcaacacauu

SEQ ID NO: 1062300 - RNA, 19 nt, Homo sapiens
  misc_RNA (1)...(19): siRNA sense strand
gaaaaucagcaguugaaaa

SEQ ID NO: 1062301 - RNA, 19 nt, Homo sapiens
  misc_RNA (1)...(19): siRNA sense strand
aauaauugcccgacuagaa

SEQ ID NO: 1062302 - RNA, 19 nt, Homo sapiens
  misc_RNA (1)...(19): siRNA sense strand
agaaagcaccacuguagaa

SEQ ID NO: 1062303 - RNA, 19 nt, Homo sapiens
  misc_RNA (1)...(19): siRNA sense strand
cauauuaccuccagacuuu

SEQ ID NO: 1062304 - RNA, 19 nt, Homo sapiens
  misc_RNA (1)...(19): siRNA sense strand
gcccaggugucccauauua

SEQ ID NO: 1062305 - RNA, 19 nt, Homo sapiens
  misc_RNA (1)...(19): siRNA sense strand
cagaugaaauggagaacuu

SEQ ID NO: 1062306 - RNA, 19 nt, Homo sapiens
  misc_RNA (1)...(19): siRNA sense strand
gagaugguggauaaacuua

SEQ ID NO: 1062307 - RNA, 19 nt, Homo sapiens
  misc_RNA (1)...(19): siRNA sense strand
gcagagaacagcauugacu

SEQ ID NO: 1062308 - RNA, 19 nt, Homo sapiens
  misc_RNA (1)...(19): siRNA sense strand
agaacuugcugaccuacaa

SEQ ID NO: 1062309 - RNA, 19 nt, Homo sapiens
  misc_RNA (1)...(19): siRNA sense strand
cagcccaggugucccauau

SEQ ID NO: 1062310 - RNA, 19 nt, Homo sapiens
  misc_RNA (1)...(19): siRNA sense strand
gcaagacuuuuauuacguu

SEQ ID NO: 1062311 - RNA, 19 nt, Homo sapiens
  misc_RNA (1)...(19): siRNA sense strand
ugagugagauccgaagagu

SEQ ID NO: 1062312 - RNA, 19 nt, Homo sapiens
  misc_RNA (1)...(19): siRNA sense strand
uggagaacuugcugaccua

SEQ ID NO: 1062313 - RNA, 19 nt, Homo sapiens
  misc_RNA (1)...(19): siRNA sense strand
cgucgugggcggaauguuu

SEQ ID NO: 1062314 - RNA, 19 nt, Homo sapiens
  misc_RNA (1)...(19): siRNA sense strand
agugagauccgaagaguug

SEQ ID NO: 1062315 - RNA, 19 nt, Homo sapiens
  misc_RNA (1)...(19): siRNA sense strand
ccuggaaucagaugaaaug

SEQ ID NO: 1062316 - RNA, 19 nt, Homo sapiens
  misc_RNA (1)...(19): siRNA sense strand
gacagacucaucccucuuc

SEQ ID NO: 1062317 - RNA, 19 nt, Homo sapiens
  misc_RNA (1)...(19): siRNA sense strand
cgagaugguggauaaacuu

SEQ ID NO: 1062318 - RNA, 19 nt, Homo sapiens
  misc_RNA (1)...(19): siRNA sense strand
uggcagccuugaaauggaa

SEQ ID NO: 1062319 - RNA, 19 nt, Homo sapiens
  misc_RNA (1)...(19): siRNA sense strand
uuuauuacguugccaugga

SEQ ID NO: 1062320 - RNA, 19 nt, Homo sapiens
  misc_RNA (1)...(19): siRNA sense strand
ggaagcugcaggcccaugu

SEQ ID NO: 1062321 - RNA, 19 nt, Homo sapiens
  misc_RNA (1)...(19): siRNA sense strand
gccuugaaauggaaucgau

SEQ ID NO: 1062322 - RNA, 19 nt, Homo sapiens
  misc_RNA (1)...(19): siRNA sense strand
guggcagccuugaaaugga

SEQ ID NO: 1062323 - RNA, 19 nt, Homo sapiens
  misc_RNA (1)...(19): siRNA sense strand
cagagaacagcauugacuu

SEQ ID NO: 1062324 - RNA, 19 nt, Homo sapiens
  misc_RNA (1)...(19): siRNA sense strand
cuacaagcggagagccaua

SEQ ID NO: 1062325 - RNA, 19 nt, Homo sapiens
  misc_RNA (1)...(19): siRNA sense strand
ggacacgccgcucuuucuc

SEQ ID NO: 1062326 - RNA, 19 nt, Homo sapiens
  misc_RNA (1)...(19): siRNA sense strand
aaucagaugaaauggagaa

SEQ ID NO: 1062327 - RNA, 19 nt, Homo sapiens
  misc_RNA (1)...(19): siRNA sense strand
ccauauuaccuccagacuu

SEQ ID NO: 1062328 - RNA, 19 nt, Homo sapiens
  misc_RNA (1)...(19): siRNA sense strand
ccgagaugguggauaaacu

SEQ ID NO: 1062329 - RNA, 19 nt, Homo sapiens
  misc_RNA (1)...(19): siRNA sense strand
gaaauucaguuccauagug

SEQ ID NO: 1062330 - RNA, 19 nt, Homo sapiens
  misc_RNA (1)...(19): siRNA sense strand
gcaagcugaugacaacuua

SEQ ID NO: 1062331 - RNA, 19 nt, Homo sapiens
  misc_RNA (1)...(19): siRNA sense strand
gauuguagcuaccgugaua

SEQ ID NO: 1062332 - RNA, 19 nt, Homo sapiens
  misc_RNA (1)...(19): siRNA sense strand
gaagaacucggauuuauau

SEQ ID NO: 1062333 - RNA, 19 nt, Homo sapiens
  misc_RNA (1)...(19): siRNA sense strand
gagggaaucuuaauuguuc

SEQ ID NO: 1062334 - RNA, 19 nt, Homo sapiens
  misc_RNA (1)...(19): siRNA sense strand
gcaagaaagugcugaagau

SEQ ID NO: 1062335 - RNA, 19 nt, Homo sapiens
  misc_RNA (1)...(19): siRNA sense strand
gaagauucaugcagugauu

SEQ ID NO: 1062336 - RNA, 19 nt, Homo sapiens
  misc_RNA (1)...(19): siRNA sense strand
ugagguauguguuugguua

SEQ ID NO: 1062337 - RNA, 19 nt, Homo sapiens
  misc_RNA (1)...(19): siRNA sense strand
ggagaaagguuuguuccaa

SEQ ID NO: 1062338 - RNA, 19 nt, Homo sapiens
  misc_RNA (1)...(19): siRNA sense strand
caucaggacuuauuguuga

SEQ ID NO: 1062339 - RNA, 19 nt, Homo sapiens
  misc_RNA (1)...(19): siRNA sense strand
gaagaauucuaacauccaa

SEQ ID NO: 1062340 - RNA, 19 nt, Homo sapiens
  misc_RNA (1)...(19): siRNA sense strand
caagggugcugguauagaa

SEQ ID NO: 1062341 - RNA, 19 nt, Homo sapiens
  misc_RNA (1)...(19): siRNA sense strand
gauauggccuaccagauga

SEQ ID NO: 1062342 - RNA, 19 nt, Homo sapiens
  misc_RNA (1)...(19): siRNA sense strand
cagcagaguuucuaaugaa

SEQ ID NO: 1062343 - RNA, 19 nt, Homo sapiens
  misc_RNA (1)...(19): siRNA sense strand
agacagcccuugcaauuga

SEQ ID NO: 1062344 - RNA, 19 nt, Homo sapiens
  misc_RNA (1)...(19): siRNA sense strand
ggugaaaccuacaaucuuc

SEQ ID NO: 1062345 - RNA, 19 nt, Homo sapiens
  misc_RNA (1)...(19): siRNA sense strand
cgauuaagauugcauuaug

SEQ ID NO: 1062346 - RNA, 19 nt, Homo sapiens
  misc_RNA (1)...(19): siRNA sense strand
ggagauguuuguugggauu

SEQ ID NO: 1062347 - RNA, 19 nt, Homo sapiens
  misc_RNA (1)...(19): siRNA sense strand
gaaccucgauuaagauugc

SEQ ID NO: 1062348 - RNA, 19 nt, Homo sapiens
  misc_RNA (1)...(19): siRNA sense strand
ggaaggauauggccuacca

SEQ ID NO: 1062349 - RNA, 19 nt, Homo sapiens
  misc_RNA (1)...(19): siRNA sense strand
gaagggauccucauuaagg

SEQ ID NO: 1062350 - RNA, 19 nt, Homo sapiens
  misc_RNA (1)...(19): siRNA sense strand
ccauugaguuggaaggaua

SEQ ID NO: 1062351 - RNA, 19 nt, Homo sapiens
  misc_RNA (1)...(19): siRNA sense strand
agauauccauggugaauaa

SEQ ID NO: 1062352 - RNA, 19 nt, Homo sapiens
  misc_RNA (1)...(19): siRNA sense strand
cagaugacauugugauaga

SEQ ID NO: 1062353 - RNA, 19 nt, Homo sapiens
  misc_RNA (1)...(19): siRNA sense strand
ccagacagcccuugcaauu

SEQ ID NO: 1062354 - RNA, 19 nt, Homo sapiens
  misc_RNA (1)...(19): siRNA sense strand
uaaugaagguuaugguguu

SEQ ID NO: 1062355 - RNA, 19 nt, Homo sapiens
  misc_RNA (1)...(19): siRNA sense strand
guagagggaaucuuaauug

SEQ ID NO: 1062356 - RNA, 19 nt, Homo sapiens
  misc_RNA (1)...(19): siRNA sense strand
gaagaaagagaaauucagu

SEQ ID NO: 1062357 - RNA, 19 nt, Homo sapiens
  misc_RNA (1)...(19): siRNA sense strand
gaggagaguuacaggaaau

SEQ ID NO: 1062358 - RNA, 19 nt, Homo sapiens
  misc_RNA (1)...(19): siRNA sense strand
caauugagcaugucagauu

SEQ ID NO: 1062359 - RNA, 19 nt, Homo sapiens
  misc_RNA (1)...(19): siRNA sense strand
ggauauggccuaccagaug

SEQ ID NO: 1062360 - RNA, 19 nt, Homo sapiens
  misc_RNA (1)...(19): siRNA sense strand
gaagauggaacugaagaaa

SEQ ID NO: 1062361 - RNA, 19 nt, Homo sapiens
  misc_RNA (1)...(19): siRNA sense strand
cgaguuccaucaggacuua

SEQ ID NO: 1062362 - RNA, 19 nt, Homo sapiens
  misc_RNA (1)...(19): siRNA sense strand
gaaggugacacuguuauug

SEQ ID NO: 1062363 - RNA, 19 nt, Homo sapiens
  misc_RNA (1)...(19): siRNA sense strand
agaaagugcugaagaugga

SEQ ID NO: 1062364 - RNA, 19 nt, Homo sapiens
  misc_RNA (1)...(19): siRNA sense strand
ugaagaacucggauuuaua

SEQ ID NO: 1062365 - RNA, 19 nt, Homo sapiens
  misc_RNA (1)...(19): siRNA sense strand
aagaagaggaggaugaaua

SEQ ID NO: 1062366 - RNA, 19 nt, Homo sapiens
  misc_RNA (1)...(19): siRNA sense strand
cagaaaggccagauaaaga

SEQ ID NO: 1062367 - RNA, 19 nt, Homo sapiens
  misc_RNA (1)...(19): siRNA sense strand
ggaauucacagcugaguuc

SEQ ID NO: 1062368 - RNA, 19 nt, Homo sapiens
  misc_RNA (1)...(19): siRNA sense strand
ugaaagaguggaucuagaa

SEQ ID NO: 1062369 - RNA, 19 nt, Homo sapiens
  misc_RNA (1)...(19): siRNA sense strand
uaaugaagaacucggauuu

SEQ ID NO: 1062370 - RNA, 19 nt, Homo sapiens
  misc_RNA (1)...(19): siRNA sense strand
gucagaagaucacucaugu

SEQ ID NO: 1062371 - RNA, 19 nt, Homo sapiens
  misc_RNA (1)...(19): siRNA sense strand
acacagaaaggccagauaa

SEQ ID NO: 1062372 - RNA, 19 nt, Homo sapiens
  misc_RNA (1)...(19): siRNA sense strand
ucagcagaguuucuaauga

SEQ ID NO: 1062373 - RNA, 19 nt, Homo sapiens
  misc_RNA (1)...(19): siRNA sense strand
gauccauugucugcuauaa

SEQ ID NO: 1062374 - RNA, 19 nt, Homo sapiens
  misc_RNA (1)...(19): siRNA sense strand
gguucuaguuuacaaaguu

SEQ ID NO: 1062375 - RNA, 19 nt, Homo sapiens
  misc_RNA (1)...(19): siRNA sense strand
aaauucaguuccauaguga

SEQ ID NO: 1062376 - RNA, 19 nt, Homo sapiens
  misc_RNA (1)...(19): siRNA sense strand
cgccaagggugcugguaua

SEQ ID NO: 1062377 - RNA, 19 nt, Homo sapiens
  misc_RNA (1)...(19): siRNA sense strand
gcaagucgagggaaauugu

SEQ ID NO: 1062378 - RNA, 19 nt, Homo sapiens
  misc_RNA (1)...(19): siRNA sense strand
agaaagguuuguuccaaga

SEQ ID NO: 1062379 - RNA, 19 nt, Homo sapiens
  misc_RNA (1)...(19): siRNA sense strand
ggagauggaacaguugaaa

SEQ ID NO: 1062380 - RNA, 19 nt, Homo sapiens
  misc_RNA (1)...(19): siRNA sense strand
aaagagaaauucaguucca

SEQ ID NO: 1062381 - RNA, 19 nt, Homo sapiens
  misc_RNA (1)...(19): siRNA sense strand
uguugaaccucgauuaaga

SEQ ID NO: 1062382 - RNA, 19 nt, Homo sapiens
  misc_RNA (1)...(19): siRNA sense strand
agaaaggccagauaaagaa

SEQ ID NO: 1062383 - RNA, 19 nt, Homo sapiens
  misc_RNA (1)...(19): siRNA sense strand
gcggacaucagcagaguuu

SEQ ID NO: 1062384 - RNA, 19 nt, Homo sapiens
  misc_RNA (1)...(19): siRNA sense strand
ggaguugggaugaagaaga

SEQ ID NO: 1062385 - RNA, 19 nt, Homo sapiens
  misc_RNA (1)...(19): siRNA sense strand
caaauuguaacucugauuc

SEQ ID NO: 1062386 - RNA, 19 nt, Homo sapiens
  misc_RNA (1)...(19): siRNA sense strand
ugaggagaguuacaggaaa

SEQ ID NO: 1062387 - RNA, 19 nt, Homo sapiens
  misc_RNA (1)...(19): siRNA sense strand
uagagggaaucuuaauugu

SEQ ID NO: 1062388 - RNA, 19 nt, Homo sapiens
  misc_RNA (1)...(19): siRNA sense strand
ggaaugggaaagguaguuu

SEQ ID NO: 1062389 - RNA, 19 nt, Homo sapiens
  misc_RNA (1)...(19): siRNA sense strand
caagauauccauggugaau

SEQ ID NO: 1062390 - RNA, 19 nt, Homo sapiens
  misc_RNA (1)...(19): siRNA sense strand
ggucagaagaucacucaug

SEQ ID NO: 1062391 - RNA, 19 nt, Homo sapiens
  misc_RNA (1)...(19): siRNA sense strand
uauaaaugccugcuucgaa

SEQ ID NO: 1062392 - RNA, 19 nt, Homo sapiens
  misc_RNA (1)...(19): siRNA sense strand
uccauugucugcuauaaau

SEQ ID NO: 1062393 - RNA, 19 nt, Homo sapiens
  misc_RNA (1)...(19): siRNA sense strand
gagaaauucaguuccauag

SEQ ID NO: 1062394 - RNA, 19 nt, Homo sapiens
  misc_RNA (1)...(19): siRNA sense strand
ugaggaagaaagagaaauu

SEQ ID NO: 1062395 - RNA, 19 nt, Homo sapiens
  misc_RNA (1)...(19): siRNA sense strand
gaguugggaugaagaagag

SEQ ID NO: 1062396 - RNA, 19 nt, Homo sapiens
  misc_RNA (1)...(19): siRNA sense strand
ucagagccuaucaagauua

SEQ ID NO: 1062397 - RNA, 19 nt, Homo sapiens
  misc_RNA (1)...(19): siRNA sense strand
ucucugaccugcaagaaag

SEQ ID NO: 1062398 - RNA, 19 nt, Homo sapiens
  misc_RNA (1)...(19): siRNA sense strand
ggagaguuacaggaaauuu

SEQ ID NO: 1062399 - RNA, 19 nt, Homo sapiens
  misc_RNA (1)...(19): siRNA sense strand
gagcaagucgagggaaauu

SEQ ID NO: 1062400 - RNA, 19 nt, Homo sapiens
  misc_RNA (1)...(19): siRNA sense strand
aaucuucucugaccugcaa

SEQ ID NO: 1062401 - RNA, 19 nt, Homo sapiens
  misc_RNA (1)...(19): siRNA sense strand
gaugacauugugauagaaa

SEQ ID NO: 1062402 - RNA, 19 nt, Homo sapiens
  misc_RNA (1)...(19): siRNA sense strand
agaaagagaaauucaguuc

SEQ ID NO: 1062403 - RNA, 19 nt, Homo sapiens
  misc_RNA (1)...(19): siRNA sense strand
agaauccuuuguugaggua

SEQ ID NO: 1062404 - RNA, 19 nt, Homo sapiens
  misc_RNA (1)...(19): siRNA sense strand
cauugagaauccuuuguug

SEQ ID NO: 1062405 - RNA, 19 nt, Homo sapiens
  misc_RNA (1)...(19): siRNA sense strand
ggaggaugaauacgauuau

SEQ ID NO: 1062406 - RNA, 19 nt, Homo sapiens
  misc_RNA (1)...(19): siRNA sense strand
augaagaacucggauuuau

SEQ ID NO: 1062407 - RNA, 19 nt, Homo sapiens
  misc_RNA (1)...(19): siRNA sense strand
cuucgaaggugacacuguu

SEQ ID NO: 1062408 - RNA, 19 nt, Homo sapiens
  misc_RNA (1)...(19): siRNA sense strand
ucacaggagauguuuguug

SEQ ID NO: 1062409 - RNA, 19 nt, Homo sapiens
  misc_RNA (1)...(19): siRNA sense strand
ggacuuugcagccuugaag

SEQ ID NO: 1062410 - RNA, 19 nt, Homo sapiens
  misc_RNA (1)...(19): siRNA sense strand
auucacagcugaguucuug

SEQ ID NO: 1062411 - RNA, 19 nt, Homo sapiens
  misc_RNA (1)...(19): siRNA sense strand
gcagaguuucuaaugaaga

SEQ ID NO: 1062412 - RNA, 19 nt, Homo sapiens
  misc_RNA (1)...(19): siRNA sense strand
cacuggugcugauauuaaa

SEQ ID NO: 1062413 - RNA, 19 nt, Homo sapiens
  misc_RNA (1)...(19): siRNA sense strand
gugacacuguuauuguuug

SEQ ID NO: 1062414 - RNA, 19 nt, Homo sapiens
  misc_RNA (1)...(19): siRNA sense strand
gguauguguuugguuauca

SEQ ID NO: 1062415 - RNA, 19 nt, Homo sapiens
  misc_RNA (1)...(19): siRNA sense strand
gaggcuugcugaaccauac

SEQ ID NO: 1062416 - RNA, 19 nt, Homo sapiens
  misc_RNA (1)...(19): siRNA sense strand
ggugguguuugaugauuca

SEQ ID NO: 1062417 - RNA, 19 nt, Homo sapiens
  misc_RNA (1)...(19): siRNA sense strand
aaccuacaaucuucucuga

SEQ ID NO: 1062418 - RNA, 19 nt, Homo sapiens
  misc_RNA (1)...(19): siRNA sense strand
uuaugacauucccaagaua

SEQ ID NO: 1062419 - RNA, 19 nt, Homo sapiens
  misc_RNA (1)...(19): siRNA sense strand
gaugaacauuaugacauuc

SEQ ID NO: 1062420 - RNA, 19 nt, Homo sapiens
  misc_RNA (1)...(19): siRNA sense strand
ggacaucagcagaguuucu

SEQ ID NO: 1062421 - RNA, 19 nt, Homo sapiens
  misc_RNA (1)...(19): siRNA sense strand
agaggaggaugaauacgau

SEQ ID NO: 1062422 - RNA, 19 nt, Homo sapiens
  misc_RNA (1)...(19): siRNA sense strand
aauugagcaugucagauuu

SEQ ID NO: 1062423 - RNA, 19 nt, Homo sapiens
  misc_RNA (1)...(19): siRNA sense strand
aaagguuuguuccaagaug

SEQ ID NO: 1062424 - RNA, 19 nt, Homo sapiens
  misc_RNA (1)...(19): siRNA sense strand
auucggagauggaacaguu

SEQ ID NO: 1062425 - RNA, 19 nt, Homo sapiens
  misc_RNA (1)...(19): siRNA sense strand
caagaaagugcugaagaug

SEQ ID NO: 1062426 - RNA, 19 nt, Homo sapiens
  misc_RNA (1)...(19): siRNA sense strand
ggugacacuguuauuguuu

SEQ ID NO: 1062427 - RNA, 19 nt, Homo sapiens
  misc_RNA (1)...(19): siRNA sense strand
gaaaggccagauaaagaag

SEQ ID NO: 1062428 - RNA, 19 nt, Homo sapiens
  misc_RNA (1)...(19): siRNA sense strand
gcugaugacaacuuaaugu

SEQ ID NO: 1062429 - RNA, 19 nt, Homo sapiens
  misc_RNA (1)...(19): siRNA sense strand
gaagaucgcugaggaagaa

SEQ ID NO: 1062430 - RNA, 19 nt, Homo sapiens
  misc_RNA (1)...(19): siRNA sense strand
ccaaucaaguucucugaaa

SEQ ID NO: 1062431 - RNA, 19 nt, Homo sapiens
  misc_RNA (1)...(19): siRNA sense strand
gcaacaggcuucucacuac

SEQ ID NO: 1062432 - RNA, 19 nt, Homo sapiens
  misc_RNA (1)...(19): siRNA sense strand
ggaggcauaugaccagaag

SEQ ID NO: 1062433 - RNA, 19 nt, Homo sapiens
  misc_RNA (1)...(19): siRNA sense strand
cuacgcagcuauuccaauc

SEQ ID NO: 1062434 - RNA, 19 nt, Homo sapiens
  misc_RNA (1)...(19): siRNA sense strand
acaaguggaucagugacua

SEQ ID NO: 1062435 - RNA, 19 nt, Homo sapiens
  misc_RNA (1)...(19): siRNA sense strand
ggacugaggcagccagcuu

SEQ ID NO: 1062436 - RNA, 19 nt, Homo sapiens
  misc_RNA (1)...(19): siRNA sense strand
gcacacggcguucgacaag

SEQ ID NO: 1062437 - RNA, 19 nt, Homo sapiens
  misc_RNA (1)...(19): siRNA sense strand
cguccagucuguagaguug

SEQ ID NO: 1062438 - RNA, 19 nt, Homo sapiens
  misc_RNA (1)...(19): siRNA sense strand
acacguucauggaggcaua

SEQ ID NO: 1062439 - RNA, 19 nt, Homo sapiens
  misc_RNA (1)...(19): siRNA sense strand
ggguggaaguggacacguu

SEQ ID NO: 1062440 - RNA, 19 nt, Homo sapiens
  misc_RNA (1)...(19): siRNA sense strand
caaguucucugaaaagcaa

SEQ ID NO: 1062441 - RNA, 19 nt, Homo sapiens
  misc_RNA (1)...(19): siRNA sense strand
gaagaguggcauucacaag

SEQ ID NO: 1062442 - RNA, 19 nt, Homo sapiens
  misc_RNA (1)...(19): siRNA sense strand
ggagucaaggucgaaguuu

SEQ ID NO: 1062443 - RNA, 19 nt, Homo sapiens
  misc_RNA (1)...(19): siRNA sense strand
agaguggcauucacaagug

SEQ ID NO: 1062444 - RNA, 19 nt, Homo sapiens
  misc_RNA (1)...(19): siRNA sense strand
ggaaguggacacguucaug

SEQ ID NO: 1062445 - RNA, 19 nt, Homo sapiens
  misc_RNA (1)...(19): siRNA sense strand
caaaggagucaaggucgaa

SEQ ID NO: 1062446 - RNA, 19 nt, Homo sapiens
  misc_RNA (1)...(19): siRNA sense strand
gagccacccugugaagagu

SEQ ID NO: 1062447 - RNA, 19 nt, Homo sapiens
  misc_RNA (1)...(19): siRNA sense strand
caaucaaguucucugaaaa

SEQ ID NO: 1062448 - RNA, 19 nt, Homo sapiens
  misc_RNA (1)...(19): siRNA sense strand
gagucaaggucgaaguuuu

SEQ ID NO: 1062449 - RNA, 19 nt, Homo sapiens
  misc_RNA (1)...(19): siRNA sense strand
gcaaauuccgaccguacug

SEQ ID NO: 1062450 - RNA, 19 nt, Homo sapiens
  misc_RNA (1)...(19): siRNA sense strand
caaauuccgaccguacuga

SEQ ID NO: 1062451 - RNA, 19 nt, Homo sapiens
  misc_RNA (1)...(19): siRNA sense strand
acgcagcuauuccaaucaa

SEQ ID NO: 1062452 - RNA, 19 nt, Homo sapiens
  misc_RNA (1)...(19): siRNA sense strand
cagcuauuccaaucaaguu

SEQ ID NO: 1062453 - RNA, 19 nt, Homo sapiens
  misc_RNA (1)...(19): siRNA sense strand
cuguagaguugcaggagaa

SEQ ID NO: 1062454 - RNA, 19 nt, Homo sapiens
  misc_RNA (1)...(19): siRNA sense strand
gcagcuauuccaaucaagu

SEQ ID NO: 1062455 - RNA, 19 nt, Homo sapiens
  misc_RNA (1)...(19): siRNA sense strand
ccaccuggccucagaagag

SEQ ID NO: 1062456 - RNA, 19 nt, Homo sapiens
  misc_RNA (1)...(19): siRNA sense strand
ccagaagaucgcugaggaa

SEQ ID NO: 1062457 - RNA, 19 nt, Homo sapiens
  misc_RNA (1)...(19): siRNA sense strand
gaaguucgaggaggacaag

SEQ ID NO: 1062458 - RNA, 19 nt, Homo sapiens
  misc_RNA (1)...(19): siRNA sense strand
gagagccacccugugaaga

SEQ ID NO: 1062459 - RNA, 19 nt, Homo sapiens
  misc_RNA (1)...(19): siRNA sense strand
cagcaucgagagagcaaga

SEQ ID NO: 1062460 - RNA, 19 nt, Homo sapiens
  misc_RNA (1)...(19): siRNA sense strand
gacggaagcgcagccgaaa

SEQ ID NO: 1062461 - RNA, 19 nt, Homo sapiens
  misc_RNA (1)...(19): siRNA sense strand
cugcugguguccacagaga

SEQ ID NO: 1062462 - RNA, 19 nt, Homo sapiens
  misc_RNA (1)...(19): siRNA sense strand
gagagcacacggcguucga

SEQ ID NO: 1062463 - RNA, 19 nt, Homo sapiens
  misc_RNA (1)...(19): siRNA sense strand
ucgcugaggaagaagcuaa

SEQ ID NO: 1062464 - RNA, 19 nt, Homo sapiens
  misc_RNA (1)...(19): siRNA sense strand
caaacuugcuggcuauaua

SEQ ID NO: 1062465 - RNA, 19 nt, Homo sapiens
  misc_RNA (1)...(19): siRNA sense strand
gcugaaagcuggagguucu

SEQ ID NO: 1062466 - RNA, 19 nt, Homo sapiens
  misc_RNA (1)...(19): siRNA sense strand
gaggaaggaucagagaaga

SEQ ID NO: 1062467 - RNA, 19 nt, Homo sapiens
  misc_RNA (1)...(19): siRNA sense strand
ccacagccaggauugguua

SEQ ID NO: 1062468 - RNA, 19 nt, Homo sapiens
  misc_RNA (1)...(19): siRNA sense strand
gggaguaggucuucgaaac

SEQ ID NO: 1062469 - RNA, 19 nt, Homo sapiens
  misc_RNA (1)...(19): siRNA sense strand
ggaaguuguucacagcaau

SEQ ID NO: 1062470 - RNA, 19 nt, Homo sapiens
  misc_RNA (1)...(19): siRNA sense strand
ugacacaacugcugaaagc

SEQ ID NO: 1062471 - RNA, 19 nt, Homo sapiens
  misc_RNA (1)...(19): siRNA sense strand
gaguaggucuucgaaacuu

SEQ ID NO: 1062472 - RNA, 19 nt, Homo sapiens
  misc_RNA (1)...(19): siRNA sense strand
gaagucaagagaaccaaug

SEQ ID NO: 1062473 - RNA, 19 nt, Homo sapiens
  misc_RNA (1)...(19): siRNA sense strand
cagccaggauugguuauga

SEQ ID NO: 1062474 - RNA, 19 nt, Homo sapiens
  misc_RNA (1)...(19): siRNA sense strand
gagcuuacaugcagaugcu

SEQ ID NO: 1062475 - RNA, 19 nt, Homo sapiens
  misc_RNA (1)...(19): siRNA sense strand
gcuggagguucucugaaga

SEQ ID NO: 1062476 - RNA, 19 nt, Homo sapiens
  misc_RNA (1)...(19): siRNA sense strand
gucauuguguccuugguuu

SEQ ID NO: 1062477 - RNA, 19 nt, Homo sapiens
  misc_RNA (1)...(19): siRNA sense strand
guugugaguuguguucuug

SEQ ID NO: 1062478 - RNA, 19 nt, Homo sapiens
  misc_RNA (1)...(19): siRNA sense strand
guuguccucugcgugaaua

SEQ ID NO: 1062479 - RNA, 19 nt, Homo sapiens
  misc_RNA (1)...(19): siRNA sense strand
gaguugcuauggccucuag

SEQ ID NO: 1062480 - RNA, 19 nt, Homo sapiens
  misc_RNA (1)...(19): siRNA sense strand
acacggugauugugaaugg

SEQ ID NO: 1062481 - RNA, 19 nt, Homo sapiens
  misc_RNA (1)...(19): siRNA sense strand
cuggcaaacugaacccuuu

SEQ ID NO: 1062482 - RNA, 19 nt, Homo sapiens
  misc_RNA (1)...(19): siRNA sense strand
acaugcagaugcugaggaa

SEQ ID NO: 1062483 - RNA, 19 nt, Homo sapiens
  misc_RNA (1)...(19): siRNA sense strand
caccaggagucagcuuuga

SEQ ID NO: 1062484 - RNA, 19 nt, Homo sapiens
  misc_RNA (1)...(19): siRNA sense strand
aaacuugcuggcuauauau

SEQ ID NO: 1062485 - RNA, 19 nt, Homo sapiens
  misc_RNA (1)...(19): siRNA sense strand
ggaggaguguagagcuuac

SEQ ID NO: 1062486 - RNA, 19 nt, Homo sapiens
  misc_RNA (1)...(19): siRNA sense strand
gaccuccacugccauuguc

SEQ ID NO: 1062487 - RNA, 19 nt, Homo sapiens
  misc_RNA (1)...(19): siRNA sense strand
gacccugucuucccuacca

SEQ ID NO: 1062488 - RNA, 19 nt, Homo sapiens
  misc_RNA (1)...(19): siRNA sense strand
ggaguaggucuucgaaacu

SEQ ID NO: 1062489 - RNA, 19 nt, Homo sapiens
  misc_RNA (1)...(19): siRNA sense strand
gguugugaguuguguucuu

SEQ ID NO: 1062490 - RNA, 19 nt, Homo sapiens
  misc_RNA (1)...(19): siRNA sense strand
gcagaaggaggaguguaga

SEQ ID NO: 1062491 - RNA, 19 nt, Homo sapiens
  misc_RNA (1)...(19): siRNA sense strand
gggccauuguccaugagaa

SEQ ID NO: 1062492 - RNA, 19 nt, Homo sapiens
  misc_RNA (1)...(19): siRNA sense strand
gaaguuguucacagcaauc

SEQ ID NO: 1062493 - RNA, 19 nt, Homo sapiens
  misc_RNA (1)...(19): siRNA sense strand
aaggaggaguguagagcuu

SEQ ID NO: 1062494 - RNA, 19 nt, Homo sapiens
  misc_RNA (1)...(19): siRNA sense strand
caaaacacggugauuguga

SEQ ID NO: 1062495 - RNA, 19 nt, Homo sapiens
  misc_RNA (1)...(19): siRNA sense strand
ggcagaaggaggaguguag

SEQ ID NO: 1062496 - RNA, 19 nt, Homo sapiens
  misc_RNA (1)...(19): siRNA sense strand
ccacauccaccaggaguca

SEQ ID NO: 1062497 - RNA, 19 nt, Homo sapiens
  misc_RNA (1)...(19): siRNA sense strand
aaagcuggagguucucuga

SEQ ID NO: 1062498 - RNA, 19 nt, Homo sapiens
  misc_RNA (1)...(19): siRNA sense strand
guucuuggagugugucuca

SEQ ID NO: 1062499 - RNA, 19 nt, Homo sapiens
  misc_RNA (1)...(19): siRNA sense strand
gcggcgaagucaagagaac

SEQ ID NO: 1062500 - RNA, 19 nt, Homo sapiens
  misc_RNA (1)...(19): siRNA sense strand
ccaccaggagucagcuuug

SEQ ID NO: 1062501 - RNA, 19 nt, Homo sapiens
  misc_RNA (1)...(19): siRNA sense strand
ugaggaaggaucagagaag

SEQ ID NO: 1062502 - RNA, 19 nt, Homo sapiens
  misc_RNA (1)...(19): siRNA sense strand
ggucauuguguccuugguu

SEQ ID NO: 1062503 - RNA, 19 nt, Homo sapiens
  misc_RNA (1)...(19): siRNA sense strand
ugcagaugcugaggaaguu

SEQ ID NO: 1062504 - RNA, 19 nt, Homo sapiens
  misc_RNA (1)...(19): siRNA sense strand
aaaacacggugauugugaa

SEQ ID NO: 1062505 - RNA, 19 nt, Homo sapiens
  misc_RNA (1)...(19): siRNA sense strand
gaucagagaagaggcuacu

SEQ ID NO: 1062506 - RNA, 19 nt, Homo sapiens
  misc_RNA (1)...(19): siRNA sense strand
ugaaugaggaaggaucaga

SEQ ID NO: 1062507 - RNA, 19 nt, Homo sapiens
  misc_RNA (1)...(19): siRNA sense strand
gauugugaauggaguugcu

SEQ ID NO: 1062508 - RNA, 19 nt, Homo sapiens
  misc_RNA (1)...(19): siRNA sense strand
ccacgaagcuucuguaaug

SEQ ID NO: 1062509 - RNA, 19 nt, Homo sapiens
  misc_RNA (1)...(19): siRNA sense strand
ggaaagaugugccuaguuc

SEQ ID NO: 1062510 - RNA, 19 nt, Homo sapiens
  misc_RNA (1)...(19): siRNA sense strand
ggaugaaacuguaacaauu

SEQ ID NO: 1062511 - RNA, 19 nt, Homo sapiens
  misc_RNA (1)...(19): siRNA sense strand
cgacuuaguucaagaugua

SEQ ID NO: 1062512 - RNA, 19 nt, Homo sapiens
  misc_RNA (1)...(19): siRNA sense strand
gaaauguuguucacucuga

SEQ ID NO: 1062513 - RNA, 19 nt, Homo sapiens
  misc_RNA (1)...(19): siRNA sense strand
aaaaugcgcugaagaauua

SEQ ID NO: 1062514 - RNA, 19 nt, Homo sapiens
  misc_RNA (1)...(19): siRNA sense strand
gaagaagcauccaaagcaa

SEQ ID NO: 1062515 - RNA, 19 nt, Homo sapiens
  misc_RNA (1)...(19): siRNA sense strand
ucacaaggaugaaacugua

SEQ ID NO: 1062516 - RNA, 19 nt, Homo sapiens
  misc_RNA (1)...(19): siRNA sense strand
caagagaacuucauaugag

SEQ ID NO: 1062517 - RNA, 19 nt, Homo sapiens
  misc_RNA (1)...(19): siRNA sense strand
gaaaagaaccucauaaaug

SEQ ID NO: 1062518 - RNA, 19 nt, Homo sapiens
  misc_RNA (1)...(19): siRNA sense strand
gaaauagucaggcaaaguu

SEQ ID NO: 1062519 - RNA, 19 nt, Homo sapiens
  misc_RNA (1)...(19): siRNA sense strand
uaacagcuauucaaacuca

SEQ ID NO: 1062520 - RNA, 19 nt, Homo sapiens
  misc_RNA (1)...(19): siRNA sense strand
gaauaucccucuccaugug

SEQ ID NO: 1062521 - RNA, 19 nt, Homo sapiens
  misc_RNA (1)...(19): siRNA sense strand
caaaauagcuuucuucagu

SEQ ID NO: 1062522 - RNA, 19 nt, Homo sapiens
  misc_RNA (1)...(19): siRNA sense strand
gacaaggaauacuaaguuu

SEQ ID NO: 1062523 - RNA, 19 nt, Homo sapiens
  misc_RNA (1)...(19): siRNA sense strand
ucggagagcugaucgagua

SEQ ID NO: 1062524 - RNA, 19 nt, Homo sapiens
  misc_RNA (1)...(19): siRNA sense strand
ggcauuauauuaucucuug

SEQ ID NO: 1062525 - RNA, 19 nt, Homo sapiens
  misc_RNA (1)...(19): siRNA sense strand
gaacaugcacagacuuauu

SEQ ID NO: 1062526 - RNA, 19 nt, Homo sapiens
  misc_RNA (1)...(19): siRNA sense strand
ugaaguugcuggauuaugu

SEQ ID NO: 1062527 - RNA, 19 nt, Homo sapiens
  misc_RNA (1)...(19): siRNA sense strand
uaagcuaccugacaaugaa

SEQ ID NO: 1062528 - RNA, 19 nt, Homo sapiens
  misc_RNA (1)...(19): siRNA sense strand
gcauggaugucuaaacaau

SEQ ID NO: 1062529 - RNA, 19 nt, Homo sapiens
  misc_RNA (1)...(19): siRNA sense strand
gaccuaagcuaccugacaa

SEQ ID NO: 1062530 - RNA, 19 nt, Homo sapiens
  misc_RNA (1)...(19): siRNA sense strand
gaagaugugugguuuuaaa

SEQ ID NO: 1062531 - RNA, 19 nt, Homo sapiens
  misc_RNA (1)...(19): siRNA sense strand
gcaaccgggcauuauauua

SEQ ID NO: 1062532 - RNA, 19 nt, Homo sapiens
  misc_RNA (1)...(19): siRNA sense strand
aagacuggcuggaugaaua

SEQ ID NO: 1062533 - RNA, 19 nt, Homo sapiens
  misc_RNA (1)...(19): siRNA sense strand
gaccagaagucucggauag

SEQ ID NO: 1062534 - RNA, 19 nt, Homo sapiens
  misc_RNA (1)...(19): siRNA sense strand
ggacucugcucacuucugu

SEQ ID NO: 1062535 - RNA, 19 nt, Homo sapiens
  misc_RNA (1)...(19): siRNA sense strand
gagauaaucauaacucuuc

SEQ ID NO: 1062536 - RNA, 19 nt, Homo sapiens
  misc_RNA (1)...(19): siRNA sense strand
gaauugagagcccaugaaa

SEQ ID NO: 1062537 - RNA, 19 nt, Homo sapiens
  misc_RNA (1)...(19): siRNA sense strand
caugugaacucucaggaaa

SEQ ID NO: 1062538 - RNA, 19 nt, Homo sapiens
  misc_RNA (1)...(19): siRNA sense strand
gcaagugucacaaggauga

SEQ ID NO: 1062539 - RNA, 19 nt, Homo sapiens
  misc_RNA (1)...(19): siRNA sense strand
gcacagacuuauuacuaca

SEQ ID NO: 1062540 - RNA, 19 nt, Homo sapiens
  misc_RNA (1)...(19): siRNA sense strand
aaacagauucgauuacgua

SEQ ID NO: 1062541 - RNA, 19 nt, Homo sapiens
  misc_RNA (1)...(19): siRNA sense strand
gaagagugaaaucucauaa

SEQ ID NO: 1062542 - RNA, 19 nt, Homo sapiens
  misc_RNA (1)...(19): siRNA sense strand
ucugcucacuucuguauua

SEQ ID NO: 1062543 - RNA, 19 nt, Homo sapiens
  misc_RNA (1)...(19): siRNA sense strand
gcccaucucuuggaaauau

SEQ ID NO: 1062544 - RNA, 19 nt, Homo sapiens
  misc_RNA (1)...(19): siRNA sense strand
ugaaaguccugauccagaa

SEQ ID NO: 1062545 - RNA, 19 nt, Homo sapiens
  misc_RNA (1)...(19): siRNA sense strand
ccagaagucucggauagaa

SEQ ID NO: 1062546 - RNA, 19 nt, Homo sapiens
  misc_RNA (1)...(19): siRNA sense strand
gaagugcuccuaccucaug

SEQ ID NO: 1062547 - RNA, 19 nt, Homo sapiens
  misc_RNA (1)...(19): siRNA sense strand
gaacuucauaugaguggua

SEQ ID NO: 1062548 - RNA, 19 nt, Homo sapiens
  misc_RNA (1)...(19): siRNA sense strand
ggacaggaugccaauuuaa

SEQ ID NO: 1062549 - RNA, 19 nt, Homo sapiens
  misc_RNA (1)...(19): siRNA sense strand
gagccucaguggaaagaaa

SEQ ID NO: 1062550 - RNA, 19 nt, Homo sapiens
  misc_RNA (1)...(19): siRNA sense strand
ccucagcaauggagaauau

SEQ ID NO: 1062551 - RNA, 19 nt, Homo sapiens
  misc_RNA (1)...(19): siRNA sense strand
ucagugaguugaaacaaga

SEQ ID NO: 1062552 - RNA, 19 nt, Homo sapiens
  misc_RNA (1)...(19): siRNA sense strand
ccaagagaacuucauauga

SEQ ID NO: 1062553 - RNA, 19 nt, Homo sapiens
  misc_RNA (1)...(19): siRNA sense strand
gcugaucgaguaccaauuu

SEQ ID NO: 1062554 - RNA, 19 nt, Homo sapiens
  misc_RNA (1)...(19): siRNA sense strand
gaugaaacuguaacaauug

SEQ ID NO: 1062555 - RNA, 19 nt, Homo sapiens
  misc_RNA (1)...(19): siRNA sense strand
ggauguaguuuauaaugca

SEQ ID NO: 1062556 - RNA, 19 nt, Homo sapiens
  misc_RNA (1)...(19): siRNA sense strand
cgacaaggaauacuaaguu

SEQ ID NO: 1062557 - RNA, 19 nt, Homo sapiens
  misc_RNA (1)...(19): siRNA sense strand
gugcagagcugucuuuuga

SEQ ID NO: 1062558 - RNA, 19 nt, Homo sapiens
  misc_RNA (1)...(19): siRNA sense strand
gaagugcagagcugucuuu

SEQ ID NO: 1062559 - RNA, 19 nt, Homo sapiens
  misc_RNA (1)...(19): siRNA sense strand
gcaaaggauuauaccaaag

SEQ ID NO: 1062560 - RNA, 19 nt, Homo sapiens
  misc_RNA (1)...(19): siRNA sense strand
gcacaguucaagaaguaua

SEQ ID NO: 1062561 - RNA, 19 nt, Homo sapiens
  misc_RNA (1)...(19): siRNA sense strand
guuaacagcuauucaaacu

SEQ ID NO: 1062562 - RNA, 19 nt, Homo sapiens
  misc_RNA (1)...(19): siRNA sense strand
gacuauggcaggauuuaua

SEQ ID NO: 1062563 - RNA, 19 nt, Homo sapiens
  misc_RNA (1)...(19): siRNA sense strand
aguaucaccuacagaauaa

SEQ ID NO: 1062564 - RNA, 19 nt, Homo sapiens
  misc_RNA (1)...(19): siRNA sense strand
caaccaguucuguguaaua

SEQ ID NO: 1062565 - RNA, 19 nt, Homo sapiens
  misc_RNA (1)...(19): siRNA sense strand
uggauuaugugauguguga

SEQ ID NO: 1062566 - RNA, 19 nt, Homo sapiens
  misc_RNA (1)...(19): siRNA sense strand
aaacaggcguucuugacuu

SEQ ID NO: 1062567 - RNA, 19 nt, Homo sapiens
  misc_RNA (1)...(19): siRNA sense strand
ugaauaagcaucugaaucu

SEQ ID NO: 1062568 - RNA, 19 nt, Homo sapiens
  misc_RNA (1)...(19): siRNA sense strand
caaccgggcauuauauuau

SEQ ID NO: 1062569 - RNA, 19 nt, Homo sapiens
  misc_RNA (1)...(19): siRNA sense strand
aaacagucuuuccauuuga

SEQ ID NO: 1062570 - RNA, 19 nt, Homo sapiens
  misc_RNA (1)...(19): siRNA sense strand
ucacgugacucuucaugga

SEQ ID NO: 1062571 - RNA, 19 nt, Homo sapiens
  misc_RNA (1)...(19): siRNA sense strand
gcaaugagacgggaagaug

SEQ ID NO: 1062572 - RNA, 19 nt, Homo sapiens
  misc_RNA (1)...(19): siRNA sense strand
cgaagcuucuguaauguau

SEQ ID NO: 1062573 - RNA, 19 nt, Homo sapiens
  misc_RNA (1)...(19): siRNA sense strand
gggccuggauguaguuuau

SEQ ID NO: 1062574 - RNA, 19 nt, Homo sapiens
  misc_RNA (1)...(19): siRNA sense strand
ucagaagagugaaaucuca

SEQ ID NO: 1062575 - RNA, 19 nt, Homo sapiens
  misc_RNA (1)...(19): siRNA sense strand
ggagagaaauguuguucac

SEQ ID NO: 1062576 - RNA, 19 nt, Homo sapiens
  misc_RNA (1)...(19): siRNA sense strand
gcgguuaaauuuguuucua

SEQ ID NO: 1062577 - RNA, 19 nt, Homo sapiens
  misc_RNA (1)...(19): siRNA sense strand
aaacauuucuguacaucug

SEQ ID NO: 1062578 - RNA, 19 nt, Homo sapiens
  misc_RNA (1)...(19): siRNA sense strand
gggaagaugugugguuuua

SEQ ID NO: 1062579 - RNA, 19 nt, Homo sapiens
  misc_RNA (1)...(19): siRNA sense strand
gaugggagaggaauauuau

SEQ ID NO: 1062580 - RNA, 19 nt, Homo sapiens
  misc_RNA (1)...(19): siRNA sense strand
ccaggccuuuggagauuua

SEQ ID NO: 1062581 - RNA, 19 nt, Homo sapiens
  misc_RNA (1)...(19): siRNA sense strand
guagcaaccgggcauuaua

SEQ ID NO: 1062582 - RNA, 19 nt, Homo sapiens
  misc_RNA (1)...(19): siRNA sense strand
gcaagcacaaugaucauau

SEQ ID NO: 1062583 - RNA, 19 nt, Homo sapiens
  misc_RNA (1)...(19): siRNA sense strand
ugugauaucuuagcuguga

SEQ ID NO: 1062584 - RNA, 19 nt, Homo sapiens
  misc_RNA (1)...(19): siRNA sense strand
gaaugaaaguccugaucca

SEQ ID NO: 1062585 - RNA, 19 nt, Homo sapiens
  misc_RNA (1)...(19): siRNA sense strand
cgcaaaggauuauaccaaa

SEQ ID NO: 1062586 - RNA, 19 nt, Homo sapiens
  misc_RNA (1)...(19): siRNA sense strand
gccuggauguaguuuauaa

SEQ ID NO: 1062587 - RNA, 19 nt, Homo sapiens
  misc_RNA (1)...(19): siRNA sense strand
gucguuaccugucaaguau

SEQ ID NO: 1062588 - RNA, 19 nt, Homo sapiens
  misc_RNA (1)...(19): siRNA sense strand
cauuugauguugcgguuaa

SEQ ID NO: 1062589 - RNA, 19 nt, Homo sapiens
  misc_RNA (1)...(19): siRNA sense strand
gcucaccgcuggcuuaaaa

SEQ ID NO: 1062590 - RNA, 19 nt, Homo sapiens
  misc_RNA (1)...(19): siRNA sense strand
ugugucagcuuuaauaauc

SEQ ID NO: 1062591 - RNA, 19 nt, Homo sapiens
  misc_RNA (1)...(19): siRNA sense strand
uugcacaguucaagaagua

SEQ ID NO: 1062592 - RNA, 19 nt, Homo sapiens
  misc_RNA (1)...(19): siRNA sense strand
guuguucacucugagauaa

SEQ ID NO: 1062593 - RNA, 19 nt, Homo sapiens
  misc_RNA (1)...(19): siRNA sense strand
gagaaauguuguucacucu

SEQ ID NO: 1062594 - RNA, 19 nt, Homo sapiens
  misc_RNA (1)...(19): siRNA sense strand
aggcaaaguuuacaaggaa

SEQ ID NO: 1062595 - RNA, 19 nt, Homo sapiens
  misc_RNA (1)...(19): siRNA sense strand
ggagagagugcuagugaau

SEQ ID NO: 1062596 - RNA, 19 nt, Homo sapiens
  misc_RNA (1)...(19): siRNA sense strand
aguggacaauguuaucuua

SEQ ID NO: 1062597 - RNA, 19 nt, Homo sapiens
  misc_RNA (1)...(19): siRNA sense strand
guugaugacggaccucuua

SEQ ID NO: 1062598 - RNA, 19 nt, Homo sapiens
  misc_RNA (1)...(19): siRNA sense strand
aggacaggaugccaauuua

SEQ ID NO: 1062599 - RNA, 19 nt, Homo sapiens
  misc_RNA (1)...(19): siRNA sense strand
gaacccgacugugauaucu

SEQ ID NO: 1062600 - RNA, 19 nt, Homo sapiens
  misc_RNA (1)...(19): siRNA sense strand
gguggacucugcucacuuc

SEQ ID NO: 1062601 - RNA, 19 nt, Homo sapiens
  misc_RNA (1)...(19): siRNA sense strand
ucauaacucuucugagcaa

SEQ ID NO: 1062602 - RNA, 19 nt, Homo sapiens
  misc_RNA (1)...(19): siRNA sense strand
agagugaaaucucauaaag

SEQ ID NO: 1062603 - RNA, 19 nt, Homo sapiens
  misc_RNA (1)...(19): siRNA sense strand
cuuugaaguugcuggauua

SEQ ID NO: 1062604 - RNA, 19 nt, Homo sapiens
  misc_RNA (1)...(19): siRNA sense strand
ucaaguaucaccuacagaa

SEQ ID NO: 1062605 - RNA, 19 nt, Homo sapiens
  misc_RNA (1)...(19): siRNA sense strand
caucacaacugucaucacu

SEQ ID NO: 1062606 - RNA, 19 nt, Homo sapiens
  misc_RNA (1)...(19): siRNA sense strand
gaaaaggaccucagcaaug

SEQ ID NO: 1062607 - RNA, 19 nt, Homo sapiens
  misc_RNA (1)...(19): siRNA sense strand
ugauguuccuguucaguuu

SEQ ID NO: 1062608 - RNA, 19 nt, Homo sapiens
  misc_RNA (1)...(19): siRNA sense strand
gggacaagauugcuuccua

SEQ ID NO: 1062609 - RNA, 19 nt, Homo sapiens
  misc_RNA (1)...(19): siRNA sense strand
ucucugugcuguucuggua

SEQ ID NO: 1062610 - RNA, 19 nt, Homo sapiens
  misc_RNA (1)...(19): siRNA sense strand
cuccugagcucacccaaga

SEQ ID NO: 1062611 - RNA, 19 nt, Homo sapiens
  misc_RNA (1)...(19): siRNA sense strand
gaagucuugugaccuccuu

SEQ ID NO: 1062612 - RNA, 19 nt, Homo sapiens
  misc_RNA (1)...(19): siRNA sense strand
ucaugcaagucuucacuga

SEQ ID NO: 1062613 - RNA, 19 nt, Homo sapiens
  misc_RNA (1)...(19): siRNA sense strand
gcagaugacaccuguuugg

SEQ ID NO: 1062614 - RNA, 19 nt, Homo sapiens
  misc_RNA (1)...(19): siRNA sense strand
gagcagcccucgacuuccu

SEQ ID NO: 1062615 - RNA, 19 nt, Homo sapiens
  misc_RNA (1)...(19): siRNA sense strand
gcucuuugacuucgccuuu

SEQ ID NO: 1062616 - RNA, 19 nt, Homo sapiens
  misc_RNA (1)...(19): siRNA sense strand
uggcagaugacaccuguuu

SEQ ID NO: 1062617 - RNA, 19 nt, Homo sapiens
  misc_RNA (1)...(19): siRNA sense strand
cuucagaugcgcacucuug

SEQ ID NO: 1062618 - RNA, 19 nt, Homo sapiens
  misc_RNA (1)...(19): siRNA sense strand
agaagcuccuggacugguu

SEQ ID NO: 1062619 - RNA, 19 nt, Homo sapiens
  misc_RNA (1)...(19): siRNA sense strand
guucucccguguucaguuc

SEQ ID NO: 1062620 - RNA, 19 nt, Homo sapiens
  misc_RNA (1)...(19): siRNA sense strand
gaagcuccuggacugguuu

SEQ ID NO: 1062621 - RNA, 19 nt, Homo sapiens
  misc_RNA (1)...(19): siRNA sense strand
ucauggaucacguugaaga

SEQ ID NO: 1062622 - RNA, 19 nt, Homo sapiens
  misc_RNA (1)...(19): siRNA sense strand
gcacauccucuccguagac

SEQ ID NO: 1062623 - RNA, 19 nt, Homo sapiens
  misc_RNA (1)...(19): siRNA sense strand
acacacuccuggccuccaa

SEQ ID NO: 1062624 - RNA, 19 nt, Homo sapiens
  misc_RNA (1)...(19): siRNA sense strand
gggaggacaggcugacuuc

SEQ ID NO: 1062625 - RNA, 19 nt, Homo sapiens
  misc_RNA (1)...(19): siRNA sense strand
cgaggccgacugcuacuga

SEQ ID NO: 1062626 - RNA, 19 nt, Homo sapiens
  misc_RNA (1)...(19): siRNA sense strand
augcaagucuucacugagu

SEQ ID NO: 1062627 - RNA, 19 nt, Homo sapiens
  misc_RNA (1)...(19): siRNA sense strand
cuugugaccuccuucucuu

SEQ ID NO: 1062628 - RNA, 19 nt, Homo sapiens
  misc_RNA (1)...(19): siRNA sense strand
gcuccuggacugguuuaaa

SEQ ID NO: 1062629 - RNA, 19 nt, Homo sapiens
  misc_RNA (1)...(19): siRNA sense strand
gcgcacucuuggcuucaga

SEQ ID NO: 1062630 - RNA, 19 nt, Homo sapiens
  misc_RNA (1)...(19): siRNA sense strand
gcugucccaugugcugaaa

SEQ ID NO: 1062631 - RNA, 19 nt, Homo sapiens
  misc_RNA (1)...(19): siRNA sense strand
guuacuaccagggcucuuu

SEQ ID NO: 1062632 - RNA, 19 nt, Homo sapiens
  misc_RNA (1)...(19): siRNA sense strand
ugacaccuguuuggagaag

SEQ ID NO: 1062633 - RNA, 19 nt, Homo sapiens
  misc_RNA (1)...(19): siRNA sense strand
ccugucugcuggagagaga

SEQ ID NO: 1062634 - RNA, 19 nt, Homo sapiens
  misc_RNA (1)...(19): siRNA sense strand
gggcggucaugcaagucuu

SEQ ID NO: 1062635 - RNA, 19 nt, Homo sapiens
  misc_RNA (1)...(19): siRNA sense strand
gacaagauugcuuccuaca

SEQ ID NO: 1062636 - RNA, 19 nt, Homo sapiens
  misc_RNA (1)...(19): siRNA sense strand
uggagcugcugucccaugu

SEQ ID NO: 1062637 - RNA, 19 nt, Homo sapiens
  misc_RNA (1)...(19): siRNA sense strand
ggucacaugugccaauuua

SEQ ID NO: 1062638 - RNA, 19 nt, Homo sapiens
  misc_RNA (1)...(19): siRNA sense strand
gcaaagagaaugauacaga

SEQ ID NO: 1062639 - RNA, 19 nt, Homo sapiens
  misc_RNA (1)...(19): siRNA sense strand
caacaaaccgugauugaug

SEQ ID NO: 1062640 - RNA, 19 nt, Homo sapiens
  misc_RNA (1)...(19): siRNA sense strand
gaacacacucugcaacuau

SEQ ID NO: 1062641 - RNA, 19 nt, Homo sapiens
  misc_RNA (1)...(19): siRNA sense strand
caaagagaaugauacagau

SEQ ID NO: 1062642 - RNA, 19 nt, Homo sapiens
  misc_RNA (1)...(19): siRNA sense strand
gagcaaacccaaagucaug

SEQ ID NO: 1062643 - RNA, 19 nt, Homo sapiens
  misc_RNA (1)...(19): siRNA sense strand
aagagaaggcccauuguua

SEQ ID NO: 1062644 - RNA, 19 nt, Homo sapiens
  misc_RNA (1)...(19): siRNA sense strand
gagaaggcccauuguuaaa

SEQ ID NO: 1062645 - RNA, 19 nt, Homo sapiens
  misc_RNA (1)...(19): siRNA sense strand
ggacagaaagcagcaaaga

SEQ ID NO: 1062646 - RNA, 19 nt, Homo sapiens
  misc_RNA (1)...(19): siRNA sense strand
aagcugaaccuguugauaa

SEQ ID NO: 1062647 - RNA, 19 nt, Homo sapiens
  misc_RNA (1)...(19): siRNA sense strand
gaaaucaggaagcagcaaa

SEQ ID NO: 1062648 - RNA, 19 nt, Homo sapiens
  misc_RNA (1)...(19): siRNA sense strand
agagaaggcccauuguuaa

SEQ ID NO: 1062649 - RNA, 19 nt, Homo sapiens
  misc_RNA (1)...(19): siRNA sense strand
aagcacauauggacagaaa

SEQ ID NO: 1062650 - RNA, 19 nt, Homo sapiens
  misc_RNA (1)...(19): siRNA sense strand
gcaacuaugacccuucaaa

SEQ ID NO: 1062651 - RNA, 19 nt, Homo sapiens
  misc_RNA (1)...(19): siRNA sense strand
cagugaagcugaaccuguu

SEQ ID NO: 1062652 - RNA, 19 nt, Homo sapiens
  misc_RNA (1)...(19): siRNA sense strand
ugacaaggcuaccaagaac

SEQ ID NO: 1062653 - RNA, 19 nt, Homo sapiens
  misc_RNA (1)...(19): siRNA sense strand
gaagcugaaccuguugaua

SEQ ID NO: 1062654 - RNA, 19 nt, Homo sapiens
  misc_RNA (1)...(19): siRNA sense strand
gaaagugugcccugacuac

SEQ ID NO: 1062655 - RNA, 19 nt, Homo sapiens
  misc_RNA (1)...(19): siRNA sense strand
caagagaaggcccauuguu

SEQ ID NO: 1062656 - RNA, 19 nt, Homo sapiens
  misc_RNA (1)...(19): siRNA sense strand
cagcaaauccacacuaaag

SEQ ID NO: 1062657 - RNA, 19 nt, Homo sapiens
  misc_RNA (1)...(19): siRNA sense strand
gaacuccacagaccuucaa

SEQ ID NO: 1062658 - RNA, 19 nt, Homo sapiens
  misc_RNA (1)...(19): siRNA sense strand
agagaaugauacagauuug

SEQ ID NO: 1062659 - RNA, 19 nt, Homo sapiens
  misc_RNA (1)...(19): siRNA sense strand
gcaaauccacacuaaagca

SEQ ID NO: 1062660 - RNA, 19 nt, Homo sapiens
  misc_RNA (1)...(19): siRNA sense strand
gaauuugacuuggcacaac

SEQ ID NO: 1062661 - RNA, 19 nt, Homo sapiens
  misc_RNA (1)...(19): siRNA sense strand
gcaaacccaaagucaugua

SEQ ID NO: 1062662 - RNA, 19 nt, Homo sapiens
  misc_RNA (1)...(19): siRNA sense strand
gcacaacaaaccgugauug

SEQ ID NO: 1062663 - RNA, 19 nt, Homo sapiens
  misc_RNA (1)...(19): siRNA sense strand
gccaagagaaggcccauug

SEQ ID NO: 1062664 - RNA, 19 nt, Homo sapiens
  misc_RNA (1)...(19): siRNA sense strand
agaacacacucugcaacua

SEQ ID NO: 1062665 - RNA, 19 nt, Homo sapiens
  misc_RNA (1)...(19): siRNA sense strand
uaaagcacauauggacaga

SEQ ID NO: 1062666 - RNA, 19 nt, Homo sapiens
  misc_RNA (1)...(19): siRNA sense strand
guugauaacugggaaaauu

SEQ ID NO: 1062667 - RNA, 19 nt, Homo sapiens
  misc_RNA (1)...(19): siRNA sense strand
gaaagcagcaaagacuugu

SEQ ID NO: 1062668 - RNA, 19 nt, Homo sapiens
  misc_RNA (1)...(19): siRNA sense strand
ugccaaagauuccaagucu

SEQ ID NO: 1062669 - RNA, 19 nt, Homo sapiens
  misc_RNA (1)...(19): siRNA sense strand
gcagcaaauccacacuaaa

SEQ ID NO: 1062670 - RNA, 19 nt, Homo sapiens
  misc_RNA (1)...(19): siRNA sense strand
gauuauaaacugguacaga

SEQ ID NO: 1062671 - RNA, 19 nt, Homo sapiens
  misc_RNA (1)...(19): siRNA sense strand
gauuuggaccugagauaug

SEQ ID NO: 1062672 - RNA, 19 nt, Homo sapiens
  misc_RNA (1)...(19): siRNA sense strand
gcacauauggacagaaagc

SEQ ID NO: 1062673 - RNA, 19 nt, Homo sapiens
  misc_RNA (1)...(19): siRNA sense strand
cacaacaaaccgugauuga

SEQ ID NO: 1062674 - RNA, 19 nt, Homo sapiens
  misc_RNA (1)...(19): siRNA sense strand
cagauuuggaccugagaua

SEQ ID NO: 1062675 - RNA, 19 nt, Homo sapiens
  misc_RNA (1)...(19): siRNA sense strand
cgugauugaugccaaagau

SEQ ID NO: 1062676 - RNA, 19 nt, Homo sapiens
  misc_RNA (1)...(19): siRNA sense strand
gaggaacuccacagaccuu

SEQ ID NO: 1062677 - RNA, 19 nt, Homo sapiens
  misc_RNA (1)...(19): siRNA sense strand
gcagcccaccgucuacuug

SEQ ID NO: 1062678 - RNA, 19 nt, Homo sapiens
  misc_RNA (1)...(19): siRNA sense strand
agaaagcagcaaagacuug

SEQ ID NO: 1062679 - RNA, 19 nt, Homo sapiens
  misc_RNA (1)...(19): siRNA sense strand
cagaaagugugcccugacu

SEQ ID NO: 1062680 - RNA, 19 nt, Homo sapiens
  misc_RNA (1)...(19): siRNA sense strand
ggaauuugacuuggcacaa

SEQ ID NO: 1062681 - RNA, 19 nt, Homo sapiens
  misc_RNA (1)...(19): siRNA sense strand
agcagcaaauccacacuaa

SEQ ID NO: 1062682 - RNA, 19 nt, Homo sapiens
  misc_RNA (1)...(19): siRNA sense strand
caagggaauguaucuguca

SEQ ID NO: 1062683 - RNA, 19 nt, Homo sapiens
  misc_RNA (1)...(19): siRNA sense strand
aacgaacgguggaaaguca

SEQ ID NO: 1062684 - RNA, 19 nt, Homo sapiens
  misc_RNA (1)...(19): siRNA sense strand
ggagcaaacccaaagucau

SEQ ID NO: 1062685 - RNA, 19 nt, Homo sapiens
  misc_RNA (1)...(19): siRNA sense strand
ccaagaacacacucugcaa

SEQ ID NO: 1062686 - RNA, 19 nt, Homo sapiens
  misc_RNA (1)...(19): siRNA sense strand
acagaaagcagcaaagacu

SEQ ID NO: 1062687 - RNA, 19 nt, Homo sapiens
  misc_RNA (1)...(19): siRNA sense strand
ugauugaugccaaagauuc

SEQ ID NO: 1062688 - RNA, 19 nt, Homo sapiens
  misc_RNA (1)...(19): siRNA sense strand
agaaugauacagauuugga

SEQ ID NO: 1062689 - RNA, 19 nt, Homo sapiens
  misc_RNA (1)...(19): siRNA sense strand
cagugacacaccuuacuuu

SEQ ID NO: 1062690 - RNA, 19 nt, Homo sapiens
  misc_RNA (1)...(19): siRNA sense strand
caacuaccacagugacaca

SEQ ID NO: 1062691 - RNA, 19 nt, Homo sapiens
  misc_RNA (1)...(19): siRNA sense strand
cugcaacuaugacccuuca

SEQ ID NO: 1062692 - RNA, 19 nt, Homo sapiens
  misc_RNA (1)...(19): siRNA sense strand
aaucguggaauuugacuug

SEQ ID NO: 1062693 - RNA, 19 nt, Homo sapiens
  misc_RNA (1)...(19): siRNA sense strand
ggaauguaucugucagcuu

SEQ ID NO: 1062694 - RNA, 19 nt, Homo sapiens
  misc_RNA (1)...(19): siRNA sense strand
ucaaaacagugaagcugaa

SEQ ID NO: 1062695 - RNA, 19 nt, Homo sapiens
  misc_RNA (1)...(19): siRNA sense strand
ucacaugugccaauuuaac

SEQ ID NO: 1062696 - RNA, 19 nt, Homo sapiens
  misc_RNA (1)...(19): siRNA sense strand
uauccuggcucugcuccaa

SEQ ID NO: 1062697 - RNA, 19 nt, Homo sapiens
  misc_RNA (1)...(19): siRNA sense strand
caacuggucaagggaaugu

SEQ ID NO: 1062698 - RNA, 19 nt, Homo sapiens
  misc_RNA (1)...(19): siRNA sense strand
gggacuggcugaggaacuc

SEQ ID NO: 1062699 - RNA, 19 nt, Homo sapiens
  misc_RNA (1)...(19): siRNA sense strand
gaacgguggaaagucagaa

SEQ ID NO: 1062700 - RNA, 19 nt, Homo sapiens
  misc_RNA (1)...(19): siRNA sense strand
aaacugguacagaaagugu

SEQ ID NO: 1062701 - RNA, 19 nt, Homo sapiens
  misc_RNA (1)...(19): siRNA sense strand
caaacccaaagucauguau

SEQ ID NO: 1062702 - RNA, 19 nt, Homo sapiens
  misc_RNA (1)...(19): siRNA sense strand
caacuaugacccuucaaaa

SEQ ID NO: 1062703 - RNA, 19 nt, Homo sapiens
  misc_RNA (1)...(19): siRNA sense strand
acacuaaagcacauaugga

SEQ ID NO: 1062704 - RNA, 19 nt, Homo sapiens
  misc_RNA (1)...(19): siRNA sense strand
auuuggaccugagauauga

SEQ ID NO: 1062705 - RNA, 19 nt, Homo sapiens
  misc_RNA (1)...(19): siRNA sense strand
ugacuacaacuaccacagu

SEQ ID NO: 1062706 - RNA, 19 nt, Homo sapiens
  misc_RNA (1)...(19): siRNA sense strand
cagaaagcagcaaagacuu

SEQ ID NO: 1062707 - RNA, 19 nt, Homo sapiens
  misc_RNA (1)...(19): siRNA sense strand
ugggacauuuaguguuuau

SEQ ID NO: 1062708 - RNA, 19 nt, Homo sapiens
  misc_RNA (1)...(19): siRNA sense strand
gaaggcccauuguuaaaac

SEQ ID NO: 1062709 - RNA, 19 nt, Homo sapiens
  misc_RNA (1)...(19): siRNA sense strand
ccaagagaaggcccauugu

SEQ ID NO: 1062710 - RNA, 19 nt, Homo sapiens
  misc_RNA (1)...(19): siRNA sense strand
auaaacugguacagaaagu

SEQ ID NO: 1062711 - RNA, 19 nt, Homo sapiens
  misc_RNA (1)...(19): siRNA sense strand
gcucugcuccaagcccuuu

SEQ ID NO: 1062712 - RNA, 19 nt, Homo sapiens
  misc_RNA (1)...(19): siRNA sense strand
ggaacuccacagaccuuca

SEQ ID NO: 1062713 - RNA, 19 nt, Homo sapiens
  misc_RNA (1)...(19): siRNA sense strand
gucaagggaauguaucugu

SEQ ID NO: 1062714 - RNA, 19 nt, Homo sapiens
  misc_RNA (1)...(19): siRNA sense strand
cugaaccuguugauaacug

SEQ ID NO: 1062715 - RNA, 19 nt, Homo sapiens
  misc_RNA (1)...(19): siRNA sense strand
ucaggaagcagcaaaucca

SEQ ID NO: 1062716 - RNA, 19 nt, Homo sapiens
  misc_RNA (1)...(19): siRNA sense strand
gaucauggcaaugggacau

SEQ ID NO: 1062717 - RNA, 19 nt, Homo sapiens
  misc_RNA (1)...(19): siRNA sense strand
aagcagcaaauccacacua

SEQ ID NO: 1062718 - RNA, 19 nt, Homo sapiens
  misc_RNA (1)...(19): siRNA sense strand
aacacacucugcaacuaug

SEQ ID NO: 1062719 - RNA, 19 nt, Homo sapiens
  misc_RNA (1)...(19): siRNA sense strand
uugacaaggcuaccaagaa

SEQ ID NO: 1062720 - RNA, 19 nt, Homo sapiens
  misc_RNA (1)...(19): siRNA sense strand
aaaugaaacuggaguacua

SEQ ID NO: 1062721 - RNA, 19 nt, Homo sapiens
  misc_RNA (1)...(19): siRNA sense strand
aaacuggaguacuaacgua

SEQ ID NO: 1062722 - RNA, 19 nt, Homo sapiens
  misc_RNA (1)...(19): siRNA sense strand
gcaccucaguuacauaaaa

SEQ ID NO: 1062723 - RNA, 19 nt, Homo sapiens
  misc_RNA (1)...(19): siRNA sense strand
gcugagaagugcccaguac

SEQ ID NO: 1062724 - RNA, 19 nt, Homo sapiens
  misc_RNA (1)...(19): siRNA sense strand
ggacagacagggccuccuu

SEQ ID NO: 1062725 - RNA, 19 nt, Homo sapiens
  misc_RNA (1)...(19): siRNA sense strand
gaaaguccaauccugagau

SEQ ID NO: 1062726 - RNA, 19 nt, Homo sapiens
  misc_RNA (1)...(19): siRNA sense strand
gcaggcagcaucccuaugg

SEQ ID NO: 1062727 - RNA, 19 nt, Homo sapiens
  misc_RNA (1)...(19): siRNA sense strand
ccaggaaggcugagaagug

SEQ ID NO: 1062728 - RNA, 19 nt, Homo sapiens
  misc_RNA (1)...(19): siRNA sense strand
acguacaguuuaaagguua

SEQ ID NO: 1062729 - RNA, 19 nt, Homo sapiens
  misc_RNA (1)...(19): siRNA sense strand
uaugggagcugagaaaguc

SEQ ID NO: 1062730 - RNA, 19 nt, Homo sapiens
  misc_RNA (1)...(19): siRNA sense strand
agacagggccuccuuacug

SEQ ID NO: 1062731 - RNA, 19 nt, Homo sapiens
  misc_RNA (1)...(19): siRNA sense strand
uaacguacaguuuaaaggu

SEQ ID NO: 1062732 - RNA, 19 nt, Homo sapiens
  misc_RNA (1)...(19): siRNA sense strand
ggaugcaccucaguuacau

SEQ ID NO: 1062733 - RNA, 19 nt, Homo sapiens
  misc_RNA (1)...(19): siRNA sense strand
gcugggcccugacaacagu

SEQ ID NO: 1062734 - RNA, 19 nt, Homo sapiens
  misc_RNA (1)...(19): siRNA sense strand
gaaacuggaguacuaacgu

SEQ ID NO: 1062735 - RNA, 19 nt, Homo sapiens
  misc_RNA (1)...(19): siRNA sense strand
gacagacagggccuccuua

SEQ ID NO: 1062736 - RNA, 19 nt, Homo sapiens
  misc_RNA (1)...(19): siRNA sense strand
aaaguccaauccugagaug

SEQ ID NO: 1062737 - RNA, 19 nt, Homo sapiens
  misc_RNA (1)...(19): siRNA sense strand
gagcugagaaaguccaauc

SEQ ID NO: 1062738 - RNA, 19 nt, Homo sapiens
  misc_RNA (1)...(19): siRNA sense strand
gagccugcauagggaagaa

SEQ ID NO: 1062739 - RNA, 19 nt, Homo sapiens
  misc_RNA (1)...(19): siRNA sense strand
ugacaacagucuccccaaa

SEQ ID NO: 1062740 - RNA, 19 nt, Homo sapiens
  misc_RNA (1)...(19): siRNA sense strand
gaugcaccucaguuacaua

SEQ ID NO: 1062741 - RNA, 19 nt, Homo sapiens
  misc_RNA (1)...(19): siRNA sense strand
ggaaggaccagccccauuc

SEQ ID NO: 1062742 - RNA, 19 nt, Homo sapiens
  misc_RNA (1)...(19): siRNA sense strand
aacguacaguuuaaagguu

SEQ ID NO: 1062743 - RNA, 19 nt, Homo sapiens
  misc_RNA (1)...(19): siRNA sense strand
gaaaugacagcuacacuuu

SEQ ID NO: 1062744 - RNA, 19 nt, Homo sapiens
  misc_RNA (1)...(19): siRNA sense strand
ccaacaagguggacucauu

SEQ ID NO: 1062745 - RNA, 19 nt, Homo sapiens
  misc_RNA (1)...(19): siRNA sense strand
ucaagaagaucaaagaagu

SEQ ID NO: 1062746 - RNA, 19 nt, Homo sapiens
  misc_RNA (1)...(19): siRNA sense strand
gaagaaaguaccagauuca

SEQ ID NO: 1062747 - RNA, 19 nt, Homo sapiens
  misc_RNA (1)...(19): siRNA sense strand
ugaagaaaguaccagauuc

SEQ ID NO: 1062748 - RNA, 19 nt, Homo sapiens
  misc_RNA (1)...(19): siRNA sense strand
caacaagguggacucauug

SEQ ID NO: 1062749 - RNA, 19 nt, Homo sapiens
  misc_RNA (1)...(19): siRNA sense strand
uagggacuguguaccuuua

SEQ ID NO: 1062750 - RNA, 19 nt, Homo sapiens
  misc_RNA (1)...(19): siRNA sense strand
ugaucgaccugccugcuaa

SEQ ID NO: 1062751 - RNA, 19 nt, Homo sapiens
  misc_RNA (1)...(19): siRNA sense strand
agaagaaaguguuggucaa

SEQ ID NO: 1062752 - RNA, 19 nt, Homo sapiens
  misc_RNA (1)...(19): siRNA sense strand
gaaugcugcuuggaagaga

SEQ ID NO: 1062753 - RNA, 19 nt, Homo sapiens
  misc_RNA (1)...(19): siRNA sense strand
gugaagaaaguaccagauu

SEQ ID NO: 1062754 - RNA, 19 nt, Homo sapiens
  misc_RNA (1)...(19): siRNA sense strand
gaagaaaguguuggucaag

SEQ ID NO: 1062755 - RNA, 19 nt, Homo sapiens
  misc_RNA (1)...(19): siRNA sense strand
gggacuguguaccuuuauu

SEQ ID NO: 1062756 - RNA, 19 nt, Homo sapiens
  misc_RNA (1)...(19): siRNA sense strand
ggacuguguaccuuuauuc

SEQ ID NO: 1062757 - RNA, 19 nt, Homo sapiens
  misc_RNA (1)...(19): siRNA sense strand
cacaagauccuacccaaca

SEQ ID NO: 1062758 - RNA, 19 nt, Homo sapiens
  misc_RNA (1)...(19): siRNA sense strand
gauaggcagaucaagaaga

SEQ ID NO: 1062759 - RNA, 19 nt, Homo sapiens
  misc_RNA (1)...(19): siRNA sense strand
cauagggacuguguaccuu

SEQ ID NO: 1062760 - RNA, 19 nt, Homo sapiens
  misc_RNA (1)...(19): siRNA sense strand
cuguguaccuuuauucaug

SEQ ID NO: 1062761 - RNA, 19 nt, Homo sapiens
  misc_RNA (1)...(19): siRNA sense strand
acaagauccuacccaacaa

SEQ ID NO: 1062762 - RNA, 19 nt, Homo sapiens
  misc_RNA (1)...(19): siRNA sense strand
auaggcagaucaagaagau

SEQ ID NO: 1062763 - RNA, 19 nt, Homo sapiens
  misc_RNA (1)...(19): siRNA sense strand
gcuuaugaaaugauuggua

SEQ ID NO: 1062764 - RNA, 19 nt, Homo sapiens
  misc_RNA (1)...(19): siRNA sense strand
ucaaagcacugggcauugc

SEQ ID NO: 1062765 - RNA, 19 nt, Homo sapiens
  misc_RNA (1)...(19): siRNA sense strand
agaaaugacagcuacacuu

SEQ ID NO: 1062766 - RNA, 19 nt, Homo sapiens
  misc_RNA (1)...(19): siRNA sense strand
uggauaggcagaucaagaa

SEQ ID NO: 1062767 - RNA, 19 nt, Homo sapiens
  misc_RNA (1)...(19): siRNA sense strand
gaugauggugaagaaagua

SEQ ID NO: 1062768 - RNA, 19 nt, Homo sapiens
  misc_RNA (1)...(19): siRNA sense strand
gcuacacuuugcacaagau

SEQ ID NO: 1062769 - RNA, 19 nt, Homo sapiens
  misc_RNA (1)...(19): siRNA sense strand
cagcuacacuuugcacaag

SEQ ID NO: 1062770 - RNA, 19 nt, Homo sapiens
  misc_RNA (1)...(19): siRNA sense strand
agaaaguguuggucaaggu

SEQ ID NO: 1062771 - RNA, 19 nt, Homo sapiens
  misc_RNA (1)...(19): siRNA sense strand
gcaucucaaggacaaguuu

SEQ ID NO: 1062772 - RNA, 19 nt, Homo sapiens
  misc_RNA (1)...(19): siRNA sense strand
caagaagaucaaagaagug

SEQ ID NO: 1062773 - RNA, 19 nt, Homo sapiens
  misc_RNA (1)...(19): siRNA sense strand
ccugggcucuggcucauca

SEQ ID NO: 1062774 - RNA, 19 nt, Homo sapiens
  misc_RNA (1)...(19): siRNA sense strand
guaagaagaaaguguuggu

SEQ ID NO: 1062775 - RNA, 19 nt, Homo sapiens
  misc_RNA (1)...(19): siRNA sense strand
ucaaggugcaucucaagga

SEQ ID NO: 1062776 - RNA, 19 nt, Homo sapiens
  misc_RNA (1)...(19): siRNA sense strand
ugaugauggugaagaaagu

SEQ ID NO: 1062777 - RNA, 19 nt, Homo sapiens
  misc_RNA (1)...(19): siRNA sense strand
aaugacagcuacacuuugc

SEQ ID NO: 1062778 - RNA, 19 nt, Homo sapiens
  misc_RNA (1)...(19): siRNA sense strand
uaccagauucagcuuauga

SEQ ID NO: 1062779 - RNA, 19 nt, Homo sapiens
  misc_RNA (1)...(19): siRNA sense strand
guaccagauucagcuuaug

SEQ ID NO: 1062780 - RNA, 19 nt, Homo sapiens
  misc_RNA (1)...(19): siRNA sense strand
aagaagaucaaagaaguga

SEQ ID NO: 1062781 - RNA, 19 nt, Homo sapiens
  misc_RNA (1)...(19): siRNA sense strand
aguaccagauucagcuuau

SEQ ID NO: 1062782 - RNA, 19 nt, Homo sapiens
  misc_RNA (1)...(19): siRNA sense strand
caucauagggacuguguac

SEQ ID NO: 1062783 - RNA, 19 nt, Homo sapiens
  misc_RNA (1)...(19): siRNA sense strand
cacugaugauggugaagaa

SEQ ID NO: 1062784 - RNA, 19 nt, Homo sapiens
  misc_RNA (1)...(19): siRNA sense strand
ggaaugcugcuuggaagag

SEQ ID NO: 1062785 - RNA, 19 nt, Homo sapiens
  misc_RNA (1)...(19): siRNA sense strand
cuucaaagcacugggcauu

SEQ ID NO: 1062786 - RNA, 19 nt, Homo sapiens
  misc_RNA (1)...(19): siRNA sense strand
gggaaugcugcuuggaaga

SEQ ID NO: 1062787 - RNA, 19 nt, Homo sapiens
  misc_RNA (1)...(19): siRNA sense strand
gugaucgaccugccugcua

SEQ ID NO: 1062788 - RNA, 19 nt, Homo sapiens
  misc_RNA (1)...(19): siRNA sense strand
ggucaaggugcaucucaag

SEQ ID NO: 1062789 - RNA, 19 nt, Homo sapiens
  misc_RNA (1)...(19): siRNA sense strand
aaaugacagcuacacuuug

SEQ ID NO: 1062790 - RNA, 19 nt, Homo sapiens
  misc_RNA (1)...(19): siRNA sense strand
uguguaccuuuauucaugu

SEQ ID NO: 1062791 - RNA, 19 nt, Homo sapiens
  misc_RNA (1)...(19): siRNA sense strand
cuaagcaucccgagcucuu

SEQ ID NO: 1062792 - RNA, 19 nt, Homo sapiens
  misc_RNA (1)...(19): siRNA sense strand
gagcagaucugaugaugaa

SEQ ID NO: 1062793 - RNA, 19 nt, Homo sapiens
  misc_RNA (1)...(19): siRNA sense strand
guacagugcugacguggaa

SEQ ID NO: 1062794 - RNA, 19 nt, Homo sapiens
  misc_RNA (1)...(19): siRNA sense strand
ccacugcccucuuuacugu

SEQ ID NO: 1062795 - RNA, 19 nt, Homo sapiens
  misc_RNA (1)...(19): siRNA sense strand
gagcacguguggagugaga

SEQ ID NO: 1062796 - RNA, 19 nt, Homo sapiens
  misc_RNA (1)...(19): siRNA sense strand
agaagacgcuccacgaagu

SEQ ID NO: 1062797 - RNA, 19 nt, Homo sapiens
  misc_RNA (1)...(19): siRNA sense strand
gugcugacguggaagaaga

SEQ ID NO: 1062798 - RNA, 19 nt, Homo sapiens
  misc_RNA (1)...(19): siRNA sense strand
caagaagacgcuccacgaa

SEQ ID NO: 1062799 - RNA, 19 nt, Homo sapiens
  misc_RNA (1)...(19): siRNA sense strand
acgaugcguuugaagagua

SEQ ID NO: 1062800 - RNA, 19 nt, Homo sapiens
  misc_RNA (1)...(19): siRNA sense strand
gccacccacugcccucuuu

SEQ ID NO: 1062801 - RNA, 19 nt, Homo sapiens
  misc_RNA (1)...(19): siRNA sense strand
gcagaucugaugaugaaca

SEQ ID NO: 1062802 - RNA, 19 nt, Homo sapiens
  misc_RNA (1)...(19): siRNA sense strand
ggacugccugccuuucuug

SEQ ID NO: 1062803 - RNA, 19 nt, Homo sapiens
  misc_RNA (1)...(19): siRNA sense strand
cagaugacgaugcguuuga

SEQ ID NO: 1062804 - RNA, 19 nt, Homo sapiens
  misc_RNA (1)...(19): siRNA sense strand
uguaggagcagaucugaug

SEQ ID NO: 1062805 - RNA, 19 nt, Homo sapiens
  misc_RNA (1)...(19): siRNA sense strand
ggagcagaucugaugauga

SEQ ID NO: 1062806 - RNA, 19 nt, Homo sapiens
  misc_RNA (1)...(19): siRNA sense strand
gugagcacguguggaguga

SEQ ID NO: 1062807 - RNA, 19 nt, Homo sapiens
  misc_RNA (1)...(19): siRNA sense strand
gaagacgcuccacgaaguc

SEQ ID NO: 1062808 - RNA, 19 nt, Homo sapiens
  misc_RNA (1)...(19): siRNA sense strand
gcagaugacgaugcguuug

SEQ ID NO: 1062809 - RNA, 19 nt, Homo sapiens
  misc_RNA (1)...(19): siRNA sense strand
gcagcuagcacaggauuac

SEQ ID NO: 1062810 - RNA, 19 nt, Homo sapiens
  misc_RNA (1)...(19): siRNA sense strand
gacgaugcguuugaagagu

SEQ ID NO: 1062811 - RNA, 19 nt, Homo sapiens
  misc_RNA (1)...(19): siRNA sense strand
gcgaggacugccugccuuu

SEQ ID NO: 1062812 - RNA, 19 nt, Homo sapiens
  misc_RNA (1)...(19): siRNA sense strand
agaugacgaugcguuugaa

SEQ ID NO: 1062813 - RNA, 19 nt, Homo sapiens
  misc_RNA (1)...(19): siRNA sense strand
guaggagcagaucugauga

SEQ ID NO: 1062814 - RNA, 19 nt, Homo sapiens
  misc_RNA (1)...(19): siRNA sense strand
gaggacugccugccuuucu

SEQ ID NO: 1062815 - RNA, 19 nt, Homo sapiens
  misc_RNA (1)...(19): siRNA sense strand
ccacccacugcccucuuua

SEQ ID NO: 1062816 - RNA, 19 nt, Homo sapiens
  misc_RNA (1)...(19): siRNA sense strand
aggagcagaucugaugaug

SEQ ID NO: 1062817 - RNA, 19 nt, Homo sapiens
  misc_RNA (1)...(19): siRNA sense strand
ugacgaugcguuugaagag

SEQ ID NO: 1062818 - RNA, 19 nt, Homo sapiens
  misc_RNA (1)...(19): siRNA sense strand
gaacaaagagccguuacga

SEQ ID NO: 1062819 - RNA, 19 nt, Homo sapiens
  misc_RNA (1)...(19): siRNA sense strand
caaagagccguuacgaaca

SEQ ID NO: 1062820 - RNA, 19 nt, Homo sapiens
  misc_RNA (1)...(19): siRNA sense strand
acaaggagaagccagaugu

SEQ ID NO: 1062821 - RNA, 19 nt, Homo sapiens
  misc_RNA (1)...(19): siRNA sense strand
aaagagccguuacgaacac

SEQ ID NO: 1062822 - RNA, 19 nt, Homo sapiens
  misc_RNA (1)...(19): siRNA sense strand
ggacaaggagaagccagau

SEQ ID NO: 1062823 - RNA, 19 nt, Homo sapiens
  misc_RNA (1)...(19): siRNA sense strand
ccagaugugcugcuucuac

SEQ ID NO: 1062824 - RNA, 19 nt, Homo sapiens
  misc_RNA (1)...(19): siRNA sense strand
gaacacaagccuccuguaa

SEQ ID NO: 1062825 - RNA, 19 nt, Homo sapiens
  misc_RNA (1)...(19): siRNA sense strand
gaaauacagugagaaaugu

SEQ ID NO: 1062826 - RNA, 19 nt, Homo sapiens
  misc_RNA (1)...(19): siRNA sense strand
uggcaagccugcagaauuu

SEQ ID NO: 1062827 - RNA, 19 nt, Homo sapiens
  misc_RNA (1)...(19): siRNA sense strand
gaacucugaugaagaagug

SEQ ID NO: 1062828 - RNA, 19 nt, Homo sapiens
  misc_RNA (1)...(19): siRNA sense strand
ugacacuacuccagauaua

SEQ ID NO: 1062829 - RNA, 19 nt, Homo sapiens
  misc_RNA (1)...(19): siRNA sense strand
acacaagccuccuguaaau

SEQ ID NO: 1062830 - RNA, 19 nt, Homo sapiens
  misc_RNA (1)...(19): siRNA sense strand
ggagaaauacagugagaaa

SEQ ID NO: 1062831 - RNA, 19 nt, Homo sapiens
  misc_RNA (1)...(19): siRNA sense strand
cuucuuaccugcagaguuu

SEQ ID NO: 1062832 - RNA, 19 nt, Homo sapiens
  misc_RNA (1)...(19): siRNA sense strand
caagcugccuggagccuuu

SEQ ID NO: 1062833 - RNA, 19 nt, Homo sapiens
  misc_RNA (1)...(19): siRNA sense strand
cagaagggguuaaaagaua

SEQ ID NO: 1062834 - RNA, 19 nt, Homo sapiens
  misc_RNA (1)...(19): siRNA sense strand
gacagaaagugaacacaag

SEQ ID NO: 1062835 - RNA, 19 nt, Homo sapiens
  misc_RNA (1)...(19): siRNA sense strand
gaguuucucuaucgcauug

SEQ ID NO: 1062836 - RNA, 19 nt, Homo sapiens
  misc_RNA (1)...(19): siRNA sense strand
gaagagcuugcuggaguua

SEQ ID NO: 1062837 - RNA, 19 nt, Homo sapiens
  misc_RNA (1)...(19): siRNA sense strand
guaguugauugcccugauu

SEQ ID NO: 1062838 - RNA, 19 nt, Homo sapiens
  misc_RNA (1)...(19): siRNA sense strand
cuugaacucugaugaagaa

SEQ ID NO: 1062839 - RNA, 19 nt, Homo sapiens
  misc_RNA (1)...(19): siRNA sense strand
aaagagacgcauucaauug

SEQ ID NO: 1062840 - RNA, 19 nt, Homo sapiens
  misc_RNA (1)...(19): siRNA sense strand
gaagguggacacuaccauu

SEQ ID NO: 1062841 - RNA, 19 nt, Homo sapiens
  misc_RNA (1)...(19): siRNA sense strand
aaacuagaauugcagaagu

SEQ ID NO: 1062842 - RNA, 19 nt, Homo sapiens
  misc_RNA (1)...(19): siRNA sense strand
agugagaaaugucaugauu

SEQ ID NO: 1062843 - RNA, 19 nt, Homo sapiens
  misc_RNA (1)...(19): siRNA sense strand
gaggugugccuuacuuauu

SEQ ID NO: 1062844 - RNA, 19 nt, Homo sapiens
  misc_RNA (1)...(19): siRNA sense strand
gagggugccuacuggagaa

SEQ ID NO: 1062845 - RNA, 19 nt, Homo sapiens
  misc_RNA (1)...(19): siRNA sense strand
agaaauacagugagaaaug

SEQ ID NO: 1062846 - RNA, 19 nt, Homo sapiens
  misc_RNA (1)...(19): siRNA sense strand
ccaggucucuguaguugau

SEQ ID NO: 1062847 - RNA, 19 nt, Homo sapiens
  misc_RNA (1)...(19): siRNA sense strand
gacuggagcacacucauuu

SEQ ID NO: 1062848 - RNA, 19 nt, Homo sapiens
  misc_RNA (1)...(19): siRNA sense strand
ccuggagccuuuauucuug

SEQ ID NO: 1062849 - RNA, 19 nt, Homo sapiens
  misc_RNA (1)...(19): siRNA sense strand
ggugccuacuggagaaaua

SEQ ID NO: 1062850 - RNA, 19 nt, Homo sapiens
  misc_RNA (1)...(19): siRNA sense strand
cggguucaauucugaguuu

SEQ ID NO: 1062851 - RNA, 19 nt, Homo sapiens
  misc_RNA (1)...(19): siRNA sense strand
gcccugauuugacuaagga

SEQ ID NO: 1062852 - RNA, 19 nt, Homo sapiens
  misc_RNA (1)...(19): siRNA sense strand
gguggacacuaccauuaug

SEQ ID NO: 1062853 - RNA, 19 nt, Homo sapiens
  misc_RNA (1)...(19): siRNA sense strand
caaaagagacgcauucaau

SEQ ID NO: 1062854 - RNA, 19 nt, Homo sapiens
  misc_RNA (1)...(19): siRNA sense strand
guucaauucugaguuuaug

SEQ ID NO: 1062855 - RNA, 19 nt, Homo sapiens
  misc_RNA (1)...(19): siRNA sense strand
guccaggucucuguaguug

SEQ ID NO: 1062856 - RNA, 19 nt, Homo sapiens
  misc_RNA (1)...(19): siRNA sense strand
ggaggugugccuuacuuau

SEQ ID NO: 1062857 - RNA, 19 nt, Homo sapiens
  misc_RNA (1)...(19): siRNA sense strand
ugaagagcuugcuggaguu

SEQ ID NO: 1062858 - RNA, 19 nt, Homo sapiens
  misc_RNA (1)...(19): siRNA sense strand
aagauaacuuugcugaugu

SEQ ID NO: 1062859 - RNA, 19 nt, Homo sapiens
  misc_RNA (1)...(19): siRNA sense strand
uggagaagguggacacuac

SEQ ID NO: 1062860 - RNA, 19 nt, Homo sapiens
  misc_RNA (1)...(19): siRNA sense strand
ggguucaauucugaguuua

SEQ ID NO: 1062861 - RNA, 19 nt, Homo sapiens
  misc_RNA (1)...(19): siRNA sense strand
aagguggacacuaccauua

SEQ ID NO: 1062862 - RNA, 19 nt, Homo sapiens
  misc_RNA (1)...(19): siRNA sense strand
aggugugccuuacuuauug

SEQ ID NO: 1062863 - RNA, 19 nt, Homo sapiens
  misc_RNA (1)...(19): siRNA sense strand
ggacacuaccauuaugaca

SEQ ID NO: 1062864 - RNA, 19 nt, Homo sapiens
  misc_RNA (1)...(19): siRNA sense strand
agacagaaagugaacacaa

SEQ ID NO: 1062865 - RNA, 19 nt, Homo sapiens
  misc_RNA (1)...(19): siRNA sense strand
cuuauugccucuuguaaac

SEQ ID NO: 1062866 - RNA, 19 nt, Homo sapiens
  misc_RNA (1)...(19): siRNA sense strand
gaagaagugaauaaauggu

SEQ ID NO: 1062867 - RNA, 19 nt, Homo sapiens
  misc_RNA (1)...(19): siRNA sense strand
ugugaacccugcagaugga

SEQ ID NO: 1062868 - RNA, 19 nt, Homo sapiens
  misc_RNA (1)...(19): siRNA sense strand
ccaguuauucagacagaaa

SEQ ID NO: 1062869 - RNA, 19 nt, Homo sapiens
  misc_RNA (1)...(19): siRNA sense strand
agagcuugcuggaguuaug

SEQ ID NO: 1062870 - RNA, 19 nt, Homo sapiens
  misc_RNA (1)...(19): siRNA sense strand
gaguuuaugccaguuauuc

SEQ ID NO: 1062871 - RNA, 19 nt, Homo sapiens
  misc_RNA (1)...(19): siRNA sense strand
ggagcagguccauuucaga

SEQ ID NO: 1062872 - RNA, 19 nt, Homo sapiens
  misc_RNA (1)...(19): siRNA sense strand
uuacuuauugccucuugua

SEQ ID NO: 1062873 - RNA, 19 nt, Homo sapiens
  misc_RNA (1)...(19): siRNA sense strand
gagaaauacagugagaaau

SEQ ID NO: 1062874 - RNA, 19 nt, Homo sapiens
  misc_RNA (1)...(19): siRNA sense strand
cuggagaaauacagugaga

SEQ ID NO: 1062875 - RNA, 19 nt, Homo sapiens
  misc_RNA (1)...(19): siRNA sense strand
cgacuggagcacacucauu

SEQ ID NO: 1062876 - RNA, 19 nt, Homo sapiens
  misc_RNA (1)...(19): siRNA sense strand
acacuaccauuaugacacu

SEQ ID NO: 1062877 - RNA, 19 nt, Homo sapiens
  misc_RNA (1)...(19): siRNA sense strand
gcaggagcagguccauuuc

SEQ ID NO: 1062878 - RNA, 19 nt, Homo sapiens
  misc_RNA (1)...(19): siRNA sense strand
caagccuccuguaaaugga

SEQ ID NO: 1062879 - RNA, 19 nt, Homo sapiens
  misc_RNA (1)...(19): siRNA sense strand
gccuggagccuuuauucuu

SEQ ID NO: 1062880 - RNA, 19 nt, Homo sapiens
  misc_RNA (1)...(19): siRNA sense strand
ugaagaagugaauaaaugg

SEQ ID NO: 1062881 - RNA, 19 nt, Homo sapiens
  misc_RNA (1)...(19): siRNA sense strand
cugaugaagaagugaauaa

SEQ ID NO: 1062882 - RNA, 19 nt, Homo sapiens
  misc_RNA (1)...(19): siRNA sense strand
uagaauugcagaaguugga

SEQ ID NO: 1062883 - RNA, 19 nt, Homo sapiens
  misc_RNA (1)...(19): siRNA sense strand
aacacaagccuccuguaaa

SEQ ID NO: 1062884 - RNA, 19 nt, Homo sapiens
  misc_RNA (1)...(19): siRNA sense strand
agcaggagcagguccauuu

SEQ ID NO: 1062885 - RNA, 19 nt, Homo sapiens
  misc_RNA (1)...(19): siRNA sense strand
guugauugcccugauuuga

SEQ ID NO: 1062886 - RNA, 19 nt, Homo sapiens
  misc_RNA (1)...(19): siRNA sense strand
agaagggguuaaaagauaa

SEQ ID NO: 1062887 - RNA, 19 nt, Homo sapiens
  misc_RNA (1)...(19): siRNA sense strand
ugauugcccugauuugacu

SEQ ID NO: 1062888 - RNA, 19 nt, Homo sapiens
  misc_RNA (1)...(19): siRNA sense strand
gugcugaguuuucuuuuca

SEQ ID NO: 1062889 - RNA, 19 nt, Homo sapiens
  misc_RNA (1)...(19): siRNA sense strand
cagacucucggguucaauu

SEQ ID NO: 1062890 - RNA, 19 nt, Homo sapiens
  misc_RNA (1)...(19): siRNA sense strand
uaugacacuacuccagaua

SEQ ID NO: 1062891 - RNA, 19 nt, Homo sapiens
  misc_RNA (1)...(19): siRNA sense strand
uugcuggaguuaugcagaa

SEQ ID NO: 1062892 - RNA, 19 nt, Homo sapiens
  misc_RNA (1)...(19): siRNA sense strand
caugugaacccugcagaug

SEQ ID NO: 1062893 - RNA, 19 nt, Homo sapiens
  misc_RNA (1)...(19): siRNA sense strand
uauaguggaauaucuugga

SEQ ID NO: 1062894 - RNA, 19 nt, Homo sapiens
  misc_RNA (1)...(19): siRNA sense strand
cuggcaagccugcagaauu

SEQ ID NO: 1062895 - RNA, 19 nt, Homo sapiens
  misc_RNA (1)...(19): siRNA sense strand
acaagccuccuguaaaugg

SEQ ID NO: 1062896 - RNA, 19 nt, Homo sapiens
  misc_RNA (1)...(19): siRNA sense strand
gcagaagggguuaaaagau

SEQ ID NO: 1062897 - RNA, 19 nt, Homo sapiens
  misc_RNA (1)...(19): siRNA sense strand
guggacacuaccauuauga

SEQ ID NO: 1062898 - RNA, 19 nt, Homo sapiens
  misc_RNA (1)...(19): siRNA sense strand
ugccaguuauucagacaga

SEQ ID NO: 1062899 - RNA, 19 nt, Homo sapiens
  misc_RNA (1)...(19): siRNA sense strand
gagcaggagcagguccauu

SEQ ID NO: 1062900 - RNA, 19 nt, Homo sapiens
  misc_RNA (1)...(19): siRNA sense strand
gcauucaauugggcgagau

SEQ ID NO: 1062901 - RNA, 19 nt, Homo sapiens
  misc_RNA (1)...(19): siRNA sense strand
aaaagagacgcauucaauu

SEQ ID NO: 1062902 - RNA, 19 nt, Homo sapiens
  misc_RNA (1)...(19): siRNA sense strand
aaaggcaucugugggaaaa

SEQ ID NO: 1062903 - RNA, 19 nt, Homo sapiens
  misc_RNA (1)...(19): siRNA sense strand
ggaaguggcucgacucuug

SEQ ID NO: 1062904 - RNA, 19 nt, Homo sapiens
  misc_RNA (1)...(19): siRNA sense strand
gcuaaacccuuuccaugua

SEQ ID NO: 1062905 - RNA, 19 nt, Homo sapiens
  misc_RNA (1)...(19): siRNA sense strand
ggaauaugaugaugaagaa

SEQ ID NO: 1062906 - RNA, 19 nt, Homo sapiens
  misc_RNA (1)...(19): siRNA sense strand
ugaagaaucucucaaguuc

SEQ ID NO: 1062907 - RNA, 19 nt, Homo sapiens
  misc_RNA (1)...(19): siRNA sense strand
ggaaaugguucuucuagca

SEQ ID NO: 1062908 - RNA, 19 nt, Homo sapiens
  misc_RNA (1)...(19): siRNA sense strand
gggacuaggugaccgguua

SEQ ID NO: 1062909 - RNA, 19 nt, Homo sapiens
  misc_RNA (1)...(19): siRNA sense strand
gaggaacuaugucaacuug

SEQ ID NO: 1062910 - RNA, 19 nt, Homo sapiens
  misc_RNA (1)...(19): siRNA sense strand
gagaguacguagaaacuug

SEQ ID NO: 1062911 - RNA, 19 nt, Homo sapiens
  misc_RNA (1)...(19): siRNA sense strand
uaaaugaguuucuguccaa

SEQ ID NO: 1062912 - RNA, 19 nt, Homo sapiens
  misc_RNA (1)...(19): siRNA sense strand
ggaacuaugucaacuugga

SEQ ID NO: 1062913 - RNA, 19 nt, Homo sapiens
  misc_RNA (1)...(19): siRNA sense strand
gaaaggaguaugagaugaa

SEQ ID NO: 1062914 - RNA, 19 nt, Homo sapiens
  misc_RNA (1)...(19): siRNA sense strand
uaucacaucucauuugguu

SEQ ID NO: 1062915 - RNA, 19 nt, Homo sapiens
  misc_RNA (1)...(19): siRNA sense strand
gaugggaacucuuuucuuu

SEQ ID NO: 1062916 - RNA, 19 nt, Homo sapiens
  misc_RNA (1)...(19): siRNA sense strand
gcaaaggccugggauugug

SEQ ID NO: 1062917 - RNA, 19 nt, Homo sapiens
  misc_RNA (1)...(19): siRNA sense strand
gaagaggaauaugaugaug

SEQ ID NO: 1062918 - RNA, 19 nt, Homo sapiens
  misc_RNA (1)...(19): siRNA sense strand
cuaccuggcucuucucuug

SEQ ID NO: 1062919 - RNA, 19 nt, Homo sapiens
  misc_RNA (1)...(19): siRNA sense strand
uguccaagcugcaagauga

SEQ ID NO: 1062920 - RNA, 19 nt, Homo sapiens
  misc_RNA (1)...(19): siRNA sense strand
gcgagcagcuugggacauu

SEQ ID NO: 1062921 - RNA, 19 nt, Homo sapiens
  misc_RNA (1)...(19): siRNA sense strand
gaaauggaccgggaaccua

SEQ ID NO: 1062922 - RNA, 19 nt, Homo sapiens
  misc_RNA (1)...(19): siRNA sense strand
uaagagugcuagauacugu

SEQ ID NO: 1062923 - RNA, 19 nt, Homo sapiens
  misc_RNA (1)...(19): siRNA sense strand
gaugaagaaucucucaagu

SEQ ID NO: 1062924 - RNA, 19 nt, Homo sapiens
  misc_RNA (1)...(19): siRNA sense strand
ggaaagguguaugacauca

SEQ ID NO: 1062925 - RNA, 19 nt, Homo sapiens
  misc_RNA (1)...(19): siRNA sense strand
ugauugaacugcugguauu

SEQ ID NO: 1062926 - RNA, 19 nt, Homo sapiens
  misc_RNA (1)...(19): siRNA sense strand
gaacugaggaaggccuaua

SEQ ID NO: 1062927 - RNA, 19 nt, Homo sapiens
  misc_RNA (1)...(19): siRNA sense strand
ggagaaagaggguuguaug

SEQ ID NO: 1062928 - RNA, 19 nt, Homo sapiens
  misc_RNA (1)...(19): siRNA sense strand
gaaacgaagucaggcagau

SEQ ID NO: 1062929 - RNA, 19 nt, Homo sapiens
  misc_RNA (1)...(19): siRNA sense strand
ugaauacuaugauguguag

SEQ ID NO: 1062930 - RNA, 19 nt, Homo sapiens
  misc_RNA (1)...(19): siRNA sense strand
aggaugagcuaaacccuuu

SEQ ID NO: 1062931 - RNA, 19 nt, Homo sapiens
  misc_RNA (1)...(19): siRNA sense strand
gaaugcaccuguagcuagu

SEQ ID NO: 1062932 - RNA, 19 nt, Homo sapiens
  misc_RNA (1)...(19): siRNA sense strand
guaggacuguuuacucguu

SEQ ID NO: 1062933 - RNA, 19 nt, Homo sapiens
  misc_RNA (1)...(19): siRNA sense strand
agaggaauaugaugaugaa

SEQ ID NO: 1062934 - RNA, 19 nt, Homo sapiens
  misc_RNA (1)...(19): siRNA sense strand
gaaaugguucuucuagcaa

SEQ ID NO: 1062935 - RNA, 19 nt, Homo sapiens
  misc_RNA (1)...(19): siRNA sense strand
cauaggagguuugaaaugg

SEQ ID NO: 1062936 - RNA, 19 nt, Homo sapiens
  misc_RNA (1)...(19): siRNA sense strand
ugaaacgaauggcagagaa

SEQ ID NO: 1062937 - RNA, 19 nt, Homo sapiens
  misc_RNA (1)...(19): siRNA sense strand
cgaaaggaguaugagauga

SEQ ID NO: 1062938 - RNA, 19 nt, Homo sapiens
  misc_RNA (1)...(19): siRNA sense strand
gcaaugaauacuaugaugu

SEQ ID NO: 1062939 - RNA, 19 nt, Homo sapiens
  misc_RNA (1)...(19): siRNA sense strand
gauacugugcugaguguaa

SEQ ID NO: 1062940 - RNA, 19 nt, Homo sapiens
  misc_RNA (1)...(19): siRNA sense strand
gaaagcauaggagguuuga

SEQ ID NO: 1062941 - RNA, 19 nt, Homo sapiens
  misc_RNA (1)...(19): siRNA sense strand
ggaagaggaauaugaugau

SEQ ID NO: 1062942 - RNA, 19 nt, Homo sapiens
  misc_RNA (1)...(19): siRNA sense strand
ggcaaugaauacuaugaug

SEQ ID NO: 1062943 - RNA, 19 nt, Homo sapiens
  misc_RNA (1)...(19): siRNA sense strand
ggucauguuucaguuucua

SEQ ID NO: 1062944 - RNA, 19 nt, Homo sapiens
  misc_RNA (1)...(19): siRNA sense strand
gaaaagcagugauuugaac

SEQ ID NO: 1062945 - RNA, 19 nt, Homo sapiens
  misc_RNA (1)...(19): siRNA sense strand
gggucaagcagaauauuaa

SEQ ID NO: 1062946 - RNA, 19 nt, Homo sapiens
  misc_RNA (1)...(19): siRNA sense strand
gcagugauuugaaccuuuu

SEQ ID NO: 1062947 - RNA, 19 nt, Homo sapiens
  misc_RNA (1)...(19): siRNA sense strand
gcgcaaaggccugggauug

SEQ ID NO: 1062948 - RNA, 19 nt, Homo sapiens
  misc_RNA (1)...(19): siRNA sense strand
aagcauaggagguuugaaa

SEQ ID NO: 1062949 - RNA, 19 nt, Homo sapiens
  misc_RNA (1)...(19): siRNA sense strand
aaaggaguaugagaugaaa

SEQ ID NO: 1062950 - RNA, 19 nt, Homo sapiens
  misc_RNA (1)...(19): siRNA sense strand
cgguuaggcuggagggaua

SEQ ID NO: 1062951 - RNA, 19 nt, Homo sapiens
  misc_RNA (1)...(19): siRNA sense strand
gggaggaaaugguucuucu

SEQ ID NO: 1062952 - RNA, 19 nt, Homo sapiens
  misc_RNA (1)...(19): siRNA sense strand
caagaucaccuacuuugca

SEQ ID NO: 1062953 - RNA, 19 nt, Homo sapiens
  misc_RNA (1)...(19): siRNA sense strand
gggcccaggucauguuuca

SEQ ID NO: 1062954 - RNA, 19 nt, Homo sapiens
  misc_RNA (1)...(19): siRNA sense strand
gggaagaugaguuggaaga

SEQ ID NO: 1062955 - RNA, 19 nt, Homo sapiens
  misc_RNA (1)...(19): siRNA sense strand
gcagaggacccugaucaga

SEQ ID NO: 1062956 - RNA, 19 nt, Homo sapiens
  misc_RNA (1)...(19): siRNA sense strand
gaggaaaugguucuucuag

SEQ ID NO: 1062957 - RNA, 19 nt, Homo sapiens
  misc_RNA (1)...(19): siRNA sense strand
ggaggaaaugguucuucua

SEQ ID NO: 1062958 - RNA, 19 nt, Homo sapiens
  misc_RNA (1)...(19): siRNA sense strand
gcauaggagguuugaaaug

SEQ ID NO: 1062959 - RNA, 19 nt, Homo sapiens
  misc_RNA (1)...(19): siRNA sense strand
aguaugagaugaaacgaau

SEQ ID NO: 1062960 - RNA, 19 nt, Homo sapiens
  misc_RNA (1)...(19): siRNA sense strand
gcgaaaggaguaugagaug

SEQ ID NO: 1062961 - RNA, 19 nt, Homo sapiens
  misc_RNA (1)...(19): siRNA sense strand
agaaggaugggaacucuuu

SEQ ID NO: 1062962 - RNA, 19 nt, Homo sapiens
  misc_RNA (1)...(19): siRNA sense strand
ggaaagcauaggagguuug

SEQ ID NO: 1062963 - RNA, 19 nt, Homo sapiens
  misc_RNA (1)...(19): siRNA sense strand
gaaacgaauggcagagaau

SEQ ID NO: 1062964 - RNA, 19 nt, Homo sapiens
  misc_RNA (1)...(19): siRNA sense strand
cggcaccgcuuuccaacga

SEQ ID NO: 1062965 - RNA, 19 nt, Homo sapiens
  misc_RNA (1)...(19): siRNA sense strand
aaagguguaugacaucaca

SEQ ID NO: 1062966 - RNA, 19 nt, Homo sapiens
  misc_RNA (1)...(19): siRNA sense strand
gcugcaagaugaccucaag

SEQ ID NO: 1062967 - RNA, 19 nt, Homo sapiens
  misc_RNA (1)...(19): siRNA sense strand
gaaguggcucgacucuuga

SEQ ID NO: 1062968 - RNA, 19 nt, Homo sapiens
  misc_RNA (1)...(19): siRNA sense strand
ggugggagaguacguagaa

SEQ ID NO: 1062969 - RNA, 19 nt, Homo sapiens
  misc_RNA (1)...(19): siRNA sense strand
caggaacucucaaaagaaa

SEQ ID NO: 1062970 - RNA, 19 nt, Homo sapiens
  misc_RNA (1)...(19): siRNA sense strand
gagaaagaggguuguaugg

SEQ ID NO: 1062971 - RNA, 19 nt, Homo sapiens
  misc_RNA (1)...(19): siRNA sense strand
agucggaucuuucaaguac

SEQ ID NO: 1062972 - RNA, 19 nt, Homo sapiens
  misc_RNA (1)...(19): siRNA sense strand
uagauacugugcugagugu

SEQ ID NO: 1062973 - RNA, 19 nt, Homo sapiens
  misc_RNA (1)...(19): siRNA sense strand
caaugaauacuaugaugug

SEQ ID NO: 1062974 - RNA, 19 nt, Homo sapiens
  misc_RNA (1)...(19): siRNA sense strand
aaacgaagucaggcagaua

SEQ ID NO: 1062975 - RNA, 19 nt, Homo sapiens
  misc_RNA (1)...(19): siRNA sense strand
aaccuaagagugcuagaua

SEQ ID NO: 1062976 - RNA, 19 nt, Homo sapiens
  misc_RNA (1)...(19): siRNA sense strand
ucaaggaggcaaugaauac

SEQ ID NO: 1062977 - RNA, 19 nt, Homo sapiens
  misc_RNA (1)...(19): siRNA sense strand
gcucuucucuuggcuggau

SEQ ID NO: 1062978 - RNA, 19 nt, Homo sapiens
  misc_RNA (1)...(19): siRNA sense strand
guauggagcccaccacagu

SEQ ID NO: 1062979 - RNA, 19 nt, Homo sapiens
  misc_RNA (1)...(19): siRNA sense strand
ccagaaggaugggaacucu

SEQ ID NO: 1062980 - RNA, 19 nt, Homo sapiens
  misc_RNA (1)...(19): siRNA sense strand
gaaccuaagagugcuagau

SEQ ID NO: 1062981 - RNA, 19 nt, Homo sapiens
  misc_RNA (1)...(19): siRNA sense strand
agagugagacgucuucaga

SEQ ID NO: 1062982 - RNA, 19 nt, Homo sapiens
  misc_RNA (1)...(19): siRNA sense strand
gugccucccucaggacuuu

SEQ ID NO: 1062983 - RNA, 19 nt, Homo sapiens
  misc_RNA (1)...(19): siRNA sense strand
auagacagcuggcagugau

SEQ ID NO: 1062984 - RNA, 19 nt, Homo sapiens
  misc_RNA (1)...(19): siRNA sense strand
aaauggaccgggaaccuaa

SEQ ID NO: 1062985 - RNA, 19 nt, Homo sapiens
  misc_RNA (1)...(19): siRNA sense strand
gaggcaaugaauacuauga

SEQ ID NO: 1062986 - RNA, 19 nt, Homo sapiens
  misc_RNA (1)...(19): siRNA sense strand
uggaagaggaauaugauga

SEQ ID NO: 1062987 - RNA, 19 nt, Homo sapiens
  misc_RNA (1)...(19): siRNA sense strand
gggagaagccaaaccuaag

SEQ ID NO: 1062988 - RNA, 19 nt, Homo sapiens
  misc_RNA (1)...(19): siRNA sense strand
ucauuugguucucggauuc

SEQ ID NO: 1062989 - RNA, 19 nt, Homo sapiens
  misc_RNA (1)...(19): siRNA sense strand
aggaggcaaugaauacuau

SEQ ID NO: 1062990 - RNA, 19 nt, Homo sapiens
  misc_RNA (1)...(19): siRNA sense strand
caggucauguuucaguuuc

SEQ ID NO: 1062991 - RNA, 19 nt, Homo sapiens
  misc_RNA (1)...(19): siRNA sense strand
agaggacccugaucagagu

SEQ ID NO: 1062992 - RNA, 19 nt, Homo sapiens
  misc_RNA (1)...(19): siRNA sense strand
ugagucggaucuuucaagu

SEQ ID NO: 1062993 - RNA, 19 nt, Homo sapiens
  misc_RNA (1)...(19): siRNA sense strand
gccucaagaucaccuacuu

SEQ ID NO: 1062994 - RNA, 19 nt, Homo sapiens
  misc_RNA (1)...(19): siRNA sense strand
ugaggaaggccuauagaca

SEQ ID NO: 1062995 - RNA, 19 nt, Homo sapiens
  misc_RNA (1)...(19): siRNA sense strand
ggagaguacguagaaacuu

SEQ ID NO: 1062996 - RNA, 19 nt, Homo sapiens
  misc_RNA (1)...(19): siRNA sense strand
gaucuucaggauuucuuga

SEQ ID NO: 1062997 - RNA, 19 nt, Homo sapiens
  misc_RNA (1)...(19): siRNA sense strand
ccuaucacaucucauuugg

SEQ ID NO: 1062998 - RNA, 19 nt, Homo sapiens
  misc_RNA (1)...(19): siRNA sense strand
gauggaaagguguaugaca

SEQ ID NO: 1062999 - RNA, 19 nt, Homo sapiens
  misc_RNA (1)...(19): siRNA sense strand
ugggucaagcagaauauua

SEQ ID NO: 1063000 - RNA, 19 nt, Homo sapiens
  misc_RNA (1)...(19): siRNA sense strand
aggaggcccuuccaacguu

SEQ ID NO: 1063001 - RNA, 19 nt, Homo sapiens
  misc_RNA (1)...(19): siRNA sense strand
gaugccagcguguagguau

SEQ ID NO: 1063002 - RNA, 19 nt, Homo sapiens
  misc_RNA (1)...(19): siRNA sense strand
gaguaugagaugaaacgaa

SEQ ID NO: 1063003 - RNA, 19 nt, Homo sapiens
  misc_RNA (1)...(19): siRNA sense strand
caacuacccuucugucuuu

SEQ ID NO: 1063004 - RNA, 19 nt, Homo sapiens
  misc_RNA (1)...(19): siRNA sense strand
ggacuuggcucgaggaaau

SEQ ID NO: 1063005 - RNA, 19 nt, Homo sapiens
  misc_RNA (1)...(19): siRNA sense strand
cagcagacccacccaaaua

SEQ ID NO: 1063006 - RNA, 19 nt, Homo sapiens
  misc_RNA (1)...(19): siRNA sense strand
gguggaggauuaucaggua

SEQ ID NO: 1063007 - RNA, 19 nt, Homo sapiens
  misc_RNA (1)...(19): siRNA sense strand
cgaggaaauuaaacucuaa

SEQ ID NO: 1063008 - RNA, 19 nt, Homo sapiens
  misc_RNA (1)...(19): siRNA sense strand
ucgaggaaauuaaacucua

SEQ ID NO: 1063009 - RNA, 19 nt, Homo sapiens
  misc_RNA (1)...(19): siRNA sense strand
ggaggauuaucagguaaca

SEQ ID NO: 1063010 - RNA, 19 nt, Homo sapiens
  misc_RNA (1)...(19): siRNA sense strand
ucagguaacacaagaagug

SEQ ID NO: 1063011 - RNA, 19 nt, Homo sapiens
  misc_RNA (1)...(19): siRNA sense strand
gcagcagacccacccaaau

SEQ ID NO: 1063012 - RNA, 19 nt, Homo sapiens
  misc_RNA (1)...(19): siRNA sense strand
ccaacuacccuucugucuu

SEQ ID NO: 1063013 - RNA, 19 nt, Homo sapiens
  misc_RNA (1)...(19): siRNA sense strand
guggaggauuaucagguaa

SEQ ID NO: 1063014 - RNA, 19 nt, Homo sapiens
  misc_RNA (1)...(19): siRNA sense strand
gagcccaacuacccuucug

SEQ ID NO: 1063015 - RNA, 19 nt, Homo sapiens
  misc_RNA (1)...(19): siRNA sense strand
ggacugaggagcacuucgu

SEQ ID NO: 1063016 - RNA, 19 nt, Homo sapiens
  misc_RNA (1)...(19): siRNA sense strand
gagcugcgaaucccaugga

SEQ ID NO: 1063017 - RNA, 19 nt, Homo sapiens
  misc_RNA (1)...(19): siRNA sense strand
auuaucagguaacacaaga

SEQ ID NO: 1063018 - RNA, 19 nt, Homo sapiens
  misc_RNA (1)...(19): siRNA sense strand
uugugcggguggaggauua

SEQ ID NO: 1063019 - RNA, 19 nt, Homo sapiens
  misc_RNA (1)...(19): siRNA sense strand
gcaugaccacgaggacuga

SEQ ID NO: 1063020 - RNA, 19 nt, Homo sapiens
  misc_RNA (1)...(19): siRNA sense strand
cuacccuucugucuuucaa

SEQ ID NO: 1063021 - RNA, 19 nt, Homo sapiens
  misc_RNA (1)...(19): siRNA sense strand
gauuaucagguaacacaag

SEQ ID NO: 1063022 - RNA, 19 nt, Homo sapiens
  misc_RNA (1)...(19): siRNA sense strand
gcaaugcacgggacaauga

SEQ ID NO: 1063023 - RNA, 19 nt, Homo sapiens
  misc_RNA (1)...(19): siRNA sense strand
caaugaagccuuugaagug

SEQ ID NO: 1063024 - RNA, 19 nt, Homo sapiens
  misc_RNA (1)...(19): siRNA sense strand
ggaaggaagcccuggaaga

SEQ ID NO: 1063025 - RNA, 19 nt, Homo sapiens
  misc_RNA (1)...(19): siRNA sense strand
ggucccagcuccaaucaau

SEQ ID NO: 1063026 - RNA, 19 nt, Homo sapiens
  misc_RNA (1)...(19): siRNA sense strand
gaaggaagcccuggaagag

SEQ ID NO: 1063027 - RNA, 19 nt, Homo sapiens
  misc_RNA (1)...(19): siRNA sense strand
ggacaaugaagccuuugaa

SEQ ID NO: 1063028 - RNA, 19 nt, Homo sapiens
  misc_RNA (1)...(19): siRNA sense strand
ggaacaaccuagccaucca

SEQ ID NO: 1063029 - RNA, 19 nt, Homo sapiens
  misc_RNA (1)...(19): siRNA sense strand
caggagagccaaacuggaa

SEQ ID NO: 1063030 - RNA, 19 nt, Homo sapiens
  misc_RNA (1)...(19): siRNA sense strand
cacauuggguggcuucuuc

SEQ ID NO: 1063031 - RNA, 19 nt, Homo sapiens
  misc_RNA (1)...(19): siRNA sense strand
uccaaucaaugcagacuga

SEQ ID NO: 1063032 - RNA, 19 nt, Homo sapiens
  misc_RNA (1)...(19): siRNA sense strand
gugcugcgccuccuuccua

SEQ ID NO: 1063033 - RNA, 19 nt, Homo sapiens
  misc_RNA (1)...(19): siRNA sense strand
ugaagugccagucuaugaa

SEQ ID NO: 1063034 - RNA, 19 nt, Homo sapiens
  misc_RNA (1)...(19): siRNA sense strand
gaagagcuccaaucaaccu

SEQ ID NO: 1063035 - RNA, 19 nt, Homo sapiens
  misc_RNA (1)...(19): siRNA sense strand
gcuuauuucuuucucacau

SEQ ID NO: 1063036 - RNA, 19 nt, Homo sapiens
  misc_RNA (1)...(19): siRNA sense strand
gaagugccagucuaugaag

SEQ ID NO: 1063037 - RNA, 19 nt, Homo sapiens
  misc_RNA (1)...(19): siRNA sense strand
gguggcuucuucuuguuug

SEQ ID NO: 1063038 - RNA, 19 nt, Homo sapiens
  misc_RNA (1)...(19): siRNA sense strand
uggcuuugcugggcauaaa

SEQ ID NO: 1063039 - RNA, 19 nt, Homo sapiens
  misc_RNA (1)...(19): siRNA sense strand
gcauaaagacggacaucac

SEQ ID NO: 1063040 - RNA, 19 nt, Homo sapiens
  misc_RNA (1)...(19): siRNA sense strand
acaaugaagccuuugaagu

SEQ ID NO: 1063041 - RNA, 19 nt, Homo sapiens
  misc_RNA (1)...(19): siRNA sense strand
cuccugaucugcagagcuu

SEQ ID NO: 1063042 - RNA, 19 nt, Homo sapiens
  misc_RNA (1)...(19): siRNA sense strand
ugccuaugaugucugcuuu

SEQ ID NO: 1063043 - RNA, 19 nt, Homo sapiens
  misc_RNA (1)...(19): siRNA sense strand
ccuuugaagugccagucua

SEQ ID NO: 1063044 - RNA, 19 nt, Homo sapiens
  misc_RNA (1)...(19): siRNA sense strand
gacaaugaagccuuugaag

SEQ ID NO: 1063045 - RNA, 19 nt, Homo sapiens
  misc_RNA (1)...(19): siRNA sense strand
acgggacaaugaagccuuu

SEQ ID NO: 1063046 - RNA, 19 nt, Homo sapiens
  misc_RNA (1)...(19): siRNA sense strand
ccuaugaugucugcuuugg

SEQ ID NO: 1063047 - RNA, 19 nt, Homo sapiens
  misc_RNA (1)...(19): siRNA sense strand
uugaagugccagucuauga

SEQ ID NO: 1063048 - RNA, 19 nt, Homo sapiens
  misc_RNA (1)...(19): siRNA sense strand
gcuuuggucacccugauga

SEQ ID NO: 1063049 - RNA, 19 nt, Homo sapiens
  misc_RNA (1)...(19): siRNA sense strand
uuggguggcuucuucuugu

SEQ ID NO: 1063050 - RNA, 19 nt, Homo sapiens
  misc_RNA (1)...(19): siRNA sense strand
ccccguugcuuauuucuuu

SEQ ID NO: 1063051 - RNA, 19 nt, Homo sapiens
  misc_RNA (1)...(19): siRNA sense strand
ggagagccaaacuggaaca

SEQ ID NO: 1063052 - RNA, 19 nt, Homo sapiens
  misc_RNA (1)...(19): siRNA sense strand
gggacaaugaagccuuuga

SEQ ID NO: 1063053 - RNA, 19 nt, Homo sapiens
  misc_RNA (1)...(19): siRNA sense strand
caaucaaugcagacugaga

SEQ ID NO: 1063054 - RNA, 19 nt, Homo sapiens
  misc_RNA (1)...(19): siRNA sense strand
ggguggcuucuucuuguuu

SEQ ID NO: 1063055 - RNA, 19 nt, Homo sapiens
  misc_RNA (1)...(19): siRNA sense strand
ccaaauaguuucacagaua

SEQ ID NO: 1063056 - RNA, 19 nt, Homo sapiens
  misc_RNA (1)...(19): siRNA sense strand
ggaagaccauggagaaaua

SEQ ID NO: 1063057 - RNA, 19 nt, Homo sapiens
  misc_RNA (1)...(19): siRNA sense strand
gcacugagacagcgaauua

SEQ ID NO: 1063058 - RNA, 19 nt, Homo sapiens
  misc_RNA (1)...(19): siRNA sense strand
gcagauaauuccacuaaug

SEQ ID NO: 1063059 - RNA, 19 nt, Homo sapiens
  misc_RNA (1)...(19): siRNA sense strand
gagaauaucuggcaacaac

SEQ ID NO: 1063060 - RNA, 19 nt, Homo sapiens
  misc_RNA (1)...(19): siRNA sense strand
cuagauaccuuauucagaa

SEQ ID NO: 1063061 - RNA, 19 nt, Homo sapiens
  misc_RNA (1)...(19): siRNA sense strand
gguaugccauggaacuuua

SEQ ID NO: 1063062 - RNA, 19 nt, Homo sapiens
  misc_RNA (1)...(19): siRNA sense strand
caagaaaacuacccaauuu

SEQ ID NO: 1063063 - RNA, 19 nt, Homo sapiens
  misc_RNA (1)...(19): siRNA sense strand
gggcagagaugguggugaa

SEQ ID NO: 1063064 - RNA, 19 nt, Homo sapiens
  misc_RNA (1)...(19): siRNA sense strand
guagagccuugucaucuuu

SEQ ID NO: 1063065 - RNA, 19 nt, Homo sapiens
  misc_RNA (1)...(19): siRNA sense strand
agaauugucuccucaaguu

SEQ ID NO: 1063066 - RNA, 19 nt, Homo sapiens
  misc_RNA (1)...(19): siRNA sense strand
gaaucuggcccacaaauga

SEQ ID NO: 1063067 - RNA, 19 nt, Homo sapiens
  misc_RNA (1)...(19): siRNA sense strand
gcagaugauuccacuuaug

SEQ ID NO: 1063068 - RNA, 19 nt, Homo sapiens
  misc_RNA (1)...(19): siRNA sense strand
cgagaaccuuccacugaua

SEQ ID NO: 1063069 - RNA, 19 nt, Homo sapiens
  misc_RNA (1)...(19): siRNA sense strand
ggugaaggcuguucuugga

SEQ ID NO: 1063070 - RNA, 19 nt, Homo sapiens
  misc_RNA (1)...(19): siRNA sense strand
cgacagugaugauaacaau

SEQ ID NO: 1063071 - RNA, 19 nt, Homo sapiens
  misc_RNA (1)...(19): siRNA sense strand
gaauuacucugcucuacca

SEQ ID NO: 1063072 - RNA, 19 nt, Homo sapiens
  misc_RNA (1)...(19): siRNA sense strand
gcacuguuaccucugaaua

SEQ ID NO: 1063073 - RNA, 19 nt, Homo sapiens
  misc_RNA (1)...(19): siRNA sense strand
cuaaugacauagcagauga

SEQ ID NO: 1063074 - RNA, 19 nt, Homo sapiens
  misc_RNA (1)...(19): siRNA sense strand
caaugaaucgcucaacuuu

SEQ ID NO: 1063075 - RNA, 19 nt, Homo sapiens
  misc_RNA (1)...(19): siRNA sense strand
ucagugagaguuuaucaua

SEQ ID NO: 1063076 - RNA, 19 nt, Homo sapiens
  misc_RNA (1)...(19): siRNA sense strand
gagguacagucuagcauau

SEQ ID NO: 1063077 - RNA, 19 nt, Homo sapiens
  misc_RNA (1)...(19): siRNA sense strand
cagauaaucccacugauga

SEQ ID NO: 1063078 - RNA, 19 nt, Homo sapiens
  misc_RNA (1)...(19): siRNA sense strand
uagcagaugauuccacuua

SEQ ID NO: 1063079 - RNA, 19 nt, Homo sapiens
  misc_RNA (1)...(19): siRNA sense strand
caacuuuauuggacaguga

SEQ ID NO: 1063080 - RNA, 19 nt, Homo sapiens
  misc_RNA (1)...(19): siRNA sense strand
cagcagauaauuccacuaa

SEQ ID NO: 1063081 - RNA, 19 nt, Homo sapiens
  misc_RNA (1)...(19): siRNA sense strand
ccaaaauacugccucuuua

SEQ ID NO: 1063082 - RNA, 19 nt, Homo sapiens
  misc_RNA (1)...(19): siRNA sense strand
gguagagccuugucaucuu

SEQ ID NO: 1063083 - RNA, 19 nt, Homo sapiens
  misc_RNA (1)...(19): siRNA sense strand
uguaacaucucuugaguca

SEQ ID NO: 1063084 - RNA, 19 nt, Homo sapiens
  misc_RNA (1)...(19): siRNA sense strand
guauugagaugguggaagu

SEQ ID NO: 1063085 - RNA, 19 nt, Homo sapiens
  misc_RNA (1)...(19): siRNA sense strand
gcgagaaccuuccacugau

SEQ ID NO: 1063086 - RNA, 19 nt, Homo sapiens
  misc_RNA (1)...(19): siRNA sense strand
caaguucauuacagcagua

SEQ ID NO: 1063087 - RNA, 19 nt, Homo sapiens
  misc_RNA (1)...(19): siRNA sense strand
gcagauaaucccacugaug

SEQ ID NO: 1063088 - RNA, 19 nt, Homo sapiens
  misc_RNA (1)...(19): siRNA sense strand
agaaaugucagaguacuua

SEQ ID NO: 1063089 - RNA, 19 nt, Homo sapiens
  misc_RNA (1)...(19): siRNA sense strand
augaaucgcucaacuuuau

SEQ ID NO: 1063090 - RNA, 19 nt, Homo sapiens
  misc_RNA (1)...(19): siRNA sense strand
ugaccaagaugaugcuuca

SEQ ID NO: 1063091 - RNA, 19 nt, Homo sapiens
  misc_RNA (1)...(19): siRNA sense strand
aaaccacccaguacauuua

SEQ ID NO: 1063092 - RNA, 19 nt, Homo sapiens
  misc_RNA (1)...(19): siRNA sense strand
gguacagucuagcauauca

SEQ ID NO: 1063093 - RNA, 19 nt, Homo sapiens
  misc_RNA (1)...(19): siRNA sense strand
ggugaagcauggagcuauu

SEQ ID NO: 1063094 - RNA, 19 nt, Homo sapiens
  misc_RNA (1)...(19): siRNA sense strand
gagagaauaucuggcaaca

SEQ ID NO: 1063095 - RNA, 19 nt, Homo sapiens
  misc_RNA (1)...(19): siRNA sense strand
guuaugggacaaugaguua

SEQ ID NO: 1063096 - RNA, 19 nt, Homo sapiens
  misc_RNA (1)...(19): siRNA sense strand
ucaauucuaugaucuacug

SEQ ID NO: 1063097 - RNA, 19 nt, Homo sapiens
  misc_RNA (1)...(19): siRNA sense strand
cagauaauuccacuaauga

SEQ ID NO: 1063098 - RNA, 19 nt, Homo sapiens
  misc_RNA (1)...(19): siRNA sense strand
gaucuacuguuuauguucu

SEQ ID NO: 1063099 - RNA, 19 nt, Homo sapiens
  misc_RNA (1)...(19): siRNA sense strand
ggagugcaguggcaugauc

SEQ ID NO: 1063100 - RNA, 19 nt, Homo sapiens
  misc_RNA (1)...(19): siRNA sense strand
caaaugaguuaugggacaa

SEQ ID NO: 1063101 - RNA, 19 nt, Homo sapiens
  misc_RNA (1)...(19): siRNA sense strand
aaaccaacguggaaaauaa

SEQ ID NO: 1063102 - RNA, 19 nt, Homo sapiens
  misc_RNA (1)...(19): siRNA sense strand
gcaguucugucacgaagag

SEQ ID NO: 1063103 - RNA, 19 nt, Homo sapiens
  misc_RNA (1)...(19): siRNA sense strand
gaaaguaccaaugcuguca

SEQ ID NO: 1063104 - RNA, 19 nt, Homo sapiens
  misc_RNA (1)...(19): siRNA sense strand
gaccaaauaguuucacaga

SEQ ID NO: 1063105 - RNA, 19 nt, Homo sapiens
  misc_RNA (1)...(19): siRNA sense strand
gguccaaaguaacgucuau

SEQ ID NO: 1063106 - RNA, 19 nt, Homo sapiens
  misc_RNA (1)...(19): siRNA sense strand
gcaggaagcagaccucagu

SEQ ID NO: 1063107 - RNA, 19 nt, Homo sapiens
  misc_RNA (1)...(19): siRNA sense strand
acagauaaaccacccagua

SEQ ID NO: 1063108 - RNA, 19 nt, Homo sapiens
  misc_RNA (1)...(19): siRNA sense strand
gagaaccuuccacugauaa

SEQ ID NO: 1063109 - RNA, 19 nt, Homo sapiens
  misc_RNA (1)...(19): siRNA sense strand
gccaaugaauaacuccaaa

SEQ ID NO: 1063110 - RNA, 19 nt, Homo sapiens
  misc_RNA (1)...(19): siRNA sense strand
gcacaagguggcucauuuc

SEQ ID NO: 1063111 - RNA, 19 nt, Homo sapiens
  misc_RNA (1)...(19): siRNA sense strand
gcuguaacaucucuugagu

SEQ ID NO: 1063112 - RNA, 19 nt, Homo sapiens
  misc_RNA (1)...(19): siRNA sense strand
uaaaccacccaguacauuu

SEQ ID NO: 1063113 - RNA, 19 nt, Homo sapiens
  misc_RNA (1)...(19): siRNA sense strand
cgcacaagguggcucauuu

SEQ ID NO: 1063114 - RNA, 19 nt, Homo sapiens
  misc_RNA (1)...(19): siRNA sense strand
uucagaaacucuucacaaa

SEQ ID NO: 1063115 - RNA, 19 nt, Homo sapiens
  misc_RNA (1)...(19): siRNA sense strand
gcauggagcuauuuuggaa

SEQ ID NO: 1063116 - RNA, 19 nt, Homo sapiens
  misc_RNA (1)...(19): siRNA sense strand
gaauaucuggcaacaacuu

SEQ ID NO: 1063117 - RNA, 19 nt, Homo sapiens
  misc_RNA (1)...(19): siRNA sense strand
gaaaacagcgucaacacaa

SEQ ID NO: 1063118 - RNA, 19 nt, Homo sapiens
  misc_RNA (1)...(19): siRNA sense strand
uaccaaugcugucaucuca

SEQ ID NO: 1063119 - RNA, 19 nt, Homo sapiens
  misc_RNA (1)...(19): siRNA sense strand
agaggaagauucuauacuc

SEQ ID NO: 1063120 - RNA, 19 nt, Homo sapiens
  misc_RNA (1)...(19): siRNA sense strand
uaacgucuauggcaaucug

SEQ ID NO: 1063121 - RNA, 19 nt, Homo sapiens
  misc_RNA (1)...(19): siRNA sense strand
gaaggcuguucuuggaugu

SEQ ID NO: 1063122 - RNA, 19 nt, Homo sapiens
  misc_RNA (1)...(19): siRNA sense strand
gaaaugucagaguacuuaa

SEQ ID NO: 1063123 - RNA, 19 nt, Homo sapiens
  misc_RNA (1)...(19): siRNA sense strand
aaauaacugugaccaagau

SEQ ID NO: 1063124 - RNA, 19 nt, Homo sapiens
  misc_RNA (1)...(19): siRNA sense strand
cccaguacauuuaagaaga

SEQ ID NO: 1063125 - RNA, 19 nt, Homo sapiens
  misc_RNA (1)...(19): siRNA sense strand
agaggaaccuggugaagca

SEQ ID NO: 1063126 - RNA, 19 nt, Homo sapiens
  misc_RNA (1)...(19): siRNA sense strand
gcagauagaaaugaccaaa

SEQ ID NO: 1063127 - RNA, 19 nt, Homo sapiens
  misc_RNA (1)...(19): siRNA sense strand
acccugguguggugaauua

SEQ ID NO: 1063128 - RNA, 19 nt, Homo sapiens
  misc_RNA (1)...(19): siRNA sense strand
ccaguacauuuaagaagau

SEQ ID NO: 1063129 - RNA, 19 nt, Homo sapiens
  misc_RNA (1)...(19): siRNA sense strand
cagcagauaaucccacuga

SEQ ID NO: 1063130 - RNA, 19 nt, Homo sapiens
  misc_RNA (1)...(19): siRNA sense strand
gcgaauuauccaacuuuaa

SEQ ID NO: 1063131 - RNA, 19 nt, Homo sapiens
  misc_RNA (1)...(19): siRNA sense strand
cgagaguuccuccaagaaa

SEQ ID NO: 1063132 - RNA, 19 nt, Homo sapiens
  misc_RNA (1)...(19): siRNA sense strand
gauauccauuugaaagaca

SEQ ID NO: 1063133 - RNA, 19 nt, Homo sapiens
  misc_RNA (1)...(19): siRNA sense strand
gaaucgcucaacuuuauug

SEQ ID NO: 1063134 - RNA, 19 nt, Homo sapiens
  misc_RNA (1)...(19): siRNA sense strand
caccucagccuucccagua

SEQ ID NO: 1063135 - RNA, 19 nt, Homo sapiens
  misc_RNA (1)...(19): siRNA sense strand
gaacuugcagccaaacagu

SEQ ID NO: 1063136 - RNA, 19 nt, Homo sapiens
  misc_RNA (1)...(19): siRNA sense strand
ggacccaggaacaggauuu

SEQ ID NO: 1063137 - RNA, 19 nt, Homo sapiens
  misc_RNA (1)...(19): siRNA sense strand
gaaauacgagugccccaua

SEQ ID NO: 1063138 - RNA, 19 nt, Homo sapiens
  misc_RNA (1)...(19): siRNA sense strand
gauaaaccacccaguacau

SEQ ID NO: 1063139 - RNA, 19 nt, Homo sapiens
  misc_RNA (1)...(19): siRNA sense strand
acucucagacaguguauua

SEQ ID NO: 1063140 - RNA, 19 nt, Homo sapiens
  misc_RNA (1)...(19): siRNA sense strand
gauaauuccacuaaugaca

SEQ ID NO: 1063141 - RNA, 19 nt, Homo sapiens
  misc_RNA (1)...(19): siRNA sense strand
cagugagaguuuaucauau

SEQ ID NO: 1063142 - RNA, 19 nt, Homo sapiens
  misc_RNA (1)...(19): siRNA sense strand
gagaguuccuccaagaaaa

SEQ ID NO: 1063143 - RNA, 19 nt, Homo sapiens
  misc_RNA (1)...(19): siRNA sense strand
gcuagauaccuuauucaga

SEQ ID NO: 1063144 - RNA, 19 nt, Homo sapiens
  misc_RNA (1)...(19): siRNA sense strand
acagugaugauaacaauga

SEQ ID NO: 1063145 - RNA, 19 nt, Homo sapiens
  misc_RNA (1)...(19): siRNA sense strand
ccagaaagaccagcaaaca

SEQ ID NO: 1063146 - RNA, 19 nt, Homo sapiens
  misc_RNA (1)...(19): siRNA sense strand
caguggaggugcugaaagu

SEQ ID NO: 1063147 - RNA, 19 nt, Homo sapiens
  misc_RNA (1)...(19): siRNA sense strand
uaucauaucccagaauugu

SEQ ID NO: 1063148 - RNA, 19 nt, Homo sapiens
  misc_RNA (1)...(19): siRNA sense strand
ggacuguauuucugguauc

SEQ ID NO: 1063149 - RNA, 19 nt, Homo sapiens
  misc_RNA (1)...(19): siRNA sense strand
ccuuagacaugacgucaga

SEQ ID NO: 1063150 - RNA, 19 nt, Homo sapiens
  misc_RNA (1)...(19): siRNA sense strand
agauagaaaugaccaaagg

SEQ ID NO: 1063151 - RNA, 19 nt, Homo sapiens
  misc_RNA (1)...(19): siRNA sense strand
gaaaccaacguggaaaaua

SEQ ID NO: 1063152 - RNA, 19 nt, Homo sapiens
  misc_RNA (1)...(19): siRNA sense strand
acuguuaccucugaauauu

SEQ ID NO: 1063153 - RNA, 19 nt, Homo sapiens
  misc_RNA (1)...(19): siRNA sense strand
cgacgacagugaugauaac

SEQ ID NO: 1063154 - RNA, 19 nt, Homo sapiens
  misc_RNA (1)...(19): siRNA sense strand
ccagcuuuaucgggaaaua

SEQ ID NO: 1063155 - RNA, 19 nt, Homo sapiens
  misc_RNA (1)...(19): siRNA sense strand
gaccaucgcccucaacaaa

SEQ ID NO: 1063156 - RNA, 19 nt, Homo sapiens
  misc_RNA (1)...(19): siRNA sense strand
ggugcacucuucuuuauca

SEQ ID NO: 1063157 - RNA, 19 nt, Homo sapiens
  misc_RNA (1)...(19): siRNA sense strand
gcacucuucuuuaucaucu

SEQ ID NO: 1063158 - RNA, 19 nt, Homo sapiens
  misc_RNA (1)...(19): siRNA sense strand
ucaagugccugccuaucuu

SEQ ID NO: 1063159 - RNA, 19 nt, Homo sapiens
  misc_RNA (1)...(19): siRNA sense strand
ccaucgcccucaacaaauu

SEQ ID NO: 1063160 - RNA, 19 nt, Homo sapiens
  misc_RNA (1)...(19): siRNA sense strand
guggaacacuacagacuga

SEQ ID NO: 1063161 - RNA, 19 nt, Homo sapiens
  misc_RNA (1)...(19): siRNA sense strand
guggugcacucuucuuuau

SEQ ID NO: 1063162 - RNA, 19 nt, Homo sapiens
  misc_RNA (1)...(19): siRNA sense strand
gaagagugaaggacccaaa

SEQ ID NO: 1063163 - RNA, 19 nt, Homo sapiens
  misc_RNA (1)...(19): siRNA sense strand
gggagccuguggaacacua

SEQ ID NO: 1063164 - RNA, 19 nt, Homo sapiens
  misc_RNA (1)...(19): siRNA sense strand
ccaaacuggugccguucuu

SEQ ID NO: 1063165 - RNA, 19 nt, Homo sapiens
  misc_RNA (1)...(19): siRNA sense strand
ucagcacccucaucaagug

SEQ ID NO: 1063166 - RNA, 19 nt, Homo sapiens
  misc_RNA (1)...(19): siRNA sense strand
uaucauguccaccuacuau

SEQ ID NO: 1063167 - RNA, 19 nt, Homo sapiens
  misc_RNA (1)...(19): siRNA sense strand
ggucagcacccucaucaag

SEQ ID NO: 1063168 - RNA, 19 nt, Homo sapiens
  misc_RNA (1)...(19): siRNA sense strand
ggugacgccuuccucaucu

SEQ ID NO: 1063169 - RNA, 19 nt, Homo sapiens
  misc_RNA (1)...(19): siRNA sense strand
caaggccaccugcguguau

SEQ ID NO: 1063170 - RNA, 19 nt, Homo sapiens
  misc_RNA (1)...(19): siRNA sense strand
cagcgccacccgcaucuuu

SEQ ID NO: 1063171 - RNA, 19 nt, Homo sapiens
  misc_RNA (1)...(19): siRNA sense strand
gcaggaccaaggauacuuc

SEQ ID NO: 1063172 - RNA, 19 nt, Homo sapiens
  misc_RNA (1)...(19): siRNA sense strand
ugucuucucugcuguaggu

SEQ ID NO: 1063173 - RNA, 19 nt, Homo sapiens
  misc_RNA (1)...(19): siRNA sense strand
ugcauggucugcugauguu

SEQ ID NO: 1063174 - RNA, 19 nt, Homo sapiens
  misc_RNA (1)...(19): siRNA sense strand
cugcugauguuugcuguga

SEQ ID NO: 1063175 - RNA, 19 nt, Homo sapiens
  misc_RNA (1)...(19): siRNA sense strand
ccaaggauacuucgugcau

SEQ ID NO: 1063176 - RNA, 19 nt, Homo sapiens
  misc_RNA (1)...(19): siRNA sense strand
guucuacgccucggccuuu

SEQ ID NO: 1063177 - RNA, 19 nt, Homo sapiens
  misc_RNA (1)...(19): siRNA sense strand
gggucuauguggcccuuau

SEQ ID NO: 1063178 - RNA, 19 nt, Homo sapiens
  misc_RNA (1)...(19): siRNA sense strand
uucaugggcuggcgagcua

SEQ ID NO: 1063179 - RNA, 19 nt, Homo sapiens
  misc_RNA (1)...(19): siRNA sense strand
gugcauggucugcugaugu

SEQ ID NO: 1063180 - RNA, 19 nt, Homo sapiens
  misc_RNA (1)...(19): siRNA sense strand
aaacuggugccguucuuca

SEQ ID NO: 1063181 - RNA, 19 nt, Homo sapiens
  misc_RNA (1)...(19): siRNA sense strand
gagugaaggacccaaacug

SEQ ID NO: 1063182 - RNA, 19 nt, Homo sapiens
  misc_RNA (1)...(19): siRNA sense strand
ucggacaggucuggugaug

SEQ ID NO: 1063183 - RNA, 19 nt, Homo sapiens
  misc_RNA (1)...(19): siRNA sense strand
ucaaugggcucuucuggua

SEQ ID NO: 1063184 - RNA, 19 nt, Homo sapiens
  misc_RNA (1)...(19): siRNA sense strand
ggacaucugugaguucauu

SEQ ID NO: 1063185 - RNA, 19 nt, Homo sapiens
  misc_RNA (1)...(19): siRNA sense strand
ccaaggagcucuacaacgu

SEQ ID NO: 1063186 - RNA, 19 nt, Homo sapiens
  misc_RNA (1)...(19): siRNA sense strand
gaaacggucuggugaagcu

SEQ ID NO: 1063187 - RNA, 19 nt, Homo sapiens
  misc_RNA (1)...(19): siRNA sense strand
acacggcgcuggccuacuu

SEQ ID NO: 1063188 - RNA, 19 nt, Homo sapiens
  misc_RNA (1)...(19): siRNA sense strand
acuaugcgcucuccaagaa

SEQ ID NO: 1063189 - RNA, 19 nt, Homo sapiens
  misc_RNA (1)...(19): siRNA sense strand
gcugggagaucaccaacca

SEQ ID NO: 1063190 - RNA, 19 nt, Homo sapiens
  misc_RNA (1)...(19): siRNA sense strand
acgagaagauccucaaugg

SEQ ID NO: 1063191 - RNA, 19 nt, Homo sapiens
  misc_RNA (1)...(19): siRNA sense strand
gcacgccagccaccaagaa

SEQ ID NO: 1063192 - RNA, 19 nt, Homo sapiens
  misc_RNA (1)...(19): siRNA sense strand
aaugggcucuucugguauu

SEQ ID NO: 1063193 - RNA, 19 nt, Homo sapiens
  misc_RNA (1)...(19): siRNA sense strand
cccgagcucuucaaguauu

SEQ ID NO: 1063194 - RNA, 19 nt, Homo sapiens
  misc_RNA (1)...(19): siRNA sense strand
ggacacuggccucagcuau

SEQ ID NO: 1063195 - RNA, 19 nt, Homo sapiens
  misc_RNA (1)...(19): siRNA sense strand
cucaagcgcuccaccauca

SEQ ID NO: 1063196 - RNA, 19 nt, Homo sapiens
  misc_RNA (1)...(19): siRNA sense strand
gguuaugcuugaacagaug

SEQ ID NO: 1063197 - RNA, 19 nt, Homo sapiens
  misc_RNA (1)...(19): siRNA sense strand
gcgagaaggaguucgugaa

SEQ ID NO: 1063198 - RNA, 19 nt, Homo sapiens
  misc_RNA (1)...(19): siRNA sense strand
ucagcuaucuguccaccau

SEQ ID NO: 1063199 - RNA, 19 nt, Homo sapiens
  misc_RNA (1)...(19): siRNA sense strand
gauccucaaugggcucuuc

SEQ ID NO: 1063200 - RNA, 19 nt, Homo sapiens
  misc_RNA (1)...(19): siRNA sense strand
gagguuaugcuugaacaga

SEQ ID NO: 1063201 - RNA, 19 nt, Homo sapiens
  misc_RNA (1)...(19): siRNA sense strand
acgcaggccucgagguuau

SEQ ID NO: 1063202 - RNA, 19 nt, Homo sapiens
  misc_RNA (1)...(19): siRNA sense strand
ucugugaguucauugacaa

SEQ ID NO: 1063203 - RNA, 19 nt, Homo sapiens
  misc_RNA (1)...(19): siRNA sense strand
gacgagaagauccucaaug

SEQ ID NO: 1063204 - RNA, 19 nt, Homo sapiens
  misc_RNA (1)...(19): siRNA sense strand
gccucgagguuaugcuuga

SEQ ID NO: 1063205 - RNA, 19 nt, Homo sapiens
  misc_RNA (1)...(19): siRNA sense strand
ccuccaugcuugccucgaa

SEQ ID NO: 1063206 - RNA, 19 nt, Homo sapiens
  misc_RNA (1)...(19): siRNA sense strand
gcugccaggugcaagacuu

SEQ ID NO: 1063207 - RNA, 19 nt, Homo sapiens
  misc_RNA (1)...(19): siRNA sense strand
acacuggccucagcuaucu

SEQ ID NO: 1063208 - RNA, 19 nt, Homo sapiens
  misc_RNA (1)...(19): siRNA sense strand
ggacgagaagauccucaau

SEQ ID NO: 1063209 - RNA, 19 nt, Homo sapiens
  misc_RNA (1)...(19): siRNA sense strand
gggcucuucugguauuucu

SEQ ID NO: 1063210 - RNA, 19 nt, Homo sapiens
  misc_RNA (1)...(19): siRNA sense strand
ccgagcucuucaaguauuu

SEQ ID NO: 1063211 - RNA, 19 nt, Homo sapiens
  misc_RNA (1)...(19): siRNA sense strand
gacgcaggccucgagguua

SEQ ID NO: 1063212 - RNA, 19 nt, Homo sapiens
  misc_RNA (1)...(19): siRNA sense strand
ccaagaagggugucaaagc

SEQ ID NO: 1063213 - RNA, 19 nt, Homo sapiens
  misc_RNA (1)...(19): siRNA sense strand
cgacauggcgcuggaguac

SEQ ID NO: 1063214 - RNA, 19 nt, Homo sapiens
  misc_RNA (1)...(19): siRNA sense strand
ucuccgaccuggacaucug

SEQ ID NO: 1063215 - RNA, 19 nt, Homo sapiens
  misc_RNA (1)...(19): siRNA sense strand
gacacuggccucagcuauc

SEQ ID NO: 1063216 - RNA, 19 nt, Homo sapiens
  misc_RNA (1)...(19): siRNA sense strand
acauggcgcuggaguacgu

SEQ ID NO: 1063217 - RNA, 19 nt, Homo sapiens
  misc_RNA (1)...(19): siRNA sense strand
gaccuggacaucugugagu

SEQ ID NO: 1063218 - RNA, 19 nt, Homo sapiens
  misc_RNA (1)...(19): siRNA sense strand
gcugccucgucauugagua

SEQ ID NO: 1063219 - RNA, 19 nt, Homo sapiens
  misc_RNA (1)...(19): siRNA sense strand
ucgaaacggucuggugaag

SEQ ID NO: 1063220 - RNA, 19 nt, Homo sapiens
  misc_RNA (1)...(19): siRNA sense strand
cuucagagcuucucgauuu

SEQ ID NO: 1063221 - RNA, 19 nt, Homo sapiens
  misc_RNA (1)...(19): siRNA sense strand
ucaaggaguucaaucagua

SEQ ID NO: 1063222 - RNA, 19 nt, Homo sapiens
  misc_RNA (1)...(19): siRNA sense strand
gcaccaagcaccucccuua

SEQ ID NO: 1063223 - RNA, 19 nt, Homo sapiens
  misc_RNA (1)...(19): siRNA sense strand
ccuagaaaguaguaucuua

SEQ ID NO: 1063224 - RNA, 19 nt, Homo sapiens
  misc_RNA (1)...(19): siRNA sense strand
gcacaugguucccugaauc

SEQ ID NO: 1063225 - RNA, 19 nt, Homo sapiens
  misc_RNA (1)...(19): siRNA sense strand
gaacauuacccuagaaagu

SEQ ID NO: 1063226 - RNA, 19 nt, Homo sapiens
  misc_RNA (1)...(19): siRNA sense strand
acaagugcuuugaacauua

SEQ ID NO: 1063227 - RNA, 19 nt, Homo sapiens
  misc_RNA (1)...(19): siRNA sense strand
agaaggaaaugaaauguuc

SEQ ID NO: 1063228 - RNA, 19 nt, Homo sapiens
  misc_RNA (1)...(19): siRNA sense strand
ugguacaguuggugaauua

SEQ ID NO: 1063229 - RNA, 19 nt, Homo sapiens
  misc_RNA (1)...(19): siRNA sense strand
ggaauucagccaccaauca

SEQ ID NO: 1063230 - RNA, 19 nt, Homo sapiens
  misc_RNA (1)...(19): siRNA sense strand
ggaguucaaucaguaccua

SEQ ID NO: 1063231 - RNA, 19 nt, Homo sapiens
  misc_RNA (1)...(19): siRNA sense strand
gaagcucuaugcagaacug

SEQ ID NO: 1063232 - RNA, 19 nt, Homo sapiens
  misc_RNA (1)...(19): siRNA sense strand
ucagaaccauaucauguug

SEQ ID NO: 1063233 - RNA, 19 nt, Homo sapiens
  misc_RNA (1)...(19): siRNA sense strand
ggaaguaugaagaaggaaa

SEQ ID NO: 1063234 - RNA, 19 nt, Homo sapiens
  misc_RNA (1)...(19): siRNA sense strand
aaggacagaugaaagagaa

SEQ ID NO: 1063235 - RNA, 19 nt, Homo sapiens
  misc_RNA (1)...(19): siRNA sense strand
ggacagaugaaagagaauu

SEQ ID NO: 1063236 - RNA, 19 nt, Homo sapiens
  misc_RNA (1)...(19): siRNA sense strand
gaagaaggaaaugaaaugu

SEQ ID NO: 1063237 - RNA, 19 nt, Homo sapiens
  misc_RNA (1)...(19): siRNA sense strand
accaaucacugcauucaaa

SEQ ID NO: 1063238 - RNA, 19 nt, Homo sapiens
  misc_RNA (1)...(19): siRNA sense strand
ucaaagaacuacgggaagu

SEQ ID NO: 1063239 - RNA, 19 nt, Homo sapiens
  misc_RNA (1)...(19): siRNA sense strand
ccaagcaccucccuuacca

SEQ ID NO: 1063240 - RNA, 19 nt, Homo sapiens
  misc_RNA (1)...(19): siRNA sense strand
uacaguuggugaauuacua

SEQ ID NO: 1063241 - RNA, 19 nt, Homo sapiens
  misc_RNA (1)...(19): siRNA sense strand
ugaagaaggaaaugaaaug

SEQ ID NO: 1063242 - RNA, 19 nt, Homo sapiens
  misc_RNA (1)...(19): siRNA sense strand
gaaguaugaagaaggaaau

SEQ ID NO: 1063243 - RNA, 19 nt, Homo sapiens
  misc_RNA (1)...(19): siRNA sense strand
caugguucccugaaucuua

SEQ ID NO: 1063244 - RNA, 19 nt, Homo sapiens
  misc_RNA (1)...(19): siRNA sense strand
ggacugcuucagaaccaua

SEQ ID NO: 1063245 - RNA, 19 nt, Homo sapiens
  misc_RNA (1)...(19): siRNA sense strand
uaacaagugcuuugaacau

SEQ ID NO: 1063246 - RNA, 19 nt, Homo sapiens
  misc_RNA (1)...(19): siRNA sense strand
guugauaauuuccaagaca

SEQ ID NO: 1063247 - RNA, 19 nt, Homo sapiens
  misc_RNA (1)...(19): siRNA sense strand
caaagaacuacgggaagua

SEQ ID NO: 1063248 - RNA, 19 nt, Homo sapiens
  misc_RNA (1)...(19): siRNA sense strand
guaugaagaaggaaaugaa

SEQ ID NO: 1063249 - RNA, 19 nt, Homo sapiens
  misc_RNA (1)...(19): siRNA sense strand
caagugcuuugaacauuac

SEQ ID NO: 1063250 - RNA, 19 nt, Homo sapiens
  misc_RNA (1)...(19): siRNA sense strand
gagggcaacguuuggauug

SEQ ID NO: 1063251 - RNA, 19 nt, Homo sapiens
  misc_RNA (1)...(19): siRNA sense strand
gccaggucaucgcaaguuu

SEQ ID NO: 1063252 - RNA, 19 nt, Homo sapiens
  misc_RNA (1)...(19): siRNA sense strand
gcacgugauccagaaauau

SEQ ID NO: 1063253 - RNA, 19 nt, Homo sapiens
  misc_RNA (1)...(19): siRNA sense strand
gaacuacgggaaguaugaa

SEQ ID NO: 1063254 - RNA, 19 nt, Homo sapiens
  misc_RNA (1)...(19): siRNA sense strand
gcucuucggcuuugacuuc

SEQ ID NO: 1063255 - RNA, 19 nt, Homo sapiens
  misc_RNA (1)...(19): siRNA sense strand
aacaagugcuuugaacauu

SEQ ID NO: 1063256 - RNA, 19 nt, Homo sapiens
  misc_RNA (1)...(19): siRNA sense strand
ggauggagagggcaacguu

SEQ ID NO: 1063257 - RNA, 19 nt, Homo sapiens
  misc_RNA (1)...(19): siRNA sense strand
cugaagguguggcucauug

SEQ ID NO: 1063258 - RNA, 19 nt, Homo sapiens
  misc_RNA (1)...(19): siRNA sense strand
cgggaaguaugaagaagga

SEQ ID NO: 1063259 - RNA, 19 nt, Homo sapiens
  misc_RNA (1)...(19): siRNA sense strand
uaacagaaagaaagaggau

SEQ ID NO: 1063260 - RNA, 19 nt, Homo sapiens
  misc_RNA (1)...(19): siRNA sense strand
aacauuacccuagaaagua

SEQ ID NO: 1063261 - RNA, 19 nt, Homo sapiens
  misc_RNA (1)...(19): siRNA sense strand
ucucgccucuuauaacaga

SEQ ID NO: 1063262 - RNA, 19 nt, Homo sapiens
  misc_RNA (1)...(19): siRNA sense strand
cuacaggggugcugacaaa

SEQ ID NO: 1063263 - RNA, 19 nt, Homo sapiens
  misc_RNA (1)...(19): siRNA sense strand
guaccuaacaagugcuuug

SEQ ID NO: 1063264 - RNA, 19 nt, Homo sapiens
  misc_RNA (1)...(19): siRNA sense strand
guggaucaucaguauaaua

SEQ ID NO: 1063265 - RNA, 19 nt, Homo sapiens
  misc_RNA (1)...(19): siRNA sense strand
caagacaagcccugaacug

SEQ ID NO: 1063266 - RNA, 19 nt, Homo sapiens
  misc_RNA (1)...(19): siRNA sense strand
caucgcaaguuugacauuc

SEQ ID NO: 1063267 - RNA, 19 nt, Homo sapiens
  misc_RNA (1)...(19): siRNA sense strand
gagcuucucgauuucauag

SEQ ID NO: 1063268 - RNA, 19 nt, Homo sapiens
  misc_RNA (1)...(19): siRNA sense strand
caaacugugucgcaaagcu

SEQ ID NO: 1063269 - RNA, 19 nt, Homo sapiens
  misc_RNA (1)...(19): siRNA sense strand
guaacucaaggacagauga

SEQ ID NO: 1063270 - RNA, 19 nt, Homo sapiens
  misc_RNA (1)...(19): siRNA sense strand
gagcguggagccugccauu

SEQ ID NO: 1063271 - RNA, 19 nt, Homo sapiens
  misc_RNA (1)...(19): siRNA sense strand
gcuucggacugcuucagaa

SEQ ID NO: 1063272 - RNA, 19 nt, Homo sapiens
  misc_RNA (1)...(19): siRNA sense strand
cuugguggaucaucaguau

SEQ ID NO: 1063273 - RNA, 19 nt, Homo sapiens
  misc_RNA (1)...(19): siRNA sense strand
ugcacgugauccagaaaua

SEQ ID NO: 1063274 - RNA, 19 nt, Homo sapiens
  misc_RNA (1)...(19): siRNA sense strand
aauucuuucucgccucuua

SEQ ID NO: 1063275 - RNA, 19 nt, Homo sapiens
  misc_RNA (1)...(19): siRNA sense strand
ggugaaggcauucucaucu

SEQ ID NO: 1063276 - RNA, 19 nt, Homo sapiens
  misc_RNA (1)...(19): siRNA sense strand
acauagccauuuccagugu

SEQ ID NO: 1063277 - RNA, 19 nt, Homo sapiens
  misc_RNA (1)...(19): siRNA sense strand
gcguggagccugccauuag

SEQ ID NO: 1063278 - RNA, 19 nt, Homo sapiens
  misc_RNA (1)...(19): siRNA sense strand
agaacuacgggaaguauga

SEQ ID NO: 1063279 - RNA, 19 nt, Homo sapiens
  misc_RNA (1)...(19): siRNA sense strand
caaggacagaugaaagaga

SEQ ID NO: 1063280 - RNA, 19 nt, Homo sapiens
  misc_RNA (1)...(19): siRNA sense strand
ccuaacaagugcuuugaac

SEQ ID NO: 1063281 - RNA, 19 nt, Homo sapiens
  misc_RNA (1)...(19): siRNA sense strand
ugguggaucaucaguauaa

SEQ ID NO: 1063282 - RNA, 19 nt, Homo sapiens
  misc_RNA (1)...(19): siRNA sense strand
gcauucucaucuccucaga

SEQ ID NO: 1063283 - RNA, 19 nt, Homo sapiens
  misc_RNA (1)...(19): siRNA sense strand
gauggagagggcaacguuu

SEQ ID NO: 1063284 - RNA, 19 nt, Homo sapiens
  misc_RNA (1)...(19): siRNA sense strand
cuucagaaccauaucaugu

SEQ ID NO: 1063285 - RNA, 19 nt, Homo sapiens
  misc_RNA (1)...(19): siRNA sense strand
uagugaagcuaaucaagac

SEQ ID NO: 1063286 - RNA, 19 nt, Homo sapiens
  misc_RNA (1)...(19): siRNA sense strand
ccaccaaucaguaacucaa

SEQ ID NO: 1063287 - RNA, 19 nt, Homo sapiens
  misc_RNA (1)...(19): siRNA sense strand
acauuacccuagaaaguag

SEQ ID NO: 1063288 - RNA, 19 nt, Homo sapiens
  misc_RNA (1)...(19): siRNA sense strand
gcugaguccugcacauggu

SEQ ID NO: 1063289 - RNA, 19 nt, Homo sapiens
  misc_RNA (1)...(19): siRNA sense strand
caggucaucgcaaguuuga

SEQ ID NO: 1063290 - RNA, 19 nt, Homo sapiens
  misc_RNA (1)...(19): siRNA sense strand
gugaaggcauucucaucuc

SEQ ID NO: 1063291 - RNA, 19 nt, Homo sapiens
  misc_RNA (1)...(19): siRNA sense strand
gaauucagccaccaaucag

SEQ ID NO: 1063292 - RNA, 19 nt, Homo sapiens
  misc_RNA (1)...(19): siRNA sense strand
ccaaggcaucguggacaua

SEQ ID NO: 1063293 - RNA, 19 nt, Homo sapiens
  misc_RNA (1)...(19): siRNA sense strand
gccaaggcaucguggacau

SEQ ID NO: 1063294 - RNA, 19 nt, Homo sapiens
  misc_RNA (1)...(19): siRNA sense strand
cuacgggaaguaugaagaa

SEQ ID NO: 1063295 - RNA, 19 nt, Homo sapiens
  misc_RNA (1)...(19): siRNA sense strand
gucaucagccggugccaaa

SEQ ID NO: 1063296 - RNA, 19 nt, Homo sapiens
  misc_RNA (1)...(19): siRNA sense strand
ggagagggcaacguuugga

SEQ ID NO: 1063297 - RNA, 19 nt, Homo sapiens
  misc_RNA (1)...(19): siRNA sense strand
aaucaguaccuaacaagug

SEQ ID NO: 1063298 - RNA, 19 nt, Homo sapiens
  misc_RNA (1)...(19): siRNA sense strand
aaagaacuacgggaaguau

SEQ ID NO: 1063299 - RNA, 19 nt, Homo sapiens
  misc_RNA (1)...(19): siRNA sense strand
cucagaggcuucagagcuu

SEQ ID NO: 1063300 - RNA, 19 nt, Homo sapiens
  misc_RNA (1)...(19): siRNA sense strand
uaacucaaggacagaugaa

SEQ ID NO: 1063301 - RNA, 19 nt, Homo sapiens
  misc_RNA (1)...(19): siRNA sense strand
caucguggacauagccauu

SEQ ID NO: 1063302 - RNA, 19 nt, Homo sapiens
  misc_RNA (1)...(19): siRNA sense strand
uuucucgccucuuauaaca

SEQ ID NO: 1063303 - RNA, 19 nt, Homo sapiens
  misc_RNA (1)...(19): siRNA sense strand
ucagaagcucuaugcagaa

SEQ ID NO: 1063304 - RNA, 19 nt, Homo sapiens
  misc_RNA (1)...(19): siRNA sense strand
gaaggaaaugaaauguucu

SEQ ID NO: 1063305 - RNA, 19 nt, Homo sapiens
  misc_RNA (1)...(19): siRNA sense strand
gaccaaucacugcauucaa

SEQ ID NO: 1063306 - RNA, 19 nt, Homo sapiens
  misc_RNA (1)...(19): siRNA sense strand
cagaagcucuaugcagaac

SEQ ID NO: 1063307 - RNA, 19 nt, Homo sapiens
  misc_RNA (1)...(19): siRNA sense strand
ucucaagacuccaguugcu

SEQ ID NO: 1063308 - RNA, 19 nt, Homo sapiens
  misc_RNA (1)...(19): siRNA sense strand
ugaagcuaaucaagacaag

SEQ ID NO: 1063309 - RNA, 19 nt, Homo sapiens
  misc_RNA (1)...(19): siRNA sense strand
ccaaucaguaacucaagga

SEQ ID NO: 1063310 - RNA, 19 nt, Homo sapiens
  misc_RNA (1)...(19): siRNA sense strand
gauguggagcaaccucaga

SEQ ID NO: 1063311 - RNA, 19 nt, Homo sapiens
  misc_RNA (1)...(19): siRNA sense strand
gugaagcuaaucaagacaa

SEQ ID NO: 1063312 - RNA, 19 nt, Homo sapiens
  misc_RNA (1)...(19): siRNA sense strand
gacagaugaaagagaauuc

SEQ ID NO: 1063313 - RNA, 19 nt, Homo sapiens
  misc_RNA (1)...(19): siRNA sense strand
aaaccugccauuugaccaa

SEQ ID NO: 1063314 - RNA, 19 nt, Homo sapiens
  misc_RNA (1)...(19): siRNA sense strand
aaauguucuucaaggaguu

SEQ ID NO: 1063315 - RNA, 19 nt, Homo sapiens
  misc_RNA (1)...(19): siRNA sense strand
gcuucucgauuucauagac

SEQ ID NO: 1063316 - RNA, 19 nt, Homo sapiens
  misc_RNA (1)...(19): siRNA sense strand
caaggcaucguggacauag

SEQ ID NO: 1063317 - RNA, 19 nt, Homo sapiens
  misc_RNA (1)...(19): siRNA sense strand
cuauagagagggugugcuu

SEQ ID NO: 1063318 - RNA, 19 nt, Homo sapiens
  misc_RNA (1)...(19): siRNA sense strand
gguggaucaucaguauaau

SEQ ID NO: 1063319 - RNA, 19 nt, Homo sapiens
  misc_RNA (1)...(19): siRNA sense strand
ucgcaaguuugacauucga

SEQ ID NO: 1063320 - RNA, 19 nt, Homo sapiens
  misc_RNA (1)...(19): siRNA sense strand
gaagauggcuauuuauaug

SEQ ID NO: 1063321 - RNA, 19 nt, Homo sapiens
  misc_RNA (1)...(19): siRNA sense strand
gcaagagguugacauuaua

SEQ ID NO: 1063322 - RNA, 19 nt, Homo sapiens
  misc_RNA (1)...(19): siRNA sense strand
caucauccaugcauaauaa

SEQ ID NO: 1063323 - RNA, 19 nt, Homo sapiens
  misc_RNA (1)...(19): siRNA sense strand
gaagaacgacggcuacuuu

SEQ ID NO: 1063324 - RNA, 19 nt, Homo sapiens
  misc_RNA (1)...(19): siRNA sense strand
ggaaggagauuauauuguc

SEQ ID NO: 1063325 - RNA, 19 nt, Homo sapiens
  misc_RNA (1)...(19): siRNA sense strand
cagugaagauggcuauuua

SEQ ID NO: 1063326 - RNA, 19 nt, Homo sapiens
  misc_RNA (1)...(19): siRNA sense strand
ggaguaaauugcagaauca

SEQ ID NO: 1063327 - RNA, 19 nt, Homo sapiens
  misc_RNA (1)...(19): siRNA sense strand
gcauugaggugcuacagaa

SEQ ID NO: 1063328 - RNA, 19 nt, Homo sapiens
  misc_RNA (1)...(19): siRNA sense strand
aaagacacauuuacccaua

SEQ ID NO: 1063329 - RNA, 19 nt, Homo sapiens
  misc_RNA (1)...(19): siRNA sense strand
caagaaagcguguuugaga

SEQ ID NO: 1063330 - RNA, 19 nt, Homo sapiens
  misc_RNA (1)...(19): siRNA sense strand
gaaaguggccacaaacuca

SEQ ID NO: 1063331 - RNA, 19 nt, Homo sapiens
  misc_RNA (1)...(19): siRNA sense strand
gaacacagaggaggcauuu

SEQ ID NO: 1063332 - RNA, 19 nt, Homo sapiens
  misc_RNA (1)...(19): siRNA sense strand
ccauucagcuuguggauug

SEQ ID NO: 1063333 - RNA, 19 nt, Homo sapiens
  misc_RNA (1)...(19): siRNA sense strand
gcaagaagcugcggagcau

SEQ ID NO: 1063334 - RNA, 19 nt, Homo sapiens
  misc_RNA (1)...(19): siRNA sense strand
gaggaggcauuuacgauuc

SEQ ID NO: 1063335 - RNA, 19 nt, Homo sapiens
  misc_RNA (1)...(19): siRNA sense strand
gugaagauggcuauuuaua

SEQ ID NO: 1063336 - RNA, 19 nt, Homo sapiens
  misc_RNA (1)...(19): siRNA sense strand
ccgcagggguuuuaaauua

SEQ ID NO: 1063337 - RNA, 19 nt, Homo sapiens
  misc_RNA (1)...(19): siRNA sense strand
uggaacugcugaugacaua

SEQ ID NO: 1063338 - RNA, 19 nt, Homo sapiens
  misc_RNA (1)...(19): siRNA sense strand
ggccucaggucaagaagaa

SEQ ID NO: 1063339 - RNA, 19 nt, Homo sapiens
  misc_RNA (1)...(19): siRNA sense strand
agacaguucuugguacuaa

SEQ ID NO: 1063340 - RNA, 19 nt, Homo sapiens
  misc_RNA (1)...(19): siRNA sense strand
gaaggccaguguccuguuc

SEQ ID NO: 1063341 - RNA, 19 nt, Homo sapiens
  misc_RNA (1)...(19): siRNA sense strand
gagcaagagguugacauua

SEQ ID NO: 1063342 - RNA, 19 nt, Homo sapiens
  misc_RNA (1)...(19): siRNA sense strand
gaugaaauugcagaucuua

SEQ ID NO: 1063343 - RNA, 19 nt, Homo sapiens
  misc_RNA (1)...(19): siRNA sense strand
gcuuagccauugaugauga

SEQ ID NO: 1063344 - RNA, 19 nt, Homo sapiens
  misc_RNA (1)...(19): siRNA sense strand
ccacaucauccaugcauaa

SEQ ID NO: 1063345 - RNA, 19 nt, Homo sapiens
  misc_RNA (1)...(19): siRNA sense strand
gaacauuacagugaagaug

SEQ ID NO: 1063346 - RNA, 19 nt, Homo sapiens
  misc_RNA (1)...(19): siRNA sense strand
auaauaagagugccacaua

SEQ ID NO: 1063347 - RNA, 19 nt, Homo sapiens
  misc_RNA (1)...(19): siRNA sense strand
agcaagagguugacauuau

SEQ ID NO: 1063348 - RNA, 19 nt, Homo sapiens
  misc_RNA (1)...(19): siRNA sense strand
gaaggagauuauauugucu

SEQ ID NO: 1063349 - RNA, 19 nt, Homo sapiens
  misc_RNA (1)...(19): siRNA sense strand
ccaagaaaaucuccaagaa

SEQ ID NO: 1063350 - RNA, 19 nt, Homo sapiens
  misc_RNA (1)...(19): siRNA sense strand
aagaaagcguguuugagaa

SEQ ID NO: 1063351 - RNA, 19 nt, Homo sapiens
  misc_RNA (1)...(19): siRNA sense strand
guaaauugcagaaucaaag

SEQ ID NO: 1063352 - RNA, 19 nt, Homo sapiens
  misc_RNA (1)...(19): siRNA sense strand
aaacugagcaagagguuga

SEQ ID NO: 1063353 - RNA, 19 nt, Homo sapiens
  misc_RNA (1)...(19): siRNA sense strand
gcagaugggacuccuguuc

SEQ ID NO: 1063354 - RNA, 19 nt, Homo sapiens
  misc_RNA (1)...(19): siRNA sense strand
uggccacacugaagaauga

SEQ ID NO: 1063355 - RNA, 19 nt, Homo sapiens
  misc_RNA (1)...(19): siRNA sense strand
ugaaauugcagaucuuaug

SEQ ID NO: 1063356 - RNA, 19 nt, Homo sapiens
  misc_RNA (1)...(19): siRNA sense strand
gaaauugcagaucuuaugg

SEQ ID NO: 1063357 - RNA, 19 nt, Homo sapiens
  misc_RNA (1)...(19): siRNA sense strand
cggaguaaauugcagaauc

SEQ ID NO: 1063358 - RNA, 19 nt, Homo sapiens
  misc_RNA (1)...(19): siRNA sense strand
ugagugagguuaugaagcu

SEQ ID NO: 1063359 - RNA, 19 nt, Homo sapiens
  misc_RNA (1)...(19): siRNA sense strand
uuaugaagcugcugaagag

SEQ ID NO: 1063360 - RNA, 19 nt, Homo sapiens
  misc_RNA (1)...(19): siRNA sense strand
uaauaagagugccacauac

SEQ ID NO: 1063361 - RNA, 19 nt, Homo sapiens
  misc_RNA (1)...(19): siRNA sense strand
cagcuuagccugcgugaag

SEQ ID NO: 1063362 - RNA, 19 nt, Homo sapiens
  misc_RNA (1)...(19): siRNA sense strand
cauagaugccuuucagaga

SEQ ID NO: 1063363 - RNA, 19 nt, Homo sapiens
  misc_RNA (1)...(19): siRNA sense strand
ugggagaggucuaccaaca

SEQ ID NO: 1063364 - RNA, 19 nt, Homo sapiens
  misc_RNA (1)...(19): siRNA sense strand
uuacccauacuccaaguua

SEQ ID NO: 1063365 - RNA, 19 nt, Homo sapiens
  misc_RNA (1)...(19): siRNA sense strand
gcuggagagugccauagau

SEQ ID NO: 1063366 - RNA, 19 nt, Homo sapiens
  misc_RNA (1)...(19): siRNA sense strand
cauugaugaugacgacaaa

SEQ ID NO: 1063367 - RNA, 19 nt, Homo sapiens
  misc_RNA (1)...(19): siRNA sense strand
gaaagcguguuugagaaaa

SEQ ID NO: 1063368 - RNA, 19 nt, Homo sapiens
  misc_RNA (1)...(19): siRNA sense strand
caacucagaccugcagaug

SEQ ID NO: 1063369 - RNA, 19 nt, Homo sapiens
  misc_RNA (1)...(19): siRNA sense strand
guuaugaagcugcugaaga

SEQ ID NO: 1063370 - RNA, 19 nt, Homo sapiens
  misc_RNA (1)...(19): siRNA sense strand
agaaagcguguuugagaaa

SEQ ID NO: 1063371 - RNA, 19 nt, Homo sapiens
  misc_RNA (1)...(19): siRNA sense strand
ccuggaacauuacagugaa

SEQ ID NO: 1063372 - RNA, 19 nt, Homo sapiens
  misc_RNA (1)...(19): siRNA sense strand
ccucuuggccugaaggaaa

SEQ ID NO: 1063373 - RNA, 19 nt, Homo sapiens
  misc_RNA (1)...(19): siRNA sense strand
gaagaugaaauugcagauc

SEQ ID NO: 1063374 - RNA, 19 nt, Homo sapiens
  misc_RNA (1)...(19): siRNA sense strand
caacaagaacagacagaag

SEQ ID NO: 1063375 - RNA, 19 nt, Homo sapiens
  misc_RNA (1)...(19): siRNA sense strand
ggacgagaucgagaugaaa

SEQ ID NO: 1063376 - RNA, 19 nt, Homo sapiens
  misc_RNA (1)...(19): siRNA sense strand
caagagguugacauuauau

SEQ ID NO: 1063377 - RNA, 19 nt, Homo sapiens
  misc_RNA (1)...(19): siRNA sense strand
cggaaaaccuucugaaagu

SEQ ID NO: 1063378 - RNA, 19 nt, Homo sapiens
  misc_RNA (1)...(19): siRNA sense strand
gcucagcgugcucgucaaa

SEQ ID NO: 1063379 - RNA, 19 nt, Homo sapiens
  misc_RNA (1)...(19): siRNA sense strand
gcaccaacaagaacagaca

SEQ ID NO: 1063380 - RNA, 19 nt, Homo sapiens
  misc_RNA (1)...(19): siRNA sense strand
aagcuuuccuuccugaguu

SEQ ID NO: 1063381 - RNA, 19 nt, Homo sapiens
  misc_RNA (1)...(19): siRNA sense strand
cgacaaaacugauaaaacc

SEQ ID NO: 1063382 - RNA, 19 nt, Homo sapiens
  misc_RNA (1)...(19): siRNA sense strand
cagaaaacguacuccauga

SEQ ID NO: 1063383 - RNA, 19 nt, Homo sapiens
  misc_RNA (1)...(19): siRNA sense strand
gggaaggagauuauauugu

SEQ ID NO: 1063384 - RNA, 19 nt, Homo sapiens
  misc_RNA (1)...(19): siRNA sense strand
gaacugcugaugacauacu

SEQ ID NO: 1063385 - RNA, 19 nt, Homo sapiens
  misc_RNA (1)...(19): siRNA sense strand
aggacgagaucgagaugaa

SEQ ID NO: 1063386 - RNA, 19 nt, Homo sapiens
  misc_RNA (1)...(19): siRNA sense strand
gauuauauugucuccauuc

SEQ ID NO: 1063387 - RNA, 19 nt, Homo sapiens
  misc_RNA (1)...(19): siRNA sense strand
uaccugaaagacacauuua

SEQ ID NO: 1063388 - RNA, 19 nt, Homo sapiens
  misc_RNA (1)...(19): siRNA sense strand
ugagcaagagguugacauu

SEQ ID NO: 1063389 - RNA, 19 nt, Homo sapiens
  misc_RNA (1)...(19): siRNA sense strand
acacagaggaggcauuuac

SEQ ID NO: 1063390 - RNA, 19 nt, Homo sapiens
  misc_RNA (1)...(19): siRNA sense strand
agaggaggcauuuacgauu

SEQ ID NO: 1063391 - RNA, 19 nt, Homo sapiens
  misc_RNA (1)...(19): siRNA sense strand
acucagacaguucuuggua

SEQ ID NO: 1063392 - RNA, 19 nt, Homo sapiens
  misc_RNA (1)...(19): siRNA sense strand
caugaucugcuuagccauu

SEQ ID NO: 1063393 - RNA, 19 nt, Homo sapiens
  misc_RNA (1)...(19): siRNA sense strand
ugcagaugcucaaggaaga

SEQ ID NO: 1063394 - RNA, 19 nt, Homo sapiens
  misc_RNA (1)...(19): siRNA sense strand
gcgugaaggcccaccacua

SEQ ID NO: 1063395 - RNA, 19 nt, Homo sapiens
  misc_RNA (1)...(19): siRNA sense strand
aaacgaaagacgucgacuu

SEQ ID NO: 1063396 - RNA, 19 nt, Homo sapiens
  misc_RNA (1)...(19): siRNA sense strand
ccgggaaggagauuauauu

SEQ ID NO: 1063397 - RNA, 19 nt, Homo sapiens
  misc_RNA (1)...(19): siRNA sense strand
caaaggugcgggagcaagu

SEQ ID NO: 1063398 - RNA, 19 nt, Homo sapiens
  misc_RNA (1)...(19): siRNA sense strand
ggaaaaccuucugaaagug

SEQ ID NO: 1063399 - RNA, 19 nt, Homo sapiens
  misc_RNA (1)...(19): siRNA sense strand
agaaccugcugcuggagaa

SEQ ID NO: 1063400 - RNA, 19 nt, Homo sapiens
  misc_RNA (1)...(19): siRNA sense strand
gggcgucuaucagaacaca

SEQ ID NO: 1063401 - RNA, 19 nt, Homo sapiens
  misc_RNA (1)...(19): siRNA sense strand
acagugaagauggcuauuu

SEQ ID NO: 1063402 - RNA, 19 nt, Homo sapiens
  misc_RNA (1)...(19): siRNA sense strand
ccaacaagaacagacagaa

SEQ ID NO: 1063403 - RNA, 19 nt, Homo sapiens
  misc_RNA (1)...(19): siRNA sense strand
cagaggaggcauuuacgau

SEQ ID NO: 1063404 - RNA, 19 nt, Homo sapiens
  misc_RNA (1)...(19): siRNA sense strand
ucagacaguucuugguacu

SEQ ID NO: 1063405 - RNA, 19 nt, Homo sapiens
  misc_RNA (1)...(19): siRNA sense strand
cgggaaggagauuauauug

SEQ ID NO: 1063406 - RNA, 19 nt, Homo sapiens
  misc_RNA (1)...(19): siRNA sense strand
aagaagcugcggagcauug

SEQ ID NO: 1063407 - RNA, 19 nt, Homo sapiens
  misc_RNA (1)...(19): siRNA sense strand
cccaagaaagcguguuuga

SEQ ID NO: 1063408 - RNA, 19 nt, Homo sapiens
  misc_RNA (1)...(19): siRNA sense strand
ggguggaacugcugaugac

SEQ ID NO: 1063409 - RNA, 19 nt, Homo sapiens
  misc_RNA (1)...(19): siRNA sense strand
cagaugggacuccuguuca

SEQ ID NO: 1063410 - RNA, 19 nt, Homo sapiens
  misc_RNA (1)...(19): siRNA sense strand
acucagaccugcagaugcu

SEQ ID NO: 1063411 - RNA, 19 nt, Homo sapiens
  misc_RNA (1)...(19): siRNA sense strand
guacuccaugaucugcuua

SEQ ID NO: 1063412 - RNA, 19 nt, Homo sapiens
  misc_RNA (1)...(19): siRNA sense strand
gacgagaucgagaugaaag

SEQ ID NO: 1063413 - RNA, 19 nt, Homo sapiens
  misc_RNA (1)...(19): siRNA sense strand
gagguugacauuauauugc

SEQ ID NO: 1063414 - RNA, 19 nt, Homo sapiens
  misc_RNA (1)...(19): siRNA sense strand
agagguugacauuauauug

SEQ ID NO: 1063415 - RNA, 19 nt, Homo sapiens
  misc_RNA (1)...(19): siRNA sense strand
ccacacugaagaaugauca

SEQ ID NO: 1063416 - RNA, 19 nt, Homo sapiens
  misc_RNA (1)...(19): siRNA sense strand
ggugggagaggucuaccaa

SEQ ID NO: 1063417 - RNA, 19 nt, Homo sapiens
  misc_RNA (1)...(19): siRNA sense strand
ccugggauccggaaugaau

SEQ ID NO: 1063418 - RNA, 19 nt, Homo sapiens
  misc_RNA (1)...(19): siRNA sense strand
gaaaaucuccaagaagcuu

SEQ ID NO: 1063419 - RNA, 19 nt, Homo sapiens
  misc_RNA (1)...(19): siRNA sense strand
caagaacagacagaaguca

SEQ ID NO: 1063420 - RNA, 19 nt, Homo sapiens
  misc_RNA (1)...(19): siRNA sense strand
gaagauaaauuaggcauuc

SEQ ID NO: 1063421 - RNA, 19 nt, Homo sapiens
  misc_RNA (1)...(19): siRNA sense strand
gcagaaagccaaauacuug

SEQ ID NO: 1063422 - RNA, 19 nt, Homo sapiens
  misc_RNA (1)...(19): siRNA sense strand
ggacaaguaugcuccagaa

SEQ ID NO: 1063423 - RNA, 19 nt, Homo sapiens
  misc_RNA (1)...(19): siRNA sense strand
gaaacccgaagauaaauua

SEQ ID NO: 1063424 - RNA, 19 nt, Homo sapiens
  misc_RNA (1)...(19): siRNA sense strand
ggagaaauuugcacugaug

SEQ ID NO: 1063425 - RNA, 19 nt, Homo sapiens
  misc_RNA (1)...(19): siRNA sense strand
ggacagugccaacaaguuu

SEQ ID NO: 1063426 - RNA, 19 nt, Homo sapiens
  misc_RNA (1)...(19): siRNA sense strand
ucagaaggcuuacgucaug

SEQ ID NO: 1063427 - RNA, 19 nt, Homo sapiens
  misc_RNA (1)...(19): siRNA sense strand
gaagcgagccuauaucugu

SEQ ID NO: 1063428 - RNA, 19 nt, Homo sapiens
  misc_RNA (1)...(19): siRNA sense strand
ucucucagcuggacaagua

SEQ ID NO: 1063429 - RNA, 19 nt, Homo sapiens
  misc_RNA (1)...(19): siRNA sense strand
gcaagucccagaagaauau

SEQ ID NO: 1063430 - RNA, 19 nt, Homo sapiens
  misc_RNA (1)...(19): siRNA sense strand
gagcagagccacacuaagu

SEQ ID NO: 1063431 - RNA, 19 nt, Homo sapiens
  misc_RNA (1)...(19): siRNA sense strand
agacugaggucguugauuc

SEQ ID NO: 1063432 - RNA, 19 nt, Homo sapiens
  misc_RNA (1)...(19): siRNA sense strand
ugaaaugacugcugaguac

SEQ ID NO: 1063433 - RNA, 19 nt, Homo sapiens
  misc_RNA (1)...(19): siRNA sense strand
ccaacaaguuugaggagaa

SEQ ID NO: 1063434 - RNA, 19 nt, Homo sapiens
  misc_RNA (1)...(19): siRNA sense strand
ugaaaucaaucaguucuug

SEQ ID NO: 1063435 - RNA, 19 nt, Homo sapiens
  misc_RNA (1)...(19): siRNA sense strand
aaucacagcauucauagua

SEQ ID NO: 1063436 - RNA, 19 nt, Homo sapiens
  misc_RNA (1)...(19): siRNA sense strand
ccaaauacuugccuaaacu

SEQ ID NO: 1063437 - RNA, 19 nt, Homo sapiens
  misc_RNA (1)...(19): siRNA sense strand
aaaccuagaugagcagauu

SEQ ID NO: 1063438 - RNA, 19 nt, Homo sapiens
  misc_RNA (1)...(19): siRNA sense strand
acaagaggcucagugaauu

SEQ ID NO: 1063439 - RNA, 19 nt, Homo sapiens
  misc_RNA (1)...(19): siRNA sense strand
uagaugagcagauuaagaa

SEQ ID NO: 1063440 - RNA, 19 nt, Homo sapiens
  misc_RNA (1)...(19): siRNA sense strand
gaagcuuacuugcagaauc

SEQ ID NO: 1063441 - RNA, 19 nt, Homo sapiens
  misc_RNA (1)...(19): siRNA sense strand
ggaggacuggccaauauuu

SEQ ID NO: 1063442 - RNA, 19 nt, Homo sapiens
  misc_RNA (1)...(19): siRNA sense strand
gguuuaagguggccaugaa

SEQ ID NO: 1063443 - RNA, 19 nt, Homo sapiens
  misc_RNA (1)...(19): siRNA sense strand
gaugaaacuuuggagaaau

SEQ ID NO: 1063444 - RNA, 19 nt, Homo sapiens
  misc_RNA (1)...(19): siRNA sense strand
caggagaaauuugcacuga

SEQ ID NO: 1063445 - RNA, 19 nt, Homo sapiens
  misc_RNA (1)...(19): siRNA sense strand
uagccaagaugaacuuaau

SEQ ID NO: 1063446 - RNA, 19 nt, Homo sapiens
  misc_RNA (1)...(19): siRNA sense strand
uguacgagcuuucgccaaa

SEQ ID NO: 1063447 - RNA, 19 nt, Homo sapiens
  misc_RNA (1)...(19): siRNA sense strand
caaaaucacagcauucaua

SEQ ID NO: 1063448 - RNA, 19 nt, Homo sapiens
  misc_RNA (1)...(19): siRNA sense strand
ggaaacccgaagauaaauu

SEQ ID NO: 1063449 - RNA, 19 nt, Homo sapiens
  misc_RNA (1)...(19): siRNA sense strand
agaugaaacuuuggagaaa

SEQ ID NO: 1063450 - RNA, 19 nt, Homo sapiens
  misc_RNA (1)...(19): siRNA sense strand
caagaggcucagugaauuu

SEQ ID NO: 1063451 - RNA, 19 nt, Homo sapiens
  misc_RNA (1)...(19): siRNA sense strand
ucacagcauucauaguaga

SEQ ID NO: 1063452 - RNA, 19 nt, Homo sapiens
  misc_RNA (1)...(19): siRNA sense strand
gaguacgccugcacaagga

SEQ ID NO: 1063453 - RNA, 19 nt, Homo sapiens
  misc_RNA (1)...(19): siRNA sense strand
gaaagugucccagcagauc

SEQ ID NO: 1063454 - RNA, 19 nt, Homo sapiens
  misc_RNA (1)...(19): siRNA sense strand
ggccugggcuucuccaaca

SEQ ID NO: 1063455 - RNA, 19 nt, Homo sapiens
  misc_RNA (1)...(19): siRNA sense strand
cgagggaaccaaugagauu

SEQ ID NO: 1063456 - RNA, 19 nt, Homo sapiens
  misc_RNA (1)...(19): siRNA sense strand
gagaagcgagccuauaucu

SEQ ID NO: 1063457 - RNA, 19 nt, Homo sapiens
  misc_RNA (1)...(19): siRNA sense strand
cagaugaaacuuuggagaa

SEQ ID NO: 1063458 - RNA, 19 nt, Homo sapiens
  misc_RNA (1)...(19): siRNA sense strand
cagugaauuuggauugauu

SEQ ID NO: 1063459 - RNA, 19 nt, Homo sapiens
  misc_RNA (1)...(19): siRNA sense strand
ggucggagauggguuuaag

SEQ ID NO: 1063460 - RNA, 19 nt, Homo sapiens
  misc_RNA (1)...(19): siRNA sense strand
gaaguuagccaagaugaac

SEQ ID NO: 1063461 - RNA, 19 nt, Homo sapiens
  misc_RNA (1)...(19): siRNA sense strand
ggucguugauucugaugga

SEQ ID NO: 1063462 - RNA, 19 nt, Homo sapiens
  misc_RNA (1)...(19): siRNA sense strand
gccaagaugaacuuaauga

SEQ ID NO: 1063463 - RNA, 19 nt, Homo sapiens
  misc_RNA (1)...(19): siRNA sense strand
caagagauugauugaaaug

SEQ ID NO: 1063464 - RNA, 19 nt, Homo sapiens
  misc_RNA (1)...(19): siRNA sense strand
gccaaauacuugccuaaac

SEQ ID NO: 1063465 - RNA, 19 nt, Homo sapiens
  misc_RNA (1)...(19): siRNA sense strand
gagauugauugaaaugacu

SEQ ID NO: 1063466 - RNA, 19 nt, Homo sapiens
  misc_RNA (1)...(19): siRNA sense strand
ugggaaacccgaagauaaa

SEQ ID NO: 1063467 - RNA, 19 nt, Homo sapiens
  misc_RNA (1)...(19): siRNA sense strand
caggauccaugagcuuaaa

SEQ ID NO: 1063468 - RNA, 19 nt, Homo sapiens
  misc_RNA (1)...(19): siRNA sense strand
gcucagugaauuuggauug

SEQ ID NO: 1063469 - RNA, 19 nt, Homo sapiens
  misc_RNA (1)...(19): siRNA sense strand
gcacugaggagcagaaagc

SEQ ID NO: 1063470 - RNA, 19 nt, Homo sapiens
  misc_RNA (1)...(19): siRNA sense strand
gagguucucuuggccaaca

SEQ ID NO: 1063471 - RNA, 19 nt, Homo sapiens
  misc_RNA (1)...(19): siRNA sense strand
gugaagacaagaagcacua

SEQ ID NO: 1063472 - RNA, 19 nt, Homo sapiens
  misc_RNA (1)...(19): siRNA sense strand
aaucccagaugaaacuuug

SEQ ID NO: 1063473 - RNA, 19 nt, Homo sapiens
  misc_RNA (1)...(19): siRNA sense strand
caaagacugaggucguuga

SEQ ID NO: 1063474 - RNA, 19 nt, Homo sapiens
  misc_RNA (1)...(19): siRNA sense strand
gaggcucagugaauuugga

SEQ ID NO: 1063475 - RNA, 19 nt, Homo sapiens
  misc_RNA (1)...(19): siRNA sense strand
gaaacuuuggagaaauuga

SEQ ID NO: 1063476 - RNA, 19 nt, Homo sapiens
  misc_RNA (1)...(19): siRNA sense strand
aggagcagcugguacugaa

SEQ ID NO: 1063477 - RNA, 19 nt, Homo sapiens
  misc_RNA (1)...(19): siRNA sense strand
uggagucacuaaugggaaa

SEQ ID NO: 1063478 - RNA, 19 nt, Homo sapiens
  misc_RNA (1)...(19): siRNA sense strand
gagcagaaagccaaauacu

SEQ ID NO: 1063479 - RNA, 19 nt, Homo sapiens
  misc_RNA (1)...(19): siRNA sense strand
cccagcagauccuugagaa

SEQ ID NO: 1063480 - RNA, 19 nt, Homo sapiens
  misc_RNA (1)...(19): siRNA sense strand
gagcagauuaagaaagugu

SEQ ID NO: 1063481 - RNA, 19 nt, Homo sapiens
  misc_RNA (1)...(19): siRNA sense strand
gcauugggcuccgcaacca

SEQ ID NO: 1063482 - RNA, 19 nt, Homo sapiens
  misc_RNA (1)...(19): siRNA sense strand
caacaaguuugaggagaac

SEQ ID NO: 1063483 - RNA, 19 nt, Homo sapiens
  misc_RNA (1)...(19): siRNA sense strand
caaagugagcacagucaug

SEQ ID NO: 1063484 - RNA, 19 nt, Homo sapiens
  misc_RNA (1)...(19): siRNA sense strand
gaguaugaccuaccucaca

SEQ ID NO: 1063485 - RNA, 19 nt, Homo sapiens
  misc_RNA (1)...(19): siRNA sense strand
gauugauucaggagaaauu

SEQ ID NO: 1063486 - RNA, 19 nt, Homo sapiens
  misc_RNA (1)...(19): siRNA sense strand
uaacaagaggcucagugaa

SEQ ID NO: 1063487 - RNA, 19 nt, Homo sapiens
  misc_RNA (1)...(19): siRNA sense strand
auggaggacuggccaauau

SEQ ID NO: 1063488 - RNA, 19 nt, Homo sapiens
  misc_RNA (1)...(19): siRNA sense strand
ccaagaugaacuuaaugaa

SEQ ID NO: 1063489 - RNA, 19 nt, Homo sapiens
  misc_RNA (1)...(19): siRNA sense strand
aagcuuacuugcagaaucu

SEQ ID NO: 1063490 - RNA, 19 nt, Homo sapiens
  misc_RNA (1)...(19): siRNA sense strand
caagauaccuguggaaaac

SEQ ID NO: 1063491 - RNA, 19 nt, Homo sapiens
  misc_RNA (1)...(19): siRNA sense strand
gaaaaucccagaugaaacu

SEQ ID NO: 1063492 - RNA, 19 nt, Homo sapiens
  misc_RNA (1)...(19): siRNA sense strand
uggcugggcugcucaagag

SEQ ID NO: 1063493 - RNA, 19 nt, Homo sapiens
  misc_RNA (1)...(19): siRNA sense strand
caacaccuucugcguggaa

SEQ ID NO: 1063494 - RNA, 19 nt, Homo sapiens
  misc_RNA (1)...(19): siRNA sense strand
ugauggcucagaaggcuua

SEQ ID NO: 1063495 - RNA, 19 nt, Homo sapiens
  misc_RNA (1)...(19): siRNA sense strand
gaagcacuacauccucaau

SEQ ID NO: 1063496 - RNA, 19 nt, Homo sapiens
  misc_RNA (1)...(19): siRNA sense strand
ugaagcggguggccaacau

SEQ ID NO: 1063497 - RNA, 19 nt, Homo sapiens
  misc_RNA (1)...(19): siRNA sense strand
uuaacaagaggcucaguga

SEQ ID NO: 1063498 - RNA, 19 nt, Homo sapiens
  misc_RNA (1)...(19): siRNA sense strand
ccaugaacauccucaacag

SEQ ID NO: 1063499 - RNA, 19 nt, Homo sapiens
  misc_RNA (1)...(19): siRNA sense strand
gcugcaagucccagaagaa

SEQ ID NO: 1063500 - RNA, 19 nt, Homo sapiens
  misc_RNA (1)...(19): siRNA sense strand
gaggagcagcugguacuga

SEQ ID NO: 1063501 - RNA, 19 nt, Homo sapiens
  misc_RNA (1)...(19): siRNA sense strand
guugugcacccuagucuug

SEQ ID NO: 1063502 - RNA, 19 nt, Homo sapiens
  misc_RNA (1)...(19): siRNA sense strand
ugacuaccaggauccauga

SEQ ID NO: 1063503 - RNA, 19 nt, Homo sapiens
  misc_RNA (1)...(19): siRNA sense strand
aacaagaggcucagugaau

SEQ ID NO: 1063504 - RNA, 19 nt, Homo sapiens
  misc_RNA (1)...(19): siRNA sense strand
uaagugaagacaagaagca

SEQ ID NO: 1063505 - RNA, 19 nt, Homo sapiens
  misc_RNA (1)...(19): siRNA sense strand
gaugagcagauuaagaaag

SEQ ID NO: 1063506 - RNA, 19 nt, Homo sapiens
  misc_RNA (1)...(19): siRNA sense strand
caccauguacucacgacua

SEQ ID NO: 1063507 - RNA, 19 nt, Homo sapiens
  misc_RNA (1)...(19): siRNA sense strand
cuagaugagcagauuaaga

SEQ ID NO: 1063508 - RNA, 19 nt, Homo sapiens
  misc_RNA (1)...(19): siRNA sense strand
cgaccacgagguucucuug

SEQ ID NO: 1063509 - RNA, 19 nt, Homo sapiens
  misc_RNA (1)...(19): siRNA sense strand
gacaggcaaccauggaguu

SEQ ID NO: 1063510 - RNA, 19 nt, Homo sapiens
  misc_RNA (1)...(19): siRNA sense strand
gaagacaagaagcacuaca

SEQ ID NO: 1063511 - RNA, 19 nt, Homo sapiens
  misc_RNA (1)...(19): siRNA sense strand
gagcgaugcagccucaauc

SEQ ID NO: 1063512 - RNA, 19 nt, Homo sapiens
  misc_RNA (1)...(19): siRNA sense strand
augagcagauuaagaaagu

SEQ ID NO: 1063513 - RNA, 19 nt, Homo sapiens
  misc_RNA (1)...(19): siRNA sense strand
gccaugaacauccucaaca

SEQ ID NO: 1063514 - RNA, 19 nt, Homo sapiens
  misc_RNA (1)...(19): siRNA sense strand
cagcauucauaguagaaag

SEQ ID NO: 1063515 - RNA, 19 nt, Homo sapiens
  misc_RNA (1)...(19): siRNA sense strand
cggagcagagccacacuaa

SEQ ID NO: 1063516 - RNA, 19 nt, Homo sapiens
  misc_RNA (1)...(19): siRNA sense strand
caaauacuugccuaaacug

SEQ ID NO: 1063517 - RNA, 19 nt, Homo sapiens
  misc_RNA (1)...(19): siRNA sense strand
ugaggucguugauucugau

SEQ ID NO: 1063518 - RNA, 19 nt, Homo sapiens
  misc_RNA (1)...(19): siRNA sense strand
gugagcacagucauggaua

SEQ ID NO: 1063519 - RNA, 19 nt, Homo sapiens
  misc_RNA (1)...(19): siRNA sense strand
caaguaugcuccagaaaac

SEQ ID NO: 1063520 - RNA, 19 nt, Homo sapiens
  misc_RNA (1)...(19): siRNA sense strand
gaggaaauguuaaaggaua

SEQ ID NO: 1063521 - RNA, 19 nt, Homo sapiens
  misc_RNA (1)...(19): siRNA sense strand
ggaaaggucacauaucaua

SEQ ID NO: 1063522 - RNA, 19 nt, Homo sapiens
  misc_RNA (1)...(19): siRNA sense strand
cauaacaacuucggaaauu

SEQ ID NO: 1063523 - RNA, 19 nt, Homo sapiens
  misc_RNA (1)...(19): siRNA sense strand
ggagcaaccuguccagaau

SEQ ID NO: 1063524 - RNA, 19 nt, Homo sapiens
  misc_RNA (1)...(19): siRNA sense strand
gaagggacauugaagacau

SEQ ID NO: 1063525 - RNA, 19 nt, Homo sapiens
  misc_RNA (1)...(19): siRNA sense strand
ggacaugauaagagaauuu

SEQ ID NO: 1063526 - RNA, 19 nt, Homo sapiens
  misc_RNA (1)...(19): siRNA sense strand
ggaaaucucgacauggaaa

SEQ ID NO: 1063527 - RNA, 19 nt, Homo sapiens
  misc_RNA (1)...(19): siRNA sense strand
gagaugaggaaauguuaaa

SEQ ID NO: 1063528 - RNA, 19 nt, Homo sapiens
  misc_RNA (1)...(19): siRNA sense strand
gaagacaagaaguuagaaa

SEQ ID NO: 1063529 - RNA, 19 nt, Homo sapiens
  misc_RNA (1)...(19): siRNA sense strand
cgagagaaagccagaagua

SEQ ID NO: 1063530 - RNA, 19 nt, Homo sapiens
  misc_RNA (1)...(19): siRNA sense strand
gagagaaagccagaaguaa

SEQ ID NO: 1063531 - RNA, 19 nt, Homo sapiens
  misc_RNA (1)...(19): siRNA sense strand
uggcuaaggugcaggauga

SEQ ID NO: 1063532 - RNA, 19 nt, Homo sapiens
  misc_RNA (1)...(19): siRNA sense strand
gcaaugaggacaugauaag

SEQ ID NO: 1063533 - RNA, 19 nt, Homo sapiens
  misc_RNA (1)...(19): siRNA sense strand
gaauggaaaggucacauau

SEQ ID NO: 1063534 - RNA, 19 nt, Homo sapiens
  misc_RNA (1)...(19): siRNA sense strand
gaucagagagagagggaaa

SEQ ID NO: 1063535 - RNA, 19 nt, Homo sapiens
  misc_RNA (1)...(19): siRNA sense strand
cucauuaccucaaggagua

SEQ ID NO: 1063536 - RNA, 19 nt, Homo sapiens
  misc_RNA (1)...(19): siRNA sense strand
aggaauggcuucaaaccaa

SEQ ID NO: 1063537 - RNA, 19 nt, Homo sapiens
  misc_RNA (1)...(19): siRNA sense strand
aaacaagggcugcaggaaa

SEQ ID NO: 1063538 - RNA, 19 nt, Homo sapiens
  misc_RNA (1)...(19): siRNA sense strand
ggagggagagucagagaug

SEQ ID NO: 1063539 - RNA, 19 nt, Homo sapiens
  misc_RNA (1)...(19): siRNA sense strand
ggagggaggaucagagaga

SEQ ID NO: 1063540 - RNA, 19 nt, Homo sapiens
  misc_RNA (1)...(19): siRNA sense strand
guuaaaggauaaaggaaag

SEQ ID NO: 1063541 - RNA, 19 nt, Homo sapiens
  misc_RNA (1)...(19): siRNA sense strand
gagacaaaguccacaucug

SEQ ID NO: 1063542 - RNA, 19 nt, Homo sapiens
  misc_RNA (1)...(19): siRNA sense strand
ggagaugaggaaauguuaa

SEQ ID NO: 1063543 - RNA, 19 nt, Homo sapiens
  misc_RNA (1)...(19): siRNA sense strand
auaaggggcuggcucauua

SEQ ID NO: 1063544 - RNA, 19 nt, Homo sapiens
  misc_RNA (1)...(19): siRNA sense strand
aaggaaagauggaaaauga

SEQ ID NO: 1063545 - RNA, 19 nt, Homo sapiens
  misc_RNA (1)...(19): siRNA sense strand
gaaacaagggcugcaggaa

SEQ ID NO: 1063546 - RNA, 19 nt, Homo sapiens
  misc_RNA (1)...(19): siRNA sense strand
ggagagccagggagugaaa

SEQ ID NO: 1063547 - RNA, 19 nt, Homo sapiens
  misc_RNA (1)...(19): siRNA sense strand
uaacuuguacucuggaaga

SEQ ID NO: 1063548 - RNA, 19 nt, Homo sapiens
  misc_RNA (1)...(19): siRNA sense strand
auggaaaggucacauauca

SEQ ID NO: 1063549 - RNA, 19 nt, Homo sapiens
  misc_RNA (1)...(19): siRNA sense strand
cagcaaugaggacaugaua

SEQ ID NO: 1063550 - RNA, 19 nt, Homo sapiens
  misc_RNA (1)...(19): siRNA sense strand
aaccagagauagagggaaa

SEQ ID NO: 1063551 - RNA, 19 nt, Homo sapiens
  misc_RNA (1)...(19): siRNA sense strand
gauaaaggaaagccagaga

SEQ ID NO: 1063552 - RNA, 19 nt, Homo sapiens
  misc_RNA (1)...(19): siRNA sense strand
gagcgggacauaacaacuu

SEQ ID NO: 1063553 - RNA, 19 nt, Homo sapiens
  misc_RNA (1)...(19): siRNA sense strand
caacuucggaaauuaaauc

SEQ ID NO: 1063554 - RNA, 19 nt, Homo sapiens
  misc_RNA (1)...(19): siRNA sense strand
agacaaaguccacaucugu

SEQ ID NO: 1063555 - RNA, 19 nt, Homo sapiens
  misc_RNA (1)...(19): siRNA sense strand
aaggaaagccagagaguga

SEQ ID NO: 1063556 - RNA, 19 nt, Homo sapiens
  misc_RNA (1)...(19): siRNA sense strand
gagaaagccagaaguaacu

SEQ ID NO: 1063557 - RNA, 19 nt, Homo sapiens
  misc_RNA (1)...(19): siRNA sense strand
gacauaacaacuucggaaa

SEQ ID NO: 1063558 - RNA, 19 nt, Homo sapiens
  misc_RNA (1)...(19): siRNA sense strand
ggucugcgcgucuguuguu

SEQ ID NO: 1063559 - RNA, 19 nt, Homo sapiens
  misc_RNA (1)...(19): siRNA sense strand
agaauggaaaggucacaua

SEQ ID NO: 1063560 - RNA, 19 nt, Homo sapiens
  misc_RNA (1)...(19): siRNA sense strand
aacaagggcugcaggaaag

SEQ ID NO: 1063561 - RNA, 19 nt, Homo sapiens
  misc_RNA (1)...(19): siRNA sense strand
ucaaugcgaagaauggaaa

SEQ ID NO: 1063562 - RNA, 19 nt, Homo sapiens
  misc_RNA (1)...(19): siRNA sense strand
aacaggagaugaggaaaug

SEQ ID NO: 1063563 - RNA, 19 nt, Homo sapiens
  misc_RNA (1)...(19): siRNA sense strand
gaagagacaaaguccacau

SEQ ID NO: 1063564 - RNA, 19 nt, Homo sapiens
  misc_RNA (1)...(19): siRNA sense strand
guggaugcaaagaaauuua

SEQ ID NO: 1063565 - RNA, 19 nt, Homo sapiens
  misc_RNA (1)...(19): siRNA sense strand
gcccgaguguggacagaga

SEQ ID NO: 1063566 - RNA, 19 nt, Homo sapiens
  misc_RNA (1)...(19): siRNA sense strand
gaggacaugauaagagaau

SEQ ID NO: 1063567 - RNA, 19 nt, Homo sapiens
  misc_RNA (1)...(19): siRNA sense strand
ggggaaaucucgacaugga

SEQ ID NO: 1063568 - RNA, 19 nt, Homo sapiens
  misc_RNA (1)...(19): siRNA sense strand
cuucggaaauuaaaucucu

SEQ ID NO: 1063569 - RNA, 19 nt, Homo sapiens
  misc_RNA (1)...(19): siRNA sense strand
acauugaagacauuccuua

SEQ ID NO: 1063570 - RNA, 19 nt, Homo sapiens
  misc_RNA (1)...(19): siRNA sense strand
gacaugauaagagaauuug

SEQ ID NO: 1063571 - RNA, 19 nt, Homo sapiens
  misc_RNA (1)...(19): siRNA sense strand
ccgcagcucacgccuguaa

SEQ ID NO: 1063572 - RNA, 19 nt, Homo sapiens
  misc_RNA (1)...(19): siRNA sense strand
augaggaaauguuaaagga

SEQ ID NO: 1063573 - RNA, 19 nt, Homo sapiens
  misc_RNA (1)...(19): siRNA sense strand
ggaagacaagaaguuagaa

SEQ ID NO: 1063574 - RNA, 19 nt, Homo sapiens
  misc_RNA (1)...(19): siRNA sense strand
uaaaggaaagccagagagu

SEQ ID NO: 1063575 - RNA, 19 nt, Homo sapiens
  misc_RNA (1)...(19): siRNA sense strand
aaacaggagaugaggaaau

SEQ ID NO: 1063576 - RNA, 19 nt, Homo sapiens
  misc_RNA (1)...(19): siRNA sense strand
gaugauguacccaggaaag

SEQ ID NO: 1063577 - RNA, 19 nt, Homo sapiens
  misc_RNA (1)...(19): siRNA sense strand
agggaaagccagagaguga

SEQ ID NO: 1063578 - RNA, 19 nt, Homo sapiens
  misc_RNA (1)...(19): siRNA sense strand
augaggacaugauaagaga

SEQ ID NO: 1063579 - RNA, 19 nt, Homo sapiens
  misc_RNA (1)...(19): siRNA sense strand
gcagcucacgccuguaauc

SEQ ID NO: 1063580 - RNA, 19 nt, Homo sapiens
  misc_RNA (1)...(19): siRNA sense strand
caggaaagccaaaagaaaa

SEQ ID NO: 1063581 - RNA, 19 nt, Homo sapiens
  misc_RNA (1)...(19): siRNA sense strand
caggagaugaggaaauguu

SEQ ID NO: 1063582 - RNA, 19 nt, Homo sapiens
  misc_RNA (1)...(19): siRNA sense strand
gaggggaaaucucgacaug

SEQ ID NO: 1063583 - RNA, 19 nt, Homo sapiens
  misc_RNA (1)...(19): siRNA sense strand
ucuggaagacaagaaguua

SEQ ID NO: 1063584 - RNA, 19 nt, Homo sapiens
  misc_RNA (1)...(19): siRNA sense strand
gcgcccagcugaggaugau

SEQ ID NO: 1063585 - RNA, 19 nt, Homo sapiens
  misc_RNA (1)...(19): siRNA sense strand
ggaaagccagagagugaag

SEQ ID NO: 1063586 - RNA, 19 nt, Homo sapiens
  misc_RNA (1)...(19): siRNA sense strand
aaagaaggaaagucagaga

SEQ ID NO: 1063587 - RNA, 19 nt, Homo sapiens
  misc_RNA (1)...(19): siRNA sense strand
gaugaggaaauguuaaagg

SEQ ID NO: 1063588 - RNA, 19 nt, Homo sapiens
  misc_RNA (1)...(19): siRNA sense strand
ggugcaggaugagaagaga

SEQ ID NO: 1063589 - RNA, 19 nt, Homo sapiens
  misc_RNA (1)...(19): siRNA sense strand
aagggacauugaagacauu

SEQ ID NO: 1063590 - RNA, 19 nt, Homo sapiens
  misc_RNA (1)...(19): siRNA sense strand
uggaagacaagaaguuaga

SEQ ID NO: 1063591 - RNA, 19 nt, Homo sapiens
  misc_RNA (1)...(19): siRNA sense strand
caaaacaggagaugaggaa

SEQ ID NO: 1063592 - RNA, 19 nt, Homo sapiens
  misc_RNA (1)...(19): siRNA sense strand
ccaggggccucccaaauuc

SEQ ID NO: 1063593 - RNA, 19 nt, Homo sapiens
  misc_RNA (1)...(19): siRNA sense strand
cuaaggugcaggaugagaa

SEQ ID NO: 1063594 - RNA, 19 nt, Homo sapiens
  misc_RNA (1)...(19): siRNA sense strand
aggaugauguacccaggaa

SEQ ID NO: 1063595 - RNA, 19 nt, Homo sapiens
  misc_RNA (1)...(19): siRNA sense strand
caaaguccacaucugucaa

SEQ ID NO: 1063596 - RNA, 19 nt, Homo sapiens
  misc_RNA (1)...(19): siRNA sense strand
ccacgaagggacauugaag

SEQ ID NO: 1063597 - RNA, 19 nt, Homo sapiens
  misc_RNA (1)...(19): siRNA sense strand
caaugaggacaugauaaga

SEQ ID NO: 1063598 - RNA, 19 nt, Homo sapiens
  misc_RNA (1)...(19): siRNA sense strand
aggagaugaggaaauguua

SEQ ID NO: 1063599 - RNA, 19 nt, Homo sapiens
  misc_RNA (1)...(19): siRNA sense strand
acaaaguccacaucuguca

SEQ ID NO: 1063600 - RNA, 19 nt, Homo sapiens
  misc_RNA (1)...(19): siRNA sense strand
gagcaaccuguccagaauc

SEQ ID NO: 1063601 - RNA, 19 nt, Homo sapiens
  misc_RNA (1)...(19): siRNA sense strand
cauugaagacauuccuuau

SEQ ID NO: 1063602 - RNA, 19 nt, Homo sapiens
  misc_RNA (1)...(19): siRNA sense strand
ggaguauaaagaggccaua

SEQ ID NO: 1063603 - RNA, 19 nt, Homo sapiens
  misc_RNA (1)...(19): siRNA sense strand
agagaaagccagaaguaac

SEQ ID NO: 1063604 - RNA, 19 nt, Homo sapiens
  misc_RNA (1)...(19): siRNA sense strand
gggaaaucucgacauggaa

SEQ ID NO: 1063605 - RNA, 19 nt, Homo sapiens
  misc_RNA (1)...(19): siRNA sense strand
aaggagagccagggaguga

SEQ ID NO: 1063606 - RNA, 19 nt, Homo sapiens
  misc_RNA (1)...(19): siRNA sense strand
caaaagaaggaaagucaga

SEQ ID NO: 1063607 - RNA, 19 nt, Homo sapiens
  misc_RNA (1)...(19): siRNA sense strand
gauggaaaaugaagaacag

SEQ ID NO: 1063608 - RNA, 19 nt, Homo sapiens
  misc_RNA (1)...(19): siRNA sense strand
agagauggagggaggauca

SEQ ID NO: 1063609 - RNA, 19 nt, Homo sapiens
  misc_RNA (1)...(19): siRNA sense strand
ccucaaggaguauaaagag

SEQ ID NO: 1063610 - RNA, 19 nt, Homo sapiens
  misc_RNA (1)...(19): siRNA sense strand
gggaaagccagagagugaa

SEQ ID NO: 1063611 - RNA, 19 nt, Homo sapiens
  misc_RNA (1)...(19): siRNA sense strand
gagaguggcuccuuaacuu

SEQ ID NO: 1063612 - RNA, 19 nt, Homo sapiens
  misc_RNA (1)...(19): siRNA sense strand
caucacggaucaugaauuu

SEQ ID NO: 1063613 - RNA, 19 nt, Homo sapiens
  misc_RNA (1)...(19): siRNA sense strand
ugucagaaguguauugaua

SEQ ID NO: 1063614 - RNA, 19 nt, Homo sapiens
  misc_RNA (1)...(19): siRNA sense strand
ugaagcagcugaccgauga

SEQ ID NO: 1063615 - RNA, 19 nt, Homo sapiens
  misc_RNA (1)...(19): siRNA sense strand
agacacaguugguuauuaa

SEQ ID NO: 1063616 - RNA, 19 nt, Homo sapiens
  misc_RNA (1)...(19): siRNA sense strand
gaucagacacaguugguua

SEQ ID NO: 1063617 - RNA, 19 nt, Homo sapiens
  misc_RNA (1)...(19): siRNA sense strand
gaugauauggcuaacuaua

SEQ ID NO: 1063618 - RNA, 19 nt, Homo sapiens
  misc_RNA (1)...(19): siRNA sense strand
aagaugauauggcuaacua

SEQ ID NO: 1063619 - RNA, 19 nt, Homo sapiens
  misc_RNA (1)...(19): siRNA sense strand
ggaggaguguuguaucugu

SEQ ID NO: 1063620 - RNA, 19 nt, Homo sapiens
  misc_RNA (1)...(19): siRNA sense strand
cacaggaauugcccuauuu

SEQ ID NO: 1063621 - RNA, 19 nt, Homo sapiens
  misc_RNA (1)...(19): siRNA sense strand
cagacacaguugguuauua

SEQ ID NO: 1063622 - RNA, 19 nt, Homo sapiens
  misc_RNA (1)...(19): siRNA sense strand
aaaugaaucuuggguggua

SEQ ID NO: 1063623 - RNA, 19 nt, Homo sapiens
  misc_RNA (1)...(19): siRNA sense strand
gaggaguguuguaucugua

SEQ ID NO: 1063624 - RNA, 19 nt, Homo sapiens
  misc_RNA (1)...(19): siRNA sense strand
gaaguguauugauaaaugg

SEQ ID NO: 1063625 - RNA, 19 nt, Homo sapiens
  misc_RNA (1)...(19): siRNA sense strand
uuaaugauguaacggcuaa

SEQ ID NO: 1063626 - RNA, 19 nt, Homo sapiens
  misc_RNA (1)...(19): siRNA sense strand
gaggaggaguguuguaucu

SEQ ID NO: 1063627 - RNA, 19 nt, Homo sapiens
  misc_RNA (1)...(19): siRNA sense strand
gaaaacucauccucuguaa

SEQ ID NO: 1063628 - RNA, 19 nt, Homo sapiens
  misc_RNA (1)...(19): siRNA sense strand
cuccuuaacuuaugaagaa

SEQ ID NO: 1063629 - RNA, 19 nt, Homo sapiens
  misc_RNA (1)...(19): siRNA sense strand
ucaagcagcaggaguauug

SEQ ID NO: 1063630 - RNA, 19 nt, Homo sapiens
  misc_RNA (1)...(19): siRNA sense strand
gacagcaaauuucggauca

SEQ ID NO: 1063631 - RNA, 19 nt, Homo sapiens
  misc_RNA (1)...(19): siRNA sense strand
acagaugacuggagcaaau

SEQ ID NO: 1063632 - RNA, 19 nt, Homo sapiens
  misc_RNA (1)...(19): siRNA sense strand
acacaggaauugcccuauu

SEQ ID NO: 1063633 - RNA, 19 nt, Homo sapiens
  misc_RNA (1)...(19): siRNA sense strand
ucacggaucaugaauuuau

SEQ ID NO: 1063634 - RNA, 19 nt, Homo sapiens
  misc_RNA (1)...(19): siRNA sense strand
gcucacagcuuuugucaga

SEQ ID NO: 1063635 - RNA, 19 nt, Homo sapiens
  misc_RNA (1)...(19): siRNA sense strand
gcaggaguauuggcacaga

SEQ ID NO: 1063636 - RNA, 19 nt, Homo sapiens
  misc_RNA (1)...(19): siRNA sense strand
aaacucauccucuguaaca

SEQ ID NO: 1063637 - RNA, 19 nt, Homo sapiens
  misc_RNA (1)...(19): siRNA sense strand
gagcuccaccucugaagaa

SEQ ID NO: 1063638 - RNA, 19 nt, Homo sapiens
  misc_RNA (1)...(19): siRNA sense strand
ucgagagaguggcuccuua

SEQ ID NO: 1063639 - RNA, 19 nt, Homo sapiens
  misc_RNA (1)...(19): siRNA sense strand
aaucuugggugguaucaga

SEQ ID NO: 1063640 - RNA, 19 nt, Homo sapiens
  misc_RNA (1)...(19): siRNA sense strand
gcaaauuucggaucagaca

SEQ ID NO: 1063641 - RNA, 19 nt, Homo sapiens
  misc_RNA (1)...(19): siRNA sense strand
cagcaaauuucggaucaga

SEQ ID NO: 1063642 - RNA, 19 nt, Homo sapiens
  misc_RNA (1)...(19): siRNA sense strand
ggagugaucgacacaggaa

SEQ ID NO: 1063643 - RNA, 19 nt, Homo sapiens
  misc_RNA (1)...(19): siRNA sense strand
guaccaagauuaacaaaag

SEQ ID NO: 1063644 - RNA, 19 nt, Homo sapiens
  misc_RNA (1)...(19): siRNA sense strand
aaagauaucacaagucaag

SEQ ID NO: 1063645 - RNA, 19 nt, Homo sapiens
  misc_RNA (1)...(19): siRNA sense strand
cgagagaguggcuccuuaa

SEQ ID NO: 1063646 - RNA, 19 nt, Homo sapiens
  misc_RNA (1)...(19): siRNA sense strand
ggucugauuccucugcuuu

SEQ ID NO: 1063647 - RNA, 19 nt, Homo sapiens
  misc_RNA (1)...(19): siRNA sense strand
cacggaucaugaauuuaua

SEQ ID NO: 1063648 - RNA, 19 nt, Homo sapiens
  misc_RNA (1)...(19): siRNA sense strand
guacaaccugggucugauu

SEQ ID NO: 1063649 - RNA, 19 nt, Homo sapiens
  misc_RNA (1)...(19): siRNA sense strand
gucagaaguguauugauaa

SEQ ID NO: 1063650 - RNA, 19 nt, Homo sapiens
  misc_RNA (1)...(19): siRNA sense strand
ggaguguuguaucuguaug

SEQ ID NO: 1063651 - RNA, 19 nt, Homo sapiens
  misc_RNA (1)...(19): siRNA sense strand
cauccucuguaacaucuug

SEQ ID NO: 1063652 - RNA, 19 nt, Homo sapiens
  misc_RNA (1)...(19): siRNA sense strand
cagaugcacccacugaaga

SEQ ID NO: 1063653 - RNA, 19 nt, Homo sapiens
  misc_RNA (1)...(19): siRNA sense strand
caaaagcaguggcauugug

SEQ ID NO: 1063654 - RNA, 19 nt, Homo sapiens
  misc_RNA (1)...(19): siRNA sense strand
ugaagaaccugaugaaaac

SEQ ID NO: 1063655 - RNA, 19 nt, Homo sapiens
  misc_RNA (1)...(19): siRNA sense strand
guggaggcaucacggauca

SEQ ID NO: 1063656 - RNA, 19 nt, Homo sapiens
  misc_RNA (1)...(19): siRNA sense strand
gaugaggaggaguguugua

SEQ ID NO: 1063657 - RNA, 19 nt, Homo sapiens
  misc_RNA (1)...(19): siRNA sense strand
agaguggcuccuuaacuua

SEQ ID NO: 1063658 - RNA, 19 nt, Homo sapiens
  misc_RNA (1)...(19): siRNA sense strand
gaguggcuccuuaacuuau

SEQ ID NO: 1063659 - RNA, 19 nt, Homo sapiens
  misc_RNA (1)...(19): siRNA sense strand
gcaucacggaucaugaauu

SEQ ID NO: 1063660 - RNA, 19 nt, Homo sapiens
  misc_RNA (1)...(19): siRNA sense strand
caaaacauguuacguuggu

SEQ ID NO: 1063661 - RNA, 19 nt, Homo sapiens
  misc_RNA (1)...(19): siRNA sense strand
cugaagaugauauggcuaa

SEQ ID NO: 1063662 - RNA, 19 nt, Homo sapiens
  misc_RNA (1)...(19): siRNA sense strand
gguacaaccugggucugau

SEQ ID NO: 1063663 - RNA, 19 nt, Homo sapiens
  misc_RNA (1)...(19): siRNA sense strand
gaccucauccugccuugug

SEQ ID NO: 1063664 - RNA, 19 nt, Homo sapiens
  misc_RNA (1)...(19): siRNA sense strand
ccgaugaggaggaguguug

SEQ ID NO: 1063665 - RNA, 19 nt, Homo sapiens
  misc_RNA (1)...(19): siRNA sense strand
ugauguaacggcuaaagug

SEQ ID NO: 1063666 - RNA, 19 nt, Homo sapiens
  misc_RNA (1)...(19): siRNA sense strand
ggaggcaucacggaucaug

SEQ ID NO: 1063667 - RNA, 19 nt, Homo sapiens
  misc_RNA (1)...(19): siRNA sense strand
auugauaaauggagugauc

SEQ ID NO: 1063668 - RNA, 19 nt, Homo sapiens
  misc_RNA (1)...(19): siRNA sense strand
gaauuucuugggagaguag

SEQ ID NO: 1063669 - RNA, 19 nt, Homo sapiens
  misc_RNA (1)...(19): siRNA sense strand
gaugacuggagcaaaugaa

SEQ ID NO: 1063670 - RNA, 19 nt, Homo sapiens
  misc_RNA (1)...(19): siRNA sense strand
uaacaaaagcaguggcauu

SEQ ID NO: 1063671 - RNA, 19 nt, Homo sapiens
  misc_RNA (1)...(19): siRNA sense strand
gacuggagcaaaugaaucu

SEQ ID NO: 1063672 - RNA, 19 nt, Homo sapiens
  misc_RNA (1)...(19): siRNA sense strand
guggcuccuuaacuuauga

SEQ ID NO: 1063673 - RNA, 19 nt, Homo sapiens
  misc_RNA (1)...(19): siRNA sense strand
gaagaugauauggcuaacu

SEQ ID NO: 1063674 - RNA, 19 nt, Homo sapiens
  misc_RNA (1)...(19): siRNA sense strand
cugaagaaccugaugaaaa

SEQ ID NO: 1063675 - RNA, 19 nt, Homo sapiens
  misc_RNA (1)...(19): siRNA sense strand
ugaaaacucauccucugua

SEQ ID NO: 1063676 - RNA, 19 nt, Homo sapiens
  misc_RNA (1)...(19): siRNA sense strand
ggagaggcaucaucgaauu

SEQ ID NO: 1063677 - RNA, 19 nt, Homo sapiens
  misc_RNA (1)...(19): siRNA sense strand
gagaaggaaucguggauca

SEQ ID NO: 1063678 - RNA, 19 nt, Homo sapiens
  misc_RNA (1)...(19): siRNA sense strand
ugagagaccuguacagaca

SEQ ID NO: 1063679 - RNA, 19 nt, Homo sapiens
  misc_RNA (1)...(19): siRNA sense strand
gugaagagcuccggaaguc

SEQ ID NO: 1063680 - RNA, 19 nt, Homo sapiens
  misc_RNA (1)...(19): siRNA sense strand
gaaggaaucguggaucaau

SEQ ID NO: 1063681 - RNA, 19 nt, Homo sapiens
  misc_RNA (1)...(19): siRNA sense strand
uggaugaggucaccguuga

SEQ ID NO: 1063682 - RNA, 19 nt, Homo sapiens
  misc_RNA (1)...(19): siRNA sense strand
gaggaggacagcuaucuug

SEQ ID NO: 1063683 - RNA, 19 nt, Homo sapiens
  misc_RNA (1)...(19): siRNA sense strand
ggaggagacucaggagcuu

SEQ ID NO: 1063684 - RNA, 19 nt, Homo sapiens
  misc_RNA (1)...(19): siRNA sense strand
gaucaaugcccucaacucu

SEQ ID NO: 1063685 - RNA, 19 nt, Homo sapiens
  misc_RNA (1)...(19): siRNA sense strand
ggguugaccuggacaaguc

SEQ ID NO: 1063686 - RNA, 19 nt, Homo sapiens
  misc_RNA (1)...(19): siRNA sense strand
uauuugaccugagugacua

SEQ ID NO: 1063687 - RNA, 19 nt, Homo sapiens
  misc_RNA (1)...(19): siRNA sense strand
gcagugaguccagaagaga

SEQ ID NO: 1063688 - RNA, 19 nt, Homo sapiens
  misc_RNA (1)...(19): siRNA sense strand
gcuauguggugcugaaagg

SEQ ID NO: 1063689 - RNA, 19 nt, Homo sapiens
  misc_RNA (1)...(19): siRNA sense strand
gcugagagaccuguacaga

SEQ ID NO: 1063690 - RNA, 19 nt, Homo sapiens
  misc_RNA (1)...(19): siRNA sense strand
gggaccagcucuacaucuc

SEQ ID NO: 1063691 - RNA, 19 nt, Homo sapiens
  misc_RNA (1)...(19): siRNA sense strand
cgaauuggagccaggcaaa

SEQ ID NO: 1063692 - RNA, 19 nt, Homo sapiens
  misc_RNA (1)...(19): siRNA sense strand
gagaggcaucaucgaauug

SEQ ID NO: 1063693 - RNA, 19 nt, Homo sapiens
  misc_RNA (1)...(19): siRNA sense strand
agaaggagguaaaagauga

SEQ ID NO: 1063694 - RNA, 19 nt, Homo sapiens
  misc_RNA (1)...(19): siRNA sense strand
caagagcaggagcaagaaa

SEQ ID NO: 1063695 - RNA, 19 nt, Homo sapiens
  misc_RNA (1)...(19): siRNA sense strand
ggaaacuggaggagacuca

SEQ ID NO: 1063696 - RNA, 19 nt, Homo sapiens
  misc_RNA (1)...(19): siRNA sense strand
cggaugggaugcugaccuu

SEQ ID NO: 1063697 - RNA, 19 nt, Homo sapiens
  misc_RNA (1)...(19): siRNA sense strand
agaaccguaucuuggauga

SEQ ID NO: 1063698 - RNA, 19 nt, Homo sapiens
  misc_RNA (1)...(19): siRNA sense strand
gcccucaacucugccauca

SEQ ID NO: 1063699 - RNA, 19 nt, Homo sapiens
  misc_RNA (1)...(19): siRNA sense strand
gggagaggcaucaucgaau

SEQ ID NO: 1063700 - RNA, 19 nt, Homo sapiens
  misc_RNA (1)...(19): siRNA sense strand
ggaccugguagcaaggaaa

SEQ ID NO: 1063701 - RNA, 19 nt, Homo sapiens
  misc_RNA (1)...(19): siRNA sense strand
gagugacuaugagaagugu

SEQ ID NO: 1063702 - RNA, 19 nt, Homo sapiens
  misc_RNA (1)...(19): siRNA sense strand
uccaagagcaggagcaaga

SEQ ID NO: 1063703 - RNA, 19 nt, Homo sapiens
  misc_RNA (1)...(19): siRNA sense strand
ggagguaaaagaugagaaa

SEQ ID NO: 1063704 - RNA, 19 nt, Homo sapiens
  misc_RNA (1)...(19): siRNA sense strand
ggaagcgaaaggccaagga

SEQ ID NO: 1063705 - RNA, 19 nt, Homo sapiens
  misc_RNA (1)...(19): siRNA sense strand
aaucauagcaaguuuacuc

SEQ ID NO: 1063706 - RNA, 19 nt, Homo sapiens
  misc_RNA (1)...(19): siRNA sense strand
ggcagugaguccagaagag

SEQ ID NO: 1063707 - RNA, 19 nt, Homo sapiens
  misc_RNA (1)...(19): siRNA sense strand
ggagaugggaagcgaaagg

SEQ ID NO: 1063708 - RNA, 19 nt, Homo sapiens
  misc_RNA (1)...(19): siRNA sense strand
gaccugagugacuaugaga

SEQ ID NO: 1063709 - RNA, 19 nt, Homo sapiens
  misc_RNA (1)...(19): siRNA sense strand
gagcugagagaccuguaca

SEQ ID NO: 1063710 - RNA, 19 nt, Homo sapiens
  misc_RNA (1)...(19): siRNA sense strand
gaggcaucaucgaauugga

SEQ ID NO: 1063711 - RNA, 19 nt, Homo sapiens
  misc_RNA (1)...(19): siRNA sense strand
gaugcugaccuuggacuug

SEQ ID NO: 1063712 - RNA, 19 nt, Homo sapiens
  misc_RNA (1)...(19): siRNA sense strand
gugacuaugagaaguguga

SEQ ID NO: 1063713 - RNA, 19 nt, Homo sapiens
  misc_RNA (1)...(19): siRNA sense strand
aaggaaucguggaucaaug

SEQ ID NO: 1063714 - RNA, 19 nt, Homo sapiens
  misc_RNA (1)...(19): siRNA sense strand
cacagucaguaccggaaga

SEQ ID NO: 1063715 - RNA, 19 nt, Homo sapiens
  misc_RNA (1)...(19): siRNA sense strand
ugaccugagugacuaugag

SEQ ID NO: 1063716 - RNA, 19 nt, Homo sapiens
  misc_RNA (1)...(19): siRNA sense strand
augcugaccuuggacuuga

SEQ ID NO: 1063717 - RNA, 19 nt, Homo sapiens
  misc_RNA (1)...(19): siRNA sense strand
guggaucaaugcccucaac

SEQ ID NO: 1063718 - RNA, 19 nt, Homo sapiens
  misc_RNA (1)...(19): siRNA sense strand
ccaaacagcccgguaacac

SEQ ID NO: 1063719 - RNA, 19 nt, Homo sapiens
  misc_RNA (1)...(19): siRNA sense strand
cccaggcacccaagaaguu

SEQ ID NO: 1063720 - RNA, 19 nt, Homo sapiens
  misc_RNA (1)...(19): siRNA sense strand
guucagggacugggagaug

SEQ ID NO: 1063721 - RNA, 19 nt, Homo sapiens
  misc_RNA (1)...(19): siRNA sense strand
ggacaucaagcuagaagag

SEQ ID NO: 1063722 - RNA, 19 nt, Homo sapiens
  misc_RNA (1)...(19): siRNA sense strand
guggagaccucgguuaaaa

SEQ ID NO: 1063723 - RNA, 19 nt, Homo sapiens
  misc_RNA (1)...(19): siRNA sense strand
gagcacccgcugugucuca

SEQ ID NO: 1063724 - RNA, 19 nt, Homo sapiens
  misc_RNA (1)...(19): siRNA sense strand
caauguggaccuggccuuu

SEQ ID NO: 1063725 - RNA, 19 nt, Homo sapiens
  misc_RNA (1)...(19): siRNA sense strand
cacccucgcugaugcuauc

SEQ ID NO: 1063726 - RNA, 19 nt, Homo sapiens
  misc_RNA (1)...(19): siRNA sense strand
auguggaccuggccuuuga

SEQ ID NO: 1063727 - RNA, 19 nt, Homo sapiens
  misc_RNA (1)...(19): siRNA sense strand
gcacuauccucaacaagau

SEQ ID NO: 1063728 - RNA, 19 nt, Homo sapiens
  misc_RNA (1)...(19): siRNA sense strand
aaucaugucuccuucauca

SEQ ID NO: 1063729 - RNA, 19 nt, Homo sapiens
  misc_RNA (1)...(19): siRNA sense strand
gagagagauuggauuggaa

SEQ ID NO: 1063730 - RNA, 19 nt, Homo sapiens
  misc_RNA (1)...(19): siRNA sense strand
ggaagacugugaagcuaca

SEQ ID NO: 1063731 - RNA, 19 nt, Homo sapiens
  misc_RNA (1)...(19): siRNA sense strand
ggucagacuuccucuucaa

SEQ ID NO: 1063732 - RNA, 19 nt, Homo sapiens
  misc_RNA (1)...(19): siRNA sense strand
cagacuuccucuucaaauu

SEQ ID NO: 1063733 - RNA, 19 nt, Homo sapiens
  misc_RNA (1)...(19): siRNA sense strand
caaaucaugucuccuucau

SEQ ID NO: 1063734 - RNA, 19 nt, Homo sapiens
  misc_RNA (1)...(19): siRNA sense strand
ucaaauuccuggugauugg

SEQ ID NO: 1063735 - RNA, 19 nt, Homo sapiens
  misc_RNA (1)...(19): siRNA sense strand
ugcaggaacuggcaaauca

SEQ ID NO: 1063736 - RNA, 19 nt, Homo sapiens
  misc_RNA (1)...(19): siRNA sense strand
agagagagauuggauugga

SEQ ID NO: 1063737 - RNA, 19 nt, Homo sapiens
  misc_RNA (1)...(19): siRNA sense strand
gaggaugggcucuggcauu

SEQ ID NO: 1063738 - RNA, 19 nt, Homo sapiens
  misc_RNA (1)...(19): siRNA sense strand
agaaugagcugauguuccu
